United States Patent Application Publication US 2007/0067865 A1 - sequence listing, part 22

SEQ ID NO: 134402 - DNA, 1082 bp, Arabidopsis thaliana
  unsure (1)..(1082): unsure at all n locations
nnnnnnnnnnnnnnnnnnnnnnnnnnnnnnnnnnnnnnnnnnnnnnnnnnnnnnnnnnnnnnnnnnnnnnnnnctttttttttttttttttttttaattgtcnaggaaagaatattatgtgtgctctacatggataacaaatttacatataatcagtaccatcgtccatcacttagactgcatatcacctcttgggagatgtagacaaacaaacattaaactgctagatcacactgaaaataccacaatttctcaccaatacccgatcgtcaacttgattgtctagcaaaagttggaaaggtaagcttgaggctaaggagagaccaaagctggacttgagccctcggtggttaagtgaagattgtcggactttagcggcaatcccttagcatctacacagaccacattcgacagtttcagtcccaactgtgcttctctcaccttatctatgtatcctcctcccgatgctattgccacctgaataatgggaagagaaggaaggttgagatcatgacggaggttcttaatcaaacgatccatattgttcccgtagctctcggcgtcatggatgtccaacacgtcactctctccttgataccacaacaccgccttgatctctccgccgcatttcctactctcctccgttctcttgaccatcctctcgtacaagtggcttccacgctcccactcttttatcgccgttccaccggaagcgcacggcaccaacccgatcacagccgaatctgtttccaggcgattcttcaccgcgttagcgaacgccattcctggacctactccacacactttacctgtgtcaatgtcaacgtgtagtggctcgtgtgcttcttcccaccggagatctgcggacaggcggaggatcgatgagtttggtgcgcattccggtggaaggattttatcccacacccagcgattgttgtggtggtctttgaagacgccgccgcgtcctgccatattgctttgtccagagagtatgaagatctgatttggtggaattggagattggatctccggtcggacgcgtgggtcgacccgggaattccggaccggtacggcaacggaca

SEQ ID NO: 134403 - DNA, 1037 bp, Arabidopsis thaliana
  unsure (1)..(1037): unsure at all n locations
gtgacactatagaagactatgacgtcgcatgcacgcgtacgtaagcttggatccttttaagcgggccggcccttttttttttttttttttttttttttttgggaaagaatattattgggggcttttcctgggttaccaaattaccttttattaggtccattggcccttaattaaaatggattttaacttttgggaaaaggtaaacaaccaacctttaaccggttaaaccaccttgaaaatcccaaattttttaaccattccccaatcggaaacttgatggtttaccaaaagttgaaaaggtaaccttgacctaaggaaaaaccaacctggacttgaccctcggtggttaagtaaaaattgtcggactttagcggcaatcccttagcatctacacagaccacattcgacagtttcagtcccaactgtgcttctctcaccttatctatgtatcctcctcccgatgctattgccacctgaataatgggaagaaaaggaggttaagcntttagggggttttaaaaaaccgggccaaaattgtcccgaaccccccgggcgaaatggattgccaaaaacggaactccccccctttaacccaaaaaaaaccgcctttgaacctccccgccgaatttccctactctccctccggtccctttgaccaatcctcccggtacaagtggcttccacgctcccactcttttatcgccgtcccaccggaaccgcacggcaccaacccgatcacagccgaatctgtttccaggcgattcttcaccgcgttagcgaacgccattcctggacctactccacacactttacctgtgtcaatgtcaacgtgtagtggctcgtgtgcttcttcccaccggagatctgcggacaggcggaggatcgatgagtttggtgcgcattccggtggaaggattttatcccacacccagcgattgttgtggtggtctttgaagacgccgccgcgtcctgccatattgctttgtccagagagtatgaagatctgatttggtggaattggagattggatctccggt

SEQ ID NO: 134404 - DNA, 980 bp, Arabidopsis thaliana
aggtgacactttgaagactatgacgttgcatggcccccttccttagcctggattcttttaaaccggccgccttttttttttttttttttttaccttggataatcaaccttttattgataacctcaaaaaaatttggggggtaggaaattcaccaccttttaattgccccttccaaaaaattccactcttgacccacttactacaagaggctgccgctttatagacgacccattaattctcagaaaaaaattccccccacccttggtccatggatgaaagaggaaacggttttgaccaaagcattgtgaaggattatagatatttgagggtttttggttttttttctttgagtagtatccgtatatatgaaggatcaaccagccattttggttaggcggtgaacagtacttctagcgattctattcccgggatcaatctttagaaccatccttaggtcttcagctccgagtttgtatttctccatgctctcgtataacagtgctcgttgaaccagaatggtcacattcttcttgtcgtgatcaagtacctttgtgcagtcggctacagctttcttatactctccaacttctttgtaacacgaagcccttgttgaaagaacctcggctgatccagcttcatcaccagctctctggttatcaatgcccttgttcttagctgatgtagctgatacacccggtggaggcggtggcaaaccatcaagctcggtggtggaaccagccccaccgtcaaaactttcaaatccccaatcttcggtctgtggcgtaggtggtgcagctgagggtttggaattagagaacattcctaatggatcatcgtttgcactcgaagattgtggaccacttggttgcacaccaaaatcaacgtttgaagcattgaagctacctcctgatgagaatgtgtttgatttcgaagcctgcggacgcgtgggtcgacccgggaattccggaccggtaccgcaa

SEQ ID NO: 134405 - DNA, 876 bp, Arabidopsis thaliana
ataacgtcgatggcacccttccgtaagctggaatcctttaaagcggccgccctttttttttttttttttcggcagggcaggaaaaaagctgcctgaactgttcatggtactagttctcgggttggtcccactgatcctgtgaagatcctttcaccaatcatacaagattatgtaaatgagattccccctcattaagatttctttttttgttactctgaaacaaatatttctttttcatctttttaacgcaaatccctacataaatcctaaatattttagagtttgagcaaatatttacactagctccatttgttccaattgtctgatggcttgttaaatgtcgaggctgatgtttgcgtgggattgctcttaggcatcttcttcttcaacttctttgggctctccatgtgagagacaatgtgagatttccactgggttgtctctgaactactgtcatgtggaggatgatcgcgaacatggcgaaatatgtggaaccaacactgcagcatcaagagcagcatactcaagctgattctggctcaaaggcctttgttcccagccgctattgcgtcttgttttgttcaaagacactcccaatattttcttcgttagtcctgctaaaccaccaaatggttcattaaaaacattttgaatgtctagcaacatgtcgtatcggtcgaaacatttcaaatccccatatgaaagcgccaactgcttgatgtcacattgaaaattgtaaccgagctttaatgtactcttcgattgcaaaatgtgactaaggcagttgtccagaatttcagaggcgtcattgtaaagctttatcacggacgcgtgggtcgacccgggaattccggaccggtactgcagacggccaat

SEQ ID NO: 134406 - DNA, 965 bp, Arabidopsis thaliana
  unsure (1)..(965): unsure at all n locations
nnnnnnnnnnnnnnnnnnnnnnnnnnnnnnnnnnnnnnnnnnnnnnnnnnnnnnnnnnnnnnnnnnnnnnnnnnctttttttttttttttttttagtgaaatcagtgaatctcgaaaataataataacgatcaatcagattcaaaaaggaattaaaatattcaagaagaagacgaagaagaaaaaaagaaagagtcagtgaattaacaaaaatcaagaagaggttcggttaatactaagtccttgaaagagccaatgaggtctgttcttctctcgatccaccgacgtcgtacttgagcctgctcataggcgtgtttggtccgctactttcttggttatcactgctgttattatatagattatcattgctctgattattacaatgatccgatgatgatctcattgacgttgttgacgagtagtccatgtcattgttcgtcgtcgtggtcatagtagtagatgaagaagacaatccaatgctcaatgtcaattagagttcgctctgttagatatgatccgtcgtcgtttgtgttgctctaaccacattttcgaggtctatgcctgaacaacttccggttctctctcttgaaccgggttggtctttgttgttaacagtccaatagtggcttctatgtttcagttgagtcatcatcattttccgtgtatgatatactttatgcagctctcgtacctgctgcttaaaaatatccttttgggcttgcactgtatgtctgatggattcagcattttgcttttcaagaaacctatccactgaccttaaaataaaaactcgttcttcttcgtagtgtgtcaacgtctcctttgacgattcttgtggaccattaacaacaaatattgatgaacccactatgatcaacactctttaagccactttggtcggacgcgtgggtcgacccgggaagtccggaccggaacggcaatcaacatccaaaggggggggccggg

SEQ ID NO: 134407 - DNA, 649 bp, Arabidopsis thaliana
  unsure (1)..(649): unsure at all n locations
nnnnnnnnnnnnnnnnnnnnnnnnnnnnnnnnnnnnnnnnnnnnnnnnnnnnnnnnnnnnnnnnnnntttaaaactatttacacaatgatttaaggttttgtaacaccagtattatgtaccaaaaatatagtattggagagaaaaccatggtatatacacgaaaaaacacaggcctcagttacatttccctatatattattacttacaaaaagaaggaaaaaaaaagaactgacaagtataatactaataatttttacgattaaaaaaggcaaaaatctgagtcaccccttcttcttttcgttttccctacccatgaagcaattccgaaccttcagctcaggctagctccgatattggtgacactcagctacgacccaccgggccaccgtgttaggcccaaacttaggcccgtataaactccaaaaactatggcttctaacttcaccacttttcgaaacaggagagtttatacgtcgacgtttgagaaggggcgttccgtagcctcgttggatttcaaacggggacacggcaaaccataggtggggaacaatttgatccgtccttcccaaccaccgggggactataaccaatccccggggtgggatgacccgacgtctcggacgaaacggggatttgatnggttcggtt

SEQ ID NO: 134408 - DNA, 930 bp, Arabidopsis thaliana
gacctatagaagacttttgagtcgcatgcccgcgttccttagcttggatcctttaaaacgggccgcccttttttttttttttggaaatggaccttcctccaaaaagggttacctttagaaaaccggtcaatggaaccgaaatggattttaaattatccgggtattattttaccttatattatccttttattggaccagccagctggggggggggctccatttcttctttggtccttcaaaggcttcctattactgcagatggtttcttatcatcgagtctagaagcaaacctctcagagatgcttattaggcctactctttcgagtatctttattggttggccgcgcagtttatcgatcaatatcttaccatctctcgattcatccccttccgcgatcacttttatgtgctcggctctcattttcggcttcagtgaagcgtcatcgcctcccaaaggaactgctccaagaacttcccctaagaacatgtcgatgtgcgtgtatctcctgtgtttctgatgaaagaccttgcaatcctttacaagcaaacccgtttcacaaaaccccgaccttctggtgtttccggtcgaggaaatagacgcctatcaaagcaattgttgggaaagaccccaccttgtgcttgtgttgctagagggacgagtgtgatgtttagagcggattcaagaacggtccttagctgctaaaggatcaagaaacatattgaattcagcatatgcatttgaaggaatcgtgaaaatgttccctttgtctgatttctcacggtttatatgtccacccacgatgtaaacttccttgattagtgaggatgattttttatctgatgagataatcttggctaagttagttaacggtccattggttagtacagcggacgcgtgggtcgacccgggaattccggaccggtactgcg

SEQ ID NO: 134409 - DNA, 763 bp, Arabidopsis thaliana
  unsure (1)..(763): unsure at all n locations
nnnnnnnnnnnnnnntcgttnnnnnnnnnnnnnnnnnnnnnnnnnnnnnnnnnnnnnnnnnnnnnnnnnctttttttttttttttttctttttcgttctttttccactttattaacataaaatttattcaaacaaggaaaaaattacaaatggaataataccgtttttggatcggaactcacaaaagggaatggttttgttcatgttgtcggaatctaaaaaaaaagctacaaattgggaacaaattacaaagaaacatgggagtgtacaatgcgtgaagggttgttgttgttattctctcatcatcagttttatgaaaccgaaagaaaaaaaggattttgttttgttttgtctgtcctcggttgtcacttgttgtcgtcccatccagattccgagcagacaagagaaaaagggcaaatttttatgtttttttttgttggttctcatcaggtaaagaatttacatgtaatcattgacgccggagctaccggagccgactccaacagttctcttgctcatgttagctctctgcaccaatacaaccaatgcttgcaccacttcagacatgggtggtctaaactctggctccggctggacgcaaagggcgataacatctgcaaatcgggagagggatttaaccgggtatagccctttgagagctggatcaaccattttgcccaaagcatcaatgtcgtgaagctgaggtgttgcccatcttaccaatgattgttccgatcttgaccttgtgctgtcgaatggtttt

SEQ ID NO: 134410 - DNA, 671 bp, Arabidopsis thaliana
  unsure (1)..(671): unsure at all n locations
gnnnnnnnnnnnnnnnnnnnnnnnnnnnnnnnnnnnnnnnnnnnnnnnnnnnnnnnnnnnnnnnnnncttttttttttttttttttttttaatacgaaaaaagacttacataaggattagtttcacaagctaaaatgcacaatacaaaaaagactcaaagatgcatactaaaaaagtaaaaagacaaaccgctcaagattcataggctttgaatatcatctttgcagtttcattcacgagtccagacctctgcaaacatagctcaaactgcttagccttaagcttcttccatttctcctccacttctctcttctcagctccatccggcaacctttgcccaaaccgcagttaatgtggattcatccaaaccacaagaactcccattatctgcattgaggaacgatgcaatctctttaccaatggagagacctgtgttcacaacctttgcctctgttctttccggtttcttcgcttcttcttgttgtttcttgggagtagagtgagctactaacttcatctctttcggtgcaggtgttcctccaactttcttccttgatgatttaccagtaaccaaaacaccattgcttccccaaatctttctggacaattcaaaacctttttgctcaagatctttagcaaactcaatatcatcttcagtctttcctcgtgcc

SEQ ID NO: 134411 - DNA, 558 bp, Arabidopsis thaliana
  unsure (1)..(558): unsure at all n locations
attgannnnnnnnnnnnnnnnnnnnnnnnnnnnnnnnnnnnnnnnnnnnnnnnnnnnnnnnnnnnnnnnnnnnnnnnnnnctttttttttttttttttatggaacaatgtcattgtttatttcatttgacgaactggtccagtattacacttcacacgttttatctttaataccgaggttacttgaattgtaaaagaaactaatactagaaagccattgacgatgggcagctacgaggtgtcgagatcctcagtcccttggtactggttttcaaccattctaaatacttggtcgctcccacccagggatggggcaacgcaattacttctggcacactaaaggtaacaagtaaaccatatttattaacttagcttgtgtgattgctaaagaaaaggcaagacactcgcattactcatgtttttatatgcagaatacgtcatagaacaatgcttactcgtattcgtgatttgcattgacatgctcggttagaggttctagaagggattgccttgttttgattatcaggagctcctctgaatcactctgaaccttcccctc

SEQ ID NO: 134412 - DNA, 630 bp, Arabidopsis thaliana
  unsure (1)..(630): unsure at all n locations
cttatagaagagctatgacgtcgcatgcacgcgttacgtaagcttggatcctttagagcgggcggccttttttttttttttttttttttaattgaaaattttgatgaatttgattaaaaccccaaaccgggttaaacccaccttaaaattccagggggtttggtttttaccttcaagaaaagccaactttccccgaccaaggtggtttttaaccggccttttaattttttcccagaggatcagttgggacagtttttaaacctccaacccagcattccatcacacgagttcttgataacttgaaagacaaatcgaatcctcatgtcacctattcctcttctctttccggaggaaggccgcagggtaatagcattttctgcatgaaattgtagcgttctcgtccaatagactcgttctcagcaatagcaaagtatgaaagcatagggtagtgaccaatgtatgaagcataactatcacgctgaatgttcacagcccactcaaatctactcaaatcagcatgaccggttccaacatatttagcttgaagatgctcaagctnagaattgatgttaaacctattacttgcctgcatntttttcagagtttcgcagcaactagaagnaggagaag

SEQ ID NO: 134413 - DNA, 741 bp, Arabidopsis thaliana
  unsure (1)..(741): unsure at all n locations
aggtgacactatagnagagctatgacgtcgcatgcacgcgtacgtaagctgggatccctagagcggcgcgcccttttggtttggggtttttttggcttccaaggaaaattatatttggatttctttttggacaaatttttttccttaatggaaaccgactttccaaaaaaaaaaacctaaaggaaaattttcggaaattcccctcttttttcctatctctctcactgattaggtccaagggtctttctttactttacacaaatgacccatacaaagaaatctgaccttcccaaatatttaatatctcttcaaaacctaactcttttatttttcctctccttaatacttacaaaataaccacaaaaaaacactagatacttaataaaacttaacccagaaaattgctccgttacctatttacactcttgaaaaaagcaaactccaaaaggatcatcgatctcctctttcccccctcaaagattccacacaacatctcaatctccttaacacttataatttacggcggcactaaatggttttttttttttgggnggttaaccncaaaggggatnnatggaaaancctaaaaggggtcggttcnggggttcggtttctaagccaagggcagggatgctgaagnttccgggaancccgggaaagggaaatcnaancccttaaancttaacccttgggggggntanccaaaatggccttaaaaaaaatncccntttccnccnnggg

SEQ ID NO: 134414 - DNA, 754 bp, Arabidopsis thaliana
tttaaaaaactttaacttgccttgcccccttccttaagcttggttcctttaaagcggccgcccttttgttttttgtttttgcaagtaaaacaatctatttttataacttctaacaataatgggggtaggacaaccgaaattgtccagtaaatgaaaacaaaacacttgaaatttttgttcaaatagatggttgattcattgactgctgcaaaatcctaagatttctatgaggtgatggttatgtatcatctttatgctcttctctaccccaatcactcccattgtgtgggcatcttgcacaaatgactcctgagagaaccgaaaccggttatggaagctcttctcaggatcgccacgagctttcttataaaggattgtccccaaaaaccggcaagaatcgataccgaaatcaagtacattgcgtatggtattgggaatctcttgaggagatagaactcgactacggataaggacgaagaaaacatcatcacaaaggtagctgttgcgctagcaacctgtgggatgactccaatctcaagaagcaaaggcccgagaacaaatccaccaccggatccaaggagaccacctacgatacctccaatgagaccacagagaccacagaagattagactcagaggagtccactcgatcgtagcttcacagatacatttcagtgttgccactgtttaacctctttttgttcgctgtatacaatttgcttgcttcaaacccaaacaccgctaaagcaactggg

SEQ ID NO: 134415 - DNA, 571 bp, Arabidopsis thaliana
  unsure (1)..(571): unsure at all n locations
nnnnnnnnnnnnnnnnnnnnnnnnnnnnnnnnnnnnnnnnnnnnnnnnnnnnnnnnnnnnnnnnnnnnnnnnntctttttgttttttgttngatgcatgtcnagagctnttattgcgaactggtaaaagaaacactccatacatannatcgtcatgaagacggggaagtactaccgaacaaacaagagagggtttaaaagaaccaaacacaaaagagaaaaaatcgacataagttgtcttcagatgacttggactctcagataggtgatgatgataatcaaaagcacaacgacgggtgaaggtgttgatgagggctcgtaacttagatgcgccataacagaatctttcagcttaaccggcgattttcctagagtagggattggaaggctgtgtaggtctgaggaacatgtcaccactttctcccacccaccctgccttcatcgccggttgttgttgcctttgactttgagtccatcttcctccaattgttgcatttgccagtttatttgcagtctctgatgctccacgggaaaagacccngttcttttccatagatgctgcaagtggactc

SEQ ID NO: 134416 - DNA, 608 bp, Arabidopsis thaliana
  unsure (1)..(608): unsure at all n locations
nnnnnnnnnnnnnnnnnnnnnnnnnnnnnnnnnnnnnnnnnnnnnnnnnnnnnnnnnnnnnnnnnnnnnnntttttgtttttgttattaaaacctaaattaaaaaacacattctgaatcatgacttgggtttaaacatcagtcctcactatattacaaaaacaatacctcggaaaaaaatcgaaaaatggatgctgcatgaatcatttttgtcggtaggccccaaagtttttgaggggtaaactttttttctttaaattttcaaaaaacaaccgatgccggtctctgctgttgttttcaccaaatgtgttcttcttctaccttccacagaggatgaacaagctgcgaaaacaccgcactagtagtcgcgtcttccgcatcatcatcagccccggtccccgaatttactcctcctctatcggttatactcatgactgttatcaaacggttccattggcggccagtgggaatccctggaatgggggtggtactatgggcatcaggctccatcaaagccgaagatgtttcttctagctgtaacgcgtactccaaatccacaatacatctcccatagaaggccggtccacaccgtattccgctaaacatttc

SEQ ID NO: 134417 - DNA, 445 bp, Arabidopsis thaliana
  unsure (1)..(445): unsure at all n locations
tttttttttttttttttttaagatatataatcacattctgattcatgatttgctttaaaacatcagtactcactatattacaaaacaaatacaccgtaaaaaatcgaaaataaatgctgaatgaatcattttgttgtttgttcccaaaagtcttcaataaataactttctttctataaatttttcaaaaacaaacaatgtctgtctctgctgttgttttcaccaaatgtgttcttcttctaccttccacgaggatgaacaagctgcgaaaacaccgcactagtagtcgcgtcttccgcatcatcatcagtcccggtccccgaatttactcctcctctatcgattatacccctcactggtatcaaagggttcccattggcgccattggaaccccggaaagggggttnnaaaatggaaagggggcccaaaaggcggaaggtttcccc

SEQ ID NO: 134418 - DNA, 521 bp, Arabidopsis thaliana
  unsure (1)..(521): unsure at all n locations
nnnnnnnnnnnnnnnnnnnnnnnnnnnnnnnnnnnnnnnnnnnnnnnnnnnnnnnnnnnnnnnnnnnnnnnncttttgttttttggtttggagtttaaagataaaaaagttataaactaattatacaaactgtattattcttttcttactcaagacacagaactaccttcttattattactgcatattacaaaaataataacaataataatgttacaaaatctcatatgttttctttatcgcctttgtcccatagcaaccacagggagagtcactttatgccctcggcttcctttcaatgtaacctgtccgaagctataagctccagtcactgatctcactgttagagtcaccgaaaaggttctagaagcgcccgctcttactgtcattgcaggaggactcacttcgatggcgattgctggctccatcctcgatgtgattgggtatgtttcttcttcttcccgaacattcgtcactcttctggttacggtttgtgttctgacgagatgagagatggctatg

SEQ ID NO: 134419 - DNA, 489 bp, Arabidopsis thaliana
ccccttccttaagcttgggatcctttaaagcggccgcccttttgttttttgtttttttatgtaagcttttgagcgtttcccttaactcgcaaatctggactacttaacctacacaatttttcctaacctaagaacataaggagagaagttgggtcagatctttggccggatcatacatggggggagcatgttggctccaaagggcggtccaatagcagcagaagaaaacatcggctggaatcaacaatgttgctgcctcttcccattcagagtaaaaccttttttaggtcagtgggactgtgcttcgagaaggatgtttgtggcggcgttgacatcattcctggcgtgcacaagcgcctgtctcgctgcgtttctgtcgaatcccattgataccaatggagttatggcttcctcagatggctccacacttgagggcaacggagctggctgatatctctctgatcgacgccctgtgttaggtgatatact

SEQ ID NO: 134420 - DNA, 814 bp, Arabidopsis thaliana
  unsure (1)..(814): unsure at all n locations
cggcccgctggtttgatttcgttnnnnnnnnnnnnnnnnnnnnnnnnnnnnnnnnnnnnnnnnnnnnnnnnnnnnnnnnnnnnnnnnnnnctttttttttttttttttttttttttttttatgcaaatctcaaatgatcattgacaattcaaagacaaagtactctcttctttacattacatactataaaacattgattacaaatcatggaatccatcaaagcaaatccacaatcacaccatttccagtttttctaaaaatcaaatctccatcaaattatgaaacttttttcttcttctgtatagcagggaaatgttcatgccagtaaccaagaacataaaaagagtctaattcgcggtagtagaccaaatgaatgcttccaataagaaataaaagagaaggaaagggtatacacgagcggaacccgaaactgaccagtgatgatgatgatgatgaacaccataggagaactctgtagtagcttctacttcagaggatgagatttgaacttatcctacaaagcccctatgggggcgtttcggtttaatgtaagaagataaatggcctttagctttcctctctcattttcctcttcgggttttctggtatcatcatcatagcctgtttcttttgctttcaagcattgatccgtctttaagagcaagcgggtgcttcggtctcttgtcctagagctgatagagctacagcttgaagatacgatgcgatatgcccagccggagatatcacttgggcttgcattgcatcattcaacgccctttggggcatttaattcttaggtaccacaacttttttt

SEQ ID NO: 134421 - DNA, 559 bp, Arabidopsis thaliana
  unsure (1)..(559): unsure at all n locations
ttcnnnttnagngnattcancagntcnagacaaaaaannctaacccggaaaagccaaatganccncaaaaagaataaagggaggaaaggnatcacgacggaacccgaaactgcccaggatgatgatgatgatgatgaacacgataggagacctctgtaggagcttctacttcagaggatgagatttgaacttaccctacaaagcctatcggtttaatgtaagaagataaatggtctaacttccctctctcattttcctctccgtgttttctgttatcatcatcatagcctgtttcttttgctttcaagcattgatccgtctttaagagcagcgtgtgcttcgttctcttgtcctagagctgatagagctacagcttgaagataggatgcgatatgccaagccggagatatcacttgggcttgcattgcatcattcagcgcctcttggggcatctcattcattaggtaacacagacttcttcttgcataaacagtcggggaaaccattgtcccaccctcaatgaactgagaatagcagtcgatggcatttgcaaattctt

SEQ ID NO: 134422 - DNA, 891 bp, Arabidopsis thaliana
  unsure (1)..(891): unsure at all n locations
nnnnnnnnnnnnnnnnnnnnnnnnnnnnnnnnnnnnnnnnnnnnnnnnnnnnnnnnnnnnnnnnnnnnnnnnnctttttgttttgtgttagattattatttttcttctttttgaaagaaaaacagctagaaagtctgtttgttattgaacaaatgattctacgaaaaaagacctataatctaatacaaaaggttatacacaaacccccctcctatgattcatccctattgacatataatggagagataagaagaagaaaaaaaaatcaaaatgatgaaaaaacctagagaaagatcacaataccttaccaatttataacttaaaaagatccaaatctcttactatactcactcacacaccagaaggttaactcaaagatatcaaatatcaacctaaatggttccttggttgtcttattcttctcgcccttcatcatataccactcggcatcgtctttaactcgttcaatgtcgttctaatctgctcttgaaccaactctaatctccttgaatacacttccaattccagaatccgggttgttccctccaccgctcatctgcaaccgccttgtttcctcctccctctacaccaaaaccgaaattgaacggccgtgtaaacatggggcttagcgagccaaaaccatgaccaccaccaccaccaccaccaccaccaagacccggaaaccctcctcccattgcagccatcatcatacttgttgtcccattcatcatctctttgatcacaggagagacacagtttttcacagtctcttcgatcgaacccccgagatttcctccaataccaacagctgcagcttcgttgaggttgacattgctagctattggcccatcagagagagtgatgacaggtttgttgtcttcctcaatcttc

SEQ ID NO: 134423 - DNA, 589 bp, Arabidopsis thaliana
  unsure (1)..(589): unsure at all n locations
aggtgacactatagaaagactatgacgtcgcatgccgcgtacgtagctgggatctctagagcgggcgcctttttgtttttggtgtttttttcacacaatttttctttgtaaacgaagcctgagcctgaaaggttattaaacaaacccacaaatgttgagaacacacacacgccctaccatcaaccccaaggggtcatagaattagatataaatttcagtgacccggccccggccgatggattggttagcaactcaagggacttcttgagatgttctacagcagccgagccttcatcaaaagccaaagctcccacagcgaatctagcagccttgagtgcctctgcaaccttctcaggccctggctggtaagctggctatcgtaatgggacttctgagctgaactccggggcaggatcttagcacggggaggcaatattgatacgcccgtttgattgagtaaggtggaaggaggaggagcaaaggggaagcttgttggaagaaggagcaggtgcaaagtgcggggaagannagtaaaggttccgggntttgganttaaaaaggnattngggnanngatgggggngnccccc

SEQ ID NO: 134424 - DNA, 616 bp, Arabidopsis thaliana
  unsure (1)..(616): unsure at all n locations
nnnnnnnnnnnnnnnnnnnnnnnnnnnnnnnnnnnnnnnnnnnnnnnnnnnnnnnnnnnnnnnnnnnntncctttttttttttttttttaataaaagccgttcattttataactcttctttacaatagattggaattacaaaaattactctactcgatagtaattttttatcctaatcttttctactaatagcaaaaaaaaaaaaacgaaacgagcttccgtttacctcttctctcgtcgtttttttttacttttcaaagcagccgttacattgccgttaactcattggaagcaaaacattatcaccgttaccatttccggcaatctgaacgttaccgtcaccaccgtcaccttcctctagccaccgttgcaccggagcacaatccattttatgccgggagtttccaatctaaagcttgacaagcgcgtgaacaataattaacaacgccacaaaccggacatcgcctaaactcatgcttcctcgtctccgggcgtccacaaccagcgtgtgaacacaatctcaacccatctcggggaatcccgcgggaaaggnccatcgggaaaaccatcnggggtggttcggggggaataanccaacctaganggagttggcngg

SEQ ID NO: 134425 - DNA, 422 bp, Arabidopsis thaliana
  unsure (1)..(422): unsure at all n locations
actatagaagagctangacgtcgcatccacgcgtacgtaagcttggatcctctagagcggcctcccnttgngtnnaaaancccnnnnnngtttttagaacacaaacttgaaccatttaaactcttgtggctgagcatttagggccaacaatagttttccaacagaccaaaagaaagatttaaacattcggacttattttaatgatttctctggtttggagaaaacgagaaaggtggaactgctttggcttcaagttacaaaggctgaccactgatccacctttggaacatgatataactctcctctggggtatactctggtgtgtgtcctcctcctttgatagtagcaaatgccatctaattggcataggtcctcgtggnatccagcganntgatcncccngccatccaagggctccagnca

SEQ ID NO: 134426 - DNA, 743 bp, Arabidopsis thaliana
  unsure (1)..(743): unsure at all n locations
nnnnnnnnnnnnnnnnnnnnnnnnnnnnnnnnnnnnnnnnnnnnnnnnnnnnnnnnnnnnnnnnnnnnnnnnctttttttttttttttttactaacaaaaattgtgtattcaccctttgtagcttgattcttagcccttaaccctaaacaaatcttccccttttcacttattaggggggtcaagattatttacaggctcgggaaaaggtttagcggatggattcctaccaatttttctctatttaaaaaacattctctagtctctcttcttatggagtttgacatggtacccatttggaaactgtaatccaggcgttcgagttatattccctccttttatctcctcccacctgtattttgttaccaagctgtgaagaaacgcagccatctgcaattttgtgaagtcggttccaacgcagaacctcatacctccaccaaacgccatgaagtgctttgatgcgtttgtaacttttgatccctcccatcttgatggattaaagactaaaggatctttatacatttcgggattcaaatgtacagctggtggacagaccatcaccgcccagccggctggaatcgtataatctttgaattttatatctctcaacgcctttctgaagattgcaggaactatatttgctagtctcgcggttccgtttatgaactgaaatgtgtaagtcattgacttgtattcttcccatgtaagtccagagtctgcatcttgccggtttctcagaattgtc

SEQ ID NO: 134427 - DNA, 558 bp, Arabidopsis thaliana
  unsure (1)..(558): unsure at all n locations
aggccacaaacggtggcaaanaataccannnagcacaaaaattaccctcccctgaacaacccaggtaataagccttaaacctgcaacaaaatgtttagcggtgtacagacactgttctcaccgcattctcctgaaaagcaatgctttggtgtcctgattgtggcatgccctgattggcagctaggcctttggtttcatctgattcccctattatttactccaaagatttggcatcagtctttgtttgcctgattttccatattgaagcgccactgtcatcatcaagttggccttttgtaatggtcaaaagggctaaactctgtggagtcgcattggcatcttctgctatacaactcagatctttgttcttaacttcatcaattccttgcttcagtatcttctagtgagcaaatgtccttcctgggggcatatcatggtcatgttttccctcgtatgtcgttataagcaacttcgcatcacaagatgacctttctacctgtttcttgaccgcacatccagaacttgaacatctatagtaactcctgattcagcagttac

SEQ ID NO: 134428 - DNA, 856 bp, Arabidopsis thaliana
gatgaaattattttggattgaatggatcattcattactcatactaaacaaggaatcccattcttattaaaatggtgcttgcaagttagaaataacagaaaggcaggcactcaaaaagaaaacagaaacaattgacttgggaactatgcgatatgggtacaagaaaaatttgatcaccaaatgcaaacagaatctccgtcttctctacaggtactttcttgcaagtgcacgtactttggtgtcaaaatgtgacgacgttatccgagaacccgggagatacaagggattcagaagaatctttatataaagctcatgcacctcttgaaagaagctcttgatgccgtcctaattccgtgaatcatgaaggagcatcagtcgggtatggcctgcggtaacatatactgacacaaccagatcgttaaacctgtccactgacttcaagaacatggcacttgtagtccatgctaggtcttggacaacatctaacgctgcatgtaatataaattggtgcaactgtgcagcatcttctcttttagcagcagatccaacttcagcttcatagatgggaatatcattccggcccacaatgataaagcaggcagtgttagccatagaatccctcgtctctaaataaaggaaatcctagatcttgtgtctccaaaaaaagaagtaaaaccctgtgaatctgatgtgcgtatcgtttcttctttaccatcaacgcatcttatgtctagacaaacattggagaatcagattccttgggatgtctctcgtgtttggatccgtgctaaatacttcaaacaggtttgattctgtcgtgtactagtttaggactatacaccacgagaactttttag

SEQ ID NO: 134429 - DNA, 742 bp, Arabidopsis thaliana
  unsure (1)..(742): unsure at all n locations
nnnnnnnnnnnnnnnnnnnnnnnnnnnnnnnnnnnnnnnnnnnnnnnnnnnnnnnnnnnnnnnnnnngccgccctttttgttttttttttcgcgaaagaccatctgacacacatgtaacagagtcacttcaatgtcgacaacattaagtttccacaaagatcccatcaatgtttctttgttggtctgaatatgagactctaactcatttgctggactagtcccatctttctttattctccggttactctcttcttgcagctgaagtaactgtaaagctcctttagctgcactaatctgtgatttccaagaatgacctttgttcctaacccattcagctacaaatggaactcctaagtaaagagctctcttcccaagttcttgagctgcttgtcttgtgtatacatatccaattgtatgcaacatatccgctccaaaagctgcatctgaaagtctcttggcttcagattctgcgcggcttatgaatccttctttgtctccgtggacatattgactcagaaaatctttgagaaaccttgaaaggttttcttctctttctttctgaacagcctttagtttgccttgaaactgatcagagttttcgatttcagaagccatttgagtggaagccattgatgcaacagccaagtgaccgatataatcctcgaatagttcacttccgaaaagaagagcgaaaacagccgttggatcaaccattgtttctttgggagctgagaattttcc

SEQ ID NO: 134430 - DNA, 576 bp, Arabidopsis thaliana
  unsure (1)..(576): unsure at all n locations
nnnnnnnnnnnnnnnnnnnnnnnnnnnnnnnnnnnnnnnnnnnnnnnnnnnnnnnnnnnnnnnnnnnnnntcccttttttttttttttttttttcagaaaaatgaagagatagtagatactcaaaaatacaaaagcaaatgtgacacctatgagaaagtaaacctttcactagttttattaactttcaagtccaaaataatctttcataatcaagagtttattagcttcaacaataacattcaactcaaagtacaggggataaactatgggtctctttgtcatggagttccttcactgatagttcctaatgatctttgccaccgaagaatatgtccccaaggtcccgcttaccaccccgatggccacaatgatcgaactcagaatcatctgtgttcttgttgctttgttccccattatctttatgaagcataaagctggcattattattgccactagtatactgagaagagatcctataagagccatcataagaccaaaaaatggaataaggaaagcagaacaaacagaagaagcgacgagtgctgttcttagaagaagagagcaccatatgttct

SEQ ID NO: 134431 - DNA, 709 bp, Arabidopsis thaliana
ccggcaggtcccggtccggaattcccgggtcgaccacgcgtccgctcggtgaggctgtcggtgttgaagggctggttgtcggtctgcgcgctcagcgccagcagcgcgcgccgcgagaagcaggtaccgacaccggccgacggcaccatgccggaaacactttcgcgcaccaccagatccttggcatgccattcggcgaactcgtccatgtagacgccggccaccagttcgtaccactcgcggtccagcgaggtgaccggcaactggatcatgtccttgcgcggcaaaaggtagttgtagaagcgcagttccatcgggtgcagcacgtcctcgctgtcgtgcaggatcaccccggcgaactcgatgtcgtggcgcttctcgtaatcgaagatggccaggatcagccagttcaggcagtcggccttgctggtcggcccgtcatgcggcacttccacgcggcgcaggcgcttgtagcggcggcgcatgcgctccacttcgtcgatggtctgctggtcgttgggataggtgccgacgaacacgacgtactcgcggtaatcgagtacgttgatcatgttctccaccatctgcgcgatgacgtcgtactccatccacgccggcaccatgatcgccaacggctgggcggccgctttaaaggatacccagcctacggacgggtgccagcgacgtcaaagttctttaaaagtcccct

SEQ ID NO: 134432 - DNA, 515 bp, Arabidopsis thaliana
ggactgcaggtcccggttccggtttcccgggtcgacccagcgtccggtttttttttttcgacctctctttctttcatcacgaaaaatttatacttatctcaaataaaataaaaatatatatatatggatatgaagggaacatacttagtaacggttattctcttggttagtacgttaagtgtggggatgtgttctaacggctggataagagctcatgcaacgtattatggtgtcaatgatagccctgcttcacttggaggagcttgtgggtatgacaatccgtaccacgccggattcggagcacacacggcggcgctaagcggtgagctattcagaagcggtgagtcatgcggtgggtgctaccaggtgaggtgcgactttccggcggatcctaagtggtgtctccgaggagccgccgtgacggtgacggctacaaactttggcccaacgaataacagtaatcggctggtgcaatctccctcgccatcactttgacatgtcctcccccgctttct

SEQ ID NO: 134433 - DNA, 509 bp, Arabidopsis thaliana
ttttggaagaacttgacacgcgcatggcccccttccgtagcctggattcttttaaacgggccgcctttttttttttttttttgggaaaaatggtctttccctttattttaaatcctgcaaaactttttaacctggccgagtatggcttcatccttaattgaaaacccgttccgttaattaaatttaaccttgaatttttttgccattaaaggagaaccaaaggacccctgcccatttaaaacaggggcatgttcagaaataagcaaagattggcgttttgaccagagcacgacttagttttgtagttaaacgaattgccttcctcgagaagagaaggtttggccaaaccaccaagaagaagggacaacgttcaaaaatgtctgcgttttgctgtccgtcagagtaactttgaaggagagtctctgtccccggagatcaccggagctctgccagttggcaccccaattacgggtcatctgaggccaagtctttccctttgagcctctcac

SEQ ID NO: 134434 - DNA, 781 bp, Arabidopsis thaliana
  unsure (1)..(781): unsure at all n locations
cgaaaaattcatttcacttntccnataacaattcaagattaagctatgggttatgaaaccaaatcgactttggacaccgagagatcgaccgcgccaggaaccggcaccacgacgaagagttgttcgatgactcaagttgtcctaagatttgttctgtttgcagccactttgacatcaatagtggtaatggttacaagtaaacagaccaagaatatattccttcctggaactcccattcgtattcctgctgcagagttcaccaactcaccggctcttatatactttgtggtagcattatccgtggcatgcttttacagcattgtatctacatttgtcaccgtatctgctttcaagaagcattcctgctctgcgggttctcttgctaaatcttgccattatggatgcggtgatggtggggatagtggcctcagcaaccggggcaggaggtggagtagcttaccttggtctgaagggaaacaaagaagttagatggggcaaaatctgtcatatctacggcaaagttttgccgtcatgttggaggagcaatcgccgtctcattgtttgcttcgggtgtcctcctcctcctatccatcatctctgtcctctccctctacaagaaaatccgttgagtcactctctttgtttcggtgtttcctctcaaagggaatacaaaattgttggatgttttttggttttcttattttggggataatctgtcggagttggaccttgtatgccgccttagntctgtaagcgttgattannaantncgttngcngng

SEQ ID NO: 134435 - DNA, 507 bp, Arabidopsis thaliana
  unsure (1)..(507): unsure at all n locations
ttccgactcgaccacgcgtncggccactttgacatcaatagtgggtatgggtacaagtaaacagaccaagaatatattccttcctggaactcccattcgtattcctgctgcagagttcaccaactcaccggctcttatgtaagttcatcctaataattcattaaattaatatttccttttattttctcgattttgattgatcatctttagtaaatgtgactaagggccagagttcatatgtgatttgtatatctcatatatagtcaaactaagtagaccatataattatggggttgttgtgttgtttggagaagtaatagagggttgttttatcaaacaccggttcttaaaccatatctttatccctaactttggcaggaagccatgtcaaatttgggttggtggaataccaatgatccgcttggtccgggtcaccatggtttggaccattgaaaatctggtcagagcggggattttttatgtatacaaaaatatatatttaattta

SEQ ID NO: 134436 - DNA, 504 bp, Arabidopsis thaliana
  unsure (1)..(504): unsure at all n locations
gctagtgggagaatccggttgcatcccggagatcgtgaaacttctggaatcgaagtcaaacggatgtcgagaagcggcggctcaggcgatcnctggattggtagcggaaggaaggattcgacgggaactgaagaaagacgggaagagcgttctgacgaatttggtgatgttattggattcaaaccctggaaacacggcgaagaagtacgccgtggcggggctgttggggatgtcgggaagcgagaagagtaagaaaatnatggtgtcgtacggagcaatagggtatctaaaagaagctttcggagatggaagtaatgtggcgccgataagcttcttcgagaaagctttgaaaagagggaaagctaaggaaagcttctttccacccggtaaaaaccggaccgcttccgggaggccatttaangcaggccaaggtaaaaaagtgtaatattgcctnntgtaagtttttttacccgtngtttaaccttttccctngnantttnaaaa

SEQ ID NO: 134437 - DNA, 623 bp, Arabidopsis thaliana
  unsure (1)..(623): unsure at all n locations
gttcgaattccgggtcccccaccctccgcttggggaaaatccgttgcttccggagatcgtgaaacctctggaattcaagttaaccgattttcagaagccgcgggttaagccaacccttgattggttgccgaagggagggttccaccggaacctgaagaaagaccggaagagccgtcctgccgaattgggggatgttatgggattcaacccctggaaacccggcgaagaagtcccccgtggcggggctgttggggatgtcgggaagcgagaagagtaagaaaatgatggtgtcgtccggagcaatagggtatctgaagaagctgtcggagatggaagtaatgggcgccgataagcttctcgagaagcttggaaaagaggaaagctaagaagcttctttcaacccggtaaaaccgaacgatgccggaagacattgaagcagccaagataaaaagtgtaatattgtctgatgtaagtttattaaccgttagttaaactttactagtaattaaaaagtgttctttgggctgnnnnnnnnnnnnnnnnnnnnnnnnnnnnnnnnnnnnnnnnnnnnnnnnnnnnnnnnnnnnnnnnnnnnnnnnnnnnnnnnnnnnnnnnnnnnnnnn

SEQ ID NO: 134438 - DNA, 782 bp, Arabidopsis thaliana
  unsure (1)..(782): unsure at all n locations
gaaaaagccgaggcagtacgtgatgaagaaggtggcgccgagtaaggtttggccaccaatagctctcggagcgtcgatggcttgttggtacgaacacattagccgtaccatttgtctcctcatatgcaaacaccaccgtgtttggcaattcatcgccggtgtcttgacccgaaacaacaggactgtaaactttttaattgaaggtttcatgtgtcacacacacaacgcagcatggcatactctacataacattatatgtgggacaggaagcaaactcgatacgtatctagacatcgtacgagataaactaaagtgcaacgtgaccatcttccacggaggagacgacgaactcatccctgtcgagtgtagctacaacgttaaacagcgaattcctcgggcacgagttaaggttattgagcacaaagatcatatccctatggtcgttggcagacaagatgagtttgccagagagctccaagagatttggaagactttttcttgctaaaattatgtttgatgagagaacttgtgatttattaggattgttctatgtaatgggttggtaaaaatatttttaagagttttataattacaaattaaggaaatccttatgtatcatgagataatccaggaaatggagtattaaataaaaatttcgcatctgttttttatgcttcnnnnnnnnnnnnnnnnnnnnnnnnnnnnnnnnnnnnnnnnnnnnnnnnnnnnnnnnnnnnnnnnnnnnnnnnnnnnnnnnnnnnnnnnnnnnnnnnnnnnnnnnn

SEQ ID NO: 134439 - DNA, 655 bp, Arabidopsis thaliana
  unsure (1)..(655): unsure at all n locations
ggtcccggttccggattcccgggtcgacccacgcgtccggaaacggtgaatctggttttgggttgggaacaggtggttatgcagcaagaaacccaggggctaacaaggcagcaccatcctcttcattctcttctgcctcagcaaccaacaacacgggttatgatacagcaggacttgcagagttttacgggaatggtgcagtttatagtgaccctacatggagatcaccaactcctgagacagaagggcctgctccttttagctatgggattggaggaggggttccttcttcagatgtttcagctagaagttcatctccaggttatgttggcagttacagtgtgaacaagagacaaccaaacagaggaattgctacttagtacaatcgtttttgttttacccacgatattgtaggcgagccatcacggtgaacgatctgtgtcttttggcgaatcttttagattatcttcttttcccttcatacaaagccagtgaggccggaactgntcatatcatcacctagggctaaccagggatcccgcangcttttctgccatgggttggttccaatatccatggtcccccagggttttccgngtcccttttttccaatttggtcccttcccctcataagggggaaaaaaccgggcgnatc

SEQ ID NO: 134440 - DNA, 817 bp, Arabidopsis thaliana
gcaggtaccggttccggattcccgggtcgacccacgcgtccgcggagcttccacagtattgaaatcaatactcgacagagcttccgagcttatccgggctaataatttcaacaacgcagggatagctctatggcgcgcttcctttaatgagttctttaatatgttgatgaggtactgcatcagcaaatacgatagcatcatgcagagtttgcaattgccactcgcattttgccactgagatatctgaagaagctgcaaaagccattgtccgcgaaatgccaatagagcttctacgttcaagtttcccacacattgatgagcagcaaaagaggatacttgatggggtttttgaaacgatctatgctcggaagccagaaaaccgagccagtattaagttgataggatgaagattgaaacagtaaaatccaaaggaacctgtatggtgaagtctgtatatgaaggcataaagatcacgcagataccgcgggaagaaaggtagagagaatcggttcaaactttttctttttccatccgagagttagggttcttccttcaaatggacaatactggttttgtgtcttataggtaaaagcagtggagaagaagtttggtctctgtacagagaaaaaagtctttaggttttgcagaacttatgaagaggtttcaggcaattggaattctgtcctttggttaggtgatctcaatgtcggttcgaaaattggttttgaaaccctggttaaggttttgaaaaaatctccttcccttttttttaaaaaaaaaaaaaaaggcggccggtttaaaagaatccaggctaagg

SEQ ID NO: 134441 - DNA, 566 bp, Arabidopsis thaliana
  unsure (1)..(566): unsure at all n locations
gcagggtacccggtctcggnaattccccgggtcgacccacgcgtccggcgcttcaacaacttcggtggatcacatgttgctacgcctaagcagattagagatcttatgaaggtcgatggtttaactaatgacgaagttaaaagtcatttacagaaatatagattgcatacaagaagaccagctactccggtagtaaggaccggtggtgaaaatccacaacaacggcagtttatggtgatggaaggcatttgggtaccttcacacgatacaactaataatagagtttacgctcctgtggcgacacaaccgccgcaatcttcaacgtcgggagagagaagcaatcggggttgcaaatctcccgcaacatcttctactactacacacacaccacaccttcttcctctttcataaatatatagttaccgatttgtatgaaaatttgttttcttctttatatatttgttttgtaaccaaggatgttcgttctaggtttaagagttttgataaattgtancaataggtntncatngcacncaattggntaaangnaaaggtttngtnnaaaa

SEQ ID NO: 134442 - DNA, 561 bp, Arabidopsis thaliana
  unsure (1)..(561): unsure at all n locations
nnnnnnnnnnnnnnnnnnnnnnnnnnnnnnnnnnnnnnnnnnnnnnnnnnnnnnnnnnnnnnnnnnnnnnncttttttttttttttttatatgtaactcattttttttagcacaagacagtattttcacaacagcacatgtttcaaatggcacaatgagggtacaacatacactaggctactactatatctctttataagcttctacgagaaaaccccattagccaccgattataaacttttgctctctatcttcctcttacccgaaaagtaagatcaggtctgtttttaagtcttacttggcgtcaaacccgtccatagctagaacgtgaagagtagtaaccagtggaagagacagcggaaatgtactgccatgcaaaagcagcaatcaccagaaccataaattgcggctatccacggctttcatggaagtgtatacaagtggcattttcccaaattctgccacaaaccggtttacgcagtgtgttcttttttctgtgtgccctcctatgctactnattccagttgaaccgntttcatatnttttacctttaanccatat

SEQ ID NO: 134443 - DNA, 520 bp, Arabidopsis thaliana
  unsure (1)..(520): unsure at all n locations
ttgatttaaaaacagttggtggaaagcttactttgtaccaaacgaccctatgcgagagaatctcaggggataacattgatctcgggctagatctcgggtctcaaagctttttgccaacatacaacaaaaatgacatccagctgatatgctgtcaagctgatgcaagtnttttacggcctggcccctgacacagttgtgaccagattttattcaatcccttgactggggcacagatatggacatcacctttacttgggttcttaacagagaccgccctaaaggcaaggagactgtgaaatatgnaagaagtgtcgaccctcctggaccttccaaaacggtctgatatncaaatgggttcctcaatgggtcgattgggatggntttagggtgcataatttntaccccaaagttcttnccgtgtnacnngggtnctggnnnttgcaaggntttcggggggtnaaacgggttaaggtnagtcaggcatcttcttaccntgaaatttcaaggggnggngnaatcc

SEQ ID NO: 134444 - DNA, 744 bp, Arabidopsis thaliana
  unsure (1)..(744): unsure at all n locations
aactttgaactcccatgccccccttccttaacctggaatcctttaaaccggccgccctttttttttttttttttttttttttgggaaaaaaaaccacaagttattgagtaaaaaatgaattttacaatataaatagccttttttggtaaggtatgtatcacaacactttatttatagagttgggttacaatgtatggaaatgtaaaattgaagttttcacttggggaactctacattatttattcttcaaggcattaaccatgatacttgggtttccgtgggaatgatactctactctcgaagacgcaccattattccccaacacactgatctagctgacagaaagttaagaccacttcaatgtcatgatgcaccaccacaaccgtagaaacttcagccggttttaagcggctttccaagcagacaatggtggtgtctcagcgttcttgaaagttggtatcatgttactgtatctatctcctttcacaaaacctggttgggcaatggcctcaagctcagtcatctcttcaggagtgagtttcactgacaaagctccaatgttctgtttgagggtctcgatcttagtggttcctggggtagggcaacggcatctccctnggnggtgacccatgccagggntagtttncagggngaccttttttttccggtttngacaaactttntanaaanaannttttggggcaaggttccccctggnnttgnaggnccttttnagnaaccttt

SEQ ID NO: 134445 - DNA, 766 bp, Arabidopsis thaliana
gcggtcccggttccggattcccgggtcgacccacgcgtccgagaggacggtggaggagcaacatgggctttcgaagtagggtcaaagtctatggtgtgtccaattgtcgtagaagatataaacccgcctcgcattttccaagtcgagatgttatgcgagcaacgaggattctttctagaaatcgcagattggatcagaagcttagggttaacgatcttgaagggagtcatcgaaactcgagtagacaagatttgggctcgcttcactgttgaggcgagtcgcgacgtgacgaggatggaaatattcatgcaactagtgaatattttggagcagacaatgaaatgtggaggaaactctaagactattttggatggtatcaaagctacaatgcctttaccggttactggtggctgttcaatgtaatgacacaaattattgaccgtaccggattgctccggtttaataaaccgggctggttaaaagcttgattcatatagaggttacgagcggaccgctctcaaggattttaggctcgctatgactaactaaaaagtcagtctaaaccagagatgatgatttttaagtgtgtttttttttctcaactttatgttttgtacattagttgcgaattttcatttgtgtggaattttttaattttaattcagttttggagttgtaaaaaatttagaaaaaaagggcggccgctctagaggatccaagcttacgtacgcgtgcatgcgacgtcaagattctctatagtgtcacc

SEQ ID NO: 134446 - DNA, 581 bp, Arabidopsis thaliana
  unsure (1)..(581): unsure at all n locations
cgcacagtttgaagcgtgagggcagtccaaggatggtgaacatgaatgaaactgcaaaaccggctaataaccggaaaaggcttaaaccaggagagaacccaagaccaaggcctaaagatcgccaaatgatccaagatcgtgtcaaagagctgcgtgaaataataccaaacggtgcaaattgtagcattgatgcactccttgaacgtacaatcaagcacatgctctttttgcaaaatgtctccaagcattctgataagctgaagcaaaccggggaatccaagattatgaaagaggacggtggaggagcaacatgggctttcgaagtagggtcaaagtctatggtgtgtccaattntcgtagatgatataaacccgcctcgcattttccaagtcgngatgttatgcgngcaacgaggattcttttcttggaattcggagntttggttcnagaagnttagggttaccggttttttntgggggtcatnggaactncgggnggcaagntttggggntgnttcnctttttagggggnntcgggccgttccgnggnttgnattntttttcaccttgggttttttttgg

SEQ ID NO: 134447 - DNA, 617 bp, Arabidopsis thaliana
  unsure (1)..(617): unsure at all n locations
tcccgggtcgaccccgcgtccgggaggaagcactgacgcaactcagggaggaagcactgatgcaactgaggagggtttaggggttagccttaagccacttcaaggagaatgatcatatgaaagttaggactgttagggctctgggttataaagacgtttcctaacagtgtttaatgtcttatagggttatccgaaaggcatagtttgttctgaaacagtatgtataaaagggtactacgtaggttggctacgtaggtcgtcggtagtgtttctaggttctgcaatcgttttggtccacagcggagatgagatcgtaatgtagtcaatgctgggtatagtgatttggtgtatgccggattgctgggtttagagtttcattttgaaaacattatggtctgctcttgctggcttactgtttttctctaggatttctgtaagacttcagtttctgcaaaccctttacttgaccttaatgtataattaagtttttaaaaaaaaacnancnanannaataaatacaggggccnnttnnnnnnnnnnnnnnnnnnnnnnnnnnnnnnnnnnnnnnnnnnnnnnnnnnnnnnnnnnnnnnnnnnnnnnnnnnnnnnnnnnnnnnn

SEQ ID NO: 134448 - DNA, 619 bp, Arabidopsis thaliana
  unsure (1)..(619): unsure at all n locations
nnnnnnnnnnnnnnnnnnnnnnnnnncnnnnnnnnnnnnnnnnnnnnnnnnnnnnnnnnnnnnnnnnnnnnnnnnnnnnnnnnnnnnnnnnnnncttttttttttttttttttctttgaagcgggagattttgatttcttcatggattatacaaaactgaacagaaacaaaacaaaaaagagactaaaatccacaaagtcacaatctatttacatgatgtcattgggccatgaaagaactatatcttcaagctctgtaatcaaatcagaccaccgggaatcatcttcttcaccttcaacaactttcacttcaaccaccacaacatccaccgttaactccactgcttccaccacaatcacagttcttcctctccctaatccaacaaccttcacttctccttccttcttcatcatcttcttcttcactacataacctaacttctccccaatcatcttcgccttctcctccacttcaacacccgaaaccttcgccgggaatctcctctccttcttcttcttagcctcaaacaatccagaaagatctaatcccgacgataacgagatcaaatcaaaagcagtaatcgaattaacactcgatttcatctctactttcgaatcaa

SEQ ID NO: 134449 - DNA, 470 bp, Arabidopsis thaliana
tttaagaggaatcatttattgagtaccatgtagtgatcaaagcttatggaatcggtagcagagagggtaatgtatctgctggtaaaaagacaatgaagcgggagattttgatttcttcatggattatacaaaactgaacagaaacaaaacaaaaaagagactaaaatccacaaagtcacaatctatttacatgatgtcattgtgccatgaaagaactatatcttcaagctcagtaatcaaatcagaccaccgtgaatcatcttcttcaccttcaacaactttcacttcaaccaccacaacatccaccgttaactccactgcttccaccacaatcacagttcttcctctccctaatccaacaaccttcacttctccttccttcttcatcatcttcttcttcactacataacctaacttctccccaatcatcttcgccttctcctccacttcaacacccgaaatccttcgcc

SEQ ID NO: 134450 - DNA, 512 bp, Arabidopsis thaliana
ctatagaagactatgacgtcgcacgcacgcgtacgtaagcttggatcctctagagcggccgccctttttttttttttcttttttttttaatctcgaataaattttaagactccaaataagttaaaaggttttagctcttcttcatgtttttatatagaagaattgttctttgtgcttaaccagagtttgaacattgtctaaatacttttgatatagaaattttttattgaacccaaatgaggtaaacttgactctatcattcattctcttccggcccaaaacttctctgttctttccttaagacctctcttgacgttcgcgactgagcaagattactagtctaaactgacataaatctaagcgcagtgcgcatatcgtaagaattatttcaggtgaaaatgatcagagttcgtcgcgattctgaggtttgtcttggttcatcaacttctcgagcttctgttgtagatctttaagattggctaccaaacaccgagctggagtagataagatgg

SEQ ID NO: 134451 - DNA, 483 bp, Arabidopsis thaliana
  unsure (1)..(483): unsure at all n locations
aaattttnaaanaaaaaaangnacctnaacaccaaanggngggggntggttgggaaaanttggcccccttttncccctggtnaagaaaccnattggagcagnttttccnagcgancggaagccaaaaaccgccgtcttntctccntccgntcttaatccccaccgtttttgtaangcaagacgcagtctctgcggctgaaccgctgcaatctccatgaatcgatatactgagtctaggaaccgcagtgatgtcagacaccgatcttcgtcctggttcgatcataacgcttcttgatttcgaaccagagtctccgttttccgaggaaaacatagttgtcatcgaagttaacttgttctccaacattctcttcgcttccatctcttccttgattcgcgaagatacccatctgatcctcttcatcccctctcttcacatgatccaatgaagaaaatctctcgctagaaatcgaattaaccatctcg

SEQ ID NO: 134452 - DNA, 521 bp, Arabidopsis thaliana
  unsure (1)..(521): unsure at all n locations
taggtaccnnnnctatagaagattatgacgtcgcatgcacgcgtacgtagcctgggttcctctagaccggccgcccttttttttttttttgttaaaacatcataatatttttaatagttttttccgcggacaatgcggaatgagttcttattagacaagaaaatcacatatcacacgtcacacacaatcgcagaatacaaagtttaaaaaatcttcattatcattggattgatatcacagacccacaagtgctaacaccgaagttgtcattgctgtgatgaaaattctcctcaatatttcgtttcctttcataacgttaatagacgatgagccgcttggtgattgagaagttggcaaaccggttgtgtcatacttcaaaaaacatttagaaagatagaactgagcaaaacgagcattggtacaacagcctgagagacctttgaccacaagtctcaaacagacgccgcaatttgctggatcaagatcaggactacactgaaccaccgtgtctaatgtatact

SEQ ID NO: 134453 - DNA, 696 bp, Arabidopsis thaliana
  unsure (1)..(696): unsure at all n locations
nnnnnnnnnnnnnnnnnnnnnnnnnnnnnnnnnnnnnnnnnnnnnnnnnnnnnnnnnnnnnnnnnnnnnnnnnnnnnnnnnnnnnnnnnnnnnnnnnnnnnnnnnnncttcttttgtttttttgtatcactaataagaactagaaacctgtgttgtagcacgggtgctagtctaggtattattttatatgatcagcacaacattacaccattctttgtaagccttaaattcaaacatataggcaactaaacttcatagatcaaatatcataattggcactcaaattcaaagttagagcttcaccacaatgggacttctcacacgatgcttcttgtctgaccaaaccaattctccaaacacatagcccttagccacatttcccttacttttcacaaggatcactttaaacgtcttttgctctccaactttggtgaaattcaagctcgttggcttcaccgcgacataaacaccctgtgggttattcaccttgacggtatacatcgaaggtcgtccaacgtttttggcagtccttgaaacggtgactttgcttgatgttaagtttggaactgtgatggaaggatagttgaggttatcaagactggttttagggcttgaacaagtaaaaataaagcccgagaagacagagatttgtaatgcattgtatccacggacgcgtgggtcgacccgaaattcaag

SEQ ID NO: 134454 - DNA, 658 bp, Arabidopsis thaliana
  unsure (1)..(658): unsure at all n locations
gattctannnnnnnnnnnnnnnnnnnnnnnnnnnnnnnnnnnnnnnnnnnnnnnnnnnnnnnnnnnnnnnnnnnnnnnnnctttttttttttttttttttttgatgtgatcaaatatgataaagaagagagttgattgatagtgataacagattcaattgggggatgcaaaatgcatctcttaaaaattgggttttgttcttttcggataaatcgaaaagaagctgtgaatctagacattgttggcggtggcggcggtggcatcaatgtctaactcttcggattctgaaagaatgtgcctaacttggtttgcaagatctgtgacatgtttatctttaaacccgagttgagcaagagcctcttcgaggttgaagagatagtcccctggtttggcccctgaagggccctttccgcctttaaccatcctgtttcggcaatatccttccaagagggagcctgggcctaagtagttggttggtggccccccctggtcaggggaagcctatgtacaccattactcctgcaaaaccgggtcccaaggattaaaggccagggaagaatccagaancccttccnganaaaangggtccccccccnccaaannnaaaaagaccccttaaccccccctaagaacctgaagaaccccaaaatttctgggg

SEQ ID NO: 134455 - DNA, 506 bp, Arabidopsis thaliana
  unsure (1)..(506): unsure at all n locations
nnnnnnnnnnnnnnnnnnnnnnngtcactgcacgcgtacgtaagcttggatcctctagagcgtccgccctttttttttttcttttttattacagggtgcgtagttaaacatctatattacatgaactaaaccctttaaaaggaaaaattaaaattaacggaaatgcaaaagaaaagaaaaaaaataaaaatctctggaaaaaagcttgagccagaaataaattttattataataagctaaggttatttatttgtctttttagtaaatttcatcattttttccaccaaaatgtttggaaatttccttatccccaaactcccaaaaatctctgaccaatgaaactcataacctttccaacggagcctttctccttctccgcctcttcaccgccgcaatttccatctttctccgagtcaccaccagcaaactcggctgaactcgaacccaattcactgagtcgactcgttcctatcgagttaactcgtccagaagcttttcccgatcgc

SEQ ID NO: 134456 - DNA, 557 bp, Arabidopsis thaliana
  unsure (1)..(557): unsure at all n locations
tggggacnnnnnnnnnnnnnnnnnnnnnnnnnnnnnnnnnnnnnnnnnnnnnnnnnnnnnnnnnnnnnnnnnnnnnctttttttttttttttttttttttccacctcaaatttttatggtttatcattaagattcaagatggattatcagagactgaaataatagcttgtagatcggcgagacactccgccggaagagagaggaacgtgttcataaacaaatcgtcgatggtctcaactttcgcgacgccgacgagtctacactttccttcttcgtccagtctctctcctttccctctctggttctctcctatcgatccctccgtcgtcaacacagttctcaccaccaacgccggagctctgtatatccctcctcccgccgggaaaaagaacttcggccataaactcccaattccaccttcccgggattctggggtgatagttcctgggaaaatctccggggagataccgatttttagaaacggtggcaatggaaagcggggaaattcggggtttggcaattgananagggatntaaangggggcaattgaanaana

SEQ ID NO: 134457 - DNA, 620 bp, Arabidopsis thaliana
  unsure (1)..(620): unsure at all n locations
cacactatagaagattatgacgtcgcctgcacgcgtacgtaagcttggatcctctagagcggccgccctttttttttttttttttggagaaaacaatcagagctcaaatatgtgtcaatgacttaaaaactgttattttactaaaaataactcagagctaatcacaacctgaataaactgaactctaccaaatcaagtcctcttctgttccaaagccagtagcttggaagttagaacctttaaagcattataaacatctcacaatttctacaggtttccatctgagccagctgcacaaaagaacccggaattctcatcaacgttttgaactctgatttcttgataatggcgtgtcatggatttctggggaaaccgacgccgaaatcatttgggcgtcatcataaacatgcaaggaaaaaccggaatcatcaatccagatgtttggctgcagccgttgcagcagctggctccatcttcacatccctcaacatgtcatcttcacattccacaaccgcctcttgcgtggcgtctccaggtttttgcggctcgccaccacatctagggaatcctaccggggccncctgaacagggacaaaanccnaaccgggcctgtagcgatg

SEQ ID NO: 134458 - DNA, 619 bp, Arabidopsis thaliana
  unsure (1)..(619): unsure at all n locations
nnnnnnnnnnnnnnnnnnnnnnnnnnnnnnnnnnnnnnnnnnnnnnnnnnnnnnnnnnnnnnnnnnnnnnnnncttttttttttttttttttatcaagcaattttttattttagtgaaattccttctgatgaacaaaacctttgtacatgtcatttgatcaatacaaaggctcatggtttgaggggaaaaaagaaagaaagaagcagatgtaaatatcgatactagtagaataaaacggaaaatgcccaccaatacccaaatacaattgatatacaaaatatatgctccacgaattaacccgaggtttacaaaacatgatgatttctccatctaaagtttgcttctacttgcacttgctagatgttgggtaacaagaaagatgagtttggtggcattggtcatgaagggaaggtgccaaagaagatgccagtggcacctatgagaattaatatcataagtacgtgcaaatctccatacgtattatattagctacagaatgcatgggaattgcnggngngagcctagtcnggtggtagaaagcatacctccccaggacaatgaataggggcnggggngngcccngnggggngacttccctgaccggccggggggcacgtg

SEQ ID NO: 134459 - DNA, 503 bp, Arabidopsis thaliana
cgcgtcacgtaagctgggatcctctagagcggtcgccctttgttttatttccttttttttttttttttttttgggaagccacccaaatcttattattccttgcaaaaaaaccggttcacaccctcttacctggtttccgatgaaagtggggaaaacctacccgaatcagtgtaaaccccaaaaaggaaaccgataatactcctcctctggagcagccccagcaggtaattggggccattcctcattgcttattggccttatgcgggatgatcctactttcagaacaactttcatgaactcgtaaacaaagtaactgattgccccggaaggcaaaacctgcaataagccgggaatcaagcccgcatattgagcaggaacacccccttggtcaatgatcttcacacaagtagcccactgcgcttaaccttttagcatgtgactgcatttgtaaaccccttctcacaacttaaaacggatatttcgctgctcggaccccgtgggtc

SEQ ID NO: 134460 - DNA, 646 bp, Arabidopsis thaliana
  unsure (1)..(646): unsure at all n locations
tncagncggggtccntttnccccggttttnaaaccaaccggtgaattgggacgctnnttggnggttaccgtttcattgtttgggcagtatttgcctccattngaagcgtnccggttgggatgggcccagtatacatggcattcctggagattcatgggggacgaggaagatgcacggggctacagctacagcttagaagtgggaggcccttgggaggaagctaacatgggaaggaaccccaagaagcatcagagatagccacaggaaagtaagagacagcaacgacggtctcatcatccaaagaaacatggctctctttttctccggtggagacaggaaagagcttaaacttagagtcactggtaaaatctggaaagagcaacacagtccagattctggactttccataccaaacctatcttcttacctgatcattcttttatctttttgttttttctctctttgagaaggaatgttgtatgatgattcgtttgcactcttcttctttgtctgtatctaaaacatatcatgaatgaatgtttcatcttatagtctcatattttggcaaaaaaaaaaaaaaagggcggccgctctagaggatccaagcttacgtacgcgtgcgatgcgacgtcatngtcttctatag

SEQ ID NO: 134461 - DNA, 521 bp, Arabidopsis thaliana
aggtaccggtttcggattcccggctcgacccacgcgtccggccgcccttttcttgtagcccatctcagggatgatcataaagttgacatgcacgctggttccacttttaaccaccgctatgtcaaatccaatccgcgtgaagtagagaacgctacttggatgctaaccgtattccattgctttgggcagtacttctgcctccatttcgaagcgttccagcttgggatgggtccagtatacatggcattcctgagattcatgggggacgaggaagatgcacggagctacagctacagcttagaagtgggaggcagtgggaggaagctaacatgggaaggaaccccaagaagcatcagaggatagccacagggaaagtaaggggccagcaacgacgggttctcatcatcccaaaggaaccatggcgtctctttttcttccggttggggacaaggaaagagctttaaactttgggtcccctgggtaaaatctggaaagagcaacacagtccagattctggactt

SEQ ID NO: 134462 - DNA, 584 bp, Arabidopsis thaliana
  unsure (1)..(584): unsure at all n locations
cgcgtacgtaagcttggatcctctagagcggtcgccctttggtttaaatccttttttttttttttttggagcaaaagggaagatgggataaacattataactactagacagatagagagacagacattaggcagtattggatgtacaactgaaacgactaaacgacgacgggtttataaaccatataatcctccaccctcaacaaatactttttctttgggataaagaaagataaaaaaaataacctgaaaattaaagaggtttctaagcagaagacaaagggaattcttcttatatatttaagagcttaaaactagataagcccaaggaacaatgcttcttggtggcgggccaatccaaagatcgtttaagggcgactcactttccccacctccaaacgcatgccccggatagtggccccaccagtctgtaagggtgggggttcaccccctctggcaatgcctgtaaagctgaaaagggtttggagttagccaatttaagganccggnggccccacgtgtnccaccggnacccggttaaaagggaatggcatnccctcaacagcttgnggccccnaggnaaac

SEQ ID NO: 134463 - DNA, 686 bp, Arabidopsis thaliana
  unsure (1)..(686): unsure at all n locations
acaaaatctaaccctcaagacatcaaatacagggaatgaacattcagggatttcncctttttggtggccatgagctgtatcttactattgatgtctatacnccatagtaaatcgaaagaaaaacaaagggacaaatcttttattaaggagttgaatatatctagttttcagctatgaaaccaaaaactgaaagcaggagaaaagttgttaaagcaggagtgacgagccttggtcctgcgctacaacacaaaacattcacatgtaaaaatgcttttctcgactatgatgattgtttacctttaacctcatcaatggggccaaaatgtctccgcattcctttagcctcaatgttaatacttcagtaacagacagttgcgtcttcaacttgtaacttcaatttgctcgatttcattatcgctgtaatctccccagcacttgcctccttgtcgttctccatttttctcatcacaagtctcatgtgatgtgggttccacttcacctaactgtcgaatgtccattttcaggngaactggagttcctgnccaacgggttcggcaacctcncaggaattttggcggtggtgggttcttcctcgggtccgggctcnccccagnggttcagacagggaatccccggaaaaggcacctgggggngaanggcagtancgggancccgnacgggggagc

SEQ ID NO: 134464 - DNA, 485 bp, Arabidopsis thaliana
  unsure (1)..(485): unsure at all n locations
acccacgcgtncgcgggagtgatggaagcccttcttctagcaagaaatctggactccagcaattaattgaagcctctgtagctaacgaggaatcagtttggaccaagtacttcaatcaaattttgacggttgttcttgaagtgctcgatgacgaagatttttcaatcaaagagcttgctctttcattgatttctgaaatgctaaagagccagaaagatgccatggaagactctgttgaaatagtgatcgaaaagctgcttcatgtctcaaaggacaccgttccaaaagtttccactgaaggctgagcaatgtttgaccccagtcttggtcccaatacggtcccttcagatgcttaagcggttattgtcccccttattggtggccggaggattggaaacactttgtccgttgcataaaattgtttaacggggcttgtgggtaggctctcgcaagaagattaatggatcatttgtcgtcttttttgc

SEQ ID NO: 134465 - DNA, 490 bp, Arabidopsis thaliana
  unsure (1)..(490): unsure at all n locations
cgcgccgtaagctgggatcctctagagcgttcgcccttgttttttttttttttttatgtagaaaaaatttagatagaagtgaaagtttccggttacaaaactcgaagggtcaggaataaaacattgtcacacacatgaaaacaaaaaaatgtgagatcatactgaatctttatcacatttctactaaggttttctgtatcgggataacagaccggagcacaccaaagagcaaacatcgaatcaaacacgcgcaaagagcagaagaaagaagaaaccaaagctggctgcttttgcagccttttattgttatcattttgtgttagcgtacgattatttcaatgcttttgctgagttcctccagctttgtcatccgcagtttctcgctttccggtgaccanctccacgancttnccaacaaatatanccttccccttngnccttncattnnnacctccaangccnccttnaatcccccccccttccccnaaaa

SEQ ID NO: 134466 - DNA, 476 bp, Arabidopsis thaliana
gaccccgcgtccgggctctgcctctgaccattctcggaacggtcaggtcactcacgcgtcctcccttccgtctccattcactgccactggcctcgagagagcgtgcgttccacgcacctagttcctttggttcgtcaggctcgaccaccgaccagacatcctcttccatgagctccagctcaaaggttgcctctctcgtccacatgatggtcatcggactgctgatggctcccaagaaacctctcgcttcgactaatcgctgaaggtggggtctatttatatctccgcatgggaaagcacacaagatatgtcgcaggtcagctgttcgacacgtgttcactcattgcaagcaggcccaactaattttggtctattaaacgtggacacgtggcctaatctgaacccatcattaggcagattgagaccggactccaccagggtgttggtggattggagagggaagggctacgatggag

SEQ ID NO: 134467 - DNA, 580 bp, Arabidopsis thaliana
  unsure (1)..(580): unsure at all n locations
ctcctntntcgccggacgagtcgcgatagtgaccgggccttctcgcggaatcggacgagctatagccatacatctcgccgagctcggcgccaagatagtcatcaactacaccaccagatccaccgaggccgatcttggcgccgcagaaatcaactcatccgccggcaccgttccgcttccgatcgccggcgggttcctcgccgatatctcagaaccaagccaaattaagtggtctcattcgacgcgggcggaggaaagcctttaacctcgccgggttcaacatcctagttgaacctcagcctggaattcttcattcccaatttacccctaccttcggcaaccactccccatttgaaggatttcggttcagcatcttcgaaggcgaacaccaaggggggtcatttcttatgctggaagagaagcagtcaaaaaaggcttaaaccggggggcggtgggagggttttacttgctaaggngggngttaaccgggggggttattccgggggaangggttttnaaggttaaagggagtttttttaaaaatgggaggtttttnttgggcttaagttttggntnntgc

SEQ ID NO: 134468 - DNA, 671 bp, Arabidopsis thaliana
  unsure (1)..(671): unsure at all n locations
accnttanncccccccccctttggggnaacccttgtccccccnccngggtcccgggcccgggattccccgggncnccccccggggcccgttactaactttgagataaagtcttttgatggctctgcaaatcctcaccttggtttggctgttataatggctgctggtattgatggtctccggcgacatcttcaacttcctactccaatagatataaatccggcggatgtggctgctacattgaacagacttccggaaacgctctcagaagctgttgaagctctggacaaagacaaagttctccacgatttgctcggacaaaagcttttagttgccataaaaggagtccgtaaggctgaggtcgagtattattcgaagaatccggatgcatataagcaactcattcaccgatactaatcctttgagcatctctatgatgattgttggatcatttggttttattgtggactttgtgtcacatgaagggtcgtatttgcaaaatacttgacataaagatgtggttcagaaaattaataaactaaatttcatatttcgagacgcatgctcatgctggggtactatttgtatttcttaccttttcgtcccatgctttcaaaagccagggttcaagaatatacagagtattttcaataatacggagtagttcttaatc

SEQ ID NO: 134469 - DNA, 488 bp, Arabidopsis thaliana
cgcgtacgtaagcttggatcctctagagcggtcgcccttttttttttttttttttaaatgaaccactgtttgctttttcattgctgttgaaacattatgcggggttacaaacaaacatatgcgtggacccttttagaggggaaaataataatatgcggatcgaaaaacatatgcacaacgtagtagaagcgtcgtccctttggaatgtgaccgcgaggagtaacagatgcagcaattctctcactatcaaaatcctatggcttcataagcttggccccgaaggatgggcttaataagtcacagcttccccttacacaacgtcttgcgtgaatgataccaccagctctgcctttttgttgaacaattttgcaggtgcaaaaccgtggtttttggtcgccggtggacttactttcacaatcaacaaccaatcatttggtttttacagggcgggggaaccacatctatttggtccaggcttaagagccagc

SEQ ID NO: 134470 - DNA, 606 bp, Arabidopsis thaliana
  unsure (1)..(606): unsure at all n locations
tttttgaacgtccctggcccccttccttaggctgggatcctttaaagcggccgcccttttttttttttttttttaaccattaattatatataattctttataaaaggctaaaattttaaagagtctcaccaccttaaaccacttgaattagtattcctaacaaaataaaaatacacataatagttacaaatatacgaacagaatcataaaagacatttctccttgaggctaacaatagtgtctctaaggcttgatttcataggagtgaactctactcccaaatttttcactttctccacacacacttggcatatcatctcattcatctcactttcttcattcgtatcagcaatagacaaatctgggaacagcttccgaagaatgtctataatgtcgtttacactcatatttggaccatcgatgatgtatctgccattggctgaaggagtctccaacgctttgatatgaaccaaggcgacatctcttacgtccgagaacctgtagtatcttttaattgaaaggggtcttaccatttatgaaatccncaattagccnaccgncatgtaagagtnggtgcaagaggggccgcaataatccnggtcacnc

SEQ ID NO: 134471 - DNA, 544 bp, Arabidopsis thaliana
  unsure (1)..(544): unsure at all n locations
gtgacactatagaagagctatgacgtcgctgccgcgtcgtagcttggatcctctagagcgccgccttnnttnntttttttttctttttttnggtatgacaccaaccatctttatatgattttccattctcgtgaaaatttgagaaacagtacacaaagagagaagaaataactatagttgtcacaacttgtcaacttaggacagtttcttgaaaactcactcactcgcatctttagttgttcatatatgcaggaggaggtcctcttagcctctgaccgttctcattcagccactctttttctctcagaaatctaagaaacggtccgggatcgtcactgaagccataaggatttgttgtgctttgttgaacgttgccgagcttctctcctctagattcatggtcttccatgtagagctgagggtgaaacgttgagttttgagaagaatcgtttggtgtcccgtacctagctaagagactgaacttggaagagccatgagccataaagtttctcaaattgtttgttccctgagcttgataggaata

SEQ ID NO: 134472 - DNA, 571 bp, Arabidopsis thaliana
  unsure (1)..(571): unsure at all n locations
cgcctgcaggtaccggtccggaattcccgggtcgacccacgcgtccgggataataatagtcacggatcttataaaaaagacttgaagcagcatatgattgtcactcgaacatgaatgagagtctcccccataatcatcgctcacatgtcggtagcaataactttgatatgagttccacgactgagaacaacgctttcacaaaaccaggagctccaaaagtaagctcagcaggatcttcatcagtgaagcattcatcgtttcagcctttaccctgtgatcatcataataatcatgcctcctataaccttgtccatgtcgctgagaggaagaagctaccgccacaatgtggatcctcaaatgtgtacaacggaacggtttgaaggtaacaacaacacagtggattacagtgtgaatggaagtgtatcaggtagtggtcatgggagtaatgggccatttggaagcagtaccgggatgaatgctggggggatgatttggggagtggtaatgggtntnggaaaatggnatggnggtgnaggtgnaccggngtggangtggtccggaacttgggggt

SEQ ID NO: 134473 - DNA, 570 bp, Arabidopsis thaliana
  unsure (1)..(570): unsure at all n locations
ccggatcgaccacgcgtccgctcaatggagtaccacatttcagccatccacacacttctaaaactccaacagattcagccacataaaagctcagattcttcagtaatctgctcaggttgtgaatcagccatctctgaatccgaaaccgcgtatatctgttcaacatgtgacttcaatcttcatgagcaatgtggtaacgcagtgcgtgggatgcaacatccttctcacgctggtctccaccacttgactctagtcccttacacaacttacagcgctggtaccttcctctgcagagcctgtggctgcactggaggtaaagggttctcttactgttgtcctttgtgtgactttgaccttcatgttcaatgcgctcacctgcctcaggtcttggttcatgagtctcatcctatgcatagtcttcttcttgtctacaacagaactcctcctatggcttttactcagtttgggtttcgggaatcaagtttgtttgaancnttgnaatatgccnatggatggaaggttttggctncaactgtatgnttgaacntnaaatcatgntcaagggtggtc

SEQ ID NO: 134474 - DNA, 817 bp, Arabidopsis thaliana
gcaggtcccggttccggattcccgggtcgacccacgcgtccgacagtccaaacactgatgggatccacgtgcagtcatcatctaccgtctccatcctcaactccaaaatctccaccggcgatgattgtgtctccatcggtcccggcactaacggcctctggatcgagaatgtcgcttgtggccctggcccatgggatcagcattgggagcttgggaaaagatagtgtggaggtaggtgtacaaaacataacagtgaaaacggcgacggttacagggaccagagaattggggtgaggaataaaagtcatgggccaggcccagtaatggatttgctaagaatatccgtttccagcattgtgttatgaacaacgtacaaaacccaatcgtcattgaccaaaactactgccctggcaacgaaaattgccctaatcaggtttctgggataaaaatcagcgatgtaatgttcttcgatatacacgggacatcggcgacggaagttggagtgaaattagactgtagctctaagaagccgtgcacgggaattcgaattccagatgtgaagttgacggaccggaataaaccagccaccacagattgtagtccccctggaggtagttaggcaggatttcaacggccccacagttgtttatggccagaaaagaaaaatatttgtcttctttttgttagtagtgtaattgtaaggaacgtcggattttcatatataatacggctttaatcccggaaaaaaaaaaaaaaaaaaaaaaagggcggccgctttaaaggatcccaggttacggaagggggccagggacgtcat

SEQ ID NO: 134475 - DNA, 470 bp, Arabidopsis thaliana
ccgggctgacgtcacttaacagtcagatgtttcacgtcgcgattaacggctgcagtaacgtaaagctcgacggagtcaaagtttctgcagacggaaacagtccaaacactgatgggatccacgtgcagtcatcatctaccgtctccatcctcaactccaaaatctccaccggcgatgattgtgtctccatcggtcccggcactaacgggcctctggatcgagcaatgtcgcttgtggccctgggccatggggatcagccattggaagcttgggaaaagaaaagtgttggaggtaggtgtccaaaacattaacagttgaaaaacggcggcggtttacaagggaccaggggattgggggtgaggaataaaagtcaggggccacggcccagtaatggatttgctaagaatatccgtttccagcattgtgttatgaacaacgtacaaaacccaatcgtcattgaccaaaactac

SEQ ID NO: 134476 - DNA, 581 bp, Arabidopsis thaliana
gcacgcgtacgtaagctgggatcctctagagcgtccgccctttttttttttttttttttttttttaatttaagggggggttaatttaatgccaaaccagaaataaaccagagttttttctaccaagctcggtacaatccggttccggccttatactcttaatatatttcttataccaaaccggggctgtgtcctatggaaatcaccaagatccaaagaatctaattttaccagaacctaatcaagtttcaaaccggttcaagcatagaggtttcttccacagcgatcacactcggttatatgagaaaccggagttttaccggaattgattttcagcagatttggaagatcgagctcgaggacatcgtgaagagcctcagatccttctcggagttcatcagagcttatagagagtggtggagttaaccggacaatagtgttgtgagtaggtttagccaagactcctctctccttcaagctcaagcaaatatcgtaagctgaaaccggggacaactttcgctattgaactcaatcgcattaaacaagcctcttcctcgtacttcctttatgtacttcggaaac

SEQ ID NO: 134477 - DNA, 563 bp, Arabidopsis thaliana
  unsure (1)..(563): unsure at all n locations
gcaggtaccggnctcngaattcccggctcgacccacgcgtccgagtacacagccattgttggtccaagcgggtcaggtaaatccactataattggcttgatagagcggttctacgacccgttaaagggtatagtgaaaatcgatggtcgcgatataaggtcgtatcatctgagatcacttcgtcgacacatagctttggttagccaagagccaacattgtttgctgggacaatccgagagaacatcatatatggaggagtgtcagataaaatagacgaagcagagatcatcgaggcggcgaacgcagcgaatgctcatgatttcatcacgtcattaacggaagggtatgacacatactgtggagacagaggagtacagttgtctggtgggtcataaaccagaggatcgcgatagctagcagcggttttgaccaaaccccgtcagtgttgcttctacacgaagcggccaagcgctttgtgccagccagtacggaacgtgttggtcaaaatgctttcggcggtnttttgntnaggnnggccgngtttggtatcccacatagggtt

SEQ ID NO: 134478 - DNA, 644 bp, Arabidopsis thaliana
  unsure (1)..(644): unsure at all n locations
gcctgcaggtaccggtctcggattcccgggtcgacccacgcgtccgaatctttggccaagcaccatggcaacaaccatgaagactgccatctctggcaagactgcgggtctccagaagtctggcgtgaggcccgccagggcctccgtcaagatggaggttgtcgccgagaagaagctcagggtggccatcaacggcttcggccgcattggtcgcaacttcctgcgctgctgggagggcaggtccaacaccctgcttgacgttgttgctatcaacgactctggaggtgtcaagcaggcatctcacctgctgaagtacgactccatcctgggaaccttcaacgctgacgtgaaggtggtcgatgactccaccatctccgtcaacggcaagcagatcaaggttgtcttccagccgtgaccccctggccctgcctttgggctgacctgaacatcgacctggtcatcgagggcaccggtgtcttcattgatgtcaagggtgccagaagacattaagggcggtgcaagaaggntttattacggccccgcaaggcaaggaatcccaacttngtttttgggtaacgcacgggtaaagacgggtcccatatttcaanggttnacacaatatgccttgaagttttggggnggta

SEQ ID NO: 134479 - DNA, 542 bp, Arabidopsis thaliana
gcctgcaggtaccggttcggaattcccgggtcgacccacgcgtccgcgttgaaagtggtgaaaccgaaccggcacgagacactggagaacacgtggaacatgataactgaggagggaaaatcaacgccgttgacttgtcattaccggaaaaccagtatgtctggacttaacgccggcggcgatgtaaaacctgtcttgaggaaagcggagacgttcagggacgtgactaattatcgacagtcgtctccgacggtgacgtcaccggtgaagatgaagaaggagatgtcgccgagtagggaggagctgaatcgaagagtagaagcgtttatcaagaagtgtaaggaagagagattggagtcgctaaaattggagaaataagtggcttaattaaacacgagattaattagctttttgtcttaataattaattgttaatcgttttttactatttaaatgtcttttatattttgtttttttttatatggactccaagtaatgaagcaaaaagagtatttgaacccataaaacatctaatcgagtttt

SEQ ID NO: 134480 - DNA, 644 bp, Arabidopsis thaliana
  unsure (1)..(644): unsure at all n locations
gacccacgcgtccggactcatctgaaaaacacgatatttgcagtcgagaggtgatacgcagatcaactatatgtgttttgggttctgtgtgtcgagtggtttatggtgattttggattcggaagaatcgttgccatgaatgggaatacttgtaggaaaggttccgattggggaatgtaaagcgactgtagtttacatgtccggttacttaccaggagctgcgtcggagaagtccccgattctctcccctgttcccgtgcgtttatccgcggctgttcacggtggagattcgtaggaaagatgtatgtcggtggtgggttgtggattcgctatggctatttcagagaaaggaaagcttataacttgggggtctacctgatgatgaaaggccagagctatgtctgcttctggagaagcatgggggaaactccagaagccgtttcctcttcctacggaggctccantcgttcaaggcttcttcaggattgggacattttccggttttaacanagccttgtgagnatttcctttggggtgaagnagtcattccnaaagatcccctttgaaanagnaagtgntaatnagccncatncaaggtcaaatcggttntgncgcctnanttgnccaagtggggnctttacgggg

SEQ ID NO: 134481 - DNA, 546 bp, Arabidopsis thaliana
  unsure (1)..(546): unsure at all n locations
tgccaggtaccggttccggattcccgggtcgacccacgcgtccgggatcatgttgaaggttatctcgagctgtcagcaaagactaaaacttactttaccacggcttttgcaatgtgggatgcagacttctacgtcaaagtcgatgatgatgtgcatgtaaatatagccacgcttggagcagaattagcaagataccggatgaagccccgagtgtacattggttgcatgaaatctggacctgttcttgctcagaaaggagtgagatatcgtgaacccgaatactggaaattcggagaagagggtaacaaatacttccgccatgccacaggtcagctctatgcaatatccagggagttggcgtcttacatatcgataaacccaaacggtacttcacaaatattgtgaatgaagatgtctcttttagggatcatggctttctttgggtttagatgtggagcatgtacatgaccgtaggctattgtttgtgggtcaacagcattgtgagtggaaggcgcaggcgggaanaacttttgtttccncggtcgg

SEQ ID NO: 134482 - DNA, 604 bp, Arabidopsis thaliana
  unsure (1)..(604): unsure at all n locations
gcctgcaggtaccggtttcggaattcccgggtcgacccacgcgtccgggaagtcgcttggaattcagttaagctcaatgaggttttccgatcacctgggccttgacaacgcctctactctgaggttcatctcctcaagaatctcaatcacgaatccattattcggtactgcacgtcttggatcgatgtcaaccgcacaacattcaactgcattactgagctgtttacatcaggcacccttagagagtgtagaaggaagtatcaagaggttgatatccgggcaatcaagagctgggcacgtcagatcctgaatggtcgtgcttatctccatggacatgatcctcctgtcatccacagagacctcaaatgcgagaatatctctccgttgatggacaaccttgggcaaagttcagattggtgacctggggcttagctgcgatttcttcgtggatcacagaatgcgcacagcggcatagggaccgcctgaatttgttggaccagagctatatgaggagggttcaacggggtttttgcaattattcgnttgggatgntgtgccnngnngtggttcccgtgggnntcctnntgngattaccnacccctnc

SEQ ID NO: 134483 - DNA, 526 bp, Arabidopsis thaliana
  unsure (1)..(526): unsure at all n locations
nnnnnnnnnnnnnnnnnnnnnnnnnnnnnnnnnnnnnnnnnnnnnnnnnnnnnnnnnnnnnnnnnnnnnnnnnnnnnnnnnnnnnnnnnnnnnnnnnnnagacattaaattcagagtttttattatccacgaacgtgcaaccctcacgaaagtctttacaacaagagtcccaataatcaaacgtaataagaaaaagtgagtaaaataaatccttgataggcataacaaaagcatccataagaaacctaaatgagcaaatcagtcacttggtaaaatatgcaaaacaacaaaagatgacttagacttgaagacttagtagtagtactggtacattcacacgtaccttcccttccctgtctgtctctgtccggggaatcagtgatgtccccacgtcatcaatcattcaggcaacgattgggccccggcattcaactacggtccccccctggtcaacctcccggtagttggtgtcgttgtactcctgcatactatcatcagggctctcctttcccggtgaggctgtggt

SEQ ID NO: 134484 - DNA, 427 bp, Arabidopsis thaliana
  unsure (1)..(427): unsure at all n locations
cggaaaaggtaggcatactccggagaaagggcataattgccaaataaggggtctttcccagaaccaagtctccaaagaaagcaaatagctgttctgcttgatagctttctcaaagtgcctctacctgataaccttctggcaaaaatgtagaggagaagcagagacttgatcagtggtctcagtttccatcgcatcagcatccatggtcatctaaaacatatacagtagatttacgaaaaaaacctaactttttaatctggaaaatgaaccacattcatctnataagctctacctaatgcccagcaattcttgaaatgcttccaatatagagctaatgaagccagcaagaccgatttccgaaacagtcttctgttcgagaataacagtgagcggcgttgtgatctcttcttccttccccggttcatgg

SEQ ID NO: 134485 - DNA, 658 bp, Arabidopsis thaliana
  unsure (1)..(658): unsure at all n locations
nnnnnnnnnnnnnnnnnnnnnnnnnnnnnnnnnnnnnnnnnnnnnnnnnnnnnnnnnnnnnnnnnnnnnnnnnnnnnnnnnnnnnnnnnnnnnnnagttttgcaaaccgcatgcatgtgatattacaaaattcacggtgaattcgtaatgcgtcttggttcaaaatagaaagagactaaacattccagatttcaattctcagctacagaaatgagtgtttaacggatacagaaacaactctcacaatcttcattcatttcatttagctactactttccaaaggaacttcaacgcatacctttttcctctccagaagatcatgtttgtctgcactctcgtttgcctcagtatctttctcctgatgctcttcagatatatgttccaatttcgaacaatcaacaggatcaagtccgggtcttttcctctgacggaatcacagtgaagaaggctggtttccagtccctagtctccagaaacttgacgagtatctccaaaacttggttcacagtgagacctgagactggaatttcanaaancccnaggggagntagcngnttaagcctggctgagcctggcagggggccttgaccggtngncccagcccgaangagagntagggngtnccaaagttgacncggggaccaatttttgggcgggg

SEQ ID NO: 134486 - DNA, 474 bp, Arabidopsis thaliana
gacgtcgcatgcacgcgtacgtaagcttggatcctctagagcggcgcgcctttttttttttttttttttttcataggaaacgagttcttattttggcactcaaacagtttatatcctcaaggggacacacatttttttcccatccagatgggtgtaaaaggatacacactactttacatagaacggcgaagacactaccaaatctgacatatatatatatataaggtgagtgcatctatatactctactgcggatttgggggacgactattagcagcagagactctagagccccactccaaaagttccttgcttgtatcgtctttgtgcactatcacttcaatgaaacaaaagctctctttttcctcattggttgccgggttgattgctttcactagctcctcctcgcatctcaccttggcagtccagcattttccttctccattgggtatgcctcaaaaaagctgtgtagttc

SEQ ID NO: 134487 - DNA, 810 bp, Arabidopsis thaliana
tatagaagactatgacgtcgcacgcacgcgtacgtaagcttggatcctctagagcggtcgccctttttttttttttttaaggcattggtataatttgaggcatatttaaaagcgatatgcacgttaaaccaataactttttattatttttactaaattaaaataaagcagttctatctaataatattacaaggcatgctataaaaagaaaatcacattgttgccattttgcagtaattgcagcgatcctatgtaatctatgaaccggctctaaatatgttgtatcacatttggatacaaaacatacaccagttttccaaaaccatattatgctgcaaaattatttaatagttgattcaacaaaatcttgaatcattttattgggttggaccatttgttaatacgagcacttgctttctgcgcctctttttcccagtcacatctcattgtgataaaacttaagatcatggtttgaacagcggttcctccaaaaatcataccaccccaaattcccatgacaccgagtttaaaaccccagcccatgagaaacccaagtggaacaccaatgcaatagtaacatcccaagtttatatatgccacgtacgattgccaacccgatccaaccgccacaccggaaagaaccggttgaacgctgttaagaagaacggtgaaagctagcagaagtgagagtttattgacggcgtctaagacggctacactcgaagagaagatccatgcgatttggttatggagaagcattacggacgcgtgggtcgacccgggaattccggaccggtactgcgacgggcat

SEQ ID NO: 134488 - DNA, 726 bp, Arabidopsis thaliana
taccggtctggaattcccgggtcgacccacgcgtccggaactgtgaaaccaaaataataaaaaaaatgatgatgatgataattctcttgtggtcaataattttcatgaccattctcttcttaaaaaaacagttgagtgggaagaaaggtaagacacctccgtcaccaccgggacttccgttgatcggaaaccttcatcagctcggccgccacactcaccgatcactatgcgatctcagtcgccgttacggtcctctcatgctccttcacttaggtcgtgtccccgttcttatagtctcttccgcggacatggctcaagaaatcttgaagacgcacgaccaagctttcgcaaaccgcccacggtcaaaactctcccagaagcttctttacaacaatcgtgatgtggcctcagctccttatggagagtattggaggcaaatgaagtccgtgtgcgtcattcatctcttaagcaacaaaatggtacgatcttttcgagatgtaagagaagaagaaatcactttgatgatggcaaaaatccggaaatcgagttctttgccgtttaatgtaagcaaggtcttggagtgtttgaccaacgatgtgatatgtagagtcgctttgggacggaaatatggtggtgaaactgactttaagaaggtaacggatagactaagcgagctattggaaacgtttaatatagggagttttgaaccgggctcgcgtgggttga

SEQ ID NO: 134489 - DNA, 729 bp, Arabidopsis thaliana
cctgccagtaccggttcggaattcccgggtcgacccacgcgtccgggactgtccttggtgtaagagatcctatatctgcagcactctctattgtgaagggtggcctaacagctactgatgtctttgctgttgaatggattcataccggtattatacactttggaatgactgtttcctactatggttttgttagcgatgttttggagctctctgaaaaataccaaaaacggtttggtcctttgcgttactttgttgctggattcctcaagttcatgtgtttgccgaagtatagctatgaagtggaatatcttccggcacaaaaagaggatgcagaaggcaaaattcgacttgaaaaggaagctgtggatatgcaagatctctacacggatgtaatgaggagatcaagcagagaaggatttcctagagcctccagtttatcaagtattgactccataatgaccccaagcgtaggcgaattagacacttgtagcagcacacatgccagcactgagccgtctgaatatgtccgtggaatagatcctaaaatgaaacgcttgtcctctggaagaagagatgttacggctgagccagaggttatttatcctcaaacacagtcaacaacccctaattggcccaggacaagatcaaagtcaagactggataaaagatggatggggttaacatccgtgcaggatcctccaactcgatgttcatgggagaatacccggg

SEQ ID NO: 134490 - DNA, 719 bp, Arabidopsis thaliana
cggaatttccgggtcgacccacgcgtccgagagaggttctacaaagggctgttcgatagggccatgaagaatggaagcgttatgattcataagggaagccgtccagattcgttaccaatagccctttacaagattgtgcacggggaagggagctttttcagtgggagaataatggagtggagagaattatggaacttactgccgacttaggtgccttgtcacagaagtttttcgggtcaaagatgtttcgtaagctgcttgagaagctcggtatctcacttttcaaaacggagataatggttgtttcacgtagatttagtgagctggttgaaaggattcttattgaatatgaagagaaaatggacgggcatcaaggcacacagtttatggatgccttgttggcagcttatcgagatgaaaatacagaatataaattcactaggagccatatcaagtcgcttctcacggagtttttcattggagccgctgacgcctcatcaatagcaatacagtgggcaatggcagatatcataaacaaccgtgagattcttgagaaattgagagaagaaattgattcggttgtaggaaaaacaagattggttcaagaaacagatttaccaaaccttccttatttgcaagctgtagttaaggaagggctaagattgcacccgcctacacctctggttgtaagggagttccaagaaaggtgtgagattgga

SEQ ID NO: 134491 - DNA, 944 bp, Arabidopsis thaliana
  unsure (1)..(944): unsure at all n locations
gcctgcangtaccggttcggaattcccgggtcgacccacgcgtccgagcaatcgctcgagaccccttacaaatattgatctctctctttctatatacataacaagactcattttgtgaggccatgtcaggagtttgggtgttcaataacggagtgatacgtctagtggagaacccgaaccagtccggtggagtttccacacagtcgcacggccggagaaatgtcttggtttacttgccgaccggtgaagccgtctcatcttactcgtcgctcgaacaaatcctaaggagcctcgggtgggaaagatacttcaatggagactccgatctcatccagtaccacaaacgctcctccatcgacctcatctccttaccaagagacttctccaaattcaactccgtttacatgtacgacatcgttgtcaagaaccctaattccttccacgtccgcgatttcaattgaaatccacacggaattaattactctcgaccaagaggtctagtttgtgtttcttttgttcaaccgggaaattccagacataaaacctataatgtcaaaatcggaatctgcagtgtgaatatgaatcacgtagaggtagaagagaagatgtgtgcagctgtttgaattcgagaaacgaagcgatgactattggattatcatcacttagttagattgtgtttatttgttgatatgtgtgttttaaatttttaactgtttgtttggttttaactggttctccaagtttgtagcatgtgcatgcttctttatttttcattttaatttgtgaggcttgtatgggacaagatagtagtgttgcaaaaggtggcacattacttaaaaatgttgttaatttttttgtttgtttgtagctttgtccctgtggtgcatggtgatcgatgtaagaattgtatatcatttggctttaaactattttacatttactcc

SEQ ID NO: 134492 - DNA, 522 bp, Arabidopsis thaliana
gtgcgcctgcaggtaccggttcggaattcccgggtcgacccacgcgtccgcaagtatatgatgcgcgctctagaggatgatttcaaacaagttgttggtattagttggtatctttggatctttgtcgtcatctttttgctgctaaatgttaacggatggcacacatatttctggatagcatttattccctttgctttgcttcttgctgtgggaacaaagttggagcatgtgattgcacagttagctcatgaagttgcagagaaacatgtagccattgaaggagacttagtggtgaaaccctcacatgagcatttctggttcagcaaacctcaaattgttctctacttgatccccttttatcctctttcccagaatgccttttgagagagccttgtttttcctttgggatttgggctacatacagattcgactcgtgcattatgggacaggtgagatacattgtgtccagattggttatcggggtcttcattcaagtgcttagcagttacagtacactgcctc

SEQ ID NO: 134493 - DNA, 922 bp, Arabidopsis thaliana
ctgcaggtaccggttcggaattcccgggtcgacccacgcgtccggcaaaacttgatccaaccaggacatggattatctcggaagaggatcaatggtggaatcaatggaggcctcatcaatgagatttcactagaatctttggagtatcgaagggatttactttttccattttctctcttattgaacaacactcgacctgttgggcgtcaggatactcttctccgttttatttccatccttctccttgctgatctttcagttacgctacttgcattacttcagttctattggcttgcccttgcagcctttcttgctatcctcctgattctccctctctcccttctttgcccattccctgccggccttaacgctttattaagtaaagaaatgagaagagcctcacttactcgtatctacggcctgtggaatgctacatctctaacaaacgtcattgtggctttcatttgcggtgtcattcattccgggtttttcactgacgagctaccaaacatctggaacgccataagggatgatgataaatggtgggtattaccaacaatcctcttgttactcaagtcaatacaagctcggttccttgattggcacgtcgcaaatctagaagtaccagacttttctcttctttgtccagatccagataccttctgggcatatgaatctggagcttgaccatcaacatgattataaagaaagaccagcaaaagatatatcttatttttcatgtaaatcttttaaaagtacaaagttcttctcggtgatagttgttaaaaacagttctctagaacatctggttatatatctggtgctgaattagcagttcgccagatcaatggtagttgtagaaacttacaccgatagtatgtaatgcttaatgttttgcaacaacaaaaaaaaaaaaaaacaa

SEQ ID NO: 134494 - DNA, 881 bp, Arabidopsis thaliana
ggtgcgcctgcaggtaccggtttcggaattcccgggtcgacccacgcgtccgagcgaatctcgaagaaagagattgaaactaaactgttgaaattttccgacaataaacttatctcttttcctcattcaatcctagagaccaaaaagcttaaaagcaaaaaagaacacaaggaaatttactcagaggtaatcgtcgtcggagccaggaggaagaggagggatgggagaggtctggacatggattatttcattcttaatccttatcactcttctcggactcatcgtctatcagcttattagtttggctgatctcgagtttgattatatcaacccttacggctctgcatcaagaataaactttgtggtattaccagaatccattcttcaaggatttttcatgcgggattttacctcgtaacgggtcattggttcatggcactcctttgcgttccttatctctactacaatttccatctgtactctcgaaaacaacatttgatagacgtgccagagatcttcaacttgcttgattgggaaaagaagaaacgactcttcaagctcgcttacattatcctcactctctttctcaccattttctggttaatctattcaacacttgatgattacgaggactgaatcacgcttgaagatacacccctgtgacaggcgacaacaaacggtttggtcaaacccctctcttagtacttgacaccgcgcttgatacaatggcatgagaaggaaggcttttaggttatgtaagttaattaatgtggcattagagagctgtgtaaaccagattttatagtcattagaatttcattgtggatctttgtggtgaagccaagcagtgaattgttaaccatgattggaaccctctaact

SEQ ID NO: 134495 - DNA, 680 bp, Arabidopsis thaliana
  unsure (1)..(680): unsure at all n locations
ccccccctagccttgctgagggtataacataagcttgatatcgaattcgcggccgccaaactacattgcttaagcgccaaaccaaaggtctttgcacggagaaaaagttttaaaagttacaaagctggtgtttgatagatatggaatgcaaactgatcatgtttatgtttttattttcgcttatgcagaggcaagctgacacagtgaattgtgatatgattccgacgaggtcaacataagtgtgttggcacaccgaattatattatgcaatgaaggaaaaatagttgagttggatagcttttgaatgcgtctcatgatcatgctgcggttggctgagctgaagatggacatgttcgttcgaggtatctctcatgtctagaccatttgtgagaagagaattcttgtttgcgattttcacaccctcgacctctggaaccttttcatgtagttccatgttctgttggggcattaggtttactttcttgtggaggcctaaattcccttggggaccgagattccccccccgggtaagtacttggatttccccggttaacatttgaccctgcaaaaggcaaagagggcccccgatcctgaacccngggggcccangtncanngggccccccggggngnccaccttgccccctagggggggaatccncctngggaaccngggaacgg

SEQ ID NO: 134496 - DNA, 853 bp, Arabidopsis thaliana
acctcttgggataacgggtctgatatttaatcagctttcatgctgcaaactaactcacattttacaaattgatttggatgggaagctaaaatgcaacggaagggtgacaactttatgctaaaacacccatttcctttgatcatcaaactacatgcttaagcgccaaaccaaaggtctttgcacggagaaaaagttttaaaagttacaaagctggtgtttgatagatatggaatgcaaactgatcatgtttatgtttttattttcgcttatgcagaggcaagctgacacagtgaattgtgatatgattccgacgaggtcaacataagtgtgttggcacaccgaattatattatgcaatgaaggaaaaatagttgagttggatagcttttgaatgcgtctcatgatcatgctgcggttggctgagctgaagatggacatgttcgttcgaggtatctctcatgtctagaccatttgtgagaagagaattcttgtttgcgattttcacaccctcgacctctgaaaccttttcatgtagttccatgttctgttggtgcattaggtttactttcttgtggaggtctaaattctcttggtgaacgagattcccctctcggttaagtacttgtatttcttcgattaacatttgatcctttttcattcgaacgccacgaaggctcaattcaagctgattttccaaattctgtaaagcttctacacttagtccagagagctcctcccccatcatttgccggtggttttcttgcaagttatgtagctgacgctttagaatcgcagcctccttttgccagaactgaatttctgaagcgggatcattttctgaactggtttctcct

SEQ ID NO: 134497 - DNA, 647 bp, Arabidopsis thaliana
  unsure (1)..(647): unsure at all n locations
aagcttgatatcgaattcgcggccgccaccaaagatgatacatgttacttcgtggaatcactcataaagtgtaacctcaaatccttggcttgtgtctctgaaagattggctgctcaagacattaccaattccatcgcaactttctgtaacgcttccaatggatacagagagaagaatcatacagaaaccaacctttgtagatttggctagattagtcccacgaacaaactcagtgaaggaaatttagattcatagaagcacgtgtgatcatgcttctctgctgctttactcagatcagctccatgggccattttcgagcatgcagtcaaagttttgatgtaatttggttttctgggggtttgttggacagtgtctgtatttacgcaccattgttaaggaaaaacagagctaggtagtatctatattatcaccaagagtcgttgcagggacattttccggccctgaaatggtggaccctggccccttcttgggaaaacaacctcgcggttccccaaaaccggcatggatttggctacgggggggctatcaggcggccgnnggatccctgancccggggggccccaattttaaggggccnccgggggggccccnttttnccctagnggggnattcgncnggggaaaggt

SEQ ID NO: 134498 - DNA, 907 bp, Arabidopsis thaliana
  unsure (1)..(907): unsure at all n locations
cccctaggctcngagggttaacaagcttgtatcgaattcgcggccgcaggagttgtatatgcgcagatatagttgccatggctgctagagatgcctgtcttttgggcgggggggcccatattatgccatcccgaaaggaaggtttgatggtaaaagatcaaagatagaagattcaaggattctcccttcaccttttcttaatgcctctcaactcactcatacttttggccaacgtggttttcactccccaagatgttgttgctctctctggagcacatcccctaggagttgcacgatgctcctccttcaaggctagacttaccagtcccagactcttcattagacctcgactttggcaaacactctctctaaaacatgcagcgcgggtgaccatgcagagcaaccctttgatgctacgcgcaacgatttcgacaatgcttacttcaatgcgcttcagatgaaatcaggagtcctcttttcagaaccaaactttattcaacacaccaaggaccaggaatcttgttaacggctatgcacttaaccaagccaagttcttctttgattcccaacaggccatgcgcaagatgagcaatcttgatgttaaacttggctctcaaggtgaagtccgtcaaaattgtcggagtattaattaggctagaccacatctacttacgatttttgtatttataataagttctctactcttgttataggaagaatcatgaatcttctaggctactatgtaaaaattgtgtactctcgtaatatgcagttgtatacttattgcttgtgtggttcagatatccatcaaaaagtaatatactttggttgcattttcgcggccgcgaattcttgcagcccggngcatccactagaatagagcgtccgccaccgcggtgcagctcca

SEQ ID NO: 134499 - DNA, 592 bp, Arabidopsis thaliana
  unsure (1)..(592): unsure at all n locations
cccccctagagctcgacggtatagataagcttgatatcgaattcgcggccgctaccccatggctcgccttaatcccactttgtcaagatttggaaaattttgtgggatagtgactgtggagtcatttgctgcgtctgcaatgggtctaactgttggagctatggtcccaagcacagaagctgcaatggccgtgggaccatctctcatgacagttttcatcgtttttggaggttactatgtcaatgcagacaacaccccaatcatcttccgttggattcctcgtgcttcattgatcagatgggccttccagggactctgtatcaacgaattcagcggcctcaagtttgatcatccagaacacttttgacgtccaaactggggaacaggcgctagaacgactgtcgtttgggaggaaggcgggtaagggggagcgatagcagctcaaagccgggttctgatgtcctgggatagcgccacgtaccttcccctgggagaaaaacaagccaaagtttcaaaagctagagcttttttttaaaatggaaactnggantncngggncccnctggaaaacggggtttntaaagggaaccga

SEQ ID NO: 134500 - DNA, 567 bp, Arabidopsis thaliana
  unsure (1)..(567): unsure at all n locations
tttttcnncttataaatcttcagacggcgatcctgacgttagcgcaggggtgttttcaagccaatgttcaaagttccccacatctctctatacgttttctctccttcctcacattgtttttggaagtcaccgcattagaccttttcttctcttaaatctaatacaaacttatgaataattagtgctaaacaggagattagtcgagtcttacattggtttaaaggcaaagagaggtaagaggagcaaccacttttattcgaatccctttattctcacactttgctacctgcttcgaggacaaagggacggatttcgtcaagctcatcatccgaatccgatgtttgattttgatcgtcaagtggttgattgatatcatcgtcttcaggtttctccgtttggtcaacctctgctttatcccagttggactcctgaattacccagtttctccattggtcaacaagaagctctagcttttgatactttaggctagtttttcttccagagaagggtacgtggcgctataccagaacatcagaattccggctttgagctggtatcgtctcccta

SEQ ID NO: 134501 - DNA, 575 bp, Arabidopsis thaliana
tttttactttttttagttttttcggggccgacaaatcaaaattttccagatatgttaagaagcttaaacattgtaatggagaaaataaataatgtggagaaaccgaaaaaagaaggagataaaagggtacaacatcagagaaatcctctttaaagtgtggagagaacaaaacgaaaaaaaacaagaaaaaaaaaaaggacaagacccctctctttttttgtggcattgttcttcaaacttgaaacccagccttatatagaaaaacaattatacacatttggcatgttacaactccaaaacattttctgatccacacacctcggggaaagattcattaaatctcaagtttgatccgggtctgtaggaacagatcttccatcttctgtaaattatctcctgggttgatttgcttcttattgatagctaagagggttttcaggttgcaactgagaggctcttgaatgcttcgagttgtccgtcgctcaattcagtctgacccattggatggtttggcgtgtcaccgttctcattgctcttgcgggatgagttgtacactgaatcaggcatcaaagagc

SEQ ID NO: 134502 - DNA, 486 bp, Arabidopsis thaliana
acaataatacaatattattatataaaatatcgtggactttacacatacatttatttattcattaattatacatccatcacacaacaattcgtaacaatttcattttgtaatatatattcaatttagtttaagcagtcatatcttctttttcttcttgaccgagtcggtaatcttgagaaccataaggactaaaagcttcaaggaggaagttggatttacgccaaggattgagtcccatgtcgttgcacatatcatcagcatgttggatgctgaacgtggaaatgcaatgacgtttgtagaatctgcttgagtttctcgtcacttccatttcttttaagaattgatccaacatcttctctttgcttggtaatctgaatttctcatccactagccggcttagccacattgaacgtagctctgatgtgtgtaagttcgagctgctttggacgtatcctacgaaacccatgtttggtattaatggatgga

SEQ ID NO: 134503 - DNA, 451 bp, Arabidopsis thaliana
  unsure (1)..(451): unsure at all n locations
gaattagaatatttagttgatcagatgagaaaggatcaggtttgcttttgatctcccatgtctataaacaagatagtctcactgaagacgagccaaaaaaaaaagacattcatctatattgacaactgaagtagccttgtcccaaaccagggcttgtgacccggtaaaaaggtaaaacaatcatcgatgaacagacgaaaaacttaaaacttgaaggtttcagtcactgtattgttctgcctatcaatgcttttgtcgaggttagtacttagctgtaatttctattgcatattgggcattccacaactggcctttttcgaggatatgtaaaatcctaactgggtctccccaacccttctttctggtccatgggtatatagccggntttagcttcgacatnatnggccaaaatcctcctactncnggcnttgacaggcnctnntntcntttc

SEQ ID NO: 134504 - DNA, 673 bp, Arabidopsis thaliana
aacagctatcacgtcgcatgcacgcgtacgtaagcttggatcctctagagcggccgcccttttttttttttttttttttttaagactgaatcaggaaaaaaagatttgtatgattggtccattacatgaatttacacaaactgaaagatctgtggatgtctggttccttgatactaagcttcattattttcattgtgattttcaagaacatgttgtgtctttaggttgtaacatctttgggatcttgttcatgatcatcatccttgaggtttctgtatttgtaaaaccaagagcagacaaggaaatagccaagattcaagactcctcctatgactacaacccagtaaacattgtcaactcttccatggtttatgtcatttgggaaccacgcggtggttctttggatcacgtcgataacagctgtgctcagatagaaagagattccaatcaccaccgaggtcaatgaagccccgggggtcctcagagactcagggaatcctccatagaatactgcaacattcgcgggaaattgaaaggcctcgcctattccaaccatcacaagagcaggaactagccatagcactgacatgggatagatgatccagttgttgagcatgataaagacacatccaaagacgagtactatgacttgcagagacccagcagagacttc

SEQ ID NO: 134505 - DNA, 365 bp, Arabidopsis thaliana
atgaaactggttccttcattattttcattgtaatttttacaagaacatgttgtgtcttaggttgattatcaagactactacaatgcaaagaaaactaggaaaacaacatgttgtgtcctaggttttaacatctttaggatcttgttcatgatcatcatccttgaggtttctgtatttgtaaaaccaagagcagacaaggaaatagccgagattcaagactcctcctatgactacaacccagtaaacattgtcaactcttccatggtttatgtcatttggtaaccacgaggtggttctttggatcacgtcgataacagctgtgctcagatagaaagagattccaatcaccactgaggtcaatgaag

SEQ ID NO: 134506 - DNA, 439 bp, Arabidopsis thaliana
aaaaaaactctttattatactcatttcaaaggcgtttcagttacaaatccctcatgtcactcaaaaataagtactctctcaggaagcttaactagataattctcccttcatagatcaagtggcttcaaaactaattgaactccatacttaggttttatagtaagcacaactataggagcatgtctatagttctccgatattgcaaaactgaatttggaaacaagcattgctaatattatcttcgcctccatcatggcaaaagtctggccaatgcagttcctaggtccagccgcaaaaggcataaaatggcgactagatgcaaaacttctagtagtaaatcgttcagggttgaactcgttcgcatcttcgccccataattcattactatgatggatcgcaaggacagggatccaaatagataaacctttagggatgatta

SEQ ID NO: 134507 - DNA, 346 bp, Arabidopsis thaliana
tttttacaacaacaaaactaatcttctgattgatttaacttggcatacttagttgcacaaaaaaaaaaaaacttgtcccaccacacaaagcaaaaacacaactagttcacatcagtcagagatcaccagacttcatcttaagaagaagaatggttctgtacccactcaactagtgtcgcaactccaaacccagttgcagctttcttcttctcgttccacactggtccagccatatctatgtgcatccactcaacatcctcgctcacaaactgtttcaagaaaagagccgcggtaatggatccacctgcacggcctccagtgttaaccatatttgcaacacctgact

SEQ ID NO: 134508 - DNA, 425 bp, Arabidopsis thaliana
ctaaaacgacaagtttgtttcattactgaaaattatccccacaggttacaatgaaacacacaaaatatccaaaaagaaagttaaaacacagctctaaaggctatagctgaacctgaatatctgttttatacaaagctttcctaaataacccgcatgcctctgatccagatggaggggtttcatcatagcggagatgtctgattaagtccctctatgcttgaagaagaccggttatttcgatgtctagaccagaatcccttcttcaatgcagagtctttggacgagggtttattccacttggagctgatagaagcaaagtgccatttcaagaatgacttattagacgagctcttgctactgcaactagcttccagcttgagagctttgccttctcgtttccccattttctggaatacaaactcatc

SEQ ID NO: 134509 - DNA, 528 bp, Arabidopsis thaliana
  unsure (1)..(528): unsure at all n locations
gaggtcaagtaataatattagtgcaatatagtttgaaataatataaatttatggttgaaacttgatgcaagatacagacaagtttaagatgaagataacaataataattcagcataaatcaaaaagataaaaaaaaaaggaagcaagaaaaacagagtaaaacgaataggttttgacaataattgccagatatttgtattttgtcgttgttcatattatatctgtaaaaactgttcttgaaacacatccatggctgtagcgggaagtccaagaagcacattgatgcttctcctctgttctccatgagacaaaaacagagttacttctttctcaggcaaagctactggaccggataaaatcgggtctccccaaccggaatctgtcgtgtggaacccaatcttgaccatgtagtgatcagaagagncgaggaaagagaggnctgcncncgngcctccgagnaaccatagcggtccctgtcccacagtaccacctaatggtnccggcaaccncgggaccacggttcggagc

SEQ ID NO: 134510 - DNA, 463 bp, Arabidopsis thaliana
  unsure (1)..(463): unsure at all n locations
cctgctctaatgacgaaactataaactagcacttttgaagactttgtacacaatttgagttcatatgcacaaggaggaaacacatttgtatcggacaagaaaagcagacagaaaactagggaaaaaaatcagagccaacactatctcacttccacattatccacaactataaaggtcaagagtcaataacattatctgagtacacttgaactgtgcgttgtggctggtgttttgtggaggatcaagattcagtcttggtggatttcatcaaaaggcgcatgagcaaatctcacatcttctggccttgcaatcacgactgggctcatcagcaaataggggccttgaggaaaagatggagttttcaagggacgtcgatccgtcatccgggggtacaccaaatgnccagaagtagtagcgtgggnccgctatcattnccagaaatccccccatggacttgnaccaa

SEQ ID NO: 134511 - DNA, 355 bp, Arabidopsis thaliana
ggggaggcaaaactttacctattagacttagaaatagataatagcttaaccagaaaagtttcctgtctttttagaccttattgccttcaactttcctttaaaacaactcgaactcaagatgatctccggtggctttacattcaagataccttttattcccctcaggagaagtcgtttccggggcaccattgtcatagatatctggcccctcagggggtttggcccagcggatgagagcccaattcaatccttcaaagaaggggtgtcttttgatctctggagctcctttttctgacccaagacgactttttggatccttcaccagcagccttttgaacaactcctttgcctggaa

SEQ ID NO: 134512 - DNA, 677 bp, Arabidopsis thaliana
  unsure (1)..(677): unsure at all n locations
ggttgggccttgtttgnaaaatccntnccccccaantgcccccaaatatnaaaccnctnttaaagccggcctttcnccaaggggggttaagtcaaancaaacaacggggntttgcccattaaagtttnnaaacccaaaccaangaaaaatcttttaaaggtgatacaacnatatncgttttaagacataacttaatctgaatccggagattcgaaaaacgggggattcagctcagataccattttggacagattctccctcatttcctgcaattcttctctcccaaatccccaggccctaaccacatctgatcccatggctccccactggatcccaagtttctctaaattccccattctagtttccaaaaatggcaaaattgcgcttgaagatctccatcttgttgctactggtatggagtgaacatctagtgagcctctgtagagagaatccgagactggactgctcagtatctcacctttcctcccaacaaggtttccaaatatagaaggaaacggtaatggtaccggaagaggacaacgcgaaaccgatagattgcaaaacaacggtttccctttggtggttgcctgttcgtaagatgcatnaaccgcattcttcacttctgaaaccaatgcttctttatcttctgatctaagggctccaagtatacacattga

SEQ ID NO: 134513 - DNA, 326 bp, Arabidopsis thaliana
tccttttttttttcccccccccccatagtagcataaaactataatttaaagaagaatgtcgaaggaagatcctatcttttctctagtacaactttaaaggaaataggtgaaattacgacagacaatgaaacttggccttttagttatacaaagtttcattccattcagaaattggagaagtggttccgagatgactgaacaatctgcaaatccgtcgtcgtttgacaagaggtttcatcactcatcagtgtctctcgggggcgtgacaaccaaagggagctaagagctctgagccgtccatagtactctccgatgactaggaaaca

SEQ ID NO: 134514 - DNA, 404 bp, Arabidopsis thaliana
  unsure (1)..(404): unsure at all n locations
tccttttttttttnttaacaaaaagagaaccaaaaccgtgcgcagcagagtttctcaaagcaaaggggtaaaatatccattcaatagaaacggttctggaaactctgcaattttgggagaggctcaattaaagccgtacatgtcaaaactcttgtcgtcaggtggtcttgtgttgttgccaccttcaggtactctaaagctgtccattggaggtggccctgcggcagctggtgccgttggtggcacccaatgcggggtggtaggaacagagaagttagatccagaagcctcttgatgtaagacaacaacattaggatttgcttgtggtgagtttcctgtggttcttcggtttgaggaatttgcagaagctagagacgatggatacgattgatgttgctgattct

SEQ ID NO: 134515 - DNA, 647 bp, Arabidopsis thaliana
attggtgaggggagcccccccactcgtcaaagcttctcccaagctggttctgggggctattccgttctaccagcaccaggggattaggctgaagcagatgggaccgacggtgaggaactcatgtgtgtatatgaaagggttgaaatggaaagaggaacaagagagagcaatggacaaactttcggcggagcggctgtctgatatgctttccttccaccatatgatggctcgtctttgctccaatgccatcaagagaaaactactagaacccgaacacacagataggaccatagagtcctccttttttctcaactattagcctttattgcaaaaacagttttacacacaataagaaaactagcattctgtgaatttacagaagctaccaaatgaaaaacttttgacagtatcctatatgtaaggtttcctcaagacagtaatcataaagagttcctttttataactccctatatcatttttcgtcatcatagtataatctatcattaccggcggcagaagaagatgaaatcaggatggttgacttgacgcaacctcagccaattatctgcggcttggaagagagagttcgcgagctggtggcccgagccaccaaagcttgtccatacagaacctctcaacttgtatga

SEQ ID NO: 134516 - DNA, 766 bp, Arabidopsis thaliana
gctatgacgtggcatgcacgcgtgcgtgagctgggatcctgtagagcggccgccctttgtttttgttttttttttttttttttttttttgaggtaaaataccatatgagagattatgaggatcaaccttacataagaatatttttttttatattagcctaaagagagattacacacataaacgatgaaagtagtagagtcgctacatatacaaacacatggcatatttgatcaaaagttgacgaagctctctaagcagctggggtctctatgactctctccatgtctcataccctcattactattttaaaacgccctttttgagaattcattcattcactcactggcttcctttcttagtgcagcaagaagggcatttgtattgcttgatgctctctgctttggctggggttatcttcacacacttcccatggtaccaacgttcacacacattacaacatatccagaactcgggggtggggtagtttcctccacaacttccacagagggggggtccatgctcatggtgttgatgttgatagctctcttccattagtttcggcgtgctctttggctgcccttcaatggatctctttaccccgtttctggatttgcttccgagatccatgcttgggttaccgtgtttgaggggggtgctacccggactactttaaagagagttgggagatcgttgatcagactaaatagacgtttcctctcattgggattaagaccagcgcccgaggaggaagaaaccgggagtggcc

SEQ ID NO: 134517 - DNA, 370 bp, Arabidopsis thaliana
ggaaatgaatacttgctaattaaagaattttttaagaaaataaacaataaaaccagtttaacttacatgaatttttgttcactgtcgatcttaatagtctaaaatcatatatcacaaatgtttagattaacgaatagttttgtcttcaacgaggagttacacgagtaatggaagcttcgccgactgaacaatgcgtagatgaatcaatagatggacctgcttgttcctgcttacttcggaagaaaaatccaggtggtctaggctcagcgagagcgaccaagctagtagtgagcatttgaactatcgatgacatggttggacgatcttcagcatcttcctgaacacatagtaaagcgatatggatgcacct

SEQ ID NO: 134518 - DNA, 403 bp, Arabidopsis thaliana
  unsure (1)..(403): unsure at all n locations
tcctttttttttttnntttttttcccgataagaacatacacatcaagttttgcatttcttttaaaaaagctttatacaatctaattctagacagtagaaaccaaacacatgatctggtaagagtaaacaagagaaaaatgtcataggggtgaattaaacactctacaacatatttcaaagtcttcaaagaccgatacgatcgacaaacagagaagtcatatactccttgatctttccttggggataggtaaatccttcatatccattgtaggtgatgaagatcatacgtgcaagatcaaaggttgctttaagaacgcaatgtcgcacacccaccgttgtcaggaactcttcatttaatatcttatcagcctctacgatgattttggtaagctccccaaaagct

SEQ ID NO: 134519 - DNA, 403 bp, Arabidopsis thaliana
ggctaaaacgtatcgattatttcttattttgggcaatttttaccacagtgtacgtagtagctcaaacattacaaaggaatttgctttgttgcaagtatatagagagaggggaacatccgcaagtcgcaatgctgactctaacttcaacgagatgagtttcctgttatcttcttggcaaagctgcttatgtcaaatgtatcattgccattctttgttatgacccctttctcggttatgattcctgcaatcagctctgctggagtcatatcaaaagctgggttccaaactgagatccctggtgctgcaatgcgttcaccaagtcctccgtgtgtgtgcatcaactcctttggagatctttcctctatcacgatttctttcccggatgaaagtgacagatcaactg

SEQ ID NO: 134520 - DNA, 422 bp, Arabidopsis thaliana
tttgaacaaaggtagcatctcaattatttggcaaaaaatggcgacgagagcctgaagatggaccatctattttcggcggtttaaggcaatcactgaagcaattggtagagaactgagggtagaattaaaaccaaaaaaaaaaaaaacaagacgaggctgcttcacatttagcagaagccacactatttcttattacaatagattgttttccttggatcagtgatggtcatcaccatgtccgtcaggaggtcctccagggccgaccacttcaagcttgaagtactgtgtacacacagggcattcaaaagacttgcctttctccagccaaaaccagacaacatcatgctcatcctctccttcaccttcagggcaaccaactattctcatgtcgtagtaggatttgactacagcaggagcttcct

SEQ ID NO: 134521 - DNA, 429 bp, Arabidopsis thaliana
  unsure (1)..(429): unsure at all n locations
aaaataccaatataagtcttgttctctctaggaagttctaaactctcacagtattacgcaccaccaaaaaaattgcataaacggggagcgccctcacaaagtcagacatcttttaaacgtacatacaccagaatcccaattcgtctatccggggaaataaaagaagaaactccggtgaagggatcatgacgagccctcatactgctcctttacggctcttgctgccgcattgtaccatcccgctgctgccattgcacctggatctggaaccgttgcaagattctctgcagatacatcagctttgatctcccagccangtgcttgcatccttgnatggttgattccnggtncgggnaagtttgccgncttcggccttnatagaatttaaaagcaaggttatttggntccncntccagcgctnaagtttnt

SEQ ID NO: 134522 - DNA, 461 bp, Arabidopsis thaliana
cttccctccatatatgcgactgagcttcactataaaggacgcaacttttattctccaactatgaattgtatacaactcttatctactctgcgtatttctgataaatcttcaaaatacaaacaagtctgcaccaaagcctagcaggggaacttatacagaagaaagtgctcaaggtttctgaccaagaagccatggctggaagaagagatggctgcgagcaatctcgacgagttcacgtggggcattcatcgtttcatctctcagcgcctcaagaatcgcctcacacgagaactctcttgttataagaattctgcagagcatctttaagatgggacaaagttcagccggagttacaggcttgccctcttcagggtgctgaagacttaacgaggattggttcaacaactcgaaaaatgctttcaccgtagaaaccccctgaatcattcccttgcctttgatgc

SEQ ID NO: 134523 - DNA, 486 bp, Arabidopsis thaliana
tccttttttttttttatttatttgggataaaaaagaccattagaatgttatcttggtttttgttgtgtacaaaatcgaatccaacacaatcggcctcaattctaactccaatcccacctaagaaagttaaaaaaacttctcgggacagaaactaacattgttatgtcccaaagatttctcacaagatattagcaacggtcaaaatcattactgtcaagatactccatataccccgactgtaatacaaatcactccgtattccagaagaagttgttgagtttgccgatggcgctgttatgttcacagacgtcccgtttctaccattaccgcggctcccagcaaacacacatgtaccatgacttggatctgtggtagtgatactagcaacaccattgaagttgcaagcatcaggattattcccagtctgatgataataagtatcaaacgcgtagttagcatgcgcgacgacattatccggttcataac

SEQ ID NO: 134524 - DNA, 419 bp, Arabidopsis thaliana
aaaagaacataatttgatgatcttaataatgaagggttcttacaagaacgattgtcccctaacattctggagtatattatatgtacaaaaatcacgatcataaatatctccagaaaactctacaaaaattaaaataatttcaaatctaatattccaacttttaagattccagattctgttacaaaaggaatcgaatcaaagatcttcccggagaaaaggatgagcaagaagctgcggcgccgtccatcgcttactcgaatctttacggagacaacactcaacgaagctcctaaactcttcagaacatccctccggcgctcgcggcggttctccaaaacacaccgcgcacatcaacgtcgcccaatcaggtctctgtcccggcggaagcaaaggaaaatgaccaacgagaagctcaagca

SEQ ID NO: 134525 - DNA, 656 bp, Arabidopsis thaliana
ttttaaaacgaccccggaatttaggatccaccattcacaacccagaaaccttataaaatatcaacatcaacaaatcttagtcaaattttctcactttggtagcttctcttactctctgtatacattgaaagtagcatatgtatatatactttcttttgaccatgagtgaagcttctcttagactagtttaccactaaagggcaaagacggcgaatcgtccccactgattatgctaggagccggagtatttctcctcgactgacgtttggtgggaacaataatggcttcatcctcaaacttcccgaggccttgccatcaatgtcataaccgtcttcatccgcctttgaaaaccggatgaacgtaagcattttgcaagtagcctttaaggttcaggtttggttctcttgcggtttctaatgtatctttcatcatagcttcctgtaaagggtatctgatgaaagctggctcataacgacctttgcagaagtggtggaaaccaatggtaagcacaggcaaagcaatgagaaacggtgcagctaatgcagcgtgctttgttcccaatagacccatcagaagcaactgtgatattaccaatgctgctatgactcgtccatgaacgtctggccaaaacgctgcagcactctcgtattcttgat

SEQ ID NO: 134526 - DNA, 455 bp, Arabidopsis thaliana
  unsure (1)..(455): unsure at all n locations
ccctccatattcccngggggaacaaaaaccgggaggataatatttttcatgggatcaaccgaagattcggagactaataaagctacattgatctcccctaaattggagatcttcactaatttcaaccccctaaactttctacaattcacccaaaatgaccccaaatcaaatttacaattcccccaccaatacattttcactatataatcaattccttttgtgacccactaatcattggtccttcacacctcgctctcaccataatccaatccccaccctccatatcacatctggtcccatccaaaccaccaacacacttcagccgtccgatcctctccgagtaacaaccccacaagcttaaacgatcaagatctctcgaatccttctgtatttcctctgtttcttcttcttcctcttcctctactgatctccaaaacgtttgatctgtcacactt

SEQ ID NO: 134527 - DNA, 461 bp, Arabidopsis thaliana
  unsure (1)..(461): unsure at all n locations
gaaaaacgagaagagggtagattactaacgaagagaaaagagttttgttcctgttaaagttcctctgcaacgacaacataaaagaaaacaaaagttctccaacatatctcttatctcacgcaattaaacacagaaattggcaaagaaaagcaagcttcttgttttgtttactgaggtcctgcaaatttgcccatcatctttgcaatcacgggagccaccttcggattcgcctgatgcttcgctagattcgcagggttcttcatcacatcttgaagagcagccatgacttcagggtcgctaaatgccgtcattagctcaggatcattcaatattttgctgaagtccataccaccacggcataccggcaccaccaggcataccaccgcctgcacctggcataccgccaccacccattcagcagggtacancgccattccggggtacacggcatctggaggaaa

SEQ ID NO: 134528 - DNA, 547 bp, Arabidopsis thaliana
  unsure (1)..(547): unsure at all n locations
ggcttctttcaaaggattcataatcttaattgacaatgggtaaaattaaattatccaaacaaatccataaaagaaaaaaacaacatttccctaccaccctttatcttttcccttcaatccaaatctttccatctttcatactcagattataaatacgaacaaattctatctttttttaaaaaaaaattggggacaaacttgcctggctctgcaatggtgtgggggcttgagggtaccttctgtttctttcattttggattataaaattgaatagttaagaaaaaaaaaagctctttcgagaaatcatcatgctatcctccgcttcttcggggtgttcaagcctgtagtcttgcagattgggcaaagattcttccggttcagccatccttaatgcattggcaatgggatcangccacatncnagggnccccaggcctcccctcgggggannccccggcaaaaaagnaggggccgacctggggggantggggngctnggantcgggggtaacgggtgnaaggtcccggtaacgggaanacccaccgggc

SEQ ID NO: 134529 - DNA, 504 bp, Arabidopsis thaliana
  unsure (1)..(504): unsure at all n locations
ataaccccaacgtgtttgtcttttttattcgaaccttctacaaatacagagccgtagagttttaaattataaactacaccaaagatataaaaattaaactcggggtaatcatctacaagttctcccgttttgcgtgccaaaaacacctaaatttaaaatctttcactcatttttccctctctcccgaggaaatggtcttgtaaaaatttccaagtttctcaaagtatgagcgagtcttgctgtgctcaggctgtttctgcccaccttccgtcactctcctatagtacttgntcatgttctcccacttcnccttacactttttcgcagatctttcgtancctctttcctttcattcttgctganatctcatcccaaatcgntcccttggttgatccccgtcttctcttccanatngnttcttggaattatcaaggctggaanttcctctgggggaaccttntaacatggnngaaanggcgttgggacnaaattaaccccttcttt

SEQ ID NO: 134530 - DNA, 553 bp, Arabidopsis thaliana
  unsure (1)..(553): unsure at all n locations
aaactcaaagtcaattcaatcgtaacacttggccactcatcgggatataatacaaaggcacaaattctggcacacatgttttctccatctctcgcctttctctttttgctatattttagagaactacagaacaaacaatgaacattttcttctttaaaaaaaaatatatatatgttcgaagcacaccaaaaatacttcacaaacacatgcacaaaaggggtcgctaccgagcggacgcagcggcggcagtagtacataatatgcaccgtaaacgcgaccgcccaggtctgtctccatcaccatcctcatcttcttcctcatcctcttcctcctcatccacaccgttatcgtagctatattcataccccgaagaacctttggttgtcttgtgattgttgttactgaaggctgcatccatgaggacgtctcgtggtaagcatgggagcagaaggagacactacagnggcccctcttatcgaaccggggcgaagnacattcaaacggggggccccggggnttcgattnantctggcaccttatggnaagattangc

SEQ ID NO: 134531 - DNA, 615 bp, Arabidopsis thaliana
  unsure (1)..(615): unsure at all n locations
tctatcttatatagcctataacaattaaaaaagtaaattagaggcgccactcacaaggaaattaatgataaaaaaatgtgaaaaatacaaataaaaaacaactctgctgatactgaaacaagccttacttattatcacacaacacaattattcacccacacgtcgttctgtataaaaacaccaaatcaacaatcactaatttattgagttttcctcaaaggaaagatatatctttcatgtcctcctcttaagaccgatacgcgattataagactctgaacatcatcaatgtccctaacctcatatcgagcaaagccagcttctttaagaacaaagtcccattctttcaaagtccgttctttgcctgtgcttgtgtgagccatcatcaccatatcaagcatcaatctcacgtgctctaacttttcatctcgttcgtccactatcatcgtctttttattctctccggtcaccgattccactatcaacactttttccgatatttggaggggccgcttctttgcaattcttcaatcatctttattgaantttttggtccccaatggggnaaacccntttgatgaaatggggtggaancggntaggtaaanaatggnngc

SEQ ID NO: 134532 - DNA, 426 bp, Arabidopsis thaliana
tttttttttttaacccaaaaacaaatttgatgaatcagagcagtttgtacagattcgctaagccaaaacatagagggcacagacacaaacaaagctaaactgatcattgccatttctcgctaatatgtctgcaagactgcaactctatttgctttttgcttccctctttacacattcaatccggagtttctgataaaacaaaaacctgtcctaatcttctctgtgttcaaaaacaattcatactataaataaccttccttgatgttcaatgcattgctggagtttcccatcagaagacacaactaagtcctcttactttttacaggttccgtttgcggtttaatttggcatcttggcatagtctttaatacaagtatggatcatcttctgcgttaagtcgattcttcttccttccttccaaaaact

SEQ ID NO: 134533 - DNA, 445 bp, Arabidopsis thaliana
acaataaaaggtggtggaggggagtaaaaacaaaatcaatgtccgtaccaacaacaatagtcgttctgaaactcgagaaaagttttcacttcaaatcttttatttataaacaagaaagagagagagagagagacaagagcaaggaagacgcaagagccttggtcataccacacagattcaagaagatgcagctagaacagacatttgtgttgtccaatcaaacttatcacgactgtatttgctgctgcgtgaagaaatctgcttcttgtctttgctgctgcgggaattgctgcttcccttttgtcctttctttccattcttcttcaggttgtctttgctctttgatttctgcggttgccgtttcttgcttcttgtgtgagagacaatggagggaggaggatcatacacatctttagcccatgacacactgagcttctcgagtgac

SEQ ID NO: 134534 - DNA, 535 bp, Arabidopsis thaliana
  unsure (1)..(535): unsure at all n locations
cgaacannnnnncattataagaatcattgactattttattttcatgcgaaaacgaataaatacaaagtttttttttttttgtagatatacagagaccaacggctttaccatgcaattaacttcttgtcaatatgcaacatcctcatgcaagaactaaagcttatgcagaaaagtaatgaagcaaaacttgaatcttcaccttctgctgcgacgctggaggaatgctgtgatgtaacatgtactgagtatatatatgaagttccgtggaactactaatccttcaaaacaaaacaaaaactctcataggttaaggatcaaaatggggacgccttctcagtttctcactcaagtgacaggttccctaagtcgaatgctgcgttgctgacgantgatttgggttccnaatggnacttgcgctgatcttaaatccccnggttnccaccagagatggnggatcgggcttnggtgnaccagttctcaaagaacccattgntctaacctgaaccctncatggagggaacaacctccanatgct

SEQ ID NO: 134535 - DNA, 520 bp, Arabidopsis thaliana
tcctttttttttttttttttttgattgaaaaccaaaccttaattccgaaaccatatcaaccgttttacattggttttctcaaaccgagatttttctccatagaaagaagcagagtggtaaagaagagcacataagggaatactatcatgggagcatatgagaatgagattcagagtcaagcgttaacctaacaccttccttgaaagaagttggagagagctcaagtgtatgaatcagtttagttatgtccatagatatatctgctggtgacactacgccacgatcaatcgatgatgcagacacatgtttagcccaaggacaggtcgtatcctctgcacttctgcaaccatttgagccatttgaacacgagatagcctctcgggtccaccagcattcagaactaggccgcatctgtttatcatcagagacccatctgtctattaatttgaaagtgatattcacaagatccttaacgtaaatggggcaacgaaactcgtcatggaagaagtctaccgtgtcc

SEQ ID NO: 134536 - DNA, 507 bp, Arabidopsis thaliana
  unsure (1)..(507): unsure at all n locations
accaaaagacaaatcatatgtggccacttttatatatttgttttaacaatacaacaaactcttccttctgagtttttcatttttcctaaagttacactctggaaaacttctttatatatatgtgatagagattctgtacagagatgatgaaaacaaatcaagaaatctggggaaaatgctcagatgatgtatctgagtaaagcccttagagacaaaccaaagaattttttcttaaagacacactggtgccttcttttgtagatggcttccttatgttaagtaagaaaagaaagagaaatctgaatctgagtatatggcagattcttgagaacattctttgatggggctagaaaattgttaccgttaacattctaggtccaggaatgtaacttaaaaaccttgagggaggatttcagatcatggcattgcccgcttttancaaaaacttcccagggcgattatggnttncaaanaccctaattttgaaaataanntntttgnggaagg

SEQ ID NO: 134537 - DNA, 692 bp, Arabidopsis thaliana
gcacgcgtacctacgcttggatcctctagagcggccgcccttttttattttctctttttttttttttttcataaagacactaagccaatcttagctttagactgtcactttaatgtgcacaaaagtacaaatgtacagcatttgggggctgaaacataccctgactctgtgtctctcttctcagaccaatacataaaaagcgtcttaaaaaccatcagcggtaacctcctgttgagggtgaatccagcagcaacctccttctcatcctactacctaacccttagcttcctcctcctccgccattacccatggccccgggtttacagacttgggcaaacggtcctgataacccaccacttattcaagcattctgcatggtatttgtgcatgcaatccagcgttgcgattttatcttcgtttttgtagttttcctggcatatcgtgcaagaattagtcttttgatcagtagatggacctttttccacgttgattttggtcgaggtttttttttccaaaaattctttaacattcttttatgacaaagccagttttcacagttccaatctggtcgctcaaagcaagaagctcctcatatgacatattttctatgtctaaccgcctttttttgaagatgaacaacataatttaacagcatcgtcaccctattttccaaaaatgcattcttcattccg

SEQ ID NO: 134538 - DNA, 524 bp, Arabidopsis thaliana
cggccgccctttttttttttttttttgtaatatgctttgattgttaataaagaaaatatgtttacaaaagcttgaactcaagtttggtttcacatactcgctacattggaattgtaagtgagaacatttctaatcataactcacaatattaacactcactgagctatcaaaatcaacgccttgttcgttcctcagccacgttcactttaattgctctgccttccaaattctgtccatcaagagcagcaatggcaacgttaacttcattctcattcgacatttgaacaaacccaaacccacgtgaacgacctgtctctctatcagaaaccactcgggcatcaactactttcccatgctcgctaaataatcgttccaaacgaccactatccacatcccatggcaggttcccaacatagatcctaaacgcagcatcatatacacgaggttgtcgttcaggtcttgatcctcttggagctgctctgtttactgtcaaacgcctcccattcacttcaaaactattgaac

SEQ ID NO: 134539 - DNA, 456 bp, Arabidopsis thaliana
atcaaacctcaagagagagcagcaatataataagaaaaagtgaagatacggtttacatattatttagtaacgactatatcaaggacataggaataacagataatacttggaatgtttatcaattattatctagttaataacagtgagtcgacttggttttttccacaaggacccttttgccttatcagagaacggtactcgtcgaacctgattggtttataaagagcaggtcggtttgcagttactagttcttcgattggtccaaccgggatatcacttctcgggttatagaagaatgccaaagagactcgttccataccggaattaacgatcacttgatgttccacgcttttgtaaattccattgctaagtatctgaagttgatctccaatgttaacgatcaaagcattagggactgatttaatggtgacccagccatcaccacgacggacctga

SEQ ID NO: 134540 - DNA, 604 bp, Arabidopsis thaliana
  unsure (1)..(604): unsure at all n locations
gatacaaaaggttcctcagcatttgatttaagtgaacaaagaggatcaagtttaacattaagaaaacataacatgatgcaatgtatggaacttacaatagatcaaagaaataatctaaaccttgtccgatttcccagattgaaatgccgattccccagagacgagcattctcaagccgtagaaggattgacatcaatgtaggatagaaaacagcatgcttgatgttcttatcatctctatacatgaaaagatgttcgccgctctctttatcccaacggaaagttggcttgtgtttctggagtaatgcgaggtaatcccttccggtgattgctcctccacctcctgaatctccagagattacaaaatcgtggccgtaaaagttgataccaagaagaaccttcctggctatgtttgagtctatgttgttggatgacccaagcaggagcttgagagttaaatctatccacttgacaggagcatgggggccagggttctggggatttgagaaatcataggccataagggggaacccatcaccgatctttcagatgagactctggncaaancggaattgngctcctgacggggggccacgnaaacatga

SEQ ID NO: 134541 - DNA, 440 bp, Arabidopsis thaliana
  unsure (1)..(440): unsure at all n locations
nnngtaatggattcaacttctctttttgtttcaatgccaagaaaaatctttggtttatttcgaagtttcctctcacgtgatacatatagtgtacatagcttatagcttgggtttgctcagattgagccgttcgacgggttatgtatatgcctcgaagttgatttgctgccctaagcaacttagctttgtgaatgcagttttgagatcaacctcgtaatcagtctgagatacggtttcacggcttctttgatacttcctgaacccatggagcaacttgagggtcagtagctaagagctgttctgttgcagcttgatcaggacccaagaatgcagacattacagctagctgacgaggacccaatccaacggcaatgaacttatctttcatctcttgcacagttgctttcccccactgtgggactctgccttctctcgtgccg

SEQ ID NO: 134542 - DNA, 589 bp, Arabidopsis thaliana
tttaagaggaatttgatggcaatttatcaaggttcaaaagggtgactaaccatccatgcagacaaaactgttgacacagagtattttttaaacagagaagggccgggccattgatcgaagatgaggatcgagaagagacttcaaggtccaagccccgcaggctcgagacacaacttgaaccagcctaattacaaaataaaaccaaatagtagatccgaaaacagagttgtaattaaagttgcgatttgtgcactttatttacaagactcaagagaaccatcatcattgatccatatctcaacaaaaccctaattatgtctactgctgaaatcttcttgtatgttcataccattcttcaagcaatctgctttctagatacgatccagccggaggatacattgggccattgttcatgcctgaagacgtcaatttagtttgtgtatcaggtactgcatatgcttgactctcaagtatcttccctattctttgcatcttttggatctcgttttggttcatccgataaccaaactgtgagccggtgtaatcgttttgcgtgttattataatgctcgttagccacctgagacgat

SEQ ID NO: 134543 - DNA, 784 bp, Arabidopsis thaliana
tgacgtcgcatgcacgcgtacgtaagcttggatcctctagagcggccgccctttttttttttttttttaatgaaagggaaaaatttattatatattctagttcttacatattatgatacatacattgtcatagtaattattcaaacaacatcgacaatcttcttgttgtccctaaggatagtctattaaatcattccatcgatttcttcgaagtcatctcaacatcatcggaggacttgtcctcctcaaagtcttcaatcggtaaaccgaccttgtaccggtatccccgagcacaataccaaaagtaaaccagattaaccacacccaaaaccgcaatcagataatagaagtaatccaattttcccgcgttgagattcttgtttagccaatccggacgatcatgcccaccggagaatttatgaacgacagtcacaaggaaactactaaggtagctcgaaccggcgaacgataaagagaagagagagttagcgatacttctcatgtgctctggaaactgactgttgaagaactcaatttgtccgatgatattgaatgcttcacatagtcccatgagaattagctgcggcgaaagccaaaacaccgactttggaatcattcccggtggatctccggcattgatgggagcgtatgcgttttataccccttcacaaatgcccggcaaacggatcatttgaaaaagaaccgcgaaaaaaccgaacccccgggttccctaatccttttgggagggaagtgtgggatttccgggattttataggggccgggg

SEQ ID NO: 134544 - DNA, 573 bp, Arabidopsis thaliana
  unsure (1)..(573): unsure at all n locations
aagagagattcattcacttgtttaaacaaatcacaatacaaaggagacaaagtaaaattacactaagggccaaagtttctgagttttcaaagaaacttaagccacacctttccacttcttccccacctacttacatggagaaaaagacaccaaacttttaccattacataactttaaccatccctaaaaactacccaagaaggcggatttgagtgagtgtgtgtagaaagaaacaaggtgaattcacaagacaagataactcgagagacgagccactactacttggagcctagcttatggacacttctggtttttaccagggcctccatagtaaaagtaatgaccccaatcatcattgcttccggtttgaacatcataacagttagactgttcagtggaatgttccaagtcctttagggtgccttgagggttggttttgcccantcaaaccaaccctgaaatgttccttnaaggnaanttgcttttnnctaaaaggcctcntncttggnaaattttnccacnttncccaattttgtgttnaaggtgtnttnggccantctanattgtnnngtt

SEQ ID NO: 134545 - DNA, 623 bp, Arabidopsis thaliana
  unsure (1)..(623): unsure at all n locations
nnnnnnnnnnnnnnnnnnnnnnnnnnnnnnnnnnnnnnnnnnnnnnnnnnnnnnnnnnnnnnnnnnnnnnnnnnnnnnnnnnnnnnnnnnnnnnnnnnnnnnnnnnnnnnnnnnnnnggaggttgaatttctttatttcgaagaacaaaatacgagatttctttctttctttttttgccaaaaaattgaaaacctaaattgaaaaaaatacaagacagacaaattatttacaaaaataaaaaaatgttcgtcacttgcatttgcgttgaacttttcagtctttattagaccctaccatgccaatcaatcatttatcatcaatacatctccccaacggcaccgtcagcctcaatgacggcgtctgcgtcttctcaccatcctctcaacctctgattccgtcagttccgtcaacgcaccgttaaccatcctcatgtctcccacagtaatctctccttcgacgtcatcaccgacgtagatcttgtccacgtcacctacgtcaaccctaatgatcttcccgagtaaccttcccggctgcttccattccgcgagcaacgcgggcaccccaaaaccaacgcgtgcatcccacgcactcacttccaagccggcggatcctttcttctcca

SEQ ID NO: 134546 - DNA, 502 bp, Arabidopsis thaliana
  unsure (1)..(502): unsure at all n locations
atttnntaanatntctaanntnnttaactttcaaaaaaaaggatgcattttttgtaaaaatgtttttggatgaatacaattttttacattcattaaaatatatatatatatatatatgtgatttttgataaatgcgtagctatttagtgctttgataggttcaatggtagcttcttggatcatccttctgtgtagacagagacatcctctgaaagaatagaagattcatgaagatttgatatggggatttgctgcaaaacaggcctaggagggacttcaagagcttccaagcttccttccatcatctctacaactctgttcatcgctgggcgatctaccggagaaggctgaatacaccacaaacccaccaatgtcatcttctttgcaagctcatcttcttcgctgttaattccatcctcaatatgccttccagacttgcatgattcaagatccctatatacccattcaggaaagtacattgaacttgtgttagaagcacatg

SEQ ID NO: 134547 - DNA, 427 bp, Arabidopsis thaliana
cacaggaaaacataaaatatattgatatggaggagagacatacacatgtcttgaaaagtgggacttgagaatgaagagttaatgagataaggtcccataaatttacacaatacagaaccaaaatgaataatacacatttgatgaatcatcatgatcagaagatgagatttgggggattgaatatttgatcagtaggggttcctatgtggagtctgcggagcagaacgaggagggtttaaaagaggttgaagtgccttcaccacaatgctcatgtttggtctgaaatttgcctcatattgcacacagagtgcagccactgcagctagcttgccaacagctttgggagggtactctccgagtagtcttgcatcaacgcattgcttcactttggcttcacttagtttaggggttgcccatgtcactagac

SEQ ID NO: 134548 - DNA, 786 bp, Arabidopsis thaliana
  unsure (1)..(786): unsure at all n locations
taaaccnggaaacnnttntgggttncaaccaatcaaggnatttncaaaacncatnttgttaaaattccccnaaacccctccntcctttttacntccaagnggagncccaatttcatgnaccctgancagtgtnagcccccctgaagaagaaagaagaagaaaccggagtttgggcaagggaaagccagaggataacccctctggtcaagaatgaaagcttctgaggccaaaaaaaaccgattgaatcccaagaatgaatgattgcttacaagagtcagtcttgaaatctgttcatgctacagtagtcttgttttgttactaacccacaattttccaagttgctcacttgaaactgcccataagtcaaaacctttcttgttcgattcttcgccatgtatatatatctatgtacctttcaaaaggagtcttcaataacttctggttggggtgagagggtcgtaatcataagcttcaccagctttgacaaatcgcccctttacacgccgtctcacatcagctcttgctttgcgggaagcatacctcactctcttatcaaacttgcgagccttcttcttctccttgtaacgcataactgcgttattacgggttactgaatgtgagcaggcattgttatcctgtaatgttggaggataccatggtggctcccccgagagctgtatggaagatgatgcaccacattcttggaaatctccagcactactttctccagtgactccagagaaggatatgttcgaatgtgctggcttcgatgcgaagcaaattatt

SEQ ID NO: 134549 - DNA, 424 bp, Arabidopsis thaliana
  unsure (1)..(424): unsure at all n locations
aaggggtaccacataactttctttgtctatagaagaatgtggataatgtctttaatttacaagaatgccgagtacaaaacagaaaaacatttatgagtatacaaacaaatacaaaggcatatacaacaatcacatattgtttaaattactctaaatctccttccctgcctttttaactaccaagagaagaacaaaattcatggaaccctgatcagtgtgagacgcctgaagaagaagaagaagaaaccggagtttggacaaggaaagtcagagaataatccctctggtcaagaatgaagcttctgaggccaaaaaaaaacgattgaatcccaagaactgaatgattgcttacaagagtcagtcttgaaatctggtcatggctacagtaggccttgttttgtnantaaccccncaattttcccag

SEQ ID NO: 134550 - DNA, 444 bp, Arabidopsis thaliana
acaatggaaaatctctaccaaagaatttaaacaaaacaaagctctcaaagaaaggtctttggttccgtattagacaaatactcacgaaactagacaagagtttaaaaaagaacaaaaaaaaaaatgaaaaattgagatactcacgaatccaaactcttgtggcagtagaaagcacgaagaagatatacattttatgtctcctgcttctcctttatgatttcaccattatgatttttctgcagcttatgaaaatcatgaaacaaattggctgctggagaaagctttcgtttaatcacagtaatccgcgaatggctttgacattaatgagaaagaatttccaaaaggcgggattgagcatctgaaggagtatctcttccaggaacattgacccacagagtattccaatcttctgaaggtcaatgttcctgaaggagtatctaaacc

SEQ ID NO: 134551 - DNA, 532 bp, Arabidopsis thaliana
  unsure (1)..(532): unsure at all n locations
aggatgagaaattaactaagacatttaactaacaacactaattatcatccatccgtgttctctcataatctaaatatttttagttaaaacccccaaatttataatgaacataataataacaagagatcaaagggtttatcaaccaacagcttctaacaaaacatgtcttgaaccattactacgattccaatgagagagtaactcacattccttaatccttcttcttgttcagagctcctcttggaatcttgcttatgaccttacgcaataccttctcatcaagtactgcatattgctttttgatctccctcatcgccttctccccataggcatctactttggtcctccatactttctcgtagagtacagggaatggtgaagagaaggccagtagcagtgtagaccatggccagaagtgtagcagctgccataatgggcaaanccncaagcagnaattnccgggtaattcctggnatctttccggtggatgtccaagaggggaacccgttggtcacctatccgacagtgngaa

SEQ ID NO: 134552 - DNA, 459 bp, Arabidopsis thaliana
aaatatataaatatcaatatctgctggtagcatggagacataagatcaaactagttccataacgagacataggtcagaagaatctactcataaaacacaccattagtctctaaacaagcagcttcacttaatacataagttacctaaaccacaagaaccaatctttttttcctggattagacatttacctaacaatccttcattcatggatcaacctcaagcaccgcagtactgacttctgccttgtcagactcttcttccaggtccttaatcactctctgatcatcttcttcagcttcgtttcctactttaccagtctcagggatgcttgaatatgtttctttatcaatctcttctccctttgtcttagacatatcctccttctcaatcaattttgtgtctgcagtttgctcttttgctgactctttctcttctaccttggtcttgggttctgcattt

SEQ ID NO: 134553 - DNA, 265 bp, Arabidopsis thaliana
ttttttttttaacttctcaaagtcaaaagatattaaacctattatagccatgaatgtaagttcacttacttctccaatgtgaagatcactcaggccaaaaggatcaccgtgtgttgtaaaattcctatgaacatcccacttctcttaaaactctacaagagaaccccaaacaaaataaatggaaaaaaaacaaaataaaaacgtgtcaagaactcataaagattgatgagattcaataagcaacgcattgagcatgacatggaca

SEQ ID NO: 134554 - DNA, 593 bp, Arabidopsis thaliana
  unsure (1)..(593): unsure at all n locations
ttttcttcattttttggtaataaacaaaccgaggccatactcgcatggggtgcgattgagattattccagctcacaggtatccttattaaatcgatattgcctggctatatcatagtgtttatacacaaagcacaagaaacaataagcaatgttacacagtatctctcactaaacatattttctgggaaacaaaagattttcatcatgctctctgccatgcatctccttcttcatcacaccttccattgttctgactccaggttgcatttcactcattagcagcagcagccgcagcctggttaagaggattatctggtgatttcttccacatcttccatatcaagtccttgtactgtgtgtgagttagacctggtttctcagacttgagccttggaagttccacttcttcatatgccttaaaagaagccttgagcctcttctccgggtgtcgatcaacgggcaggtatctgacacagtaatccgggcaagagcctcgtcaacgggaatgtgccncgatgagggatcaccgcgattggaattggcaccagaccanctttcaantnacttccngcatggggctgtctctangctt

SEQ ID NO: 134555 - DNA, 439 bp, Arabidopsis thaliana
gttgggaaaatgcttcatttactgggaaaattcgtaacgtttggacattcaataatatagctttgacaagacattgactccggtagaaaagaaaccaagagaaatctaatgagattctcaatcgtaaatagtattactgaaagttgtccaatctgtttagagagctttcttcacctcgaaaaagttggagcgttcattgttcgctgcatcaatgtcttccgcggatgccacagccaccgcaacacctttatctctaaccacatctattgcttgtgcgaaatccttgaagtccttcaaacttgttgttagtatctcttcacgctttctttgtcgttcttcgtcagttactccgagtaaatgcctcaacaaactgctataacctttggcatcaggtaattggtatgaatcaacatcaccgatggtgccaataatagcttta

SEQ ID NO: 134556 - DNA, 555 bp, Arabidopsis thaliana
  unsure (1)..(555): unsure at all n locations
aaataattcccanaaacccccaaaaactacaacgggggaaattttgaaggtttgattccatgtaatgaaaccagaacgcacccgcatcaaactcgggtttataacagcaaaagtatctaacaaaaacaacaaaaaaaataccaaaaaggcggtttcaaaagcgttaagaaccttttttcaaaccccattacattcaacaacagcttcagcagctcgtcttggtttgttcttccttctgctcccattctgcctaaacccaatagacgacgatgatttcatagaatcttctgtgcttgattttgaccctaccccattctcttcttcagttatggtgcctctttagactccactggggttcttcctcttcctcccattctctgncacattttccttactggttactggaaccattggatcatcaacctgggcttcttcccaacggcttcttcaaaagnncttctcctcctcctcttcaancttnacgggttnggggggccccctttccaaagggggaccttttcccgggggcccggnttcagagagaattggnctggt

SEQ ID NO: 134557 - DNA, 454 bp, Arabidopsis thaliana
ccttatttattatgtaacgagaggatgaagccttttgacttcttagctgcttcttatcttatgttttgcttaatacattctttatgtacaaagagagagaggagagctatattctctgtttaccatttaacattttacagaagctcccattcagattcttctgatgattggttttcctctatcggtttcggattatcgccacattctctcccattttcaacatcttctgcgtaccattgccgggcaagtcgcttgtattctttttctctgttttgcttcattcttgaagatatagcgtctctgatcttcttgtaaggtttgtgtttgtcattctccatcttgtcaggaaacacactatggaattcgtctctatccacaagtatacagctttcttcaactgatctcccactaagatgttggagaatctctgacttcggctctgagacagaactcg

SEQ ID NO: 134558 - DNA, 385 bp, Arabidopsis thaliana
ttcttttttttttttttcctattataactccatttatgcaccatttctgttgggttgtatcagattattattgggcgcaagttgttactctaaatatggaaatatatttaaatacataaaaaagctaaaatctagcgttttcgaaaccatgcaagtcactgactctgttcatatgtttcctcaccatcgccactttagccaacctctccgccgctttccaagccgacgtcggagtaagcgactccaaactctctgatgccgccacgtgtcttcctttcacactattaagatcagctatctctgcgtccagtccacgtatacacgcatcgctcgagctcaaaccgtgctgcacaagcaatgctctagctgacgtcagcaatctatg

SEQ ID NO: 134559 - DNA, 541 bp, Arabidopsis thaliana
  unsure (1)..(541): unsure at all n locations
gagacaaagttctattgttattgaaatttaacacaatgtctattgactatgttctctttttatcttgtccctaaatgtttgtgtttgctacagatcttcttccacaattacttcaaacaaagcccatttccattaaacttctaagaacagtactcaacagtactctggatcaagttgtaaaaccttgagaacgataaacaaactcagtacacgagatttgctatcctctttccgtgttcataccttaagagattggattgttcattctcaatcttctcaggcagacgagctctttcttgtggcatacacacggtatgcagccagcccaacgaccacagcagcagcaccaatggaaacggccataagagagcggttggattagcctgttgtaatgtttgcggcgtttgcctgcttcgggctctgggatgctcaaatgaggatgttgtgctgcagttaagattttgcgggataaattgttgaaatcccccaattgggaggtttgagacggggggnnatncccaactggggancccgggggnct

SEQ ID NO: 134560 - DNA, 392 bp, Arabidopsis thaliana
ttcaaaacccaatttgattattggtcgtattattaaaaaaagagagttgcattcattaacacacaaatttgttaaagatagaagtacaaatatatttctacttgtacaagcaaaagtagtaaaaagaaaaatggcgaaacaatattctcatcgtctcaatatttgtagcgtgaagatctctcatgcatagtcttgtcttctaccttcttatctgcaaaaaatctctgcaaggatctgaggaaatgaacctgtttggttgatatattaataaagctacttcttcctttaattatcttctttaattatgtgctaaactagaagcaaccgaaataaagagagaaaattaaaataaatgaaactccgtaagagaatctgatctttgcatcggatcc

SEQ ID NO: 134561 - DNA, 459 bp, Arabidopsis thaliana
ctaataaattaattagtttattcttttcccaatagttctccaaaactgttttacaagccgacgataacattaaattacttcttaacaaaatcacaaaacacccaaaaaaaaagaaaaagaagaaaaaacaaaatcttatcacaactccatacaaaatttgaccacaccggcgattttgcaaccaaaccggtgtttggttaatggcaaaaatatcacacaagtaagagatcggatatcaaagaatcatcaagatcgttgaacgatgaaccaatctctttgatctcggaggagtagtattcttctgcgttgctatcgaataacataaggtcgttgaagaaatcattctctgttggttgaataggagacataggttgatcgaagatggagatgtctggtaatgattcattgaaatagttgtcgagaaatgtaatgtccaatggaaatgaatcatcattagta

SEQ ID NO: 134562 - DNA, 709 bp, Arabidopsis thaliana
  unsure (1)..(709): unsure at all n locations
tgacnnnnnnnnnnnnnnnnnnnnnnnnnnnnnnnnnnnnnnnnnnnnnnnnnnnnnnnnnnnnnnnncttttttttttttttttgaagaaagctctactttatttggctactgttcttatacttacaaagggaatagttaaatactgaagaacatgaaaccaaatctagtgctttacattgtttgagtcccttaacttggagggttttacacagatataaggttaccgaagccatcaacagttacccctttcaggacaacgttgcatctacttcaattcttaaaacacgggacaaccttcaacaacaacacctttggctagagggcaatgcgctagagggcaatggtctgaattctcaagcccccaccaatcaggtaagcttatatcattgttctggaatgcgaagaatatcaacactcccataatcgcagtacctgcatcaagcgccgcagagaggatgtaattgtgcctcgcccaccaagttttgaacctcctgaagatgtagtagttgaacacaaccccaacgatggcccaggaccagtaatgcacagccttaccttgtggcatggcgcttactgcagagaagatcaagggaacatggatctgttttagccatttcttctctgggaacttcttcgataggtaccagaagggaactggatcgaggagaccgataaggaagaaccagttcatcccgggatagatacc

SEQ ID NO: 134563 - DNA, 416 bp, Arabidopsis thaliana
atccttcttgtgctgcttctccttgtgcttttcctgcaggtgaaatcccacgagaaaaagaccacacgtatataagtgatgattagaagaaaggcatacaaagatttagttacctttacttgtcaactcttgggttacctttacttgtcaattcttgggtcaacttatataagttttcagagaagaaaccaggttaatcatcaaattcaatgagtatgcgtctacattcattcaaggataaaggatcacactagtgatattactaagtttggcatcaatggaatacaattatctaacatccaaaaccaccagctacagaaacccatacacttcaatatgtcagcatctcagcattctaagttagtcaaggatcctgcaatgcttgctgggtactaagaaaaacaagtggaaggaca

SEQ ID NO: 134564 - DNA, 440 bp, Arabidopsis thaliana
ttcctttttttatttatattaatgcccttccctatatttgcccatatttgtagaatacagctgatgctcatagtcatagctcaaatcataagaaagttcacgaacagttcacttcattgccacactgtttgctgcaatccgcatcacttactgctgttacaagcccccttctctgcatatcaagaagcaaatccgaagcagcggccatgtttccctccttttcataagctctaatcaagagatcaaaaacagccgaatcaggacttattccgctattcaacatttcatcgaaaacttgtcttgcctcaaccatcaaacccttgctagctagcccgtaaatcaatgtagtataggctaacaaatcaagcaaaagaccttcctgaaccattctggtttttaacttaaacgcatccaccaaattcccttgcttacacaaacca

SEQ ID NO: 134565 - DNA, 452 bp, Arabidopsis thaliana
gcggccgtccttttttttttaatgtttcgcatgattgcaactgagggcggaaattcatggaaatacaaagcattaccaaaagaacaaaaggtcgagaatttaactctcccttgaaaagatagactactacatgtgaattagaaaaattcaaaagaactaaggctgaaactaaatcagccattattgtaattgaaaacacaattttgaaaaacatgttgagatgaaacaactacatctttgcacaatctgttggcttaaatgacaccgttttggaaacagcgtcgtatccaacaagaaagctcatctgcgccacattaccgtatatggagaaactcgggctttcgcggaaggcaaagcaaaccaaatccttcgagacttgtacaaaggcattggaggagtcaagcttcacatcggctccatcaaaatgcatagtaatgactggaacttttaga

SEQ ID NO: 134566 - DNA, 415 bp, Arabidopsis thaliana
cctcaaaaaattgaatataaagtttttgtggtctacgaaataatacattacagaaaaaccactattttctgttcttattcgaacgggctttgtatattgaatgcaaagcctaaaaaggttaaaaatcctctgatagaatccatcagaatctacaacagagaagagaagagtaatgtctccatcctttcttcccctttcgaaggtggctcttctcatctttctcctttcgaagttgtctctcctcagctatcaccattcgaagttgggtttcctcagctttctcctttcgaagttgagtctcctcagctttcaccattcgaagttgagtctcctcagctttcacctctcgaagttgggactcctcagctttctcctttcgaagttgtgtcttctcagctttatcctttcgaacttt

SEQ ID NO: 134567 - DNA, 307 bp, Arabidopsis thaliana
  unsure (1)..(307): unsure at all n locations
caacctcatcacttgattcacgatgnaccaaatatgattttcatgtttcgaattcacaaaattctttgaagaataacaagagaaatctcagacatagaaaaaaaaaaaaaattttccaaagctttacaagacataacccgttttggttcatttgttcaacaaacttaactaaatggtcctgaaagatgttgaaattgagtaacacagtggggacttcatgaactttcctttgctttctttttagtcttcaagctgttttggggcactgcgtttccaaattccagccaagacgctaccgaggattgag

SEQ ID NO: 134568 - DNA, 810 bp, Arabidopsis thaliana
  unsure (1)..(810): unsure at all n locations
nnnnnnnnnnnnnnnnnctatcacgtcgcatgcacgcgtacgtaagcttggatcctctagagcggccgccctttgttttttttttttttttttttttttttttttttaaaataatttcatgtatttcataccaaatgcatacaaatacatatgtatttattttagtcgaatacaaatatgtatttataactcgagaaatgctttcttcacttatattccagatgtgttactatgcgcaccaccaggaatggtcacattgctgttgtcgcttatagaagaaaccaatttgttgtcatcctcacttttagttgtgataggcaattcttggaggctattcttttcaaggatatctaatccggatacttcatagtcttttccttttccccaaacaaccatatacaaacccgcggcgatcactgcccctcctattacacatccgaaatggatttgttcatgaagaataaaagaggcaaggagagctacaagaatcatgcagagagggttaaaggcagtaacaaaaactggccctctcgtcttcataaccatcccttgaacatagtacgttatccccgagctaactattcctgtttaaagaggtgcaaaaagccttgcattccaaccaaccgcccattcggtagggtgtctcttcaccacaagcgctaccgcgaagctttggacagccccggctaggcatattaaggcctgataatgaaagatcggcaggggtaccttttttatttgttatcgactgtaaacatataaaccgcccgaaccaagcaaccacaaccgggggagaaatcaacaagggtt

SEQ ID NO: 134569 - DNA, 749 bp, Arabidopsis thaliana
acactatcgaccagctatgacgtcgcatgcacgcgtacgtaagcttggatcctctagagcggccgcccttttttttttttttttttttttttattctatatgaattataaacccccaataagtctatacaaatagaaataagaaaaccaaaacaaaagagttcgaacataatccaaaagaaagaagaagatgataatcacaccatagtcaaaagaaaagaggacataatcagtgaattcacttcacaggtttgcggacgagccttgaagaaggccatctctaatctgagaagccacatcacgaaccgctcctggtccatgaggtatgaacacggcagacgacttggagctagcaccaatctccttcattgtgtcaaagtactgtgtaactagcaccatgtccatcacatctttagcagttgtcccagggacattcacagcgaaacccaaaacactgtcgggtaatccatcgacaatcgcctgcctttgacgggcgataccaagaccagagaggtacttggactcagcttcaccttcagctctcttaatctggaggattttctctgcctctgccttttcgtttgcagccaatctcatccttgcagcagcgttgatttcgttcatggccccgtttgacatgttcatcaggctcgatatcaacaatgagagtttgcacaatctcataaccggaaggccgacattgcctttttcgagctcctctttaacaagcttttgaaataacattctttt

SEQ ID NO: 134570 - DNA, 184 bp, Arabidopsis thaliana
gtggttagagggaaacgcttggttgaagcactaaattactgaaacgggggaactaagcacacacttcacaacaagcttttggcttttgaaagagttaaaaaaacaagtttcacattgctaataaagaataccagacagtcattgcaatggccttttttcatccctaaagcacaagaaagagggg

SEQ ID NO: 134571 - DNA, 426 bp, Arabidopsis thaliana
  unsure (1)..(426): unsure at all n locations
tccttnnnnttttattaattttccttatcgtaaacgcatcaaccaaatcagtgtaaaatgcaaacaatctatgagtttgcttcaaaaagtaaaaccaacgattgttaatctctctactcgtgatcaatctcttgaagaacgatctcccatttaagcgccactgactgtactgtaagcttgataatatcccttcacaaaagtctaaccgtatcttttagaggaactctatcaaaaacttgatctgagcatctcaaaaagttaaaattttagcactatggacgataatatttataatcctcttctcatactctactctaaccgtgtttggaaacaaacttagccgagacaaggacttctggtctcaggagggggcagcatcagcgtagaaccaaacaatttcttcgacaatgatgatcccgcagaaaa

SEQ ID NO: 134572 - DNA, 261 bp, Arabidopsis thaliana
ggggaaaccaaaaaaaaagccccgattaatgaaaaggaccgattggtcccccgttcatgaaacccgatttcaacttcttatttacaagagttcaacatgaaactccggggaacgatggggaaccttttttagagggaacccaaaggggaacttttaaccacaaatccaaaatttttttattttctgcaaaggatcttcattagctatatatctctgcatctcgatttttcctttaacactcccatcgaccaattttttttt

SEQ ID NO: 134573 - DNA, 452 bp, Arabidopsis thaliana
cagaaacatgttttgaacatatactctattacttaaaccatatagtggccatttatgtgcgtaatcttctgggtttggggaccacatggtcatatttcaacatggatgcatagtatcagatttttctacaggtctacagcacaaacaataaataatacatggagattgactctcataataatttcaaagcttggagttggaagttgctatcttgatgagatctttgcgtagaatcttgcctgaagggttctttggtattgaagatacgaaagcaacttttcgtatcctcttgtatggtgctacttgtttcgctacaaactccattattgtcttctctgataagctgctcccagttttccttacgacgtatgccattggaaattgccccacttctttgtccggaaacgggatcactgcagcatcagtgatttcaggatgagtaagcaacaaag

SEQ ID NO: 134574 - DNA, 362 bp, Arabidopsis thaliana
agaaacaatctgagtttgaatttacatggcacaggaaggaaacaacacctacaaggaacacagccaaacaaaaaaaatccctgaaaccttgtaatagaacacataaaatatacaatctggttcccatttatgagttggggaagggtatgcataacgagatgtgtgagatagaaagttagaaattggttatatcgaagaaccttaccatgtttctacaaaatctccccatgtctgctgaatccagtgtcttcaccgtccgtgtttgaatccaaaccacaaggagagtcataccatttcgagttttcttgatagaagctatcgacttgtataccagctaaacctacatctgtttctatactacc

SEQ ID NO: 134575 - DNA, 311 bp, Arabidopsis thaliana
tttttaatcacgatgcttttcactcttgattctacttttttaacctcttggttggttacacgttaattaggcatttgcaagagcaagtgttattttatcaacattttgaaacttggaacaaaagacaagtttggggaagagattttaaacagcgagacaactaaggagagaaaaggccaaaagagatgctacagtttacatgtgattgaggctgttgttgttgttgtctcccttttgcttcactctcaggggcagggagatcaatatcaatgttcccacacttgataagatggagaataggatgaccattt

SEQ ID NO: 134576 - DNA, 477 bp, Arabidopsis thaliana
cgacccacaagcgagaatttcataaatgcttgattcttactaaacaatgaaaagtaacatcgcagagtttgaaagttgtcggaaaacaaaccaagagtcatcaagagggaaggcaaagtaacatccaggattgtcacgcaacgaaaagaaaagtatcacgcagaaagaaagggaaaggaaacaacatccttcagtacagaatgctacatagagcttttaacctgtgaaccatcaaggtgactcactgcctttaggggaaggacggctaagctcagcctcatcatcaatcgggctcctgtcttgaccattaagtccaacaggactttcaccacctccaacaatgggactcgcagagttcctgccattaccattctcttttgggctaccatcatagtctgatccacgctttgggcttgcatctatcacttttcggtctggactcaggctttggtccctacctttgggagatacagatcg

SEQ ID NO: 134577 - DNA, 431 bp, Arabidopsis thaliana
  unsure (1)..(431): unsure at all n locations
nnnnnnnnnnnnnnnnnnnnnnnnnnnnnnnnnnnnnnnngggtaaagaatatatggctccattgatcagctgtgattaacaaaattggacaacaaattgaatgaaggaaaaaaagaaccaagtttcataactatagatatggggttatgtacaaagcgctaacacagtgaactagccagtgtgggatggggatattcttaagaaattttgcagactaaacaaatcttcccaaccccattcgctatacactaccttcgaatgccatttcctacgtctgtgaacctgtcgactaatcattcttttggtggttgcaccgaataacagtgtttgacaatgcaggagttgcttcatagttcctgtaaaagagtcaagctcttaggcttattagcagcttctgacttcattcaagtggattcaaccttggattata

SEQ ID NO: 134578 - DNA, 360 bp, Arabidopsis thaliana
cgattacaaaatgtgtgcttagattgatgaagttacaaaagaacctcgagtttctagtctacgaatgtcttagacttataaacgaacaaacaaatcgttttctagtctatacatcccttgaacttatctagcgaaagttgtaatgaacaaaatggttatggaggatttcctagaggagttggctaatgcatacaatagtacaacgtgccaaaagggtcacatccgatgtggaacaaaacggaaagaaggaacgtaggtgaaagcgctctgctttgtagctaaagttcatcagaggaacggctttgagaagaaaaaaactgtacagccatgtcctttgctatttgaagcaaactcttaacg

SEQ ID NO: 134579 - DNA, 472 bp, Arabidopsis thaliana
tttccctttttttttatatgtttatgatcaatctttattcaaatctgttaaacatactaaaagaaaaaacaaatcaatgcttcataatgtatatactaatgtaagatcaattcaagagcctctttcatgatctcttcttccatttcaggtagctaaagaagtgtctctctggaaccggaacagacttcactaaccatccaatcggccacgatgcagctgcgatggcaatgcaaactccccattgacccaagtttagcctctctgtatcagcaaatctcttgagaaactcaaccatcacaacttgcaaaaccacagtcacaactataattccaatgaagagtctgttcttgtgtaaccctttaaacacattcttcttctccaaactcctagcgttaaactcgttgaacacctgacaaagcacaaatgtattgaagatcaaagtgttcttcactttctcagtcacgttgaaaat

SEQ ID NO: 134580 - DNA, 490 bp, Arabidopsis thaliana
ttattaatctctctctctctctcttcatcgccgccggcgtcttctccggctcctccgctctgtctcgctgctacttcttcttcatcttcctgatgaatactcacaaaaccgaagaaggcctgttccaccatcatgatcttgatccgacggctgacatactcgttcaatcaccaccctccattctccaccaccaccacgaccacaattccgaagtcgatcccgcgttttctctcccggaattcatactcttccgctcttctccttccggagattctcccggtctctcctcagacgagcaagacgattcccttaccggaaacccccaaattgctgattcgccaaattctagggtttcgagtgcaggaagagatgggcttttcatcagccccgatcctcatatctcatctcagttctacacattcaacgcagcttctcactctctcatgtgtcgctgtctccgcgagggccgtctcgctactccggcggagat

SEQ ID NO: 134581 - DNA, 409 bp, Arabidopsis thaliana
ctcacagaaaatttggttttcttcttgacatcgaagaatctattgtgatgttttgtttacacagagataggaaaaaaattaagcttttagcttgttctcaaagagaaaataaactctgaaggagagaattgggatacagatacaatagggtttagggtagtgactccttcaagatgaatatgaatgcttaccaaccaccaatggctatgcctctacgtctccgtcttcctttttgcaaccatccaatgtatcaagcaaagatatcctctgtcaacaatggttcttcaccattcacacagccttgaggtgcacactcgatttgctcatagttaagttgtctggacgcttcatacagagcaatccctacactcaccgaaagattcagacatctcacatacgtttctaccat

SEQ ID NO: 134582 - DNA, 387 bp, Arabidopsis thaliana
gatataacaaatgcattcggagtttgtgatgaaaaacactacataatcatgtggttacataactacaattagatagaacataacatatccattttcgttgtagatctttgacgtctctgctcaattggtagtcaaggaggctgcctttttgttgcaaagcttatcgcagatgtaaacacagttctacgtaaccaacaaagacaccattgcagctgcagagtcaggtccatcattgtttacactcggtatgatgacttcaggtgacactttttgcacaaactcttttagctccgtgaagctgctatgctcactgtaaggaacctcgtaccttattattgtaccctgttgcaaccttcttcctggggacttctttttagtcttaccaga

SEQ ID NO: 134583 - DNA, 352 bp, Arabidopsis thaliana
caatgtaatggcaaggccaaattaattatttgtattacaacattttcacttattacaaaatgaataatcaccacaccattcacagaatcaattagcacatttttaatcccaaaaaaactgggatcaaaaattttataaaaaaggtgaaaaaaaagaggattgagtttgagttagcaagcacttccaccggttgtaacacaatggttaagtgcagaaaaccaagaacgtttcccttcaacctgcgacgttgatcgcctgaatcctacaccggatcttgaatatgatccaccaattaaccggcttcgaggttcatcaacatctgagccaccaaggcagagacttggaggaaacc

SEQ ID NO: 134584 - DNA, 546 bp, Arabidopsis thaliana
  unsure (1)..(546): unsure at all n locations
aagagataaattgtagtgacaaatcctcattaacaaaatattgtaagagataaatacaaaaaaaaaatcaaatcaaaataattaacaaatatgttccatagttttcagatctatacaacatgttttagacattgacttacaacattcagaagaacaacaacatattttgaaacagaaacaaacatttgacatgagagactaaacgtcaatattgttctctgtttggtaaagctccaccatcttcttcttgtttctcttatgcagagtgtagaagtaagatcctaaagccacaactgttgctatcaaagtaccaattctaggccaactaaactcatcatccatgaaatcaaatgccaacacaacaaacaaagccacaagtggtgaagtacacatatgaacaacatcgccaaacacacccgaaacataaagcaccaaacccatcagcccgaccgcccaaacgccacgaatgcaacccgacactcaacggatcggtcccttctnacnggggncgctgngcctntccgcncggaaacccggggaaaccgg

SEQ ID NO: 134585 - DNA, 506 bp, Arabidopsis thaliana
  unsure (1)..(506): unsure at all n locations
tttnnttnnntncctataacatatcaatacctttataagatgctcttattagtattaagtatatatatactaggccaaaaaatactacacatggattcttttctcttctccatgattcattagaaagaagaggagaaaaagagagtaaaactttaccacaagacatagcagaacttaaaatgtagacaaaacctggaaaagattgaggaaactctcatctggtaaacaaatatgatgtctgtgccaagccggcttctctggagttactttcctgaaaaagttcaatctttgcagtatctcgcgtttcaccagaagttaatgagtcattcacaggttctgcatatgaacctcttttaccggatttgaagcaggaaactaaccaaagtgttgactttattgtcggtaatccaagaaggagagattccccatcatcatccncccttggcaaaactggtttgaaacnccttnngnaanagccnttggggaaagggggngntcngntnnta

SEQ ID NO: 134586 - DNA, 398 bp, Arabidopsis thaliana
cacatatggctttcgatagaaacggtgtcaatagtagtattacaacacaccacagaaaaagggacgatctattacagcgtttcaaaattgtggtttgtttgatattaagcttcagactgaacgtttctggtcttgagaccgaagagattcttaagcaaatccgccgtgtttggaggaatcttcgctggtcgtggagccataaagttgacaatcttctcatgaacattatacctgatctttctgctctttgaggcacgtcgatccacaactttcctcttcttcgtctggaacttcttcatctcgtagaaagccgcctctgaggaagctggatcgatagtcttgagaaactcctttagtaactgcctatagaactcagcatcttccacaagttcagggtc

SEQ ID NO: 134587 - DNA, 385 bp, Arabidopsis thaliana
gacccaataaactcgaattgataaaattcaccagaatgagccaggtgttgagagatttggctacaatctatgagacaacatttgaccttaattaagtctaaaacatcgtttgcaagtagtaaaaaaaacaaggattatgtttgtgacaaacacgacaaaacatttaagaaactttaaacagacaaagatgaaacaggaatcatcaaccatgcgaggatctcttgccacttgatcggctatcatcataacgacttcgacccctgcttgagtattcacgctctctgcttactctatcatcatcatcatcttcctttacccgttgctcgtcttccatcacctctgtacctgtctctcccatgcttatgactcttcctcatcatgcctt

SEQ ID NO: 134588 - DNA, 499 bp, Arabidopsis thaliana
gttcatatgaacttgaaacttttatttcctgaaaccatcataagaaacaaaaaaaacaaatcaaaagttcataaaataagaagatcaaaagaacaaagacacaaaccaaacatgagcattcaaagaaacagagaagacaacatataagtagtctctctaatgggtagtcactttaagtcttaaagatttattaatccaagccttaaaacttccaccagctccttttctagctccattaatcggaaaattcgatcttcccttatcttcctcaaccttcttctcctctggtttcttcttacacaacataaagttcctcactcccaccgacccaattgcttcccatggactcaaagctccaggtccaaccattggacaataaaaaacaaaatcgttgaaatcagatccaagaataggaagacgaccttcacgagcataacatttcaaagcagtatcaatcacagatgcaacaagatcaccttcattagcaacgaaccggatc

SEQ ID NO: 134589 - DNA, 328 bp, Arabidopsis thaliana
gtccttgcgctaaataaaaagcatttagctgctgcgttgtaatgttccatatatattatacaatttaaccactgactaacttagaaggtcctacaactacaacagttacattttaatcaacacatctacacaactcacacttaatacaaaaatcgtaggtactctctgtctttaaaagttacatccttcgttttccccatctttttccggtgtctaaaccaacgagccttgaagatgatggagcaggtgatggaccttctataccaacagactctggaatatccagattcccttgcattgattgcgcagatgctactagtgactgttc

SEQ ID NO: 134590 - DNA, 396 bp, Arabidopsis thaliana
  unsure (1)..(396): unsure at all n locations
ggattnagaagtcttagagaggacatattgggggcaaaactgagcatgccggggtgcgtgtgcaccaaatgccagaaaaaagaacacatgcattttcaatttactccgttcctactactctcatcatttcatttatcccactccagctctaactgtggttcagtctttagatgagaaacattcctcgacggcagagcttcagtattaacgtgaccagttaaccgattccaacccatgatgtgtggaagagcaaaactaaaagctgtcttcatcactgcaaattcagcttttgtgacaggaaccacaaaatagtcattggttttgaggatgctattgttaacgctcaatgagatgaagtagccgctaccatctgcgtggggcttaactgacagtgac

SEQ ID NO: 134591 - DNA, 558 bp, Arabidopsis thaliana
  unsure (1)..(558): unsure at all n locations
gcattgccccnaacaaaaaatcacgggnngaattggtttctnaaagggnccnccaangggtgacngncttcctttgaancaaggtctnaanatttaaatgctnctttggctgacccatnggacccatgtgtcaagcatcatggaccttaagggaaattgagtgacccgtaggtccttcatttaaacccggcttcctttgttgcctacgtggaatggaactgttgcggctgctacaaactctttctggcctgaccattccatttcgtgaacccactttgagtttccgagccaattgcagatgagatcgtattctccggcataaacaaggagcttaattccatcttgaagaagagctggaatcccgacctcaagattccgcatccagtccatctgcattgcttcgtagaccgctgtactgcaagacacaaactcgatatctcccacacctaatgccttccgcaccgatttctggttcaagaaattctccatgttcgagaaatcatagcacaagcttccttcacattgtttcctcacgtcataatagtttaccggacgcgt

SEQ ID NO: 134592 - DNA, 388 bp, Arabidopsis thaliana
aaacaatgaagtttcctgtgtattggtggaaataattcacaagtgtgtgttatttagcttttcttaaaagtaaaatattgatctcctaaatacataataattcagccggttcggaatttggatttactgatgagcggtccgaccagtgggtgtactgagctttccttgcatccagttctgaagcatttgcaatgctgcctttggctgatccatcggaaccatgtgtccagcatcatggacctttaggaaagtgagtgaaccgtagttcttcattaaacccgcttctttgttgtctacgtggaatggaactgtcgctgctgctacaaactctttctggcctgaccattccatttcgtgaacccactttgagtttccgagccaattgcag

SEQ ID NO: 134593 - DNA, 340 bp, Arabidopsis thaliana
aagagtgtgtataaatatattctattatttcacaaacttatatttatgcaattacatctttatttcaatcttcaaaagagaattaggatctaatgaatctaccagagcaattgaaagtgtaatgtgaacagttgcttactgtgagtttttgactgtttttgtctgctctgcttccagctacgcctagcaatgtgtagagaatgtacggtggttgaaaggccgatgcacagatatattatatagaaagcctagcaggcagccagagtcgcatttgcggttttcgtctctagaggtaccacgttattactttggcctttacgtgctatctggtttaagtgat

SEQ ID NO: 134594 - DNA, 386 bp, Arabidopsis thaliana
  unsure (1)..(386): unsure at all n locations
tnnntatattntattttatcacagtaacacctttttgggcaatactgtagtgttaaatggagatctctctaggtaacgggtacattatattttcatgtttttattttttttttaaacttttatgaattattttttagtggcaagcctttccttaatcttatcaaccatcttagatcccacttgaaaagtcttagttaacacatcttccggcaaagccggctctgccgcaaatagggttgccgcaacagaagccgttcccggcaactgactattaaatgccgacaaaaccgacgcgggagatttcccattgttcttttgaaaatgcacaagccctcttggaaaaacgaaaacttcaccaatctttatggttttagtgaaaagcttat

SEQ ID NO: 134595 - DNA, 384 bp, Arabidopsis thaliana
caaaaacctaaagattcattatcagcgcaaattacggatcctttgatgacaatgcacaaatgatataaacattgctggctttaggttcggtagttttacaactcacaacaaaatcatcatcatcaaaatctaaatttctacatagtgttttgaggattaaaccttcttcttccttctcttctgtagtagggagtttcatccactgttctcttcacatactccataaatggtgatggtgttcttggagattcctcatggtatataactgtgccgcttcttctttctggtgttccctgtgctgcatttccactgtatgttgccgttccagtagctcctgtgggcacttgtcgatctatcactttcatcaagatgatcactgataca

SEQ ID NO: 134596 - DNA, 760 bp, Arabidopsis thaliana
tgacgtcgcatgcacgcgtacgtaagcttggatcctttaaagcggccgcccttttttttttttttttgagccattaaaacaatggatatagagagaaaacacaggtgtgtccatcaaatgaggatcagtagtaacaacgcaatcatacaaagtaagaagaaaaaaaaaacaagacgaagaaaagggatgagccggggcatcaggccacagcaaaactcacccgaatcaaagctttttattgagcacacaaaaatccccacacctaaccttacaacactaaatgtcacactcaaagagggagaggcccacacaataaacccccttcactctggccatctcattacgggttaagaggcattgccataggaaacagatcctcctcttcgtaacatgattcttcagcaccagcgttctcactttccttttctgctgatacttccctgtgatcttgaggtttttctgtgctaaaagaatcatccccttcttcgtgtatctcaatatcttcttttcccaagtccttggggtcacaatccaggatgcaatcgccaaatatatgagttgtttttgggtttggtccatgagaaattatacaggtatagtcctcagagagagccatctcacgcccagagagggagcgagagtacgtggagatgatatccataggggatgatgaacttgatctccttggttcctccacaatgacacaaggatcactggaaagcttgggagttgctgtattaacattgttgaccttgacctg

SEQ ID NO: 134597 - DNA, 420 bp, Arabidopsis thaliana
cctgggtgattatcataaaaaggttggggcacgcttctaaagcttatttgggcttctcaattccagctgaaaccatttaaatcaaactgtttaggacgcgttgtgccatagttttcgtcgtgtgtgttaagatctagagctgttcttgtgtgtgtttcaagcttgcaatcttcattattctcgttgaatctttcttctgtatactcactgttgttgctactccttcctctgtgttcatgtaatcccactcctattgacaatcttccaggacttcttcttgaagacgagattctcggttctgcgttgttaaccattgttgaaagatatggcctggtgtgattctctctgaggctttcttcttctgcccatgtgagctccattctatggaagaatggctcttccattatctctttttgctct

SEQ ID NO: 134598 - DNA, 371 bp, Arabidopsis thaliana
cgcttgtaaacaaaactgcattcacactctggcgggcataaggtatacacagagtcatagaatcatggacatattttgtaacacatatattgacaatttgacattacgtaaatgcaattaaaactggaatgtaatttccggtttaccagtcaacatacaaaaccagctttcggtttaatattcgtccaaataagtgtagagcgtatcgtccttctttgttttgcgtcggctaagtagcgcctttagcagccgtttgctcttgctcggttgttgttgatgctctggttctttctgagcttctttctcgaacgcaacccgaaccgaagccgatcttcttggttctgacggataccgtttaggagttggagtta

SEQ ID NO: 134599 - DNA, 395 bp, Arabidopsis thaliana
tttgtgaccaaacaacagtttcctattataagactgcgcaaaagtggattttcaaatatttcacaagtcacaaatcgcccttccaggcaaaaaaaaaaaaccagtgtctatgaggcttacatgcaaacccaaaatgctcactattatccaaaattagctttgcaatatcagcaactcagctgacgcatgtaaagagtaaaggttttatgtggacaccaagtttttcgtcattggtcttcagtggctctttctagttctgctcacgttagagctctgatcggtaaggaacttgaggacatcgtttagggatcttagccggtcccaaatgttgagtccataaggggtttcgactagggcctcctggaattcaaatgcgttttctgctaccggatact

SEQ ID NO: 134600 - DNA, 739 bp, Arabidopsis thaliana
  unsure (1)..(739): unsure at all n locations
acgaagatgcgtcgctttttaggtaaatggcattttagttgggcccttaagtgttaggttttaggcccaaataagtccaatctcctaagcgacttttttgttatcggcccaaatttagttactttgtgattttaccttcaaaacactaaacccctgtctggaggagtgttatgtgatgagtttcagacatttgttaatgtctgtaaaatgtaaacaagaaaaaaagaaattacttgaacacaaacttggtgtgtttctgtgatttaagatttagataagtataaactttaaaatggtaacgtttttcgagcgaaactgaatcagattatagcagagacacttgtaatgtaaacaatctaaagcaaagctttatcacattaagacagtgaattatgtgaagatagggtcttgttgttgttgttgtgtgtgttgaaatgtttagtcccattgttcttcccagaaataagtccattctgaagaatttactgtctgtttgccatctgctgatacaagatcataaggagagtcatctgcgaattctgttggcattgatttccagtgaagtgatggatgccattccgcttctttaaccactcttagtatctctcccgctactattttgcttccttgtgctgacaaatggatccccgtctgtgaagcaaaacagtttnccagtcatntgcttcntgaaaaggtagagaagaggctcaannacttnctangnccggggtccttggga

SEQ ID NO: 134601 - DNA, 564 bp, Arabidopsis thaliana
  unsure (1)..(564): unsure at all n locations
caagaagaagaaaggaactttcttttatttatttcattggttttatacatatcaaagatctgattatgcgaaactgtttacaattctcccattacaaaaaaaaactgctaaaaggttagtaaaaaacataactcaatttctctaacgatcctctccaacagaaacataagtattacatataattcgattctaaatttcaccaaccgtaagcagctttttttctttcccaatccagattacaaaacccaaaacatacagggtacatacatacccctcatgatctctggctttgggggcttccatcaaggccttctattcagtgtcagacgggcaagaaagaaatgggttgggagaattcggggatagcgggttcatcaaccgctggaaaccgcgacaggntcagctactacatcatcagctggtcaagttttgcaacttggggttcaattcattgttacagaatctccaacncngggttaacccccgtcctcctgnctccaaaaccacgtggggcatcgaanccgggganggatggcttncctggtncccaggtccaaactntct

SEQ ID NO: 134602 - DNA, 422 bp, Arabidopsis thaliana
acaaaagaaaaatgaaatttattagtctcctttgttccttgaagaacaaacaatgggaatagcaaacaacgaaactcacgacacataaccaacacaaatgtatacgtacgtcctttcttgcacaatggcacctcaaaaaaaagaaagaataaataatcaaaagtgaatcaaatgaattgaaaaaaaaaaaaacctattaacagaaaaatgagcctcatcataatcttgtcgtcaataggcagagctactctcactagcagagagagaaggcccttcagatttgactaagcttgagctattgctactaatctccagcccttgcattcggccgttctgtagaaagtccgacacgctttgagaattggacatctccataggattgaaactagaatgcatctgcatatcatggaggttcattgagc

SEQ ID NO: 134603 - DNA, 481 bp, Arabidopsis thaliana
tttggcaaaagaaaagaaggatttctttatttttgattcaatttaaggagaatcacatagcagaaacaggagaaagatgagatagatacaaaggttctttggctaaaaataacaactctgctccaactttgaaaagacgaataaaacaactctgattgctaattttcaccaaacatgtgttcaatcttagcctctagatagctgaaaagtattctttgctgagcttggggtcaggtttcattgatttctcccctggcttccatcccgcagggcacacttcatccgggttttcttgaacatactgtaatgcctggagggttctcattgtctcatcaacactttcggccaatacccgaggttgtggatggtggaatgctgaatgactccttccttgtctatgatgaaaagccctctcagagcaatgccctgatcagggatgagcactccaaacgattttgaaatggatttagtgatatccgaa

SEQ ID NO: 134604 - DNA, 408 bp, Arabidopsis thaliana
taattattatagcatctacagatatcagaattcaggtaccttttttgttctataaagagcaagtttcaaatttctttttgaatcatactttgacattgaagatatagagctttagcacaactgcaagagcgagctgcaaaagaaagatgctggcgataatcaggatcgatctctctccagcggaattgatatgcgctttgaggttcaaagccacaaatgttgcggacatgaacccagctacacctgcgatgacccatctgaaaatctccactggcacgaccgagagacacaatgctgggataaagacgaaaagggaatagccataaagacagaagagttggactaggcctgatggtgcagagaagtatttgagaacgacatataatgcgagaggaacaattgtgacat

SEQ ID NO: 134605 - DNA, 417 bp, Arabidopsis thaliana
gtcaatgcttccgtcctcttttatctctggcgggacgctttcggtttccatcgactttctcgcgtcttctacatctttttcttcatcatcatcatcagaaggaacatcgacgcaataaaccctaaagcttggagatccaggaccaatcattctctcatcaaagttgttgatactcccttcatcaacatcatgattcttaccatcatctccttccttcttaacattgatgacgaccacatcatcatcatgattttcctcctcttgcttcttcacaacctctttattttcctcctcttgtttctccacaacatcttgatgatgattggcctcttcttgtttggtcacaactacttcttccttcacctctttaacatcatctttggatggaatcttttcaaaataacctctttcttctct

SEQ ID NO: 134606 - DNA, 410 bp, Arabidopsis thaliana
  unsure (1)..(410): unsure at all n locations
tccttttttttaaatanattaataaaggatcttttccttttgattaatctctgtaatactactcattatttgaactcaaggtaacgttacagatagaacttctgatgttcaaaaacaaagaataaagcaaatgaatgacagtgttttcttctgaaaaatcgttttatgtgaaatcatcagaggcattggagatttatgaatcagaacagcttgcagaaatcatgcacttggaggcttgtaaagcttctcaaccatcttcctgtactcttcttggttactccaaagctgagctgcttgagtgttcaatggtgaactgatgttcggctctcccaggaggctctgaatcgatagtagtatcgtcctcacatcgtaagcagatgaccacttatcctgaagaatgtctaagcaga

SEQ ID NO: 134607 - DNA, 610 bp, Arabidopsis thaliana
tcctttttttttttttttaagagaaatagaagaatggcattaagtattatggttcacgagttatagttgaagaaatgatgtcacacaccaaacacaggaaaaccaaaaggtacaagagcttttttagcaagttaaaaatcaattcttcttaagagcattcccaatagctaatacagagatgagaaaaaaaaaaaaaaaatctagactgtatctagagagtttcactttcaaaaaataaaattaagaaaaaaaccatgtcgagattctgacaaaacgatgaacaaaaactatatttatgatcttcttcttcttcatctgggcttttttatccccaattttcttctcattgtgtttttggcttctcgatcttgacataagggagaactcccagaaagtattttacctttgggttccatccacgttgctgagctctgcagaacatcaagaatgtgtttgcgcagtaagagttgaaactcatgaacacatgccacagagcatgtccctgaggattcacaggccactgagatatcgtcttgcagaagacacggtcacagaaccagcatatgcttcccactaagatcgtagcaacataccatttcgcaatcctttt

SEQ ID NO: 134608 - DNA, 395 bp, Arabidopsis thaliana
cctcgtcacgcttacgctccttctcctttgccttttcttgtaaactcgttatgtattcctcaaataacccttggctaacactttcatctccaatcgatctaaagatattcaaaatgggaccttaagaaggtaataccacaacctttttttacgtaaggtaagccatgaagcaacctattcaaggcaataaattatttacctgtactcttgactttcttctactagttggttgctatcttcccaatttgaagctacggtgatttccttgaaagtgtgcaacagattggtaaattcttcagccagacgctgaagctttctggcctctttttcttctttttgcttcactctcccaaccaagtcatcatatataagctttaaatttatgtctgatatct

SEQ ID NO: 134609 - DNA, 408 bp, Arabidopsis thaliana
aattgaaaagattcattgaaattttttggtgagggatcaaattacatacaaaaggggtgtatgtaaaatctttcatcaagtttaatgccatttaggaacagagattctgagccgctttgctctcttcacgtttgggtttcaacctgaaggagatttttaccctttaagatcattctcaaaaacccaacaaacagaagaaccaaaaccaaaatgttgggcaaagtcagctatataactacaaatttgtcctaaccatgtctctcctctctatttctctctctctccctaatacttaagatacagctttgcaggtcttcttgttgtgtcctaaacccttgccgttgctacactggagctgacgcttgaacatgtccagcggttccacctgcttactctttggcctccctg

SEQ ID NO: 134610 - DNA, 339 bp, Arabidopsis thaliana
aggcaaacccatactggagataataggaggtgttccgacaacatcaatcacatgcttaatagtattattggaagaagacaaaagtatctaataagacataaaaaagggtgtagacacagatttcgtctggatataataatacaattacaaaagaaagataaagctgagaaaccaaaagaaatcctgaccttcctataggagatctcattatggctactttggttggtctcttgactgctctccattatctgcaaaaatcatatctttttaacgatctgaacaacatcctagtcctcaagctcgtgttactttccaactctttgaggcttgtgtttggca

SEQ ID NO: 134611 - DNA, 365 bp, Arabidopsis thaliana
  unsure (1)..(365): unsure at all n locations
aattntnggatcattcgcattataagagagctaaatagttacactgtttcagcgaagaactgtacacgagggatccagcagcagatttttagtcaaaagatagaagctgtgagactgagatagatatatggaaaaaaacctaacttattcttcctggtcttggtctctgatccatttggttgccacccatttctctcctttggtcaccgggcagctcccgtgaagcgaagtctgatcaatcgttccatttggaaacacggaataaaaaagaagaccatctcctttccgaggctttactttcaacccaatacattgcttgtaatcgtatccgatgcccatattagaaccgttctcaaatgggaaca

SEQ ID NO: 134612 - DNA, 477 bp, Arabidopsis thaliana
aacaaaaagaaaaggaaacatgttggcaaacgttgtgtcatggttaatgatttgcttcctccagattaggaaacgcagtgtttcaaattatacaagatctctaccaaaacccaaacggatcaatcataatatgaaatcaaaacggattcgatcggggagaggaacacatgaagagtaccaaagagaaagatataaatccacacatcatttaaacacaaaaaactcacaacggtctcccctaaagcctttgtctgagctcttgattctcttttcgcaacaactttaactccttcatttgctccgcttggttctccagaatcgagcttaacaccttcgacatctccatctcgtgcatgtggaactgtctgaggatctcaatgtgaaggttccttacgtcgtcagaattgagttttggaaagaatccagagttccttcgagcgttctttgaaatagctgaagcgtgaaattgctactacc

SEQ ID NO: 134613 - DNA, 399 bp, Arabidopsis thaliana
aagacttaactataactagtggcatctgggtttttaccattaaatgtatgaatacaaccgtccataaactgttcaaagaaaatcctctatatattagaggataaacaagcatacttagaaaagaagagacactccaatcttgaatcttcccatcatagttatcaaggtaattttacaaatttgtaaccctataagcccctaagggaaggtaaaaccgtaaaatggagctactttcaaatgttatgaaacaaactctagaatctcaaatgtacatgtaagatgatgtgttcctgagatcttcaggctttagttttaggatacaaactttttatgttcttttgggttgatttatatatcatcttgatgaggaatttcgtgtacaaagaaactagcggcgac

SEQ ID NO: 134614 - DNA, 506 bp, Arabidopsis thaliana
  unsure (1)..(506): unsure at all n locations
atcagttgatttatttctgcacttctcatgtctttgggcaaaggaaacaacataatcttgaaagttttcataaattgtcatatgtgcaattgaaaacactgagacaacattacataatcaaggttcagaagaatcctcacaatcattgtcataggatcctgtcaatcttcgcatgatgttgaattatatgaatcagaaaggtatggattgccgatcaggccaagactcgatcttctggaagtaatcgacaggcaatacaccatcaatgccttcagtcaaaatcactttgttgtctgatatgtagaacgcaatcccatcttcaagagctttccttgatgtcgaggaagatgataacatttacatttcttctcatgccactaatcacttcaccatctgttggtaatccacaagagaagtgaacatgcattccaatccatacgcttaagccggtgcaaagatgggtccaatctcngataagtccatgacaacntggnntctctggggng

SEQ ID NO: 134615 - DNA, 403 bp, Arabidopsis thaliana
  unsure (1)..(403): unsure at all n locations
acnaaaaaggcttcgaacatttccactcaatactgattcacaagggaacaaacctctttatttggttcagattaaaagttctaagagcaatgtccttatttaaagatgattgggcatcacacaacgttttgggacttacatcaaccattgctgcctgatggaagaaagcttaagccaagtactgtttcatccaggaggtgaagcgagaccaagcaagctccactgcggcttcatcttcatcagaaagtcccatgcttttccttctgctcactccttctggactcctgttcaagaacgcgtgtccattacctggatagatgtgaacttcatgtgctactccagacgctttcagcttcctttcgagattttttgctgccgtgacatcagaaaaaccaacaaaatt

SEQ ID NO: 134616 - DNA, 463 bp, Arabidopsis thaliana
  unsure (1)..(463): unsure at all n locations
aggtncgcacggtcatcgatcaagacttgaatcattcgcaattacgcggccgctgtctctccaagttaaaaagagagttgcagggtgtcttattctcaaggggacaaatatctatttcccactttagttacaaagaggcaatcttctcattcccccaaattcaaaaaaactcaaaagtaaaaaaaaaaaaactgcctaacacactctaaacatggtagtgtccaatctcatcatttctttcattattgaggacaaatatctacattaagctcttttcccggttttaaccgaagtcaggagctcaacaccagacccttattacactcttatgtctttcgcatcagagctttgcctggggattcaagaaggttccaaggttagcaattggctgctccaagagcatttgacgggctggactggggtccgggggtaattttggggggggcatttcggggntcgtttt

SEQ ID NO: 134617 - DNA, 527 bp, Arabidopsis thaliana
  unsure (1)..(527): unsure at all n locations
gataaagtatgtattttgtatcatttgaaacatacttagagaaaaaatacaattatgtggagatgagaaaaaatacataaacttgtatgcgttctccacttcattattaaccaaagattaaacttaagaacttttcagattttttttttaatttctgtttccaaaaattcaatagcttgcttaaagggtatcatggagagtagaaggaaggagctgggaggaaaggaaacggtgcagcagaggcataagccaccggaggttgagccacacgtttctttcgcctctgagttttgacttcaccagatacagaatttgttaatccggcttcttctacgagttgttgctgattatcattagagacacggtgtagaagaagaccagaccatgaaaacaggaaggaagagaagctggcatggaacatttncctngcttatgcatggccggcncngnagaatgaaatgcngttcaccgatgccagtnganaggttgatccggggaaccactggggtaccccngcaaggngngac

SEQ ID NO: 134618 - DNA, 577 bp, Arabidopsis thaliana
  unsure (1)..(577): unsure at all n locations
accattaaaaaagataaatgttattaaacaagttttatatgtcctttttccttttagagtacaccacagagaatagaaaatacacacattccaccagttaacaatttacaacaaccccaaaggcaaacgtgataaaacaaataaaagaaaacaacgcaaacgtttaaaattcaaggttgagaaaggaacgtcgcgtctgcgttctggtcgctgcagtagagacaagggtgttgatgaaaccctagtctctcaagcacatcccttgccatcatcactagttgcttgttcttcatggcaccttcattttcgttcaacaccctttggaatcgcgttgctaaacgctccgtacgctttcccgttcccaacgccgacgtcagcagacgtctcatccgcctgacanccgntcatcaatatccctgagtccacgngtttttcacgggccgtcataagntccaaaagntccattagntccattgccggnaccggaacttaagccagattngggccnaagggcncagtagatgnggccgtgcggagtnaattccgggnggaccaaggggaaggntncctnaaggng

SEQ ID NO: 134619 - DNA, 680 bp, Arabidopsis thaliana
  unsure (1)..(680): unsure at all n locations
nnnnnnnnnnnnnnnnnnnnnnnnnnnnnnnnnnnnnnnnnnnnnnnnnnnnnnnnnnnnnnnnnnnnnnnnnnnnnnnnnnnnnnnnnnnnnnnnncgttcaataaggtttattttgcaaaaacgtaaaacacaagaaaacaaaattacaaaaatatgctgatattgctctttccttaagttgttacaatatcagttttttcttacttgtaaggtgataataaatccgaaacagagttaacatcttcatcgtcctcaccatcttcaccatcaacatcatcttcatcggagtcaacatcagaaacttgatctaagaagccatggtgatgatgatgcgagctccaatcaggtgggaaagtcttctgcaacgtctcagtgagctcaccacctgaagcttcaatcttacacagacatttagaccagtgaaccgcagttcccatatcaacaatcaagcctgcctccaccatttccttgcagatagtcatcactcctgagtaaatgtaagcttctgcgattgaagcacgcgacagaagcgaagtcagaaggcaatgatacacagctttgtcgggttttatcccccggacgcgtggnnnnnnnnnnnnnnnnnnnnnnnnnnnnnnnnnnnnnnnnnnnnnnnnnnnnnnnnnnnnnnnnnnnnnnnnnnnnnnnnnnnnnnnnnc

SEQ ID NO: 134620 - DNA, 391 bp, Arabidopsis thaliana
ctgagaagttatgtgacttaatttcaagaagagaatttgtctattagaattttcaagaacctaaatagaagaacgttctggtgtgaatatccaataatgtttcaggttgcaataactctgaacataacacgacacagattcagggtctcttttgctaggctaacaagaactcacttgatcagatcagataatcgaaagaatctatctactccaagcttttgtaacttttcatcttctcaaagtcggcttaagcttgggaagataaacagacacaatgtagcagaaacaaggactgtgtataagcagggctttgtgttagtagcagaagctgaggttgacctagcaacaatgctcgcaacagactcagtttaaagaccagacccgtaagcaa

SEQ ID NO: 134621 - DNA, 373 bp, Arabidopsis thaliana
aaagagactgtcaattcgtacagatacatagattgaaacaagacataagtatgtgtatccctcccaataagtaagggagggtgtggccgtaaacttcacttaccttacattcttacaatatcttttactttgctttgagctaacaacgaacttacataaaatttacttttgtagactccctcctagtgtcgatctcacaaagagcattcatgtttgttggtggtagatgcttaaattcgcatgtgtttcctcgtaacgctgggtgaggtatgtcgaacatttgatcggtggatatttaggaagctcgctttccgacttgcaggttgggagacactccacgagacagtcatgatttggttccacaaagaatgga

SEQ ID NO: 134622 - DNA, 416 bp, Arabidopsis thaliana
ccccaccagaaacaataaatgaattgggatttatagtccataaactttgtcaatcttatagtctcatgaaaattcacatacagttttgcattaagtaaggcacaacaaattccacaacctcctcatccgatatactgaggtggtcccctaacacactttcaaacttcacttttccggcaacatccaatgctttcagaccaatccaatcttctctgtacaacttcgtctgttgagctgacaaaagggtatcgaatccttcatcttcataataaccaaaccatgcagtttctttagggattaacattgtatcgctctcgaacatgacaagaactaaattgtgtaagttagtgaatcggtctttgaaagtagagtttctttcgtcaggtctctcattgttaagctttggtagatacttg

SEQ ID NO: 134623 - DNA, 764 bp, Arabidopsis thaliana
agctggtgctcgcgtacgtaagctcggagcctgtatagcggacacccttcgttctttttttttaattaaaaatttttaaaattataatacttatataatcatatgttaataataagactgggcattgtataccgtgagagctctttgtaaaacatttgagagccgaagtagacatttaacagattcagattacacaaacataagaggaagattattacatttgaagaagcatacgtaggttgagttcttataaccaagttcaagggtttatctaatagccttaccggagaatcattgccggtaaggatcaaactggtgttgggactggtgttgggacattggatatcggcggctgcggtgctacagcaaagtgcagtcctctgcgttgaggcccaccaccgtgtatcatgaaagtaacttctgcggcaactagagccgatgcttcctgtctttgtcttcgacgttgtaatataccgatggccccatgccatgatgtaacatgggaggagaaaaccagcagcacgaataaggaatagagagaaaaaggcagttggatcgtcctcgtcgtctgggttcgctgtgagattttaacgcatctcgtaaccagtaaaaagtgcctattagggatgaagagccacccagaagcgaccaaaaagggccaggttcccgctttggagtttaattttcttcaagaaataattttcaattcattatagtccttgcgctttcccaaaggaaaaatggaaccgatttctttggcaagg

SEQ ID NO: 134624 - DNA, 408 bp, Arabidopsis thaliana
ttttgattcgaagatagccttttgactcaaaagttcaaagttttgtttgatcattagataagaaacaacaaaaaggtggattttctaagtagcacacactcgcaagaactcttttttatcttttgagtcttgatcaaaaactggatatagagaatcatactgcaacaaaacaatgccctacgagcttttcggatttctccttgaaaatgcgagggagaatctcatgtgcgccgatatccagagcttgcgggtccctgcacaaagtttgtcccttttctttcgagctagatatgaaccaaactttccgaagagagggagattcaaactgaacaaagattccatcatttggtccgagtttccatttccttgagcctacacctttccacacctgtgggtaggatatactac

SEQ ID NO: 134625 - DNA, 770 bp, Arabidopsis thaliana
cgttaattggctgttttcaacgtaatacatatggtcagattgtattactaagaaaataaatagaaaatggagagaaaaatgaagaaaaggtttttcattacatgggtttaatataaagtacaagtagacgtgttcgttgaagcaaatgcttaagaatatatatttagtgtgattttatttctgttcactttctaaaagaggatgaagcgtgaagccattcctggattgcagatcgaagagcaagatttggaactaactttgaatgataaagccccgtgtttggcaatggggaagccccatgccccccctgaagccatggacttagggcttctgcttcatatggaaacccatctgctgctagttggggaaccttcatcacttccagtgaaatgggacagatgaagtactgaggagcttcacggtgctcatcagatcgagagacctcttttcttagctcctctacttctataattgctatgtcgcgtcctttaatcaataaatctcgttcttccttggcttttctcaaaactttcgttgccaagttatacttgtcttgcagcttttgtaccaacatataagactcggttattcggttctcagatatatacctcatcttttcgagtttttctctcactttcttcagctccatctctgtttctttcctttgtttcaactcctccaaataggcactttcccattctttaccccttttgattgcttcatttttctcttttacaacttcttgatgcttgaaagcctccaagcttgct

SEQ ID NO: 134626 - DNA, 512 bp, Arabidopsis thaliana
  unsure (1)..(512): unsure at all n locations
ctttgaatataccactagtggtcgaggtggtccttaagaaacacaaggacatggaccatcatatgagttgaaatcaggagtcaaaccaaaccacaaattaataactacaatcaaaagaaattgtgttttagccacacaaaaacaagcgaaaaaaaaagcaaaataacatgatccgagtaacataattgcccttctcagttccactccaccaccaaataacataacccgagtaaaatttgtatccaaaaaaacaagatcaccatgagaatatctttaaatggnctagccagtgaagcgaaatgaagtctcctatagcanatcatagaaatgnttgatattgattttctctctcccagcatagatagcttctgcagatccancgttttctccttgcggaccatttctatnagcatgtaaatctnctttgntttggantggnaattgggggcnntgaagttgntcancatcatcctcttgggaggggttnaggtnntttaggccttttttnngcc

SEQ ID NO: 134627 - DNA, 471 bp, Arabidopsis thaliana
  unsure (1)..(471): unsure at all n locations
aaaacaaattttttcttctaacacatcaaattaaagaaaacagagagggagggagggagggagtaaaaagtaaaaacctaattttcaccctcttcctaagaaaaaatcaagaagtaattgagcattttaccccaaaaaaagaaggaaacggaaaaccagaatgtgacgggagagtttcattacaccacttattacattcacttttcttagttgacatctctagctcccttcttcccttcactataattcgatcgcaaatcttcatataggccagtttttagctagttccgtacaatatctcttcctcggatggcgccatgttgagatcagggaggacgaagaaactcccctgattttgcgagtcactggttttgcaagattttgatccctgtagccgctcgagttgtgatttacgaatcaatcaacaaggttcntggntgngaaacggccgagttaaagtcagcttaaanc

SEQ ID NO: 134628 - DNA, 574 bp, Arabidopsis thaliana
tgcaatctccagctttttagtactccattcgttacaagtattacatttatatttctgtatccattaaatataaattcaagtaagaaagttccaaacaaaacaaaaatccaagaaatttttttagaagccgtgaattctctggccttcttctacttgacaataccttatctctctgactcttctctgaaattttttaactaacaactgaagaaatctccttttggatcattccaaaagtttcacaaaatccagaagaaaaaaaggaaggaagattatttaggaaaatttcaattgggaaaattatcaaaattccctctaggaaactccatttccaggaccttggacacttaggatcaggactttacacttaggttttttgaggtagctacaatgggggttttacctttgggtatagttccttcaaatccttcacatgtcactttgatctctactccttcactcttgaggttccccattatcatcttcactttaggtctgatctcgatctcatatcctacacgcgcgcgcgtgagatctgatctcagatgcttagcttcatccggatctaactcac

SEQ ID NO: 134629 - DNA, 471 bp, Arabidopsis thaliana
ggtcattgagtcatggttgtaatggtcatgagtcattgagtcatggctgtaaacttcttcaacaaggaatagattcccacatttatatgccagtgtatcttatgaaaacaaatattatattatgttcacatattgctgggtgatccaaaaatcctcaagatatctattatcccagaatcatggactgtgtgagtctgtgacttaacacaaatcattgcgtcgtctccttgatgttcttctatgtgcagaccatctttcttttatatctccaggtgtgccaatccgttgctcatcgggcgagtgaccatcctccattactccagctgcacggatcctggcggtctcagccaacaagtcatggataagcatctctgtcgtcttagccgtgattcctctgagataccaagaaatgggcggaggtggaacaatcgctggctgtattagctggtccagcgttaccttagatccgat

SEQ ID NO: 134630 - DNA, 273 bp, Arabidopsis thaliana
gtaaaaaaaatctctttcttttataatgactatacaaatcatattaatctatccataaccaatttcggagaaagaaaaagttagttataaaaagaacttttttcacggcggccccgggggaggtaaatcactgcacgttgtagacacaattacttttccggcacgttcaccggactttataagcatcaacactacttctcttatcgtcggtcgatcagacggcgaagatttcgtacagagcacggcaattttcgtcactgtgatcatatgatt

SEQ ID NO: 134631 - DNA, 518 bp, Arabidopsis thaliana
  unsure (1)..(518): unsure at all n locations
agcttaaaaataaatgtcaattaaagagtaacaacagtttataaaaacagaagaattattcaacaacaaaactaaaaccagagagggacaaaagcaaagcagaaaccagagagaaaaatccaaagctgcaataaccttaaacttgtctttaagaaagctggcgcctcttgtaacgcaccatcacattgcctttaactccaaccaccatagcgttccagtcaatctcagggaacggtgaaactagctcaagctcgaagttcctcaacaaatgactccatttggctttgatctgcaggtaagcaaacggctctccaaggcacccgtgccttccccctccgaatgcaatgtacgagaatgccctgggggtttngtcctcttntcttcnagggggngatntttctgggcgtanggtgtgggggnctttgaanngtgcggtaancggttggnaatgcaggggnngtttnaacgatnngccctttgggtaccgaagttttcctccgggtgtacggngnatatta

SEQ ID NO: 134632 - DNA, 389 bp, Arabidopsis thaliana
acatataagacatttagatttaacttagatataataacttacaacaacgattactctgaatgcttataccagagaatatctatgtcttgcttaaaacaactcgaactcaagatgatcgcctatggctttacattcaagatacctattattactgcctccaggcgaatccgccgctgcctctggtccaccaccatactcatagaaatccggtagctcaggcgggattgcacaccggatcagagcccaattcaatccttcaaaaaaaggatgtcttttgatctctacagaacctttctctgacccgagcctgttctctgggtccttaacaagaagtcccctgatcaagtcttttgcctggaagcttacaagcgggctatcaggaaacttga

SEQ ID NO: 134633 - DNA, 756 bp, Arabidopsis thaliana
  unsure (1)..(756): unsure at all n locations
aggccccggttggatgactttctnnnnnnnnnnnnnnnnnnnnnnnnnnnnnnnnnnnnnnnnnnnnnnnnnnnnnnnnnnnnnnnnnnnnnnctttttttttttttttttttttgaaaaacaaaaggtattaaatatacaaatttataacagttgacaacatgtaacaaagcccacaagctttcgattagtacaaaagaagaatatttcactaaaacgtttctactttcttgtacaagtaatttaatttgccaaataccaatcgctagccgctttaaccaaaatatattccacacttcaaactaaaccgggttttgttccaatgtagtaagtaggtcactctcaggttagcttcctcggcaagttataggtctttttcagaaacttagtcgcaggttcatcgtaacggtaacacaatactcttaaaagtgtgtttggttctgtcggactccacggaccagaagttgggggtaacggaagctttcctttgtcagaaccatgattcttcacacacactggtttaaaccggttaattaaagaaatttgtattcgtggcgcagcaacggaaagtatacttcttggacagtctcgggaaaacctttttctaaataaaatccaaaaagggcaatcccttgcttcccgtttttgaccccggaaaaaggaattccggatttaagaaaaaaccttggaaaagaactctttttttatttatctggggaagacacaggaaaatcctcttggagaaatttgggtaga

SEQ ID NO: 134634 - DNA, 666 bp, Arabidopsis thaliana
  unsure (1)..(666): unsure at all n locations
nnnnnnnnnnnnnnnnnnnnnnnnnnnnnnnnnnnnnnnnnnnnnnnnnnnnnnnnnnnnnnnnnnncttttttttttttttttttacggaaaaacacacggttttaagtatacaaatttttcacagttgacaacatgtaccaaagcccacacgctttcgattagtacaaaagaagaatatttcactaaaacgtttctactttcttgtacaagtaatttaatttgccaaataccaatcgctagccgctttagccgaaatttattccccatttcaaactaaaccgggttttgtaccatcgtaggcggggggtcactctcagggtagcttcctcggcaagttatagggcctttttcacaaacttagtcgcagggtcaccgcaacgggaacccaataccctaaagagggggtttgggtttgccgggctccccgggcccaaagtgggcggggacggaaacttgcctctgggagaaccatgattctacagacacaatgatttaaaccgttgaataaaaaatttgttcttcggctcagcggggaaggtaatcttgcagtcacaaaaactttttaggcaatccaaaagaatccgtcttcgtttgccggaaaagatatgctagaaacttggaagccccttctaaggcttcaaagtttttatttggggagacacc

SEQ ID NO: 134635 - DNA, 823 bp, Arabidopsis thaliana
catgacgtcgcatgcacgcgtacgtaagcttggatcctctagagcggccgcccttttttttttttttttttggatacaaatttttaaaagctaaaccggatatgagattaccggttcttacaaagtcaattacacaccacgaaggttcttgcaagacatcatcatttgagatccccatgaaaaaagaaggaaggagaagaaagtacagatgtggttacacaagtagatatatgatatctcttataatggttgtacaaacacaggtcacaagttagacgcaacaaacaatgtcactgcaccaatcccagtcagtcagacccgggttttttgggatacctttagtttaccaagacaggttattttggtttctcaacttcaaagcaatctgaaaacaatattagacaatctcccagtcttctctcgacatgtcgacaaactcggtaacaccatcctcgaacatcaccgagtgctttcttgaatactcatcaaaatgtctaacgaggccaaaacacctatcactcgtggggcgagataacctgatcaccacaccaatgcaattacgcgaacatgtatccctttgactaagattgttccatgattttcctgcatctatgtgtctatttacaagtccattttgatgcacccttgggcagtgtcttgggccaaattaatgtgcccacttagattaaaaaagctttcaatcccgagggcttatctttaaggttttgcttagggttttttaacaccccaaagcttttcctttctttgcaaacccttacaagccccccaccaaattgggccaggtctttggaatcttggcacc

SEQ ID NO: 134636 - DNA, 689 bp, Arabidopsis thaliana
  unsure (1)..(689): unsure at all n locations
gtttctnnngaactctattagagctatgacgtcgcatgcacgcgtacgtaagcttggatcctctagagcggccgcccttttttttttttttttttttaagaacaaaccggtctttggatacaaatttttaaaagctaaaccggatatgagattaccggttcttacaaagtcaattacacaccacgaaggttcttgcaagacatcatcatttgagatccccatgaaaaaagaaggaaggagaagaaagtacagatgtggttacacaagtagatatatgatatctcttataatggttgtacaaacacaggtcacaagttagacgcaacaaacaatgtcactgcaccaatcccagtcagtcagacccgggttttttgggatacctttagtttaccaagacaggctattttggtttctcaacttcaaagcaatctgaaaacaatattagacaatctcccagtgcttctctcgacatgtcgacaaactcggtaacaccatcctcgaacataaccgagtgctttcttgaatactcatcaaaatgtctaacgaggccaaaacacctattactcgtggggcgagataacctgatcaccacaccaatgcaagtacgcgaacatgtatccctttgactaagattgttccatgattttcctgcatctatgtgtctatttacaagtccattttgatgcacc

SEQ ID NO: 134637 - DNA, 590 bp, Arabidopsis thaliana
  unsure (1)..(590): unsure at all n locations
ggctaatgaaagtgaagaattactgatacatgataaattaaatccgatgggaacctctcaacagaaccaaaatacaactttgataaacttcaacaaagtttttattaaagtgggggaaaaacatgaactaaaaaccagtaataaaagaaaagatcattctgcagcattcatcagcatatttagtacatgctgtacttgtcgttcgtcgcttcgggtcgaatgctcttgtagatggacatggcaattggaagaatggctgtgagagcgatttgcaactgatccgagctgctggttctgactgtgatctgtccgctcatcttgttgttaagtcctgcacgaagcgcaatctttgagttccttccaacagagacttgagattggagattggctcccaagggctaaatccgcctctccactttaccagagacagccccaaagaagattggtcctgtccaattgggnatcagcttccctaagcctgacctcgaggtccgaccanaggccgatcnccngngatcgattgnccangntgccaaagacacctttccaggnaattggcccggttaccangggggttnccanatgaagca

SEQ ID NO: 134638 - DNA, 727 bp, Arabidopsis thaliana
  unsure (1)..(727): unsure at all n locations
tcgttnnnnnnnnnnnnnnnnnnnnnnnnnnnnnnnnnnnnnnnnnnnnnnnnnnnnnnnnnnnnnnnnnnnctttttttttttttttttttaatatttgtttagacccgttagtaatcgggtttaaatgggtacccgttcaaacattacaaatagcccgtttagacccgtgggcctaaggtccattttaacaacactacatataacaaacaaccgacccaagtcagaactatgggcagctttattataaaacatggcagtgtgtgtgtagaaatcagattctcatggcttgtatgtcaaatctctcgtcatagagtctccaatgtccatacctctccgtctgcgccacatcccctgaccttggcacatacacatctgggcttctttacctccttaagccatttaaagccttgacacgttgcttgtaatgtcacggcttggacaaattgcacacacccaaacaagtccaagtactctagcttgggacaaccctcacatatcgaagcaagacccttgacagataatctagagaactgaatctccaaatgctctagattgatcatatgtttcccaatcgcgtcagcttctgtgtctccgtcttgaggacaagcgtctaagtattctgtaggaacagagccaatgtgccgagaagaccaatccataagattacgtttcaagancctcagattaggacagtttctaccaatcatnacaagagtgtcgtgag

SEQ ID NO: 134639 - DNA, 606 bp, Arabidopsis thaliana
  unsure (1)..(606): unsure at all n locations
ccnccatccccgtcgnagctganctntaggnggccccccttttttttttttttttttgngatccngtttactctggcacttctgccaattgtttagggcgtacaaacatttaaagttgtccgggtaacaacaggtttcacgttttacaagatacacgagtatacagaaacacaaaggcaatctctgttctttgggatttgaatgcctcacaataaagaactatacatcagagtgtgatactgtctggggagtgagaacgtacatatgacagtcgtgtgcgtcaacttgagcttcaaaggagccagaagtattctctgttacatctttgtgctgccacaaatctcttactgaaacgctaatggtagattcaagaccgatcatatcccatgatgctgtaatagttgctggctcagagcaacggttccagagagcaactaccatacggtcaccagataaaggtcctgaccacacctgctgacaatcattttctccattggcttgaattttccttccttgaacaccatgggcttggtaacagggtaatcccctattacccnaatccccaagttcagnggcaggtctaaccaccatcagggggctcacagt

SEQ ID NO: 134640 - DNA, 363 bp, Arabidopsis thaliana
aaaaaagaccacgagaaatttttccgtcgggtcctttagtattgggtcttagcccattaagagttttacatttaaataactttgtcccttctgattttcacgttaggcttggaccaacggatctttaactaacaatggaactacaaatcggagaatgtggcgggggcgaattcaatttcaagtcgaacggccggcggtgaagtacgccaaaggtccgacgaaggcggcgtttatataagtcgccggttccgcgtgactataatcggctctttgatctggatacccatcgttttgattcggaccttctacgattgctccggtgagaatgttagggttagggttttgagtgtaaaacgattggaa

SEQ ID NO: 134641 - DNA, 641 bp, Arabidopsis thaliana
ttttttaggatcataaatcgaaatatctttctcttgttgtaaataagatgatacagacaataatgagaatacagaaccaaacaaagcaaaacagagcatcctctgtttcgccgcaccaaataacagaaggaccagaataaaacacattcagttatcatgttgaagcaagccagtatctttgaatttctcctccactaagccatcaatacgagcagccatctcaggagtcaaataattagcccaatctccaacctttcctttcctaaaatacgcgctattcgcataaacagcaggacgatcctctctttctttatcacctttgttagcttcaagattcttcaacgtctcaaagctacaaagcttcaccactttctcagcaacaccattctcctcttcctcatcagtgaatccataacccatgaactcagccaatctcttcacaaaaggcaaaggattggccctcatggtctcgtacctaaggaacaaaatcctatctggattctcttggtaagctttccaataacccaaaacatgatccagataaggaccatacacagataaacctttacaaaacatatcaaagctgtcctcaagactcgctaattgaccttcttgagacttctccttgtgtaagaaagtcc

SEQ ID NO: 134642 - DNA, 434 bp, Arabidopsis thaliana
  unsure (1)..(434): unsure at all n locations
ttttnttgaaaataaattttgttcccctttccacgctgggtagaggtctgtaaataaaaggggttgattgcgaatagaaaataaatgcattgtagaatcaaaagataggaaatatttcatcttctggcaacactaataataacacataaagaaacctccatccgaaaggacctttagagttctaagaagatcgaaccattcatttttggtcaacatttggagattgcaccggataatcgcagttaatatgactcaccggtgttatttcttttgcgtgtcagacgatttcttttgctgtcagtgacacgtcctccggcgaccttaacaatgggttcgtctttggactttataagctttaaagccggatgaaccttgaggtctcccattactagcttttgtccgatatccaattggcttagatctacttctatata

SEQ ID NO: 134643 - DNA, 425 bp, Arabidopsis thaliana
gaacttcaatttaattccattaaatatatcatgaaacctcttgattaattacaaaatccattaacaaaaaaataattaatataaatttgattgagattaatgaaaattgtttcagattctttgagagacagtaaagagaaaaatacttcattgacatgttgtggtttaatctcaatcctcgtcctcgtcatggttaactttcgccgaacttaatgttctacacggttgtgacggcagttgctgcggtggtggcgcgtcaacaacaaacgctgacgacatctccatttggcaaactctaacagctccgattaatctctccggcagctcctcttccgtttgtgcctctgctaagaaccccatatcgattgtcacgctcgtcacgtaccctaaagccagccgtagaatcgccgttgcgatcgctgagc

SEQ ID NO: 134644 - DNA, 373 bp, Arabidopsis thaliana
gttattaaaaattcacgatgcatttacatatatcctttgcggggaatagatatttatacaaacagaaaagaaatgaaagaatttgaaatatgcttagacaacaataatttcaaagatctaaagaatatatatttttccgttcacatcttggtcttcacggaatttattccataatcaagttttaacgacctagatgaatatatattcttcaagatcaataccaagataactattctttcgggggcattggcttccaattatgaactttatggatcggaccttgttttaacctaaaatatattccatcttctctagctggccattcatatgggcctccttgagccacacccggtttattttcatacacatcaaa

SEQ ID NO: 134645 - DNA, 991 bp, Arabidopsis thaliana
  unsure (1)..(991): unsure at all n locations
gttnnnnnnnnnnnnnnnnnnnnnnnnnnnnnnnnnnnnnnnnnnnnnnnnnnnnnnnnnnnaaagactccttttttttttttttatatttgtccgtctcaaaacatgtttcatatcccaataagaaaacaacaaacacaaaacgagtaaaatggtaaaattaagaagagtgtactgtttcaaaagtaaagaacaccaacaagtgtaaagttttgcataaaatctaaaaactgacgacgacacctaattatttacatctgacaacgagagaccagtaaacagtaaatcctcgcacaaaatcctaaaggaggatgcacgagtgtggacgttatcatggatggatcttacttgcccccaagagatgggaactgagcagcatctccaattgccggtgcagcttcattacggtaaccaccagattcgccactagaaacacctccacggccacgaccaccacgtccacggccaaccacggcctcctcggtagtagttcccaccctctgctggcttcagaaacccattgatgctcaaagccttcttagccttcccttctttggaacctttgggtttggccttatcagaacccaagcttgatgaagatttcatcatttagactccttgtttgacagttgttgcattgattcaaacaactttcgtatcaactttcctctcagaggtggttaatgattgaagtgccttttttcttcttcctcaaagtattttctcatactcatcaagagtnatttccttatcctcaggctctttctcctcaacaacagtattctccttgttagcatcagcagctacatcatcaacagctggcttctctccaanatccttctcagtctcaacaccagctactgcttcagtctcagcagctatctcttcccctggagttccccaattcccacgaccagatccgtcacgcttgaagtcactccctctgccagttccactacgacgctcaaaggcccttcgaggacgctcccct

SEQ ID NO: 134646 - DNA, 622 bp, Arabidopsis thaliana
  unsure (1)..(622): unsure at all n locations
ttctttttttttttttttttttagaaaaccatatctgcttacacaaaaaaaattcaccttggagtgaataagtgtcgactactacaagcatactgcatcagagtgcggattaaacaagaaccacactcattcataatcatacaagactctagacagatcaacacagtaaagtggcaataaacagcagcatcaacaacaacaaaaacaacgtgcatccacgatttttagcaaccagatgtttggctctgagagaaattacggaaaaggagacacagcgaaacggattatatacacttgacactaatcaccgaactctgcatgctgcaggtccacccggtgaataatttggattggggtgaccgggcaaattgcacctggcccaacgttctttgcaaacctccggtgcattctgtaatccagggaccctcccattgcaaatgcantccactgtagtagttccccagggnttnggggtcaccagtncactggaagggtccaagctttaaccanatggtcatcaatgggctagtttngggtttngggnangaatantcgccagggggcgggattnttnaanccggggggccccngtttngggggcccccgggggggccactttttc

SEQ ID NO: 134647 - DNA, 506 bp, Arabidopsis thaliana
  unsure (1)..(506): unsure at all n locations
attcaaatcaattgtattaagttttccctatacaacacaatatttctcaaatcgaagtgacacaataatttcacgtatagactttattcccaacaaataattcacgatcaaccatacattggataaaagagaatagacgtctaaatttaacaacctactctcagtatagtgatgtgtaatatctttccccatgtgtttaagcaaagcttctttaatgctattccaagatggagcaaggccagtgacgtttccacattgcaatctcttctttacaatttagctttcggattcctccatagaacccgtcttcttcgttaccttcctctttatgatctctcatgatcatcgttcttctccaccttggatccgacggtgtactggttgaattccacactaccggctcactaaganggcatggcatgggtanggtcccatcacagggtccaaggggggacaggccatacaccatccanngggganccttgncctnccacggggtcgggggg

SEQ ID NO: 134648 - DNA, 301 bp, Arabidopsis thaliana
ataaaagcccaatagtttaatatactaaaagatacaaaacttcttctttttgtttttctttaagaaaacaacagatgatatacatacactcacactcacactcacattcacacacaaaagagacccccaaaaatcgagccttaatctcgtcaactaccactacttaactcacatgaccaatctggtctcacatctctaaatagatggatctccatcgagatcatagaccactactggaacatatgattagtattgacggacctctggctttcagtttcttgatccagaaatgttctgatct

SEQ ID NO: 134649 - DNA, 464 bp, Arabidopsis thaliana
tttgtttgaatctttcgctctcttttttaatcattctaatattagcaagttgtagcattgtagtagtagtaagatataaattttgttttctataaatattttcaggaatttgacgtccataatgcattttgaggttcaccacaacgttcgtgaacgtcggccatcctctcagccgaccgacagattccgctgcatttccagtcgaacgacgccgcgcaaacatgtcccatcattgcttttagttcacaatcttgagaagtactgcaacaaagtcttttttcatcaacatgttctacattcaatccgatgaaccaagatcccaacgaaacatcttcattcgcatacttatgcagtaaatcctggtttatcagtatgtaagtagctagatctttagatatagcataaaactgtccagtggcgtggcggaaatacttgttcccgacttctccaacttccaatactct

SEQ ID NO: 134650 - DNA, 566 bp, Arabidopsis thaliana
caccaaataactagtatataattgttaaaaaataattatcatatacaacatagaaaaaagtaatacaactgtagtgtaatatgtttttggtgatttaacccaattatcttctaaagaatacaaattgatggctaaatatatacgtgtaataattaaaggatggccaaaattgagaagaagaacaatgaaagtgagatagagagagaataagcagcagaagtcgtcgacgtgtttggtctttgagatggtatgtttgtcgcctctgggtcaaacgaagaagctggcggtctagccgaggaggaggaacggttcgatggaagcgtccgagccgatgtctcaccggtgtaacaatcagattctttccaccccagaatcagtttctcacgatcaaagacaatgcgatagccagtcatgaagttctgtccaatgatgctaatgtcttctatcttcataatggctaaacagtagacatctgtgtccttcatggggattactactaacgggtgataaacgggatacgagctcccgcctttcattgtcagattcacagctggatactggaagct

SEQ ID NO: 134651 - DNA, 735 bp, Arabidopsis thaliana
ctatgacgtcgcatgcacgcgtacgtaagcttggatcctctagagcggccgccctttttttttttttttttttttttttaagaagaagcaatgtgattgaattataacaatttcaagaattacaaatgtaaaagaaatgattttaagcttatccgaagcttaaaaatcctgtttaggttcaaaagaagacataaaacatttcttttgaacctgaaaaataaaattccccaaatgaatgtaataatctgatgatgctttctgcaccaatccaagttttcttaagaatctaaaagaaagccaccaatgctttctcttgattcttttacctaaaatgcaatttgaaacaacaacaaaaaaaaagaaagaatgtgatgatggtttcttcttcttcttcctcctcctaagtactaattaagattctagaatcctaaaaacgatggatgaatgaatgtttctagaacgttgttggagagatttgatgatgagttagtgtacaatgaagtttgtcccttcttctggctattgtagtagttctgaatcaaccctctatcttgatggttgatgttgtcattgcttcattaccatctttgctgctagcttcagtttctgctttctttggtgctggaggtataactactgtttttgttgctgttgttgcacctgaggtggaagttgaagaggacggtgatgatgatgaaggtaaagatagacccacagaggttgggagggagagga

SEQ ID NO: 134652 - DNA, 433 bp, Arabidopsis thaliana
  unsure (1)..(433): unsure at all n locations
anaaataaggagatcttttaatactactttagattaacagaggttatccccaaaggtcctaatcagatatcagattgtaaccaacacaattctcactcttagcaattatacaaagaaaggaaatagctttgcatacacatagtgacataactgtgcctgaagctacctatcaggccttggggcatacgtttccttcacaaacccaaccatctttggactcgtcgccaccaactttcacagcctcatcgccgttttcttttgtgtcctcgtttaaagcacacttggcgtgaagatcaaagtcgcattcgtcgcaatggtaagaccatattgtcccttcttcctcacacttatcgcatgtgtaaacctgnacacgagttagttctagctnatgttcttcatggagaacatgtttcaccttcttaggccaatcttt

SEQ ID NO: 134653 - DNA, 488 bp, Arabidopsis thaliana
atagacattataaaggacttttttcaagataatattgttatatttggttcatttttttcttcctacatcaatcaaccaaatgtaggaacatttgccatgtacaaaatgagaccattacaaacaatgtaccaaccaactgttgtgtgaccaaaaatcttaccctgagagtctgattttgttgtttgcttgagtttctttgatgactttagaagcaaaacctggatcacaattaaactccagcctcttcaatcgcagcagacattgaagctgatgcttcttctagcgttcgcctcttttgaactgcgttaaagggcctcgatgatgtctccttcttatccaaatcatcggtggcatcccttccaattccccattctaatccagcactcacctttttcacgttttctttaacccgtttaagagaatcaagaacaccgacatggacagttttacccttccggaccaccctgatgccacaatctttgacaaat

SEQ ID NO: 134654 - DNA, 396 bp, Arabidopsis thaliana
aaaacgccaaagtttattaattagtggattgatcaaaacaagaatcactgagaaaacatatataaaagaaaatcaaaattttcttaaaccacatatctcaaagaacataagcaaacatacaaggtaacaataacacatactcttaaaaatactcaaagaaaaagttgtggaagacataatcagatgttgatggtggcatcccacagccggagaactccatttcggccaccgctacatatccgtttcctctcgagatctgacgcaacacatctcaccacggcggctgttctttgtggtactctataaagttgccagcctgagactttggttccggcgttagaaggacgatggaaaagagacattgagttatctgctgctccaatgcctaaccaattt

SEQ ID NO: 134655 - DNA, 340 bp, Arabidopsis thaliana
aaccgaagaaaatcatataatccttttcttttttcggagaggtttacaagtttggaatatagaaacataagaatttgttaaatgactggcaaataataataatgatccaataaacaacaacccacaagaaaaggcccacatcttttgacactaaattaaaaaaagggggtttaattaagcagatccaaactcagagagccacttctcgggtttctcgatatcagaggaagacacactcggttgcactttcctaagggcctcttcgaaatcacacattgccactggatcatttgatatatcgtctttcgacatgttctttatctcatctctcggtttcccc

SEQ ID NO: 134656 - DNA, 349 bp, Arabidopsis thaliana
ggatgcccaatcaatatatatataaatttattagatacatcaatgaaaaccaaaaaaaaatcccagaaaattaaaatcttatcaaatatgatccaacgataagtaaaacggcctgttccaaaactgaaccgaagccaatctaaaaccatgccacataaatttgcactcttgggatattccaaaaacttaaaaaaaagaggggtaaatttgatatttggggaaaaaatttacaagcagtcatataattatataataaatcccgttttaaacccatcaaataaaaattaaaaaaaccacttcatcgaactttaccttatgggtataaaatatatatttttgggttaagaag

SEQ ID NO: 134657 - DNA, 359 bp, Arabidopsis thaliana
  unsure (1)..(359): unsure at all n locations
nnnnnnnnnnnngagaaagatgaaccactacttgctggaattaaaggtctttcttaattcctcagatgtgtacaagggtttgcttttatgttgtagacatgaataaaccactcaatatgccagtgcaatgcgaagtcttcaaagacgtatgggatctatgagcagagttactatatactccttcagttttccttcactacaattgtgtatatcatcggacttggtgtagaggagttccaataagcgtccaaaattaagtgcttgcttgagtactcgacctggtacgctggttgtcttcagtagctcctcatttatggtcttattgatgtccacgatcattctttgacactcgagaatag

SEQ ID NO: 134658 - DNA, 435 bp, Arabidopsis thaliana
  unsure (1)..(435): unsure at all n locations
taaccgtaattttccaaaattaagctacaggtacagctaaaaagtgtactacagttttctttttctaaaaatagtagagaaattctttcttgaatttttagaaacaagattgacgataagccctggattctattagtttctatgggggcaaaaaaggctacattttctatggaaataaaatgctaagggaaagcgaaaagaaacacaaaacagagaaaagttacctaaccgaactagatctgagaaagagttcctgcgttttttcatccatctgggctatcaaaaccaaacagcaatctcccgtgaaaactgatggtttaaaccgctgatcattggggcgggtaattggctttnnttntagnggtccatacaaaagggccatttccngggtttggggccgntntccgntttccccttttgnncttgggttnccnc

SEQ ID NO: 134659 - DNA, 182 bp, Arabidopsis thaliana
agcaaggtgataaggtatcactcattcatttcaagaatgttgcaaatcaagccaaatcattgtatacaagaatgttgcaaaatcatgccaatcataattttaaactgctggcttctgacacaaagggaaatgtcagacatctacataccattttatcagatagcatctttagtatataatgt

SEQ ID NO: 134660 - DNA, 550 bp, Arabidopsis thaliana
  unsure (1)..(550): unsure at all n locations
gtcaaacaaataattttgtaatttactactcaagttcataatttaaccattacaagaaaaaacagacaagaagggaagtcaagggagaaggaaaaaaaaattaggcaaaatattgttgctgtatggatttgtccctatggtttgtgttttgtgtgtggatgtgagttagagagtgtcccaattagggatagtcgcagtagcttcattcaccatcttcacaagtgtcaccacactttcgggaacaccgggaggcggcaaggacatgttccttggaggaggaccccgcaaatgtggatctcttatcgaatcgccactctcctattttgcccatatgtcagctcccccttccatgttgtagtcgcatccataaagtgtaatggatgataaaccttccccttgggaagacaaatcccccggagggctgaagcatgaaatccttccgaagtatgtgacgcacccctggatagccgatgcaattgggnaccggaaattccagncccaccnatgcctacagttcggngcgnttcatgtnggggatcccntgngggtt

SEQ ID NO: 134661 - DNA, 522 bp, Arabidopsis thaliana
  unsure (1)..(522): unsure at all n locations
ataaaaagaatcaactgttccatcacattaaagctgataaccaaagaaaagaggtaatttgtccaaactgtgtctcactctcacctaaacaaaactacaaaacagaggaaaaaagaaaagaaaagaggatgcctcagtagttcttctctaacaaaaacccaagacgacgaccaaccataaaataaattgaacatatattcctaagcgactctaaacaaaacagaccacaagctaaaacactgtcaatcaatggatagtaaaaaaaaaagaaggggaatgagatacacttatggcaaaccatgtcttcttgatggacagaagaagcaaacatagaaagaaagtgagagaaccagggggatagaaaaaaaacatcccacgaccttgggcttttttcttctttttaggtttgtgtaggagaaacctcactctccaagcagctgcctggactggtgggccctctgatctgttgttgaaaccaccttaccaccacgtctcctctctccnggctnccctcangcangc

SEQ ID NO: 134662 - DNA, 395 bp, Arabidopsis thaliana
gattgaatcattgtatatatttcgtcattatttggactcgattgacagataatttcatacttgaaaactaaaacaatggaaactgaaatttgatcatctctgtacaccaacaatggatatttgtttttcaacagtctgagtgaaagaacatcatttctatgtacagtaaagcagagaatgaaatgcagaggaaataacaagttcaatagctagaaaaatgagagaacaacaaaagatgaagaacaataacaaaatccaagatgttttagtttttgattgttttgctctcagcgagaagaaccagaagcatctttgagaagaaattgttctcaccagattgagatccagaggttgaagaagacgaagaagaagaagacgagaacaatccactaaac

SEQ ID NO: 134663 - DNA, 640 bp, Arabidopsis thaliana
  unsure (1)..(640): unsure at all n locations
gctcaaaaaataaattttctattagggggggaaattaatacaaaatgcatggaaataaaattttgagactttaatttatatgagcaaatttataactgaaggatagacatttgttgagagtcctctaatttatatgagcaaatttcagctgtgtactgcgcaagcatgtcaaacgagggaacatctgaagcatctcttcacggcttcgtctcttgatgccggtgcagccattgacatcaagagtggtgagtgtagtcgagcatgtctgngaaagggtctccagacatctgtcagacaccccaactatcccaaacaagctgagaaattcgagggaggtacaactattagcaatggtattcacacctgcatctgtgatacgcacacaccatgtcaanttggagagactctaactcgtcgcatnnagctatatgtaccactcccctcgtcagatattttcttgagcgccacatattntctaagnacctcaggtcagctaanagtgatatcttncangnaggccttcgnctgtgaagcctgaaaagagcatagagatttnaggncttggagagagaaacaatttntgggggaacnngaggcaatcccccatcttgtntccttnacaaanccaggcgatnttcag

SEQ ID NO: 134664 - DNA, 538 bp, Arabidopsis thaliana
  unsure (1)..(538): unsure at all n locations
accaaattgaaatttcttcaacttccgtgatattcgacaattacagaaaatatacaacattcgttatatagttgaatcaacacagataacttgaaaatgtaaacagcataaaacaaacaagaaagacaaacaaatttcctttcttggaaatttggtcttcaaaaatttctcttaattgctttattggggttacacttgggtattgttagtcacaccttcgtttacttcactggtaataccaccaccctccacttttgtcgatgtgttggtgatcggcagctcctgcattcctattttctcttccaccggatatcacttcgnccttagctttccccccacacaacgctatatagcccggagacggataaaaatcgcccgggttatacntccaagggggaatcttttcagccaaaactaaacgccgngggaagcagtggnggtcatgcacatagggntaancgtgncgnaaaaccggncncgntcccnatananggnttgatgaacgncanccggaaacccccggggaaagggganngnt

SEQ ID NO: 134665 - DNA, 333 bp, Arabidopsis thaliana
aagaatgtaactcattggagaggctcaaatactttcagaaatgtttctgatgatacatataatgaaatttcatgactccaaaatataataagaaaaaacaaaattaatggtatttgatctaatgtgatcgtcaaaaactttcccagcaaaagctattgtaaggaagaagatcaaaactggttttcttctttcctttcgtaatggaaacaaaataatttctcattcttgtgagaagatccgttcatagaacaagatatacgcttcagaatgcagaaccttttccaatgaaacctgacgaacatatgcatcgcttacgttataccacgcagtgga

SEQ ID NO: 134666 - DNA, 380 bp, Arabidopsis thaliana
aaaacaaccggaaaaacctgggtactatattggcttacatttgcagaagaccatttcaacagattttggctacaagatcactttagcaaaatatttccctcaaaagttacaccagagaagttcagcaaaagcatgaatacgccaaggggttcttctttgatatatagggagatatgtaattagcgggaagaccggatgtccctgagatctcggctggaacgagaacttgaggcttgcctaaagctatcctttttccaactgtattggcgtaaaacagaccgggaatggctggtacaaatacatcactccttgaacttatgtagaagtcaataacattttcatattcagaattctctaattcaagggtacttcgttttctt

SEQ ID NO: 134667 - DNA, 436 bp, Arabidopsis thaliana
ggaagaacaacattggactattatagaagttacttcaattgtatcaacttctctttattcttgggtttaatttagtttacttactactaaaacgtaagaggctgaatctccacacagttctagaacagtcactttaaagctcatcgttatgtacacaatcgccaggccaaagaactcgtataagtactagacagatccagtggcaaaacagcttcttctctgtttcctcattttctagtttagtgactttgatcagcaacggtttttttaacgaaatgcatccctcaaactctcgtcatgacacttcaacttccttctgcgtgaacgagggaacagtagctggtggatcttcttctctgctgccatttctgttgtagccctggttttgaaagggaaacggtgagtttggacttgtgcacctgcgaaaactctcaca

SEQ ID NO: 134668 - DNA, 617 bp, Arabidopsis thaliana
ttagaaaaactacgacgttgaatgcacgcgtacgtaagcttggatcctctagagcggccgcccttaaattttttttttttttttttttttttaacctaaagaaaaaatttcttttgaagtctataaccaaaaaaattgataaattaaaagaagaaaaaagataagaaaaaaaaaaaaaaaaaagagttctaaacgttacaaaaagtttgagcaaacatcatctcgcttctttaactcatttaaagagaaacgatggattctctcttcctcctcatgatgtctttttggaccataaagttttcaccggggtgaaacttacccgcgacccggtttcctgactggaacattgtcctcatcatcagattggatatctccgtactcccagattccggtcctagatttgcgagcttcgtcttggaacttctcaagagcatcaagagcggcttgcttgtctttcggttcccatctcctgcgtttctccatcctggctattccttcctgaagcattgctgcattgacagagatctcatcatcgacagcgatgagagttacaacgagctcagttccagttccttggcccttcactttgcctcctgaaggatctttttcctttacca

SEQ ID NO: 134669 - DNA, 311 bp, Arabidopsis thaliana
gaccttcgaagtttcaatgtgattgcagtaaaaacaaacagtgttttcaaccgtggagattgcaataaactgtaacatatcaaacagaaagcctttttatttttctcataacataaaactcaacatcacttgcaatgttaaagacacgacttaagcttatttggtaaagatggtcctaactttctgaagacagaactcaactcatgtgtcaaagatttgatctttgatgagatgtttttcatttggagaatctgtgtcgatcatgaggcgaggtgcgatcgatgtttggtccatgagggatgatcccaaaa

SEQ ID NO: 134670 - DNA, 531 bp, Arabidopsis thaliana
ctatatcgtatatatggactgcttacagatggtgttcaagttatttccaaactggaaacgtgaggcagaagttaaaaagctcggttacaaggttcatggcgatcctttctccaccaacacaaggcgtgtcctcgctgttctccatgagaaaagactctcttacgagcctattaccgtcaaattgcaaaccggtgaacacaaaaccgaacctttcctctctctcaacccatttggtcaagtccctgttttttgaggatggaagtgttaagctgtatgaatccccgagccatcacacaatacatcgcatattgttcattagctcaagaggcacacagcttcgtgaatcttttggaggtcaccgagacaaatggcaactctaacaatgtggatggaaatcgaagctcatcagtttgatccacccgcatcgaaactcacttgggaacaagtcattaagcctatctacggtctagagactgaccaaacaatcgtcaaagagaacgaggctattctagagaaagttctaaatatcta

SEQ ID NO: 134671 - DNA, 385 bp, Arabidopsis thaliana
agtttggaattttggattaagaatatatatagtctttttatatatttccctagtaataaaataggtgctctttggggaggggatacacagatgctcaagtcttgtaattcgaatcaaagcttgaagtaaagaagaactcataactttatgttaaattctttggcatattgagatgctttcttttcttctctctaaaagaaacttcctgcagaactctattcactactttgggcgttgtagcaataatctcaagcagcaaacacaaaattggttttcctctcctggtatttgccttaatcccgtacagatgtcctctagttaattagctggagttttcgggctccgaaacccttttttaagctcagtaactctcttcatacaagct

SEQ ID NO: 134672 - DNA, 341 bp, Arabidopsis thaliana
  unsure (1)..(341): unsure at all n locations
gatgagaacacaccttgaattaaagacacaagtccaccgataagaaatatattactggactggtttgcaaattatacacaataatgtctacactctttgatacatcaactaatgggcgggggatctcaagtcaataatctagtggaattagtaaataacagctactgggtttgcccccccttcccgatggataatttgaattaggggaccatggtaatggtgggggatnggttccttaaccaacccccaaaatgcccaaggggatcntgcncatgnggngtccccaatccgaggggccntcgccaatcctggnacaaaccaaacnttntttgntaaaaant

SEQ ID NO: 134673 - DNA, 998 bp, Arabidopsis thaliana
gatacgttaaactgtttataaaatgaagtgtgtatttttgcattttcttatagcaactcttgccaacaaaggtttagtgtaacctgaaagaaaaaagatgctcacaaaacttgctttattgggatcttaacataagaagaaaacaaaaggcgaaaaacactttgagatcacttggcgctcaaactccggatgacgtatggtagaataccgccgtgatcatagtatgccaattccacctctgtatcaaaacgcagggtgcagacaaaggatttgccactgtcagtggttacagtgacgtcttgaccgggtctaatgtcactaacttttgtaggaaggtggactgtgtagcgttcatgaccagtgagtccaaggggttccgcgtcctccccagccttgaaacacagaggatgatccccataccagccaggttgctgcgatggattccctcaaagctcttggcaattacagctttcactcccaaaagcaagggaccctttgcagcccaatcccgagagctaccacttccatactcagcaccagccaggatgatcgtatcccgttcaagggtcttgaatttacttgctgcaatcgaaaacgctaagcttctctccagtcggaaatgtgaacaagtgttggggccaacttcctcctttcaagagcttgttaacaatacggatattggcaaatgtaccacgagccataacctcgtcgtttccccttcgacttccatatgagttgaaatcttccgaaatcacaccacggtccattagaagctttgcagcaggactagttttttgaatgtttcctgctggagagatgtggtctgttgttacactgtccccaaagttcaacaagcagtaagcatccttcacttcacgaggaccaggtggatttgcggtcatattcttgaaatacggaggttcatgaatgtacgtggagtttggatcccaagaatataacgtggaactcggtgcagagagttcattccacaaggggtt

SEQ ID NO: 134674 - DNA, 478 bp, Arabidopsis thaliana
  unsure (1)..(478): unsure at all n locations
gacataaacgattcgatttttatcacaaaccaaaaaacgccatttgtttattacaaaaccatttaacaatacaacaatagagacacaacaataccagtagcatgtgggttgaagcaaaagacaaaggaatagtttgcattattacagacactcaaattaattacatgaacatgacatcaatatttcataaaaatcatggacccatctagtcatcatatggacaaaagagtgtgtgtgggtcagagatattttattacccttaggggagattcatagatcacgcgagcttgagatgagactttgaaatatttgccttttgatttcaccatccacactcagccaaaaaaagntgatcattgnccatcaatgaccatgacgacnttggcttttccattcccacccagagnggaagaagaaggtgncccctntcctncnngancgttttggaaattgcnggagcatngaaatncctaanngg

SEQ ID NO: 134675 - DNA, 526 bp, Arabidopsis thaliana
  unsure (1)..(526): unsure at all n locations
acaaaagtttatacatttatttgaaaatgtttattggttaaaagttgtttacattctaaagacaccaaatcgagtatcttctaaaggacggtttaaagcagcagagagacaaagtcccaaaacctttctggtatcacaaggatcaatcactccatcatcccaaagtctcgccgtcgagtagtaaggatttgcctctctctcatacgcatccaccgttttcttcttgaacgcttcttcctcttcctcagtccacttgattccttggctcttcttggtagccctttcaatctgagttaaaacacctgcagcctgagcgcctcccatgatgccaattctggcgtttggccaaatgaacataaaatctggactgtatgcacgcccacacattgcatagtttccagcaccaaagcttgcacccgttatgattgtaatccttgggacctagacaggtatggcacacatttcggccagctttgnangcgtgggcagtnagaccncaaagctggatgttgggaaaangnttaca

SEQ ID NO: 134676 - DNA, 505 bp, Arabidopsis thaliana
acaggaaggaacaaaagattaaattatgtacagaaagtaattgaggggtctcaacaacaacaaaggaaaaaataaaaagttaaaaagctctcaaccaacttggcttttgggtcattagttggattgtgtccatgtcacgagcttatctctatccacaatttcttccccacccctactgatattggttggctcttcactctttctgtaattaaattacattttcaaatttaaatacattttaaaaaaaaaactagttatttcattctgaaaatttagcaccaaggaaaaaaagatgatcaggctaagctagagcacggcgaactctaggggtggtactggtaacggcaacacggccacttttgatcatatcttgcctagtttttatcactttgtcttcgaagaatctgctttccggattttcggaagcacggtagagcaacctacgcaggcgtgagccaatgccatagggtccggcctggggcccatgagaagcagtaaaggtggg

SEQ ID NO: 134677 - DNA, 442 bp, Arabidopsis thaliana
ctgcaagattagatttaggattgacagagagaataaacaaaaagatgagagtttttgtctttgttgagtgagtcacaatctacaaccacagaagggaggaagctaatatgtccacacagttacaagcctaaaagaagctataccttgatcaacaaatcagtgaaaatgcagtgactttactcaatatcgtcgatccaatcaccataaacacgactgattgtatctggtcctttccatttccgttgagttctgactccggtgggtttctgcgtaacagcactagatgtccgttgggatgagactccaggagaaacaaggctggtcactgcgtctacttgtcctctctgctttgtgtccaaagtggcggatgttccgatcttacattctccttcaacgagtcctccgccaaatgtatgcaactctgaaggtccatgagcaaaat

SEQ ID NO: 134678 - DNA, 416 bp, Arabidopsis thaliana
ttgaaatgtacatgtttatgttcagagactcttagctttacaaaattattaatttctcaaatagtatatatttgaattataaataactttctaggaatacctctttgtatatctaaatattttagtatataaaaatagataatgctttttgtattcattatctgaacagtagttataagatcatatgtgatattatgattaattttcataaaatatgaagacttgataccttttctgtctttcagataactctaatgaacactcaaggtactttagccttttaaaaagttgaaatttagctcatggatgtatttttcagatgagaaaacttggggatgtcttcttttacctagaatgcctctgtttacaagtgccttgaaaacaaacattagctccctttcttcactaataactat

SEQ ID NO: 134679 - DNA, 419 bp, Arabidopsis thaliana
gctagaagaggcgaaagctttgatggaaagaatgccaatggagccaacaaatgtggtatggggagctctgttcggctcttgtttgttacacaaagactatgagttaggtaaatacgcagcctcccgtgtgatcaagctgcaacctagtcatagtgggagatacactctcttggctaatttgtactcggaatcccaaaactgggatgaagtcgctcgggtaagaaagcaaatgaaagatcaacaggtggtgaaatcgccaggatttagttggatcgaagtgaaaggcaagctttgtgaattcatagctttcgatgataagaaaccccttgaatctgatgatttgtacaagactctcgacactgttggggtgcaaatgagattgccagatgaattggaagatgtgactgctgaatcatgac

SEQ ID NO: 134680 - DNA, 439 bp, Arabidopsis thaliana
atgcaaaccattaaaatttgtttttagtataatattgagttctgaaaactcagaactctgcatcacactaatctgttcaatacttcatacaacacaagcaatgtctcaaattttccgaaaacaaaccaaaactaaaaccatccttgattcactccactagacaaaaaccatgagattagaaaacaacaatgtagctcaacaaaaacaagagtgcagaagctaaaagggtcaaggtgaacatgaatggcactccaatgggtaaatttaagagcctcactaccggcggaatccacggtcagcgactcgagcagacggacactcgtacgccctgtgtcctcggccaccacaattgtgacatattatcatagcactaacgccttctctgtctctgctcattctgctcaaaccacctctttgcataccaccatctcgaaccctg

SEQ ID NO: 134681 - DNA, 421 bp, Arabidopsis thaliana
aagaatgtataaaattacaagatccggtgttatggaccgaaattattacacaatgttatcaatgttgaaaaaacaaagatagaacctaaaaatttggttagggacgaatctcatcccagttggagtcatttacagatgccaaagcaaggaaaaaaaaagtgtatgtaggagaaaaaaaaaaaaaaacgagaaataaagacaattaaactttgcagaaattgagttgtccatttattgggttgtttgcttctgtacacccacccaccaatgcgtacctccttttttacactgaaacacctgattcaaaagctccacctctggtcatgtctggatctttggacgctcctctcgcctgatgttttccttggtgctgcgaccaatacccgtatgccctcaagactctgtctagcagttcttgtgg

SEQ ID NO: 134682 - DNA, 724 bp, Arabidopsis thaliana
gctatgacgtcgcatgcacgcgtacgtaagcttggatcctctagagcggccgcccttttttttttttttttttttttttaaaaaagagctttcttgatacttatataaacatgatacattgtatctcaaaatgctcacttctgtgcagtagagaagtctatatcgctcgatgaaagtactttttggggtttacattgcacactgttccacgattagaccatgacaaatcggagagggccgtttctttttggattcgtcgcctcgagtctattgtaaacatgagaagagagctcttgaatttgtggcgtttctcgtggtcctgagtaaacctctcacgttcttatgtactatttccaagggaacttgaatgtatctttccaccatccctgttttgagcagtgtacaaagatcttgtccactctccactataagctcacaaaaatgctggtcctaacaataagtttccgaatccccagccatttccttaaatcaatttctttacaccttcttgggggaccaactttttgggactctgggcttttacaaccgaaaggggccttttctttccctttcttaaaacccccatttaagcctttacacttgggccctcctttaattgggggggtcttctagggcaacggggaaaaggggtttggataccctccccctttccacatctcaatgtcttccaattagttaaataaaccggagatccaccccaata

SEQ ID NO: 134683 - DNA, 752 bp, Arabidopsis thaliana
ttttttttttggaaccaaccagtcgttttattccacaagtccaaagaaacgaaatttcattacttcctctaataacaaagccaacaatatcatcataggacgtgaagagctttagaagaaacaaacacacaaagcttatttatcattgctcttcaaatactccttgagaacattccataactgaaccaaactttgccttaaccttcactggtggattcgccaatctacaagccatctcctttatgttcttagaatgataatcaatcttactttgtgtaaacttcaatccatgagctgtactcaccaccacaggccgatcattcgctccaataactcctgactttctcagcttcatcaacgccgtcaatgcaacaccagtatgtggacatataaacataccagtagaatcagcaagagctgttgcatccatcaactcttcctctgtagcttcctcaacaatcccattagatttcttcaacgcatacacagctctatcaatcgaaacagggtcaccaatctgaatagcagaagcaaatgtagtgtttgctttcaatggattgaaatcttctttaaacccagatttgtaatgcaagtaaagtggatttgcattagcagcttgagcacaaacaagcctagggatacgatcaacaagacctaactctttacacatatgaaaccctttgtaaaacgcatagatgttaccaagattgcctccaggaacaatgacccaatcaggaacttgccaattaaac

SEQ ID NO: 134684 - DNA, 427 bp, Arabidopsis thaliana
  unsure (1)..(427): unsure at all n locations
nnnnnnnnnnnnnnnnnnnnnnnnnnnnnnnnnnnnnnnnnnnnnnnnnnnnnnnnnnnnnnnnnnnnnnnnnnnnnnnnnnnncggccgcaaaaattgatgatattatggttttgtttattgatcagcattatcgttattgtggaaaaaaaaattgaaaagtcaaacaagagagcctgacttgacttggatttgcgaccaactgtgattacattgacccacaggctacaacaggtcaacagcataatatgagagagtttgagagctaaaacagcacgcactttctattcaaaaacgtaaaacaccacagctttcctctgaaatacgtgccgttttcctcgtatgcaatgtttttttccattcgtgttctacgatcaaacacatggttcaaggttcttgacttcttggtaagtaggtattgggacac

SEQ ID NO: 134685 - DNA, 511 bp, Arabidopsis thaliana
  unsure (1)..(511): unsure at all n locations
aagttctgtaaaacttaagagtactattgaacttgttcttagaacaaacttttgcatatttaaaacctaaggacaatagagtcatctggtacgaaaacttctctgcacagaaaaaacagcttaaagcataagcagcagagattaataaggaacgtttcctatagagggaccatctcgagatcattgtgttggcttttggcagatgatggggatgaggacgaagaagatgaagcgtctcttctctcctcagtgttcatctcttgaactgggggaggatccatagtagttgatgatgaggcttctgtatcagaaagatgattcttcatctccctgtgttcctggcacaaagcacaccagtgcaagcaacagtgaaccatgcaatggatccacaaggcgcattcttgagatgaaattcctcctggagtcttggcgggaanagcctgaataggttccacacatccccaagcaagaagaggccttcgcagtcacaactgtggttgggggcaatgga

SEQ ID NO: 134686 - DNA, 495 bp, Arabidopsis thaliana
cggccgcccttttttttttttttttttttttttttttttaattatttttggggaataatcaaactttagggttaaaaactttcagcatgaaaatccagttatttggaagcaaaaaccaaaaggacccatttttttcatagaaagtatgttacactgcaaaacaaaatagatggtttacacaaaaaacaagctaaccacatgctttcagtttcttcgataagacaaacccaaaaaacgaagaaagaagacgggttatataccagagaagacgagataagttcactctcgtctagctagattatctatcagcaagttcgtcgttggagccaaagattgatagcgccgatgtttttttctttttcgatggttggtaatgtgaattgttaagtccagactcggttggcgtacctagctgcaacgatatatgatcatctggagatatccatgccagtggattagcttctttagctacaggggtgtttgcattatcgatgg

SEQ ID NO: 134687 - DNA, 530 bp, Arabidopsis thaliana
  unsure (1)..(530): unsure at all n locations
gttataaattaaatgtcagataattccattaaaacatcaaaattgacaaaaacataaagtcctctatttgcctctaccattttttacttgaattctacaaagtataaagttatacagctgaaaccaggaaataaggcactgaatctacactggtatatcagtaatatttccggtttaccaaaaccgatgtgggtgaagctgctaaagcggacctgccggtttaacttccgtagagaggaagaaaactctacgagatttctattaaaagctagatgatggtcgaggcttaccttgaatggagtttaagtgctgagtaacgaaaataactgccataactactaaggaggcaacccaccaacggactgaagnacagaggcccctggntgtctggttttgnacaaancccgtaaaccccnatttganggtcattaccaatcacnatccggtagngccanccgttcgngnaggcatcaaggtggtaaggtgnattgagtcgggtttnnnccgggaantncgattggnagnccaat

SEQ ID NO: 134688 - DNA, 372 bp, Arabidopsis thaliana
  unsure (1)..(372): unsure at all n locations
cttattataaaaaactctggtcttatcacagagtgttacaatttacattggcaatggcttgttgtcgcgaaacgactgaacaagaagaaaagctcgacgcgggcggaaaagagggacctcatgtcctgctccatgtattgccaccagagtcagccctttgtaaacttggctccatccaccaacctgttctggccatcatcgttccaagggtaccatttggagagtggctgtaacttgagggctctaatggagtatcgtgttccagtaatgggaaccactgattcantgtntccnctgaaaacccatatcctgagacctgcggcgntgagttctttgtagattggaagcatagacagaggagaatctgcccat

SEQ ID NO: 134689 - DNA, 953 bp, Arabidopsis thaliana
  unsure (1)..(953): unsure at all n locations
nnnnnnnnnnnnnnnnnnnnnnnnnnnnnnnnnnnnnnnnnnnnnnnnnnnnnnnnnnnnnnnnctttttttttttttttttttttctacccttactctctcatgcgtttccttaattaatcaatttaggttcaggttttgagtttatagaaaatgatcaaattacatatatggctggaccaatatattcctatacgagtgagacagatccaaccatgcctacaccaacgttcaatttttttgtaataaaaaactacatttttggttgaagcacaacgaggcctacctttgatccatcttaaagctgttgaaatgtcctcattcaacattcacttgaagaagttcctaagtccactgaagagccgtagagccttcagctcaccacttctgatatctctcagtctcctcctcagaatgtattgagcacggtacagtatcctgcgctcactagtgggacaagtctacagctagctgtttcagaaacgcttttcgggtcaactgttttggagatgttatgtccaaatccattgatccactttcctttagaaatcggctgtactttgatatgcttgtttcgcatgagtccagtatgaactgcaatgcgtcttcctcgatttcaggatattttagatcattctttgttgatgtcttatttgaagcagctttcgccatctcttcaaagttgtttctcatatctggagggctcaccacaagataagcatatgccattagctccattggccaacccgttatccttacgggaaagccattggggtgtcgataatccgtgtttctttaaagcatccagcttttcctcgtaacacttatcgtttttcctaagtgataatgctagttctactgaatcactaggattggttccttctctgggaacaaacccataagataacaatagctctccgttagatttattcccataggatatgaaaacctgg

SEQ ID NO: 134690 - DNA, 485 bp, Arabidopsis thaliana
aaccctaagatcatctctttaaattaccatccgtcttctgcaattacacaagtgattcgaatcgcaatcaaaccacaaaccctaagatcaacacagatcctaatactctctgatcattcctttaaaccgttctttagttttgctaattaaaatagacttttctaggttttattatttcagacaattaattattatcgaactttgccacaacggatgacatttcccggtatcggattttcatctctaaccggaatagtcgaaggatcttcttctccttcacctttaactctcatataaagctcttgaccaagataccattgctctgctttctgggatctcacgttccacattccttgatgatccatagctatcaatattgctgtccacgaatatggataaacctgaactggtgaccgtgaaacagcatctactaagttatatccagcttttttgctttcagaccaagctccaaatccatatccgac

SEQ ID NO: 134691 - DNA, 379 bp, Arabidopsis thaliana
  unsure (1)..(379): unsure at all n locations
nnnnnnnnnnnnnnnnnnnnnnnnnnnnnnnnnnggacgggttattactaataattttcgccgcactaataagggtcattcattccggccaaaaaactatttattatgaaatctatcactataactttcggggacgagctgagatcgttccattcgctataaaaaagtggtttaattagtatcatttcagttattgattttgggacctcgtttcccaactgggccctgacctctcgctctcttccatttctccacattgatcatcctagcgaagatttccctaagcaaagtcaacttccgcgattgctgtgaaatgacgttaacggccgacgagctttggctaagtatgatcccatacccatcttgaaaattatcaatt

SEQ ID NO: 134692 - DNA, 265 bp, Arabidopsis thaliana
ggggttcgcaggccttgataaatgtgaccaacaattgccggtatccatgggaaatcacattaacccattaagtaacttgtaacagaagggacagtccctattgcagaaacatggctattgaaaacacaatactgaattaaccatcactaggggaaaaagggccatatacttgatggacaccagagttgaaccgttggcgaatctgtggctggccacccggcatcaggttatcatgatgaaacactggtcttggagggaaatgagc

SEQ ID NO: 134693 - DNA, 394 bp, Arabidopsis thaliana
gcaaatcaatatattcattccattcaagagagtaagatcgcatccatacaagacaatagtcacagtacttacatataaactcttgcaaatttatacttaacagtattttcagaaagataaaaccatttgagattagcttagtttcacgaaaaacctgatcaaatcatttctcaaggatcttgctcataacagttcttgctagatcaatacttccttcttcgtcatctacttctgttccggcttctctgactgatattccatgtccggacaaagagcaacgaagaacagagttaacctgcttccttaatctggcattatcaatcagaacctctgtcagcatcttccttactagatcgtctgttccacgatgccctcctgatgttagcttcagctt

SEQ ID NO: 134694 - DNA, 704 bp, Arabidopsis thaliana
  unsure (1)..(704): unsure at all n locations
ctcttagaccaagctacgactatgacggcacgcgtacgcaagcttgaaccctctaaagcggccgcccttttttttttttttttttacttcaacattatggggtggattggttttcactataccagcaaataacaatttattgccttaccaaacatcagctagtgttactacatttgtactagatagtatcaaatctaaaacagaggagttttacttgggttcttctgtccatcgtctcttcatttcggatttggatcgaacttctttaagattcccatccaaaccataatctctctccatcacaagattgattccttcatctgaataccatccaactccaatgcacaacactccatctttcttcacatccacggatgcactcacaccacctgggaggccacatcacagacacatcttgcatatctatcatctcttcctccccaaacgaaaccaaagtttccggtaagttccttctctttagagcttctgtgcagaggtacacaactggagtgctttcacctggctgttcgaattcggcttcttctccgtagagtggagttgcatttacttcaaatactttccatgatcctgttagttctgatggttgcgtgcgtttcctctgtgagaatggttttaactccaatggtgcgtcgntgtcactttgctcttcataatttgaaggactaacccacagttcttcataa

SEQ ID NO: 134695 - DNA, 415 bp, Arabidopsis thaliana
aacaagcatccataactcgatccaaattcttataagaatgtaactacatatataaggatacaacattagtcaaacatgtaatctgaaatggtatgattataccaccaccatcttgttcctctataaccgaaatcgccacggacacataccggtttagagtttctattttgttattccctttctgttttaagatatcatccaaaacgctccgacaatctctgatatgtacacaattaaaccagagaacatcagcttccgatgttttacgggagaagaaggcgggagcggaattactcctctggggcatggggcatccatcgcctttacatgccctcgtacagtacccggggctcgagaagatcaggacagaacatctctcatgttgtctagggaacggggtttggcaaaaaaccgg

SEQ ID NO: 134696 - DNA, 534 bp, Arabidopsis thaliana
  unsure (1)..(534): unsure at all n locations
atcacaagaagattttgaatcgaatgttttagtttattaggttttttttttttcatttgagaaatcaaacttagaaacattgcaagactcactaagtctagttgtttatagcattcaacttatatgcaagaacagatttctagcaggggagttgatccttgtagatgttcaaacccgaggtggatgcagtaattgggcatagcctgagagaaaacgaatactgtgcaggcggaatcagaaacttatcgtgaacacatggagtccagctatcatctcccccaagacccatgtgtttgtggtccagatgcacctcgatggttttggtcctttggataagatcctcttcatgcgttgcacggtggaagctcaccggttgtataataacnaagcattccatttgcattagggaagngnaccctatgttgaagctatatnccaaaccaccttggttcngaatgtacccccnaanantgtctaccccatttccccngganaaanagggnatgatgnnccaaatgggtcnaatcgccaggg

SEQ ID NO: 134697 - DNA, 283 bp, Arabidopsis thaliana
aagaaataaaatcgtaatcgaattttttcttttgggataaataaaacatgacatattttacaatttaacattccattggacaatacatataactccacacaatattcttaggggaaaacacatccctaatcataaaacaatctcacagacatatctatataaaatatacttaattaaccattctgcactttttgcgaactttcccaacctgacccggtaaaactccaatccgacccatttttaccatggagacaccaaagtctttaaagaaaggagacccatc

SEQ ID NO: 134698 - DNA, 554 bp, Arabidopsis thaliana
ttttttttttatgaacaaatatgaagatacataacatacaaatgaggacaacaaaatgttacaaatgaattgaatcagtaaacacacagttaagaaaaaaagaagataaaaaaaaaacatttgtaaactgtaatcattacattacaataccaactatatacagtagcattataaatcaaacgatttttaaaaaatttggcaaaaaaatgaagcagaagtttcgatttaagaaacctctcaaacaaaaacaaaaaatgaagtggtggtttacttgttagaccactggaattctatctcaaggtttctgggaccacttttgctttctggtaacaaactatattcacctgcgactgctcccagcatcaccaccctatcgatttggatcgttactttcccaaaggaactctttcccattttgcttttgttcttgcatgaaatgtggagtttttgacctttgggagggctctcaaatgaccatgagaagctctcgtcccactctggattaggacctgtcgatatcaccttggtctgtctaggaggattgttgccgagtg

SEQ ID NO: 134699 - DNA, 725 bp, Arabidopsis thaliana
  unsure (1)..(725): unsure at all n locations
acnnnnnnnnnnnnnnnnnnnnnnnnnnnnnnnnnnnnnnnnnnnnnnnnnnnnnnnnnnnnnnnncttnnnttttttttttttttttttagaaacaggggtggttaatagaatgtttaaacagagaagaaggaacagaacagagtctctgtctccaaaaattctgaagacacatcaattgccacaagtcttgggctctgccgtttcacgagcaaatgaccaaaaaaacaagtagaagaagaaaccattaggcttcaataccgaagatgaaccagtaaaaacaaaaaaagaaaaaaacccctaattaggttttttaaaaaaggagatgaatttttcttattaatgttattgaagcttctctcttatctgtcttcttcaaaatctgagaatggtgtgtcagccaaactccaatctcattccacattcatccttcctttccttttttaccatccttcccttgctgacgatgacctgtcgaagtttctgttgttgaagaatccacgttccttgcttccttggaagtttcttcgatcatctactggtcttggccaattatcgcctgtgccatgtgatctaggtctttccatggattcaacactcctagactcatcgattgatccagcccgtgaatgtggtctttctgaataggaaccgcctctgcttgcactggatccaggcctctcaactgctcgtggcctgaacctgactttgtcgtccagctcacg

SEQ ID NO: 134700 - DNA, 558 bp, Arabidopsis thaliana
  unsure (1)..(558): unsure at all n locations
tccttttttttttttttttttttgactttaagatagttttctattgaaattggatgacttacaaacaaaaagtacaaaacacagattcatatttggaagtagtatctcagactttaaactcccaaaagaaaaatctcaaaatagtcataagattaagagtacatcgtaaaataataacaagaacttcaaaaggcatatcaagtagtagtccattcctcaccaagaccataagcatccgagtaaccagcatgggcatgcccgtggccatgatgatggtcatggtcatcaccagcctttgcttcttctaacactttctgtacttcctcagggataggttcttcagcaacccgtctgatggatttagggaggagagagacaaattctgatatgtaatctgcaagctcgccggatttgctttcctgaggccaccggctgcctgaatgtgtgacaaactttgctttccggaaggcctagcaaacgtgncccccggaanccattctttagnggtcncngncaatccttgnacgggaaccttacccnccgatnccntgggganga

SEQ ID NO: 134701 - DNA, 336 bp, Arabidopsis thaliana
gatagaattggatcattggatggtgaaagaaatataaatacattatgtgattagagtttgatttgcgagtcaaaagatagaaacaatgaaacgaatcagtgttgtaaaatcactcaaggaggtggtgaatccagtcctttacaataaccggtgagccataccaaggtctggtttcatcgtctgaaccaacaggtgaatggtaaacaccgtcggagctaacattaagtgcaccttcaaagatgagctgaaacctcagggactactccatcaccccacacatcagctcttccacatacttgcttgtatccttgccctacaaaacggagcacgggaagt

SEQ ID NO: 134702 - DNA, 374 bp, Arabidopsis thaliana
  unsure (1)..(374): unsure at all n locations
attcaatctttggaagttatngcaacttttgtgaccntctgcacatttcnggcaaatggaacaactctttttacttctctaaatacacttttgaatgtaaagaagctatctggattctggaccaaaacaacacacaaacccgaaacaaaatcgaattgaagaaatcgaacgaacaccttaagatgggtttgaagggttggctgattttgattcagctactacacatagagggtatgcaaacaccagaatctggattctggtgctctttccagcattcttccagggactctaagtttcagttctttcttggctccaccggaaaagcagagtgccatgtttcttttggtgtnatanacnggcatgantgtctcctt

SEQ ID NO: 134703 - DNA, 460 bp, Arabidopsis thaliana
  unsure (1)..(460): unsure at all n locations
gagaaaaattcacgtgttggtagattactggattgttattagagagttgtttgaagtatagtgagcgaattaaaaatttactgtgttgcttgctgcactaaaattacgatgtcgtttttgaatctaaaacatgtgagattataggaattttctttgatacaaatctcatttgaagaaggttttaaaatattttcagtccccgccggcgtaaaagattcatattccggcagatcggagagcgtactcttgcaccagcgccgcaaacagagacggcctctccagcaagcgagccgggctatcgaactctttcgctttcccagcatcaatgacaaggactcgatcgccgtccatcactgtaggaatccggtgggcgatgctgatgatggtgcacgacgcaaagtcttccctgatgatctcctgaacacggngncggtttgggancaacnggncaanttnctnc

SEQ ID NO: 134704 - DNA, 501 bp, Arabidopsis thaliana
  unsure (1)..(501): unsure at all n locations
aggtaattttcaaaaggaagtgtagaatccatgataaacgaatgcatagtgaatgggcgatgttatctggaagaaaacactctattgatatcacaatcactcaaggtaaagctcgtgctagaaattggtgcacaagctgaaaacagcttacagagagagcctgatgaaggaaaaaactagagagagatataaaagctaggagcttgcagttacctccgaaaagccaaacttctcatggaatttctttgtgttacagtccagcatttctctaaggctgcagtcaatgttgttctttttgacaagtttaaacctcgattcgaccttcttcttcaatccatggtgaaagaattcaggataagaagccacttcatccatgcctcttcccatcacctggacgagggatctgatcctaggcggtagggaattcttaacacccttaatcaagatggggggaccgtgacaggtgcaccngggacnccaaccaacccttcaaaaacaaat

SEQ ID NO: 134705 - DNA, 441 bp, Arabidopsis thaliana
ccaagaaagaacaaaggtgtaaccggttcatgtcagaatcataggcgctgttgtttctgaaagttacaatggtgattggtgacacttttacatattttgttgtcaacagaggaaacatagggaatttgatctcgtcgtgtcacgacggtcttctagacctttcaagaaccatctcaccgcgaggtgctctgaagcataagtcatgaaggcagctagaattatggctagacccaccattagacccaacctcgtgaataaagcagtgatccccaaaatgtaaggtaaagaaactgcagcaatagccagaaaagccatccctaatccataatacaatgtagtaacgtcacaagacccacctgctcgctgatgaacttttgcggaatcatccaaggaagatgattctgattgtatcgctattctctttccatgttgatgcacaaa

SEQ ID NO: 134706 - DNA, 431 bp, Arabidopsis thaliana
cccacccgtccgttcttttactgagattcttttggcgactttgattactttcatcatctgagcttaaggttttggctgacatatatgggcggttgtgatttgaataaagacggcaccaagcagagaagacaccgggattcttggacattgcctggatatctcataaacatggccgctctaaaagtgcgccggcagagcgggatcttcacacttgtggtaatggagcttcacaatctgcaaacaacttgactagagtgcatgcatactctgttcaaacaacagcagacaagagaccaaaaccactgcataattgtcagatgttaactaaaaacaatgtgacttctaacgacagagcatccttggaacgcgatgttgagcagcttcaccttcgtcttcaacaggagaaatctatgagaatggtgttagagaga

SEQ ID NO: 134707 - DNA, 423 bp, Arabidopsis thaliana
  unsure (1)..(423): unsure at all n locations
aatgatttctctaccactcactacaccgattttacccagccggtgtctcctccacaaaacccgccggcaaaactcgactcgccgccgcttattgattcgatcatcatcgagcttacaagaccaattcaccgtggagacgacgaagcgagtggttcttgtgagacatggacagagcacgtggaacgaagaagggaggattcaaggaagctccgatttctccgttttgacgaagaaaggcgagtctcaggctgaaatttctcgtcagatgctcatcgacgactccttcgatgtctgcttcaccagtccattgaagagatcaaagaaaacagctgaaatcatatggggaagtagagaaagtgagatgattttcgattacgatctcagagaaatcgatctctactcttttcaangtctacttaagaa

SEQ ID NO: 134708 - DNA, 468 bp, Arabidopsis thaliana
gataatataattaccttttagtattctatattagattattgttgcctggaagttgaagaaatgaagattaatgtcttgtataatttatattttgtttcagacctatatatacattgtcatgcaaggaatagctgaaagcagattttttttcttttgagaaaattactactcaaattatctgccaaaccgattaaaattacttaatttcaccatcggtttacttatttcaagctgtctgaagtaatttatcgttgttactctcattcttcctcgtcgatttcggagttttcctgattactttcaccctaaacgccgccttcttatctgaaccaaactcgatgatgtcggacgatctaaaccgcgcgggaaaattcggtgttgctctatatcttcttccttcgttatcggtcacataggttccgtgttcgcttcgaagatccatcaagaagaaagctccgtctttgtaaa

SEQ ID NO: 134709 - DNA, 734 bp, Arabidopsis thaliana
  unsure (1)..(734): unsure at all n locations
gttgttggancttttataagaagaaacagataaaaatgaaacccagatctggttcttacagtaacagatcttaacacaatctctctctctttttaatcgtcatcatcttcgntgatgataaaatcatcacgctcaatcttttttttgtgntcttcctttttttctctttcaatatgatatcaaaggaaaatggaaaaacaaaagagcataaagttatcattttgtaaaatttgagaattttttttgtgtgtaatcaacggattttttttgtgaagcagcaaatcagagacgtagatcggtacagtggagatcatctatcccgccagcgaataagtcaacgccatccaaccgggcgggaaattaagatcaaactgaaacgggcgttttccggcgggaagacgaagatgcgatatcatctccgtcgtcaataacagacgacgaagaatcgcagtcgctatgacaatcctccggagctaccggtggagttctcggatatctcttaatcgcatgtaacggtttcgccaccgacgaagacgccgccgcggcttccatcggtctcggtccgctacaagatttaacggtgctgctcatgctgctactcgccggccgactaataatctgctgctgctgctgctcctggaaattacctccgccgtataaccgatggtccataaacggatcgatctggttctgaatcaccggaggagaacagaggttttgattgtggaggtagg

SEQ ID NO: 134710 - DNA, 554 bp, Arabidopsis thaliana
  unsure (1)..(554): unsure at all n locations
gggtgaaaaatgtcaaatttataagtaggaacagctctcaggttctaatcatacataaactcgaacgcaatccaaattaatgttacaacagttttatttcccactctttgtgttttgtttggtgggttttcttcttcagaaactctcttggatgtgtttataagagcaaaactggagggatgtgtccttaatggcggaaatgtctaacgttggtgaagagcagagagactccatactttttgcagcaatcaatagcgtcttggtctctaatactgcctccaggttctgctatcactcctattcccatctggcacgcctcttccaccgcatctttccaagcgaatggggagaatgcggcactggccaaggcagccctttaagcttcctccccagctttccttgnaagcaattctcagncncnnnnaccgggtttggtngccggttnccatccccagnaaaaaatggtnctatgnggcaacccagnatcggataaacaccnnggaaacaggtcggaaagggnccnggnaaggggctggggggaancaccttggaat

SEQ ID NO: 134711 - DNA, 551 bp, Arabidopsis thaliana
atgatgaaaagatatgatcgtacaaaatatttataatagtatcaaaatgttatcaatgagaatgtataaaactgtttctatatagatgaaacatgatgttacatccgaatagaaagataccatacgaggtctcctgttcccaagtttaacatttcaaagccaaaaaaaaaacccattgatgttacatatcataagcacaagttgacgtctgaggacaaacaatttgatgaccatttctggttttagaaacaagttgactttacatatcaggatactcaaaaggagggctttaataaatcatcacttgcagatgaactaaccaaactcactcagatcactggggaaatctctctccattccttttggcgatacattgagttaaccgaggaactcttagcggctagccccagcgcctggtaacatgcttgtgagcgaaggcacgccttgtccccccttcccctcggccgcttgcttcatctactgtggatctatgttttccattaatccgggcattaggaacacaacaactaccatgaatcccaccatgagac

SEQ ID NO: 134712 - DNA, 579 bp, Arabidopsis thaliana
  unsure (1)..(579): unsure at all n locations
attttcttatcttattggggtgtactagtatggatagcaaatatcaactactaatatttgagagtttgcaactatttcaaaagatttttgatatacaaaatcctaaggggacagagagaaaccctaataataaatagactaatactaacataatatggacagacaaaaatagccacttgcgatttctattcattctgcagtcttaatcaaaagctctttctccttatcctgcctgaaaatcttcgagatatgtacagaggagtcaaaagaatgaaggattgatgggttttcactgattcttaaggtgacgggggcttggtttcgacaagctttcttcaagcaaacccaaaaccttcactggcttcgtgaattgggagtagcaggcgttcctgaagctgttccttaagattgatacncagggnnggcnaagttgggtaaaacatgtatgagctgatggcagccgctctgggggnccaaatgctttgngggattgnaaaccttttgaggggcagnaataccctgaagngccttgaancttccaaaggacccttgatgtccngggcaaatgagaatcccnca

SEQ ID NO: 134713 - DNA, 394 bp, Arabidopsis thaliana
aaaacgaaacaagtccaaaacataaataaaaataaatatcttgccatacataggggcatatttgattaaagagattatcatcagaatttttccatattacatatagagttatggactctctaattcaacaaaccttagccaaaaacaacatcccctaacttttaatatctaacataaccaaccttttccttcatcaaacaaacgaccaactaacgagggtaaaagccaagcagtggtttgattcgttggtcatcaacaactttccacaccgtcgcttgctcatacgaaaccggtctgcccatgctcgacacacatattcctgccggaaagattcgcatatccctgctgcatgatcttggcgaactcggagcaaagagctctccgaccagagtca

SEQ ID NO: 134714 - DNA, 567 bp, Arabidopsis thaliana
acaaaagctgcagctccaccggggtggcggacgctctataactagtggatcccccggtttgtttttattgcacaaaattttacataggaacgcttaaccaaccaacgatattgtcaaacaagtcagtcaaaaatctttggatatttcttctgaagaactaaggaaagagcggtttactatgcactatttcgctcacaaaccggtgactttatagtttttgattatatcgatgtccgtccagtacattaacccaatcctgtgatccaccgcgcacaatattgtcccgggtacagtctcagaccagtttgctagagtgttcatttacgatggcgcctgtggggggatcttgatctggaccttgaccgcttcgacctggatttgtcatgagaagagtagagagtgttcttgtgctgagaatgcttgctatgtggtgaccgcgaagaaacatgtccattccaatcaaaacaatatatggaaaacttttttgggggtggagatctttctttaactaggcctaacttcccgccttggggcgttttaccccacaatatgcgggccttttcttat

SEQ ID NO: 134715 - DNA, 425 bp, Arabidopsis thaliana
  unsure (1)..(425): unsure at all n locations
aaaccaagcaacaatctcatgtgtatttttacatctagagattctaaattcgatttttctaatttatacacttacataataaaatcaaaggcaaaagaagtgtgaccaagaaattcactcttcacctcactcgtagaacccaaacccaacaaaaaaaaacccaaaacgaagccacacaaagtccaaaatagaagctcactctatgtacatcctattttgttagcgcccttaccggaagttctcttttcaaaaaaganaaaaacctcccaaggccatttgtgactctaaaattttcnganacaaaaaatggnaaatccttggtctntttctcaggntcagtgactcntggnaaagcnctttcctcatccgttggnttaaacagctgnaggngtcntaccnaggttcntgggtggcgaaggggcccg

SEQ ID NO: 134716 - DNA, 533 bp, Arabidopsis thaliana
  unsure (1)..(533): unsure at all n locations
ggnccaanggnatgngnaaattcccanggtacaaaccacccatnatanttttataaaatacctttactacattacctacacattcacaatgacataaatatgaacatataaaaaaaaatcatagttttgtagaaaattctataaaacacaaaaagaaagagaataagatgaaacctaaaaagttatctaaaaatggaatggcctaacaagtaattgaagactctttctttgtgatatgcgggatctctttgttatatatatatcgtgtgcatcaagaaacacacatcaatatctgtttgcaattttcagaggaagtaagtgagctgttcctttttccttgagcctccttctccatacaaatcattccattgctttagctcattcattcctgctccttctgatgcaaaactcgcagctacctgggttttagcttttctcatgtcttccatgttcaaaggtctcaaatgtaataactctttcctcagaagcttctgcttctccttcttttggattcttctgtgccttttcctgct

SEQ ID NO: 134717 - DNA, 596 bp, Arabidopsis thaliana
  unsure (1)..(596): unsure at all n locations
atcggttaagtccggtttttatttttaagtgtttaggatagactacaattgaaagccttttttcacaacaagcaagagaagataaaaatgaaaagagtcatattccgattacacttttagttattgaaaaataacaacaaggtaataacaagaatcagatttgtgaatcttcaagcaacaacaagaaaaaaaaaaaaaaaaagtcgagacatatgaggctttttgtcacaactccaagaagaaagattcaaactgaactcattcatcaccggcaaatctgacatgttttcctgtcggtgtaggaaagcctttcaaacgcaacactcctggagattgatctttggcctccacaatctcttcatcttcactgtcatacacaaatctagtgtgtttccctgcaaagtcagtctctacgctcatcttcctaattcccctcacacaacccatccacaatccctccctcttcttcctcctcttcctcggcggggtattccccatcatattcctcaccgtaagaataggcgtcttcctcttcatcatcatactcgcttgggattgatnggcggatcggcaccggngggtaancncggggtngg

SEQ ID NO: 134718 - DNA, 569 bp, Arabidopsis thaliana
  unsure (1)..(569): unsure at all n locations
gatgtacaataaacagaataatctcatttccaaaacttctggcaaaacattatattttctcaagggaacaccccacacagacaagtcgaaactttatgggtttgtagcaagtttgttgaaggcggcgtgaactctctcttccgtgaacagtctatggttttcatagaaatctaatatctccattgcaatattcttcacaatgttcatgtcgacagaaagctcttcaaaccatgtctttatgtctttctctttgtgtacagaagcaatgtaaatgcaagcgagtgttatgagaaacggcggatgtataaggatgaggtccattctatatgtgtcgttgacaagaccccaagttagatgggtcatactagtgtcattgattccagaatcctgcaagaactcaggcagagatcgatatgggtggaatacaaccaaggttggaggtccaatgcttcccagaccttcacctccatttccaggatacctttaaccccataccgaaccttttcatccgctccaacagggggggaaggccccgacngggggcncccgggatccngccggaccgaant

SEQ ID NO: 134719 - DNA, 537 bp, Arabidopsis thaliana
  unsure (1)..(537): unsure at all n locations
ttttctcgtaatctccatacaacttcatttatttttttcttatggcaatgactttgtaccttattttccaatttgggtctatgcaaaatgattgaatcaaaagagttcactctaggtaaaccaaggtatgctacatcaacagattaactgaaacatagaagacacttttggcacatgagattgtaccaccatctcgtattaaaaatacttgtgagaacttcacggaaaggttccagcgtttctatcttctgatactactacttcagtagctgctgcctgtgagtatgctcggtcgtgttagagttttactgatgagatctctcagctcgatctctcctgggaatctaccttctttcaatttagagaacaccggttcgccgttgcagtgaacttcaaaggcgcctganctttgaaggtaaggctgcagaaagtttccgataaaccaagtggaagccatggatccaaatctgttggccctccaggagtggaaccaagcaggtgggttcgtaattccaatcatgggaaggatacgatcac

SEQ ID NO: 134720 - DNA, 458 bp, Arabidopsis thaliana
aacataaactaaaacttcattaaaactcgattcctaattgcaaaacccggctttatgtcttaagatcttactacaatccggaacacacacttttgtatgtcttaaattactaaagcataaacgaaaaaacaaaacactcttctcacttaacattactaagcaagatcctatgaagctgcaaaactttttaatgggcaagagatgttgataggagcaagttgatcaaggaaaccgaaactagagtcagctagctgaagatcttcaacatccgcaaagtcgaaatctggtaacgcacttggaccgttatcttcgaatccttgaatgtcatcaagcaagccgaaatcatcaaactgatcatccgcgaggaaacaatcgaagtctaggtcttgttgctcctctgccaagaaaccaaaatcagggatctgtagattagtaaaagtcgaaaatccgaacaacgt

SEQ ID NO: 134721 - DNA, 395 bp, Arabidopsis thaliana
gttatcgatgatgaatattttaaatgtgtcaggggcatctgacactcaattgatgggtcccacactttcacaaaagtatacatagattcatagtgatgatacagacacagacactgattttgagggttttaaaaacaaaatatcatataatggaacagaggtggttccttagttgacttgtgagagaggcgaccgtgttagctgttgcggttttgtttccttggtcgcaaaggattcataagagttgttttcacggaactcttcaactaatgtctcaattggcatggctcgtagtgattcaatggtggctttggttgggatctctggttcattctttgttggagttgcacctgtgggctcatactccatgtattgttgttgaaaagtttcttgag

SEQ ID NO: 134722 - DNA, 528 bp, Arabidopsis thaliana
  unsure (1)..(528): unsure at all n locations
gtcattcaaagttgataaacactgctcattgggggacaaaatttttctaatgggagtgagttcaaaagtctggcatttaagcgtaagaggattcgctacatttaacttttctagatctcatcaatgaatcctagaagatcttcaattccttgcctcaaagctatgaccttttgctgctgagaagcgatccggttttcgatatcacgccctgaggatttcttttcgtacccttcaacaacagtggtatgtttggccattaacttctcttgaagttctttctctttcacaactagctcctcgacctttggagatatgtgagaggctgatgggaaagactgtaagaaacccagcaacggtttcagtcctttcgaagatctttcagaaactggcagtggatttgcgagctgctttgcngtttgaatggcaccagtcctgagantcacgcangatgctcagctaacatgngggcaagcatttnggngaggttgnctcngngngngnaggcccaccatgaggtcgcaaaaccgt

SEQ ID NO: 134723 - DNA, 510 bp, Arabidopsis thaliana
  unsure (1)..(510): unsure at all n locations
aagataattccaatatagaacttaaaaaaatatccaaaacatatttatttatcagaaaagagagagagacataagcaaactacgataagaacaacgagatagcaaatcctatgtatatctaacgagatgtaacaggacgttacatgtaatacgcaaaaagaacagagcgcgccgtgtcggctatacttaacactttgcgcatttattaccaaagatccagcgtttaaagcggctgagacgcagccatatgctgttgctgtttgccgccgtcaagagccatttgcttggacatatcggctagagctgctgcggctgctgctggtgtcatgctttgggtatggagacgctaatggaatggccagtgtttgccagcaggagcttgtgtgtgggtaatacactgtctcgtttggagagtttgtgtatccaaagggccccgcagttgcgtttccgttntgcaangttgngngncccnaccgaattggggttnngttgnncannttnggggncccc

SEQ ID NO: 134724 - DNA, 529 bp, Arabidopsis thaliana
  unsure (1)..(529): unsure at all n locations
aacacagaaagtttcagctattattatactcatgaatgaataattgatttgatagtagatagaatagtttgttgtagttccagagattgttaaataaactcctgacaaaaacagaaagcaatatgtaagaagatttccataactagcttaacttaagagtgcagcttcaaatttacttcttttggctctctgttgcatctgaaatgttctaaggcttgttggaatccttcccgggacctttcgggattgcccattcaggccaattacgaggcagcttaagcacaatctcagcgccgtctgaagatgatgatgatgaagatgacgatgaaggagaaaaaaggcggtggatgattagcagataccggagtaaaaggtttctcccgaagctcggttctcagtcgctgagtttccnctggtnctgccttcttcttcttgggtntatcaccagaccgttgagagcttntgtacccccaaaaggggntattatcatttcacacnctatcatancnnctgccanatgtccatctgt

SEQ ID NO: 134725 - DNA, 600 bp, Arabidopsis thaliana
  unsure (1)..(600): unsure at all n locations
aattataattaagtcatttcattaaatccaagtcaaaccaggacaaacattcatgaaagcagaatgaaatccatttgctatgtttttaacattagcttaactatatgtaacaacaaagactcgacagatccgtaaacacataatctcatctcatcgacaggggcttccgcttcttcgtcgatgaaggactctcacttgcttgtcttcctaaaggtcgctttgatggtgttgcactcttcgcgagcttcttctctttgcgggcttgcctctctctttcatcaaactcctggttctctttctcgatcagtcgaatcagagtgtcgcatcttcttggcaagttcctgactcgggcgggatttcacaaaccagtcaaacctgaaaacagacgatgtcctaaatgctgcctttagctcatcccaattcccataaccaagtttgtgaatcatgcagatcatgaaacggtcacactcttcattgtacagcttgcctttgttctgaccatattgaatcttcagttccagccaagggtttctgtagcganccagtttcttccctatggccttcatgattncgtctttcctagagaaccttgcctctccc

SEQ ID NO: 134726 - DNA, 465 bp, Arabidopsis thaliana
ttttttttttttttgattttaagatcagatgaaataatcggttacattaagttgcagagttaggtacattaaacaatagaatgagagatgaatatcccaaaagaagcttatagctatgtctaaaatgcttcaggccttcttgttcttggccatggcagcactgatatcagatgcagtgtgacagcgaaggacgagatcagagagtgagagcttgagatcaatggtgagtttctggaacaccttagataagagtaacacatctgacaaggccctgtgagcatcaccctcccttgtaagactatagtagtccgcaagcgcttccaacgatgaacttagcttaaccgttggctctacagacttcatgttctctctagcgagtgggagcgagtcgagtaacaaccaattatgaggaatctcataagaacaacggttaaactcgttgatcaaaaactggaagtcaaatga

SEQ ID NO: 134727 - DNA, 567 bp, Arabidopsis thaliana
  unsure (1)..(567): unsure at all n locations
ttttttgatgtaatcagaattttcaaggataatggtaaaaggatgagacgaagaagattcatcaatacaagtatctttgtttatgggctaatttacaaaagttatctttatgaatcaatgttaataaaaagtaactttaaagactaattcacttataaaagtaacatagagatcttgatgccaatgtcctaaaagagtaagcgtttcaatttcacttggaaatgtttaagacctacgaccgtgaacctaagaagagtcattcctcattgtgacaagctactttctaagagggtctcagactcagagagctgctttcttcacctcgaaaaaatttggagcgttctctgtttgctgcatcaatgtcttcttgtgatgccacggccactgcaacggctttatcactaacagagnctattgcctctgcgnattccttgaagtccttcaaacttgtaggtaatattctttacggctattttgcnctcttcggcgggtacattaggaaaatgcncaacaaactggatancnttggatnagggggttggatgatcgcatcgccaatgnccatnt

SEQ ID NO: 134728 - DNA, 525 bp, Arabidopsis thaliana
  unsure (1)..(525): unsure at all n locations
atataactaaatttgcaaatcatatatacatggggatatatagtcttattacattcattcacattacattcaaataaataaatttaaaccttcttctacatgaaattatttttaactctatccaatttattttctcaagttctaaaaggactttcaagacgaatatagtcatacataataccttgaaatggtgttctacttctggtttgagttaaaaatattgtattatcaccaacacttagtaaatttccagcaacgtcgatactatacaatctatataatccatgaattccatgtcttgcgatcgcattgtcctttccgataaaaccggttgtgaaaatccgcatcggatttcggatcgttgattcggattttgtagttccgaatcagctgctgatgctagagctattcggagtgtgtagcggccgatacggttcacgtttttagggtgaaatgattgccatgtgttggtggatgancgtaccaangttcncgcacatgggaagaccatcttnggggggaaat

SEQ ID NO: 134729 - DNA, 333 bp, Arabidopsis thaliana
tttattttcttttttttatttgaaactgaaaatttttattcggggtgtatggtaaaaaaaggttacattctacaaggcatacagatagtggttgtgtcagttaacaaaaacatcatcaacacctgacaaaagtcaaagttgcaaaactaagtatactaaagcttagattttggaatcgaagctttactctcgtgaagcaaaagggcatcgtaatgaccaaaaccatggtataggactcggattgggtcgtctttaccgtattcttgaccatattctgcattacttataagtcctccagctttatcgtctttcatatacactgtgattggcatc

SEQ ID NO: 134730 - DNA, 403 bp, Arabidopsis thaliana
aacgataacctgcctctcaattatctctagtactttattttacaatcgtaattattttagctgcgctattgcagatagtcatacagagagcattgttatccaaaaggaaaaggttctaacgcttatggagattcatggactcactgcaagggatagcttgccatcatagcaataccacatttacccgtgtcttcacttacaccacgctccatccgtatgtagccttcttcaccccagccagttccccatgaattctttacgatccagtacttttgatcgccttctactccatatccaacaacagtcactccatggttgagatttgttccacagtaatttgtgaaaacaccggaggagtagagctgaaagataaacccaccaacatcgattccaactgatactg

SEQ ID NO: 134731 - DNA, 443 bp, Arabidopsis thaliana
ataagattaagaattgggatctgtttgacttataaccaaaactttgaaagccaacaagtatgagacctggtgtaataccacaagcaacagactacttactatacagtgtattataacatgatggaaccagagataaataaaaaatgtacatcagacaaactcctacatagtttctctccagccccataaccggaattacattaaaccgtaccaaatgtactcggtttacagtccaaccagatttcaccggagttacagcccttatgatgttcctctccttttgcacctccaaatgcactttttacccggtttgtgaaagccgtctccagttcagtatttcatggtgattctgcaagtagctagacgttgtacttcctcctccaataccattttcttcactagggaactgctctgagtaccctggagaccactcggggactatg

SEQ ID NO: 134732 - DNA, 426 bp, Arabidopsis thaliana
caaaggttcatcaacatgattctctacctgtctgtttttatataatccatattcatagaactaacaaagaacgattcttttgggtataacatcagacagagacagaggtcagagtacaaaaaggatggcttgtaaaatacacttgaacctatgttgtagtaggaataggaaatgaagttgattgaagtctctgcaaccatgcgattctcaaactgggcttcttcagctctaagaagatctctctatactctctcttcagaaacaggtccaacgcaaacatgtagagctcactaccttgttcgacctcttcaattgcgttgaggcttttaatgcattctccaatgctgtacatcggctttgccgattcaatctcaacgaataccggactttcctgcaacataacgtcattcattaacttcatatcat

SEQ ID NO: 134733 - DNA, 490 bp, Arabidopsis thaliana
  unsure (1)..(490): unsure at all n locations
aaagtctaaagtaaagatcgtattcaataaagcaaaaagtacacaactctttttctcttcaaattggctcttgcaaaaagcctttcacaaaacatgtctcacaaagtacaacaaaagcgggaaaattttacatctacatagagagagcctaagacacaagaaagggagaataataagacgagattagaacttccttggtttagctaaggacttgcagaaagaagaaaaggctcctttgatttcttcagggatcgggagagcaagagagagtggtaaagcacgatgatgatcttggaacagtccggtttggtgtctcaacgagaccgagtgtgccaaagctgtttgtcttttgttgagtccctccagaataaaagagaatgccccaacgtgagacaactctgtagaagagcctgtggagcaccagggaactaagagcaagaccagtgcanacccgntactccacattatggggcacntgcncggtttgntt

SEQ ID NO: 134734 - DNA, 551 bp, Arabidopsis thaliana
  unsure (1)..(551): unsure at all n locations
aacacaagtttttactcttaaagtttgcgcaaaatttcattccacaggttttgtgtattcatactcacatatgactacgagatttaacacattgacaaaattaaaagcacaaaaggagaaaattgtagtttcagaaagagtagtctttcaaatctgctctagagtcgtccatgtcaatctcagacatgcattcgtcagcactaataggagggagtttccgagtcttaccgcttaaggttgtgtttgtgccaatcactcttacagtgctctctgtattgccttagcctctccaacgaacgtgttgccaagtgctgcacttgggcccccttccttttcctcccccaccttcctngctttaanggaacctgnaggacttnatcncttgngtctggaagnttcnttgccaaggtcaacgacgggancggcnaatcctnggnccagcccagnaggaaaaacggnttgtggggttgaatgccaatcatcaaggccancgaangnccaagctnggaccntngnatgacggaaangggaatccagctcccggaacccca

SEQ ID NO: 134735 - DNA, 474 bp, Arabidopsis thaliana
acgagcgttgatgaacttgatttcgcaaaaatgcattacaaaaatctcaaacgtctgtatgaaaaaattcgctttctttcgtaccaaaccaaaatttagcacgagaatcataaattaagctaataaaaaaacaactcaaaaacagagacgtaactatgtgatgttcctgataatatactacttactactaggctttgtcttcgttgtcgtcagaatccgaagcagctccgagtttctgttgacgggtagttggaagagaatagtttcgtcgctctttgcctcctggcttcgaagaggcattaccgtaccagatcatacccagtactgcaattatcattccaacaaccacgtgcaagttaagaccttctctaccaaagaagaagaagcccattatcagcaccaggatcgtcttcatgtgtcccagcacttggaacgatacagctgtgaatcttccgatgcagatgaactggctta

SEQ ID NO: 134736 - DNA, 422 bp, Arabidopsis thaliana
ggtagattatggatacaaatagagagttacattaccaaagcaaaagtcaacaaaaaaaaattccataattatgatgtcatacagcataaaaataaaatattacataaagcataaagctcatatctatgaattattgatacatataacgtacatatataactatcaataacagcacacacatcatcgcaacactttcagattttctttgaggccaatttgcggtacatttcgtcgatttgcacctgataatatttgagaagattgttcctccgattcttgagcgtcgcagtcactaagtctctctctacgtcgaaaggttttgtctccactgtcaccgctttgatgtactcaaactttcttggcttgttcttttctgccgtggacttcagttctgaaatgatgtgttcttttagttccgggaa

SEQ ID NO: 134737 - DNA, 585 bp, Arabidopsis thaliana
aaataaattcatatatattggatcaagcaaaaaaacatacagaatcgttatccggccatttattgaaaactacttagctcgtgctacggaggacaaggattttttactcgttctcttaactcccaaagatacgcacaaggtccaaaaagataaagttgtaaacatttaggcaaaaaggttaaacacacaaaaacttcgggttaaaaagtaaaaacataactaaagttacggtctcttttcctaattttttaaaacatttattgtttttcccggtttcaggcgagtcatctctaccgccgcgactcaggcgagtttccacgccgaggttgtgatgagtggtcgcgtctgccaccctatcattaaacatccgtcattttcttcaactctgtatccatctccggtagcgtaaagcgataaaagcatactcgcttgtttaaacgcgctagatccgagatgaatcgggtcaaacccagcggatttcatccgaatcctccactgtgcagccgtctcgtgccgctcgacccgatcggacccttccgccgcaacaacgttgagtatctgtctccctaagtacacttctgacat

SEQ ID NO: 134738 - DNA, 645 bp, Arabidopsis thaliana
aactaaaccaagccaaaataaaattatctctgaaacagagctttgatacaaaatccacctcaatctatagccaaatgaatatttcaatatccacctttccaattcgaagtcacaccataactatgcttatacaaaattcactaccaaaacctcgaaagtcaatagagatgaagaagagtatttcacctatcagttcctagtttcaatctcttcctcctcctgctctgccttgaagctttgcgagtaatgataagaagagtcttctttagttttgtggtcttttagtttccacttttgtatttgtaaaactctaacatctcttcttccacgggatgagtctcgcctactatcacaagacaatgcaacggtgctccaaaatcaacgctttcgagttgcttcatcgtccctgcaactatcgtctggtcctcagagccaagccgggcaaagcccacacactgtgtgtcttcaccataaacagaatctccatgcttttgctcaacttccagaagctgctcgattgctgtattaacactcatatacctcggcggttcatactgtttcttccctcctctgcatagagattcaaaagtaggctccttcactcggatatctagcaaacagagagtgtgaagtccaagagagcgg

SEQ ID NO: 134739 - DNA, 740 bp, Arabidopsis thaliana
cagaggcaagcaacatcgaattaaccaattaagaagaacttgtaagctattaattcatttaccttgttagaatgctttcttccccccacacaaacaaaacaataataaatcggaaaagatctaaaacccccacaaaaaaaacagagtaagaaactgaagcagatcatctctgaggctggtcagaggcagaagctccaacggaaggtgtagccgtgacagcgctggctgagccattttcaggcggtggagctactccccatttaccttctgactcaagcggctcgaatatatggacccctccgtctgacagacccactgcaaacatgttggattcttgcggatgagccgctatcaccagtggatggacattcgagttgctgagagaagctggcaaatatgcagagggattgactctgcaacgcaatcgaaggtttgcagagctgaagacgcatattgtaccgcccatgaaaacttgggtatatccaatgggctaccacatgagaatgtggcatgtgttattggagctgctgattcacgcacaggccactgtttcatgcattcaagcttggttgttccgtatatagcgagctgagtttcatggaccacaaggaagtgtacttgatcttgatgaaactgaacacgcgtgtctgacaaagaagacgtggatcttccctgtggaatttgcagaaccttgcttttctgcttctcccatccatccgtgttccatacgcaaagctgag

SEQ ID NO: 134740 - DNA, 616 bp, Arabidopsis thaliana
  unsure (1)..(616): unsure at all n locations
ttacgtttatttcatcaattattgtatcgaaagtagacaaaactcaaaagcaaagagatcatcaacatttgtctaaaaagtaaaaacaattgaacatgaagaaaaaaaaaaaactctcgttattggaactataatcaataatcgattaaaacgccgctcgggaaaataaacagagagctgagaatttgaagcaaacaaaaaaaaaactcatatttgaatttcgaaatcgttcttacaaaggcgtcgttgggacgttgcttctggctgcttcaatctcttctcttcttctcataccaattccaagacctgaaacaggcctagccaaattcctctccatcttctcccactcccaatctccatctgctccatgacgacggagccaggtcttctcaacgcgggttctgattccaaggccaatcatcttccacatcatcaccaatctggaggaatcggnggcagatccggtaatctgnntcncatncaggccntgnggcancgnttccaccttngcggnggtggggggccaatctncaagggggccgggtttggccggggncaggggggtggatngnggggntttggctccggnacncgggagttccgnnggggggatntg

SEQ ID NO: 134741 - DNA, 561 bp, Arabidopsis thaliana
  unsure (1)..(561): unsure at all n locations
ggaaaggccggccctatccaggcaagttgatgaggcattaaattacataaaactcatatgattacagaaaaaaaagaaaggaggaaaaagtcaaaaaggcacagagaaggcatccccttgtgactctgttacgtccgttaatttcggctccccaaccaaaaaaaaaaaaaaaagaaacaaaaactacttttacaacggtaccatgtcacccaccatgtgactagacttataatgtaaggttgtgtggggttgttagaacacgcgccgtctacaacaacacaaaagagaccaaaattgttccagctaatccacactgggcccaaaacagggcctgtctgctggctcccataggaactcctctttcccatttcagaatgtttcttctnancttttaattttaaggngccatctcttncagctgttgcttccagtactttgggntcttaactccggcctaaggggatttttttttccannggncgnacaaccacggggttccaaagtggggggttngngnaaaggggagnagttttttntggggcggattnggtttggtttcct

SEQ ID NO: 134742 - DNA, 285 bp, Arabidopsis thaliana
  unsure (1)..(285): unsure at all n locations
ttctttttttttttttttttcaacaaaaagggttatcacttatcactgttgaaataacatttccagtgtcagttcacgatgtgaagtaggttcaagcttatcttgcttgtgtctagctgcattcctttttatctacgaatattctttactgtctgactgtcattctttgtggtgtgtatgatcagaaggttgtttgaattccttttgctttcggatgctttggcaaagcacacgtagcctccgattctcaccaagaggcaggccttcaggttcttgcnatgattc

SEQ ID NO: 134743 - DNA, 739 bp, Arabidopsis thaliana
ctacgacgtcgcatgcacgcgtacgtaagcttggatcctctagagcggccgcccttttcttttttttttttttttaacttcaaaatcatataatttctaattacttccacgattgtaatcaaggtacatagatagttcgagaatctattcgcgcggttgtttcgttcgatgatagcgcatacacgcttctcagatgtggtaaaaacataaaccacatcttgtttcttccaagtctttagtttgtggtaaaagaaaaagatgtgaaattttctgaaactcatctaacatacttgagtaacatacatgtagacagaaaaaagtttcggtgatagatcctaaaaccatttgtaacttgtaaaccctgttagacagcaagaccgatcgatctagtagcggttgtgacgcctgtggcgatcatagtcccttggtctatctcttgacctggaccgtgagcgtgacctacgtttgcttcttgagtgtgaccgatcatagtctctgtcttgtccacgatcacggtcatggtgcctatctcgatctctactcctgcgatcataatctcttcgatgttcacgactagcttcttggtctttctttcggcctttacttgattctctctccttactgttccggtcctttgatctttccttgcgaatattgggctttttattccagaacttctgttaatttggtcccggactagcatgtattcctaaattaaactttcccccccaaaatgaat

SEQ ID NO: 134744 - DNA, 851 bp, Arabidopsis thaliana
  unsure (1)..(851): unsure at all n locations
tcactatcaacaactataacgtcgcatgcacccgtacgtaagcttggatcctctagagcggccgccctttttttttttttttttttttaacttaaaaaacagcactttctgcttttgcttatgcttatttccccattgtacacaacaaaatgcttctacaaacactttaaaacatggttgcatctttcatccgaggtggtgtgaccgtaaacaaactctaacctcgtgttcttcctccactcctcctctcaattttggaaccacaatctctaaaactggtccagtcccatcaaaggatgcttcaatatttgcttcttccggaatccgattcggcaattgtatctccctcatgaattcccctggaggacaatgctcagccatctgatcaaccagcttgaaagtccggtcccgtctcttcacaaacgaagccctcgaagtgcttagtcccgtgaccttcacgattccatttgtgatattgttcctccatgaaaccttcacggtgttcaaatccacaaatggtagagttattacgacccgataagcttctttcgtccctcattaaacgcgttttttggcagacagtttaccagggtccccgcaaccttaatttccttttcattcaaccttcccccggagggaaaaggtccgttnttttacccccccaaactttggggccccgggggttcaccttttttgggcattttggtggggggttctcttctccaaaggttttgttttaaaccacggttcccgaaaaacaaggccattttccttttctttttccggttgggctttcccccggggaggaattaaaaaacaccccctttttccctctttccttggggaggggg

SEQ ID NO: 134745 - DNA, 670 bp, Arabidopsis thaliana
  unsure (1)..(670): unsure at all n locations
ttttttttataaataaaatagtgtttactaatcaaagaaaattgcggttaaatacaacttgctctgaagaatatactttttagaaacgaagacaaaaaaaaaactaaagtgaaaaagttatacttaaaaaacagcactttctgcttttgcttatgcttatttccccattgtacacaacaaaatgcttctacaaacactttaaaacatggttgcatctttcatccgaggtggtgtgaccgtagacaaactctaacctcgtgttcttcctccactcctcctctcaattttggaaccacaatctctaaaactggtccagtcccatcaaagtatgcttcaatatttgcttcttccggaatccgattcggcaattgtatctccctcatgaattcccctggaggacaatgctcagccatctggtcaaccagctttgaaagtccggtcccgtctcttcacaaacggggccctcgaagtgcttaggtccccgtgacctttagggttcctttgtgtgatattgttcctccatgaaacctttaagggtgttnaaatncacaaattggnggngttttncggcccagataaggtttttnggcctaatagacggtttttnagcagttaaagggncgaggttttttntaanantccccggnggnggttncccaattgggggggc

SEQ ID NO: 134746 - DNA, 553 bp, Arabidopsis thaliana
  unsure (1)..(553): unsure at all n locations
gcacctctggtgtaccagttatcgtgcccacggtaaacgctgggtagccaagtgcgganggantaactgctgaaaaatccaaattcactcttccatacaatacaacatttttttcaatatatcattctcacttctcaatattttctcttacaaaaatagatgtacattggcatccttctcttcactctaaccccctcagaaaacaatcgattttccaattcattaatcaagagattcgcatatctcttgaataactaactagggttttatccatttaaaaatcattttggggaaaaccaaaaattatttatataattgatctttgaatctccccaagctaattttttcttttttttggaaaaaaaatcaatttatttattttattgcttaagaagcggagatgtgtcctcccactgggccaatcgtctcgaagccttctccacccctttatcccaatgggtcgggatgggcatggccaggtaaaggttgctgnggggcncaatatcccggccaaatccccangnccantccngggggcnagannaccannggg

SEQ ID NO: 134747 - DNA, 578 bp, Arabidopsis thaliana
  unsure (1)..(578): unsure at all n locations
caagcccaangcagttntgcagggtngnggtaatcacnttggaaaattaaaaanctaaaccgggccggttttctctctcccttgctaccttcacccaatgctaccactaggcataacccatccagcttcatgcccaacaaccacactaacccccatttccaaacactccccgttgtctctccttcatcaacgcagctgataccggacttccctacagtgctggaagtcagagagctctctgctgaacagttgttcttgtgctctattgctactgcaagctcggataaggatggaatcatcattttggttgtgtcgaaggtgcttgttgttccttggcacccattggtgatggaggcctttatggctagctctgaaagctcttctctagctgcctctaacccagcaaatgcaacagcttgctcctctatagccttgcaagctttctctagaattgattgcaggtacttcccttgtgcctcgatccttaactggagtcgcctttgcacctctagttgctcgtgtagtcttctttggacttccatctgggcacgcaaagcttcagtgacctggtaactcct

SEQ ID NO: 134748 - DNA, 481 bp, Arabidopsis thaliana
agcatggtgatttgttatgagtatttaatgagtattttttatggtatacaattacataaattctatatttaggtttgtccaaaaaagaaaaaagaaggcaagcttagaaaaagttgaagcaaatacacaaactaaaagagaggctacagattcaacaaatatatacatagacgctaagacaagtttgatgacagagtttagagttaaatacaacatagcaaaattaaataagctaaaatctggtctcgctctctctctctctcttgctaacttcatccaatgctactactaggcataacccatccagcatcatgaccaacaaccacactattctccatttccaaacactcctcgttgtctcttcttcatcaacgcagctgataccggacttcctacagtgctggaagtcagagagctctctgctgaacagttgttcttgtgctctattgctactgcaagctcggataaggatggaatcatc

SEQ ID NO: 134749 - DNA, 504 bp, Arabidopsis thaliana
  unsure (1)..(504): unsure at all n locations
nnnnnnnnnnnnnnnnnnnnnnnnnnnnncaagacaatccgaaacagagacattgtattccatttacatggggaaactactgttgcgacatctgattttactactacaagcaccccaggttaggtgtagcaaagaatgcagaacagttacacgatatccatgtcctaaggcacaacaggaatttagaggcataaagaatgataatatatgtgggtgtaaacctctttttttcaatggtacagttttaggagaaagaagactctctccatcatttctcttcattgggggtattctgtgactaagtgcatatagatgatgaagaaataagaatgtaacttaaatgtagtcaagaaaaagacctaaaattcggtctaagggatctaactccgcatcttttttcctctgactaccctcttccatatcacccccattggactctggcngcacttgcatgccnnaagggccaactgngctggccaaccgnngtgatctccnggnatcatg

SEQ ID NO: 134750 - DNA, 470 bp, Arabidopsis thaliana
  unsure (1)..(470): unsure at all n locations
gttcaggagagtgagtaggaggaggattttagaggttgttttttttttgggagagaatattttctgtatcattaaacacacaaaccgttgctacaaattacatactgaaaaatatgaatgaagacattatacaaacgaccaaacacacctctctatgatacataaataccccaaaactaaaacaacctctaaaatcctcctcctactcactctcctgtttgtgtccctcaccaaaagtccaataccacatatataatcaatactaagaaaaaaagcaaagtgaagaaaatcaaatatatgaataaaaatgagaaagccccttttacaaaacaaatactcttcctcctcactactactacaaattctttaccctttcatcatctgacttgaatgaacttaacctgtgaaattcttcgataactcaaaaccctcattgatccattctgntggtaaatagcaatcgataattg

SEQ ID NO: 134751 - DNA, 487 bp, Arabidopsis thaliana
  unsure (1)..(487): unsure at all n locations
ttcctcaaatatttctttcatataaagcaaatgaattcataacataacagagatacagtaggaaaccaatacagagacaaactttacaaattacaaatagactaacgctagtgtctcatccaaaaccagaatttggtgaaaaaattataattatgaaacaagcacaagttcatcaagcgaggaaaaaggattataaaagggaacgatagtaaccgaggctagaaggagttccagttatctgaccttttcgtagggctttcatccgaagagactttaaagggacctgtggggaaccaaacgggtctgcatcatcaaacgagtatccatgggctacactgaaaccctttgtactattcatagggtcgatcttgatagcgngggggncaccaagcttngncaccgttgatgggatcaaccncgaatttccagnccggacnggggggcgccggggatccggacggacngagggganagttcccnaggggng

SEQ ID NO: 134752 - DNA, 536 bp, Arabidopsis thaliana
  unsure (1)..(536): unsure at all n locations
gaactcaggagatgaagcagtagtaggctctgcaggcgctccaggaccaagccaggcttcattccagnncccgacaccatctccaattgcaatgcagagatttccaagtgtagacaacatcagaagaagtggatcaggaacaagccttaatggtgatcttcctcagtcagtatcaagaagaacagcttcatggagcggaagtgtcaaacagctcgtcgtttatgtctccaacgagtgcatcaacattcagaccaagcccactgaacagtagcagtagcagcttaggagaggagcttcaggaagttgaactgtaagttgaaaaatctgtaatatcacaaaaggaaaaaaaagttttgctcactgtcacaacaggttagntcggtcaatcaatcaaatgttaatccatgggttnccccaaattncatgnngnactttctctgttctgtcaatgcagggggaaatatgtttatgccgttgnatttttttttaatttctccnaanataantccttaatnnttttnnnnagctttgggntt

SEQ ID NO: 134753 - DNA, 401 bp, Arabidopsis thaliana
  unsure (1)..(401): unsure at all n locations
tttttttataaactttgttttagctttaatcttcttcaaaaggtgcacaagtaggcactcgttaggacaacacacaagacaacaaagttcgaaacacacaaagattacacttctctactcagaaaacaaacttactttgttattattattaaaaaaaaagacctgatttcactcatctctaaagccaattaagaagaaaactacaagagttatattgtagtgggcaacagcttctggatgatgaaggtagtatctgatgagccggtgggggacattgttccttccgacttggtttagcttacacggcctttgctccttgaattcccttccacccgggtgtttccccttctttaattccaaagaactcccggccaaaaaaccttccccccccccncccgttt

SEQ ID NO: 134754 - DNA, 489 bp, Arabidopsis thaliana
  unsure (1)..(489): unsure at all n locations
ttgatttgaaatcaactttattttattttcccgcaagttttccaagagttaaagaccttacaatgggtataaaaatgcttacaccaagaaatttagcacccaagtctatatgcaaaacagtatactcaaccgaacttggtgacgcacctaataattggacactgaaacaatgttgtttactcaaggtgaattgatgaaacgcctgaagtaatacatgtggttcgtggatcaccactttctaggcaaacgccatgtggatcttctctcaccaacaaggccaaaacattgtgcggactccatgcctgggtcagtttggtgccggaatcccctaaagtggttgcaaatatggcatcaanccaccaagctccaggacaccagcaagttagaancccttcaggaacncatggttgaatccaaaagttgagttgngattcanggnctttngggacgttgccgcttanccnntgncgcnnaganctggncccaana

SEQ ID NO: 134755 - DNA, 520 bp, Arabidopsis thaliana
  unsure (1)..(520): unsure at all n locations
ttttttgacaacctttcaacgtaggtatagattacataaatcccccaataaatgtctgttccaaaaaaaattggggttacaatattctctcagaactagagttccaaactcccttttttttcctctgtacaaaatatcatcaaatggttctaccacacttgatcgcataaatgtttagtaagaataatatatgcaatccaatctcttgcccaacctacccaactttgcaacttcacatcaaatccctttcacgcactttctttaagcttccaccagagaaatagagaccagaaccgaccaccagaattaccgtacctaacctggagcaatacggtttcttttgggaagtttggggtaatggccccaaatacatcacaacacaactcccataatttcagngggaggccccgggttanagggnnccnccangggggaattacanatcaaccccngggaataangggtnaaaagncccatttccaancttcccggncncagaangnttggggcttgaagnngg

SEQ ID NO: 134756 - DNA, 549 bp, Arabidopsis thaliana
gttaataacattttcaatctctattatgaacaagaatcacatcacaacttggacgatcaccggtaactaaaaccatcaccaggctatgttacacagtgtggcttttgtaaagacacagaaacatatgatttattttaaaaaaacacttcacagttccaaagattcctacacatagtaaacgatcgaaaaacatgaacaaaccaaaaaaggataacttacaatctacattgagatcgaatcagaatcagtttctttcatcagaagccgaaatgcttgaagttgtggtacctgaaactttaaacattgatttcacctagacgcatcagcttcttgcttaactttagccaattgtgttgccggattctgtttctctgtacctccattgttcttagtcgtagtcgtcgtagggagtagtagtagtatcagagctctctgtttctttcacagttaggcaccatttgatgcaggactcagttttgggtttctgatcaacgggagcttctttaaggttaggggacaaccgatcttgccttctccttgggcatcaag

SEQ ID NO: 134757 - DNA, 445 bp, Arabidopsis thaliana
gacaccaaaccaaattaacaaagactacatgatttcgtttatgcttttgggtctaagctacagtgtttcgtttccacacgtctaaaatcacatcaacttgttgactagtctttaaagtcgaaacaaaactgagcaatactgtcaaatagtgtgtgggaaatggaacgaacatgtttttggacaaaacggtgatgcgggacttaggagggaactggttcaagcgtggcctgctcattgccactcaccgtttaagtttgactgccacaatttgaccattccatcacttccagtgctagctaaagtcatgccactcatgtcccattccatttgccaaacctcgccttgatggccagaaagcgaggagaccttctttactggaagccttccttcaagatcaggagctagaccaacatgccatattcctatgcctttatgagttgcaacg

SEQ ID NO: 134758 - DNA, 537 bp, Arabidopsis thaliana
cggatcgagatgtatggatccatggatctatgtgtctatatagatcctgttcctggattaacgaaaatgtgcaaaagctctatttgcctctgccattctatgagtctcttcctttttgcgtatggcatcgccactccctttggcagcatccactaattcggaacttaatttgaaagccatatttcgacccggacgttttcgggatgcccctaataaccaacgaatggcaagtgcttttccttgcgtggatcctatttcaatgggaacttgatgagttgacccgcctacacgtcttgcttttactgctatatcgggagttactccacgtattgcttgacgtaaaacagatagtggatttgtttctgtcttttgttgaatctttttcaaggctcgatagataattttgataagccaatgatttttttccgtggtttcagaatacgggtaaccaacatgttaactaatcggttacgataaattggatcggattttgcagttttttctcctgcagcaccggcgcgaatcatcgtcaagggg

SEQ ID NO: 134759 - DNA, 351 bp, Arabidopsis thaliana
attgaaagcgattttaatctttttactctggtggcttcttgtattgccaactccttaacacgagctagagtttgttaattctgtttattcataaacggacaaagcgaaacaagtgagtagagccacacgacgactttggcattgtccagtgatggctgcttcaagtcttagtctgttgtgaaggtttccacattcctggtatctcaacaccatgaggaccaattctgttacgtgatatgaaattcagaactagattcgcaaactccttcggtacatcttcctgtatggcatgtccggtgtgtttgaccaccaatcatctgaaactttccttgcatttgaccaattgtgagg

SEQ ID NO: 134760 - DNA, 558 bp, Arabidopsis thaliana
  unsure (1)..(558): unsure at all n locations
atgacgtntnatgaaancgancgnaacttggaaccttcaagagcggccgctacaacagcttctattccttccaggttatacacgttaaatgctccaactgcatatccacctttttctgcattcagaagcagctcttttgtcgaccgtcctgctaccactgaccaagacttcacaacttctgcaagcgctgtgctgttaccaacattaccagggaaaacaatgtaggggacccctggatgtctactttctggacctaacttccatactggaacaccagcaagggcttgaccaatcacaagtgcacgtcgtgctttcagggctttcgttgctgtgtctgatgacgtaattccacccttagcaagaatataacgaggtctgggtcgatatctggctcactactttcaaccagagcggagtcacttttgctggtaaaatcaagactttccgaagatgttttnccgggaagggttaaggatggccaaattagggnccctgaancccgnggaaanattgggnaannaaaagggcttnnggnttnnnaanccccncnnanggntt

SEQ ID NO: 134761 - DNA, 739 bp, Arabidopsis thaliana
  unsure (1)..(739): unsure at all n locations
gctttcgttnnnnnnnnnnnnnnnnnnnnnnnnnnnnnnnnnnnnnnnnnnnnnnnnnnnnnnnnnnnnnnnnnnncttttttttttttttttttgtaaaaagaaataaatttataattatttacaattccaactattgggtaatacacccagaataataattaaatcaataagaaaatcaaaccctaaaaagaaacttgggataaaagaaaacgaaaaaacagagatatcaatgttgtatcaactgagagagaagcttgagaagaaaagaaatctccttctgtgaaaactcaggtcttgtaatggcaacatcatcatccttggaaggtgatggtaatggtgatgatgatggtggtggtcttatcatcatgcgtgtcgtggactctataatctcctcaacaaaatctacaatcactccatcgatccccatcacatattgcatgtacactgcctctccgacattgttgagtttgccgtatgtgaggagagagaggttagattctttgatcttgctaatggctgctgggttcctgaacactccttttacctctgaaacaataccttgaagacctccttccaagcaaacttgaatggcttcttcgagcgagtttcttctctcgtcattgtgaatctcgtttcccgcatcagtcacaaagcggacgcttgggtcgacccgggaaatttggaccggtccctgcaagcgtaccaacttttcctatacgaggtcgtttttaacttg

SEQ ID NO: 134762 - DNA, 470 bp, Arabidopsis thaliana
ataccttgaagacctccttccaagcaaacttgaatggcttcttcgagcgagtttcttctctcgtcattgtgaatctcgtttcccgcatcagtcagaaagaaaacagggtaagtgctctgcagttccctaacaagcttagctgcatctggttggaaacttgagaagattactggtctggcttttagcataattagagaccacctgtagtactgatctcaggatatggacaagaaactctcgttcatagacggtctgatcatcaaatttcaactcgatattgaacccaagagtttgttcaacttgttcaaaagcttcttgcaacgtacaaagagaatcatccaaatcaacgtcccatttcaaaaccttcccttctttagatttcctcatcagtgtcttccctattttctcagtttccttctgaggtccataaaggagaaactcagacagactcagatccgtcactctactct

SEQ ID NO: 134763 - DNA, 514 bp, Arabidopsis thaliana
  unsure (1)..(514): unsure at all n locations
aggccgaaaatcaaagatgcttttcttgaacaagaccagccctaaatcgttttaaaaaggtactcaagtttcaactattacacttgctactgcttccttcactatcaaactacgaatcttaaagataaaacatgcgactaaccacacgcatgagggcaatcccaaaaggtaaacgtcactgggaaagttaagaacaaatccagagagcctatccactcaatttatatagaccgtgtcactctgtcttgggggtctatcacgaaccgtacctggtttgaatctggacccttcatgtctcgccagctcaggaggcaccgcactgttgctctgaacaagcatctgcttcagatcatagaagacttcgggatcatgaagtgtcaagaacgaagcgcaacaccacttttccagacgncctgtacgtccgaacgtgggngaaancccanatgttagggtgncgaagttatgnatgggccanccggaataatcccgccaaaantgtgananagggttnttt

SEQ ID NO: 134764 - DNA, 464 bp, Arabidopsis thaliana
tcttctttttattttttttttccgtacggcctcctaaacaaactcttgtgaattgtcataattagcatgcggctttgctcgagaatattcaccagattcgatttcacagcttcaatggaacaattaggtcttccataagagaatttcagccatggaaataaatacttggggcatctgctcctataacagggaataagggattcctctgtttatggctccgaaagcaaacagtcaaagattgagattgttgaacagatgatgcagagactgatcaagatcttatcaacaaacctcagtaaatcgtctgtgattgtattcacatcatgtattgttgagaaccgccttagcccttaggcttaaatctccatattcttagtgttgatcccttctaatagaaagtggttacttgggtaagacagagatcttggcttcaaccttaagcataccagtatcacaagctgtct

SEQ ID NO: 134765 - DNA, 421 bp, Arabidopsis thaliana
aaaaatgggattcgcacttaagaatgaagggaaagtcataggcatattacaagattaagaaaacactttgtactcatgcggcaacagagcctttattacagacacactcataacgatgatgcttagagatacctaacgcctaaaacggacccaaacaaacaaaaatttgaaatggaaacaaatcaaacaacagacccatttttatatataaacctctctctttggacatgtctctaaatcggacaaataaaaacggccccatttctttgtgatttcgagggggttcttaggcccacatctaatacattaaagcatcagaagacgccatgagaggctggttcataatataagacatgttcatctgattcacgaagaaattatcacactccaaaccaaccagagggttcgaacacatgcccat

SEQ ID NO: 134766 - DNA, 308 bp, Arabidopsis thaliana
gatcccaaaagaagatatctaattctggggtgcatttgtttagaagacatgttcaggtgttattcttacagtttaaacatttcttctacccacatgatgggttttactatcttctactctttttcttcttctttctaaaacaaaacgcaaaagaataacattgcacgagatgcaacgcatgagcttctatggccaaacaaagtcaatgtcactgttatcaacattccacactccaagaccgatctcatcaaacaactgctcataactccagcttgagtatcccaagaaaaaccagttctcacttggat

SEQ ID NO: 134767 - DNA, 436 bp, Arabidopsis thaliana
aggatatcaacatatcttgatttaaatatatggatctaaaccgaaatccataactaatcataaacttttggatacattccgctaaaccacataaaatgggaaggaaaaatcaagaagtggagtttacgacagttgtgaaccaatgaacagagtctttaggatatctcttgagggtgtctctcgtaatcaacgaagtagagaccaaatcttgaactataacctgctgcccattcccaattgtccaatagcgaccatacgaagtaccctttgacattacatccatcctcttttatcgaagcttgtaagctagaaaggtaatcatgatggtatttgatcctctttgcatctttgagagcgtcttttcttgagatcagaatgctgcttgggtcgtccattccattttcagtgatgaagactggagggtttccatatctat

SEQ ID NO: 134768 - DNA, 227 bp, Arabidopsis thaliana
  unsure (1)..(227): unsure at all n locations
cccacgcgtccgcagaaagaaataaaacgagatgggaagtggcatgataaggacattggttattctagcaatagctttattcatgatcggttccgacaacgtccacgtggcaaaagcccaggtctgtggagctaacttgtcgggactgatgaacgaatgtcaacgctacgtcagcaacgtccggaccaaanttctcagccgccgttctcggttcttgttgtgctcta

SEQ ID NO: 134769 - DNA, 595 bp, Arabidopsis thaliana
  unsure (1)..(595): unsure at all n locations
gggtccgaaaagggatattattttgtcaagaatcttacatatttttgttttgttttttttggttcttcttgctacagttgcataatgaagaatatggtaattaaataaaatacagtcgcaaacaaaatctacaacaatggatccgacaaaggatgacagcgatcctacaaggatctctatcttatgtattcctttaatcatgaataaatgttttgtcaaccctcttatgaacaggtcccaagtttatctctgtagtttaaccggcaatacaatgccatcatgctgccagttcattgcattctgcatcctctttctactgatcggagatatatcaacccgcgctttattctctcgccagtatcctgaagccgaagtaagttccaatctttctggaagggctcctaatctggcagtggtagcaacacggtatccatccttggatcccaagcttttacaatgcggcaccttctatggctttccagctccaggacaaaacgtccatccgggagtggatcacactctgtgatttnaactttgcaagcaacatccactggagaacctgtcgccgaatnaagagctaccattcccatccgat

SEQ ID NO: 134770 - DNA, 573 bp, Arabidopsis thaliana
tttttttttttttttttttatagggaacaagggttacgtatccttcaccattaaaatactcaaaacgtctctacaacactatcacaaactacaaaagacaatacgaaacaaacttatgtggatagtttcacacaacagttccaaacacacagacaacacttgtctccttatctaacaaaacaaccaaagatagtagagagacaaagaaactaagaagcagcatcaaaagcagaggagcagtagcttctccaggtctctggtaagcagattaggcatgatcacaaaactccaacgtgacaaaggtgttctaggtaagaacctgaggaatgtcttttcttcacaagaagtggattaatgttgagactgaaatggcttgaatctggatgaacctttaccagcagagatagtctaagactctaagagggtcagtaaacttcccctcccttttccattccaaaacaggagcgggcgagagggagtccttgccgggggagtagttagatttacatcatttaaggcttgacagaaatgaataagaaggaagagaagaagacttaaaaaagagagttaaag

SEQ ID NO: 134771 - DNA, 389 bp, Arabidopsis thaliana
aaagagaagaagaaatctaaaccaaccaatacaatagttttatgtaattctattttaatacaaaactggcttccgttttaaaaatctactgtcgttggttacattttgtatacggggatcttgacttttaagtaagggtttaggaagtgaagatatcttgaaagaaggcatggatgtcacctttactgatgtcaagctccgcaaacttgtcaacagcatccttgaatgcttgatcttgagacgatattttgtcaaggcttagtttatcgacgttgttgttactctcaaaggcgtccaacacgatggctgctctcttcacgacttcctccgggacaccagcgagtagcgcacagtgaaggccatagctcagcaaagtttgtcccggaatt

SEQ ID NO: 134772 - DNA, 685 bp, Arabidopsis thaliana
  unsure (1)..(685): unsure at all n locations
aaaagtaatttgccgcctgctattatgacactgtctgacgactacacattctcctttgtattgtcagaattaaaaattattcatatttctggacgaaacaaaaaaaataacatttaaaacctagcgttttcgaagccgtgcaagtcgctcttcttcatcatagctaacttagccagtttctcagccgctctccacgctgatgctggagtcaacggctcaccgttttcatccatcaacgtcatcgtcgtcgtggtctctctctcgcttcctctccgccgttgattatgttgctgctggtgctgactttgatactccattagttgttgtcctctccattgaacttccaccagctctgcctccacgacctttatgtactcagccgcttccaccgttcccgactgggccaagcaacgcacgcgctgatgttagcaagtggtatgcgcttgtgcattctccgtattccactagcctccgcgactcggcaacagcccgagtcgctataaagaggcttctaagccgctcgattctaggagaagagatgatcgacggcttnagggacgcggagagatggtctcggccataacanttctggggngatgggcctnaagagactctaatgacaaactggaaggccaatgngggtacggggnccaagccaacaagagccntttcccnctgggaaagg

SEQ ID NO: 134773 - DNA, 383 bp, Arabidopsis thaliana
cattagattaaatatagcgggaaatcgaaaattcaatgttacaacattggaaaaacattttccttttcatggttcggatcaatctgttggtgtgatacacaaaatccaatatgcttttataggatttaattgaagaatcccatgaagaatcatcaggggtctagtatgagtgttacagattgtgtgttatggcatggggctccaagttttctttgctgttcattcctgctaatctactgagggttctgtcttttgcgaaacctaattcgttatccacgcagagctcagtaacatcgttctttcttgatcttgatgatgttcttggacccatcgatttcgcctctgagattgttataatcttttccaaaagttcttgaggattt

SEQ ID NO: 134774 - DNA, 749 bp, Arabidopsis thaliana
  unsure (1)..(749): unsure at all n locations
gttnnnnnnnnnnnnnnnnnnnnnnnnnnnnnnnnnnnnnnnnnnnnnnnnnnnnnnnnnnnnnnnnnnnctttttttttttttttaacaaaaattaccattgacattgaagcaaaacatgaagaatacaaaaaggttacaaactataaaaatactgcaagaatggcatctgagaaaatacagattcagatggggctctgtaaatactaatatgcccagcttctgctatttcttcaatgtgtggtcaagaagaaataattttacgtaaagaatacaaaaaaagaggccgcaaaaatacaatactgtacacagtacacacacttccctgtaaaaagcttgtaatcttttcatctatttacacaaattctcaaaccaaacctcttctccttctccttctcaaacctgaaaactcaccaacaaaacagagttgagagtggctcgctatactctctttcggagacaacactatgttcagactttggtctgcttcctcctacgtggtcctgtccttaagttccctggccagctctttcgattctagtcagagaaaccaaaaggggatttactggtctctgctttggattctaaaccgatgaagcctgtttcagtgaagcctgttttaatgaagcctgttttaatgaagcttgtttcattgaagctcttaatgtctcatctggtactgtccatgaaagtaactgtccagctgcggacgcgtgggtcgacccgggaattccggaccggtacctgca

SEQ ID NO: 134775 - DNA, 602 bp, Arabidopsis thaliana
  unsure (1)..(602): unsure at all n locations
aaccctgacaaacgcatttttatttttcacaaaaaaagattgaaaacaacacaatgtgttttgaagtaaatgctgggagaatctctgtgaacaacataatgctaagagctgcttgaatcagaaccggcccttcaacgaaattgtttgaaattctacaatctgctggggatatcatcagttggggatgtcaggaacaggtaagcccttcaactgcaactgtttgtgcatccattgccagttttctggggttacttctccaccgagagcacggatgacagatccaccactgcatgatcccactttgcaacattcttccaaagacaatccctttattagtccggtacagaaacccgcttgcgaatagggcaccgggctcctgtgggcatcagttggctactggcccncccaaagggcggaaaaatggancacccctttaacnaaggtttggaangganccctttnggccccaaaagttaccaaaggncctctggaantttcgcctaggacncaanggtgccccggganccggttttggnnnccccaaggggcctgggggttcncccggtaaaaanaangttttntacccgccccaaggggggggg

SEQ ID NO: 134776 - DNA, 813 bp, Arabidopsis thaliana
  unsure (1)..(813): unsure at all n locations
nnnnnnnnnnnnnnnnnnnnnnnnnnnnnnnnnnnnnnnnnnnnnnnnnnnnnnnnnnnnnnnnnnnnnnnnnnnnnnnnnnnnnnnnnnnnnnnnnnnnnnnnnaaaacaaatttatttgattcttaaattattaatttaagatgaacaaattttaagggaaacctattttattttttttacacaaatgcagaaaagaaaaacacttttttgtttctggcattaattccctccctctatatatatatatttaaatctattatgacaaaacaatccaatactggattctttttacaacaacatgcacagacaaagctgagatctcaccttaagaaactaatgaaattgagttatgttcgtcttcatcagaccaagaggttgaagaccacgacgaagaaaaaaaagattgtttttatccaacgagtccaggaagagggtggggcattattggattcactggaacaggaaacttattgagcagaactaaccattggtctttcagttatcatccctacttctttggaaactttgtctacttctccaaggaagtttttaacccccaaaaatattttaaacggatggcgctttttttttacccgagtttccatggaaaaacctctgggatttctttttacaaggagataaccccttccgcctctttttgagcttgggactccttgaagaaaatttttttccttctagattcttttttcaggaaaacaggttttttaatttggatattcccgaaaaaaaccctcttggaactggggggggctttttttttttttggggaatgtggtgtgaatatggaga

SEQ ID NO: 134777 - DNA, 918 bp, Arabidopsis thaliana
  unsure (1)..(918): unsure at all n locations
cattccgttnnnnnnnnnnnnnnnnnnnnnnnnnnnnnnnnnnnnnnnnnnnnnnnnnnnnnnnnnnnnnnnnnnnctttttttttttttttttgttgttagggattatattctacaattgctctgcaaaatagtggacaacatagaaagctggtatacgttatggctcatccatgctaaacatttggaccgtgattgttaagttagactgattctatcactggtcttctttgttctttttgcttgcttgcggttgcttgtgctaagtcatcatctatttgcggcgtgctaggatattcataatctttggctttgccccatatcacaaggtattgacctacacatatgaccgtggcaccaagagcccttccgaggtacatctgctcatcaaagatgatgctcgacataatcgccacaacgatcatacaaagaggtttgaaagctgttacaaacacaggacctctggttttcatcaccactcctccaatgtagtaaccaagcgctgagcacactatcccactataggtgattgtaagaagtttagtgtcccaaccaatggcccacacgctaggatttcctttctccatcactaatgctacaactactccctctattgtacctattaggcatatccatgttgcgagagagagctctgcagggtaagtcttcaatgtgattgcttgtagtatcatgaaacatgcatagctgaagcaaccaattgtgactaaaactgcacctttgatggagctatgaatatcggtcccacctgtgttctgtgccgagggtcctttagtccagaagaggtcaagagctggacctttttcaagtgtcatgaccatcactcctccaactgtagttactgttccaaccaccttagcggnactcctgatactttgaaacttcangctttcgagcctg

SEQ ID NO: 134778 - DNA, 472 bp, Arabidopsis thaliana
aaaaaaaacattccggaattattaaccaaaggactaactactaaggatcagtagatgatacaaaaagttttactacttaaatcagttctaagagaataataatcacaagtttaacaacacattgttacactctaatcaaatttcacaaatgtttttcttcttttcatctcaaatttcacatttccactaatcagacaccaattgtttaagcagagattggttcgtatggatatgaaagccaagggtgcttcagagcctctgctgcagaaggacgcttctttgggtttatctcaagaagatggagccacaaagtctgtgaatccttggtctcccattggcagccgatggtctcaacgaggtccttttgggtatcagggactccaatcggttgcttccctgggtccgctcatagagcatccggttttgggtggagtggttgtgggaatcacgtcccttggtaagcatttcatta

SEQ ID NO: 134779 - DNA, 545 bp, Arabidopsis thaliana
aatatccaaaaacaatatctattgaacttttataaaacataaacgtattaaacctatgatattagtatcttctcttttttattcaagagaggggaaacaaaaacacatggttataattaaagtctaaaacccatggaataacggaagggaagaaaaacccccagggagttttagaggaaccttaacaataccacagcaaaaaaaacccttattcccgtgttataaaaccatcatcattatcatctcttaaacaaaaggatcttcttcttccttaatcatcttcttgttaaatctttattaaacggtgtagtgaccagctgtctcaatgtctagtccctttagcttcaccactgactctacatgtcctttaagcgtatgaagttccctaagccttgcgatctcagctcgtctcttggcttgatttgcaatctcagacagttctctgtaaccacctctctccgggacaacgttggctgtttcagtgttctgaagaccgtgtaaagtcctttgtgcatgagcccattgtgcttccctctcctctattc

SEQ ID NO: 134780 - DNA, 655 bp, Arabidopsis thaliana
ctatgacggccgccctttttttttttttttttttaaactgaaagtaatatcgaccaaatataatcataatctaaagaaacaaaagcttataatctcatccgtacatgacagattcaaaattaagttcaggtgcgagcaaagtcatattcatatataaagctcgaaatggagggacgacctcggcatcatctctgtcatagttcttcttattccggtacggtttctattggtaaggcatgtaccgcattggccttctgaacctaggagccttcccgtatccatatggggaataaaaatacggaggcacaaagggtctgcgaaagcggtatcccattgaagggttgaaacgcccaggatgatactgtttcattccaggaacattggttcgcttaggcgagaccttcagttgacgaccatgaagctctgattcattcagctgcagagcttcttgcacggcttccacttctacaaactccacataagcaaatccctttggctgtccaaacttgtccattagaatggttacccggttgactgttccgcatgtttggaaatgtagttgcacttcttcaggtgtacaggcatagtcgacctgtattagctccaagtatcctccctgcggagctttgggtcttgtttagaaagcatccagcat

SEQ ID NO: 134781 - DNA, 454 bp, Arabidopsis thaliana
gggtaaaaatccaatttggtttcctgggttctgatatataaaccttgatttaaacatacaacaatcacagaatgtttggaagaatgccattaagacaagaaatcaaatgaaaatagattctctttcgcgaagataagtcttcatatctaaaatcacaactgccttaaagacatcaagccaagaccacaccatacgagtctctttgagttctctttacggttgccatccatattgttggtttctagcaccacccatagggttctgacctcttccagagccaccagatccaccatactgaccaccaccttgtgagtagttgggtggtccaacaccatagccaccgctaggtcctctaggaccggcgccatatggtgcaccacgaccttgtggaggatatgctccgctgctgtaacctccacggctctgattattataaccaccagtctggtttccg

SEQ ID NO: 134782 - DNA, 436 bp, Arabidopsis thaliana
agaactattcgccggtttaaggtagttacacataaactacacgcgatgcatccatacaaaatcataaagaattctatggggtatacaagagttcaaggctaccaaagaactagcttttgcaatttgcaaacttgttaagacaagtctcgcgaatcatattcaaaccctgcaagtcttggcaagaggttcacagtctttatagatctccaagccagactgatcaagttggtcttcctcaaagcaagcacagcgtttgctcatcgagccagttattgctatctccaaaggtctttgtaccagtcttggcactccaacatcacaccaaacctttccaccttcatcttgactccatcgtgagttgcaattcgattgcttggcttcttcagtcttctgtttctccatgagttgtgcacctctggaggcttttgcttcagct

SEQ ID NO: 134783 - DNA, 449 bp, Arabidopsis thaliana
ggctcaacaatactataatattgggtgcgacctcaaagaaaaaaacgtctatctccagagaatcgactgtgttcaactcgatgactattccccatcaaagtaaatattgtacacgcagacatgtccatgtaaaagagactcagaaagcttagagagttcaccttttgaacacatttgtatattttgaagaacatactcatccccaaattcatgttgtattctataacaacacattcatcttgttctcgtcttgacgacttgccctctcgaagctttcctctccatcttctctctctttttacgagacttttcatcttccacacctccctctgaaccttgtgacatgaatcctcgaataagaccagaagctttatacactccaaacgcatgaatcacaagatacgtgtaccaaaacttcccagtgatgatggaagctagctgaacaaagc

SEQ ID NO: 134784 - DNA, 485 bp, Arabidopsis thaliana
  unsure (1)..(485): unsure at all n locations
ggatataaattgttctttccatctgcggtctcagagacataactttgaactagtaaaacgaataacccccaaagacatgattctgagagactacaaagttattaattgatgcaagacttaatttcaaagatcactttgggctccacgactggagtaaagtagttaatgcggtatgagacgaaccagtttctgtcaaggctaattcggctgcgttcttcatagccatggttcgctccctaaccggacactccccaattatctcttggactcgtttctccacctctgtagagctcacgaaacccgtctctgattcattcatcgaaatcgcaatcttgatctcatccacaatcatcactctattaaacctctgctcagcgtacaacggccaagccgccatagggacgcctgcacaaacagcttcaggaattgaattcaaccgnaatgagtgngatccgcgacggttatgattagaccgnatggggctt

SEQ ID NO: 134785 - DNA, 495 bp, Arabidopsis thaliana
  unsure (1)..(495): unsure at all n locations
nnnnnnnnnnnnnnnnnnnnnnnnnnnnnncaagccacttaatcatgtaatagtatttgtaatgtttccaagacctaaaaggaatgataatagaaacatacatcttaaacattctatctacaaataatgcgttgtgaaacaaactcactggtacaatgaatatcgattctagaacaagaaccaaaaccatgaactgaatgaacaacacactaattctcattctccaatccttccttccgacatgacataacaggttcatgtatacttcatctcaactatgagctttaccatttccaagcgtgtgctctagatcctccatagccacatcatggatcctctccccttcccatggcttaacttggctgttctcaaacttaaactcggagctttgaccaatctcttggattgctgctgtgtttggagacaattgctgtggtgcaggtttcacgagattgaaggtaggcgaggttggcaccatagaggcagagaatggct

SEQ ID NO: 134786 - DNA, 379 bp, Arabidopsis thaliana
aaggaagaactaagaaataagtttgaacctttatgaagatccattttagaacacgtttgattgtatccactccaaatacattttcatcaaaatattattcaacagaaattgccagcgattgccaatagatggtcacttagtagttgaggtttgcaaaacattggcatatgatcaggctcttccatctcaatcactaaattcgccggataattatggatcatccatcgttggtggtcttccgggatcatgtggtcctctttgcacacaatgtaagctcgaggaacagatccataccctttctcagaaaagttctccatcttcgataattcattaataaacaatgaactaggcctctttagaagcaatccaagctcaagat

SEQ ID NO: 134787 - DNA, 390 bp, Arabidopsis thaliana
cttcaaaagagaataatactattatatgactaacatataccaatggtacaatagccggcttaatcactcatcaaggaaggaatctaatacatacgtaccacattcaagcatggccctcatgtgggttttggttctaaagggatccaggatgtatgattggatttcatctagattcagatgagagctgattcgaagcgctttatctttcaattggggctttatcaccaactggtgctcctttattttgactagatccgaattcaaagcttcttttgatttctcacccggtggcttgaacatcgacagagttccaacgaaccacgcgtgattctcctccaacttcttcgcgatgggttgaggaaggtcatcggagagagatgcattctcgag

SEQ ID NO: 134788 - DNA, 430 bp, Arabidopsis thaliana
  unsure (1)..(430): unsure at all n locations
aacaacaccaaaaccatgggtccgtatcaataatttatttggtttaaataacaatgggaaatattcgcaaacgcaatgatcaaacaagattcattcacactgtttaacaacggttgaggtaagtctcgggaacaagttgtgcggttaagagatctacggtccccgaaccgacggacttaaacactgttatgtctgtggaactctttctcccttctttgtcacctttgatcaactccaccaaattcccacaaaggtcttcttttttaatcactcctctctcaaacgctcccggagcatcatcctgcttctatcatcgcagtgtcattatcgacaaacacactccctctctgtatcgcattgtcgtcacattccttcaatttcatgggctaaangntcccaaccaaggtcaaggatgaggttccggggtttt

SEQ ID NO: 134789 - DNA, 392 bp, Arabidopsis thaliana
atcagaaaccaaaaaagagtgtgtgattcttacaagtcacatatgcgcccatgtctgagtagaagtccgggtttccagaaatagaaggtttgaatttgatgtttgtgacagaagccgcaaactaatgattgattcctatgaagtcaggtgagcctttaacttgttctgattcttcctctgagaaaactggcagtcttgacccaatggttcttttcattgtatctggataggctccaaatataagagggccaaggaaccaaccgaaatagaaaatctttggctctttgagttgcaatggcatcatccttggagcttgtagaaggagtcaaccccattaaatataagccaaagcctatggaaccaccctgcttatccttgtacttttgcttata

SEQ ID NO: 134790 - DNA, 280 bp, Arabidopsis thaliana
cgagaatattgtttttgttttacaaaacaaagaagggaagtgctttcaatttcaaaatccaaaataccaaacttgggaacaaacccagggcggttaaattataagtttaagccattttggcattgcttaatatgtaactgggatacatgaagactttaactttgtttcccatggacttgggaggaaggttggatgtaaatttggcacggacaacaccgttgttaccggggggccgggaaacctttccccaaaaacaggggggggggctaccgtttttttt

SEQ ID NO: 134791 - DNA, 421 bp, Arabidopsis thaliana
acctgtaaatagcatgggctgctgtacaatcagcagacgcacactcttcatttataaatatgtttgtacatgcaggggaatagaaaccgtactccttatatactcaagcctcaaatcacacatttatgatacagtttcacagagaaaatgccatatcattaactaggaacctgtggggtgtgactcttcaatcatggacttggcaatccacaagagacctgggtcattccgtttcagtaccaaatatggatcttgtgctcctgtgcttgctgataccatctcatcgacaaagccaacgacggaaagtatctcaaccgcagctggaaagttgagaatgttgcgcttaattgcaggatttcccttacgcgagcctttagaatttcatttcattgggttgttcaatgatgctcctgactatttt

SEQ ID NO: 134792 - DNA, 449 bp, Arabidopsis thaliana
gaagagataatcacatcataggacctgaagccactgggccagtcttgggtcatgaactactacacaatggtgaggctaattttacacaaatgcaaatcttgtccaaacttatttcatgaaacaaaggtcttacatctcctaattaggagtcttctgtcagaactccaagtgctgatactcttttgtcagacacatctgatcttcaaacattcttgatcgagccacggtttgaatgcatcatctcgaaccacattcgttatataaaagataaacccgcgcaacaggttcagagctttacgctcatccttttcacgcaaagagtcaaggtactgctttttgaagtctggatacctatcgagatatgaaggtttctttttgttcgttggaaagctaaactctgttccatctcgtagttctatatgtctggatgacactccatgcactgatgc

SEQ ID NO: 134793 - DNA, 247 bp, Arabidopsis thaliana
  unsure (1)..(247): unsure at all n locations
nttttagaaactccagtcatagtttttttgccataaatctttcaaacatatatatctttttcattatagtattgctctatacaatctatgtacatacatgtacaaaccaaagagtaatgttcttcttgactcttgatcttccatctcaatgcgttctagtttctttttcagccgccttgattgctttctcaacagaatcccatccaaaccggtcaacgtagtcttgaaccgattttttagccccttt

SEQ ID NO: 134794 - DNA, 480 bp, Arabidopsis thaliana
aagacaaaactccattgtattgataacgttgtataaagcttttggaacaacataacaattctaggtttcccaagaattaagtcaaccagatctactcatatatatgaaacctttaatgtaaaaactatatacacctgagaagtgtgaccttgagtgtctatatcgcaactctacttccactatgagcatgtgactaaacagtctgttgttacaaacatatcctctgtctccaatgtccctctcaccgcttgataaaacttaacccatgaagatgaataagagtccacaggactgaaaaagaacgtaggattaggactgcttgcaggggaagcagtcaccaaatccaaaaccgaagctgcaggtttgagctgttgagggaaattgaaggccaagttatcgactttatgctcatagattttgccattacggtcgagtttataccgagaagtgccttgaaactctcctttagcttcccatgga

SEQ ID NO: 134795 - DNA, 529 bp, Arabidopsis thaliana
  unsure (1)..(529): unsure at all n locations
anccggcccgnaaacctgggncccccttaagccggcccccccttttttttnnncnnatgggtncnnnttttccccccctttnatttgcaaggtttgattggaattactngaccaaaccccaggaatnctaactcacaatgcnaaaacccancggtgggagttatagggcatttggaaaatatcaaattgttatctacagacagttttgtaaccacagagagagaaagatatataggagtaagatgtttcttgggtttgtcaaatctgaaggatcttcaaagagtcggccacaacttgaagctgctttttcactttcctccaccttctctnatttgctccaactatgagagtgtagtatctgttgtttccaactgccactgttgcaaaggaagtggttgcatagataggagttcttagtccatactcaaacgtgtaatagttctttccatcttccaccctctcttncatatcgtagatggtagctacttggtttggtgctgcaaacttatgcttcactagatcataaacc

SEQ ID NO: 134796 - DNA, 518 bp, Arabidopsis thaliana
  unsure (1)..(518): unsure at all n locations
ggaattttggttttccctttactatttcatgattatatttgcccaaaaaacaattcttatcatcgcaccgctttactattctgggccatataatttgaaccaattctattagtgtacatagagatttgatgaataatctctcaaccaaagcttaacatgacgttgtgttggtgtttggacttgtaatccgatgatagcactcgctatcatatgatatatataactctgcaggtaacgagagcgagagagaggagagatcatatcttacatatccaattagtcttcatcaaagtacttatcttcagcgtcacggccaatctctcgaagccaatgatcatcaagagtctcgncattgtctatctttgcgtaatccaaatgttgatgatcttctcccgataagaacttctgttccatgattgatgtgaactgatccatcatatcttgcatctcctctggcggtaagactgttgcagccttctctttctgttctttaccattcagacttgaagagctagctt

SEQ ID NO: 134797 - DNA, 504 bp, Arabidopsis thaliana
  unsure (1)..(504): unsure at all n locations
gggggcatggcccatgaatggtgaaaagtttaagggttcttagttcttacagatccaatacaactaaaacagaaggccgaaatggtttatcttctacacaagaagggtttctggacacaatacacgtcctctatagcaaaataacaattttaccaatgacaacaaaacaagtcaaaagcttttccatgggatctttcacaaaacggagtttatcttctctgtaggtagtaatacaggtgaaggtaaggttcactggtttgcctctttgaccaaaaccacattatatacacaaggattggattcctgctgtaagcttcatcaaaagtaaaagctattcagctctgccttggcttttctcgccgtgaaaagatgagccttacgatagaatagagtaccgccttaatgcaagaaaccacaaagttccagcatgaggatggccagtaccacgggatatagcagcctgaaaaatgcaaatgggtgctcggggacgccanaggaaggggg

SEQ ID NO: 134798 - DNA, 579 bp, Arabidopsis thaliana
  unsure (1)..(579): unsure at all n locations
nnnnnnnnnnnnnnnnnnnnnnnnnnnnnnaaccattgcaagcctttgtgggcacttgtttatatcgctgtttccacgtggcaaacaaagtcgaaccagaagaaattttggtttggtaataatttatttcgttagtaccggttctcgaaccaaataaaccaaaccggattaaactcagaaccgataaattatggatccgattacattcaagcagaaggaatcatgccggcttttcttgcataagcgaagattccaccggcgtcgatcaccggaccggcatcaccgagcggtttcagtttgtattctttcctcgtcgtatgattgatcagcaaactactaccgtcttccttgtgttcgattgtcaccacatcccctgttttgcactcgtcgcaaatcctaacctccgattccaacggggaaatctcacctgtagctacacagttcctggaaaaggatcctagcggacgattccgccaccacagctttagctcccgccgcgccgagacaaactggagcgtgttcgcgggaagatccgcaaccgaaattatcgccgccgatgatgactgagtactttgattt

SEQ ID NO: 134799 - DNA, 461 bp, Arabidopsis thaliana
  unsure (1)..(461): unsure at all n locations
gatggaagtttttgcaagtaaaaatgttcgtagcaatcattactactaatcttttctggctttctcaaaaaaaaaaaaaaaatccatcaagtaaagacgtcaaaggctcccaacattttgtaagcccctaaaacaaaactaaaaacaccttcgggaccaaattccccttttgctctttttaagcgttttatgcaacttcttagcttgagtcaaaacacaatcttggtcgaacaaagctgacacaactgctacaccttttaggttcggtgcatcgatctgcatnacagacccagnatttgagatccctatgcctccgattgcnacaaccggtaattttgatgcttnacatacttcttttagcccatcaggtcctatggtacgattgttggccttagtgttcgttggaaaaactcctcctgacccaatgtagtccgcaccatctttccatgcttgatgagctt

SEQ ID NO: 134800 - DNA, 947 bp, Arabidopsis thaliana
  unsure (1)..(947): unsure at all n locations
cntcnncgcanaattngnatcaancncccgtttcccaaatagttggcagggtatccgtatctcacccagggccagcagctttccccgttgacaatggtcgctatatcccatctacagttccaggttgatacatccggggaaaggcctcccttcagagatgctaagtgatatgtttgagactcgagatggatgggtccacccctgatggtttagggcctaacgctttcccggaaactattggagcagatgaatggccgtgtcagttatgtcctgacaagacgaacggtgtttctttcaggtggatcttcaagtgaactcaatgttaggtgttcagtcaagaggaacacagggtagttcaagcataaagtagaaattttgagttacaaggcttataaaatttaatcaaatttggtctcttaccaaatgtattaattagaacaaaggtacattatttattaccaccaataagattgtatcttaactatcctatgtatacaatttggagagatcatttggccaaccagacaaaagtaaaacacaaccatcaattcacatgtctagaacaataattctttctaattctggataccagcaaactagaaggaactgagaaaaccagaaatgtttctaaagggtactatgtagtagtttgttgttggtcatcatcatctcatcctagaaactgatatttacgttttaaaccagaggcaataacgtgattcacttgactgtcagctttgatgtgtgttctcgccggcaagaggatgaggaaccgttgaatttgatgcctcgagctgcgnattctcccggntgntcggntattnggttcggtccancaaggccatngggtgggncccctanctcatcancaactgngtctgaagtggcatagcgcgttacctggtcgggnngccntggggcttncggggggctnccctctcctaggc

SEQ ID NO: 134801 - DNA, 531 bp, Arabidopsis thaliana
  unsure (1)..(531): unsure at all n locations
atagtaaattaatgactttcaagtggttttcatcttacttacaaacttataatatgctataatattataatccataaataaaaaataaaatctattaaatatgctatattttttgtggcatcttgtgtagagatgatcatcagttgacaagaagtgccttgataatgtctttgcatttctcctcctcggcgtttagaagatgtccataacctaagacctcatggtacttaatccatggaagcttctctgatatatatcgattaatttcgtatggaatgattctgtcttccatcccttgccaaacgtggaccgatccttcgccttccgcaaacggattttctaattcagtcgggtcgaattcccatgtcgcgaatccngggancaaggcccgggggaagacattcangggcncctggtgggccaaacttttccaagccaggggggggntcccccatttcctccttaagnnggcnaatcttggcggggaaaaggatgtccccggnanaanccaggnggaaaanttgggcnccc

SEQ ID NO: 134802 - DNA, 482 bp, Arabidopsis thaliana
aaatcacattgttcacatcataaaataactttgaaagaaaccaacaagttacattctaaacatttcgtcctttgaaaactcttaaaaacacattattaattaagcatcacagattaatcatacagtcactttacctcacaattttagcaacaaactcatcaatattcttatcagaatttcctccatcagacaaagcttcccttgcaaactccatcaacctccgagcgttttttctaatctccttccctttctccgacatatcttccataacttctccaacacatctcacaatctcttccttcggaacaaacccattttgatctgccttaaccctaaccccaaccttccacacatcttcaataaacttagcattagtcggctggtcgctataagccggcatccctatcaaagcaactcctaagctcaatgcctctaaagtcgaattccacccgcaatgagtcatgaaacaaccgattgattta

SEQ ID NO: 134803 - DNA, 421 bp, Arabidopsis thaliana
ttttttttttaaacaacaccttttgatttttgattcaagaacccattttaaggacaaagttttggggggtcatttggtcactcttttgttgagtaatcaacaagattttcatctaaaataagaatgatacattaccccctcttacaacataagacttaagggacaaaagttgctggataagcttaaaggaagagtgaaaatctttatcagaaaagaaggaagaagaattaaaacgatcaaatccggatactgtacctttaattatcatggcctcccttttctggaacaacatgaaaaaactgcagaagataaagggaaaaaaaacttatatcattatgtttctgaaccacttctggtcttgagtctttagaatagcattttgagtaaaagaagctttttgctggttagttgaacatcctga

SEQ ID NO: 134804 - DNA, 528 bp, Arabidopsis thaliana
  unsure (1)..(528): unsure at all n locations
catgtccaatcatatatataatattaagaggttaccggcgctgagtcatacagtaaataaaaatacagacaatagttacctcaatcaaaatcacaaaaccaatgactctttttctggttaatgcttgtgattccaatggggtagggtttcatacagattagaatcaggagcaaatggattctgcatgccttcacggttcacctgttccggcaagaaatttgccgtctccactctctgattttgtgctaaaccagcactggtgttggtacttgaatttgctgggtttcaaaaatgtgggttagangttttggcgggaatacctangaggaagcnncccggtggtgttgcctgaatgggaatgcccangntttgggcctttaccaattgcaaaggggtccatccntgtcaatcctttttcacagnttccnctgccatcttaacctttgnnccccaaagttncgaaatcagcccntaaaatcctggttgcaanagnagnggancaacntatggtcctngccnaagcgntaa

SEQ ID NO: 134805 - DNA, 984 bp, Arabidopsis thaliana
  unsure (1)..(984): unsure at all n locations
caagggtagggccaacctttaaaattcccatctctatctattggggaggtgcgcccaccctttttttattatccttttccaccctttgacccatctttttaacccgacatggaactccttgaactcctgggaccgtagcgtttctttcttctccaggaacctggcacccgcccaacattcattcaataggcaaattatcggcttcatatcttctcgaatcgcacagtctagcctatagaaaacgttctcctccactagcagaaaccaccacaatgagtttccccgcgttttgtgtccgctttgcatcctttcacgcagccgctgctgcggctccagaggatattccctccagtgatccttctttgagggctataagcttggctgtttcaatagcctcttcaccggccccttgaatgacttcatcagccatggttaagtcctcattgaatgggtccattccagagccacttccctggatctaatgtggccctggttgacctccgctaagtaccggactttcttctggttccgccacacaatccttgatgtctttgttccgctccctgaggaccttccctactccagtagcagttccaccagtccctacgccagcgaccaatatatctactttcccggctgaatctctccatatttccggtacaatggttcggtaatgagtctcggggtctgcagctttctcgtaatgccggggcgcgtctctctgtccaactcatgtccggcgtggttttcccaaacgacngnctcctaatcaaaattgttgtctcctgcctcccttgggggtgtgttagtatagtagttctgggctcctggactgtcgtctctctatcatcccagtgttctcagcaggcccgtcgtagttcgccaccacgtgtgtaggactgctgagcttccttggctaattatagatgcgacgcgcagccgctagtgagtggatgatctctgcgcctatcttgatagatgcga

SEQ ID NO: 134806 - DNA, 461 bp, Arabidopsis thaliana
  unsure (1)..(461): unsure at all n locations
gcaatggaagtagtcaactaaaattattcataatcgaatatgcaactttttatacatttcacattgaccagtaataagcaaattgaaaccttggactcttggaacgaacgtctcttattacacacgaaaccggcacacgtccaacattcattcaataggcaaattctctgcttcatatctaatcgaatcgaacagtttagtcgataaataacgttctcctccactaggaaaaaccaccacaatgagtttccccgcgttttctggccgctttgcaacctttaacgcagccgctgctgggcttcccagaggatattcccaccagtaatccttctttgaggggcaagaagcttggnctgtttcaatagcctcttcacctgccacttggaataatttncatcaacaatgggttaagtcccaattgatgggnngattccagggccaatncctgaatcaatntggac

SEQ ID NO: 134807 - DNA, 602 bp, Arabidopsis thaliana
  unsure (1)..(602): unsure at all n locations
aaaaatcttgaaattttggatttaacaaacaacaatgtttgccctcacacacatgttcgctagacgaccatgcagggacacaattgtgcaacttaaagatagccagtgcatagaattccgtggtttgacatttatggctatcctgaacagatactgtgttgagtaggacactaattgggtcactgaaactacaagatgaggaacttggaaaaactacgggttcaggtcgaagttcgtctccaataggttctggattttggacaaggaatcaaccttaaaatcaggttgcagaccggaaacagaaaaatccgtctggtccataccttccggtttcatctagcaagcaagtgaaggctccagctcggttcccacatgctatatcaccttttaagctgtcaccaaccatcatgacttcattaggttggatgtcccatgtagaacatatatgcaacagcgggctggggttggttatatggggcgnacncctgccaagtgctgggggaaaggtaccncaaacgttntggaaatnccattnctttgaaattgnggaatagccccccttaccttttgnccaggngcccaagtncgngnccagngtgnna

SEQ ID NO: 134808 - DNA, 529 bp, Arabidopsis thaliana
gtaggaagatcctccctgcgtccctgaccggtggccagcggacctaccaatcagttcaacaccaccctcaatgtgggctccgacgacacccccaaaaatctcatcagcgatgagaatggcgtgttgtatagttctcgccgcaggcatgcgcgagacctcaatcaggtcgctttcgggcggcagcgtctaagacgtgggatcctgattctcggggcctgccctattcaagcccaatccgccccttggagccagtccgctcccgggggcggattgtccccgtgacgccatcggccccgggtttccaaaccgcagaaataatgaagcccatcaatcgccttagcttgatgggcttttttggttcataacggccgcatgggcaaggaatgggcatgcgttggcagcaacttgccagctttctggccagcttttgaagcgggcaaggtgccccgctcaccttcctggcggatccgcgagctgctggttctcgtcctcgagctgcttgatcgtctcgcccgtcacccggtgcagc

SEQ ID NO: 134809 - DNA, 873 bp, Arabidopsis thaliana
acgactcactatagggattgctggttcgcctgcaggtaccggtccggaattcccgggtcgacccacgcgtccgggtgtttagtggtgtagtggaaatcaattcttcgtcatctgttggagctgttaaggaagagtttgaggaagaatgttcggggaagaggagacgaactggatcatgtagcaagccaggaaccaaagcctgtcgcgagaaactaagaagggaaaagctaaatgacaagttcatggacttgagctctgttttagagcctggcaggactccaaagacggataaatcagctatactcgacgatgcaatccgggttgtgaatcagcttagaggtgaagctcatgagcttcaagaaaccaaccaaaagcttctagaagagatcaagagtctaaaggcggataaaaacgagctacgagagggaaaagctggtgttgaaggcggagaaggagaagatggagcaacaagtaaaaatctatggggggttccatcaacccaggttttcattggcccttcccaagcatcccagcagctttttcatttccccaattagaagggcgggtgggctttacccctttaccggcttcctatttcctcccaaaccattggcccattgttgggtcaccccttttacccttccctgctgtaacccggggaaatccctgtctttggtgggaaacctcaaaaaaaaaacctttcccctcccggggtggggtttaaattctttctcttccaaagggtgggaattcccctcccaatgtgatcccactgggttatatccaatatccctcttaagggaaatttttttttgttttccttttcggaaaagagaattttttttcaaaaccaacaaaagggtttttgggagg

SEQ ID NO: 134810 - DNA, 632 bp, Arabidopsis thaliana
  unsure (1)..(632): unsure at all n locations
ggtgtttagtggtgtagtggttttcaattcttcgtcatctgttggagctgttaaggaagagtttgaggaagaatgttcggggaagaggagacgaactggatcatgtagcaagccaggaaccaaagcctgtcgcgagaaactaagaagggaaaagctaaatgacaagttcatggacttgagctctgttttagagcctggcaggactccaaagacggataaatcagctatactcgacgatgcaatccgggttgtgaatcagcttagaggtgaagctcatgagcttcaagaaaccaaccaaaagcttctagaagagatcaagagtctaaaggcggataaaaacgagctacgagaggaaaagctggtgttgaaggcggagaaggagaagatggagcaacagttaaaatctatggtggttccatcaccaggtttcatgccctcccagcatccagcagctttccattcccattaagattggcggtggcttacccttacgggctactatcctccaaacatcgccaatgtgggcacccttaccctcctgcttgaccgtgatccgtctcgtgatcctcaaaaattttccncccgttgttaaacctnctnaatggtgnttcancattggccatggtnatnaa

SEQ ID NO: 134811 - DNA, 636 bp, Arabidopsis thaliana
  unsure (1)..(636): unsure at all n locations
nnnnnnnnnnnnnnnnnnnnnnnnnnnnnnnatggaccgggccagnaatncctgggctaccccccgcgtccgcacaatcttttctcaggagaacttcccaaatcattgatcaactgcagtgatatcgagtttctaaacgtggaagataacagaatcaatgacacgtttccatcctggttggaattgttgcccaatcttcagattcttgtccttcgttctaacgagttctatgggccaatattttctcctggagattctttaagtttctccaggttgcgaatctttgatatttcggaaaatcgcttcactggagttttgccgtcagattactttgttggttggagtgtaatgtcatcagtcgtggacattgatggtagaataattcagtatacagttacaggaattgaccgggacttctaccataagtctgtagctctcataaacaaaggattaaaagatgggacctggttggggagtgggttttcacaatctacaaaaccatcgatgtctcgggaaacagactcgaaggagacatccccgagtccatcggtcttctcaaagaagtgattgtgctcagcatgtcaaacaacgctttcacaggccatattccaccatctctatcaaacttgagcaatc

SEQ ID NO: 134812 - DNA, 624 bp, Arabidopsis thaliana
  unsure (1)..(624): unsure at all n locations
cactnnnnnnnnnnnnnnnnnnnnnnnnnnnnnnnnnnnnnnnnnnnnnnnnnnnnnnnnnnnnnnnnnnnnnnnnnnccacgcgtccgagccaacgtccgagaaatctttgacaaggctcgtcaatctgctccttgtgttctgtttttcgatgagctagactccattgctactcagagagggaacagcgcgggtgatgccggcggtgcagctgacagagtgttgaatcagcttttgacagaaatggatggaatgaatgcaaagaagacggtattcattattggagcaactaacagaccggatatcatagattcagctcttcttcgacctggaagactcgaccagcttatctacattcctctacctgatgaagattcccgtctcaatatctttaaggcctgcttgagaaaatctcccgtcgctaaagatgtagatgttactgcactcgcaaagtacactcagggattcagtggtgctgatatccccgagatctgccagagagcttgcaagtaccccatcagagaaaacatcgaaagggatattgagaacgagcgtagaaggagccagaatccagaggccatggaggaagatatggtggatgatgaagtttcagagattagagct

SEQ ID NO: 134813 - DNA, 366 bp, Arabidopsis thaliana
cagatcaacgataccaactttttttaataaaaataaaacatattgcacccatatttttaaaaaagaaaaagaaatgtcccttgaggggttttgtagggcgtaggtaaaagaaccaaaactttacgaaaaatatggcttcgttgagagaacacatcaaacaacctcaacctcattcttcgtagactttgactttatctcccacttcaccccactttctctttgttttgggtatctctctgcctaaccccaaaagtaaacggccgttatcacgctttcgaaacggatacggcctctttaacggcgatagaagacgacctctcggtcacgccgttaccgtttaatttcccattaccgttacccattttt

SEQ ID NO: 134814 - DNA, 482 bp, Arabidopsis thaliana
ggcaaataataagaataaaattgataatagtaacgcacaaagaccaaaaaccaattaatcagaagttttggcacaaaccacagacaaatttaaagtttctcaaagacaacaaacatcattttattcgtattcaacaacattgcttttgcttttaaaagcaaaaaacgcatcactgaacattgaacttttgctttgcgaatgcaacgacctcttcgacggttggcatgtagggcttaacagcttcatgggccctaaacctctcggcccatttgatcaacccaggtgttgtctcttgccggagaaacttgacgccggaaaacgcctcgatcacagagatcggacctaaaggagccgaacaagcaatgtcaaggtagccgatggtctctcctccaaggaaccctaatcctttgctgctcttctgaaacgtttcttcaagtatcgccaaacactccatcagctttcccaccgccgccattttccct

SEQ ID NO: 134815 - DNA, 796 bp, Arabidopsis thaliana
gaaatttaatcagtgtgtgtttataaatgtgcctaatttttcaattcaaaaagttaagaactgggtagtatatttctgtagtcaaaacaacaaaacccaagcttgggatttctatatcggttacaaaaacaattgttatgagatcattctataagagagatgcaaagagcaacactcatgccaagaatcaaagatatcaaatggcaggcactgtttttaagtgttgattttcccgagttgttcatttctgcaagaactccagcaacagctatgtatatgaatcctcccgctgtgaatccctcaatcaacgatgattgtcctggttcatttccccagaccaaaaccaatgcagttccggcaagtgcgacgagtgcagagaggaagttgaagaagagtgcttttgttactgtgaagcctgatcttactagaatcccaaaatcacctatctcttggggaagctcgtgggcaagtaaaaacatagttcttgaccaaccaccaactgatccatagatgagaaacgcacttcctaatgccattccatcagtgaaattgtgaacaccatcagagaacaagttgaggtaaccaaagactaggctcgaagaacgcgtctccacctgttctggtttgtccgattttccatcggaagtaatttctgttcctgaatctgatttatcagtagcgtcactagcagaagtctttctcttacggagagatttatctgtagagccgccagagactttctctgatgaatttacaattgcatcagaagaagattgttggtccaagttgttcccgg

SEQ ID NO: 134816 - DNA, 556 bp, Arabidopsis thaliana
ctctctcttagccatgtttgggtcaagaggtctctgttgcagcagaatctggaatcgttctctgtttctcaaacgttcttcaaacttccgagctagtttctctacgaaacgtgttgggacccataatgggacattccactgcgacgaagctttagcttgcttcatccttcgtcgttccaatagattctccgatgctcaaatcgtccgaaccagagatcatcaggttttggagaagcttgatgcggcacttgatgttggaggtgtgtatgatcctcagagtgaacgttatgaccatcaccagaaaggatttagtgaagtgtttggccttgggtttaatactaaactcagtagtgctgggcttgtctataagcattatgggattggaaataaatttccaaggagcttcaacttgagcagaggcaatcctgatgcctttcgattgtttctcagctgtgtacaaaaacttcattgaggcagtagttgctttagacaatggtatccatcaatatgatactgaccaacctccaagatatgtaaacaatactagcctggggca

SEQ ID NO: 134817 - DNA, 823 bp, Arabidopsis thaliana
taaagtgtgtggggggcaaccccgacccagggggtttttttccccccaggttcaaaaaggagagtttggttacaaactccgaccggggcccaaaggtgaaaatttggatattttaaggggctcccccacctaattaagaaagaaagcctaattttcctgttcggcaattgcaacagccgtaccggtaaaggctttgggattcccttttaaaagccggcccgccccaagttgtgaatggttcttgaaaaatacatcccaaaacaatgtgtatctttgttatgcacattatgatacacacacccgaataacaagttcatccacgaatatataaaagcagtaattacaaactcaatcgggtttcttctaccttaaccacttataccggtgtagattacaatcaaaccaagcaatggcaaatgcagtttagtaatctcaacctgatcattcaaaatctcaccagctctttctatatatccccggtgggcataatcttcaatagcttgaccagatcatatgacttgaaatctcttccaaagcacagagccaagtccaaagctaatttcccatccttcgttcgtcttgttttatcagcaccattggtcaacaatatctttgtaatgtctcgatttcggctttgtacagctatatgtaacggagtccatccttcattatctgcaacattgacgtctacattgtacttgaatagtagttttacagtctgcaaggctccaacttgaactgcataatgaatcggagcaaaaacgtcccgatcttgaagatgcggattagctcggacgcggggtcgtccgggaattctggtccg

SEQ ID NO: 134818 - DNA, 473 bp, Arabidopsis thaliana
gaactcatacattttgtattgatttttatgtgaggcgaaccaacaaacaaagaacgtatctctaccagaaccaaggatctttgccttaaaggttcagcataaatctcgacacagagagactctaatagtagtaggaggaccagatatatgactccaaatttgagattattactagtgtgttgcggatttagctgcatattggacaacgaacaagaccattcttattacactccttacacttcaccaccactgcatcattcccccatccttccaccactttacagcttccattacaacccgaacacggcaaaaacgctaatccgccggaaccaccggaaccgccgccacaccgatcgttcttcctcggaatctctttaagcaattcaccaagcaatccttctttcaccaatctcatcacttcctctgctccaccaatgtgcttgcccttcacaaaaacccgaggcggcaacacc

SEQ ID NO: 134819 - DNA, 771 bp, Arabidopsis thaliana
ggggaaagaaacccacaattgggaaagggcttaaggttttggtaaggttttcccggttttttgaaggggtttcctttaaaagaggaaaaggccctttaggattctattcggccaattcagaccctttaggggttttaattcctccctgaaacttacaaggtcccccaagcttaatacctaaccctaaagcctgaacttgatctctatattgtataccccggatatcccccccccgtttaaacccccaaactgcccgccgttaaaaaaaacaaggtttggcccttggaactttgttttaaaaacggttgtgtttttgtgcccttgcataaaaaggagttaaccttgatggtactaaacccgctttccctccgttagtaggcatgagcttcgatcctaccgtagtagagtccgatcctcttgtttgggttacggacaggaacagtgagggctaggttataccttaaaatgttgtccggggaagtgtggtcaaagcgggtaagggacgcatcggtcacgtgaaacttgatggcacgaggtcggacgatgagccagaagatgagagcggctacgccgaggatgacaataagggatatgattactttgacgaataagctgaggaggcagcagccacagccacgaccgtgcccacgtcggtagtagcctttgggagctggtggtgggactgatggaccgtagaaggcgccattgagaggttgttcagcagccatgatagtaattgtgtgcgtacgcgggagtcgtcccggaattccg

SEQ ID NO: 134820 - DNA, 481 bp, Arabidopsis thaliana
ataagaagcgttatcttgaaaagttacttataaaaaagagggtggtcgataatcagaagaagacaagttcaccaagatttaactattggactgaaatcagccaagttgcacatactcttcaatttttgccttcttacgggccaggaacctctctttagcggcagcgattcgcatcctctcttctcttctggtcgttaatggctttcggcacttcttttgctgcctctttgattgatgactttctctctttcagtgccatcttgaacccatctccttttcagaaactgcttgctctgcttctagtggctccaaactttttgctacgacttgatccaaattcgcccgagtcaggagatacttccttctccggggattttcgtttcttctctacccttgttacttcttttctcagctcctcgagcttctctgcctttcttgttcctcgagcttctctgcctttctttgttcctcgagcttctct

SEQ ID NO: 134821 - DNA, 505 bp, Arabidopsis thaliana
atctaaaacctgcctgattttagcattcactgtaaggaacaacacattgagtagcaaatggaacatctgaaaagtctacaaactgcaaagtaaaacgaacaagaagataacaaatattgctagggacttgactagatgaaaattcccaaaatatgtttttcgatttcagatgtgcaaaaaccctcttcacagcctttgtgaggatcacatcgttgaaatgttggaacacaaaaggcgtgtggaagacttgaattctagtttccaccttcattgataaacccttctttgcggccttcaaagccaggacgcaggagctttttctctttgttggcgaatttgcgcatcttattctgttcaatcctatcggcaatattccctgatctcttttgctgcttctccacctttgaacttttgttgcccttcaattctctctttccacttctctgcgttcttctcttgcctctttttgtctttgtggatgctttgcttcaatagctttgggtca

SEQ ID NO: 134822 - DNA, 713 bp, Arabidopsis thaliana
  unsure (1)..(713): unsure at all n locations
aacaagacaagtctctagagttgtatataaaaatgtacatccatgtcctatgattatgattcctatcatctataactataagaagacatcataataagtctgtgttaatgtcaatagtatttaggagggtaacccccaaaattggaaagacctgaagcaagttaccagaacccaacacaagaaagccattgcacccgagccttggtattggatacagaggctcccatcaaaggtctttccatcagcagacgcaaagcagttcagttgcactagctacaggacaagcaccaccaagagaaagaaacgaaagtacgaaatcaccggcgaaaacgatggaaagaactcttaattcttgaggaaggagtttcactaagacagagtatgtgtctgtcaaggcaagtaaaatgctccatggagttacaattgccatcaccatcgctaaatagcagaaagtagtgaaatcatagaaatcgaaatcaaagcacatgaagatcaacgaagcagctgagaaaatggtttggccgaaacggagagcgaantggcgctagtgccgaacgatcccgggacatgctccatccaatttcaaacctaattctctgtaacgccaaatggacttgtgtgtttgctctttattctcttttgctctgttttanaaaaataaatttactttataaacttaaataatactaacactcttcanattttcatttaag

SEQ ID NO: 134823 - DNA, 376 bp, Arabidopsis thaliana
  unsure (1)..(376): unsure at all n locations
tcggagcggtactgcactacgagctgagcgtgctcactgctaccgatgcgaccgaacggctcatcacccgcaccgaacgcatcgaccgtatcggcctggtcgaagccagcaccgccgtctgatcgataagcacacagaacacacaccgcgaaaggccggacatcctccaaggaggatttccgcctttcggacaaatcgagcacactcagccaagctgtcacgtgagcttcggggcgggttcttcccgttttcccccgggggctttcgaacttccggcttgttcgggttccgggttctttgaattcagctncggggtttttcgaaacctatgtactngnacaggtggtacaatcccnnttaacgacgatggtnncca

SEQ ID NO: 134824 - DNA, 499 bp, Arabidopsis thaliana
ggcaaatgcggtagtaagggcacttgagaacgaaagtgcagaaatccgggcggaaatggaagcttccaaattaagtgcatcagaatcgctcacggcatgcatggaggcctcgaagaaagagaaaaaatgcttaaagaaactactggcgtgggagaagcagaaaatgaagttgcaggacgagattacagctgagaaagagaagattaaggcactcaatagagctttagctcagatcactcaggaagaaaaagaatatgaggcgaaatggaggcaggagcagaaagctaaggagcaagttttggctcaagtggaagaagaacagcgctcgaaggaagcaattgaggctagcaacaagagaaaggcggaaagcctgcggttaaagatcgaaatagacttccagagacacaaagatgatctccaaagactggaacaagagctgtctcggctcaacaaagcctcttcaactgactcaagcctccaatccaataacacctctcac

SEQ ID NO: 134825 - DNA, 694 bp, Arabidopsis thaliana
  unsure (1)..(694): unsure at all n locations
gggtagaggtggtagaatttttatttacttacattgtgaatcctgggaagatcataaaccaggcaacatcttctttgaacaactcaaaacaatgtaaaagatgcgaatagtccaaaccccctcagattgaagataagagacaataggaagtagagagacggagccataaacaaacaaacaaacaaacaaaaaagtattacacctgacaaaagaagttgtgctgtgattaatctttggaccccagataattatctttgttactaagaactcgctccaaagacacggattctctgctgaaccggagctctgcaacaaggacaggtcgctttgccactgcccatgaagctatcgctgcagctcgcacagaccacttggtgagcacaagggagaaacacaaccgaaacctcatctttcatgcagatcagacattcccgggtcatagtttgcttccttcctcatatgatccatcaagcctattcagcccttcaagcggcttagacattgtttctcccttcgacttgtctgatttcanctttgtgtganaggtgttattgggttggaggngttgaggcaggttgaagngggtttgtttacccgngncagcccttngtncagccnttngggganacctttgggncnngggaggcnattngngnttaaccgngggttccacctttnctggtggaanccnntc

SEQ ID NO: 134826 - DNA, 737 bp, Arabidopsis thaliana
ggaagaaatacgagagaaagatctcaccgactctaaaccatctccaccgcaaccaccaccgaaacgtggtctcatcagccgcaaaagacagcttgtgtttctctctttcatgattttattagccgcaaaaggactcgttgggatcggagaaatagcgtttgtaatcttgtgttatatctacttgtatgagtttctctcaagatttgccttccctcgcaagcaaacagaacagaagaagagactctcaaaccctaaaaacaaactctttcaagcttacttcctcgccactgcaattataggcctactcttccctctttgttacatcggagatggaatataccgtggagacattcacggcgctggagccgctcgcaccacatctatttctcctctcaggtcaagctttcacagaacctattggtttctctgacaagtattcgatgccaataggtattcttggaccggttttctacaacgctcgtaggattttcgctcttttggattgggttaaagcagaattctccgacactcaacgtcctggtggtccgttgagattgtacggaggaagagtgattgcatcggttaacacggtgatgtggttttataatctgtttggtctcttgttgcctgtgtttcttcctaggtcttgtgagatttacttctccggtgataacaaagatgattgaactgatttgtatttgtctcatttagaataaaaatgttgagaagttcgtttt

SEQ ID NO: 134827 - DNA, 620 bp, Arabidopsis thaliana
  unsure (1)..(620): unsure at all n locations
agcaaattaaatacactactacttcttgagcttttaaactacacaaacaaatggctccaagaaccccccttgcactcttcgtttctctcaacctcctcttcttcacttacacctctgcaaccacagggacttgtcctaaaaattccatagagatcggtacttgtgtcactgtgctcaatctagtggacctaacattgggaaacccacctgtaaagccatgttgctcgctcatccaaggcttggctgaccttgaggctgcggcctgcctctgcactgcgctcaaagctagcattcttggaattgtcaatattaacccttcctatcaatctcagcgtactcctcaatgtttgtagtaggaatgctccaaagagtttccagtgcgcgtaagttgaatacctatgacatacctatgaaacaaacgaatcataccgatgcttgaacatgttttcttacctacttggtggtggtccttaggtggttgggtttncctttctttcttgggttggtaataatgaacgnncggaggtcctgatgaaaatatgggaaggggnnggggtttcaancgaaagttgggttttttccctanttgggggcccngggtggggggcccctctgggnaa

SEQ ID NO: 134828 - DNA, 459 bp, Arabidopsis thaliana
ataatcctaatgtataacacgtttaagttgatattaaagacaattgtcaaagctctctaacccatgaaaatatttggacaaagaaataagagaggatttggtgtcttgcaagtttcacagctcctatcttaacttatcactagcttgcttgatcctaaataggatttaaaggcatacagcttttcagtttataaaactggttcaagctgaagttagttttcaattaaactggccctgccccatttcgatgcagagcggtcgggccttcaactgcgggtggggtccggcttgccaaatagccggacacctggactcgagttgaagccgcagaccggttagcttacggggttggagggtgcttgagggatggtgatcaagggtaaaacgtcttggttggtcagaggaagaaacccatgttgttgaatttgacagaagagagagagcaccatcaagatcttg

SEQ ID NO: 134829 - DNA, 507 bp, Arabidopsis thaliana
  unsure (1)..(507): unsure at all n locations
ctcagatacagaaactgactaccaagaacaaagctttttccttcgagcaaagaaagttcttttttcttttcttttgctcttcgtaacccaaccaacaagactttcataagctattaaatcagaaccctggaagacaaaaaaggggaaaaaccattatccttaaagtaaccaacacttctctctctctttcttcaatggatttgcaactgaaacaatggagaagccagcagcagcaacaacatcagacagagtcagaagaacaaccttctgcagctaagataccaaaacatgtctttgaccagattcattctcacactgcaacttctactgctcttcctctctttacccctgagcctactttcttctaaactctcctctttgtctcctgattcttcctccagggttccccaaggatggggggcttttttaggctggggacagtgggaagaacttgaccttcaagcttttgatctttcaggtacatgtttgggttggngttgntgttcc

SEQ ID NO: 134830 - DNA, 551 bp, Arabidopsis thaliana
  unsure (1)..(551): unsure at all n locations
cgcttgcagcatcattataacttaaaaatgaaataaaaagtcgttgcacttctacattttgcctaagcttcatcgtagatcctatttagacatgaatttccaaaaacaaatctttgaggatataaaatctgcagagaaaggctacagatacaagggaaatcttaaaagaaaaagggaagaggacaacaaaagcctcccctctttatacaggaaatttggataaaaaccaaaaacacagtaaaaaccgcattgttgtgttggttttacactggtcaatgaaaggcttgtgtcgagacaccaagctgatggagaacactggttggggaagatgaggaagaagatctcagggcttcggccaatgggccgcccatgttgtgatgatggtgggtggaacctccaacggtcccaacagctcatggtttgctganctctccccatggttgttgccccggggtnccnccttcgttgcctgtnganaacttcaaaanacgtctnaaggaaaagtnccgggcatggnnattgngaaacaatgggttnannccatgggggtt

SEQ ID NO: 134831 - DNA, 621 bp, Arabidopsis thaliana
tatgatgatggggatgaagtttttctctttttacgttgtacttcttctagttgcagctagctcggggatgcggataaatgggcagagcgtttcgtgtctaaaccaacttgctccatgcctaaattacctgaatgggaccaaggaagtacctcaagtttgttgtaatcctctcaaatcagtgataaggaacaatccagagtgcttgtgccgtatgattagtaaccgttggagttctcaagccgagcgagctggcatcgatgtcaatgatgctcaaatgttgcctgctcgatgtggagaacatgtcaatcccattgcttgcttgactcgttctagaggaggatcttcaaactcagaccgaagttcctccattggcaacaccttttctcagtcctattgggtgacaaacattagctattgcagccactgttttgtcataattgccatcacataattagctgaatccctcatggtctttagcagcgttgctttgctttgcttaattaaagacgggtgggtctcttgtttttttaatgcccttttagttaattatgattattggtcgtcaccaacacattgtatgtaccactttgtccccataaatagtcaaaatccatttctatt

SEQ ID NO: 134832 - DNA, 522 bp, Arabidopsis thaliana
ggtctgggctacctcaaaacacgatgtttatttattgtccaactactccatcagccactggtcttctttgacaggttgtaggagtgaaattcttaacgttaaaggtcatgtggctccgtctgagaaacatcccgagagtttgttggaaggatttacagagactcaagttagcactcttgcagtaaaagaaaggctactagttgctggtggattccaaggagaactcatttgcaagcatctcgatagacctggtgtgagcttctgctcacgcacaacttacaccgaaaacgctatcaccaatgcagtaggtatatataggaactccagcggcgcactgcatttcaatggcctcaaataatgactgtggggtcagagactttgacatggagagatataagcttgtccaactcttccgttatctatggcccgtcaatcatagttccctaagtcctgatggaaaactagtagcagtcgttggagatgacccagatggtctactggtagacacaagtaacggacaga

SEQ ID NO: 134833 - DNA, 478 bp, Arabidopsis thaliana
gaaacagagtttgattccgtgcacaaccgtcggagagaggaatctgttagccgacgcggcgaagattgtagataagaacaaatcggtgaaacgaaaagacgatatgaagaagatcgtcaatgaaggactcttatcacttaattacaattcttcaatctgcaaatcaaaatgggataaatctccttcgttcccagctggtgaatacgagtacatagatgtgataatcggagaagaaaggttaataatcgatgtagatttccgatcagagttcgatatagcgagacaaacgagtggttacaaggtgttgcttcaatctctaccgttccatttttcgtcggaaaatctgatccggttaagtcagaccgtgttttttgatatcggaggcgggcgtaacagagtttgtaggagaaaggattgccttttcccccgtggaggaaagctgagtacatgcgatctaaatggctctcttcttatacgc

SEQ ID NO: 134834 - DNA, 487 bp, Arabidopsis thaliana
ataagatgtgtcgttacctgtttgttagatgtgacaatgagccagctccatggaccagtgatgagcatggcgatcgtccaagacctttgcctgatgttccagagctggagaatgctactgacctgtttgtgagaaaggagagtccatcatggggtttcgatgaagctgagggtcgttggaagtggatgaagtctccacctgttagcagaatggctttggatactgaggagaggaagaagaataagagagcaaaaaaaggaaataatgctatgaaggccagacttctgaaagaattcagttgccaaatctgtcggaaagtgctgagtcttccagtgacggcaccttgtgcacacaacttcttgcaaagcatgccttagaagcgaagtttgctggggtaacctcacctggggggcagaagcaattggcgtgcggtaaactacgtgcaaagaaaaacatcatgacctgcccttgctgcacaaccgatctc

SEQ ID NO: 134835 - DNA, 551 bp, Arabidopsis thaliana
agtgtttgcatgtttcagaaagaagataatgaagagatatcgaggtgaaaatttcagaaaagggattgaggaagaggacttggacttgcctatttttgacagaaaaacgatttctatagccactgatgatttttcatacgtgaacttcctaggaagaggaggttttggaccagtttataagggtaagttagaagatggacaagagattgcggtgaagaggttatccgcgaactcaggacaaggagtggaagaattcaagaacgaagtaaaactaatcgcaaaacttcaacatcgtaacctcgtgaggcttttaggttgttgtattcaaggtgaagaatgctatgttgatctatgagtatatgcctaacaaaagtttagacttctttatatttgatgaaaggagaagtacagaattggattggaagaagagaatgaacattatcaatggagtggctcgtgggattctctatcttcatcaagattcaagattgagaatcatacatagagatttaaaagctggaaatgttttactagataatgatatgaaccct

SEQ ID NO: 134836 - DNA, 505 bp, Arabidopsis thaliana
  unsure (1)..(505): unsure at all n locations
gtacacctgcgttcactgtgatttctaaggttccaaccgttatccttgggatggatgtttcacatggatctcctggacagtctgatgtcccgtccatcgctgctgtggtgagttctagggagtggccactgatatccaaatatagagcatctgttcggacacagccttctaaggctgagatgattgagtcccttgtcaagaaaaatggaactgaagacgatggcattatcaaggagttgctggtagatttctacaccagctcgaataagagaaaaccagagcatatcataattttcagggatggtgtgagtgaatctcaattcaatcaggttctgaatattgaacttgatcagatcatcgaggcttgcaagctcttagacgcaaattgggacccaaagttcctttctgttggtggtcaaaaggatcatcatacccaagtttttcnagcnaacgtttcctgaaaaatttccnncngggccaacnattnnccacaaaattttncacc

SEQ ID NO: 134837 - DNA, 570 bp, Arabidopsis thaliana
  unsure (1)..(570): unsure at all n locations
ggccgccctttttttttttttttttttaacttcctgaacttatatattcactacaataagtctttaattaaacaaccgaattgttaagggggacaaaagaatattcaaaccccaacaggcaaacaaggctggcgataatagtcacaaaaaacattccaagccttagtgtcgatgcctggcttaaaagccgagagagatcctaagctgaaagtcagatagcctattgaactactacttacttactgagccaagtagggccgctcatttaacagaagaacatggagttggcgacgttgtctttgagtcttgggagctgtgcaacagagaattggtcctggagctgtgataccaccatggcttgatgatggcccagactgatcttcaaacttcatgaacgtcccaagctgagcagctgccaagtggngcatagcagatcggcgcaacaacagaaatngcnctggngctcctttngnacacataggngaccgantggncaagtcctgaagtcgcagctgaaaccatcnntcataaggcgggtattanttggngggagtccacnatcccnggngg

SEQ ID NO: 134838 - DNA, 581 bp, Arabidopsis thaliana
cattcaccttgaagaaaattagccccaaagtgctccttttgcctgatcaaccatcgccttcttgggggttttctttattttctacattagccatttaattcattcattatatatacttctctctaatttcttaatcatctcttcttatagtttttaccctaaagaaaatggcaaccgtcgatgtcatcaacggtgattcaatctcaactcttcattctgacataatccaaacccaattcttgacccgactcgatggtccgacgctagcctccaccgcaacaacctcttcttacctccaaactctatgcacggaagagaaactctggcaagaactctccatcgacacgtggccttcgatcaatgatccacgtgttgtccaagctatctcctctttcccttccggttaccgttctttctttgctgactcgtacccgttcactgaacacacgtggcagtctgaaaaacatgatccaccgccgggattaatctcagccgttcatttatactacagaggagagattatatactcgtaggtacaagagatggaaacagagaaaggtaaatcaggatggttcttgtca

SEQ ID NO: 134839 - DNA, 529 bp, Arabidopsis thaliana
  unsure (1)..(529): unsure at all n locations
cattcatctcgaacgagattggtctcaaagagccctgggttgactgagcgaccatcgccttcttcatccttgtctttattttctacattaggcattcaattcattcattatatatacttctctctaatttcttaatcatctcttcttatagtttttaccctaaagaaaatggcaaccgtcgatgtcatcaacggtgattcaatctcaactcttcattctgacataatccaaacccaaatcttgacccgactcgatggtccgacgctagcctccaccgcaacaacctcttcttacctccaaactctatgcacggaagaggaactctggcaagaactctccatcgacacgtggccttcgatcaatgatccacgtgttgtcaagcaactcctctttnccttccgggtaacggcctccttgctgancgaaccgtcactganaacgggnagctgaaaaatgtcaccgcgggtaatccagcgtggttaacaaggggggtnaaccgaggcaggtgganggaaggaacaggtggctt

SEQ ID NO: 134840 - DNA, 544 bp, Arabidopsis thaliana
tcaaggttgtacaaatatgcctccatgggttttactgttcttggtgtgttcctaattacgaagcatgtcattgactctgttctagagagaagacggcggagacagttacaaaaaagagtgcttgacgcagcagcaaagagagctgagctagatagtgaaggttcaaacgggacacgtgagagcatttcagattctaccaagaaagaagacgctgttcctgatctctgtgtgatatgcctagagcaggagtacaacgctgtgtttgtcccgtgtggtcatatgtgctgctgcaccgcatgctcctcccacttgaccagctgtccactttgtcggagacgaatagatctggcggttaagacatatcgtcactgaacaacaactcaggcctcagaaacattctctacttgagtcttgtctgtaaataccgcaaaatcaaaacattacacagtttagcgttcgatattccctttggtttgatttcgacaacaaaacattttgaattatatagaaacataaggtgtttactcgatttgcaaaaaaaaaa

SEQ ID NO: 134841 - DNA, 356 bp, Arabidopsis thaliana
gtatgggaaggagcatttaatctcgactcaattgctctacgagctctctccttgtttcaaactcggtttcgaggccgcgaatctcgccattctcgacgccgccgataacaacgacggtggaatgatgataccgcacgttatcgatttcgatatcggagaaggtggacaatacgttaaccttctccgtacattatccacgcgccggaatggtaaaagtcagagtcagaattctccggtggttaagatcacccgccgtggcgaacaacgtttacgggatgtttagtcggatgacgggtggagaagagaggtttaaaagcccgcgcgggtttgttgtgccagccccgtcagcgactccg

SEQ ID NO: 134842 - DNA, 575 bp, Arabidopsis thaliana
  unsure (1)..(575): unsure at all n locations
attaaagaacccaatcactctttcttttattattagaaaaacataaaagtcttttttttttctttgttacataagattcctacacttttcgaaatggaaaatcacaatgataataatatcagaataatctcgaaaattaataataatatggtaataataagaagaaaaaaaaagagtgtgtgaagttaacgccaagcggatgcgacagtgagtgcccgtcccatccaaccaaagcacacacctccgttatcttctttaacggtaaagcccgggtggactcggtttccacgactcttcatcgactccgctatcttctcactcaatggcattaactcaaacccagccatgctcatccgcattcgccatttcccgaacacctcgcaccgctctatacgatcgattccttcggacgccaccgngttttacgaggcttccgggcaattccttcctcaactttggaacgggcggattcgttcttgggaccgtaggctcggcccgcttgacgaccggaccgtacaggggnatgttttnttaatttcccttaaaagggggcgnttttgggttnatttttnana

SEQ ID NO: 134843 - DNA, 483 bp, Arabidopsis thaliana
tctcactcaatggcattaactcaaacccagccatgctcatccgcattcgccatttcccgaacacctcgcaccgctctatacgatcgattccttcgcacgccaccgcgtttactagcttccggccaaattccttcctcaacttttggcacgggtcggaattccgtactaggaaccgtagactcgaccgactcaagcaacgcaccgtaacacgcgcatgactcactcactctccctaaaaacggcgccgtattcgaattcatttcttgctccactagagtaaccacgcgcggtttaagtcccttcacgcgccggagaagttcgtcttggattctccgtgcatacgctttcgtcgggaacacgataaagcttgaaagctaagttcacagccaaagtctcgtcgggatcacacccgagagattcacgattcagatcaccgagtcgtaaactcgtcaccacgttgaaacttacggagataccgagtcg

SEQ ID NO: 134844 - DNA, 778 bp, Arabidopsis thaliana
  unsure (1)..(778): unsure at all n locations
cgagctcactagtgagctctnctancngacgatccgggaatgagaggtcttggtcttggagcctttacactagactggaccgcggttgcctctttcttgttcagtccacttatcagccccttctttgccatcgcaaatgttttcatcggttatgttcttttgatctacctcgtgttgcctttagcctattggggatttgattcttataacgcaacgaggttccctatattttcgtcgcatcttttcacatcggttggtaatacatatgatattcctgcgatcgtgaatgataactttgagctcgatttagctaagtatgagcaacaaggaaggattaacttgagcatgttctttgctcttacctatgggcttggtttcgccaccattgcttctacgctcactcatgtagctctcttctatggcaaggaaatttctgagaggtttcgagtttcatacaaaggcaaggaagatataccacactaggttaatgaagagatataaagacataccttcatggtggttttacctcaatgttggctgcgacactacttatctctcttgcattatgtgttttcttgaacgatgaggttcaattgccttgtgtgggggcttgtgttcgcaagcccgatggctttcgtcttcacactcccgataagcatcataaccgcaacaactaaccaaacaccgggattgaatataataacagagtacgcaatgggactcatttacccgggacgacctatcgcaaacgtatgctttaaagtctatggatacatga

SEQ ID NO: 134845 - DNA, 542 bp, Arabidopsis thaliana
  unsure (1)..(542): unsure at all n locations
gatttttttttgaaattcttaattagttacttggtgtatcatacattgttgaaacacaccaatggatcctttaagattatttaaccggacaaccatcaacaattactcctctagcggttggacatttagctagatcacaatgttcacctcttgttccccaccagtccaaactcttttcctccatccccaccgagaagtacaacaaaaccgccatgaaagctacaccggcatccatagcggctgagagaacgtagttatacctctgccaccaacttttcctgtaccggaacacaaacaagttgaatatcgtccccaccaatatccacgagttgtagttcaccgcggtcgcaggtggcatcattgcgggttgctccctagaagaacagggggatttacaaggtggnatccaagaacgttttggggacgctttgtggcatggccacacttctgcttggnctaatgacctccggggaaaaccggtcactggccgaataggttcctggggccaaatcccggttggccgcaaacccaatggncggtgt

SEQ ID NO: 134846 - DNA, 350 bp, Arabidopsis thaliana
ggaagaactcgtggccggagcttacgggaacaaatggtgactatgcggccgtggtgatagagagagagaaccccaccgtcaatgctgccgtgattttggatgggagtccggtgaccgcagacttcaggtgcgaccgggtcagagtttttgttgatggaaaccgtatcgtcgtcaaaacccccaaatccggctagacttgtataatttctatattcataatgaaaaagctatagacgagtcgtggttggttagtaatcaatcatgtaaaataataatcgtttgccttcataatttctgtgttactgatgcctaaagttatgaatgaaaatagtatcctatatttcaaaaaa

SEQ ID NO: 134847 - DNA, 410 bp, Arabidopsis thaliana
acgccgtgccggaccattaacgctaatgctatcgccgcaccgtcgccttcgggattgatctttaacgggtttcgtgatttcgtcccgattgaaaagaggcttgttatatcaagctttcgtggcttgaaactaccgtcgaggacgacgaagactattacgagctctgactggagttggagttataggtctccgggaagattggcgtctgcgtctacgtctacgtctgcgtctacgtctacgtctgcggctgtaacatcgaattctacgaatagatttgaagctttagaagaggggattgagaaggtcatttatagttgtcgatttatgacgtttcttggaacattaggatctttgctcggatcggttctctgtttcatcaagggatgtatgtatgttgtagactcgttttt

SEQ ID NO: 134848 - DNA, 569 bp, Arabidopsis thaliana
  unsure (1)..(569): unsure at all n locations
caaaatcaaagtcagagagaaacaatattttttgaacaaaaagagaagatggagcgttgctaaaacattatacacatacaaagtttcttttgttttgggacaacaccattaactcctcagtgtgaaccattgagcctagagagcatgaagagacaagcagaagaaaaaaagatagaaacagagatacatagcaaatccgtgacagaagttatgactactctcttgctcttgtcaaacaaaccaatcaatagtagcatcactattacatgtcccaactttgttttcagctcgcttaccgatttcacctctaaccattgaggtcgctcctttaaggtgaacatgccaaagaggctcgacctattggaaacaatatcgtgtgtgcgcgactctgaagtatcgagattgctgatggacaactcgtaaagncccatcccaaggctaacatcacagtcctaggggtatatatctatgggctcaccaaagggttcnctttccncggtcncgganctgnaaacgggctaaantactaancctggtgacaggaccgtccgggaaagnctatgtccaga

SEQ ID NO: 134849 - DNA, 548 bp, Arabidopsis thaliana
  unsure (1)..(548): unsure at all n locations
gtctttctcaaaactaaaattactttaattcccatctttatctagtccaaactcatgatgtgacaattctgatcatacatataacaacttaaggagacatgtaatatatattatacccttttctgatcacaattcgtccttcgagtcactttggctactctttgtcgtgctatcgggtgattctttggtctcggtagtttctacttttggtgtggactctgcagttttaggtgattcggttgatgcaggtttctccagtttgaatgggatcgttgcgtgtttccttaagaacttgtaaaatgcaaccacagtgcggtctgtatctacagtaatcggctctgaagtcttgttgcccgcagggaagaagagaatggtagggaaccctcagcctttgccttgggatgtcatgggtggtccanccaccttggtangacgggngaancaaactccgaaangcctgnaagttgntaaaatggccaagggtngaatgccacangggngaaccccggagaannttaaacgcngaaaatcccaaggacccacccnat

SEQ ID NO: 134850 - DNA, 568 bp, Arabidopsis thaliana
ggaagagccaaggaagctgagaggccacaaatctactgccacttgttgtatagcttctcgtgaccggcctggaattgttctcacttccggcgaggatggttgcatttgctggtttgatttgcgatgtaaagatgttcaattcatcatcgatgttggaacagaaccagtttcatctctttgtttcaagacaggtaatgagaacattctctatgcttcttgtggaaacgaaatcaagtctttcgatgttcatacgctaagtgctacttcttggaagccattagagagttacaattacaacaaagatgaagttaaccaggtagtatgtaacggaaggtcgtcttttcttgcttctgcagatgattccggcgatgttaagatcatcgaccttggtcagaaatgcctttataaaacccttagagctggtcacacaagtgtatccttacttcgttttttttacccattctcgtctatgaaactctactagcctcgaaaaaatgtctcaaatcaacaccttaatgagacatataagatatgtagttctgtacaattcattccatggagaccttgg

SEQ ID NO: 134851 - DNA, 504 bp, Arabidopsis thaliana
ggccgcccttttttttttttttttttttttaattaaatgtttcattctttataacttggtttatcaaacaaaaaaataaactaacttgtagatcaagcaaccattctaatgtcaaaaataaaaatgaatctcttagactaataacaatgtcaaaaaggatgaagcttttagactatttttatggacccatcaggcctatttaagagattgagtaaaccttaactactcttgttgtgtcacacactacaagattctcagaatcagattgattcgtgcaaagccaattcaccttcttgcttaggttaatattcaaatggaggagatcactgttattggttggttgttgtttggatcaagacatttaaagcaatcccagattttgactgttttatcattaccaccagagattaaggaatccacccttctcccggaaccggggaaaaggctccccaggaaacagcagaattgtgtccaccaacagagtagtctaaacaaacccttttg

SEQ ID NO: 134852 - DNA, 361 bp, Arabidopsis thaliana
ccggtagctctgaagtgagggaaggtattgaagagaagactctgcttaacaggttgggaacaacgggagacatggctgctgcggctgctttcttagcatcagatgattcttcttacatcactggagaaactttggttgtcgctggaggaatgccttcaagactctaaacaatttcacatcaataatagcgtaaagaatgcaatcagggtatcaagtaagtagagatgttttttttagagttttcaactaaacaagactttaagaaacgaaagatgttccaataatatcacgaggccattggatacttgttggtcttgtaaaagataatttcttcatcagcaaaaaaaaaaataaaaacggg

SEQ ID NO: 134853 - DNA, 510 bp, Arabidopsis thaliana
agcacctgcacctgggaagaaagcggctctgtcttgttcgcagtcacttcctcgtggaatggaatgtattgatccactaaaattagggatcatagacaataagacattgagattaatcactgagtcgtcaggcagcccatcaaaagctgagaaagtggataatactcttcgcgaaaaattggtttacttctctgatcattccgatccgaagctgtttctttcccgtattcaccaagacacgactgcagcacatttggaggctggtgcccttggcttgaaaagtgactcaaagggtcggaatctgcaaaggaaacaattggcgaaggacaattgtgactgcttcgtctcatgtaaaacaacaattgatgatattgagtcaaaactgatgcggattgaagaagaccccgaaggttcaggaactactcattagtttaattgtatgaaaagtgtgacatcgagggccaatcttgcatttgagccactttttgagagacaggctcaagctgagaa

SEQ ID NO: 134854 - DNA, 644 bp, Arabidopsis thaliana
  unsure (1)..(644): unsure at all n locations
nnnnnnnnnnnnnnnnnnnnnnnnnnnnnnnnnnnnnnnaagaaaagcataataataaatagaaagaaaaaaatcaacgatggacaagcaacgttatctttacaaacattttcttcacagtttcgttttcgttcagatccaataaacagccgaatccaaatttgatatcctcaagagatcatccaattacaaataacaataataatagtaataagaatattaaaaaaaaaagatcaggaaaagcttttgcttgttgttaacttcaacatcctgcaaacacatttccctgatgaacccaaacacatctattttcctcctcctttgattgtttgattgattgctctgcaaataacaaagcttcttcacatcaccatttgtttttttccccattattactctttcactacccttttcttcttttctttctttcaatcggacaaacacatacagaccaacaaactcccagtctcttctattccttggctttgnctgtctaacctcttctttagccatctatgcacatcaatcattcattgtatttatcagaacaagatcatacattgtcgcagaaagtgagcaaatataactggaattgattgagatcataagagggtaaaacctggcaaaagatctggttccaaatc

SEQ ID NO: 134855 - DNA, 548 bp, Arabidopsis thaliana
cgctgtgattgtcaagagtttgaacacacaaagaagaaagaagttctcaacatttcaagcaagaagaaagagagaagagtgaaggtccaataatagagagaacaaaaaaaagagagcttaattgtcagtttattctctgcaaacgtgcggcctaagtaacacatgtcgaattatggagtgaaagaactcacatgggaaaatgggcaattaacagttcatggtctaggcgaagaagtcgaaccaaccatctctaataaccctatttggacacaaagtctcaccgggtgtgagactttggagtctgtggttcatcaagcggctctacagcagccaagcaagcttcacctgcagagtccgaattggtcccaaccacaattatgagagcaaggacggatcttgttcaagaaaacgcggttatcctcaagaaatggaccgatggttcgctgttcaagaagagagccatagagttggccacagcgtcactgcaagtgcgagtggtaccaatatgtcttgggcgtcttttgaatcccggtcggagcttgaagaca

SEQ ID NO: 134856 - DNA, 980 bp, Arabidopsis thaliana
gaagtttttaggagaaggaaatgatggcgtcggttccaaaactgaaggctgagatcggagccgatggtcttgcaagagaagctcctgttattgcttacacagagaagataatcgaggaagagcaagttcagctgaggaaatacattgaggagaactatacaaaaattagggatgttgaaagggaatttggaaacctttcaatggaattgaaactcactgctggacctaagaaagcagcaatggaacacttgagaaagaaaatcgaagtctcaactgaaaggatccatgctgctaagttgaaagaagaagaagcgcgaaaggcatttgaagcagcatcaaaagttgtgaaggatgaagaagcaacaaaacagagtctttgcgaagatttaaacagtctggtacaacaaagcagcaatacgcagtacgccagacttgaggaattgaaaagaagactagaagcgttgaatccaaatcgatcatctacttctattcagcaagtgcaagaaccggagactaaatctgtagtagacagcgcaccagcagccaatgcgaaccaaactcacccgggaaaacctgaaaataaccacgggaacgaggaaggtggtaaagaacatggacagagaccagcaacagctgaaggagaatcaaaagcgaaaaagaaaccacagaatcaagggaggggaagaggaattggaataatgaacaaaggcagaggaggttggacaggtgctggattcgatgtcgatggtagaaattgagatacatatatctagataatccatataccgaaagcgtcatttcgaatcagaagtatgtcaaatatattgttaccaggtatgttctatcatcttttaacatcgatggaccagtacgtagccacaaagacttctccttttctcatacacctgtgttactgaaaagaagtccatcccatcaataatggactgttcataaatcaaaaaaaaaaaaaaagggcggcc

SEQ ID NO: 134857 - DNA, 333 bp, Arabidopsis thaliana
  unsure (1)..(333): unsure at all n locations
caactatctcattctcaagcagtgaaaccgataacccttatagtcactcagaggaagtaatctcattttgtccctccctctctaacaatacacgtcaaaaggtcatcacaaggctcaaggagaagaagagagcaagagtggaggagaaaaaagcttaatatggtcccaagaaaatggcagagtaacacaatttcttgcaatgcctttgtacataagacactaatctacctcttcatctattttacatggctcagtttcttgcatgtaactgtgaatctgaagattcatcacttgttgattattttccaaaaaaaaaaaaaaaaggncggccgc

SEQ ID NO: 134858 - DNA, 773 bp, Arabidopsis thaliana
  unsure (1)..(773): unsure at all n locations
aaaaccgtggaatcaagaagaagaagaagagcaagcacgtcctcctcactctgttgaccctgttgaagatcaaactcgccgccatccttccgttcgccatcggtaagatcgccctgatcgccggtaaggccttgttgttgggaaccatcgcactggtcctgtccctgatcggagtcctgcagaaggtgctcagcaaacaccacgagaagaccgtcacctatgaggtgatcccacaacaccaccacgaatctcacggtggacacgactcctacggcagtgccggaggcgccgacatctctttccggaggatacggcggtggttcttccagcggcggatggggacgcagcgtcgactcccaacagatggcctacagtgcccaagcaccgcagacatcccagtgaacgcccaagcaaaacaagtcctcgagttgacgacaaagacgtatatgataacgccatcatcgcatatacctacacaaccacatcgtgtcataccgacggtgcaccacaacaatcccgacgacaatcaaagttcaaacgagccatcgaaacgagagctacaccacacgcaaaagctcactaaacttatttgtacattatttatttattatttatataatatttatattgatttatttcaacactgtttgaaacgttcatactatattttgatgttttcgaaaaaaaaaaaaaaaaaagnnnnnnnnnnnnnnnnnnnnnnnnnnnnnnnnnnnnnnnnnnnnnnnnnnnnnnnnnnnnnnnnnnnaacgaaa

SEQ ID NO: 134859 - DNA, 927 bp, Arabidopsis thaliana
gaaaagtaattatctatggctctctcctcgttgatctcagccactccgctctccctttcggtgccgagatatctcgtgttacccacgcgccgccgtttccacttgccgttagcaactcttgactcatcgcctccagagtcatccgcatcatcatcgattcctacctctattcccgtcaacggaaacacgttacctagttcttacggaactcgcaaagacgacagcccgtttgctcagttctttcgctccaccgaatccaacgttgagaggataatatttgatttccggttcctagcgcttttggcagtaggaggttcgctggctggttcgctactctgctttctcaatgggggtgtctacatagtggaggcatataaagtctactgggctaactgttcaaaaggcatccataccggccaaatggttttacgcctagtcgaagctatcgatgtttatctagctgggactgtgatgttaatatttagtatggggttgtatgggctcttcatcagtcactcggcctcatggtgttcccccggaatccgatcgggcccttagatcctcttccctctttggtatgtttgcaatgaaggagagaccaaaatggatgaagatcagctcacttgatgagctgaaaaccaaagtgggacatgtcattgttatgattctgctagtgaagatgttcgagagaagcaagatggttactatcgccaccggtctagatttgcttagttattccgtttgcatcttcttgtcctctgcttctctttatatcctccataatctccacaaaggagagacatgaaccaatgtatatgtacagacccaatctatccaatatatgtgtttactactgttaaaaaaaaaaaaaaaaaagggcggccgctctagaggatccaagcgtacgtacgcgtgcatacgacgtca

SEQ ID NO: 134860 - DNA, 490 bp, Arabidopsis thaliana
tcatcgtctcttcgatttcgcaaagacggccataatcaacatcttcgcacatccttatgccactgtttgcgaattgtactgtggcggagctcccgaaaccgacaagtgggaagctgctccgattggtcactacatcggaattgatacatcttctgggatttcttctgtacgagaagcttgggagagtcagaggaagaattacgatgtggaattctttgaagctgatccttccaaggatgattttgaaatccagctacagaagaaattggagcaggctgatttagtttcttgttggcgccatctccagttatgctttgaaactgaggagagtgcgagaagactcctaactaatgtagcatgtttactgaaaccagggggttattttttcggtatcactcctgactcgtctacgatttgggcaaagtaccagaaaaatgttgaagcataccacaacagaagcggtgcaaagcctaatgtatttccaaactac

SEQ ID NO: 134861 - DNA, 517 bp, Arabidopsis thaliana
  unsure (1)..(517): unsure at all n locations
caataaacaagataaatggagggtctaattccgttagtatacaaagccgtcatgcaaatccgttacggtaacgagtcgcagcaactttcttcttcttactacgttcgtcttcccggtgattcgggtcggtttgtaagatccgatttagatgtatcgggtcctggatctaattcctccaatagggcgtcgtcgtcgacaagcacaactacgtttgctgtttacgcgggagtccagtcacctgtttctcgtcaggttgtcacgtgattcacacgcgctttttgaaggaacctgaagttgcgtgtgagggaagggttcgtgacttttgttttgtgcgttttttttttgtaagttaggcttggaccggtttaataaacctgatgtaataattcggtttggaaaattgatttctctaagcgtagactttaacccaaaagggtggtctcgtggcttttgatttgcaattgtgtgttttctttaaattgaaaaaggttctatgatatattaaggtattngggcc

SEQ ID NO: 134862 - DNA, 716 bp, Arabidopsis thaliana
gctataggaaaagctggtacgcctgcaggtaccggtccgaatttcccgggtcgacccacgcgtccggacatgtttaagcgtcaattcgaaagtctcagagatgagaacgaagttcttcaaactcaaaatcaaaagcttcaagctcaggtaatggcattgaaaagcagagaaccaatagaatcaatcaatctgaacaaagaaacagaaggatcatgtagtgacagaagtgagaacatttctggtgacatcaggccaccggagatcgatagccaattcgccctaggccatccaccgacaactacaacgatgcagttttttcagaattcatcgtcagaacagagaatggtgaaagaagagaacagtatcagtaacatgttctgtggaattgatgaccagtctgggttctggccatggcttgaccagcaacaatacaattgaatgtggtcgatctgttcttgtttgtattaaaattgtcgttttctttaagtggtcagatgaaccaattcatgtttcaagaatctatatttagtctatatgcaccaactaagctagtagtttttttgggtaatgtgatgtaagagaattaatgggggaaatattcatcatattatatgataataatcaatcatatgggccatatgattaaacattaaaaaaaaaaaaaagggcggccgctctagaggatccaagcggacggacgcgtgcaaactaagtct

SEQ ID NO: 134863 - DNA, 482 bp, Arabidopsis thaliana
  unsure (1)..(482): unsure at all n locations
gtgtatttatgaagcagcctctatcggattctggcgaggggatgttaagatattgatagaagacattgctgcattgaaacctactgttttctgcgctgttcctcgcgtgctagagagaatatacaccggtcttcagcagaaactttctgatggtggttttgtaaagaagaaattattcaactttgcattcaaatacaaacataaaaacatggagaaagggcagcctcatgaacaagcatctccaatagctgacaaaattgtatttaaaaaggtaaaagaagggttgggaggaaacgtgcgtcttatcctctcaggagcagctcctcttgcagctcacatcgaatctttccttcgagttgtcgcgtgtgccccatgttttgcaagggttcgggtcctaccagagagttgtggggggacttttgtgtccattccaaacgaggtttcaatgcttgaaccggtggncccccggtncaaacgttgaa

SEQ ID NO: 134864 - DNA, 485 bp, Arabidopsis thaliana
gttggagtccgaaagcaatcaaaactcgtttgaccaggttccaagtaatattattgggattgttcctccagctcctgggaaccagcatccacaatttgagacttctgaccctcaagcacgtgatgcccttcgtcttcccagttttatgggccaacaaccttttgatacggcgagctactatgctcagttctaccgctcaggtcctgacagtgatggccgtgtttctcccttcgtttccccaggggttgcctccaaatttaatgggattacagtattgcctccgcattcatctcaaaccatgcaagagggtggaaataacttggtcctgtctacttgctagtccaccaccactggtaactcaagctgctggactaatgcagagctctatacctgtcacgcagcagcctgttcctgttttccgccctccgggcttacatatgtcgcattatccaccaaactacgtgccatatggatacttctcccca

SEQ ID NO: 134865 - DNA, 797 bp, Arabidopsis thaliana
  unsure (1)..(797): unsure at all n locations
gtccnnnnnnnnnnnnnnnnnnnnnnnnnnnnnnnngcccgtccgcggtaccggtccggaattcccgggtcgacccacgcgtccgaaaaaatcaaagctttttcttttatcttcaattctcctccgatgaggtgtaaaagacacaccgtcgatctcagcagcagcaacggcgtttgcgcttcttgcctccgtgaacgtctcctctctctcgccgcttccgccgccgtatcagccgccgtagaagaaatcaatcaaagaaatctaataacaataatcatcctccgcttttgattttccctcgctctgtttctccttacgttacccgtagaaaatccgacgccggagccggtggaggagatcctttagtttcttctaatcggagattcattaccacgccacagatagatctcgtcggatattcatgcaaagatttcgaatcgaatcgatcaaataaatcaaaacaaggtaaaaaagtatctagattctcgaatctattcagagctagatctgaagatttcgataccaatcccaaatccaacaatcctagattctcctcatgcgacgcgtctgagatttcatcttcttcttcctcttcacgttcatggatctcgacgattctctccaccgggcgacgtaaaaagcaaccaaccaccgcgtgttacatcgaagacgttatcgctgcgcgtagacctcaacgtatatactgcagaggaatgtcacctgtaagagatacggaacccgagcagtccgcggaatcaatcgaggaaatgaagagaactccggcgaccaaaactccc

SEQ ID NO: 134866 - DNA, 687 bp, Arabidopsis thaliana
acccgatcggttatttctgggtcgcgccacgcgttgcgatccatttgcttgcgcctctgccgcagccgccgtgggaacatcagttcaccgacacagtagtcggaaggaaatagaagtagcagattatgaatctagtgatgaagataggcatttcaagaggaagccgtcaaggtacgcgcgatcaccaccggtggtggttagtgatgtgagtgaagataaactccgatactcaaaacgtggaaagggggagagatctcgagcttgacatggattttcaaacatgtttttttttttttttgtataatcaaaaacagagaatgagaactcttctcgtcttgctgtaacgatcaaagagagagagctcttttgtcatcgaattcttttttaatttttgtagtggaattcgatttcgtaacttcttttattcttttataaataaaaaatatatatgggcggccgctctaagagatcctagcttacgtacgcgtgcatgctacgttatagctcttattatagtggccacctataattctatttctattggcgcggcgagttttacataccgtgcgccgacctggagtaataaatccccctggacgtttcacccccaaacttttaatattcagcccttttgactattcaacaattcccccccttttttcagtcccagtcctgtgggtggttata

SEQ ID NO: 134867 - DNA, 938 bp, Arabidopsis thaliana
  unsure (1)..(938): unsure at all n locations
tcagctccggattccggttcgacccacccgtccgcttctagaccatagatttgttcttcgaaaaaaccgttctttcttttgcctctcactctagttccttctctcatttctacttctctagcttcactgacttgctgctaccactaaatcttggcatttgtggaaagttgggaatttagggtttttgggtgtgtgtgtgaaaacaatggaagcactagttgttgatgctggctctaagttcctgaaagcaggagcagcaatccctgaccagtctcctgcaatgataattccctctcaaatgaaacgaatggttgatgatgggtcttcttcagctgataaccccaccactgtctttgaggatgtcactcttgatcctattgaaaggggtttgattagagattgggatgctatggaagatctgttgcgttatgttgtctacactgggcttggatgggaagagggaaacgaaggcaatatactttttacagatccactttgtactcctaaggctattagggagcaattggtgcagttgatgtttgaaacattcaatgtctctggattttatgcatctgagcaagcagtgttgtccctttatgctgttggacgcatctccggttgcactgttgatattggtcatgggaagatagatattgccccagttcttgaaggtgcagtacaacacattgcctcgaaacggtttgagctaggtggaccgagctaactaaattatttgcccaagagcttggaaaaacccaacccgtcgatgaatctcagcatgtctgatgttgaaaaactcaaggagcagtatccaaactgtgccgaggccgaaattgtttcaaaaaaacccaaaactgtgaatcgggagganncntttcctgatggcaggtgtnngnatcggnggaanntcncggttgggagctttttnacnccanaac

SEQ ID NO: 134868 - DNA, 751 bp, Arabidopsis thaliana
acaaaaattaaatagaaattaattaatgctttacatgaatcaaaacactcagaaagtagtatgtatcaactgttttttgtcgttaataaacctctataaatgatattattaaaccaataaatagaaaaaaagttaccaaaaacaaggactgcaaatgaaagagctgggactcgatattatttgatcagatatgtcaaacatggaatcagcaagcacaacctcttgactgatctggatcaataatatccgtaacagagtcatgatactggcctctaggatatatgtcattgctttgtttacgttcattagagagagcaatgtgtgcaacactcaaaaaagcttcatcgatattggtatcttccttcgcagaggtttcatggtacggtatgtttccctttgagccacaccactcgatggctctcttatttgaaacaactcggctgtttccgccatctacatcggtcttgttcccgatcaaaacaaagggaaatgtctccggttccataggatttgcctgtttgaggaactctgtgtgccagttattgagagtttcaaaagatttgagattgttcacgtcgtagacaagaacgcaacaatcagcacctctatagaacgcggcccctagactttgaaatctctcttgtccagcggtatcccatatctgtaaagtgacagatttttcatctatatgaagctctttggtcacgaaatctgctccgatcgtagccttatattgcttgttaaatttctt

SEQ ID NO: 134869 - DNA, 479 bp, Arabidopsis thaliana
  unsure (1)..(479): unsure at all n locations
aagatgtaactgggtatatttaaaagtagaggaactaagacgtaactggtttatatgatacatgtatgagtacaaggtattattattatcattgttgttgttgttgttgttgtctgaggttttattaaagtgagagtagcttatgggttcacagaatcagatggtggaagaaggagcatctggctgcttttccggtagtgcattttgaaacgcaggcagttcgttgtatgattcgtaacattttgcaagagttgggtacggttccatgttaatctggaatctgttgattgctccgtggatctgtggtgctagaaagagatcagccaggtaaatttcatcaccagtcgcatgtttcccagcgcaattcaccaacagtttctcgagagctgtaaatccctttgtgatagcattattaacccaggcagncttctcctccacantgacctttcccccganaaacccaataacagccagatttg

SEQ ID NO: 134870 - DNA, 589 bp, Arabidopsis thaliana
  unsure (1)..(589): unsure at all n locations
atgatcgctcccggtcaaacctcctcccttcttctccgcgccgaccaactctccggcggtgaatttctcatcgccgcaactccttacgtcacttccgtctttcctttcaacaactcaaccaccgtaggattcatccgttacaccggtaaaaccaaaccggaaaattccgtaaacacacggcggagacggcgattaacggcaatgtcgacagtcgtagctctcccgaatatgctggatacgaaattcgcgacgaaattctccgatagcatcaaaagtctgggatcagcgaagtatccatgtaaagtcccgacgaagatagacaagcgagtgatcaccacggtaagtctcaatctcccagggattgtcccgtttaaatcagacctgcgcacgggttacggcaggggaaggggattctttcgcattcaattaaccaacatcttcattttgttaagancctccggtatnngttnctcgnaaagcttcctttaaagaaacaggggcaaaaggngntttnttnacttggatttcccaggggaaacncccnaccaggtttcngttttacggggggtaggnccggttttgnnaanat

SEQ ID NO: 134871 - DNA, 508 bp, Arabidopsis thaliana
  unsure (1)..(508): unsure at all n locations
ggaaaatatgtttctattaagatttcacaaaccattttgacaattaaaaccaggaaagacaatctatatttatatttaaacactcttaattagcgaaaccaaaaccctaacaaaaccaggtaataataatagaagacattttttaacactgaggaagatcatgaggaggaggaagcagagtttgtgaaggaagaggtccatctttgacgataaaccccattgctaaaccccacgaagtatgttgttctagatgacagtgaataaaccaaactcctggattatccgcatttatcctaatcgccgcccatcctcccgtcggcactgcaaaagtantcctctccggcggatccaccaagttgtaccttttcggatccttctccggggtcaaaattcccaatcctcttnccactacgaagaattgngtccgngacatgtaaagntgatcccgtgttaagacccgtcctgacacgttcatccgtcgatcgctcgaagtcgacgatctggtnnt

SEQ ID NO: 134872 - DNA, 306 bp, Arabidopsis thaliana
ggcttttagcgtttagcttcatcatgatatatgatctttagactttattattgttatattattattattatttattttttgtgtgtttgttcttaattattttatgtataaccaaaagaaagaaagaaaataaggacagatccatagttgagtcagtagtcatcgtttgtagaaagttttgacagtatataatttctgattatatttgttaaaagttcatatgttgactttgttttccttttaaaagtactttcaggtgacttgtgtaatatattcacacttgtaataacaacaattttgatctta

SEQ ID NO: 134873 - DNA, 498 bp, Arabidopsis thaliana
caaaaaattcatttttgttttcttttagagttcacaagttcttcgttgttcagctactcccactgtcataacacgaagtgggtttttttctgatcaaagaacaaaaacaaaaatggatatctccgccttgtttctcactctcttcgccggaagtctcttcctttactttctccggtgtctaatctctcagcgccgctttggatcttccaaactcccactccctccgggaacaatgggttggccttacgtcggaggaactttccagctttactctcaagaccctaatgtctttttccattcaaaacaggaaaaggtatggatcggtgtttaagactcatgtattgggatgtccatgtgtgatgatctcgagtccagaggctgctaagttcgtgctggtgacgaaatctcatctctttaaaccaacttttccggcgagtaaagagaggatgttggggaaacaagccatcttcttccaccagggtgattatcacgctaaac

SEQ ID NO: 134874 - DNA, 501 bp, Arabidopsis thaliana
  unsure (1)..(501): unsure at all n locations
ggccgccctttttttttttttttgatggggaaatatcatacactctcaaaacgtatggttacaatggaacattacatgactttcttcacaacccccagaagaaaaaaattctgaaaagggaaccaataagaaaagaatcaaaaacacaatttttgtataactctgtttctatcattgcattactgcaagctctataccctgagtccatcataccaactccatcagaagcgggtcgccctcagccatttgctgaaccaatttgatgaaatcttgttcgcttgatatgctccacgggtgaaccgcaggtgcttttagcagaatacagactcgaagaagtgttaaacgaagctgatttcctcttatataccattgaaccgagaacggggcaaaattcctgaggngaatccatagncaagaagacattggcacagcactttggtaatgcagtccatatcggcccgggtnaacaagntcgtaagcagtncagcttaggcctagaat

SEQ ID NO: 134875 - DNA, 711 bp, Arabidopsis thaliana
gcttccgattgtagtctgttgcagctctcgtgacgaacttgacgccgtctgttcttccttatccactcttccttacatttccttagccgctttgtacagcgatctagcagatagagaacgagctatggttatagagaaattcaggcaagcaacaatcaactggaaccagcaacttaactctgtggtagaagaaggtttggaagagagtgaaaacggaaaagaagaaaagacatctcatttggtagttgtgaccgatgtttgccttccgttactctcatcaggagaatcttctctatccgcacgcgttctcataaactacgagcttcctacaaagaaggaaacatatacaaggcgtataacaacttgcttagcttcaggtggaatagtcataaacatggttgttggaggtgaagtaacgactctcaaaagcctcgaagaaagcagtggcatactcatcgctgagatgccaatcaatatttctgaaatcttataaccaacacatggatctccgatctgaagaattctaaatggggttaatggctcttaagccttttgaaggactagaggagatgaatggtggattgataacgctttatttgtttgattgtatccagatgtctcttgaccattgcgctcaaatcatcaaagccaaacttattgtaaaaccagtttctttttttcttatattattaaagaatgttgaaacgaaag

SEQ ID NO: 134876 - DNA, 541 bp, Arabidopsis thaliana
  unsure (1)..(541): unsure at all n locations
gaaagaaatgagagatgtttttgaaacatgtacaaaggtacagaaggggtaacaccgaatatcagctagaaagaagcaacaaatcaattcacaaacgagacatacatatagacataacatatacttcaccaaattcatattttgtcatcagccatttcctggtgttctaacaccaacaaatctgatgataagtaaagccttagaaacgccgcacacttgtgaaattcaacaactttttgccatcctcaacattcacggcgataatcacggccatagctgtagtttggcctagctccgaaatcactctcagacctctctgcagcagctctctcttcctctaagctcaatccacccatcgtcttctgcaactgcctgtgatcataaggagagtaatcgactggnggccgatgggccattanggactccgtagctaagacaatcgngagnccaagggggantttggnttgncncgggaaccagaagggatcaagggngctnagggccatangnggggnccgaagtagaaccgggggggtaaggt

SEQ ID NO: 134877 - DNA, 494 bp, Arabidopsis thaliana
cgcgaagagaagctagcgttttggataaacattcacaatgccctcacaatgcatgcgtatctagcctacggaactcacaaccgtgccagaaacacctcggttttaaaggcagcttatgatgttggaggctatagcgtaaacccttacattatccaaagctcaatcttaggcattcgcccacatttttcacaacctttgttgcagacattgttttcgccatcaagaaagtcgaaaacttgtaatgtcaaacacatttacgccttggaatatcccgaggcattggctcattttgctctttcttcaggattttctactgatcctccggttcgggtttacacggcggattgcgtattccgggatctaagaaaatccaaagaagagtttataagacacaatgttcgtatacacaacgagacacagatattgttgcccaagattgttcattactatgctaaagatatgtcacttgaaccatctgccctcatggaaacaac

SEQ ID NO: 134878 - DNA, 507 bp, Arabidopsis thaliana
  unsure (1)..(507): unsure at all n locations
aactgtgatcggtaacttacagaactcgtcgaatcttcagagctcaatacagaatgggctaaagttttcaaagcgagtcgcataaaacaaattgataaaacaaaaagagagagcaaaaagtcacaatgataatggagctaacaatgcataatctgttctcaagagtctaaagacataactaagcgattcctgacctgcgcagctcaagattcaccatgagcaaaatggcatctatctccatatgtacagttccctttagagtacctatcacagatcttgggttttgtaagttgctcccaggatgtgggttcccttcaggaccaccaatcccttgagggttccttcactgatccaggcctccctataagctctctcaccatcccactcgcgacattgatcctgttcaaatgtcccttccagctcgataatcttcaagtttggggcccttcagtgcttaatcggaatttggcccgttcagggaatnggtggatgggncccttccaagng

SEQ ID NO: 134879 - DNA, 471 bp, Arabidopsis thaliana
ttctctttctctttctacttttttttggttctgcgatttccatcaaaacccttttcccaacaatcttggttttgtacagagaagaagaagaagaagaaaggcacacaaaataacccatgtctggtttatacaataactcatcttacttctctcctgctcgagctgcttctcctcagattagaagcactcctgagatcgacagctctcagtacttgacggagcttctcgctgaacatcaaaagcttactccttttatgcaggtcctacccatatgtagccgtctattgaatcaagagatgttcagggtctctggaatgatgtctaaccaaggatttggtgattttgatagacttcgacacagaagtcccagccctatggcttcttctaatcttatgtctaatgtctctaataccgggttaggaggctggaacggcctctctcaggagagacttagtggaacacctggaatga

SEQ ID NO: 134880 - DNA, 505 bp, Arabidopsis thaliana
  unsure (1)..(505): unsure at all n locations
taataacaatctccaaatggctaaatcatttgcacctctcatcgctgtgttatgcgttttggttctcccacttgcggccatggcggttggaacgccattccacattgaaggaagtgtttactgcgacacttgccgctttggattcgagacaatcgccacccaatatatccgcggggcaagagtgagaatagtatgcaaagacagagtgacactaaaatcggagttggttggggtggcggtgacgggacctgatgggaaatacaaagtcgccgtcagaggagaccgacaggaccagcaatgtctggcggagcttgttcacagtccactgtcccgctgccaagaggctgatcctggcagaagcaccgctaccgtgatcctcaggggttcaacggggcggcttntactngtaattcggcaacgcattgggttttttagggcggaccgttncntggnttngngttttcgnaaacgtnnctgagacggggtaaccgggtntttattantc

SEQ ID NO: 134881 - DNA, 543 bp, Arabidopsis thaliana
aagctcatatcacaaaacttttagatctcatttcatctttcttcgattctacctactccgattcaatcgatcttatcgagacatggatgctcgtaagagaggacgccctgaagctgctgcctctcacaactccaatggcggattcaagaggtctaagcaagagatggaatcaatttcaactggtttaggaagcaaatccaagccatgcactaaatttttcagcacttctggatgtccatttggtgacaattgccacttcttgcactatgtgcccggtgggtacaatgctgcagcgcagatgacaaatctccggccaccggtttctcaagtttccagaaatatgcaaggatctggtggtcccggcggcagattctcagggagaggagatccaggatcaggccctgtttcaatctttggtgcttctacttccaagatcagtgtagatgcttctttagccggtgccatcattggaaaaggtggaatccattccaaacagatatgccgtgaaacaggagcaaaattatcgattaaagatcatgaaag

SEQ ID NO: 134882 - DNA, 516 bp, Arabidopsis thaliana
  unsure (1)..(516): unsure at all n locations
gcatgaatcttttttaaaataatctgtaatgaatttttgatgaggaaaaagaaaaacaaaaatttaaaataaagaagaagaaaaacgaaagccacagggtcgctcacccgagagagaccagggcaggccttgaccagaccaccaccattgcagccactactggagaaaccagatatacacatgtgcgtctgtgtaatgcatgcagacatgtacttttggttgaagtaaccattataaggcttgaaggagcgttttgggcgagacgtacaaaacgctacttagcatcctgttttcgggcgtttaccacttgaattgaaaggcgaacgctttccacctccgcttggcccggactctcttncctcaggntgttcgagtttagcaatgccagttccctcagctgctggncnctttatggaatnttggcgantcgtcaaaggntttaggaactctccaataattccttgagnttgtcnagggnattncacaatacagntggantctgcncataantggant

SEQ ID NO: 134883 - DNA, 410 bp, Arabidopsis thaliana
  unsure (1)..(410): unsure at all n locations
aaaaaaatataaaatggaaaaactatcgtaattatccccggcatatcaaaggatgatcctacataagtaacagaacatacaacaaattcctctttcttgccaaggacatgagatttttttttttgaagggtgcaaatactttattttatatgggttatcttagatatgtctaaatagtctcaccatctttagagactcaacaattcaataaaatagaaataaataaaaactctaaataaacttctgtgttctgtttcatcaagaacataagatgactcaaatagcccggttatcgccgnctgcgaggtagcgtttgcggagagcggcgcncacgggagcgggtcgtccccgaagaaanccctggcgtggcgnatgacgagtaaaagggggncngttgagngcgtaaggat

SEQ ID NO: 134884 - DNA, 508 bp, Arabidopsis thaliana
  unsure (1)..(508): unsure at all n locations
ggccgcccttttttttttttttttttttttgattgagcgaaggtcttacaagtacgagaacgaggaggctagagaatgctggacaagtgtcattgtcaagtgctgagagctgatacttgtgaatgaattgattgattcaagattatttatgcggtatggagtactgaccgactctgcgtgaagatgggacactggtgatgcacacctagcagagcagaggaagactataggcatgagattagttgctgcctctggaggcaatcacttggcttgtgcccccgcatcaatgaagaggttggtagcattgagcagtcgattggcagtcacatctaagatgaagctagcaatctcctctggctgaccggcagtctcagccaatgtcacctgcttggcaaatgcatcagcagcgtcaaacagaccaggatcgatattacgtagaccatcagtttgactnggccnggggtgactgcagccncganatctgctggccgctcggggaaacacanaa

SEQ ID NO: 134885 - DNA, 721 bp, Arabidopsis thaliana
ggcgacgtcgatgcagtggatctttgcgatcatggtgaagtatccagagatacagaggaaagtatacgaggaaatgaagagtgcgttcgccggagaagaaggagaaagagaagagatcagagaagaggatttggggaagttgagttacctcaaagctgtgatcttggagtgtctaagaagacaccctcctggtcattacttgtcttaccataaggtcacacacgacaccgttttgggtggatttctcattccgcgccaaggtactataaactttatggtaggagaaatgggccgggacccaaaaatatgggaagatcctctaacgttcaagccagaaagatttctagagaacggagaagcatgtgattttgatatgacgggaactcgcgagattaaaatgatgccgtttggagcgggacgacggatgtgtcccggttacgcgctttcgttgcttcatctcgaatattatgtggccaatttggtttggaaattcgagtggaaatgtgtggagggtgaagaagttgatctttcccgggagcaaccagttcttcacaatgggcatgaaaaaccctttcaaagcaaatatttatccaaggagaaagtgatatttgcttttgttatatacataatcaaaaggcccattgggccaatttgtcatgtatattaacaactttgtctcatatgtattaaaacaattaaggcctttaatgggtttcaatat

SEQ ID NO: 134886 - DNA, 544 bp, Arabidopsis thaliana
cactgacatccacacagcctccactcattctcacctaccatctctactctactcgactacactacactacactccactgactcagtacgtcagcagtgcatcctctctacagcatgggctcacaatctcaacaacggcgctatgaaggcaaagtggtgctagtgactggtgcaggtagtggcattggtcgttccactgcattagcattcgcccaagaaggtgccaagctagtgctgggagggcgcacagagagcaagctgcagaaggcagcagagctgtttccaccagcaagtgtagaccgcccaggtggtctaccatgcaaggggcctgttgggctagaggaggtcaaccccgaagttagttgggctagcagtctcccagttcggtgggctgcatatagccatcaataatgctgccgtccttgaggttcataaggctgtggacatcagccaagtcagtgtcaacaatcaactggcatccaacgttcatagtgtcatatatgggatcaagcaccagctaagcgctatcggcaaatcatctacag

SEQ ID NO: 134887 - DNA, 653 bp, Arabidopsis thaliana
tggtatggctaaccggtggcttaggtgtggtccacgttctcatcaaagaaacgatcccatcttggtttctatcaactgacaaatcagaccgagaacaaggaccatcggatctagttgcagagctaagaggtcatgcccttgcctactttgtggtcctatgtggagcacttacttggggcgtggattcaagatcatctgcatccaaacgccgccgccaagcaatcttgggaagccacttggagttcatcgcgagtgccttagatgggaaaatatcagtgggatgtgaaacagcaacttggcgaacatatatttccggtttggtgagtctaatggtgagctgtttgccgctctgggtgacagagatcgatacagaagtgttaaagagtctaagcaatggactaagaaaatggggaaaagacgagctagcgattgtattactctccttgggaggtctcaaaacaatggattacgcagctgatttcatcattcatttgcgttcatagcttcttaaaaagttttgatcttctccagatttcagatagttgtttgatagatgtttttcttctagtgtttgcttccttgttgtgacttgtgttctctagctccagtgttgtgtgatgaaatcaatcacgcatatgtatagagagaaacag

SEQ ID NO: 134888 - DNA, 543 bp, Arabidopsis thaliana
acccacgcgtccgggtttctaaataatattttattcttattttgcattatataacactaacatattacatcaaagtttatagtgatatcactgattaaaattaaatgattatagatatgtatatgaacaatatgaatcatgcaggatgtaatgctgatatggggtgagcaagatcaagtttttcctttaaaaatggcccatgacctcaaagagtaagacccttgactatattctttctatttgatctaactaaagttaatcgggtaaccaatacctatgctacaaataccaagagtgcgatttgagaacgaattttggaattggtatagtaacgagttattcatattcgtgtgtttgtttgtatatttaccaggatgttggggactaaggcgacgctaaaagttatacaaaagacatcacatatacctcatacggagaagtccaaagaattcaatggctttgtcatgtctttcttattacctccttctccatccccataaatggaacatccatatttaactattaataaccattttttttttg

SEQ ID NO: 134889 - DNA, 461 bp, Arabidopsis thaliana
  unsure (1)..(461): unsure at all n locations
gttgaactagtattatacatacatacatacatcaaaagcatttgggtgatacacattagtttgaatgattcgagtaaacatcatcgagatctgatatttgatgatgcaaaagaaaagctgtagcttgacgcatcaaacctaaagtgataagtttcacactttgggtctatgccatcaagttatattcatctctttcgattaatacagagtttgtcggcttctatcggtcattccttcttggtttcctttcccttatctgcttctgataataatgtctgctcgtatacgaattgagtgagcagtgggacaaggatagctccaagaattgcgacttttctccaatccgggtggaagaaacgaaggatcagcaattgggngaccacaancccattaacccggggaaaaatccctcttgacttganccggncttccttggaaccctggattcccagtcccccagt

SEQ ID NO: 134890 - DNA, 730 bp, Arabidopsis thaliana
  unsure (1)..(730): unsure at all n locations
agaaaacatagaagatgttgttcacacttcatgcatttcagacaaccttaacaccaaactttcatgttcttttcaatgcctcgagacattctctttcccgaccccaatttctctgtctctccaaatcgggagacggaacttcagattctgattctgatcccgaccctccaaaacccgaaggcgatactcgcaggcaagaactcttagctaggatcgccatgattcagacatcgaaggtccgtttgacggatttcttggacgagagatcagagtatctcaccaagtttgctgaagaagccaatgcggagtttgacaaggttggagaagacgccatgaaagaccttgacgaagctagcacaaggatactggagaatatcgaaagcaagatgcaagcttttgaggaatctgcgggattgaacagattagagatcgaggagaacgataataagttggctgagtttgaggagaagattcaagtagacaggaatgaaggattgtcctttaaaagcttacgtgacaaaaaaccagtggatagagagcaagctngagaggnaactgnggaaatncaagaggttncccaagaaagtgcaggtccaagtcaagaagggntntttnccccggggtaattgggtttntggttctcgaatttccttnttccttcgttttttcaccggnttggggaaagccgaattntttggctntctttccccctnntacnaatncggttcgg

SEQ ID NO: 134891 - DNA, 495 bp, Arabidopsis thaliana
gggttggccatatgttcctgcgctctgctggtggacttgcttcagtttcttgagccatttttaagaaatgctgaactcggaggaccggttcatttcctatacaaagggacattgagagtattactggttctgcttcatgatttcccagagttcctatgtgattatcattttactttctgtgatgtgattccttcaagttgcatacaaatgcggaatattatcctcagttcttttccacggaacatgaggcttcctgatccttctaccccaaatttaaagattgatttgttacctgagatagtagaagctccctgtatcctttctgaggttgatgctgcgctaaaggcaaagcaaaattgaaggatgacgtggatgagtatcttacggcgaggcagcaaaattcaaccttcctaaggtgggttgaggacaaaggtacttctttcggccagcggggctagttcagctgggacccgttacagtgtaccattgatcaac

SEQ ID NO: 134892 - DNA, 442 bp, Arabidopsis thaliana
  unsure (1)..(442): unsure at all n locations
ccaagacagaaaaatgaacacctatgacgtaacgtgacttcatatatctatatatatgcatgaaatcccatctttaaaatttatacgtttaaatcaaccaaaatatgtacaaactcacgctttgtatactaactctgagttttcttttgttatctggattatcaaatacgggtattagcccgagtacaatatgaatctccaagccaaaggaggaaaataggaaaagaagtttgggatcaaacactattaaggggtctcaagatcgggtgcatcagggcagtaattcagggggggcgttccttccatggtaattaattggttgtaaacctaaccggccttaaccnanaaaaaaaataaaaacaaaaaattctgtgtcaagttgatctaatttgggaaagtcaatgacatattaagatatgtatcttacgcttcaagctgaacc

SEQ ID NO: 134893 - DNA, 546 bp, Arabidopsis thaliana
  unsure (1)..(546): unsure at all n locations
gnatttacggaaaaancnatgtaccataanaanaagttgacggatgtgcccaanatatattctagcacggaccataaattcnggaccaatttaatgacggctctcggncgnctaaagcttnaaatctgtattttaaaatatcaacggcccaggattcataaatccctcggtgccccccaaagccagtcagtggccattttcggcgacgggaaagtaggtccgccggctgctgctgcgttatacaatgaatgtttcctccagcaaggaaccgatctctcttgcattctcgattcccacaaccgagtgatgaggaaatgtatccgagaggacacgaatcgcttctttatcacgtattggatcaccgaattgtggagcgattattcctccattggcgatgtagaaattcacatacgatgctgcgagtcttgtccctgcaagtcttggtatagcttcaccatcctgagtgattccagacgattcttcttcagtcatataaaggggttccgggatataaacgtttaagtgaccttgaagtgttccgttccc

SEQ ID NO: 134894 - DNA, 491 bp, Arabidopsis thaliana
  unsure (1)..(491): unsure at all n locations
aaaaaaaaatgaaaattctactaaaaaaatacaaatgtaaattaattattcaaacttgcataattaacagaacaaaaatctaattgttatgccataatgcaagcaaagtttgatcggaatgatgacccaataatatatttcttagtcaacgaaccataaaatacaggatccaattaatgaacggctctcgttcgtcctcaagcttcaaatctgtattttaaaatatcaacggccaggattcataaatccctcgggggcgcgcagagacagtcagtggccattttcggcgacggaagtaggctccgccggctgctgctgcgttatacaatgaatggttcctccagcaagaacgatctctcttgcattctcggattccccacaaccgagtgatgaggaatgtatccggggggcacgatcgctccttncccgatnggtnccgatgngggggtatccccatggngngagaatccaacgngggnngctgcccgcag

SEQ ID NO: 134895 - DNA, 493 bp, Arabidopsis thaliana
aggagatccaaaaaccctagttgtgctagctctccgagttatcattttcaactattcgcgttgggttactgatattttcccggtcatctccggcgttaattttccgatcaggctccaaattctcaaagatggcaggaaaccaatctttaaaagattacttgaagaagtatgaaagtagtgatgttgtagagaagaagaagaagaagaagaagcagaagaagccatctaaacctgaaccaagaggtgttttagttgtcgacggagatccagttttggcaaaagcaggttgatcctgaagaggacggaaacggagatgatttcagcaagagggaacaccctctggttcgatgaagaccattgaaagttaaggcgattgagggaggttgtgaggaaatttaacggcaaaaggcgtgctcataaatcccattgcttgaggatggaagtgggtgggtaacgttacctctaaaccgtgaagacacacaatctaatattt

SEQ ID NO: 134896 - DNA, 615 bp, Arabidopsis thaliana
  unsure (1)..(615): unsure at all n locations
caaatagacgagctatgacgtcgcatgcacgcgtacgtaagcttggatcctctagagcggccgccctttttttttttttttttttttttaccaaaaaaaacttaataaaataaataaatttaattgtcattcaaaactttacaaaaaaaatatcacacgattcttaatcttctctatgtaacaagtaatcttctctaaatctccttctaatggagaaatcatacgaacgagttaacgtttctctgaatcttctcaagtcaagcttcacgttctgtccttgtagatagattttcttcgtatattcccatcctttgtcgtttagactatccggatctcggattacagggtcatctttcccatattcttcatacaaagagctctctttcggcgcaatcttgtaaccaacgtacttcaatcctagcttcttcgccggttctccataatatgtctctgccgcccagtccgtccctaatgggatgatctgaatgaaaacggttttcggtttcaagaaaaggaaatgagtcattgctgctccatgtacaccgatcattacatcgctcgtgttcaacgaacgataaatcttggnnatttangttgccttttgtggttttagat

SEQ ID NO: 134897 - DNA, 612 bp, Arabidopsis thaliana
  unsure (1)..(612): unsure at all n locations
aagatttgaaagtctaaactaaccgagttctgtttttgtaccggtttctcaacgttgagtttggttttttacgggtttcttacttaccggctgcatcagacagaccggacaagactcaggccatactagtatgtatagttatctcacatttcaaactagaaccagaattcaaacttcctcagtttagaatggttatctcctgaatcaaaccacattttgccgaacaaaatctgattcacatgtctgcaacggaccagagataagcctctatttccgttgctttcctctcattggtcttcttaatcagatccttctcagttccgttactacggtcgaccccatcccagtgtctacccggtttaatcccataccggtttgatgcagcttccaaccgtctcgtcaaccaactatgtttaggcacactttgtggtataatgaacccagattttttcatctcctcatcgtctcctagatccacaagagttgtctcgtactttcttttcttgaccaatgagccattgggatctccaaatntaactctttccttnatcagttggannangcncgggncnanccctgtcggngnaantgggttacccttcnaagncaagt

SEQ ID NO: 134898 - DNA, 498 bp, Arabidopsis thaliana
tggagatagaaaagagtttgttccaaggaagttaccttcggttcatctcggggttgaggagactggcacagtgagcactgaaatagggaacttgattaggtggaggaagaattttgggaatgttgtgctggttatgttttgtaacggtcccgttgaacgtaccgcactcgagtggaggttactttatggccggatattcaaaactgttgtgatactttcttctcagaagaactcagatctctatgtagaagaagccaaactcgatcacatttacaagcatctaccaaagatatttgatcgatacagcagcgcagaaggattttggtttgttgaagatgatacagttctcaattactgggaatctacttcaaggctgacaaaatctaaggatttggactaccaggcaaggtatcaaaggcttgggcatcagtgaaaccggccgggaactctgattggttttctgtacaagcagagttagtgaagaaaactgtaagtaca

SEQ ID NO: 134899 - DNA, 507 bp, Arabidopsis thaliana
ctcagtaacaaaaacaccgttccctagatttcctttcacctgaatctgaagatggagttctctaccgccgactttgaaaggtttatcatgttcgaacatgctcgcaaaaattctgaggctcagtacaagaacgatcctcttgattccgagaatctgctgaaatggggtggagctttacttgaactttcacagttccagcctattcctgaagctaagctcatgttaaatgatgctatttccaagttggaagaggccttgacaataaatccaggggagcatcaggctctttggtgtattgccaacgcgtacaccgcccacgcgttttcatgttcacgggtcctgaaggaagcaaaaaggggcactttgataaagcccctgattatttccggggggccggaaaatgggggtcccgggattcacacatatcgcaagtccttggattcctcactaaaggccccggaactgcatatgcagtttatgaatcaaggaatgggacagcaaatacct

SEQ ID NO: 134900 - DNA, 524 bp, Arabidopsis thaliana
gattccatctttctccgtttccggcgataatcttcatcgcttcttcaggttcatgtttttccagattctttgatgccttttatgtatctctgactctccacggtttcttaatatgaattcttcttcgcttcatttctgattcgcgatcgtcagattctctggtttgtttgaaattcgaatccgtgtgtctgatatttcgattcctggatcatttgttgattatctttagaatggagctaaagaatgtcaaagatgcgtttgaatcgtgttaccaaaaagcaggaacctatgctatagcaaaccgcatgagggtggtagacaaaaatgcctcaaggaaatcggccaaggcatttgaaaacggtaccaggagggtaatccatggatcctgttgttgctgatctgaagaaaacttttgaggagattgctccaatcaatctactagaagcgtctcagaaagaaataaatggggttcttaccaaatacccgaaagctcttgacaaaactctgaatccagatatatcgac

SEQ ID NO: 134901 - DNA, 431 bp, Arabidopsis thaliana
  unsure (1)..(431): unsure at all n locations
tgttcctgacaattatgattgccttgcaaaccttggagttgcttatcttcaaagtggcgatatggagctttcagcaaaatgttttcaagatttggtactgaaagaccataaccatcctgccgctttgataaattatgctgccgagcttctctgcaaacacagttcaactgttgctggtgccggggctaatggtggtgctgatgcttctgaagatcagaaggcacctatgaatgtcgcaaaggaatgtctcttggctgctctaagatcagattccaaggtctgcccattgcgtgggtgaatcctgccaattcatacctttaatggatgggtgatcacaggaagctcgggcaaatgtttcgagaaggcagccaagctttgatcccaactgtatggcnactaagnnntcctcgtttctgtccaacgggtcaaag

SEQ ID NO: 134902 - DNA, 527 bp, Arabidopsis thaliana
  unsure (1)..(527): unsure at all n locations
aancctncggtccggcggatcccggngcccctgccgatggagtgcataaaggttttagtatttggcttgatgtacctctagaagccttagcgcatagaatagctgctgtaggaactggttcaagaccattgctacatgatgatgagtcaggggacacatacacagcggctttaaaccgtctttcaacgatttgggatgcacgtggtgaagcatacactaaagccagcgcaagagtttccttggagaatattactttgaagctcggttatagaagtgtctcagatcttacaccagctgaaatcgccattgaggcctttgagcaagttcagagctatttagagaaagaagatggtatggctagaccagatggactctagttccagaaagttatgtttccccggcaacatctcatgaatttgtgcctagttttgaatgttgtatataaatgaataatactcctgtttgagcacattggctccttttcaaattggacccaaaaaatgaaaaggagccatttgcatttttat

SEQ ID NO: 134903 - DNA, 481 bp, Arabidopsis thaliana
ccgagttaatggtaccgagcttgattaacaaattacctggagcaatgttgttgatgactcggtatagattgttcttgaaccctggtttcccttacgaaaacatgctcaataggtaccataacgctactggtatcaccatgtgtgcttatctcaagcagtacaatgtctttaaccgaacttcaggagggcttatgcaactcaacttggggaaaccaagaccactttgaatatggttggctcatgctttcccttctttaagcttcccttgtttcgcggggttatctttaatttctacttggagttcccttggaatgggtactgtgggcctacatttgtagagaaccatgttctcaaggattttgctcagtctcagattgattacattcttggagacaaccccttaaaaatgagctatgtggttggattcggcaagaagtttccaagacgtgttcatcaccgaggcgccacgatcccaaacgac

SEQ ID NO: 134904 - DNA, 477 bp, Arabidopsis thaliana
gatggatatttaggaaaaaggttggcgatgttcttctagattgggacacaagatttaacatagcactcggaacagccaaaggtttagcgtatctacatgaagattgtgatgcaaggattgttcactgcgatataaaacccgagaacatcctattagacgataacttcaatgccaaggtatccgatttcggactggcgaagctcatgacccgcgaacaaagccatgtcttcacaacaatgcgcgggacaagaggctacttggctccagaatggatcacaaactatgcggtatcagagaagagtgatgtttacagctacggaatggtgttgctagagttaaataggaggaggaaggacctttgtcccatcagaaacttccggggaatgccattttcccccttttggctttcaagaagatggaagaagggaagcttatggatattgtcgatgggaagatgaagaatgttgatgtgactga

SEQ ID NO: 134905 - DNA, 382 bp, Arabidopsis thaliana
aactttgaaatggggaaatttaaactgaaaaaattaacgcgaaagagtgcaatacaaacgagtttttgacctaatcagttactaagaacttacggatactcctagcatgaaaaatcaaactactgttacaaccaaaaagtaaaatgctaaaaaataatgaaagttatttttcaaagggaaacaagtcaatgagaaactaacttggggctaacaactgaaccggttcggatcctaaatctctgctctaattaaggccctatttcttcaaaaacttggaacagcttgtagggactgaaccagctggcttaaaccggttgcgttgtcactggttggctccttcttccgcctcatctgtatgactttccggtggtggttcgagtgc

SEQ ID NO: 134906 - DNA, 387 bp, Arabidopsis thaliana
agtagtaacgtgttttcttgatgaacacaaggagtttgatagaagaacttaacggccccaacaatagttgcacacatccataatcatttacgattttaagcatctatacattgcatccagatacttataaaaatttccagaaagagaagttggattcataacagtatgttgtaaagaggtacttacttggggtggttgtggttgttgaacggttttttcattgctctctctaaatccatcttgcaatcgtctcgcaattttttcattctcacaaagctgttttgaaggtggctactctcttcactgaggatatcgcccatgctaagaaagagcggacttcactgggccatgagcttggattcttggtttgcagaaactgagtttccc

SEQ ID NO: 134907 - DNA, 458 bp, Arabidopsis thaliana
catgcttgcaaaagaatcgcttctcttgtcgcctctcctttcaattcttcactcggaaagctctctgttaactcctctagtgggtcagaccgagatgcgcctaagccgctcgatattgtctcgaacgatatcgtcttgtcctctcttagaaactcagggaaagtagcagtaattggcttctgaaggaaacgatagtccaacttggatcaaagatgatggtccttacgttgtggttgtagatcctctagatgggtcacggaacatcgatgctttcggtttcccacggggacctatatttggaactttacaattcggctcgttgagcttgatcatttacctgttgaagagaaagctgagctcaattctttgcagagaggcagcaggcttgtagcttccggttatgtgctatactcttcagccactatcttctgtgatacacttggatcgggaacacacgc

SEQ ID NO: 134908 - DNA, 336 bp, Arabidopsis thaliana
  unsure (1)..(336): unsure at all n locations
gtttggacgatgtgattattaatggctcacctgggtatctccctcctgagtgcttgcaacccgaacacgagctgccaacaccgaaatctgacgtctattgctttggagctgttctgtttgaactcatgacagggaaaaagccgattgaagatgattatctcgatgagaaagatactaacttggtgaggtgggttagaagtttagttaggaagaatcaagcatcaaaagctattgatccaaagatccaagagacaggctcagaagaacagatggaagaagctctcaaggattggttacctttgcacaagttagctcttccttaaaaggnggccaatg

SEQ ID NO: 134909 - DNA, 789 bp, Arabidopsis thaliana
tgacccactatcacggttagctgttacgcctgcaggtaccggtccggaattcccgggtcgacccacccgtccgcctaaatctctttcaaacttacaagagctcaagattcttaagctagaggctaataatcttagtggagaaataccgaaagagcttggggatttgcagaatctgttattggttaacgtttcgtttaaccgacttatcggaaggttaccatttggagaagtgttccaaagcttagaccagagtgctattcaaggaaacctaggtatttgttcaccgttgttgagaggtccttgcacactaaatgtcccaaagcctcttgtcatcaatccaaactcctacgggaatgggaacaatatgcacggaaacagagctagcagtggttctggaacattccaccgtagaatgttcctgagtgtttcagtgattgtagcaatatcagctgcgattctcatcttctctggagttataattataacgctgcttaacgcgtctgtgagaagacggcttgcatttgtagacaatgcgttggaaagcattttctcggggtcttcgaaatcaggaagaagcttaatgatgggtaaacttgttctgttaaactcaagaacttcacgttcctcgtcttcgtctcaagaggccgaaagaaaccccgagtcacttcttaccaaagtttcaagaattggtgaaggggtttttggaacagtctacaaggcacctttaggagaacaggggaaaaacttgcctggtaagaaaccttgtcccgtcgcctttttttaaaacct

SEQ ID NO: 134910 - DNA, 520 bp, Arabidopsis thaliana
  unsure (1)..(520): unsure at all n locations
aacgacgtgattatgctggtggtttgaaagttgggaataggattgaagacagggcagaagatggaagaaataagtttcatggttacaataatgttctggaagagcagttaaaagatgtagagatggatgttaagatgctaactgatgacaaactacgattggaggcgtccgttgaaaggaaggcacatgaagtagacattcttacttctaggatccaggagcttgagacccagttggatagagagaaagatgaatgtaggaggattacttcaagctcgaagaaatttgtgaaaggatataaccgtttcttgcgggcacaagatgatctaaagaggtcagaaagcccgtcttcagaaattgggaaaccaacttagtacgtatcttgcttggaagtgaaggcaataatagggttgtaggcctggatattttgaccgttaaggggcttattgncgnattttnagacctctttnacccnatnacggttcagatnctttttnatttccggaaancttntttgttc

SEQ ID NO: 134911 - DNA, 329 bp, Arabidopsis thaliana
gaactaatggagccgcctgaagatgggaaggttaatgtcgccaaagagctttatggagaaagtttgcagatttcgaaacttagtaataaagatcatggtcttgagaatttagatgatcccttttacggaagttcagatgaagattatagtgaagctcgcgtgttggacattgagaatgagcagagacgtgtgaaattccactcggctggatatcgtgatgggattgttgccgggaaagacgctattgcgcaggaaggttataactttggctatcaggaatcagttcttgctgggttacaagtttggtattgttagagggtgtttccagt

SEQ ID NO: 134912 - DNA, 430 bp, Arabidopsis thaliana
  unsure (1)..(430): unsure at all n locations
ctcacatctgaagtcaacaatctgatatctgagtacaccgcattgacagatgagtcccgcgagttgacacaggagaaaaacgacctgagagaagaaaagacatcgctgaaatcagatatagagaatctcaatcttcaataccagcagagattaaggtcaatgtctccatggggagctgcgatggttcacacagtcatgatggctccaccaccctcctttccataccctatgcctattgctatgcctccngggtcaatccnaatgcatccatcantgccatcttacacatactttgggaacnaganccntagcatgatcccagntccatgtcctacatacatgccctacatgcttcctaattacagtngttgaggcaacaatccggtgnacattccacaggnaccccggttacccntatttgggggaacct

SEQ ID NO: 134913 - DNA, 303 bp, Arabidopsis thaliana
  unsure (1)..(303): unsure at all n locations
gcgtccgtgattcgggtcgggtcgacccgtttacagtgaccacctttaatgttgagcgaggtgagatttataccggaccggaatatacttcgacggattggtctttgacgagtctagtgatcaggtcaattgaatttcaagttagtttgatgattacctttataaggtttcctccatggttaattagtaaatgtttgagctttggttttgatccgtatcgaacaatgaggcgtggtagacgctatttagtatcgtggattgttgggttatgtgattcaggggttaaaagatgntaaagcctgt

SEQ ID NO: 134914 - DNA, 412 bp, Arabidopsis thaliana
  unsure (1)..(412): unsure at all n locations
aagaaaacgagaacttcttcttgtctcagagtacatgccctatggtagtcttgacgagcatttgtttgatgaccagaaaccggttctttcttggtcacagagacttgtggtcgttaagggtatagcctctgctctctggtacctgcatacaggtgctgaccaagttgttctgcaccgagatgtcaaagcttccaacattatgttagacgcggagttccatggaaggttaggggattttggcatggccaggtttcatgagcacggaggcaatgcagctacaacagcagcttgttgggactgtagggtacatggccccgggggctantcanaaatggggggtttccnctggaactnattttttaaccgnatttggggnttttcaancctttaaagnnaaccctttgnggngggg

SEQ ID NO: 134915 - DNA, 366 bp, Arabidopsis thaliana
ggccctaatactatcatcatatttatttcggcaaagccaaataagggaaaaatgttttcgacatttctgagcaaacatttaaacaataagtactatgagtctgatagtactcgagaggcatcttttaacggaggagactacatcacttttagaggaaaactcgagggagatgcgtatttcacaacaaggctcttcaaatcccatcttcatctttcatcttcccccatcacaatttctttctctgtgacatcagatgaaacctctaaacatggaatcctgctttctttctcatctccatcacacgggacggaatccattctcgtttcacgacaagaatccatctgtagattcaacaacatgttctta

SEQ ID NO: 134916 - DNA, 561 bp, Arabidopsis thaliana
  unsure (1)..(561): unsure at all n locations
aaagnntaccaaaantactcacctaaattaaagncagattcnctcacttattatgnttcaaatnttaccagcggcattattaaaaccctaaaaactagtagtgcttcaacatgagagattggtcccaggagtgaccccaagcttcttgcagaagtccaagtaatggttaaccctgctctgcactgcagctggacgcccaccattacattcaccaccgttgatcctcctcgtggttgcaccaaacccttggctcaaaaccggacgcacattcttgttccaaaaccacatggcacactggaaagccacagttgggctacgagccaccatatctgggtccttcaagagaggaagtccaaggaactttccggctgcaccatagttgtagttccatgtgatttggatcggaccgcgaccatagtagttctttccgggttgacaaggatatgttgtgcttggtgagcagtaccttcctctggctatttcttctttgtaacaaaaacttccagattcgtgagagaactgagccaacatggcggcaatctcacgcttagcaacagttcc

SEQ ID NO: 134917 - DNA, 511 bp, Arabidopsis thaliana
  unsure (1)..(511): unsure at all n locations
gcggccgcccttttttttttttttttaccttaagagacatcaaccacacaatatttcttctaatctcttacaaattttataagttctggtgttttcgacttcactttattattcgatacgaaattcttaaccagacgacattaatgaaaaaccctcataaactagtagtgtcttcaacatgagagattggttccaggagtgaccccaagcttcttgcagaagtccaagtaatggttaaccctgctctgcactgcagctggacgcccaccattacattcaccaccgttgatcctcctcgtggttgcaccaaacccttggctcaaaaccggacgcacattcttgttccaaaaccacatggcacactggaaagccacagttgggctacgagccaccatatctgggtccttcaagagaggaagtccagggaactttccggctgcaccatagttgtagttccagtgattggancggaccgcgaccatagtagtctttacgggttgacaaggatatg

SEQ ID NO: 134918 - DNA, 522 bp, Arabidopsis thaliana
aggacggagaagcatttcaagggtagaagttaaggaaacaaaaaagaagaaattagagtatttcccaaggattgtgaaccaaaagatgagagaaagaaagataatggagattgttgatcaaaggctgattgaagttaatgaggtagatgaagaggaagtgatgaaattggtgtgtgtggctttgtggtgtatacaagagaagtctaagaaaaggcctgatatgactatggttattgagatgcttgaagggagagttccggtgaacgagccaccggattcagatgttgttgtggtcgatcttttggcggctgatgatgatgatgcaagtaccggtgttcgacgggtagtaaatatcccgaaattgcaaatccatagggagaggaatttccgtttatcatccatttgctctagtatcatatctcccatctttccacgctagtaatttttgggtgttcatattgggtttgtttcaatcaaaacctgagtatgtttgggggttcaattatcaacctttgtccggtt

SEQ ID NO: 134919 - DNA, 653 bp, Arabidopsis thaliana
gaatttagccctgatcatgaggcagaggacagggacgcttggttcgatgaattcattgaaaaagtagatggaaaagtgacgttcaaaccggttgatttcgatgagttagccaagaacattcaagagaagattggttcacattttgagcggtgctttggatccgaaacacatctagaacttgataaagaagtgatccttcagattctggcggcttcatggtcatcattatcatcgggcgaagaagaagggagaacaatagttgatcagtggatgcaaacagttcttgctcgaagctttgctgaagcaaaacagaagtacggttcgaatcccatgttgggcgtgaagctggttgcttcttctagcggcttagcttcccggagtagaattgccggcgaaggtggatgtgatatggtgacatgcatatatataaatgaggtaataataaagagttataatcctcagattgtttttctcatggaaagttttttgcttgtgtaaattacaatgtaaaatggctaagctttcaccttgggagatagggttgtttgggagtcccattttgccacatcttttttggcattttgagttttaggtatttctcctaaaattttccccaacttccaaatttaaatgaattaaaccatcttctctgt

SEQ ID NO: 134920 - DNA, 562 bp, Arabidopsis thaliana
  unsure (1)..(562): unsure at all n locations
gattccgcgtctagtgataacaagtcaaacttgacgttattctcggatgtggttgcctcttcctccccagtttctcaactgtgtagggaagcttcaacttcagggcataacccagtttgcaccacacatagtagttggacagttattttaaaaacagcttctatggctagcggggcaattaggagatttcaagaccgtgtattagggccgagtaggacgggtatttccagcagtactagtgagatatggctcctgggtgtctgttataaaatctcagagggtgaatcctcagaataagcagatgctggccgtgtattggccgcattcagacaagatttttcatccttaatactgatgacatatcgtagaggttttgagcctattggggacacaacttattcctagtgatgtaactggggttgcatgcttcgaaggggcccaattcttttcgacaggggttgctttttcaaagcctggaaggccttggggaaaaggntcccngccccggtggaatacttgggctttggccttttgggaacttggtcagatctggtcnaatttc

SEQ ID NO: 134921 - DNA, 458 bp, Arabidopsis thaliana
  unsure (1)..(458): unsure at all n locations
cnaaagggcaaccctttaanaaacgacgacatggcccattgccagtttttaacatgcccaccaatacagagaaagctccatgaaccacgagcatgacactcgtaaatggtgcacacattgaccaaaacacaaatgattacgagtaactcctgattaaagagctctggcttaaggtgaacaaagtctagaactagagagagcaaaaagatcctggtgaccaacaataatcaattagctagattagatacattgacctttgcaaatgaacaaagatccagcatgtttgacattgtacataagacattcagacaactgacccatgctcatcaagtcctcttatgaacgtgacaagactcctttcgagcttggtattgtcccaccgcggcgtggatcagactctgttgcttgtcggagagctcttgcaaaggccttaaaggtcgcttctattatgtgatgcg

SEQ ID NO: 134922 - DNA, 777 bp, Arabidopsis thaliana
tgggatttgtggtgatgggattcgttggattcttcgtgaagctcgttttcatcccaatcaacaacatcatcgttggatcttcttagtgtagtactttctttacgaggtaattgatctcgcattatatatctacattttggttatgttacttgacctatagtcattgattcaatagttctgttaattcctttaaagatcattttgactagaccacattcttggttcattcctcaataatttgtaatcatattggtggatatagaagtagattggttatagatcagatagtggaagactttaggatgaatttcagctagtttttttttttggcgtattgtctcaaaagactagtgctttgctgtctccattgcttctgctatcgacacgcttctgtccccttgtatctttattatatctattcggcccatgggttttgtttgccctgtattcgttcgctctggtgtcatggatggagtctctgttccatgtttctgtaatgcatgttgggttgtttcatgcaagaaatgctgagataaacactcatttgtgaaagtttctaaactctgaatcgcgctacaggcaatgctccgaggagtaggaggagaagaacgaaccaaacgacattatcagccctttgaggaagctcttagttttgttattgtttttgtagccaaattctccattcttattccattttcacttatctcttgttccttatagaccttataagttttttattcatgtatacaaattatattgtcatcaagaagtatcttt

SEQ ID NO: 134923 - DNA, 659 bp, Arabidopsis thaliana
cacaccggcgacctgaaaatggaaacttcctgttttacccttctcggtctccttgtctccctctccttcttcctcactctctccgcccaaatgaccggaaacttcaactgcagtggctcaacctcgacgtgtcaatctctcgttggttactcaagcaagaacgcaacaacgttgcgcaaatatccaaaccctttttgccgtcaagaacctccgctcgatcctcggagctaacaatctcccactcaacacctcacgtgaccaacgcgtgaacccgaatcaagtcgtacgtgtcccaatccattgctcttgctccaatggaaccggtgtctcgaaccgggacatcgaatacaccatcaagaaagacgacatactctctttcgtcgcaactgagattttcggtggtctcgttacgtacgagaagatcagtgaggttaacaaaatccctgacccgaacaaaatcgaaaccggtcaaaagttttggttccctttgccttgtagctgtgataaattgaacggtgaggatgctgttcactacgcacatgtagtcaaactaggggaggctctcttcgggtgagatcgctgctcagttgggaacggacaacacgacgttggctcagctcaatggaatcattggggactctcagcttcttgctgataac

SEQ ID NO: 134924 - DNA, 518 bp, Arabidopsis thaliana
  unsure (1)..(518): unsure at all n locations
gtcaaaagctgaaatgtttccaatataaaaatggtacaaggacgtgatgcttctggtgaaacaatgtctttattttaatccgaactgtacttagatacacactcataaacacacaacaaaacattactagagaaggcagagacaaagcagagcacactgaatcaacacaatcacgaaattgaagcttgagctgagcgttgatgcatagttatcaggaccagcagaatctggacaagctggggaagctgtggtgaagatggtttggttggagtaaccagcatagacgcaatcacgaggtcgtcctgccaagaggcgttaagcaaagctccatccacattggggaaatgggggggcaggtttgccagtccgagggcttattctcaggtggtggattgaccgcttaaagccccattcttcaaggcgccacaagtacccttggcgcaattgtttccagtgaagacgtatgagttgttaacagaaccaggggctnccacggnctccnccagaggntnaccttt

SEQ ID NO: 134925 - DNA, 505 bp, Arabidopsis thaliana
aagcttcgcttgagatggaagggaagcaatatgagagaatgattgatgagaaatttgcttatgatgaggaagagatgaatattctcaaggagattctttttaaaagggagagagaaaagcattttcttgagaaagaacttgagacttacaagcacattgatgatgatcaagagacggaagacaacgagaagagagaatgcgatgaggatggagaaccgattgtgtatgatgttcatgtcattgaggataatagtcagactaaagtgagggatgatgatgtagcagaacacaaagagatgaaggaagaagagatagtcaaggatcatgattcagtatcatcacctacttcatcttcaacacatctcccataagtttctaattctgattgttgaactctgtttttgttaatgtatgtgtgtagatttggggtaattggtgattatcaatggccgttttaccttttaggtggtgtcacgcataagatgaaataaaaatgttttgattg

SEQ ID NO: 134926 - DNA, 522 bp, Arabidopsis thaliana
ggatttgaattttcctcctccgactttgaacaattctcctttgttgaacctcttcgacgatacaacgccggaactgaagctacttccgtcgtctcgttcttctcgtccgaacactagtaatttacagagtgtatgcacactggacaaggtgaaatcagctctagagagggcagagagagatcctgctatgttcaagaaacgtcaatcaccggatgatacggtttacgatcattataggacggaggctgtagcgtcaccggtggttgccggatgtcctggttgtttatcgtacgtgttggtgatgatgaataacccgaaatgtccgaggtgtgataccattgttcctttgcctacaaatcctatgaagaagaagcctaagattgatctcaacatatcaatctgaatgttttggagtttatattggaacatttttgtaaatgatagataacaattcagggggtttattttgtaaaacttaagaaagaagaaaaaattgatggtaaggaaggaagatttgaaggg

SEQ ID NO: 134927 - DNA, 635 bp, Arabidopsis thaliana
  unsure (1)..(635): unsure at all n locations
cttcgaaactaatatcagagatagatttagaagctttttcaatggcggcgtttttcctttttgcaaggagacgcttctcctgagaaatcggacgcgtgggtcgacccacgnananaaaaacatctctctgcttctttagtttcacatctcacacaagtctttgctctctcttaacagtttttcttctatcatctttaaactatgggaactgttgtgtatcaacaagggtttcagtctcagcttaatgagcctagggctttaaggcttaggctatcttcaccaaatcctcacttttctcaaccatttggtttagctctcaaatctcatttacttgactcctctcatgcagaggacacccgaaaccgtaacgatgacaaagctgctgcttccccggtctctgactcgagtggctggagctctctccagtccctatcctctggctcctcctcctccacaaagacgacgacaagctctgagaaagagagtagttactatgttcaacggccgtcttcttgtagagctctaagggaccagagcttagcattgtgcactgagatctcggaagcgatctggtctgtgtacagnattntgngtgtcccgctgcggnaccagatcnggggaacangggagngttt

SEQ ID NO: 134928 - DNA, 593 bp, Arabidopsis thaliana
  unsure (1)..(593): unsure at all n locations
ccaaaagaaacaaaaccacctcgaaaacaattgagacagcctccttctgttcctttcatttgggaagagcggcctggcttccccaagaagaattggcaaccttcactagccacttttgtgccttctcctcctccgcttccgccacctatcccagtcccggttaagctggtaacatcagttcctttccgttgggaagaaacgcctggaaaaccactccctgcttcctcaaatgacccacctcagcttccacatccaccattggaaaccgctacgccgactccattaccgcctccagttcctgttccggttaagcaggttacttcgggtcctttcgatttgggaataaacttccaggggacaaccattacccatggcttttgttgactaccagtccacctgagctgttggatcaaccgctgccaccgcctcccatgtacggtgatgttgaaaccagcagcgatatttttgatgatgcaagcagtgactccttcagctctgtgccgtctctattagcaacaaaccgctcggtttcgatatccggtgctgntgcggtggatgaatttgatgacaacctgaatacagtgactagctcg

SEQ ID NO: 134929 - DNA, 511 bp, Arabidopsis thaliana
  unsure (1)..(511): unsure at all n locations
agagaattttattagtctctcaatatcattttccacaaaacttatcatgtcatcatcatcatcatcatcgtcagccaccgatactaacataaagccatcgtcttcgttgccggcggtggagtctgtcacgtgcgacacgtgcggtttcgctgaagagtgtacgccagcttacatccaccgtgtcaaagaacggcataagggacactggctttgtgggctttgcgcggaagcggtaaaagacgaggtggttcgatcttccactcgtatctccgtcgaggaagctctccgccgccacacgacggttttgccaccgtttccgttcttggagtcccgatgaagaggaaggttcccatatccgtcaatttggtaggattctacggcggaccttcgacgggtctccacggggaaccaccacggggacaagctcaattggggtttcaccgggattccngggtnaagtnagcgnggtngtttttcnntttggngtttttccgttttttnttaaaaattg

SEQ ID NO: 134930 - DNA, 503 bp, Arabidopsis thaliana
aaaagcatcataatctcgatgagttaaatccatgtatctcataaccctaatcaccacttagctagtaaaaggaaaggaaaataaaaaggacttgtgtggtagaaaaggaagatgagcagtagcggaaaccctagcagcagcagcggtggaggaggaggaccgtgcggcgcgtgcaagttcttgagaaggaagtgtgtcgctggctgcatcttcgctccttactttgactccgagcaaggagcggcgcacttcgcggcggttcacaaggtgttcggagcgagcaacgtctccaaactcctccaccatgttcccgagcataaacgatccagacgccgtcgtttcaatctgctttgtaggctcaagctcgtctcagagaccctatcttcggcttgcgtctctaacatcgtctctcttcagcaacaggtggtaagtttgcaaactgagctttcatatctacaagcacacttagcaactctagagctgccacaacctcaaccaccaca

SEQ ID NO: 134931 - DNA, 515 bp, Arabidopsis thaliana
agctggtggctgaagcagctggaacacccctgtttgagattttcgttattaaagacactgacggaggatatgttatgcaggtggtgtatgtgcaacacgtgaagcaaaacctaaccatttccgagaattccttttcaaaagtacagcaatcctcgaaatcctcgatcaatgacccatccattttagatgtacgaggaagtgaactgaaggtggataaaaaagaagatacacaactaaatgctggggaaccaactgaagaaggaattaaaaatgtgataaaatttctaaaagataaaatcccagggctaaaactgaaagtaatggatgttattaaaatccctgaggaagagattgttggcagtgatgacgctactgaagagctggttggagaaggcactgaggaaacaaattcttctgatgatgaagaagaagtagaagaagaagaaaatgacagtattgaagcaatctcatctatggatagtgcagattatggaaagcattcaaacactaggttt

SEQ ID NO: 134932 - DNA, 716 bp, Arabidopsis thaliana
  unsure (1)..(716): unsure at all n locations
ctagggtttctgaaatcgaggagagatccaatcggcaatggcgaatcaagtgatcaccggaatcaaagaaacagctcagtcaattactggagcggctcgtccatggggcgatttcctcgatctttccgccttcagcttcccttcctccatcgccgatgcaacaactcgcgtaactcagaacctgactcacttccgcatcaactacagtatcattctctctatcctcctaggtctaaccctaatcacacgtccaatcgccatcctcgcgtttatagccgttggcttagcttggttcttcctctacttcgctcgcgaggagccactcacgatcttcggattcactattgatgacggcatcgtcgctgtgcttctcattggtctttcgattgggtcgctagttaccaccggagtttggctcagagctctcaccaccgttgggatttggtgttctggtttttgatcttacacgctgcgttaagaggaacggatgatcttgtgagtgacgatctggaatcaccttatggaccgatgctctctacctctggcggggggtaacgacgggggctcgtnggngattacaaggggaatcttnatcaacaagaatttggtaaatgaanttgggggattttagggttttngggnggtttggggaaattggcaaaaggntggggttgggggtccccccnaaanantggnaaannaaaaaaatttttttt

SEQ ID NO: 134933 - DNA, 380 bp, Arabidopsis thaliana
aacatcaatcctcttcctctaaaccggttttcgtcttaaaacatattttgtcattaacaatgtttaaatgggccacaaaacaaacaatgacaatttacaaaacaacaaaaccctaaatccccaaactcattatcaaatcgtgttgatcagattccactgtaatcaccacgagcaccgtcgttaccaccgccagaggtagagagcatcggcccataaggggattccagatcgtcactcacaagatcatccgttccttttaacgcagcgtgtaagatcaaaaccagaacaccaaatccaacgggggtgagagctctgagccaaactccgggggtaactagcgacccaatcgaaagaccaatgagaagcacagcgacgatgcc

SEQ ID NO: 134934 - DNA, 580 bp, Arabidopsis thaliana
agtagttcgagtaatctttgtttacctggttcgcttgatttttttattgttcgtgggaagattgttgtttgtgatagaggtgttaatgctagagttgagaaaggagctgtggttagagatgctggtggtttagggatgataatggcgaatactgctgcgagtggagaggagcttgtggcggatagtcatttgcttcccgcgatcgctgtagggaagaagactggtgatttacttagggagtatgttaagtcagattctaatccaactgctcttcttgtttttaaaggaacggttcttgacgttaagccgtctcctgtggttgctgcttttagctcgagaggtcctaatactgttactcctgaaatcttgaagcctgatgttattggtcctggagtgaacattttggctggttggtctgacgctattggtcctactggtcttgacaaggactctaggaggactcagttcaacatcatgtcaggtacgtcaatgtcatgcccacacatcagtggtttagcgggtcttttgaaagcagctcaccctgagtggagtccgagtgctatcaaatcagctcttatga

SEQ ID NO: 134935 - DNA, 515 bp, Arabidopsis thaliana
  unsure (1)..(515): unsure at all n locations
gatggtgattggcttccatggatccgctgggaaagtcctaaactccattggagcatatttaacaacagctcctcctactaagtcacaacttgtaggtggtctaaccggaggcgaaccttgggatgatggtcctaattatgatggcgtgaaaaagatatatgtcacttacattagcactcttataaggagtatcaatgtggactatgaaaaggacggccaagttgtaacacgttaccacgggatgaagaatggagatacagaggagtttgtgatagactatccaaatgaatatttgatatcagtggaggggacctacaacatactccccgatgataacgttttgggtcattaggtcgttgattttcaaaacatcaaaagggggaatctctcccacatatgggtttgtgtcaggtaccaaatttgtgttggggggccaaggtattgctattgttggattctttgggcgggttggggcttttgcggtttggggttttttnncannccncgaaatngaa

SEQ ID NO: 134936 - DNA, 434 bp, Arabidopsis thaliana
ggaacctacaacatactccccgatgataacgttttggtcattaggtcgttgattttcaaaacatcaaaagggagaatctctcccacatatgggtttgtgtcaggtaccaaatttgtgttggagagccaaggtaatgctattgttggattctatgggcgggatggtggtgctttcgacgctatcggagtttacttctctccaattccttcgtaattcgagactataaaggctataaaaccatatggttagatggaaatatagtcacgaacttcatcttgttttaaggctctcatatctacaatgatttactacctactccgatgtttctttaatcagtaatttctttcgagtttacaatctcttgtaataaaacaaggtttaattatgaaacctgtatttcagtatttaaaaataaaaatattattataattctg

SEQ ID NO: 134937 - DNA, 462 bp, Arabidopsis thaliana
  unsure (1)..(462): unsure at all n locations
aaaatgaatgaggccataatgagatttgagaaggttcggtcaattgatccttacacactaaccagtatggatgagtatgcgatgctgcttcagattaagtgtgattattccaggctaaacaagctcgtccacgatttattaagcgttgatcataccagagcagaagtatttgttgctttgtctgtactatgggaaaggaaagatgcaaggacggcattatcttatgctgagaagagtatcagggtagacgagaggcacatacccggctacataatgaagggaaatctacttttacaagcaaaacggccagaagctgcagcgatcgccttcagggctgcccagaaatttgagggtccgttcttcgttcatatcaaggcttagtccattcttatcttgcatttggtaanccaaggaggcntttttnccnccgggangcattgttcaatgnntnatncgnggnng

SEQ ID NO: 134938 - DNA, 504 bp, Arabidopsis thaliana
  unsure (1)..(504): unsure at all n locations
ccagaatgtcgtcttcttcttcttctccttcttcgtcttcccttaaacccattaattcaatttcctgataaacgagcagagagagatctgtcaaaatcacaaaccgtgaattcgggaagaataagccgatgatgcttcgtattgttcaaatcgcgtttctatgtctcgttctcgtcgccgggatctcgatctccacggcgatatcagagactgagactatatacgagatcctcctggcaaacggattaccttcggggatattcccgaaaggtgtcagagaattcaccttcgacgtcgaaacgagacgattctcggtttatttgaatcaggcatgcgaggctaaatacgagactgagatacattacgacgccaatattacggggactatagggttctgctcaaacctctgatttggcttggaatctgcgggaaacctatttttgtggttccggtaaaggatccgngngcgnnccnagtntggcttnaanctcggcggtgggtttt

SEQ ID NO: 134939 - DNA, 653 bp, Arabidopsis thaliana
  unsure (1)..(653): unsure at all n locations
gatagagagagagagagatccagaaaaagacgaacaacattggcgctgcaatggctgattctatcgtatgtggtggccgtcgaagtagtaatcaccctcgtgttgactctcccttaccctatgcttcttaagaaacgtgtagttcagcttgtctcattgattctccaacctgctgcttccatcgtcgccttcgccggatttcagctcctcgatatttactggaaggctgagcatagactatcttgttcatctgaggtttgcactgctacagaacgtgatcgctacgagaaatctatctacaagggctcagaggaacgtggttctatgcgcttgcaggaattctactctactggtgcatctaccgcatctgcaaatacaacaaagacctggagcgcttggaggcaaacggggaagagattcaaggnagagtaataatcttcacgagtatagggagttgggtcctcaaaaccattatataagtaaagcnttttttaattgcattttacggtccaaaattattgncctgaatgaaccaaggggnancgngaanagcctttgacaccnaaatgggnaaacaccagggccaatccnttggcaaattcaaganaccctaattttcggggggaatcctgacccgggggcncnannttttc

SEQ ID NO: 134940 - DNA, 501 bp, Arabidopsis thaliana
ccgcattcatcatcacctctcaattcattttcacgtctcctcgattgttcaactctttaagctcacaatatatacaaaactctgtttttgattttctctttgatcaaaatcaaaaaacgccgatcacaagttcacaacatgccgggaaattctcaccgccggggatccgacgtcatattcaccgtgatgatgatcgccttgctgacgtgtccaacactcatcaacggttcatcatcatcagatgcttctttagaagcaagaaagctcgatgaggtcgatcccataaagtgctctccaagctgcatccaaaaccctcctccggccatctcctctcaccaccgtcttccgccaccacctgcatgtcccttccaacccccggctcttttccaccgcctccggcctaaggaagtcagttcctactgcccaccgcctccgccggctaatttcttgtacatcacgggtccgccgggaaatctctaccccgttgatgagcaattcgga

SEQ ID NO: 134941 - DNA, 759 bp, Arabidopsis thaliana
cattcatcttcttcttcaatctctctcaacacaaagatgtatcaaagaagttatgagctcaatgatggagactctccagattcgtaaacccacttccctccccgtttctcaacgccctaatgcagcagccaccgccgacgatgagcctggtctcatccgccgtcgtctctcttctctatcactcaacctctcaaaccaaccagcagcgatcgcacctgcttgccccaggtcccaatctgttcccgccatgggagaacaagcaggaagctctgtgaaagaatggtgggaatggggttggtcatggatcctttcaagaaaacctatattcatcagagatcttgagcttaacaaagacgaagctaaatcgattggttcacaaaacagaggaagtataatgcacgttttcttcaaactccgatctcagatccgtaatttcatgggaccttcttcagaagattctcttcctctttcttgcaaatacaagcgtcaacgataaaatgattcatataaggttgagattttgtgatttgtctgttctttttttacttttgtgcaatggagtataatgaatgtataattcgtctttttttttttaaacttgatgttgtattttgctataattaatttgcctagattattattaatcaatttatttattttatttgtggttacgacgtttgtggctagtgcagttggtatttttgtatttttaaatagccagtgcaaatttatataaaaaaaaaaaaaaaaaagggcggc

SEQ ID NO: 134942 - DNA, 625 bp, Arabidopsis thaliana
ctcgtcgtcgtctctagtctgaactttttcaatctctcgcgatttcattcaatcaatggcgcctaagaaaatcggagccggcaaaggcgattcgagcatcttggcgaagatttcaaactacgatatcgtttctcagggaagacgcgccgcttgcgatgccgtctacgtgtcgaagaagctgttaaagagcaccgggaaggcggcgtggatcgccggtacgacgtttctcatccttgccgtgcctttgatcttagagttggagcaagatcatcgattaggcgagatagattttgagcaggcgagtcttctcggaaccccaccggtcggtgcgatgctctaaagtaactttagaaaccctaatccgtcgatcatatcataaatttgatattatcatgcttgtttctgctactcgattagaagctgttagtttccttccttgtgtaagattaggtttactcataagggatttgatgaatttcaattggctattttgaagattgtgtttgagcaatcttcttctaatttatttggcaatttatgatgtgggctgagattttctccgtacaagtgattattcttttaatctcatagctgtgactcactttgagtggagcatcaatcttcg

SEQ ID NO: 134943 - DNA, 564 bp, Arabidopsis thaliana
gaggcatcaagttacaagaacatggctgcaaaacttgagttcgacctaaaaagcttatcggatgcatacaacagtctagaacaggcgaattaccatcttgagcaggaagtgaaatccttgaaaggaggagaaagtcccatgcagtttcctgatatagaagccattaaggaagaagtgagaaaagaagctcagaaagagagcgaagacgaattaaatgacttgttagtatgtttgggacaagaggagagcaaagtcgagaaactaagcgcgaagtgatagaattaggagttgatgttgataagcttttagaggatattggggacgaatcagaagctcaagcggaatctgaagaagactgaccattgaacaagtagtagagattctatatcctctaaaatgctctctcatcaggtaatggaacttgtacagtcttgggtggtttattttgatgtttgacaattctctttgcttaatcttttagttataactctttaattttctaccaacttttagattccttgaaacatccacatcttaccattagaacccaatttggttaggttc

SEQ ID NO: 134944 - DNA, 427 bp, Arabidopsis thaliana
  unsure (1)..(427): unsure at all n locations
caagaaacaagaaaaatgggtgttcttgatcacgtctctgaatatttcgattgttctcatggaagctccaagagacacaaaagtctacagacggtggatgtgagggttttgatagattgtgaaggatgcgagaggaaagtaaggagagctttagaaggaatgagaggaataagagatgtaaccatcgagccaaatgctcagaaagtgacagtggttgggtacgttgaaccaaacaaagtggtggctcgtatcattcaccgaaccggtaaaagagcagagctatatcctttcgttccttacggcggttgtggctcatccttacggggctggtgtttacggtaaccagagccccgacttgggtaccgttagggaccccccggggtttgatccccaaagtttcanggtttngaacgngntnanctncccc

SEQ ID NO: 134945 - DNA, 542 bp, Arabidopsis thaliana
aaattttgtggtgaatgagagagtcaactttaatggagaatgtcatcaaggagaactatctcctccttcatcttctttatcgtctcttctaccattctttttctcgccggaaaatcctcggccaaaatttctcataacggtgacaataatgtgacggccttgttcctctttggagactctttcttggatgcaggaaacaataattacattaacaccactacacttgaccaagccaattttccaccttatggtcaaacattctttggcctccccaccggaagattctccgacgggtcgtcttcatctccgatttcattgcgggatatgcggatttgccggttaattccgccgtttttgggaccggggaatagtcaaaaagaagcttttccgggcgtcaactttgcggtttctgctggggcttgggtgctcttgtggaaacgttccaaggttcggttataaatttgagaacacaattggatcactaccagaaagtggagagattatggaggacaaactttggtaaagaagaaagcatgaagaga

SEQ ID NO: 134946 - DNA, 466 bp, Arabidopsis thaliana
ttcatattaagttaataactaataaagttgtttgggaaagtcagctagaaaaagaagattaactaacacagcttttatttggtttttttttaatcggaaaactgaaaacactctctctattacggggaaaacaacaaaagggcgtcgaaatcataggttgaaccactttcaatagaccagttgtccatctttaacatatcaagactcacgaagcctttttttgattaaaaaacacgaacagacaaccaaaccccataaattctttagatccaacggtcggaagttttttattagcatcttggaagatccaatgggggagcctgcaccgattgcaactgtccacgaccggtctctaccaagaaaaccatagccaaaccccatcccaaatgtgaatcaatgtgacaatgcataaaccatgctcctggagtatcagcgacgaaccgaattgccacccaaccacctggag

SEQ ID NO: 134947 - DNA, 504 bp, Arabidopsis thaliana
  unsure (1)..(504): unsure at all n locations
gagcggccgcccttttttttttttttttttttaaatcaatccttttaggttttcattgatagtttgcttaaagcttacaacttgagtttgagaatacttaaatacaaaggtggagacttagctaaaaccctagagacattggacagatgtcatacatcaagttgagtcttctgaatcaagggttgagaaacgattctcgagctttacgttgaactgctttgccgtacaagaggtcgttgtctccttattgccagctccacttttgtcattacttgaggaagattctagactctgtttacttgaaacagatgaccgttgcctccacttctgcttccttgggcttgggtttgtgcgaggcccatctggttcattttcccccttgctccattagccgaaacgacaacgtattgtcgtttgccagagaaagccccggctcttacccgtatgggtgaactcccccaaattgngnaggggaannaaaccgatttgccctaagngnanaag

SEQ ID NO: 134948 - DNA, 424 bp, Arabidopsis thaliana
ctcaacatccgatccgtgcgtaatgctttccaagagtctgttggaaacagactcaagaagttcggtggctcagacaatgacgagttgcttcaaagcttcactagcctcttcaaagatgagtataagattccaagaaactccaccattgatttgacaaaagatccgggccatgtactcagcgttgcaattgaggggaaccatgtcgggagtgtgaagagccatctcttgtgtagatcaatcttagacttgtacattggtgaagaaccgtttgataagaatgcaagagaagattttctagacaatgcagcttctctagccttcgacaactagttcacaacaaaatgttgctttctttctttcttaacggattctctatatatacggcataatgttgaggaatgtatttgaaataaattgcttgggg

SEQ ID NO: 134949 - DNA, 527 bp, Arabidopsis thaliana
  unsure (1)..(527): unsure at all n locations
ctctttcagaggcatggagaagtgaccaaaatcgtttctcctcctggaaagggtggaaaacgtgattttgggtttgtccactatgctgaaagatctagtgcattgaaggctgtcaaagataccgagagatatgaagtcaatggtcaaccactagaagttgtgcttgctaaaccccaggctgaaaggaagcatgacccttcttcttattcttacggggctgcacctactcctgccccctttgtgcatcccacgtttggtggttttcctgcggctccttacggtgctatgggtgccggtttgggtattgccggtagttttagtcaagccaatgatctatggtagaggagcaatgcccacaagggatgcaaaatgggttccaatcgttttttcccgatggccgagtttgntattgttnttgaaaaagccttggnattccgnttggagnaananccaccncaacggcccangagggaatncccggataangggttaaanggggggnnaagnaggggtaacagttntgccnt

SEQ ID NO: 134950 - DNA, 518 bp, Arabidopsis thaliana
  unsure (1)..(518): unsure at all n locations
agcaaaaacaccaaatctgatggataattgataagagtattattcagaagagaaaaaactaaaaagtctcataatttaaagatcgaatcactcaatcctatccccccagcagtctccatatcaaaccagaaaccataaggtttcgatttcatattttataacacatgagagagagctttttaaagttctccaaaaacaaactacaaacaaatcccaatacacttctccttttctttttctacttgcttatttttctctatggttactagtagggtcggtaccttcggcctcctcgggtaccatcatgttcatgactggttatctctgcctgaccctccgcttgagccgttattccggtcatttcttcttgggtcgttgtggcggcggctgctgccatcggcataccaggctgctgcagaacataagccaactcggccatcgggaagagcattggaccattgcatcctgtnggattggccccananagnnatnggngcnaaatncgganacccaaccgg

SEQ ID NO: 134951 - DNA, 493 bp, Arabidopsis thaliana
ctaagaatggggtcactaggagaagaaccacaagtagctgatgactgcatgggtttgcttcaactcctaagcaacggtaccgttttgagatccgagagcattgaccttattacccaacaaatcccattcaaaaacaaccaaaccgttctcttcaaagactcaatctatcacaaacctaacaaccttcacctccgtctctacaaacccatttccgcctccaaccgtaccgctctccctgtcgtggtcttcttccacggcgggggcttctgcttcgggtcacgttcttggcctcactttcacaacttctgtctaactcttgcatcgtcccttaacgcccttgtcgtctcaccctgactaccggttagcacccgaacaccgcctcccggggctgcctttgaggatgctgaggcggtgcttacatggctctgggaccaagctgtttccgatggtgtgaaccactggtttgaagatggaacagacgttgactttgaca

SEQ ID NO: 134952 - DNA, 522 bp, Arabidopsis thaliana
  unsure (1)..(522): unsure at all n locations
gcgtccggattattaaaaaggtaaaacgatggtagaagaattggtggtaatctcgaagagcatagttaatcccagaagccttatgataccgacttctgtgaagaagattcagctgactccatgggatctctctcgccttcgttttggttatcttcaaagaggtcttctctttcacaaaattgaagtcaaacaattacaagcttcactctctgttgcacttgatcgtttctatccattagctggtcgtcttgtgaagctaaagaacgacgacgatactgtctcgtttttcatcagctgcgatggttcaggtgtggagtttgttcacgcagtggcttaaaaacatcgagctcagtgatgtccttgagttatccgggttctgtccccgggttttccgcttcctttatcccggcaacggggatcaagacctcccaggggtntnaagtcttacttagggntnaagtaacanantttaggncgggttttnancgggtttggaaanctctccggggtnnnnccttaatt

SEQ ID NO: 134953 - DNA, 530 bp, Arabidopsis thaliana
  unsure (1)..(530): unsure at all n locations
cttgatggaaaccgcatcagctgtttgcctgatgaattgggccagttggtaaggcttgagcaactatcaatctcaagaaatatgctcatatacttgcccgatactattggtagtctccgcaatctactgctgttgaatgtctcaaataacagattgaaatcccttcctgaatcagtagggagctgtgcttctttagaagaagtacaggctaatgataacgttgttgaagagcttcctgcatcactctgcaatctgattcagttaaagtcgctttccttagacaataatcaagtgaaccagattccagatggattgctgatacattgcaagagtctgcaaaacctttcttttgcataacaatcctatttccatggttcagtttcagctgatggaaggataccaagactttgaggtgaggcgaaaggaggaatttgttaagcaaatcgattcgaatgtggtgatgggcttaagcccttgtgtggggttgtaaaggaacngcttnnaaagcctncttgtgggtcggnnatggg

SEQ ID NO: 134954 - DNA, 441 bp, Arabidopsis thaliana
  unsure (1)..(441): unsure at all n locations
cactcccatnnnnnnnnnnnnnnnnnnnnnnnnnnnnnnnnnnnnnnnnnnnnnnnnnnnnnnnnnnnnnnnnnnnnnnnaaggaacgaatagagtttctttattcggccgctatcaatctccaaatagccaaaaaacatactcgccagccaaaagggaggtagtcgtattaactgttaatttaatttgaaagaaaagtaaactctcactcacgttcatcataattctctctagctttgaaatataaaggaaaatcggtctcaggtaacacctctccgcagcttgtaaatctcaactgtgcactgaaaaaaacaggtattaggacttgggttttagggaactcagatttcttagtccgaatcattcatgaagcggtttcctaatctccctcctggtgcaacccgaaagccgtctcctgcttttctttcacaaaatttggat

SEQ ID NO: 134955 - DNA, 801 bp, Arabidopsis thaliana
accggaccttccgggtcgtaccacgcgtccggatcgagtggggtatagcgcaactgattgtgaatcctgagatttttctcttctctacgatgagattaaatcaacggttggagatcgtgaggttgaagaaaaagatgtggataaaatggtctttttacaagccgttgttaaggagattttacggaaacatcctccgacatactttacgttgactcattccgtcacggagccgacgacggtcgccggttacgatgttcccgttgggattaacgttgagttttatcttccgggaataaatgaggatccaaagctttggtctgatccgaagaaatttaacccggatcggtttatttcgggtaaggaggaagcggacataaccggtgtaaccggagttaaaatgatgccgttcggtattggccgtcggatctgtccggggctagcgatggcgaccgtacacgtgcatttgatgctagcgaagatggttcaagagtttgagtggagcgcttatcctgcggaaagtgaaattgatttcgccgggaaattggagtttacggtggtaatgaagaaaccgttgagagccatggttaaaccaagggtctaaattttgtttaattatgaaaacgatgtgtgcttatatattaaagaaggaacctatacttttgaattttgtcaagtgcctttgtgaattttttaagtaaaagattttattttatttgtcaaaaacaccattcaattaatgaatttttgctttaaaaaaaaaaaaaaaaaaaaagggcgggccgtttttagagggaatccaaa

SEQ ID NO: 134956 - DNA, 783 bp, Arabidopsis thaliana
  unsure (1)..(783): unsure at all n locations
accggaatttccgggtcgacccacgcgtccgctggatgatgtatatgctgcttttgatgatccggaggaactaacatatgcacaggatggaacaagagacacaggtccactaactctaaatgcgtttgacctaattattctatctcagggcctgaacctcgcaactctttttgaccgtggaaaggactccatgaagcaccagacaaggttcatctcacacaagccagcaaacgtggttctctcaagcatggaagttgtgtcacagtctatgggctttaagacacacattcgtaattacaagatgtgagtggaaggattatctgcaaataagacatctcatttctccgtcatactagaagtcttcaaagttgcaccatcaattctcatggtagacattcaaaatgcagcaggagacgcagaagaataccttaagttctacaagactttttgtagtaagcttgatgacatcatttggaagccgccagatgcatctatgagaaatcgagtcactcaaggccaagagtaaaaagacgttgaatccacgtgcgtggtattcaagcagagctttcacagaagacagttagaaacaatatttaactctctgtgtttcttaagtgctttagtcgagtgaatatgtacaagcttgttgatttggttttaatttatgaatacatagaagatggtactaaacttatacgatatcaagactaaattgagtgaaaattgctgatagtttctcctggggaaaaaaaacccccntaacactttcctactcacgacata

SEQ ID NO: 134957 - DNA, 507 bp, Arabidopsis thaliana
  unsure (1)..(507): unsure at all n locations
gccttgtttaggactttcttcaaatggcttaaaccgggtggttaagttctcatcagcgactactgtagaagccccaaaactccatctgctgagttttcagagtacatcaaacagagaggatatgatctccatgacgttcaagcttatggacagatgctaaaagacactggcttcactgatgtgatcgcagaggaccgtactgatcagtttatgcaagtcctgaaacgtgaattagacagggtggagaaagaaaaggaaaaattcatctccgacttctccaaagaggattacggtgacattgttggaggatggaagtcaaagctggngaggtgtgcatcggntgngcagaaatggggcttttcatcgccaccaaganttangcaaatcggaaatcttctacttctatgttttntcctnctttgtttgtnaataaaaatgncnttnccgttggggttgtattgcctnaggtgtgtntttggctttttgagggggtaacttgttcctttg

SEQ ID NO: 134958 - DNA, 361 bp, Arabidopsis thaliana
gtccgttgcagtttttgaagagaagtacgagttcgagttctgaatttgagaattctatccaaggagctatcttgcattgcaagcaatcacagcagcagaagcagaaacagaaacagtatagtactgttaacgaggtcggattctgttcgttgtcagcgtcaagaatcgcagctagggatgatcaagaatgggctcagatgtttaggggctaactaaagatatcggtcatgaagaaagttaagaaggaaataagagttgagcgagagtgagagaactagagaataaattctttgttttctttgtattttgcctcttctttgttttgaggttacataaattcacaatgctttttttggattcc

SEQ ID NO: 134959 - DNA, 765 bp, Arabidopsis thaliana
accggacctcccgggtcgacccacgcgtccgctggcttaacacaacgtcgttttgggccaattacccggcgggtacacccaagagcatccttctagataggcctccgacgaattcagtgtcatttaagagtaaatcggattttgtcaaaaaaccaatacccaaaaaaggtttagagaagctttggaagacaatgtttaaattcaacagtagcgtctcgttgcaattcaacccttacggtggagtgatggaccggattccggcaacggccaccgcttttcctcatcggaaaggaaacttgttcaaggttcaatactctacgatgtggtttgacgcaaacgccacacagagtagcctggctatgatgaatgagctttttgaggtggcggaaccgtacgtgtcaagtaacccgagagaggccttctttaatttcagagacatcgatattggaagcaatccaagtggtgagacaaacgtggatgaagctaagatctacggatccaagtatttcttggggaatttgaagagattgatggatgttaaagctaagtatgatcctgataatttcttcaagaccgagcagagtattcctccggttcgtgtaaagtagtgatattaagttatctgggcatgtgttataggcttatagtctctatgtaggttgccttggttaatcattagtactcaataaagaaatctatacgtgagtagtaattagtttcataatcaattaagcatgttcatctaatttccttttgtttaaaaaa

SEQ ID NO: 134960 - DNA, 783 bp, Arabidopsis thaliana
accggaatttccgggtcgacccacgcgtccggttccattacgcaaacctcacttgtttcccaagttacctcttcctttcagagatacactggatacgtattcggctgaactgaaaagcatagctaaggtcttattcgcgaaactagcgagtgcactcaaaatcaaacctgaggaaatggaaaagttgtttgatgatgagttaggtcagagaattaggatgaattactacccgccttgtccggagcccgataaggctattggtctaactccacattccgatgctacaggactcaccatactgttgcaggttaatgaagttgaaggtctccaaatcaagaaagatggcaagtgggtttctgtcaaacctctcccaaatgctttagttgtcaatgttggagacatcttagagatcataacgaatgggacataccgaagtatagagcatcgtggagttgtaaactcagagaaagagaggctttctgtggcgtcattccataatacggggttcggtaaagaaattggtccgatgagaagtctcgtggaaaggcacaagggtgcacttttcaaaaccctgaccactgaagagtatttccatggcttgttttcccgtgagctcgatggaaaagcttaccttgatgttatgagaatctaaagaaaccatgcataaaaccattgtcttcttgtgttacatatactctgtttcttctctgttttcatactttctgcagcaatcatctctgtctgctttatatatggtaaaacaatgactaataaagaatgttt

SEQ ID NO: 134961 - DNA, 510 bp, Arabidopsis thaliana
cagcagtagaacttcagaatttggctgaagaagttaccagactctgcaatgaaaacgcgaaactcagcaggtgaaaaagtttcaggtctctctgttgttgctcggagactcccagcttcaagataatgctgcaaagtaaatcatcttcgttgacatataatgcaaatctcagactctacttggaaggtaatgatgttgatccatcaaagggaacaagagatcatgatgctcccaaaggcattcaatccagaaaaaatggtttgtatcgcttggatagtattttgattaccgtctgatgacaaacacatgatgtaaatatccctcacaaatttggtttcttgttctcagtgaccactatttttgtatgtccttaggttgaatcaatgatgttgcaccaagttccatagttagtttttcagcttaaaaaactccgtccagctatatgtaactgatttgatatatcacccaaatgtttggtaaaaatcccataaaaaaaaaaaaaaagggcgg

SEQ ID NO: 134962 - DNA, 798 bp, Arabidopsis thaliana
gcaccggacttcccgggtctacccacgcgtccggaaaaacgaaactttcggttgtgcgaaatcttaagatcaaagatggcatcgttttgcagatcagcgttaatggcaggttccagaaacttagtatcaagatccagaaccgtaactcaaaagtccctcaatcttaaacccacaactacttcatctcctttcgcttcaatgtctcaatccatccctcgcgcttcgagggttctctctgctttgggaagtgttgaaacgatgattccacttcacagtgccgttgcttcagctcgtctccggtcaagcatcgctgctgattcctcttgttggagcttgctttctcagggacttgcaacgcctttgtgaccccggtctgctggatcgatataaggcggaaataatcaatatattacaatgaatgaacaagaatagtgtttttttttctagttcgaactctatcgtcaatgtattgttgggtgggtcacaaggacttgttgtttcaaacttcttgcaatctatctattcgatatttggatccacacattttggggcctttttccttcactaaagtcagcatttgctttcttttggtcatgcacattgtaacgaggaacctctgcatttttcaatttctgaatcctgttcactgatcctctttccaaaaaaaaaatttggcaaaaccggtccttttttaaaactttaaaatttaaggggcgggccggttttagaaggatccaagttttaacttcccggggccttgcaaatttataaactttttttataggggccccccaaaat

SEQ ID NO: 134963 - DNA, 440 bp, Arabidopsis thaliana
cgtaactcaaaagtccctcaatcttaaacccacaactacttcatctcctttcgcttcaatgtctcaatccatccctcgcgcttcgagggttctctctgctttgggaagtgttgaaacgatgattccacttcacagtgccgttgcttcagctcgtctccggtcaagcatcgctgctgattcctcttgttggagcttgctttctcaggaactgggagttcctcggtgacaccatcattagctttggtcttggtcttgaagcgtccatgggttgatacttgatattgtactgctttaagactacttggtgaccgttgcccaggcttcttagaccgggttttctcccggtttaggatcaaggttgttttcccaaattttattggttatcggttaagacttttcagatcctttttttgaagcattggaaaggggggtttagcatc

SEQ ID NO: 134964 - DNA, 789 bp, Arabidopsis thaliana
ttgacgttccgctccggaatttccgggtcgacccacgcgtccgctttgggtgactcctctttgcagaacgctctggaacttgtacatgagcatctcaaccaggttccatcttatggtcaccgcgaggttctgatattgtactcagctttatgcacatgtgatccaggcgatatcatggagaccattcaaaaatgcaagaaatccaaattaagatgttctgtaattgggctctctgcagaaatgttcatatgtaaacacctctgccaggaaactggcggattgtattcagttgcagtggacgaggtgcatctaaaggatcttctgcttgaacatgcgcctccacctccggcaatagcagaatttgcaattgcaaatttgatcaagatgggtttcccacaaagagctgctgagggttcaatggcgatttgttcgtgtcataaggaagttaagattggagctggttacatgtgcccaagatgcaaagcccgggtatgtgacctccctacggaatgcactatctgcggtctaacacttgtttcttcgccgcatttggcgagatcataccatcatctcttcccgattgctccatttgatgaggtgcctgcactttcaagtctgaatgataatcggagaaaattgggaaagagttgttttggttgccaacagagcctaattggtgcagggaataaaccccgtccatgcgtaacatgtcgtaaatgcaagcactatttttgtctggactgtgacatatacatccacgagagctgacacaactggtctggctgtgag

SEQ ID NO: 134965 - DNA, 951 bp, Arabidopsis thaliana
  unsure (1)..(951): unsure at all n locations
ccgagtggtactcagagcagctggaaatgatggaaacaagactgtgacaatgacctacctaggtcagtttcttggcgagaaaggcaccttgctgaaggttatggagaaggcttttccagaactagggttaactcaaaaggattgtactgaaatgagctggattgaagccgcccttttccatggtggatttccaacaggttctcctattgaaattntgcttcagctcaagtcgcctctaggaaaagattacttcaaagcaacgtcggatttcgttaaagaacctattcctgtgatagggctcaaaggaatattcaaaagattgattgaaggaaacccaacatttctgaactggactccttacggtggtatgatgtcgaaaatccctgaatctgcgatcccatttccgcatagaaacggaaccctcttcaagattctctattacgcgaactggctagagaatgacaagacatcgagtagaaaaatcaactggatcaaagagatatacaattacatggcgccttatgtctcaagcaatccaagacaagcatatgtgaactacagagatctagacttcggacagaacaagaacaacgcaaaggttaacttcattgaagctaaaatctggggacctaagtacttcaaaggcaattttgacagattggtgaagattaaaaccaaggttgatccagagaacttcttcaggcacgagcagagtatcccacctatgccctactagaagctaggttcatgaaaccaataacattatcaaaaataagaataaatgataattgtatacaacatgattcgtctttctttatttcagacaatgtggacactactctaaataaaatgtcatttaccttacaaaaaaaaaaaaaaagggcggccgctctagaggatccaagcttacgtacgcgtgcatgcgacgtcatagctncgtcatagtgtaac

SEQ ID NO: 134966 - DNA, 355 bp, Arabidopsis thaliana
caggtacatggcgccttatgtctcaagcaatccaagacaagcatatgtgaactacagagatctagacttcggacagaacaagaacaacgcaaaggttaacttcatcgaagctaaaatctggggacctaagtacttcaaaggcaattttgacagattggtgaagattaaaacaaaggttgatcccgagaacttcttcaggcacgagcagagtatcccacctatgcccttctagaagctaggttcatgaaaccgataacattatcaaaaataagaataaatgataattgtatgttacaacttccctaaatacaacagtgattcgtctttaaatatcccagacaatgtggatactact

SEQ ID NO: 134967 - DNA, 626 bp, Arabidopsis thaliana
  unsure (1)..(626): unsure at all n locations
cgttnnnnnnnnnnnnnnnnnnnnnnnnnnnnnnnnnnnnnnnnnnnnnnnnnnnnnnnnnnnnnnnnnnncttttttttttttttttatactcaaaacagggggaaatagaaatatacataaacatgaaacaaacacttcatattcactaaccttgattagtgtcctaacgttaatacaactgagaaacaaatagagtaaatttagttaagttcagaatctaagactgaagagtactaaaccagattcgaggattacgactagatgaagaaaactaaccctaaaagaaggttataaagagagagagagggatcagagtcgtgaaaacagagttaataactagctctttgaatgaaaacggtttctaggtccggcggagagaagtaatctctagtgacggtgacgtaactgcacttcaacgacggtttacgcttctttggcgccgctggacacggcgggacccttggaattctgacggaaaccgcggtaggggtcgtaggcctgtctgatcttgctcctctgtttcggtaactgtgacgccgggagataggttaatctgcttgagaggggaacgtgagggaattccggcgatgacccattttttaccgacggtggattcttggtat

SEQ ID NO: 134968 - DNA, 1040 bp, Arabidopsis thaliana
  unsure (1)..(1040): unsure at all n locations
attccgttnnnnnnnnnnnnnnnnnnnnnnnnnnnnnnnnnnnnnnnnnnnnnnnnnnnnnnnnnnnnnnnnnnnctttttttttttttttttttttgagattgaacttgcattttgattttgtggaattctgttatgatgtctttgtatggttttgttgaattccaaactatatcttatgcaaaaaattgctaaaaataacattaccgtaactttatcggggtttaagacaagattcttcaggcgggttttgtgatagggatggaccatcttccaagatgagcggtgtagtttgtgcaacggattactcctttgctactaggaccatccgggaaatctatgacactgatgctacctgcgtctaggtgaaacaacccgagcgcttctttagtgaggttaaggcattgtgctatgagtgaaatgtgagtcattgcaggaccaaccaccaccatgatttctccagggtttgacttctcatccgatagttcgtctaagagtgattcccatgctttctcggatctgttccacagagctgaaaacgcttcttcgtctaattgacttgcaatcacatcattgtccttattggatttccgaaaaaccccctcaacataaaggtcattcatttggtcccgttttcccgtagtggggcacattacctacacctaaacaacccgcagcttcttgcacccgggatattactccagaagactcaatggaggctgttttagggctgcaaactattgaactaacccttagatcaagtagaagctctgcggttttctgtgaatgtatcacaccaagcatgttcattgcctgatcattattagctgcttggttaataacagcagaatcctcattattcccctgaccatggcagacaagtataatctgcttactagctttccggccaccagaacttccaccagctagaggcgaattaggtgtctgatttagtcgattaagacatacgtgaggagatccaccgtcagctcttggtatgaagtccaatacacttacaccacaattgctctgcaacaaac

SEQ ID NO: 134969 - DNA, 407 bp, Arabidopsis thaliana
aaaactaagcagtagaattataatcgaaattcaaatgattctcaaaatttccgccctttttgggaaatatgcaggtggcaaaagaaaaacaatggcatataggtaaaaatggatcacctcatacaggacccacaaaaaaataccgtcatttccgtttaaaatcattatttgctttcttttgttcatacggatatatatatgaagatgcattggatcactcgcattctccttcagttgtcgccgaggaaacgtaactcataacaagagacgacgtactctcatcagccgtaacaggcagctgaaatagttgcttgcaagagtggcaagtgatctccatcattgttgcattaatcctcttgattgcttcttctctaacaacgtgagccttctccaactcggtttttgct

SEQ ID NO: 134970 - DNA, 761 bp, Arabidopsis thaliana
ttgaccagctatcacgtcgcatgcacgcgtacgtaagcttggatcctctagagcggccgccctttttttttttttttagaatctggatttttatatcatttgtatttactactttcgtagtaaaacataaatttttacccttttggattcttcaaccaaattattcagacaaagtgtctcaaatatggaaatattgcttgacaaagttgttgggagctggttgttatacggagttgacttcatcttcatcgtcacttcctccacttccacggctactgcttccactactgctttggccgccgctgccacttccgctgcttacgcttttgctacaaccatcactgtcacttacgctgctacttccactgctactgcttgagcttgaggttagactcttttgcacctctgcgttcacttgtgctctaagagcttctgctgcgttaaaaccttattcttcttcaccgccgctatcgacatctacatctgcaatctctttttccgacatgctaagctgtttatttaagctttcttcatattctccaccatcagcgttctctttctctgcattggcgctctctggtgtaaatgaaccacatatttcaaccagatcgatctcttgatggtcatctccatcatcgttcttgtactcaactggggaggttgcaagcacgttcaaattgtgggcaggttagctgagttcttttgctcccaattttgattctttccacctaaacaggcacattaggaaacaaacttctatt

SEQ ID NO: 134971 - DNA, 763 bp, Arabidopsis thaliana
ttacactatagcacgagctatgacgtcgcatgcacgcgtacgtaagcttggatcctatagagcggccgcccttatcttttttttttttttttttgacagctggaaatataaaatcttattgaatcagttgaaaacaaagttccagtgaacgcagagagtttctttcctcagtaagaaaatgaaacttactacgacaatgagagatcatcaaaaggttgtcagaaaaagaaactaaaagtgaaaaaaatgcatatttgtgatgctgtggtatataaattatatacattacaccaaaccaaaaccagattcttctttttggttgttctgtccctgcaattcaccaacaggtgcttcgtttagccataagaagcggatgaaatcgttcagctttgcgcttacactaaccttataaggagttgggtttaatctcctcatatgatcaggtcgcatgttttcgagctgcttgatgcaacggtcttttatctctttcaaaggcggtaatactttttttgcttcatctgcgcttccacgccaataacatttgaggagcttttggacacgctgtggccctacatatgcttttttggattcgttgattgggtgacgacaaagtaaaacctcacccaccttttggaggtggttttgttcttctccaggccttttatttcttccaagaggggttaaccttttttttgcccggaaaaaaatctggaaaccttctgcctttttatacccacggatatttggataaccccttctggta

SEQ ID NO: 134972 - DNA, 742 bp, Arabidopsis thaliana
cttgacgtcgcatgcacgcgtacgtaagcttggatcctctagagcggccgacctattctttcttttttttttttttgcaaccacaaaaataacttcattgtcatctaaacttgacaagatcacatataaacagacactccactctactactatctctttgttacaggcacaaaatctcgcctctttcattttttcaaatctttcaaataacttcaacaaacggaaaaggaggaatactctgttcatcacagaagaaatcagaaggatcaacacttgtcttaactctcaccaatctctcaaaattattcttaaaatacttcactccccaactcttcccttcctcgtacttactcctcttaactccaacatacatccccaaatcaagatctctcagattcatataagctcctctcggagacttcgccacaaactcactcatatcatcgtaaactctctccacccatctcatatacttctctttcacgtctcctctccaggaattcaagtactgaatctcatatatattccccttcctatgcggaaatggtgtttcgtaatctgcaatctcactcattttaccaccaaatggagggaaaattagctgagcatgctctgcttccgggtcttgcaaccggcctccaaagcttccaaatcgcgcttttaggcatcgggttcttgaccaaaatcagatttagcccttgaaagccaacgatgctcgtgtacgtttagtaagaacatggtc

SEQ ID NO: 134973 - DNA, 770 bp, Arabidopsis thaliana
gaccagcttgacgtcgcatgcacgcgtacgtaagcttggatcctctagagcggccgccctttttttttttttttatttacagttttgttttgatattttgtaatggatttttcaaaaaattttttattaatatagcttttttttttgtatcttttacttattttgtgtttatttttatgaaccaatgaaatacctatggttctatatataataagttgtccatcgttttgtacagacaaacgcacaggttcaataatcaatattccttttttcattaattttgcaaaagtgaaatttttctcaatcattagaatgtctaggctcatctctcctctttcaatagaagataccgctatttcgtttggattgtttagtctaaccaagagacagtatacttttacattattgagaattttttgattaaaaaaacaattccatcgcaattgaaaacgcggataccttgtcagaaataaatcaagttccgcttctgtattacttttgtattgatttttatttttacgtttttttattgttgattctgcaaaattttcttcaatatttttttcttggtttaatcgagcctgttcgggatttctttttgtttctttatctgattcaagttctacttgaccggccgattcttttttcttctttattcagattataaaattcgaagggattttttttcatttgatgggtataaaacctttttttcttttccaaagatcttttttattaaccattaatgtttttcattaaaattttaaaag

SEQ ID NO: 134974 - DNA, 731 bp, Arabidopsis thaliana
catgcacgcgtgcgtgagcttggatcctatagagcggccgacctacgcgttctatttttaaatcaaagggagtgtttgatttagatttacagtttcattttatgctacaaataaaaaagggtaatggaagaactaaatgaatccaacatgacatttttacagcgacattcacaaagaaagctcttctagattgctgtcctcttgagaacaattctggagagctcttgagagactagcttcatatccggtctctctggtgctggtgagatacagctcagagcaacctgcaagacatcagtaagaaccccaaagggattccttgagccctgtgatccaacaatcgatggatcaaaacactcagttgcacgggttttgtcccacaagcagtagaaccctttcagtgaggtcaacgacacctggatcactgcacactatatttcccgaaacttttcccgggaggagccctatctaaatggctccgagggcatagacatcgctttttcgagaacgggacggtttactcgagctggcaaactttggagggcagataccaaggtcaggtgcgttcaagactttgctttgacgttgctttctggggtgatttaattcaaatgaagactaataactctctttaagttgtagccaaaaggaggttcctgggaaggtttttctaaagaaaaaaatttttaggttggcaaatattaagaatgtccccccttggtggggaatat

SEQ ID NO: 134975 - DNA, 527 bp, Arabidopsis thaliana
  unsure (1)..(527): unsure at all n locations
aatgaatgggatcaagcaactccacgcgcactgtctgtgatcatggcgtagacgaaaccaaagatctcttacaacgattgcttctgataccaaaccttgtttatgcccgaaaactcttcgatcatcatcaaaattcttgtactttcctctacaacaagctcattcaagcttacctatgttcatcaccagccccatgaatctatcgtcctctataatctcctctccttcgatggtctccgtccaagtcaccacactttcaatttcattttngcagcttctgcttcgttttcttccgctcgacctttacggttgcttcattctcagnttttnaagatctggggtttgagtccgattcggttctgctgnactaccctaaatcaattgcctatgcgaagtaaggagctttgtgttgtgngnccagagtgttcgcngaaatntttaaggggggttncccgtttggatgcaattttcangggttccacgcgggggtnnnttaggggcgtgggttnttntcannctgnanacnc

SEQ ID NO: 134976 - DNA, 677 bp, Arabidopsis thaliana
  unsure (1)..(677): unsure at all n locations
aagctttaatacgactccctatagggaaagctggacgccctcaaggtcccggtccggaatccccgggtcgacccccgcgcccggaggatgccaagtttaggagtttgaaatgtgctggctctgggaatcttgtttatgtgtttaatgatgattgtcataagaaatttccagcttgtgtttgtgaagattggtggtggtgagaatgggatatgtagttggagaagagttcccttgtttgccttctccggttaataagtttcataaagttgttagtttctgctcaacggtgtctattaccgatgttttccaccccgaggaagctcggattggcggttcgatccgtggttgagtttgcttagtgctaatgtaaagtggagatgaagggagaagatttaataatgaagtgtataaaaatggttatcaatttattatggtaatcatgtaattagacgtaaactggtttataattcttcgttgtatgaatcatttacatacatacccatatctacagaatcattaagtattgttgtttgtttataaatgagggggttttcccaatttttttannnacaggggaaaaaaaaaaaaaaaaaaaaaaaaaaaggncagggcggccgctttaaaagaacccagggtagcgtgcaggcacgtaatagctgtgctatagtaaagaacgt

SEQ ID NO: 134977 - DNA, 517 bp, Arabidopsis thaliana
  unsure (1)..(517): unsure at all n locations
gaaatggaaacacacaaatcgttgtagaaaacacgtttacagtacatatataattcaaaacacacacaaaaggagggcaaaagaatatacaaagggttttagagttatagggaagttatggcacaaaaggatgtacttggaatactctctcatgtttgcttctcttatcacatagatggtacttacccgtaaacttgacgccggcaaaaaacatagaacactaaaaatgaattccagatatataaacatccaaactctctcaccatcctcacaatttagatgagattaattaactatgaatgtcgtccaggagcgttaccgatcagtctgcattgttcaggtagcattgtcgatatcacttctccatgcaatgcaaacagttccccgtctttnccggaactgtcatgcgnatttttcccggctttatcttcactgntttanctgcaattgtcatgcatttggtccactacattctnttntnggcttttaanaattgnaattgngnttnaccgttttg

SEQ ID NO: 134978 - DNA, 900 bp, Arabidopsis thaliana
caaaggactttttatatatattacaaaaatgaacagcaagttccaccactggagaaaccatggtgaaaaggcaaaaaccttatacaaacagcctttcttacggtaatggcaaaccaaacagaagttacaacacattcaactaccaaagccaaaagaaataaaatgataactttgaaacagtctttaataacgtccttcataagagcatagttccaatcaagagaattggacatgatcttagagcatccaacttttgcatttgttgtgaacgacctgtatatatcatcatatcctcctttcgagaaatagtagcagcataaccccaaaaggtagtcacctgaagatcaccaagcttgtttatgccgatcttcctgttaacatcatcttgacaaaagtaactcaaaatgtgtccactaacttatctgaacagtggagatttattacctaaaaagaaaagactgaacctatccttgacacttctcagagaagaccagacctatctctagaaggaaaggattagattgaaggatttaaaagcaaactctttggcgtgttcaaaaaaacccttgctaacccatctaggcagcgtggcgagcaaacataaggaactcaacctgagatctaatgtcacactttttgcaataaaaaaagctccagtattgcattttgtgtaggctcaaacaggacaaaccaatcctgttttccactgcctaagacaaggagaggagcaatgtgacttaaaatcaatggccattcagtaggcttgtgaatagctttaatgatgttcatagtggatgcagcaaaagtcactttctccatatgtaaactattcatactttttaaagcccattcccagctcaaaatcttagcttcacggacgggtgggtctaaccggaaatt

SEQ ID NO: 134979 - DNA, 565 bp, Arabidopsis thaliana
  unsure (1)..(565): unsure at all n locations
agcggccgccctttttttttttttatttggagagcaaagatgatttgactaaaataactaaaatcacataacaattaacgaaaacaacttagagaagaaaaacacatatataaaaccagaatccatgaagagaaagatccacaacataacataccaaagcattaatatatataaatgcctaagtcaagtaaggtgatgcaacggcataaagaggggaactcgcggtgaaccgaaaaaccgctggattcagcgacatcagttttgtcttctttagattcctccggtagtttccaatcaaacccatgcactaagttagccaaaaccacctcattcaataccacagcgaatggatactgctgggacaaatccttctccctgctccaaatgggagcagctcaaagttttgacctcgggaatcaacagacggatctaaatgcctctccgggttggactcctccgcgtctggtccccatggggcaacctctcccccgggccagcatcatcacacttgcgacggtggatgggngccctattaaacctccgtggtcntggggcncatgggant

SEQ ID NO: 134980 - DNA, 513 bp, Arabidopsis thaliana
  unsure (1)..(513): unsure at all n locations
gggaagaagaaaatacatatgttatatatatattttaaatcatagttgaaacaatactcagcctagaaggcagacaatcattcctattcactacaaatctttctttatatacaaaactagttagaaaacaaaatcataagaatacttgtgggtgtgggtgtttgtgtcaagagtcaagaccaatttcgctcctgtcaaatgtggtttgttttctccttatccaaacataaacgagagatcatccataggaacctcatcaagacctgctgtatcaatatcctgaagaccctcgaaccagtttccaagatctgcctgttcatctaatttcgtctagatcacggaacgctaatttcgagaaatctatgggagcttcgtcgtcgactgcaccatctccagaggtaacccctcggtttgaggccccctgctgctggcccgtnggggngtaaggtgtgcgcntnatggtccgtgtgtgngngtccttggttggtgncggcccnacactcccccgtcttt

SEQ ID NO: 134981 - DNA, 406 bp, Arabidopsis thaliana
acatctgagtctattctgctggatttataatcaaactaaaaccgaacagagaaaaaaaaaatggaagaacatatcatgaaatcaacagaacctaatcccatatacaagttacaaatttacaacaaggtttccgtttgatttataatttggttagatcacgcgtaaataagaaaccaaacttggttgagaataagaaaccattcttggtagaaaatcagtaactaatatataataacccattcctttgacaccgcatctttgaccgggtcaatatccccggctaatcggagaactaaacctatttcagccgtacacactctgctgacgtaccgtcttagagagatcatcacgaatcggagaaggagacggcgtgtaaaacggtggggaagcacatggagtagaaaac

SEQ ID NO: 134982 - DNA, 498 bp, Arabidopsis thaliana
  unsure (1)..(498): unsure at all n locations
cggagaaatcgtggcacattccacaacattatgaattacacgtttccacgagaagggagcaacttgaataaacatttgttcaacaaaagaatcttctcaagatgaaaaatatggtttcttatgcggtagaggtgaattgtatagagcattcctgccaacgatactgtggagaatgagatcaacgtcaatatccaaaaatcctttggattggagacaatgatacctaaaagatatgccatcaagtcaagagccgattgcagtgagttctgaacacctccaaccacacaacggtcggattctgaaacaagatcctgcatttgttgggatgacggcaagatcaaacatccacaagccaagccttgaagcagnacncagccattagctgnaaggggcaatttancccntttaaccccancggtccaanggggccaagggggncccctgggnccaagggccagggngggcccanntngnaccggttncttggggaacaaattt

SEQ ID NO: 134983 - DNA, 543 bp, Arabidopsis thaliana
  unsure (1)..(543): unsure at all n locations
cctntnaaaaaaaagnccccttaaaangccttagggcctatattacagaccttgagtttgtacataaaatcattcgtatacgtaacatacaaggctgagacaatctattgtgacaacccggagaagaaggacacaccggtggatggcaaccacgaagaaccagaaatgaactgagccaccgtaaacttactagcctctaccgttgaggtaataacatgataaccaggccatttgactcgttgaccaattcctgaacccaaccctttgttcatatactcaccatagtacaacgagtccaatgcaaacggaccattccactccaaccatcctcgcgggtcaatatggtcacccatatccgacatcatgtacacaactctagaatacaacttccacggacggccgagatacgtcggataactaccccttagaggcttcaagatccgggtgttgctagagcttacaagatgaatcgaatcccgnattctgatcggtntttcgggtctggccganagaactctgnnggccatggtncgggnaatgtaa

SEQ ID NO: 134984 - DNA, 1346 bp, Arabidopsis thaliana
  unsure (1)..(1346): unsure at all n locations
tnnnnnnnnnnnnnnnnnnnnnnnnnnnnggacacaagatagatttgtttaattagcaagtctattggcttgggcactcaagtctgaattacaaaataatttaaccatttaaatgtaaaaacgacagagggtctgttcgagaaacaagatcaacatcattgccccaacatcctcctctacaaatgccaaaccagactaataccgggaaacccataaccaaaaaatagagggaaatttatttttattgtctgcaaattcagtgtcatatccaagtcaagggtggttgtcgagtgacaggagttaacttaagaggatgagccatggtaaggatggtccctttaacagcctctttcatgttgaccttctctccttcgattctccaggcaaagcactgcaccatcattcctattgcacttcctacaatcatataagctagatttgatccaggacatcctctccttccactgccgaaaggaagaaacttaagagcttgctctcttctctcgccctcttgccctgaccttgaagaagctagaaatctctctggtttaaacccctcaggggcctcccaagacattcgggatctctcatcacaacaataggcatttaatcaaaaagtgtttgccttcccccggtatgtagaaccctccgatcttacacccttgttgaaattcccttggcaagagaggccccggtgggtgcagtcttagtgcttccttaatgacagcgtgcaagtaagggaggttcggtaaatccgtttcttgaatcaaccttgatttccctacaacagaatcaatttcttctctcattctctcaagaatgtgagtattgttcatgatctcggccattgtccactgtattgtttgcacagaggtatcagtggctccaatgaaaaggtccacgaaaaaagccttgatgtgattcttagtgatcttgtactctgcattttcgtctccataagctgccaacaacacgtccaacataacccgtaccttgatccttcctccggtttctctctatgttccacaaagaactttctctagcagcacatcaaatttgttggaaacgcccatgatatccttcttgaatagtgagattccaagtttctgaagctgtctgcgcaacaaaactgccaagaacatctttttcatcaagccaatcgactcggtaactaatccccttagtttctctgtctcaccattctcctctgaaaaactccttcccatgctcatcttgcacaaaatgttgttcatgagattcattgcttcttataccaatctcaacgcttctcccttcttacccttgctttatcgaccgcagattcggacgcgtgggtcgaaacggaa

SEQ ID NO: 134985 - DNA, 425 bp, Arabidopsis thaliana
aagggaaacaagaatataatcactttgtgtttttcaaatgcaattattttttccttaggatccaggcataattggggtataaacaaacaccacgacgaagagtaaagtgaaattgtgtgaagaatcatgtgattgtgaataaaagaatgaatggtgaactgtctggagacgacgggattcttctgtcctgcctgacgattaaaaggtcggatttgttcagagtggtttagaggatctccatgctgctctgttttctctagttggtagaggacttgcagaagaagcaaatactgttaacccaactctttttcggcttagttctttgagatttggtgtttcttgcctccacaagatcattcatgtattgaaccacggcctgtgcgcctttttcggttatatcccttggaagctcttcaagtggattt

SEQ ID NO: 134986 - DNA, 432 bp, Arabidopsis thaliana
  unsure (1)..(432): unsure at all n locations
ttgtttttttttttttttttttaaaacttacgatttttttttttaatatagtttatttaaaaccgccgtaaaaatggtatgtaacagatgcgtaccaataccaaatgtagtgattacacgggattgtatagctagtcaacgatcaaaatcgaatcccttagttacaataagaaatcaaaactataaataaaatataaaacttttgaagcaggggaaaaggaattcaaacttacacgtatcaaaaaaagaagttactcttctccccaattttgcttccaacaaaaagtaacaaaaaatattggagaacccatctagtttagggccgtggaacgccaatgcccattttcactaccaaaaacctaccaccaccacttccgggaccggggnccccnttncggnnggggcctttccggggttgaaaaacnncccccg

SEQ ID NO: 134987 - DNA, 538 bp, Arabidopsis thaliana
  unsure (1)..(538): unsure at all n locations
actacacacctataatgtttttcaataggttacatcaatgtttcccatcaaacattcatacttaaaaatgctaccagaacttggccacaagcctaaaagagagtttagaagagatgatcaggtaactagtacagaggacagaccgaaccattgataagttgctgcagatacaagctgatacccttcaacctctgacccatttttaatttcctttttggggtgcaaaagccaaaagtcatttaaagcttttgatgcatcaccttcctcctcaagtatttttccatcctttggaaccaagcatggaatcccatctttgataggaaaagagacaccaatagtatcgctnacaagtgatttcgtcttctngnaaaacctcagaggttgcttagagagagggcacaccagaatctcggagagggtcttgtnaattacattgccggcgtnttttagcagcactntgtttagtctcaccattctaaagctttgatctttagctctctccggactttttccttttttccgatctccggtagaattg

SEQ ID NO: 134988 - DNA, 487 bp, Arabidopsis thaliana
  unsure (1)..(487): unsure at all n locations
gacgaaaccgtcttcaccgatctaagtgtttacttagcgacgatggcatggtatggatattcaaaaactttggctgaggaaacagcgtggcggtttgctaatgaaaacgggatcgatttggttgtaatgaatccaggaaacgtgatcggaccagttttgcagccaactcttaattactctgtagaagtgattgtggatcttgataaatggtaaaaacccttccaatagtttttactataggttcatggacgtgagagatgtttctnttgctcacatcaaagcgttcgaggtcccttctgctagtggcagatacatacttgctgatccaggtgtaacantgaaagncattcaaaaagctttttacatgaactgtttcctgattttgtgcccgtgttgatnagggntantgngnattagggtgggntnaatggcatncaaagtttgtttncgtaaatttgaaaagttttggganttnggtcacnccntt

SEQ ID NO: 134989 - DNA, 482 bp, Arabidopsis thaliana
  unsure (1)..(482): unsure at all n locations
ccagtaaaaagaaagagaaagagagaataaataaatggaagatgtacggaggattgtggtggtcgtagaagataaacaagcggcgaggacggcgttacaatgggcacttcacaacctcctccgtcaaggtgacgtcatagtactcctccacgtgtactctcctccaccgcgtaagaagaaatccacggcggcgcgtctcctccgccgtcacggatacaatcttgctctctctttccgtgaaatctgcgactctttcttcaacgtttgtttttcctttgtgatcgtaattttgacagacgaatactgagatcattgtgagagaaggagatgatgatgggagaatgattgctcaagttgtcaaagagattggtgcttcgnatgcttcncgttgggctcccatcagaacagntttcttttacanntnggcanaaggtgggtncnnttttncgggaattncatttcaaangatgncntaagcnccc

SEQ ID NO: 134990 - DNA, 898 bp, Arabidopsis thaliana
  unsure (1)..(898): unsure at all n locations
attatgaaaaccaaagcgctaaaagtaggcgtaatggcagatgatggatcatcgctgcagttggagaaaggcgaaaatggaaaaatggatttggacgagacacttgaaccaagggatgatatattcaggctcagtcttgatgacacacttgagcaagaaaggatgacgtttcatttaaagatgtctcaagataagcaagaaagtctaaggcagacctttaaacagggtgatgttgaaaaagattcagacgtattttcagaaggccctgaatttccaagtaaaatggcagaactagatagtgacactgaagaggagatagtggaagaacaattagaacatttgcagaaagagaatgagaagttaagtctaacctttgaacaacatgatcacatctacagcacaacggagccttctgaaattgtgggtttgcgtcatgcgttataccaaacgcaaaattcacctctacgatcacctctcacttcaccaattcatactcccattggttctccgctgcattacctgatggcttcacaaatacgttctccaatagcttcaacaatgcatagtcacatagtttcaccgcttcgttctcccatcaactcctctggatcactctctgatgtattgttcttcagcaagaaaacttgatggcacgaaaacagataagcattgttccaagctttccccacatacttgaagactttacctgcgatacaaaaacagtgtgtacattgtttcaattttgtttttgagtgattgtaaggttttctacagataataaatcaattcattgagtatccnnnnnnnnnnnnnnnnnnnnnnnnnnnnnnnnnnnnnnnnnnnnnnnnnnnnnnnnnnnnnnnnnnnnnnnnnnnnnnnnnnnnnnnnnnnnnnnnnn

SEQ ID NO: 134991 - DNA, 432 bp, Arabidopsis thaliana
gcggtgatacaccggcaacgacaactgttcgccgttgatttccactgaatacctgactatctgcgctgcgacggcaagaaattgaaaattatggcttacggtttgatgatgttgaaaacccgaaaaaggcttcgtcttttaagcggcctccttctgcgtcgagactgtctggctttcgagaggaagaagaggccgatcggagtagaaaatcgggttcctttgtggatcatatcggtcaggaggacaagagaatatgcgcctctggatgtttcagaaaatgctgcgcttgcacctgcatgtttgtttctgttgtccttataatcgtcttgttggtaggattgtctgcaaactcttcaatcaaatctatactacctcaggtgcttgtcacaaaccttaagttctcgagattggatatcgccaaatcatcgacag

SEQ ID NO: 134992 - DNA, 456 bp, Arabidopsis thaliana
aacctcatcactctgacctcattctcaagtgctatgcggttcttacataattgcggtttttatgttcaagcatatcaatcctttttcatttttatgtacctatcttctggaaatttgcagggagacaaaaatatcatcaagtttgatggtgatcacaactcttcgcgcccgcagtcttattatgattcagtattagtattcttctacaatgttcttcgcccgcctccaatttcttcatcttactcatctaaacttgaaagttattacagtttgggagatgtcaatagcgctactggtttggatgagaggttttctgtatgagatcatatctggggctttcgttcggcatgtatcggtgttgcaagtccttcttttctgcaacctcctggcccctctaacccacaaggccaacgattgagctcctttcagaagctatgcccatgatagatacagata

SEQ ID NO: 134993 - DNA, 380 bp, Arabidopsis thaliana
  unsure (1)..(380): unsure at all n locations
gggagcaatgggatttgtaggagtatcaagatttgggaatttattgaagaaacagagagttggatcgaagtagaaacattaccggacattgtttgtaggaagtttacttcggtttgttaccataactacgagcatgtgtactgtctgtggcataaggagatgatttgtgtgtgttgttacaattggcctgagattctgtttttccatgttggaagaaggacatggcattgggttcctaaatgtccttcgttgccggagaaatggagtttgtgggtttccggtgggtcncctttttgtcccaaggnttgcttcttcnnttttangtgttaaaatgangantggtttnaggccngnaatccncctttgttanagggggtttt

SEQ ID NO: 134994 - DNA, 763 bp, Arabidopsis thaliana
ggagcgggaaataccaattttctcccaagggggaacaggcttatgccccattgattttcggccaaaggtttgtaattacagcgttccctataagggaaaaggttgggtacggcctgccaagggcccggggtccggaaatttccggggtcgaaccaagggggcggcatttttttcataaaaatgatgaagaagagcaagctgatctgcattggcatggaagcaaatgtcaagcagagttgccaaacaccgcgtcgccaccggaaatcctaagggtcaatatcatataccacatgacgtaccaaagggacaccttgtggtgttcgttggtaaagatgaggaaacttataagaggttcgttataaagatcacggtgcttcacgatcccatcttcagagctttgcttgttcaatcaaaagatgaagctttcgacgatttcacttccggagattccaagctttgtattgcttgtggcgaaactctctttctcgaggtcctccggggcgcttctcctcgttattcgttatgagtctttgattcaagaagatggttctactactaacgtttagggtttttttaataatgttggaggatccctttaaggagtttgtgaaatgagccatttttaggtattagctgatggtagatatcatataatcttctcatagaagccttcattgttttataaaaaaaaaaaaaaaaaaaaaaaaaaaaaaagggcggccgctctagaggatccaagcttacgtacgcgtgcatgcgacgt

SEQ ID NO: 134995 - DNA, 958 bp, Arabidopsis thaliana
  unsure (1)..(958): unsure at all n locations
tttttttttttttttgatgaaatcattgtgaaaacggatatccagcaaaatcatgcaaaatctacagagtcgccgtccttataagtaaaagattgagccttgcatgctgcttgattcgctttccttctatgtccagtaacataaagataaaagatctacatagatcctaagttctaaacttgtataggaacctccggttttaattaagagtttttgtgtcggatgatgactccctcgaagataccatctgatcggaagttaggagagaatagccgcggatcaactggccccgggaggttaaagcacagcttaaaaggtccaggcggacaacagcttcccggggtattcatctcgaacacccgagaatgtctcttgatatttttttcgcctgttgtagttgacccctccagtataaccttcccatctgattcaatctcacaggtgaatccaccgtaatctttgcggacaccgggcaaggcaacctgaaaaaagtaagcacccttgttgacacccaatgtcaacaacaccaacagatgatcctagagtttctttactggctgttccagtagttaccaaccgacggttctgcatcgcttgaaaaaggtataggcttatctgttttttctctttccataagagtttcaccattcttgtttgttgccttttttgatgagttcttgaaccgtcttctcttgtatgtctcacgaaatctttcaggggttttactcgttccactaacagcatgaccagtaactgcttcttcttccttgttctttcgcttacatgtttctggaagctttacaaatgaatagtagtcttggtcagagacaattccactgaatgcagattctccgtttctcccacgcgtccgactagttctagatcgcgannnnnnnnnnnnnnnnnnnnnnnnnnnnnnnnnnnnnnnnnnnnnnnnnnnnnnnnnnnnnnnnnnaac

SEQ ID NO: 134996 - DNA, 351 bp, Arabidopsis thaliana
  unsure (1)..(351): unsure at all n locations
gtgaacagaaaagaaaactttttaacatatgcaacaagattttggtgagggtttgtctacatgttccgggaagagagagagagagaatcagaagtgtatcttgatctagggttcacagacaaaatctccatgctttgaactaagcagaattcatctgggtcttttatctctttcaatatcaaacccaaggattgatctatccatatcgtccaaaacctatatctagctaagcctagaacttctctatcgnttaccactttctttctatatttcttctgaatttgtaacatcagaagtaataatgattccaagtatggagggaggcgggaagactaacagagaagaagagga

SEQ ID NO: 134997 - DNA, 783 bp, Arabidopsis thaliana
atgaccgcagccaagtgatgtaccatcctgagctgactcatttgctcatgaataccccttcgttgaacaatttagcttcgacgtttcagaacgagtatgttgggggaagttatggtaactatggtaactatgagcaagaagtatcctcttcttatcaagaagatccaaatgagatcgatgctctcttgagcgcagatgaagattatgaagagaatgatgataatgaaggcgaagaggatggtggtgattcagaagaagtcagcactgctcgtacttcttccagggattatggaaacaccacagcagaatcttgttgttccagttatggttacaacaacaacaacaacaacaactcaaggaagcagagtttatcgggcagtgctagtagtagtaacaatgatgggaaaggacgtaaaaagatgaagaagatgatgggagtattgaggagaattgtccctggaggagaacagatgaatacagcttgcgttcttgatgaagctgttcagtatctcaagtcacttaaaatcgaagctcagaaacttggcgttggacatttctcaaaccaatcttgaatgctaccgatatttggttcttccatcactattgtttctcgggggggttaatcatcgggcttgcgctattctggccctttctctttattttcccccctctatactcacttccttttgttggcaggatggatctattttatgtttgaatctctctatgtattttgctttttgtgtgttactgcttcgatgaagaagcaaggtttgaacaaaa

SEQ ID NO: 134998 - DNA, 467 bp, Arabidopsis thaliana
  unsure (1)..(467): unsure at all n locations
tttacaccgantcagggaccnggcctgnattcccagggctgcccactgtgtccggggctgactctaatgatcaacagcatttgccaaactggaataagatgagagtctcagtgaacatcatcacccaaaaccgagctcaatctttattaagattgcttaggtctttgagcaatgcatactaccttggtgacgaaatatcactcagcttcaacatggatagcaaagtggatgaagagacgatcaatgtagtgagcacattcgattggcctcatggaccaaaaacactaagaagaagaatcatccaaggaggcttaatccgtgctgtgagcgagagttggtatccagcttctgatgatgattttggtctcttgcttgaagacggcattgaagtctctccatattaatttcctctggttcaaaatacggtttacttgcttaccacttcggcccttaagggttttttcccc

SEQ ID NO: 134999 - DNA, 617 bp, Arabidopsis thaliana
  unsure (1)..(617): unsure at all n locations
aaacccccncccgttntttgngattggccgnatacaatttccccngnaccactttgccntggttccccaancncgaatttnccccncccttaaggggaccaaaagctggncncccaccncggttgcggccgctnnnngacctagnggacccccccgggcttncaggaatttcgccacgngccccatgaaccgtgaaccattncactggttgagcccctagttggttttgagaaatcattcaaaccacttggatgatcnccgaagttgacatcagttccaagggaattacaaagccgaaggaagtaaagaagttcaaaggagaagggatgccacttcactacagcacaaagaaaggcaacctctttgtcacttttgaggttttgtttccgtcttctctcactgacgatcagaagaagaagattaaagaagtctttgcttagtgctcttctcccgctttcgctctctctctctttagaagtttggggattaaagagaagaacatgtgatggtcctaatgtataacatgattaggttttaatatagaaagaaaaaagatatggggagacaaagtcggaaggacgttttgatcaagttgtcatttttgtttgctctttgtt

SEQ ID NO: 135000 - DNA, 759 bp, Arabidopsis thaliana
aaaaatggagccttccgtcaataaagatgaataaagtatggggaacggccccaacaagggaacccggggaccgaaaaatttcccgggggtgggaaccccagagggtgcgaacaaatgtttaagagtaaatagcatttaacaagggtttccggtcccgcggtggggccagtcaaaaaaagctatgaggtccgtgtttcaaagagaaaaaaaaggagaaaagggctggcttcgtagaggcagtgagacgagtaatgctgaaaacaaacttcggaggagcctcacaagcgtgtatctcctgaatcgttttatacaaattcatggcctgaatgtttctgtcagatgaatccgaagaggtctagtgataaatgcccgccaaataatgttatagagattcttgacagccggttagagaggatcagagatccagattcaacttctcagacgtattccacggtctctggattagaccggtaaggttcttaactggtaagcctttggaacgttttatacctaaaagtgtttcaaacaaagaagagcagaaagaagaaagatgtgtctccaccattgttcatacaattcaggtagctcaacgtctctgtgtcaaacaattttctttatgaagcatagatttgaatcttgtttcaaaatttgaaacaaaatctaagagaagtggtgggcttccaaaaaaaaaaaaagaaatatatagggcggccgctctagaggatccaagcttacgtacgcgtgcatgcgacgtcatag

SEQ ID NO: 135001 - DNA, 577 bp, Arabidopsis thaliana
acaatctcttaggtcatcgcctttactatggtttccgttcctcaatcagaccagacagaaaagcacttgccccaattttcattgcttgagagaaggggaaaagggctggcttcgaagagccagtgagccgggtattgctgaaaaccaaacttcgggggcgcctcacaagcgtgtatcctcctggatccgttttttacaaacttcatggcctgaatgtttcctgtcagatgaatcccgaaggaagtcctagtgataaaatgcccgccaaaataatgttatagagattcttgacagccggttagagagtatcagagatccagattcaacttctcagacgaattccacggtcactggattagaacggtaaggatcttaactggtaagcctttggaacgttttatacctaaaagtgtttcaaacaaagaagagcagaagaagagagatgtgtctccaccattgttcatacaattcaggtagctcaacgtctctgtgtcaaacaattttctttatgaagcatagatttgaatcttgtttcaaaatttgtaacaaaatctaagagaagtgatgagattccact

SEQ ID NO: 135002 - DNA, 390 bp, Arabidopsis thaliana
  unsure (1)..(390): unsure at all n locations
gagacaagctctgtctgtggtcgggaaatcgaaaccagagcctcggactgtgtctctgctctgcggagcatccggtggcgttttcttgaaggtgaatccagcgaacccttaatctcaagctccgagactgtgcaataaacaaaacagtagctagcagcagcagcaacacatgaactcgcgcaaatcccttatccgtgcctcaatctcttcctttccatttgttcctcttccaaaccctaatttctctatcaccttcatctccgttcgcgcctttcctcctctctctgtccttcatccaaattnatcatgtattgtaacaagttcgacggacatttaatnggagctgtggcncttttaaccggagaggcttaacgggaggagtttcccang

SEQ ID NO: 135003 - DNA, 454 bp, Arabidopsis thaliana
gcgcttaacgttcatatgcttctttttcttcttcaagaaacctatggattcacgagttaacttcgatttgcctccgagccctccttctctaccaatcattggtcatgttcaccttctcctctctactctaacccacaagtcattacagaaactctcctccaggacacaagacgtgaacatctcctctcgcggtgtcaccgcggttgatgagtccctcgtgtttggttcttccagcttcgtcactgctccttacggagattactggaagttcatgaaggaagcttacttgtcatgaagctttctcggaccggcaggcaacaaggagcagtccacgggggacatccgctgcaagatgacattaaaagcggttttgcaggaatctgctcgataaagcaaggaagaaggagagcgttgagattggtaaagaagcaatgaatctcatgaacaacatttt

SEQ ID NO: 135004 - DNA, 533 bp, Arabidopsis thaliana
  unsure (1)..(533): unsure at all n locations
cttgaagggtcagagtctaagacagaaagtgttgctgaagaggagccggatcttcctgggaggtcttctatacaggatgatgaatcaaatgcagaagaaactgatgatcaacatcttgcatctgaccatgccacagacatcacaagagaagactcgaatgataaaagcaaagaggttgttgaagaggagacagtagagccatgtttcaccacaagagaagactcggttgacaaaagcaaagaggttgaagaggaaacagtaaagccatgtctcatagaagacgcgcttacaagccagaatgacaaaacctcatctggtgaccatcctgttgaaataaacggaccaatccagttgaaagcaagaatttgggaatctgaaaacattggaactggtatcaaanttgcttcaactgaggtagngtcaccagcctttgatgatcttnaccgcancagntttaaaggnaccccgnggttgatcttncaaggnccattttcagctgnntgttnttttnacgggtgggccatttcttgaat

SEQ ID NO: 135005 - DNA, 1013 bp, Arabidopsis thaliana
cgtccgagcgaaacaatgattgagctataacataggcgaaacttgagcggctctaattgaaaatcactccttgtttttttgaggaaaaagtaagatgtagggctgagaattcgtctatgtgatccaacggttttaaaatgatccttgttccttcctctcctatttatctgaaggacgaagccccacgctgcacataaccggggcacttaacgtatagatcataaacaaagaagaagaaaaaaaataagaaaagaagaagaagatgtcgtggcaaacttacgttgatgagcatttgatgtgtgatgttggcgatggtcaaggacaccaccttactgctgccgctatcgttggtcatgacggtagcgtttgggctcagagcgccaacttccctcagttcaagggacaggagttcagtggtattatgaaaggtttcgccgacccgggtcacttggcacccaccgggattttttcattggcaggaccaaagtacatggggatccaaggtgagcccggggctgtaatccgtggcaagaagggagcaggaggcataacgataaagaaaacaggacagtcatgtgtgtttgggatctatgaagagccagtgacaccaggacagtgcaacatggtcgtcgagaggttgggtgattacctcctcgaacagggtctctagaatcttcttacaatgttccaccacctacatttttttataaggccattgtttctcctatttttttcctttgggtgatttgcatctctttctctaattgatattataagttttgggctaatggaccttcctggtttctccccatagcaaacttttaagaaagctgaagcctaaaaggcttttactctctttgccttggtttcttatttatatgcatgttttagttgttttctctttgcttttttgtcaattgcattctgtctaaaaaaaaaaaaaaaaaaaaaaaaaaaagggcggccgctctagaggatccaagcttacgtacgcgtgcatgcgacgtcagagc

SEQ ID NO: 135006 - DNA, 1004 bp, Arabidopsis thaliana
  unsure (1)..(1004): unsure at all n locations
aaaaattgtgtagaaagctagatgatgatgcaatcccgattattagcgtttgcttcagcggcgcgttcacgtgttcgaccaatcgctcaaaggcgtttagcgtttggatcatccacgtctggtcgcacagctgatccagagatccatgccggtaacgatggagccgatccagctatctatccgagagaccctgaaggtatggatgatgttgcaaaccctaaaacggcggcggaagaaatcgtagacgatactccccgaccgagtttagaagagcaaccgcttgtaccgccgaaatctccacgcgccactgcgcacaagctagagagtactcccgttggtcacccgtcagaacctcatttccaacagaaacggaaaaactccaccgcttctccgccgtcgcttgattccgtgagctgtgctggtttagacggttcaccatggccgagagacgaaggagaagtggaagagcaaaggcgaagagaagatgaaacagagagtggccaagagttttacaaacaccacaaagcttctccgttatcggagattgaattcgccgatactcggaaacctattacgcaagctaccgatggagctgcctacccagccgggaaagatgtgatcggatggttaccggagcagctagacacggcggaagaatctttgatgaaagcaacaatgatattcaaacgcaacgcagaacgtggcgatcctgaaacgtttcctcattctagaatcttaagagaaatgagaggcgagtggttttaaactaaagaccacaataaaatgttaagaagtgtctgaataaacttttgtcaattagcttcattgagacattttggttccttacgaaagtgaacaaagcctctttatgtcccaaatctctagaaaccctaaaatcaaaagaatttgttcgtaaaaaaaaaaaaaaagnnnnnnnnnnnnnnnnnnnnnnnnnnnnnnnnnnnnnnnnnnnnnnnnnnnnnnnnnnnnnnnnnnnaacgaaa

SEQ ID NO: 135007 - DNA, 519 bp, Arabidopsis thaliana
gaaactttggttccatcgtctctctacaaatcttactgctttgaccacctggtgattgctacaagagattattgttttgctccttccatggaagcaatatgccaagctgtagaatttatccatagaaatgcttcgcttggaaagacgacttatgttcactgcaaagcgggtcggggtcgcagcacaactattgtcatatgctacttggttcaacacaaaaacatgacacctgaagcagcatattcctacgtgagatcaatcaggcccagggttcttttagcagcagcccaatggaaggccgttgttgagtactaccatgtcaaggtgctgaatactcagagttgcttaactgatgcaacttcagctttgatcccgagaaatgtgaagcaggtttgttcctgggaatgtagggggtgtttgttgatgggtcaatggttgtagtcacccactcggatctagagggctataatgatgatgactcacggtcacgaggtcagtgaaagttaatgggaatgagct

SEQ ID NO: 135008 - DNA, 403 bp, Arabidopsis thaliana
gactagttctcggggctgcagttctctggtggctctccctcgacggcagcgttttctcagtcacacgcggtggctgatacaataacggcactcacagctgacccgaatttcacggcggctcttgcagccgttatttcttctatgatcaatggtacgaaccaccacgacggcggaggaaacaacaaaaatcaatagaaaaatattacattttttttttggggatctacaattttttttccaactgggttataggaaacagagagtttatttcattgattcacatttgttctgtttcgtaccaaaatcccagtaaatatacaaaagcaaactatactcaagttcatattcgtaaacactataaatagttacgtaacttaattagcattgcctttaaagctttaat

SEQ ID NO: 135009 - DNA, 500 bp, Arabidopsis thaliana
  unsure (1)..(500): unsure at all n locations
gcgtccgtagatgctgttcatgctgccattggccggcatctaccttttgtttcaaatatatccaaatataatttggtcaaagaagactttactcgagctatgcatgattttgtgcctgttgccatgcgtgacatcacaaaatctgcctctgaagggtggtcgtttggggtgggaagatgtgggaggtgtgactgatattaaaaatgctatcaaagagatgattgagctgccatcaaaatttccaaaaatctttgcaaaatctcctctgcgtttgagatcgaatgttctcttgtatggcccacccggttgtgggaagactcacattgttggcgcagctgctgcagcgtgttccctacggtttatttcggtgaagggggcctgagctgttaaacaaatacatttgggtgcatctgaaccaagcgggtccgngatatantttncgaaagnagcagctncaagctccatgcatacnctttttngntggnntcgnttaattngga

SEQ ID NO: 135010 - DNA, 514 bp, Arabidopsis thaliana
tcaacaagctgcatctcttacagagtttagttggcttggctacagatttccagtttcgaatccaaaatctcgggtttctattttaaaagctcaggaacttgagaaggaactacagagtccaacagcagaatctctccctgcagagaaaaagctaaccatttttgataaattattcactgcatatcatggtgccagggacacggtacgcagtgaccttggtaagtgcaggtaatgctggatctgttaaaggtgaccctaaatcggtttggacaaagctgttgcagctgtgctagggcaaagaacccttgtaagggaccccttgcttggttaaagttgcaaagggttaaccgtacaggaaacgtgatgataaaaatgataaagctactaggcctgaagagcttgttcgattgtatgaccttctattacagaatgtcgctgatctttctgatctcattagctctggaagagacaggaaacctgaagagattgcctttgaagaagagtgtcagcgcac

SEQ ID NO: 135011 - DNA, 520 bp, Arabidopsis thaliana
  unsure (1)..(520): unsure at all n locations
acctgagaatctcatctctctcggatgtagaagaagatgttgacgatgaagaagcgaacgatgtccgcatggggatcggcgattgtaatcttcataatacttatgatcgtcactcccacaatccctcaatctcaggcttaccacaatgtcgccgatcaacgctccttcttcgggattccaaattttttaaacgtcatctccaacttccctttcctcatcatcggctttatcggtcttatcctctgcttttacccagaagattactttagcttttagtttgcgaggtgagaaaataggatggacttgcttttacatcggtgtagctgctgttgcttttggatccttcttaactatcatccttcacccaaacgggtgctactctcctctggggtcgtccttcccatgactattgctttcacatcaatcatggctatatttgtaatcgagagggctgttgagcataagggtaccttctccatggcccttatttttcnggttttaananttttttttggggttt

SEQ ID NO: 135012 - DNA, 521 bp, Arabidopsis thaliana
  unsure (1)..(521): unsure at all n locations
gcagtttgtnttgatgatcctgagtataagcacatcactaacatcaatgaacttcctcctcatcgtctttctgaaatccgtcgattctttgaagactacaagaagaatgagaacaaggaagttgcagtgaatgattttntacaacctggtcctgctattgaagccattcagtactcaatggatctttacgctgagtacattcttcacaccctgaggagatagatgaaaagaggacttcttcaagaacattcctgccaatttttgggtctgcaatctcagattctgttgcagtgaatatgcaaaagaacaagaatttggtcttatatttggattttttttggaataagcacgtgtctcatattttggctttgacggctttcccttttttgttggtggttgttgttgttggccctcctcgggggatgtttttgtccttgaacattaaagaggttttgtatttgtgaaaacactgcccctttgggtccctttttttaataatttcaagcttcgatttggttccg

SEQ ID NO: 135013 - DNA, 1086 bp, Arabidopsis thaliana
  unsure (1)..(1086): unsure at all n locations
agctgataccgaaactgatcctatattgaagcagaatctggtatctttggaaagtaaagtcaagaagatagataaggaaatggagaaacacaatgaccttttgaaggagattcaagaaaacccaacagacataaacgcaatcgctgccaagagacgcagagactttacgggagagtttttccgctatgttactttgttatcagaaactcttgatggcttggaagaccgagatgctgttgcgaggcttgcaactagatgtttatctgctgtgagtgcttatgacaacacgttggagagtgttgagactctagatactgctcaagcaaagtttgaagatattttaaactctccatccgtggattctgcttgcgaaaagatcagaagtttagccaaggcaaaggagcttgattcctcattgatcttattgatcaacagtgcatacgctgctgcaaaagagtctcaaactgttacgaacgaggctaaagacataatgtatcatttatacaaagctacaaagagcagtcttagaagcatcacaccgaaagagatcaaacttttaaagtacttactcaacataacagaccccgaagaacgattctctgccctagctacagcattctctcctggtgatgaccacgaagctaaggaccctaaagcattatacacgacgccaaaggagctgcataagtggataaagataatgcttgatgcttaccatctcaacaaagaagaaacagacattaaagaagctaaacagatgagccaacctatcgttattcagcggcttttcattctcaaggacactatcgaagacgagtatttagacaagaaaacaatcgtggctgatgaaactccaaagaaggaagaagaagatacgactattgaagattttttgaactgaaaattgtgaaatccatgaacacactctgtttacaattagtaccttttatgtaatggggaaaagagtaattttgtagaaaaaaaaaaaaaaaagnnnnnnnnnnnnnnnnnnnnnnnnnnnnnnnnnnnnnnnnnnnnnnnnnnnnnnnnnnnnnnnnnnnaacgaaatgtacaaccaattttccc

SEQ ID NO: 135014 - DNA, 564 bp, Arabidopsis thaliana
  unsure (1)..(564): unsure at all n locations
agtgaagtatgtaatctttgacaaatcaggcaccttaactcttggaaaagctactgtgacaaccacaaaggtcttctcagagatggaccgtggagaattccttacacttgttgcgtctgctgaggctagcagtgaacacccattggcaaaagctatagttgcgtacgctcggcatttccacttctttgatgaatccactgaagatggcgaaacaaataacaaagatttgcaaaactctggatggttacttgatacctcggattttctctgctcttcccggaaaagggattcagtgcttagtcaatgagaagatgattctggtgggaaaccgtaaacttatgtcagaaaatgccataaacatcccagaccatgtcgagaaatttgtggaagatcttgaagaaagcggaaagacgggagtcattgtagcctataatgggaaattagttggtgtgatgggaatcgcggntcctctaaagcgngaagccgcttttggttgtggaaggtctccttgggaatgggtgttcggcccataatggttacaggtgatacctngnggacagcaag

SEQ ID NO: 135015 - DNA, 519 bp, Arabidopsis thaliana
  unsure (1)..(519): unsure at all n locations
ctgcgcacccacgncgtccgnatggtcttggtctctcccagggtctggagttgcgggttgctactgcccacatgcaatcttctggcagattgggaaattctactccgggtttcagtcatcagaatccccgtataccattaggtgaatcacatttttcacatttggaaccaacggaaggacgctggtctggagccgatacacagctagctggtgactgggccgaatctcaatttcgtagatctaatatggatactgagcatgataaaatgaggtcggaaattaggagactgggtgaagatcccaactcatggatggtaggtggatctacagacggcaagtcaaagcagcttttttatggggttgctccaccagagacctggccatcaatcttgcttgggtcaccaaacatgaaccgtggggtatccttatgacaaggatgggttccctnnagggcttnaccccagggnttnaaancggttggngggccttttaaancatnggtggaatnaaaacggttaa

SEQ ID NO: 135016 - DNA, 964 bp, Arabidopsis thaliana
  unsure (1)..(964): unsure at all n locations
gattnagggaccnggcctggaattcccagggtnaacccactgcantccggctagaaccatcaccaaccaatcccctaaaccgaattctacccttaaccagcgtaaaccgcccttaccgaatctatccgtctcgagaacggtttcaacaaagacagagaaagaggaagaagagaggcactacaggggagtgagacgaagaccgtggggaaaatacgcggcggagattagggatccgaacaaaaagggttgtaggatctggcttgggacttacgacactgccgtggaagctggaagagcttatgaccaagcggcgtttcaattacgtggaagaaaagcaatcttgaatttccctctcgatgttagggttacgtcagaaacttgttctggggaaggagttatcggattagggaaacgaaagcgagataagagttctccgccggaagaggagaaggcggctagggttaaagtggaggaagaagagagtaatacgtcggagacgacggaggctgaggttgagccggtggtaccattgacgccgtcaagttggatggggttttgggatgtgggagcaggagatggtattttcagtattcctccgttatctccgacgtctcccaacttttccgttatctccgtcacttaaaacttcggaaaagtcaacgtacgatgacgttttcacttgcgtcactctcatgatttcatttattcttgtataatataaaggtagcggtagtgtgcaaatatcaaataagtagtttaattagtaccaatcattttattcattattttttttagtagaatatttggatgttgaaaatataaatttaattttgtatttgttgatgttataaatttattgattgtataaaaaaaaaaaaaaagnnnnnnnnnnnnnnnnnnnnnnnnnnnnnnnnnnnnnnnnnnnnnnnnnnnnnnnnnnnnnnnnnnnaacggaatgacacca

SEQ ID NO: 135017 - DNA, 623 bp, Arabidopsis thaliana
  unsure (1)..(623): unsure at all n locations
gaggntgaacccncccttgttttttncccctntttaaagaaggncgatccccggtactcttatccccacttccaaacataccctatacaacagggcaagagagtcaatcaagtagagtgaagatggcaactaaacaagaagctttagccatcgatttcataagccaacaccttctcacagactttgtttccatggaaactgatcacccatctctttttaccaaccaacttcacaactttcactcagaaacaggccctagaaccatcaccaaccaatcccctaaaccgaattcgactcttaaccagcgtaaaccgcccttaccgaatctatccgtctcgagaacggtttcaacaaagacagagaaagaggaagaagagaggcactacaggggagtgagacgaagaccgtggggaaaatacgcggcggagattagggatccgaacaaaaaggggttgtagggtcttgctttggncttncggcacttncgtgnaagcttggaagagcttttgaccangnggcgtttcaattacgttggaggaaagnaatcttgaatttccccttngatnttagggtncgnagaaacttntcttgggaggggtntnggtttgggangaagcagtaga

SEQ ID NO: 135018 - DNA, 531 bp, Arabidopsis thaliana
  unsure (1)..(531): unsure at all n locations
gtaaacatttactctaaacgtagcttatcagagctttaaagtgatcgatggattgaatctatacggttgcatcagtatactctctctgctttatctgtttcccgtggcgattttcgttgaaggatcacattgggctccaggttaccataaagccattgcatctgttgggacaccatcaacgttctacttttgggttttgctctctggtgtcttctatcatctgtacaaccagtcttcttaccaggcactcgacgagatcagtccattgactttctctgttgggaacacgatgaagcgagccgtggtgattatctcccactgtttttggtggttaggaatcctgttagacctctgnaatgctcctttgntcnnccattncgnatttttgggaacctccttgtattctcaaggcccntcaaagaaggaggagnnttaaagtnggngggtgtaaagaaggnctaaaggttttaagggnaaaaccaagggttctttggntttttttnttccaaatttttttttccncnnngtttt

SEQ ID NO: 135019 - DNA, 463 bp, Arabidopsis thaliana
cggcaatggctttctcacaagctgctctctctgcgttgcctctttctgatcgaactttccgcaaaaagccatcttcttcttcttcatcttcaccgaatttcgttctgagagtaagagctgctgcaaaagaagttcactttaaccgtgatggctctgtcaccaagaagcttcaggcaggtgcagatatggtggctaaactattaggcgtgacgttaggtccaaagggacgaaacgtggtgttgcaggacaagtacgggcctcctaggattgtcaatgacggtgaaactgttcttaaagagattgatttggaggacccgttagaggatgttttggagtgaaactttgtgatggcaagcggggtgctaagactaatgaccttgccggtgatggttccactacatctataattcttgctcatggccttattactgaaggtattaaggtgatttctgctggaacaaat

SEQ ID NO: 135020 - DNA, 541 bp, Arabidopsis thaliana
  unsure (1)..(541): unsure at all n locations
ccgcgtccgaagaagtactcacttcgccaacaggattccaagttgcagatcttccactggacccaatgatatcaaaaatgattttggcttcaagtgagcttggttgttcacatgagatcattacaatcgctgcagttctctctgtccaatctgtttggatcattgcccggggagtacagaaagaacaagatgaagcaaaactgagatttgcagccgcagagggtgaccatgtcacattcctgaatgtatacaaagggtttcttgagtcggaaaagcctacacagtggtgttacaagaatttcctcaactaccaatccatgaaaaaagtagttgaatcagggtcaactcaacgggttnctcggggttagggntaccttggaatcatgtgacggggncatggnggctttnggaaaagcttttcctcaggtttttttcccatgatnncgtttgggccccgnaatggggtttcagcccttgggggntttnggggtttttncccgcnctttttttnggggggcnccaaggggggtnccnccttttt

SEQ ID NO: 135021 - DNA, 610 bp, Arabidopsis thaliana
  unsure (1)..(610): unsure at all n locations
cngnttcnccccctctgtggggcaatgcagtcaaagagctaacccgacagtactgcaacctactcggtgaatcatctgaaagcccgttgagtataacagtaacagcgggcacacaagcgttaccagtactattgaaatacatgaacgtggtgatggcgaataagaagcttgattggcagaccatggaacaacttcctgttgatgcgcaactatccgaggagtttcagtttcattcggtgtttgtctgtccagtctctaaagaacagtcaagtgatgataaccctccgatgatgatgtcttgtggacatgtgctttgcaagcagacgatcaacaaaatgtcaaagaatggctctaagtcgtcgttcaagtgtccttattgcccaaccgatgtagacatctcaaggtgtaggcagttgcacttttgaaacgaaagctcgggaatttgtacgaccgatataactggaactaggttctgaatcgggggaatctgtgtcaaaattgtaaccttgtggggtcctctgtttctttttttcatgaagttttttaagtgatggggctttggtgtacaaattgatcaggggaagtttttagatgattggacatcccataa

SEQ ID NO: 135022 - DNA, 460 bp, Arabidopsis thaliana
  unsure (1)..(460): unsure at all n locations
catgtttctggatggtcatgacacttagtggacttctagggcttgccattagctttacttcaatgtggtttcttcatcaaactggagcaacaacatacagcctggtgggatctctaaacaagatacctctatccatcgcggggatcgttcttttcaatgtaccgaccagtttgcagaactcagcaagcatactctctggtcttgtcgctggagttgtatttgctagagccaaaatgagggagaagtcctaaaatactaaccatctacaacacattttactacatcaatcagtataggccatggcaaaaagctgattaaagcagagcaatgaggtttataaccctcagaattctatgcacgttaatgtgtttctggtaaaagctttcggcactctacttgtataatgnnagtaaatnttaatggatgnntcggttctgnngtgggaagggnagttttggtt

SEQ ID NO: 135023 - DNA, 500 bp, Arabidopsis thaliana
ctctgccccactgcccactccagtcgcttctcctctcaactcgatggggtaggaaaactctgtccacgggctagttctgtgcatttgtgtgaccctgcactacacaagctgctgaactggtttcacagcgaccctactagtgtacccgtccatcttcatctcctccctcctcctcctcctcgttgatctcctcctcattcttcgttgtcctatccctcgtcttcctctcctctggcattgatccagctgcagctgttgattgattggctgttgtgttgatctgttgttcctccctcctcctcctcctccttctgtcgctatgtctaacggtgagctggagcagactcatttcggtggcttggcaaggtgttcgggggccaagtgcccaagctcgagtcgagtgaaggattcaaagctgcttcctggtccaagactcccctgtggactggtcgactgcgcgtggtgagtaagggggacaaggtgtcggtgctgctggagca

SEQ ID NO: 135024 - DNA, 494 bp, Arabidopsis thaliana
tgatcttttaatgctcttttgtccttggagaagaatcatacatgcatataccgttacttctgatgatgattcagattacaagaatcttctaacatcttcttagaaaagcttctttcctgcaattagtggtttttatggttaaaatctgggaacttcaagaggcatgaatagatgtgcagaagttttcggttgatattgtcactcgctataggtttattgaggagctcctttaagctaagtagtccacatagggttatctacagggggataaagcctgaaaatgtgtgtggttttagggggaatttcagaaattttaacagtaaataggatttatgatggggtatcaaagtgggggtatttgcacctatgcatgaagttcacgatggtacatctggaatttcttcggagtgtgacggcagtctcagttttcgtttttggcttcagagactgactgataacaccagtatgattcatatgaagttagtcaaatttac

SEQ ID NO: 135025 - DNA, 402 bp, Arabidopsis thaliana
  unsure (1)..(402): unsure at all n locations
ggaagaagaagtttcgtccggaagctggtcagagctgtagcctccggagattccgtggctccggcgatttcggaagaatcaaaagtgaaattgggtggctcggatttgaaagtgacgaagcttgggatcggagtctggtcatggggtgataacagctattggaatgatttccagtgggatgacaggaaattgaaggctgctaaaggtgctttcgataccagtcttgacaatggtattgattttttcgacaccgctgaagtttatggttccaagttttccctgggtgctataagctctgaaactcttttaggaagattcatccgtgagggaaaagaggggtattcccgnagcttagggtttcggttgnaaccaangtttcctgnatnnccatgggggttttng

SEQ ID NO: 135026 - DNA, 482 bp, Arabidopsis thaliana
tcgattcgtggatggaaaaagtgggagcaagagacattatctaatgactatgagttttctattgatcattcaagacttaggctcactcatgagacttcttttgtgagagaacatacaagtttctggacaacaactcctttcttcttttacgtcggatgcttctttaggcagttctttgtatctgttgaaagaaccgactacttgactctgcgccatggattcatctctgcccatttagctccaggaagaaagttcaacttccagagatatatcaaaagatctctcgaggatgatttcaagttggtagttggaataagtccagttctttgggcatcatttgtaatcttccttgctgctcaatgttaatggctggggaccattgttttgggcatcggtaccgcctctactcataatcccaggctgttggaaccaagcttcaagcaattttggcaacaatggcgtagaatcgtgggcacatacgg

SEQ ID NO: 135027 - DNA, 482 bp, Arabidopsis thaliana
  unsure (1)..(482): unsure at all n locations
tcgattggacggaccagcaatggagagtgctgcggttggagctactttggggatgtggtcatgacgctggtcagctcatctttggtttattgtttctgcttctaaaagataggctccacattgaagttataagaacttggggtacaagagttgttggtttgactctccttgtgattggtgctatgggaatcaaagaagcttctgagatgccggaaccatgtgttgttacttggagaatggggaaacagatgagaaaagcttaaagaaggaaaagatagggtttgcgacatttgcgactgggattgttcatggcctgcaaccggatgctctgatgatggtatttcctgcattggcttttccttntcgggtaanccgtccttcggttcccaacaaagtctttnattggancggtntttccaatnggangccccaaaattttatttggncccttnangcgggtnaaaangaaaatnncccgggnc

SEQ ID NO: 135028 - DNA, 682 bp, Arabidopsis thaliana
  unsure (1)..(682): unsure at all n locations
ggtacttgatatgatagaaaaaggaggagtgaaaggtttagctcatatcacaggcggaggtttcacagacaacattccccgagtcttcccggacggtttgggtgctgttattcacaccgatgcttgggaacttccaccgttgttcaagtggattcaacagactgggagaatagaagacagtgagatgagaaggacgtttaacctggggatagggatggttatggtggttagtccagaggcagcttcacggaatactagaagaagtcaagaatggaggctatgttgcgtatcgcgtaggagaggttgtcaacggtgaaggcgtaagctatcagtagagtgttgtgcgttcttttttcttctgtgtttttctaagttttcgtttcccaccgtttttaagaattaatccatttgtctacggttttatgaggttacaatcgagatgaggcattttttaagacgtcgtgttattatttgatctaattttttaaaaacaaccaatgtgattggtctggtttattctctttgtcgcacaaacagatgttgaaagatattctcgttctaattatataaaatttaaacatgttgtttgcctaaaaaaaaaaaaaaaaaaaagnnnnnnnnnnnnnnnnnnnnnnnnnnnnnnnnnnnnnnnnnnnnnnnnnnnnnnnnnnnnnnnnggtaa

SEQ ID NO: 135029 - DNA, 764 bp, Arabidopsis thaliana
  unsure (1)..(764): unsure at all n locations
cccatgttaaccgcagccggagacgatgaactggacccggtcgtgggaccagaatcggcaacggaagcagccactccaagagtgctgactataatctcccatgtgatggagaagctcgtggcacgaaacgagtggttagctaagcaaactaagggatttgggaagagcttggaggcgtttcacggcgtgagagcgccgagcataagtatagctaaataccttgagaggatatataagtacacaaaatgtagcccggcatgtttcgttgttgggtatgtgtacatagaccggttggctcataagcatcctggttctttggttgtctccttgaatgttcatagactcctcgtcacttgtgtcatgattgctgccaagatactagatgacgtgcactacaacaacgagttctatgctcgggttggaggcgtaagcaatgcagacttgaacaaaatggagttggagcttctctttcttcttgactttagagttactgtgagttttagagttttcgagagctattgctttcacctcgaaaaagagatgcaactaaacgacgtcgtttcttccctcaaagatattcaaccaatgcaagaaagtctctctccagcatctactttatcatctttatatgtttgatatatgtatatgaatttttttaatataacttttaaaaaaaaaaaaaaaaaaaaaaagnnnnnnnnnnnnnnnnnnnnnnnnnnnnnnnnnnnnnnnnnnnnnnnnnnnnnnnnnnnnnnnnnnnaacg

SEQ ID NO: 135030 - DNA, 542 bp, Arabidopsis thaliana
  unsure (1)..(542): unsure at all n locations
cccatgttaaccgcagccggagacgatgaactggacccggtcgtgggaccagaatcggcaacggaagcagccactccaagagtgctgactataatctcccatgtgatggagaagctcgtggcacgaaacgagtggttagctaagcaaactaagggatttgggaagagcttggaggcgtttcacggcgtgagagcgccgagcataagtatagctaaataccttgagaggatatataagtacacaaaatgtagcccggcatgtttcgttgttgggtatgtgtacatagaccggttggctcataagcatcctggttctttggttgtctccttgaatgttcatagactcctcgtcacttgtgtcatgattgctgccaagatactagatgacgtgtaagtaaagcctttcctgaattcctataaaacctggaatttggcctactcatgaacctttgggcccnaggtggatcctaattggttacccaaatgaaggtccatttttttccccccattttaatggggcaacttgtcccatatggtgtagnc

SEQ ID NO: 135031 - DNA, 663 bp, Arabidopsis thaliana
  unsure (1)..(663): unsure at all n locations
ggnnnnnnnnnnnnnnnnnnnnnnnnnnnnnnnnnnnnnnnnnnnnnnnnnnnnnnnnnnnnnnnnnnnnnnnnnngcccacgcgtccgaaaagacgaagaagcagacgcagagaagatccgaattacccgaaaccgaaccggagcggttacaatttcttctttgctgagaaacattgcaagctcaaatcactttatcccaacaaggagagagagtttacgaaacttatcggagaatcgtggagcaatctctctaccgaagaacgaatggtttatcaagacattggattgaaggataaggaaaggtatcagagggagttgaatgagtacagagaaacgttgagacttagggatggtgacatgacaaacggcaaggctttttaggtgatttagttaaaacggcaagtcgttttgttgtaggtcgtttctctcttttaagattggacgcctcgccgtttcttttattttctagcttattgtagttgtccatgcttgcttaactaggctcagtgagaggctagacttgccaaacttgaagagtctttatttatttaagaattttagatgttctaatgtattaatcctttttcgaaaaaaaaaaaaaaaaaaagggcggccgctctagaggatccaagcttacgtacgcgtgcatgcgaagtcatag

SEQ ID NO: 135032 - DNA, 514 bp, Arabidopsis thaliana
tattccaggaccgaaattgttcttccataagctcgttcaaccattctggggtaaaattgagacagagaagtatccacaagtggtaattgctgatctcgatgatgagctcatggggttaaagctattgcattatgatgctaagattctctgcattggtcagggatcggattctgctgtttcagggttcaaagagatgggtttctcagttgttcaaggggttcctaagcatccattgttttcctttttcagtaggaagcatgtcaacgagcttgagcttagtggtgacaagtcttttgatttcgtgctctgtggggatgttgatcatgttgcttccccctgctcttcttgtgcttgagatggagccggggtctgaagccctgggtgggaaccggacgcagtccttgtgagtactaaatgcccaaccggtcttgtcaaaacccgggacttcggggcttaacgagtctgagatagtgcgtgtgaacaacttggataagttcaccgtcattgtattcaa

SEQ ID NO: 135033 - DNA, 465 bp, Arabidopsis thaliana
  unsure (1)..(465): unsure at all n locations
gaatgaatatgccttctatgatgcttcctatggccatgcagcaacaacaacaactacaaatgtctctcatgtccaatcccatgggtttagggatgggcatggggatgcccggtctcggtctcctcgaccttaattctatgaaccgagctgctgcaagcgctcctaatatccatgccaacatgatgccaaacccatttttgcccatgaattgtccatcgtgggatgcttcttccaatgactctcgatttcagtctcctctcatccccgatcctatgtctgcctttcttgcatgctctactcagccaacgacgatggaagcgtatagcagggatgggctacattattatcagcaaattgcaacancaacttcntncttctttcgaatccaaaatgntttantactnaaacacctctnttatagtttacgncnntattatgngttngtcacattacatncanntatat

SEQ ID NO: 135034 - DNA, 583 bp, Arabidopsis thaliana
gtttttcgtctggtcccatagtgaatcgtggctcagatggcttcctagggtttgtggaaatcggagaggggaatacagatttgagatgcaaagtagctccagctccggtggtgacgaccttgaaaagcagcagcagcagcagcagaaggacaagtctccccagaagcagagcgagtcagccaatgaatcgaaccacctcacaatcgttgtctgcaatggagattctagtcgggaagaattggtgggtcagatcccaccggaaaaggaggttagcttatccagaaacggaagctcgcacgagcagtgcaggcgtttgtctacaagacaaagaagaggcttttgattgaactcaggttgtcaatgtcgtgcggtggtcttgctaaagctcacaggtcttgtatagatgcttggtttcgtactaaaggctctaaccagtgtgagatctgtcaagttgttgctgttaatgtcacacctcctgagactcaaccaactacaaactattgggtttggaggattgatcctagctatagacaagaagagcgtgagagaggatgctttagtccgctttgggttgcattttcga

SEQ ID NO: 135035 - DNA, 913 bp, Arabidopsis thaliana
  unsure (1)..(913): unsure at all n locations
tctctcttctctctttcatatcttttagatgagaggggcctctgtttttcttttgtaatctccttctaaaatcggagctttttggtttgtgctttaggcttccggtattgttgccggtttctctttccgacttgttcggatttacttccgactttgttcggttttagttgttttctttctcttttggttgtcttttgcaggttcaaattaacacttccaattttgggaagctgaaaattccggaagtcatcaaatggatccttgttcattgagtgcttgattcttctcccaagtgaaggtaattccttgctccgccgaaagggcttgttgagagcgttggttctccttggtggattgatcaagttgatgcggttgatttgggacgggatcatgaagaattggagtcttcggcttgttttgatgattctctgatgaatatttcgagctaatcggctgaagttaaaaattttcgtgatcaagtttaggtccagccaatctcttccggtggtctatggcataaggcgagttggtacaatcgaaggcacatatagaggtttctcggagggttgagtcgatctaccggctgatgaagaaaatttccggtgatgatgagtcggtgacggcgtagctgacgaaaccttctcttctctcaacatctcacgttgcataacacgtgtcattttgttttccttatcttgttgtgtttgcaattagtgggccaactttggtcttcttctgtaccgaatatttgcccacttgggctttataaaacatattgggcatccaaaaaaaaaaaaaaaaaaaaaaaaaaaaaagnnnnnnnnnnnnnnnnnnnnnnnnnnnnnnnnnnnnnnnnnnnnnnnnnnnnnnnnnnnnnnnnnnnnnnnnnnnngaaccccaaccggggcggggc

SEQ ID NO: 135036 - DNA, 724 bp, Arabidopsis thaliana
tctttcacaagtaacagtactggccatcttacctttggttccgctggaatctctgaatccgttaaattcacaccgatttcttccttcccaagcgcattcaattatggcatcgatatcataggtatcagtgtaggcgacaaggaattagcgattactccaaactcattctcgaccgaaggtgctataatcgactcaggcacagtgtttactcgcctccctaccaaagtctacgcggaactccgcagtgtttttaaggaaaagatgtcgagttacaagagtacgtcgggatacgggctttttgacacatgttacgatttccctggcttggatacggtgacatacccgacggttgcattcttccttcgccgggtagcactgtcgtaggacttgatgggtcaagggatttcggttcccgatcaaagataatcacaaggtttgttttgggcgtttccagggaaatgatgcccttccccccatcttttggaaccgttcaccagacgccgctagattgttgtgtaccgccggtggctggtggccgagccggttttgctcccaatgggtgttaattagctccttgaccaaaaaaaaaaggagagggttttgtaatttgagtaagggtttggctcgtaaatttagctcctttttttaaaaaaaaaaaaaaaaaaaaaaaaaaaaaaagggcggccgctctagaggatccgagcttacgcacgcgtgcatgcgc

SEQ ID NO: 135037 - DNA, 650 bp, Arabidopsis thaliana
  unsure (1)..(650): unsure at all n locations
gttggaattgatattgctgaagggtcgattgaagattgtcgcacgcgttataacggtgatgcagaccatcatcaacggcgtaaaaagttcagttttccgtctcgattattatgtggggattgttttgaggtagagctagacaagattcttgaagaggatgccccttttgatatctgcagttgccagtttgctatgcattactcatggactactgaggcacgtgcacgacgagctttggcaaatgtttcagctttacttcgtccaggaggtgtctttatcggaacaatgccagatgccaatgttattataaaaaaactcagagaagctgaaggtttggagattggtaatagtgtttactggattcgttttggtgaagagtattcccaaaagaagttcaaatctagcagccccatttggtatccgaatacggggttcatctcgaggatgcctgttgattgtcctgaaatgggtttgtgcccttttaacggcttcaaagtctttagcgggggagtattgattttanaggttnggaattttttgaagaccnccncggggtttnnccncngggtttttnaaaagccncnaggttttngaccccattaggaggctttggnccttttggggatngncnaataccaagcccatttaac

SEQ ID NO: 135038 - DNA, 825 bp, Arabidopsis thaliana
  unsure (1)..(825): unsure at all n locations
agcttggtcacattgttacaaattatcatgtttttgctaagttagctactgatcagtttggattacaacgtttttggttgtttgtgtaggtgtctctagttgatgctaagggaacaagatttagcaaggaagggaaaattgtgggtcttgatccagataatgatctagctgtgttgaagattgaaactgagggacgtgaactaaatcctgttgttctcggtacctccaatgatctacgcgtaggtcaaagttgctttgcgattgggaatccatatggatatgaaaacaccttgacaatagggggtagtaagtgggttgggaagagagataccttcacctaatgggaagagtatttcagaagctatacaaaccgatgctgatattaactcaggcaattctggagggccattgcttgattcttatggccataccataggtgtgaacactgccacattcacccgaaaagggagtggtatgtcttctggtgttaactttgccattcccattgacacagttgtccgaacagttccgtacctcattgtgtatggaacagcttatagagacagattctgaagtaaaccaaacatcttctttgcattttgtctatcactttgtctattgtttgttgataatacaattcgaaaagtttcagacttgtctctctaaatgtaaatacaaaaagttcaaaaacagtttccaatgtnnnnnnnnnnnnnnnnnnnnnnnnnnnnnnnnnnnnnnnnnnnnnnnnnnnnnnnnnnnnnnnnnnnnnnnnnnnnnnnnnnnnnnnnnnnnnnnnnnnnnnnnnnnnnnnnnnnnnnnnnn

SEQ ID NO: 135039 - DNA, 424 bp, Arabidopsis thaliana
  unsure (1)..(424): unsure at all n locations
acggaaaaagagcatcatagcaccagtggtcgcatcaattgcttcaatagctattcttataggtgcattggttctgttttttgttcttaaaaagaaaacgcaatcaaaagggccaccagcagcatatgtacaagcgtcgaatggtagatcccgtagatctgcagaaccagcaatagtgacgaagaataaacggtttacttactctgaagttatgcaaatgacaaataacttccaaagagtgcttgggaaaggagggtttggaattggtttatcatggttttggtgaatggtactgaaccaaagtngcttatttaaggtacctctccccattcttccatctcaagggttataaaccaattccaaagcttgtgggtaggaccttcttcctntgnggttcattcccaaagaatttgggtaggccctt

SEQ ID NO: 135040 - DNA, 397 bp, Arabidopsis thaliana
agaaaagaaaaaagaaatcaatcataatgttttcgaattttttggaaagcttatacgatggaatcggagacgatgacgccgccgacgacgactaagacaacaacaacgacgagaaaaccccgaaagcctcaacggaaagacacgatttctcgagaaacgccgttcgtttgtcaccggaagaggaggctcaagcgcgtggggttaaagatgatttgacgggacttggtcataccctcacgcgtcaatttcgtggtgtggctaacttttcttcgctccgttacctgattggatccttcttccttcttccctccgatcctttccgaacccatcccacggtttaacccaatctccggcttcagatcctggattgaataattcgcgttcttcagatcgggac

SEQ ID NO: 135041 - DNA, 547 bp, Arabidopsis thaliana
cgagctttcagacgtcaaacatggctaaagctcaaatatgtctttgtttcatcattttcttatacctctggccagaaggaaatttcatcaaagtcaccaaggcagatcgctcggccggagattggtgcgttgctaaaccttctacggataacgaaaggcttcaagaaaacataaacttcgcgtgttcgaaaatcgattgtcagattatctcggaaggaggtgcatgttatttaccagatagtatcattagtcgtgcttctgttgccatgaatctttattaccaagctcaaggaggacatttttggaactgcaattttgaaggctctggtctcatcggcataactgatcctagctatggaagttgcatttatcaatttcgtaagtaaaacatatcaaggttcgatcttgttgcaagaagttagaggactgtatctgaaatttcctatttaaaatctaatgttgggatgttttaattggatttctcaacagttaaatgtttgagcctagatatgtgtatgccattgttaaagcaatataatttaattta

SEQ ID NO: 135042 - DNA, 404 bp, Arabidopsis thaliana
gggatcttgtatgtagccttagctctagtgatcattggatcagctgggacgcgattcaccttggcagccgcgggtgcgaaccaatataagaagcctaaagaacaaggaagattcttcaactggttcttccttgcactgtatattggagctattactggcacgacagcgattgtatatacacaagacaatgctagctggaaacttgggttcggtctatgcgccgttgctaacttgatcagtttcattgttttcatcgccggggttagattctacaagcatgacaaacccttgggaagtcccctatacaagccttatcccgcggtttaagttgccttgctaccaatcgaaaagcaaaggtagtgatttcatcaaaagacgaagactatcatcaatttggtctcggg

SEQ ID NO: 135043 - DNA, 389 bp, Arabidopsis thaliana
  unsure (1)..(389): unsure at all n locations
gtacaatgtgtttgagattcataggaaagaagtcaattcaagtcttttggaagtgaaagctatgaacaaagatactgaagctgatagtgatagtgataggaagattaaagaagaggaaaggagaaggaagattggattagctaataaaggaaaggtgccatggaacaaaggaaggaaacacagtgaagacactcgaagacgaatcaagcagagaacaatcgaagctttgacaaatcccaaggttcggaagaagatgtccgatcatcaacaaccacacagtaatgaaacccaaggagaagataagagcttcagtgaaccaagtttgggcagaaccggtcaagattcggaagcgattaaaggggagntcatgtcatccgtggncnagaaac

SEQ ID NO: 135044 - DNA, 455 bp, Arabidopsis thaliana
  unsure (1)..(455): unsure at all n locations
ctcgatgatgatatttacctcggtgctgagaacaatttcaatctgttaacagtgaaaaagaacagtgaaggtgctactgatgaagatcgaggacggttagaggtagttggagagtatcaccttggggaatttgtgatcagattccgccatggatctctagtaatgaggctacctgattcagagattggtcagatcccaactgtcatctttggtacagtcaatggagtgattggagtaatagcttcacttcctcaagnacaatatacttttcttggaggaagttncagtcaagttttaggaaaaagtgattaaaaggagtccggcggnttaagccacgggcaaatnggagggccgtttaattaccggggaaaaaggaacccncggggaagngnngggaattttccttngnatgggtgnccttnaatccggaattngttttcttggatcctntnggt

SEQ ID NO: 135045 - DNA, 434 bp, Arabidopsis thaliana
caagggactcctgctggaattcgagttactgctccccctaattctcttaggcctataaccgcaccgccccttgttgaggaaagagttgagactggcatcaaagtaccaccgcttacctcttattcagatgttttcagtgatttgaagaagccggatcatgtattggtttgtgcgcattgtggagaacgttgcgattctcctttctatcaaccataacaagggtataggcaacatatgcggaaagtgtttcaagaatggaaaccatcggggggaacaacactgcaggtggattttaaagttgattgggggttcacccccagctgtgtggacagaggaagagatcctcctcttgctagaatctgtgctgaaacatggagatgattgggaactcatttcacaaagtgtttctaccaagagtagactagattgcattt

SEQ ID NO: 135046 - DNA, 520 bp, Arabidopsis thaliana
tgtaaccgggactcggctatgggaagaaggcgctctgaaaacagtaacaatgaggaaaaaggaagggcttgctgattaccgctactttccagaaccagatcttccagaagttatccttacccaagaatatgttgatagcattcgtgcttctttaccggaactccctgaagcaaagcgcaggagatatgaggcgatgggtctaggcatgcaagatgtgcttttcctcgcgaatgacgtcagtgttgcagaatatttcgatgcagtcattggtaagggtgctgaagtgaagttggcagcaaattggataatgagtgatattgctgcttacttgaaaaatgagaaactttctatcaatgatattaaactcactccccaagagttggctgaacctgatagctgcaatcaaagatggggccattagcgggaagactcggcaaagaagatactgtttgagctattagccaaaggtggaaccgtcaaaggaatgataaaggcaaaagatttagttcagataactgat

SEQ ID NO: 135047 - DNA, 839 bp, Arabidopsis thaliana
  unsure (1)..(839): unsure at all n locations
cttcttcttcttcttcttgtctccgatgtctgccttggatgttatgattcactcttcaagctttctcctcccttgcgacgaaactagtacagggacgagatacgctctcgttgttctgaaccagagtttgccacgattcactcctcttctctgggaacatgcaaaacttcgtctctgtgctgatggaggcgctaatcgcatctacgacgaattgcctctcttcttccctaatgaagacgctttggccattcgaaacaggtataagccggatgttatcaaaggagatatggattctatacgtcgtgacgtcctcgacttttatataaacttggggactaaggttatagatgaatctcatgatcaaggcaccacagatcttgataaatgcatttttgtatatccgtcactctactttgaatcaagagacttccggactccagattcttgccactggagcacttggaggaagatttgatcatgaagccggtaatctcaacgtcttatatcgatatccagatacaaggatagtccttttatctgacgattgcctcatccaactccttccaaagactcatcgacatgaaatacatattcagtcttctctagaagggcctcactgtggactcatacccattggaactccatctgctaaaaaccacaacctccaggggttccaatgggatcttccagcnaacactgaaaatganatttgggtgggttgaataaattacatcccaacttggggttaaaagaaanaaaaaaatcncagtccnaatccggattccngatttttctctgggantatttccctccaagaaaaacaggactttccctttcaa

SEQ ID NO: 135048 - DNA, 477 bp, Arabidopsis thaliana
  unsure (1)..(477): unsure at all n locations
ccagaatcgaaaccaatttgtctactacaatgttctttacaattgcagaaaaggtttcaactttcccaagacaatcacacgatggtgtgtatcgtgccattgacatgttcttgaagcaacatccaggaataacaaagagtgagaagaaatcatcaagcaaattaatggattgccggaaattatcgccggaggcttgtgctcacgccgtgcaaaacgagaggttaccattacgagtcgttgtacaaatcctcttcttcgagcaagttcgtgccaccacgaaaccttctcttccaccgagcggctcgcacgggagctcaagaacgacaacagaagaagagtgtgagtcagtcacagccacggaggcagacgacaacttcgtcggggggcaagacgggtagttctgtgcaagacggaagcaaaaaggagttttaatntctcgggatttctnggaagntttgncangtaaangtnaaattg

SEQ ID NO: 135049 - DNA, 469 bp, Arabidopsis thaliana
gagagagatatgcatcattttgtccctgtcttcgataccgatgatgattatgtcaacaaccataattcttctttgaatcatcttcctagaaaatccattactactatgggtgaagatgatgatcttatggagcttttatggcagaacggtcaagttgttgttcaaaaccagagacttcacaccaagaaaccttcttcttctccaccgaagcttcttccttctatggatcctcagcagcaaccttcttcagatcagaatctttttattcaagaagatgaaatgacttcttggcttcattatcctctccgtgacgatgattttctgcctcagatcttctcttctccgccgcacctactgcgacggctaccgcgacggtgagtcaagtcaccgccgcgagaccgccagtaccttcgacgaatgagtcgaggccgccggtgaggaacttcatgaatttctcgaggctgagagg

SEQ ID NO: 135050 - DNA, 437 bp, Arabidopsis thaliana
ggaagataagaaaatggaggagaagaaatctgtagtgccacaagcgaaatcagaagataagaaaccagaagaagagaaaaagaaagaacctcaagagattgtgcttaagatttttatgcattgtgaaggttgtgctaaaaaaatccatagatgtcttaaaggctttgaaggagtggaggatgtaactactgattgtaagactagtaaagttgtggtgaaaggagagaaggcagatccattaaaagtgttgcaaagattgcagaggaagagccatcgtcaagtggagcttatctcaccgattccggagccttaaccggtttctgatgaacccggagaaaaaggaggaggagaaacctaaacctgtggaggaaaaaggaggaggtagtgccagtcggtgctgagagttcacatgcattgtgaagcatgtgccatggaga

SEQ ID NO: 135051 - DNA, 571 bp, Arabidopsis thaliana
cactcttaaaaccctaaacctctccacgcatggtttcaacgtcacaagcaaagccaacgatgacgaagaacaaagcaagaggtatgagaaagagattttggagttcggcccctcttcgtccatgttcttgcccttgactacggttgccatcgttaacctccttgcttttgtctgggggctttatggtcttttcgcttggggagaaggactcgtccttgagctgatgctggcgagtttcgcggtggtgaactgcttgccgatctatgaggctatggtgttgaggatagacgatggaaaattaccaaaaagggtttgtttcgtagctggaatcctcacatttgtgctgattgtgtcaggttacgtcttcctcaagtaactggacccattatggttggttctgtcgtttcagttaaactaatattacatctgtattgtggtaattaggagagaataatgtgatgaatccatttctcacctcattttagaacatacatttcggtatattgcgtctgtattgtagtaattaggagagaataatgtgttgaatccatttctcacctcattttagaac

SEQ ID NO: 135052 - DNA, 589 bp, Arabidopsis thaliana
  unsure (1)..(589): unsure at all n locations
ctcgtcatcctctccctctgattctcttatgtcgccttgaaaaattaagacaaaacaacaacaaaagaacaagagaagctctaaaatccagcagctatggcgtttcttctccccaatctctctccttctttccttcttccgaccggaaaatcactcaaagagaaacccatttccaaccaagctttatcatcatcatcatcatcgtccaatagctacgagtttgaagaagatagtctctctccactttctctctttagcgtccaggctcctcctcctgttcgaggtgcgcaggttaagaccaaaccaagtgcgcaggataagtacccagcacggcagcaaaggtgacttcttacatcaaatctcgggtttagcctgtacggtaccccttcggcggaggattttgcctctcctctttcaaccaaaggatctcaatttccggcatttacagggggtggtataacattaggtgggtcccaatggananggtttttttggggttnncaacttcaaaatttgtntttttggggactttngggtttatggnaagntttntttaggggttttnnnntgangnttttaggggtttggg

SEQ ID NO: 135053 - DNA, 512 bp, Arabidopsis thaliana
cagagatagcagaatttggaatgaaatggttttctcttactaaatccatttgctggaaggtcgtgacaaagacggttgattcctctggaatcggacttgtgatctatcaaaagccaacatcagaatcctgttataataaacgcagcacacaagatccaccactttgtgataaaaaggaagcaaatggttcatggtatgttcctctcgctaaatgcctttccaagttacctagtggaaatgtccagagttggcctgaactatggcctaaacggcttgcgagtgttaaaccgcaaagcatttcagttaaagcggggaacattgaagaaagatacaggggaatggtcagcaagtggtttctgatggtttacctcaaaacatctacgctgtaaactggtcgactgtgccggaatgttgacggacatgaatgcctggcttttggcggctttgcctgctgcacttttcaaatctaccactctgggtgatgaatgttgtccctgtggataaacctgaca

SEQ ID NO: 135054 - DNA, 864 bp, Arabidopsis thaliana
ggattacataatatactggaaaattatagatcgatggtgggagcaacaacagcatattcctttgcttgctgctggtttctttcttaatccaaaactcttttataataccaacgaagaaatgcgtagtgagcttattctatcggtgctcgattgcattgagagattggttcctgacgacaagattcaagataaaatcatcaaggagttaacctcctacaaaactgctggtggagtttttggaagaaacttggcaataagagctcgggatacaatgcttcctgctgagtggtggtctacgtatggagaaagctgcttgaacctctcacgttttgcgatacgcattcttagtcagacgtgcagttcatcagttagctgcaggagaaaccagatacctgtcgaacacatataccaatcaaagaactccattgagcaaaaacgactcagcgatcttgtatttgttcagtacaacatgcgcctcagacaactgggtcctggaagcggagatgacacactagacccgttgtcacacaacaggatagatgttctgaaagaatgggtttctggagaccaagcttgtgtagaaggaaatggaagcgcggactggaagtcgcttgagtctattcataggaaccaagtagcaccaatcattgatgatactgaagatttgggttcaggtttcggtggatatttgaggtattcaaaggtaggaaaaagaagtgagagcatgaagggttattattcaaacacatcgggggaggttttccacggaagattgatcatggttggtttaagcttcctcggcggtgctttctgacttacatgaagctgttgtagccataggggtcgatttgtaacattagagtc

SEQ ID NO: 135055 - DNA, 543 bp, Arabidopsis thaliana
aacttgaaggatgtaattgctaagaaagttgatgtgctacaaaattttcagaaggtaaaaggtaataatgcaacatccctgaaacgtggattaagcaatttaaggttggtggggcctacatcacctagaagacattctattggagcgtcaccaaacgctcgacgaggaaaggcctctggtttatttggaagaggaacctcagatgttgacaactgctctgaatatagcagcaagcattcggattctggttcacaacaatcatcagacgggcgtaaacatcaaaaagattatcaccaaccatcttaaatttgctcggtgcggcggaaaggaatcgattttgaatgatgaagatgtttgaacctccgtagggcctttccagaatgcaagattcctgtaggccagattgtggtgatatcccctgatagtgtgtctttcaatggggacagaaactgatggatccataagcagtgcagtagagttgactctattccctgaaactgctaagcctcttgaactaatagaacgacctgaagcacgcatgac

SEQ ID NO: 135056 - DNA, 798 bp, Arabidopsis thaliana
tccgatggttactgagactggatggccaaccataggttcaccgatgtgtatgctgctgcgtcttctgacaacgcggagtcatacaattcaaacataatccggcatgtagttaccaaccaaggcacacctgcaaagccaggagaggcaatgaacgtttatatattctcattgttcaacgagaatcggaaagcgggtttggattcagagagaaactggggattgttctaccctgaccagacaagtgtttatcagttggatttcacgggaaagagcaacgggtttcactctaattcgagtggtacaaactcaagtgggagtagtaatagctggtgcattgcttcttctaaagcttcagagaggagatctgaaaggtgctttggattgggcttgtggtcctggaaatgttgattgcacagctattcagccaagccagccttgttttcaaccagatactttggtttctcatgcttctttcgtgttcaatagctatttccaacagaacagagcaacagacgttgcttgcagctttggaggagctggtgttaaagtcaacaaggaccctagttatgacaaatgcatatacattactgcaggagggaacaaaaccaaggcgacgaatgcaactgcattgacctcctctgcttcaactccacgtggaaacgaactactccaatggattttgaaactctgtctcatgatctcgttgttcttcagtttgcaaactatgaattcacaggcactgtaaccgaaatctgaaagaaatgtagcaatagcaagaaaaagcaaaatttgttcctg

SEQ ID NO: 135057 - DNA, 804 bp, Arabidopsis thaliana
cgcttgaacaccaggtcgtcaagggtgtagtggaaagtcttaacatcatctcccgtaaggcgagtatgagagttgccgagtatgcctttctttatgccaagactcacggaaggaagaaagtttctgcaattcacaaagccaacattatgcagaaaactgatggtcttttcctgcagtgttgtgatgaagttgctgcgaagtatcctgagatatattacgagaaggttgttattgacaattgctgtatgatgcttgtgaaaaacccagcactttttgatgtcttggtgatgccaaatctctatggagatattatcagcgatttgtgtgctggacttgctgggggactaggactgactcctagtatgaatattggggaggatggtattgcccttgctgaagctgttcccggctctgcacctgatattgctggaatgaacctggcgaacccaacagctttgctactgagtggagtgatgatgttgcggcacctgaagctcagcaaacaagcagagcaaatccacagtgccatcatcaacacaatagccgagggaaagtatagaactgctgatctcggaggttcctcaactacaacagatttcacaaaagccatctgtgatcatctctagacacccgtgaaaagccataattctttccttacttacttattggatcttcctcttggattttcactccaaaatttttctacatattgatcctcttcctatgaggagaaacaaagcccccataggctttagacattgacttgtgtttacataaaatttgaagttcttgcagagctgtatt

SEQ ID NO: 135058 - DNA, 517 bp, Arabidopsis thaliana
cgttggttatacacctacattgcgttatctaatcacgatcctctttctcggagttgaggtatacataatggctattgcagggcttgggtttgtcgtctctgtattggaagaaagatacggttttgatgcgattaaggaaggaaccgctctgatgaaagggaggaggataacagggttggccttggcgggtgtatttgtgtttctatcgagtctcattggtcatgggatggagaagttggcgaaggagctagatatggacttgagctcagggtcgtggtgaaggtcggtggttgtgaccggtgggtgggacgggtggaagctggtttgtatgtatggggctgaggttgtgctgagttatgttgtaatcactgttttttactgtgagtgtaggaaacgccatggtaacagttatgcaattgttgctgatgaggaaggtcttgctatttaaaattagttccaacacttttttgttgttgataattcaaatgaaaatctgtgaaatacatttttgtttacc

SEQ ID NO: 135059 - DNA, 530 bp, Arabidopsis thaliana
  unsure (1)..(530): unsure at all n locations
aatatataaagagaggngaaattaagcgtaagattggtggcgggggaaaataaaagcatggaagaaggacttcttcggcatgaaaacgacagagatgatcgtcgtatcacagcttgtgttatcctcagcacttttgttgctgtttgtagttccttcagctatggatgtgctaatggttatacttccggcgctgaaactgcaatcatgaaagagttagacctttctatggcacaattttcagcgtttggttccttttttgaaactttgggaggcgcggcgggagctttgtttagcggtcaattagcagtcatcccttggcagaagacgaaccgttgttgggcaatgcgactttgttcctgcaatttcttggttggctctccattgcttttgcaaagaatgtcttgtggctggacttgggaagaatttctttaggcatcggagtgggcttgactagctacgtggtccctgtctatattgcggaaatcactcctaacatgttcgtggcgcattttctgctttaaccctgcttc

SEQ ID NO: 135060 - DNA, 363 bp, Arabidopsis thaliana
  unsure (1)..(363): unsure at all n locations
ccaacttgatccaaaaacgaantgccgaagaaaagcaatgcagcagttttaaaggattggtcaaagaaatcgaaaactaaggcggtgagagttcactatacggcggagttcacggtggatgcagcgtttggctcgccgggagcaatcaccgtcatgaataaacaccaaaaagagtttttcttggagagcataaccattgaaggcttcgcacttgggcctgttcactttccatgcaattcttgggttcagtctcaaaaaagatcaccccggtaaacgcaattttctttcactaatcagccgtatttgccgaatgagacaccaagcggattaagagtattgagggagaaagagttgaagaatcta

SEQ ID NO: 135061 - DNA, 264 bp, Arabidopsis thaliana
ccgggttttaaggaagctgcaatgaatctggcacgcatgtcgcaatgcatgtatcaatatggtgatggtcatggatgccctgaaaaagccaagaccattgatcgtgtccaatccttactcgttgatccaattccattagatgtaaatcgtcttggttgaagtgtaaggactctactacataaaatcatttgtacaatgaaatcctcaaccataaaaaatgttgacgtcagcccctttctcaagaaatcattaagttaaatttat

SEQ ID NO: 135062 - DNA, 661 bp, Arabidopsis thaliana
  unsure (1)..(661): unsure at all n locations
ctcgcgaaacctcaaagacaattattgtcaggcgtctacgatctactgctctattcgggggccaaccagggtctggcggggaataccgctgggcggacgaagttctccgcagatcgataacgccttaggtacttgactgcgtggctctcgatctccgttggctcgacaccaactgcagcccaatcgccctcgacatcagcatcgtcgatgtaccggcgttcgacctcatcaggactgagggctggccaccagacgttctgagcgaccttggcaagcgcagtcgcaactgccttcggcaagacaggggccttagaaggttccgtgatagcgattgatgatacgaggtccagaagatattcataggtcaaggtcgaaggtccaggtagcgagagagttcccgagatctgagggttcgacataaggttcgccagancctggggcgacatccatcacatgaacagggcgtatttggtttgccgggtttaattncaccagattggccaaatagccatattgttcagnacttgcttcanancgacatttgcaggggcgannatggtnctaggggaagnttcttgacgcgtcttcaccccagctagtttggagactcgctcgatttgggagcataagggcgnaggtcacgaangagaacgcagattaa

SEQ ID NO: 135063 - DNA, 456 bp, Arabidopsis thaliana
  unsure (1)..(456): unsure at all n locations
tgctgatatgtgctccaagacaaatcttctggtgtgtgctctcttctggatgtatgacacagtatgcgttacgggaacatcaggttggtgttggccatgagactgctgcaatgacggggtttgattctgagtcaggtctagagacagaaggcaaattagcggtagatccaataagaaggtggtccatgatccaaaaccaatctagaagagagacgcatgacccccacagtgacatatatggaggcggaacatcagtggattctcaaagtcaagtgtttccagaggtttgttagaaaaccacagtgtctgaggaagcttggcaaagtatctaaggaaaggaacctacccgtgtggtgggataagcgtcaatttgtaccatatttgaagcgggacaaccagcaaacgcatctgccgacttaagttaccctttttggggaaagngaaaanntttaggtt

SEQ ID NO: 135064 - DNA, 480 bp, Arabidopsis thaliana
  unsure (1)..(480): unsure at all n locations
ccgctaagacgcattattgttgagcatacacatggcaaaccatctgctattgttcttagatgcagcatctatcaacagatgagatgagacaatgcgtttttgcaactcatataacataacattgtatgcaatacaagcaaacacaactcaatggttacaaccatgtgatgcattgatattcggtcctgcaagcagaaggtgaacgctgctttgaaagatatacgaaacaaaattggtgtgcggcgcgtatgtnatgagttacacaaagcagtacatagcattagtaagcaagatattgtacaaatatggaatcagatagcaaacagtacagtcgatgagtactaagctccagtgcagtcaatgccattgcacctgaatgctcagatanggtgccntaggattacatctgntngnaacctttgctccagntncngattntggntggctnncttcccngtgggtncncaaacttgtgnaanc

SEQ ID NO: 135065 - DNA, 676 bp, Arabidopsis thaliana
  unsure (1)..(676): unsure at all n locations
aattcattcatctttaatcttttttgcttcatgaacacgatgagtgataataaaaatcttctcctgagacgaatggatgaagaagaagaaaaagatcgagcaagaaaacaaatctctgttttatcctcaaaaagatcccaaaccacaaacgcaaacgcagctgttacagctccgtccgaggtggcgtttaacgtttgttgtttatgtgtttattgtcctctttgtgttctttggtgctgcatcaaacagccttgtacaattggatggagagccattctaaacgccaaacgcagattaagcggttgcagcggctgcggtagaagctttagcaggagggttttggctgctgattattcgtctttttccgatattgattctgatgatgtgaattgcaaagctcataattgctcaacacgaaatcggtgactacaaaaatttcattgagtttcatgaatttcccaaacttcctttttctctgttctaaacgcccaacgcaaaacgctggagttgacttcataatgctgagttgatgaaaaatctcgagattaagctctattatttcgataatttacaggttaaagatgttgttgtgattcattatataaagatgtatatattacttggaaaaaaataaagttgtttttttttnnnnnnnnnnnnnnnnnnnnnnnnnnnn

SEQ ID NO: 135066 - DNA, 480 bp, Arabidopsis thaliana
  unsure (1)..(480): unsure at all n locations
tttttttttttttttttttagcttaatgagaggcctttcattttaatttcttcaaggatcgaacataaatgctcataaaagagtatctgataacttaagctaggcattacatcaaaagacacgaacactatatgactatttgatccttagacttggttcatctgtgcaaaaaaatctttttactagacgaagagttttgcacttcctctcttccaagcaccacgaaggcanaatccaccgggagagttctggctccttttggagttatcgttcttaggttctggttcaggctctgggttagaatnctaagatctagtactgcagccattgatttcccncctagacgtgttctgagaaanttttganggttncttanggtgcntgcctgtggcaccttantccactccagccgatgaaagactccccaacgnnggnacttttggtntggcnttaactgaanggnaaggancctaaacttgg

SEQ ID NO: 135067 - DNA, 409 bp, Arabidopsis thaliana
  unsure (1)..(409): unsure at all n locations
taaaggaatacgtaagcagtcttgactcggagtttgtcagcagttactggatctcctggtgcagattggggtgttattagtggtggaacagctggttatagcgagtagaaacattcaagtaatggtggtgtgttattaatgatggaatagctggttatagtgggtagaaacattcaggaagcagattcatgtcgcgtaaaagagaagacttgattcttggtgtagcatataggatggccaaaaaattaccagtctaacatataccctgggtgaatcctaagttcgtatggtgatacttgaacattagcgtttccccttttccctttgtgtatagtttcctcatttagaggccgncttttcccctttggggttctttatcttaagngggggtanantagcntctngctag

SEQ ID NO: 135068 - DNA, 405 bp, Arabidopsis thaliana
ggagtttttcttggcgagagttaggatgggagatcattcagcgctggtggttgatcggttatcaagcgattctggtctggggacggttaaccgagcagacccgaaagctgactcggttaacgaagatgggggagcgtggatctatatctgcaggagctgatttatgtgagagcaaatttgtacagcgtaggatttgtcatgatgaagatgaagataccaacatggatacgccttgttcttggtcctggaacattaaagtttgcacatcataaattgcgtccagagatggtccaatgagaaaaggtgatacgggatgccggaatttgttccgtcagcaattataaacctgggttacaccgcgccacgacaattgtttcactacacaggcatttctatgaacttcgg

SEQ ID NO: 135069 - DNA, 437 bp, Arabidopsis thaliana
ccgggagcccaaaactttgaaatctcttcaagacccaaagctcttgggtcgaattgctggtgtaccggtttatccaattgggcctttgtctagaccggttgatccatctaaaactaatcatccggttttggattggttaaacaaacagccggacgagtcggtactttacatttcatttggaagcggtggctctctctcggctaaacaactaaccgaattggcttggggacttgagatgagtcagcaacggttcgtttgggtggttcgacccccggtggacggcttcagcttgcagtgcatatttatccgctaacagtggtaaaatacgaggcggtcacacccttgattattctccccgggaaggtttttctgtaagcccggactcaatgacagaggccttcatgggctccctctccttgggctccccaagcggagat

SEQ ID NO: 135070 - DNA, 622 bp, Arabidopsis thaliana
  unsure (1)..(622): unsure at all n locations
acagattaaaacactaattatttattttacattgtaaaatacattactgatagggactagcattgaccaaaacaaaaccacgtgataccatgtggcaaccaagactcggaaactatataatacaagatacccaaaagggtaaaacgacacgcagtttataagtaacatactataaacggtaagcgttcctaggcaccacgtgccatgcacctgacacgctccaaaagatgctcgctctcgtcggcgattcttgacaacgattcatgcgccactccaccgtcgcaactcagcgattcggcagcggtctctttcagcttctttatcttctttcttcatcttcaggcaccttcctcctccaccatgatctttctcaccaacgcctcgatctccgccctcgtaatcantccctccgacggtagtttcttagagcggaggcaacgccaagctcttcgttgaggagtgtcgcgttcatcattgctccgcaaaangggcacgcgatcatcggacggcaccacgangtctcgagaacgattccaccgcgtgagtagaaccactnggatggtgggcaaattcgttgggngcccaaagngacataagctcttatggtcgggaaaaaactcgg

SEQ ID NO: 135071 - DNA, 523 bp, Arabidopsis thaliana
  unsure (1)..(523): unsure at all n locations
cgcaaaatgcgattctgtaaaaagctctcatcattttcctctttactctaaccatcatgacaggaaccgcgttttcacaaaactgtggtacaaacgggtgtaaaggcaacatgtgctgcagcaggtggggatattgtggtaccacaaaagcctactgtggcactgggtgccagagtggaccttgcaactctaaacctaaacctactccgactccaagcggtagtggcggtctaaatgctggtcctcgtggtaccatagcaagcgttatcacaccagcgttcttcaacagcatcatgagtaaagtcggaagcggttgcccagcgaaagggttttacactcgccaggctttcatcgcagccgctgaatcgttcgcagcctncaaaggaccttttgctaagcggtgagattgccgccatgttggttcagttctttcacgnatnttggaggtttttctttcaaggagggaattggccagggggaggttcttntttcccaggnacaaaaatntctttnttaaccccgg

SEQ ID NO: 135072 - DNA, 609 bp, Arabidopsis thaliana
gggaaccttattgatctccaaaatccgtgaagaatacccagacagtttaatgaacacatattctgttgtaccctctccaaaagtgtcagatactgttgtagaaccctacaatgctaccctttcagttcaccaattggtagaaaatactgatgaaacctactgtattgacaacgaagccttgtatgacatttgcttccgtacattaaaacttacaacaccaacatacggtgacttaaaccacttagtctctttgactatgtctggagtgaccacttgtctcaggttccctggtcaattgaatgctgatctccgtaaactcgccggtcaacatgggttccttttccccaggttacaatttcttcatggcctgggctttcgcttcctcttcaccttctcgtgggaggccaacaatttcaaggggcactaacccgttcccgaacttaccccacaaactgtttgatgccaaaaacatgatggcagcatgtgacccaagaagtggacgttatctaacagtagcagctgtattccgtggccgtatgtccatgaaagaagttgatgaacaaatgttaaatattcagaacaaatattcgagctacttcgttgaatgga

SEQ ID NO: 135073 - DNA, 444 bp, Arabidopsis thaliana
  unsure (1)..(444): unsure at all n locations
gacttgtgctatcttccaagtcatttttgtcattggactttcatcgctatcgctatcatcatacatgttcttgattagaccaagaggttgtggggacgaagtcacgccttgtggttcacattccatgatggagatcacaatgttctacttctcgatctacttgatcgcattgggatatggcggttaccaaccaaacattgcaacgcttggagcggatcagttcgatgaggagcatcctaaagaagggtactcgaagattgcttttttnagctacttttaccctgctttaaaactcggntcgcccttttcggacaaccatcttggggnatttttaggatgaggggatttggggactccgggtttttggnatccnctgggtctcctataatnggggggntcttttccncnttggacaccgggtancnccattttaagnccccgggg

SEQ ID NO: 135074 - DNA, 465 bp, Arabidopsis thaliana
  unsure (1)..(465): unsure at all n locations
agacaaagatgactcaccttgatttctttcacaacaactctaaccatatgatccaatgccgggttataaaccactataaagattcctataaagatcccaacattcacaagtgtctctctgtgtttgtatcccaaaattcaagacaggaatctggactatctttcagaatcagagacagaagttacaaggaaaggacctgcaggaagcgactttggtatatcaactccaaacaagagcctttgtgtttgttgtctgtaagttatgaaaacatcaagaccttcttgtagtttagtttcaccttctcctcggcttgcgggtcttctgctgtggcctccagtaacaagcaagcggccccaaatgcacagctgggcgagggtaatggccaatggagctccatcgggaaaaccagagcatnggggggcactggtaagncttcagggggngaantgggcccctnccttgccc

SEQ ID NO: 135075 - DNA, 521 bp, Arabidopsis thaliana
aacggcaaaaaactatattttttaaaataacatgccagtttagtatcagaagatgcagaaacgccattagccaaaactgattaattaagagaagaaattaacattaaattttttaaaacataattaaataacccaaaaaaaaaaaaactcaacagtcaaagaaactgttggcatttcagtcatttccttgaaaaaaagcgttagagccgttaccgctcaccatgattatcatcaatctccaccgccaccgctttcaccgtcgctcgccaatctccgccgtctgccgcaacccaccaaatccaacggcgtacattcaaccttatggcttcgctctccaatccaacgcctgaacaaccacgggaaccaataattaaccttcccacaaacagaacatcgccgaaactcatgagcccgagtctccggccttccacaaccaccatgcgaacacatccttaacccttccgctaaatcaacccgacccgaactaaaccactcttttaaaaaccggttaaccggatgaa

SEQ ID NO: 135076 - DNA, 441 bp, Arabidopsis thaliana
  unsure (1)..(441): unsure at all n locations
tgcaaacaatgtccaagacgaagcactctcggtattgagcttactctctacaacattgacgaatcagacagtggaaagttggtctcttgtgatgatgatttttgctaccagattagtggcggtcctctctctggctgcaaagctaatatgtcttgtccttatcttgagatatatggagatggtagctctactgctggttattttntcaaanatgttgtgcagtatgacagtgtagctggtgatctcaagactcaaacagctaatggcagtgtcatttttgggtgtggtgctaggcagtcaggagatctagactctnctaatgaagnagcacttgnccgggntacttgggattnggggaaagctaattcttccatgatttcccagctggcctcatcagggggngtgaaaaanaaatttccccattncttaggtggangaaat

SEQ ID NO: 135077 - DNA, 465 bp, Arabidopsis thaliana
aattctttcatagtcttatggctactaaattcatcaccctcactcaaatccaccgccctaaaaccttactatccaccacaaaatctcgtcgacgcaataataacaaacccaaaccatccaaaaccataagcgaaaacatgttgaacaacgtcttttctggcaaaacgctaacagaaatctaccataataagataaattcacacccacttactaatccactactgtttcttgaagatcagttcgtaaaagaagaggagacggatcaacaagaacacggggaggtctcgtacaacagatggtaagtcccctaaccgcggccaactacgggggatttgaggcggtgttgttgctccgcttaagcttgttgtggggacatgaaaatgttccctaagccatatattaaggaaggcaagagcgttttacaatgagttttgttgtgatacttatgctgagagtaacactatg

SEQ ID NO: 135078 - DNA, 380 bp, Arabidopsis thaliana
ttcttcaatctatccatgaaccggagctcatttctgcgttcgacaccggtggtgcagagcttctatacgaaattcgtctccttagcaccacgcagcgtgttgcagccgccacattcatcattgatcgtaatattgattcgaaaggagcacaggatttggcacgagccatcaaggattatcctaaccgtcgtggagacgttggatggttggattttgattacaacttaccaggagattgtctttcattcttgtattacaggcagagcagagagaataagaatccatcggatcagagaacctcgatgcttctacaagccattggggggtgcagaatcaggaaaaggctaagaacaggttgaacacagagctatacggggaca

SEQ ID NO: 135079 - DNA, 972 bp, Arabidopsis thaliana
ggcaacttcacttcagaggaggaagaaacaatcattaagcttcaccacaactatgggaacaagtggtcgaaaatcgcttctcaacttccaggtagaacagataacgagatcaagaatgtgtggcacactcatctaaagaaaagactggctcagagctcaggaactgcagatgaaccggcctcgccttgttcgagtgattctttttctcgtgggaaagatgataagtcatctcacgtagaagattctttgaacagagagactaatcataggaatgagttgtctacatctatgtcttctgggggttccaaccaacaagatgatccaaagatagacggactcaggtttgagtatattgaagaagcttatagcgagtttaacggcattattattcaagaggtaggcaaaccccgatctgcttggaggtacccattttgattcagatcctgacactttgggggttcttaggtccttcaaactcatttcaacaatcccctgcaaatgggaccagctcaggctcaggggcaccaccagaagaagagtctgatgtggatggggttaagaaatggttcacgcccctagaaagcgaactcgggttagaagaagacgataatcaacaacaatacaaagaaggagaatcatcatcatcatcactcttgaagaactacgagctcatgatacattgataaaagatatttattttggatatcaatatgacaatatgtatgatggaaaggtagagagatagtagagaaaatgtatttcctatagttttttaattggcattatttttagtagcctgtagataaaacagagctggtcaaaagatgcacactatactaaaagtctaaaactatatatctggaagattctttctttagtcttagagaatcttgaagaaaaaaaaaaaaaaaagggcggccgctctagaggatccaagcttacgtacgcgtgcatgcggcgtcaagctcatag

SEQ ID NO: 135080 - DNA, 873 bp, Arabidopsis thaliana
agattgtgactactactgctactactagtgcaagaagctcgaggagtactagcaaagagattgctgttgttgctaaagttactaaaacgggaagagccaagaataatattaagaaacaaacggatacgaaaacagaatcatctgacgatgatgatgatgagaaggaagagaattctaaaacagagaagaagccagtagcggataagaagaagagcgtggctgatttcttgaagaggataaagaagaactctccacagaaaggaaaagaaccaacgagtaaaaatcagaagaagaatgatggaaacgttaagaaagagaacgatcatcagaagaagagtgatggaaacgttaagaaagagaacagtaaagtgaaaccgagggaattgaggagtagtacgggtaaaaagaaggttgaggtagagaataataatagtaagagctcatcgaaacgaaaacaaacgaaagaaacagcagaggtggctactggaaaacgaggtagggaatcgggaaaagacgataaacagccaaggaaaagaagcagaagatgaaactgaactagcctgtggttaagcatttgtacatttgatgtgccagaagtattcatcattcctcttaacatcactgtttcggagggaatcataggtcttgttaggtatttattctcatagttaccagtttagtttttttttttgtttaaactgtgttttccttgttagagggtataactatagtggttataaactgtgtcttcatttatttgtctagtttgatcgattcatgttcacaaaacccaaaaaaaaaaaaaagggcggccgctttagaggatcccagcttacgtacgcgtgcatgcgacgtcatagctcgtctaaaggt

SEQ ID NO: 135081 - DNA, 515 bp, Arabidopsis thaliana
  unsure (1)..(515): unsure at all n locations
gcgcccccaatctctctcaaccaaggcgattttaatctttgaaacccttgtttcttatcgattccgcctctccggccaccggcgctcctcgctgtggtcgtgagagggcccatgtgtttctccgttcgccggtttggccctttccaatcggcgatttgacgagtttaacgatcganttgtgtggtgaggtcttcggtggtgcttcctgcggttaataaggcgtcgacttgtcttggtcctatcggtgaggacggtgattgtaaccttctcggcggtctcgctcttcctctagattgctcgtggacagcatctnagcttttntaaggctcctacggtggttctcggtggtttantctacgcgttgttttncnacgacgtttcctncttgtttcggtttcaaagtnggtggtaaggtcctgtnttggcaaatnggtttaagcaagtattggtctcccanaatctaagcctctcctttccctttggcggttcgggnggaacntccaaatnngttntgg

SEQ ID NO: 135082 - DNA, 542 bp, Arabidopsis thaliana
  unsure (1)..(542): unsure at all n locations
tcttnggattcaccncnctttgtngancnanngccaatggaagcccaattgntgcaaaggctgttgaacggnttcnaaaccntttacacccagatgcaccaactcatggcatacgaactcatgtctgctaatgatgccccagagagagaccccaaagattggattcttgaaggaagtaacgatggtggttcgacatggtgtgtcctagacaagcaaactagtcaggtattcgaggaacggttccaacgcaaatcctacaaaataactacacctggattccaagcaaatcttttcaggttccggtttttaagtgtacgagacgtgaattcgacctcgagactacaactagggagcatcgatctgtacagaagtcaccagtgatttaatgatgcattcatgcacatcaaatgtataaatattccaaaaacatcaatttgttttgtcttcactttctgcacattgatgtattccgtattcgtgagggaattggcctttgctattgctatgaaacacctctgtcttagacagaggcttacagactc

SEQ ID NO: 135083 - DNA, 646 bp, Arabidopsis thaliana
accatgtgaccaacatttatgactcgtttctacctatccttactcagttcgttgaggacggcttacctgtagcaagaacaaatgaggtacttaagatgatcaagcaagtcctagtggatctgaagaatgcgccttacaaaacaaggaaggctcgattgactttagattcagataactcaagttcattcccggagcagtttcttcccgcactaggcgatttgcttctcgctctttctttaaagagcgagagagacacaaacggtaaaagtgtcacaatatccgtagacgggaaactcactaaaactgctatagcattgccagttgcattggacgcgttaagggaacttgttgctgacctcagcaaataccaaaacttaaacaaagattcactgtcttttccacttgttaaacagaacagggtatgctctggttctgtcctcgcaagtggtgaagagcttccttctggcattgcaaccgcagcttttgatggaatccaagagtccaaatgggaagaaccaaatggtgcaaaaggctgttggatcgtgtacaaaacactctacaaccagatgcaccaactcatagcatacgaactcatgtctgctaatgatgccccagagagagaccccaaagatttggattcttgaag

SEQ ID NO: 135084 - DNA, 548 bp, Arabidopsis thaliana
ataggagcataacacgacttcttacttctctcaagaccaaaatagaaatgcaattcataggtggagaataatgtaatgcaccacatcatcaatctatttgatgaactttaataaacaacaaactcgtttcttaaaacaggaattttaaaagtaatactgctcttaacatattccatagttttcctttttccttcggacatgtcaatgaacaccacattcctttttaagaggaactagccggtgttttgggttcatcgcctgatttggaggctggaggaggagtgccttctactcccatctcggctcttagatcattgatgctttgctccagctcattgattctgcctcccatgtcatcaatctttgtgatgatggagtccgacattgtctggaacctggtttgcatctgctggagaagattttggacaaaagcagtcatatcagcagtgctctgcttagtatccttagaatcatgaccatccatttttagggttttcttgcgactgatcggaaaactggagaaattttgatttcagcgaaaagcgatg

SEQ ID NO: 135085 - DNA, 687 bp, Arabidopsis thaliana
cgacgggttacaaggttgtccctagagccacagcagctagtctacttgaccatgatgatccaccgcagaagagaggagcttttactaataaccaaatttgggttactccctacaataagtccgagcaatgggcaagtggtttattcacttaccaaagccatggtggtgatactcttgcggtttggtccgacagagatagagatatagagaataaggacattgtggtgtggtacacgcttgggttccatcacattccatgtcaagaagattttccgataatgcccactgtttcttcaagtttcgattttgaagcccgtaaattttttcgagcgcaatccaatccttaaagccgctccaaactttgaatatgaccttcccgggtttgcggagccaaaatctgtttctgcttgagaagaatgaagaaccaacaaaagaaattatccaacttcttggatcttattggcaaaactacaaatcaaggtacatgatattcactttcctatgtgttattggcgtaatcccaactcctataaaacttataagcgcaaaaatagtatataacatgtccaattcaccccggaatgttaatctcaaggaattgtattggctactaaattgttttccattttccttgttattagcttcaaaaatagattgtgaaacgaagatttaacattctcttctcct

SEQ ID NO: 135086 - DNA, 737 bp, Arabidopsis thaliana
  unsure (1)..(737): unsure at all n locations
ccaaaatttgttggagaacgaacactctcgagacggaatcgatggcgtattctcagacggtgatggctatgatcaggtgggctagacctcctttccgcaacaatcacgataaggttgctttcgctattcactcttctttcgtcgcttccggttatatcctcaccgccaccggacggcctgctttcgccgacgaggctctctcttcgtcttctcagaatgatgttggaatcgaaggatggaacgaattcgagggagagtatgcgtttgtctatgcgaatccgaagaaagggtcaaagaaaattctggttaagtgcttggcgatgggtgataaacttcttgttgatgccatagctgatggtggagcagaacctgctcatcttgagattaaagttggggattatgctgaggaaagcaatgagggggattactctgcgcagttcaagaatttgggtaagttagtgactgatttgcagagtgagattatcgataagcttgatggaaaaccaaaacctgttgcttcgagagcacagtccagctctgagactaatgaagagcctagatattacgatgatacgcctaatccattaggccctcagattcacccctcaggngtngtngttcctccgatacctngtaatggtggntncagggatctcttccctngncccaggtgntngaatttaccctnggaggggtggttttggggatggaaagatttttgntgggacccnctannc

SEQ ID NO: 135087 - DNA, 549 bp, Arabidopsis thaliana
  unsure (1)..(549): unsure at all n locations
atcttggaacatgtcggtctattttgcttttgatttcttattctttaggtaacaacaacaataccaaatcaaacaaacataaaaaagttaagaaaatagaaaactctaaaacacaaatattcatcaaatagttatgcatacaagaacaccatcatggttatggaagaggattaagctaatgatggaatcattcccatcatcctcgcataagcaaaaataccaccagcatcaataaccggtccagcatcaccgatcgacttcagcttatagtttttaccggtcgtgtgattagtcaataaaccaccactatcactcagctcgatcgtcaccgtatctcctgtcttacactcctcacagactctaacctctgactcgagcggaaacacctctcctgtagcaaccgagttacggaaaaagattcttgcgtaagactcagcaactatggctttagctccagtgctccagaaagacggggatgtcacggacgtcggaccaagttcgcgcggtatgttgganttatggcccctggcatgacggttgggacggact

SEQ ID NO: 135088 - DNA, 561 bp, Arabidopsis thaliana
  unsure (1)..(561): unsure at all n locations
aataataagcaattaacaaaaagtttgcttgaaagagaagctgatcaatgtcaaaggtttttacagcagaaagttggaaataaattggacaaacaaagaaagatccaaccgaagaaggaaataacaactctctctgggtgtgtagagcaaaaaacgagtctaacatgttttaaaatctttcataaaaacttataaaagatgagcaatcttcaaaagaagaagagacaggtttgggctaaagaagagtgctgtgatgttgaaaatccagagataacctttttcattcattcccatggagattgagaccaaaaaaattattattactcaacgctgtgttggcctgggcctggagcttccaaatgtggatcggcgatcatcactgcctctaggaccagaaccccaacggtctcctccttcagctgggggtccagatctttccctattaactaggccaccgggcaggtctgtggggggtcccctgttgcttccccaggggcaatctccggagggggccacggttggacgcgggnagttctnagatntnggcnaagggctgnccca

SEQ ID NO: 135089 - DNA, 490 bp, Arabidopsis thaliana
  unsure (1)..(490): unsure at all n locations
agcttgaactcaattcagataagaaacttcagatggttcaaaaggcaatcaaaagccaaagtgacaatgtgcagattctttaatactatacaatatttagggtaagcaaagactatcatgaacccttaagacagagagagatagttaacttgtgtgtgcagtcttgtgccttaacagccttcaaactcacaggagtgtagtcaaaagtattctaaaccccaaacctttctccaatttgctgaactcttaaaaagtctttcttcttcctgagtaatctagacctttgtgagagagactgagtgatgtaactgaaacctgagagatctcaattgccatctggggttctgctgganccgccaattttggagcttcctttacctttnccancgccttttggcttgccaganggttagagtagcngggtgcngcaganctgtgatcanacagcagnccatctccnggnttcncngtttcaagangggttggatnt

SEQ ID NO: 135090 - DNA, 529 bp, Arabidopsis thaliana
cgaagacttgataaaagcttgagcattgcgaggagtcggcatgactgtgcaaggagttctgaaggtgcagagaatatagaagagctagagatgttgctggaagcttactttgtcgtcattgatagtactctaaacaagttgacatcgttaaaggagtacattgatgacactgaagatttcattaacattcaactggataatgtgcggaatcagctgatcgagttcgagttgcttctgacgactgcaacgtttgttgtagccatatttggggtcgttgctgggatctttgggatgaactttgagatagacttcttcaatcagccaggtgcattcagatgggtactcataattactggagtatgtggctttgtgatattttcggcattcgtctggttcttcaagtacagaagactcatgcctctataagaagagagacatgaatgtgctccccagaaagtagacaccaacttatattgttatgttgcttacagatattaatgatttgtttcctttacacaatggaatcttg

SEQ ID NO: 135091 - DNA, 682 bp, Arabidopsis thaliana
agatttgatttggatctttggggcgtctaggaacatcttggagtctgcatagtaacaaacattgggcagggtaataaaatcgggatttgtacacgcagacacgttttaaaccgcttatattagccagacagagcaagctaggaagcatacgactacaaagccaagtgtatgcgtatgagaaacatgtgttgaccatatatgttagcttgttctttagcagctgaactgatctcgctttgtccggacaagttccagcggtaatctctccagcgccatccatagtcttggagctgttggatcagacttgggttgggctttggctagcttcgatttgaaacttatggtgatgcataccttgaattccactgagaagggacctgcgaaaacggaaggacacattaaaagccgaggtagtaaaacgtaaatgggtagagtcatgttacggcacacatctccatccgcaatctgtgtagactgaatcaaagaggtcccagtgacaatcctttcccctacaattatcgactcgactcggagtaggtgaatgtcaatagaagtaataggaactgaagatgcttccactgttaactcaccactgagtggatcctgcaaagagcattgggtggctaattttccagtaactcggaaaccacctgtcttaatatcaggcagcaacggatgtctc

SEQ ID NO: 135092 - DNA, 558 bp, Arabidopsis thaliana
  unsure (1)..(558): unsure at all n locations
gccagtttcttcctaatacaatgagactttgagtccaattcaaaaactgtacactaaaacacacaaaagagagttcctttcttcaccaggagtaatgccggaaccttctccgactcgttctcctaaaaggtttacaagcaagaatgctaagatcaacagctgcagcaagtgccatgaaaatggctgcatcttccacacaagttacatgtctcatagctaattgtacaacgggcttgctgcttttcccttccccttgcactctcgagctcattacaaacccacctccagagacacactgtcccaaccctgagaagtctccactactctgcggggcttggaattggtgtagctgcaacttttcagcatctgtttatcccgggtcgattaaaaattccccacctttctcagcgctgatgagggtttcagacattaaaacatttgcaacttctggcccgtttgagaggtggttttttaaccacggggtttttgtnccgggttcccgccangttnggggtttcccatgggttccacctttttgcgggtggcaagccgncnagc

SEQ ID NO: 135093 - DNA, 461 bp, Arabidopsis thaliana
ggtaaaaacccgggtgataaagaacaacttgaatcctgtgtggtatgagacgctaatgctttcgatacccgagcccatgcctcctctcaaagtgctagtgtacgacaaggatacattctcgacagatgatttcatgggagaggcagagatagacatacaaccattggtgagtgcagcaaaagcatacgagacatcgagcataaaggaaccgatgcagctgggaagttgggtggcgagcaaagagaaccacattggtgagtgatggcataatcttacttgaagacgggaaagtgaaacaagacatttcacttaggctacaaaatgttgaaagaggtgttcttgagatccagcttgaatgtcttcctctcactcaatgatgatactttcttcttcatccctcttctttttttttttctttaaaagatttatttctaaaaataaaatgaagaaaagatgctgct

SEQ ID NO: 135094 - DNA, 647 bp, Arabidopsis thaliana
cgccatcaaccgggctccttctaaaggagctcatatgcctccaaatgtcccaaaggatcatgaaagcttcagtgctcgtgtcctagtaactttcatggcttttgtgatggcgattctcacattcttccgtacagtatcaaaccgtgttgtgaccaagcagcttccaccgcctcctagccaaccgcaaattgaaggaagcgctgctgcagaggaagctgatctcctcaattcagtgctgaagaaattaaccgaacttgaggagaaaattggagcgctccagtcaaagccatctgagatgccttatgagaaagaggaactgcttaatgcagctgtctgccgtgtagacgcccttgaagctgagctcatagccactaagaaggctctttatgaagctctgatgagacaagaagaattactcgcttacattgaccgtcaagaggcagctcagcaccagaagaagaataagaggaagcaaatgttctgtttctagaagatgaagaagaagaatcaaatgtttgtttctagaagaagaagaagaagaagaggcatctctgctttctctctctcccttgtaggtttccattgaaacagaacaactctcatctcattttatgttaaaagctaatcagttctttctcttttatgat

SEQ ID NO: 135095 - DNA, 551 bp, Arabidopsis thaliana
tcgatgaaggagaagaaatacagcatagattgtgctgagagtgtcatcaaatctctgaatttacctattgagaagatcaagaaatgcattggtgatcctgaggctgatacagagaaccaagttctgagaactgagcaagtatctcagattggccgaggaaaccggggagatgttacgatattgccaacattagtcatcaataacgctcaatatcgagggagattggagagaaccgcggttttaaaggcgatatgcgctgggtttaatgaaacatcggagcctgccatttgcttaaacacaggtctagagacaaatgagtgccttgaaaacaatggtggttgctggcaggatacaaaaagcaaccatcacttgcttgtcaaaggcacatttcagagggaggactcttgcgagtgtccggttgtaaaaaggtgttcaattttaaaggaggccgggctccacttcatgtacaccttatgggcctgcgaggtgtactatgaacaatggaggttgctggtctgacacaagaaatggcttaactttctctgcttgct

SEQ ID NO: 135096 - DNA, 514 bp, Arabidopsis thaliana
aaggaattgtagtcaggccatgaatctctcagaagcttcaataacttctgtcctttcttcttcgctctctccgtacactcactctgcaccatcaacaacaactgtaccaccactcccgcccccgccgcttcctccctccacctttcctccgccgtacaaagcgctaacaacgcccccgccgcatactccgtcgcgcgatccgaaactctcaatatcgttttaactaacaacggcaccgttaaagcgtgctcaccgaacgccgcgcatccttccggcgttcggcagagtagctccaccgtcgctaaggctcgctccgtatcgcatctatcgaaatccgccggcgagtctgtctattagaatctccggcgcaaccggctgtgattcgcgatgtgtcgcgtcggatttcactgaacagagcgcgaacagagtttttgattccgattttgagagctcgtcgtgacgaaatcggatttctcagaagatcgagaactccttcgaatacagattctgaatt

SEQ ID NO: 135097 - DNA, 535 bp, Arabidopsis thaliana
caatgaaagcattttttgcattattttcttgaaaagtcattacatccaaattatttttttttagccatgaaaatatacacaactctatctcactcttttatttttacagtataattcatatgtacattaattggatctccaaacattgcctttgtgtaggacagttttggttactttgggtcatatactattaggggtgtaaaaggctcggcttctggatggaacttcacggagctctttggccctcaaggggcatatacggtgccatgatcggccataatcccaggggccatgtaagacctgaaccggtatttgtagaatatataaccagctaaaccggctactgcgacaatagctagtatcaagagtgtgagccaccatgctgttttggatccatatctctctatacaaggatcttgatcgtttatgtaaagccggtcaccagaacaactgcatttgaatccaccccaggagttcttgcatctgcaaccgctacattgacataccgaacgctctttacattcggtaatatctt

SEQ ID NO: 135098 - DNA, 470 bp, Arabidopsis thaliana
gtataattgtatatcattcatataaatcttaagcttcacttcaaagatgcgactttctcccacaaaacatatttacgtatatatcatctcatgatgttcacttgattaaaaattaacatcacgaatttaacagaatatattattaaataatccagcaggtaacaaagttataaaatggcacacgtgtggggctccatacccagataagctctcggttcccccatacccttaacgcgtcacaaccaaacaatctcacctttcctcctccttcctccttcccccctggtttcccaaggttccttaatgcccagggaattatagacccattgggatcttgggatcccaataccccatcccttcagatgtccaatatcactcgaacttatgcaagacccagtcaccgtctgcaccggccaaacctacgaccgagccagcatcgagtcatgggtctccatcggtaacaacacgac

SEQ ID NO: 135099 - DNA, 486 bp, Arabidopsis thaliana
aaaaccctaaatcagagaatctagcgttgttgcttcttcagttgtctctaaaaatggggaggaagagaaagcacagcgagactgttacggcggcaccggtgagggattctcctccggagagacctcaaaggactcttttgggttggaaagataagaaggaagatgctgagaactctaaacctgcgtatgcgtctgtattcaggaataaagagaaggttctcgttacttgttcccggcggatcaatttcaggtatcgacatttgatgttgaacatggtgtcactttttacctcactgtaagaaggatagtaaggtaggaagcttaagagccagtaggaggtgccccctcttaaatgagctccattcgggctttaagggcctctttcttcctggtttgttttttcggggtgtcgggagcaccaagattcttttacaatgtgggtggtgaagtcccctgggggacctttcgttaagttcttggttaatg

SEQ ID NO: 135100 - DNA, 531 bp, Arabidopsis thaliana
gagaagaaaaatatcctttgatctataatcttttgatgatttattcggaacacgccacacaaccaaaacaagctttgatcaaaatcacaaacaactcagatatgtctatagtcagcataaaagtcttgagaaatataccagaactgggcggaaggtgtgagcgctgtagcatgacgtgagggccaaggataaagattgcgaaaaggaagaatccaccagatataatgctaatggtgactaaaagccatttcacatgggcaattgcagtgatcacgccaaaaaggaatgccacgggcatgcatagtaatgaaaaaagtagtaagggcaaggccacatgtaaggatttgaggatgagtgctagatcacccaactgcgcccaaataagagtacatattgttgcaacagaactttgcattgccaagatgtcaaaaagcagaaaaatgaagagagttgggtttggccccgtgcctgccctgcccaagtttggttttttgctatcgctgatataaccacctgggattgtaaagcctg

SEQ ID NO: 135101 - DNA, 466 bp, Arabidopsis thaliana
  unsure (1)..(466): unsure at all n locations
tgtctggtttcatgcaaacatccttcttcttcgggtgcatggcttgcatttgttacggttgcttcctcatgcttggaaccgttggcttccgcgctgctctcctcttcgtccgccacatttaccggtcgattaaatgcgagtaaaactgttgctgccaatcaccctcccccttacgatttttggtagaacaaagaagaggataatctgttcttaggtggataaagaagaagacttcttcgaagccagaaactgaataccaaagcgctctgtggtcacattttgagttcctttttgttaaaaatgttgtggggcagtttgttttcctgtgatatgatttttaggcggaaactatgtttgggtttaggtgaagtctttcctcttctcttactactttagagggcgtatcctcccttttttctggtaattaattaagggaaccttttggtaaccttttttttaatggncc

SEQ ID NO: 135102 - DNA, 506 bp, Arabidopsis thaliana
  unsure (1)..(506): unsure at all n locations
gttcgcaagcnagagcatttttatagaataccctttagcaatataaacagaatactcagttcttttttgtttttgtttttcaacttgtacagacagtgtggtaacatatgtaagtggtataagaaacgaaccaatacctaaacatcatcagagctcacacaacatgaacaccaaattttattctagatgatgtgtgatgagagttttttacacctactacaatcggatggtgcacataaccgtggtcctgaaatcaagttgatgattgaacggtggctttgagacaaccgatctccaagtcttcttctttggatcatacatatgaatcatcaaagatccagctttcctctgttgtccagtatgccttgtatccatcagattataaccatccaaaagaatcataacatgtaattccccatcagggcacggaaccaaccggttgtcgaaagggcttctagggcgctgncncctctccacggtcaaccaccaaccaaggccanctatcc

SEQ ID NO: 135103 - DNA, 463 bp, Arabidopsis thaliana
gaatatgataagggacgatctgataaatcaaatggtgcacgtcgtggtagacaatggagaagccagccgactaaggtctctgagatccctcctcttctgagctctgaggttcacaaaattcataactacgagaagaaagatcataaacaccgacataataaaaggtctccatctccgcaggctcaatctcagaggaaaaggtctagaactgacgactcacggaatgaacagacattctcagtgtaaagctttggtcagagggcatctttccgttctgctttgtatgagactaacaagtcagacaggggaagctaaacctgatgtctctcgcccgcggctttagtttgcctgtgcgagatgctttagctatatcaaggccggcaaatagttcgactgaatcctgattaaaacgtcttcgttcagtggtgtccacatctactcaaaactcatttgaccctgatcc

SEQ ID NO: 135104 - DNA, 513 bp, Arabidopsis thaliana
  unsure (1)..(513): unsure at all n locations
ccgttaccatattctttgatccattatataatatatatactttcaccacatcatatatgcatctaagtaaaagtgggtacatgcagagggcacatatatttacataaaatccgttttttagttatagatttcagtagcttccaatatacttgttggtcccttcactgggactggtcctggttgtcagagacggcctcatagtgactatagtgttttcgtctgctcctgcttccagtgcagccatccctgcttccagaaacttctgaacagcgtcttctgcgtatttgttgccttcacttactgtcatgttcttcccaatgtctggatatgagtttaggagatggtctccaacgagttgagaggccagttggatcagctccacctggaattctgagagctttgagtctcctttgcccccagggctcagcgaaagttcactccgggggttcccgggaaactngggggggaatccggaacggggaattccaaagacagccaggaccctggaggggg

SEQ ID NO: 135105 - DNA, 570 bp, Arabidopsis thaliana
accagattgatacgtgtatgtatcataactcatgtgatgctgtatcgctttacaaggatcactgttgcggtagagaccaaattccttcagagacagtccagattttggtggcacacaaaaatgaagtgtggtttgtgcaattctctaatagtggcaaatatctggccactgcatcaagcgattgtacagctataatatggaaggtactggatgacaacaaagtcgaactgaagcacacacttgagagccaccaaaatccagtttcttttgtctcgtggagtcctgacggtactaaactgccttacatgcggaaacgctgagggttcttaaggctatgggatggtgtcacaggtgtgttgagacacacatttggaaacaacaatactggattcactgtcagctcttgcgcatggttccctgactcaactcggcttgtctgtggcagttctgacccagaaagagggattgtaatgtgggacactgatggaaacgagatcaaagcctggagaggaacgagaattccaaaggtggtggatttggctgtgacgccggatggcgagagtatgatta

SEQ ID NO: 135106 - DNA, 474 bp, Arabidopsis thaliana
  unsure (1)..(474): unsure at all n locations
ccgcagctgaagaatttcgaaggtttattttcaaccgaagtccgacctagtaaaggttcaggggtacaagccttcgcctctcgtgcatttgatgcttcatttagctggaaggacattgaatggttaagatctattacagagttacctattctggtcaaagggatactcacccgagaagacgctcttaaggctgttgaagctggtgtagatggaataattgtatctaaccatgggggtcgccagctcgactattcccctgctacaataactgttttaggaagaggttgttcaagttgttagaggtagggttccggtttttgctttgatgggaggagtaagaccgaggggcaagatgttttcaaaagccctcggcactttggggcacaagcttgttctttattaggggaggcctatgaaccctatggggctttcaagctaaaggggtnaagattgggggttaaaaaaangggttng

SEQ ID NO: 135107 - DNA, 402 bp, Arabidopsis thaliana
ggattctgtttttctttcctttatatttatattttatgcactaaccacatcattgggtcagacaagcattcaatatgtttatcatatgtacttttcaaaagatgagtgttgaattgaatccatgcttcagtccttgttcttctaacatggctgctggttgccacggttcttcagctgtctgattaagtttctcagaccatatctgttggtttttttggatcagagcatagagggaagtctctcattctctggcctaacatgggttctggttatggcatcaatgggtgggacaaccaggaaagagccataggaatctcaaacccagtctttaacatatcaatcacttttttcactccatcttcacccttagctgcaagcccatagatcataggcctccctata

SEQ ID NO: 135108 - DNA, 475 bp, Arabidopsis thaliana
aattcgacaaccaacttttaaataatttaaatttactcaacaatagagggaaataaataatcctcatttactctcccccaaaaaccataaataaaagattcacaaaaaaaaaaaaacatggaagaatcgaagaaacaagaagtgaaactatagaagccaagaagaagcaaacaagcagagcaagctcaccaccaaaccagccttagctcctccgatgatcctaaccgcaccagcatcatctgccgtcgcatcatcggcctctccgctcaggccctttcggcaggcgaatccggagtcaccaaaagggatcattatctggcgacgggtgcagccttcttgcttcctttcctttcggctttcccctttagccggcttttggagaatccgcaacatcaaccatcctctggtggccggagcaggagccggagcttcaacagccgaagccttaaacaactgtttaggcaacaaaacctta

SEQ ID NO: 135109 - DNA, 483 bp, Arabidopsis thaliana
  unsure (1)..(483): unsure at all n locations
gaatccaaacgagcaaagctgatttaaattgagtttaaggaattaccatattgttcggccatatcaaactccaaagtaaaagtttgatgatacaaaagcaggaacttgacaagaggaaaaaaaaaaatactacataaaacatacacacatacaaatttttatgtaaggggccatggttcttaggttaaaactgcggagattgaatcagcgatggagacaatagtcgacggtgagactccacgacttccggacaaataccatctctgcatcattcccaccacattcgcattctccaccttcagtttctcctcttcctttaccttccggctcaaacccgatctcgcaaatgccatctttggctgagaaatggtaagtgataacggagttagctttggaagtactggactgggaaagccaacgnccttntcggggtcagttctcctcttccncggacttatcncccagcnaangttcccncggntt

SEQ ID NO: 135110 - DNA, 442 bp, Arabidopsis thaliana
cacgcgtccgcaaagtttgatacaatcgcccgcttggccatgggaataaaaagggtctttcacgtctgcaggttttaatggcgacaatttcgttaagaagaacaaaagaaaagagtttgattggtttaccgcctaagactgttgaaacttgttatgttgagctttctccggaagaacgtcagttatatgatcacatggaaggagaagcgaaaggtgttgtgcagaatcttataaataatggaagcttgatgcgcaactactcaacagttttgagtataatccttacggcttaggcagctttgcgattgacaatgtctctttgcccctccagcaattaagatcctttttcccacttctacaatctgtaggaagattgtgactgttaagccagggctactgcaaaagctggttgcagcattgcaagatggcgaagattttgact

SEQ ID NO: 135111 - DNA, 635 bp, Arabidopsis thaliana
  unsure (1)..(635): unsure at all n locations
ccggcncccccnnccggnccntagtcacccnttctctctcgtccctcgngcaaacctcttaccggggaggccantctcttaancancatgccaagcnccacctgattgancatgtcccgnaaccaccctggcattnctattgggcgactgtncgagaagtgtgatggaaaatgcgccatatgtgatccctatgtccnccccgtgtactctggttaggatttgcgatgaatgcaactatggttcgttccaagggcggtgtgtcatatgcggaggagttggaatctcggatgcttactactgcaaagagtgtacacaacaggagaaagatagagatggttgtcctaagatagtcaatcttggcagtgccaaaactgatctgttctatgaacgtaagaaatatggattcaaaaaacgatagtagtttgttgttacttgagctattgatcttttatttattgatgctaggaaagtgtctgtacttgtcttgtttgtgttaaggaaattttatccggtgaagtaatttaagacatgggttcaaactaaggattatggtttgttgaaaaaaaaaaaaaaaaagggcggccgctctagaggatccaagcttacgtacgcgtgcatgcgacgtcatagctctt

SEQ ID NO: 135112 - DNA, 463 bp, Arabidopsis thaliana
cacgcgtccggggatcgctagttcagacaccttctcttcttcttcgttctccttcgaggtcaaaatcttcttaatcgaggaagagcaagatcttctttaagcagtcatggccaagcatcatcctgatttgatcatgtgccggaaacaacctggcattgctattgggcgactgtgcgagaagtgtgatggaaaatgcgtcatatgtgattcctatgtccgcccgtgtactctggttaggatttgcgatgaatgcaactatggttcgttccaagggcggtgtgtcatatgcggagggagttggaatctcggatgcttactactgcaaaagagtgtacacaaccaggggcaaagatagaggatggttgtcctaagatagtcaatcctttggcagtgccaaaaactgatctgttcctttggaccgtaaggaatattgggttcaaaaaacggtaggaggtttttttgt

SEQ ID NO: 135113 - DNA, 484 bp, Arabidopsis thaliana
  unsure (1)..(484): unsure at all n locations
cgcgtccgaggatttggaacaattagtagaagtagtgtgcaaggtggtacctttgatcatcgcagtatcaggagatgttggctctgagacacctattaagtgtgagcatagtgatgttctcggtgtatttctcaagagaacggcagaacaacaggttttgagacgtaattggagattttcatgggttcgaaatagtacattgatgcagccgatgactaaggaagtcccctggtatctggacgacgggacaggtcgtgtgaatgtagatgtatctcaaggtgaattaggcttggcgttgacggttggtagtgatgtattttnaaaggcagagccgctattcgctttttcaaggagcgttggggtatcttaaaggcttttangatacttngggtaagacacntttagcgtgttttccccncttggtccnccncttcaaattntttggtnaggcttttagggattgcatngggntttcaagggttna

SEQ ID NO: 135114 - DNA, 483 bp, Arabidopsis thaliana
  unsure (1)..(483): unsure at all n locations
acgcgtccgagctcgggttaactcactgcgctctgctataattgaaacatttccagaaccaaacaggcgactactactgcggatgctaaagatgatgcatactatcacctctcattccagtgagaatcgcatgacttcatctgctgttgctgcatgcatgtccccattgctcttacgtcctctattggctggagaatgtgatctagaaggttttgacactctaggagataactctgcccagcttcttgctgccgccaatgctgccaataatgctcaagccattgtcacagcccttttggaagactatgggaatatgatcaatgatgaaggtcttgggagatgctccacttctactgattctcatatttggcgacaagtgggccctgaggaactcaagtgatgaagagggaaatagtggttaaacatcctgactttcataatctgggtataggagaagggggaacaaggttgntgtattntgtc

SEQ ID NO: 135115 - DNA, 462 bp, Arabidopsis thaliana
  unsure (1)..(462): unsure at all n locations
cgcgtccgcattggttgtcacctttattttatcccacattttttctaattagaccataagtcatttttttggtttccgtttgattgatgaattcaacatttttgttgtatatgttccacgattttgcaatgttcttctcaatcgaagctaaagggattatatagacaattattgcgtgtgtttgaatataggacgcagatataatgtggcttagagatccatttcctcggttatatccagatggagacttccaaatggcgtgtgacagattctttggaaatccttatgattcagacaattgggtcaatggctggtttcacatacgtgagatcaaacaatcgaagcattgagttttacaaattttggcacaaatctcgtctaggttatccagacttngcatgntcaagatgtgttcancagnttcaagcatgggcctttnatctcagggnttggantccaatt

SEQ ID NO: 135116 - DNA, 484 bp, Arabidopsis thaliana
  unsure (1)..(484): unsure at all n locations
tngcggcgcgtgaccnagtgctgcttgcggtcacaaagccaatgtgtgcccttcatgcccngcttcatgcctttctccaaaacttgcggactcaccactgatcccaacttgtgttccgaaactgccgcccaagctcctttgccgaagacggcagcacctgttccaggagcacccaaatctgacaaggatgccgcaagcaaactcgcgggaacaggcttggtcggaatcgtcgtgatcacgattgctgcgatgttttattaaaattgaattatatattcttaaccattggagtgctttatatagactatagcctatattcctatccggctatatgtgagaattgtgtttggatcaattatacatggcgttttattttgaattttgttttttacatctagagtttttaaaaatattgttgttgtcgcctttaatgtcattttgtttattacaactcaaatttaatatatgtgaaatgtgatcgtgc

SEQ ID NO: 135117 - DNA, 477 bp, Arabidopsis thaliana
  unsure (1)..(477): unsure at all n locations
agacggcgttgaacactcagctgtcttgtctttgcggtttcatcaaaagtccaatgttgttgatccctttcatatgtcaccgacttcaatgctcttttctccaaaacttgcggactcaccactgatcccaacttgtgttccgaaactgccgcccaagctcctttgccgaagacggcagcacctgttccaggagcacccaaatctgacaaggatgccgcaagcaaactcgcgggaacaggcttggtcggaatcgtcgtgatcacgattgctgcgatgttttattaaaattgaattatatattcttaaccattggagtgctttatatagactatagcctatattcctatccggctatatgtgagaattgtgttgggtccaattatacatggcgttttattttgaattttgttttttacatcttgggttttttaaaaaaattnttggtgncgccnttaatgccattttgtttttncaacc

SEQ ID NO: 135118 - DNA, 883 bp, Arabidopsis thaliana
  unsure (1)..(883): unsure at all n locations
gcgtccgtgccaaaggtggtctgatgctcagaactatgattcctcagcattctacaaggtaccgttctctagagttgtatacattgaccaatctgacttccgaatgaaggattcaaaagattattatgggctcgcccctggtaaatctgttttgctaagatatgctttcccaatcaagtgcaccaatgttgtctttgctgatgacaatgaaaccgttcgtgagattcatgcggaatatgcccccgagaaaaagtcaaagccaaagggggttctacactgggtcgctgaatcttccccaggagaagagcccataaaggtggaagtccgattattttagaaactctttaactccgagaacccggctgaactcaatgatgcttggctcactgacattaacccaaactctaaaatggtaatttctggtgcctatgctgtatcaacccttaaagatgctgcagttggggacagattccaattcgagaggctaggttattacgcggtggacaaggactctgagccaggaaagcttgtgttcaaccggacggtcacactcagagacagctacgggaaaggtggaaagtaaaacactccacccatattaacattttgttggtcaaaattcccccgaaagggttttataacaacagtaaatgaaatcgtttggtttgatacgcacattgtacaacagttggttttttatttcttgaatcaaaacaatgtcatgttttatcttttgaaaagttctttatctccnnnnnnnnnnnnnnnnnnnnnnnnnnnnnnnnnnnnnnnnnnnnnnnnnnnnnnnnnnnnnnnnnnnnnnnnnnnnnnnnnnnnnnnnnnnnnnnnnnnnnnnnnnnnnnnnnnnnnnnnnnnnnnnnnn

SEQ ID NO: 135119 - DNA, 374 bp, Arabidopsis thaliana
cacgcgtccgagctcgtacaaagaaagcagctttacagttccagggacaaagattgtttccgtagacagccctgtcgggcgcttaggccttactgtatgctacgatttgaggttccctaagatatatcagcaactgagatttgaacagaaagctcaggttttactagtaccatcagctttcaccaaggtcactggggaggcacactgggagattcttcttcgagcccgagcaattgaaactcaatgttatgttcatagctgctgctcaagcaggaaagcataatgagaaaagagaaagttatggtgacacactgatcattgatccgtggggaactgtagttggaaggttacctgatcgtgtttcgaccggcatt

SEQ ID NO: 135120 - DNA, 353 bp, Arabidopsis thaliana
  unsure (1)..(353): unsure at all n locations
tcttcttcttcttcaagcgatgaaccagaaaagttttgattttnattttggtgaaccaggaaagtggtactcgatctgtggtttggcgattctgaattactatattcctggaaaattctgttcagtttcataatttaaacaagatgcagctcaacgcccctgaacatccggttgcaggacacatcgctaaagacgggaagcctgggccctctcgtacatgacaagggtcgggttcttcacgccacttcagggcggttctcgtcgcgaaaacgaggtgaagctctacgaatctttgtcctcaaacacagaggctccagaacacatccatagatatttgccggtgtatcacggca

SEQ ID NO: 135121 - DNA, 745 bp, Arabidopsis thaliana
  unsure (1)..(745): unsure at all n locations
gcattgaacatcacaaattaagcggaatagttcattttgcgggactaaacaacatatatgatcttggttttttcgtcaagatcagagatatcgaggtatttggtacttggccaatggcattgttatcggctaataggaaacgagtggtagtagaagggcctgtttgtgaatcttcacaagtattggggtggcatttgagaaaaattaataacgagacagagacaaagcctccgattcatatatcaagcttcgctttcaatagttccatactttgggaccctgagagatggggtcgtccttcttctgttgaaggcaccaaacaggattcgataaaatatgtgaagcaagtagttttggaggacgatacaaagttgaagggacttccggcacaagatttgttcccaaggattatgctttggcgtctcaaatttcccacaagaacacgtttaagcacctgatttgctttatttcattctaatctctttcaaattagacacttttccttctttttttgacaaaaaaaaaaaagagacacttttccttttttttttttttgaatttatacatcacagtgaaagatttaaaatcagtcatctagagtgtagatttaaaatgctaaataaatactatagttcttaacattgaaaaaaaaaaaaaaagnnnnnnnnnnnnnnnnnnnnnnnnnnnnnnnnnnnnnnnnnnnnnnnnnnnnnnnnnnnnnnnnggaatgcaaattcaaccatac

SEQ ID NO: 135122 - DNA, 523 bp, Arabidopsis thaliana
  unsure (1)..(523): unsure at all n locations
caaccgntcggttgnctgccagcnntccgctatggacggcntgtgaggccttttgggatctcccagtttgggggcattgggaaaattnttacgggccggggccaagcccccgatccttttatccacgtcgctttcaatagtcccatacttgggccccctgagagatggggtcgtccttcttctgttgaaggcacccaaacaggattcgataaaatatgtgaagcaagtagttttggaggacgatacaaagttgaagggacttccggcacaagattgttccaagattatgctttggcgtctcaaatttcccacaagaacacgtttaagcncctgatttgctttatttcattctaatctctttcaaattagacacttttccttcttttcttgacaaaaaaaaaaaagagacacttttccttttttttttttttgaatttatacatcacagtgaaagatttaaaatcagtcatctagagtgtagatttaaaatgctaaataaatactatagttcttaacattaatc

SEQ ID NO: 135123 - DNA, 479 bp, Arabidopsis thaliana
  unsure (1)..(479): unsure at all n locations
gttattgcagatatattaagtgcaatgcttctncgagctattggtcagaaacttcagatggcttatggactgaatgcgagactacttggttttcttaagtcatcaagggataaagtgatcctaccttgtggtgatattgctgctcttgtgtatttgtggcatcctttcacgatagtttcttgtgtgggcttatcaacttctcccatcgaaaacctggctgtcatattggcgctttttggagcagttacacgacgagttcctctggcagcatttggcttagtcattgccacacatttatctctttatccctgctactctgacaattccaataatcttttctatttggggataatggttttggatgctcctcccaataaaaatggttnccttcagaccagaagnggtaggaaaattnagggngagttcaaccctctanctngtttncnanacaagncaaggttgaaacaggcttacggacc

SEQ ID NO: 135124 - DNA, 408 bp, Arabidopsis thaliana
acgcgtccgaacataaactcttcttctctttctctgcctctctttttctcctctctctctcaggcacacgatccacacacacacacaaagactcaaaacaaagtcaagaaccctaatatcttaagaacgtcctgacataaccataggatcaaagatggagggagaaaccgcagccaaagcagcggcaagttcctcctcatccccgagccggtacgagtctcaaaagaggcgagactggaacactttccttcagtatctaagggaccacaagccacctctgaatctgtctcggggtagtggcgcacacgtccttgagttccttaagtacctcgaccagtttggtaagaccaaagtccatgccacggcttgtcccttcttcggacaacctaacccaccgtctcagtgcac

SEQ ID NO: 135125 - DNA, 498 bp, Arabidopsis thaliana
  unsure (1)..(498): unsure at all n locations
gaatcaagtgcttcaccgtgatataaaaggctcaaatctccttatcgacaatgagggaaatttaaagctggctgattttgggcttgcacggtcgtattctcatgatcatactggaaatcttacaaatcgtgtcatcacattgtggtataggccccctgaattactacttggggctacaaaatatggcccagcaattgacatgtggtcggttggttgcatatttgccgaacttttgcatgcaaaaccaatcttacctgggaaaaatgagcaagaacaattgaacaagatatttgagctttgtggatcacctgatggaaaaactttggcctggggtttccaagatgccttggttcaacaatttcaagcctgcacgggccttgaaggggcgtgtaagagagttcttccagacacttttgattccgggcatgctcttggattaccttgggggaaaatgtttggggctttttnccccgcccagggatttntcgnnnaaggatt

SEQ ID NO: 135126 - DNA, 498 bp, Arabidopsis thaliana
ccggcagatgctacccaaaagcatgattgtgaaatcatgagtctggaaggccaaaacacccaagaagcagagtatccaagctctgataaagttgcaaagggtggctttggctcagatatagaaggtattggtacagcacctacttcgggaacagaccctgtaggaacagagcaagtcaatgaaactcaaagtccaggaaatgattatgagagaaatgatcatctgaggaagtctattattttagctggtgatacaatgcaaatagattgtgaaactcaggtacatgaaagtgttcagattgaacggggctgttctcttgttaaggaacccgaacgatcgaagggatactcaagacatagagggagtaggtactatagggacgtcggatcttctagcttctgaagttgcggggagttgggctaatagcacgaatccttctgtacatggagaaaacgaaactgaaagaagtagagaagatgaagagagtcagactcaaaa

SEQ ID NO: 135127 - DNA, 419 bp, Arabidopsis thaliana
  unsure (1)..(419): unsure at all n locations
cgcgtccggaaatcggaaatgcttccattaaagcttgctcgatctcttcttctccacgagactctcaatctcactcataattccggcgatacagacgacgttgatgaagacggagaaaccagtatccggcaaattctaagctcctacaagcaatcaaaaacccgatcgagatccgataacaacaagacgagaaattcgaaaaccccattgctatacttcgttccaacacgagaattgatctcagatacataccgattagcaacaatcgggagggatctaggtatggatatgtacccaacaccatcactcttctcacatcatcttcttcattcccatcgccagattcaaaatccgccggcacctttctcttcttcatcgcatccttcggcatggggggcttttgntttngnattngnggg

SEQ ID NO: 135128 - DNA, 640 bp, Arabidopsis thaliana
ctttgtcttcttcaggacctcctttctgggcagcgggtattattttcggttaaatcctcagaaacatgtgaatctgatttaagcatccctgtcaccctgaatggagaaaatgtagctctcgtcaacaaaatcgctctaactgatcaattggtggccggaagcgctattttggcggcaatatgtactgcacttgatcgtattggatatatctgcgaagcttcctttgaaatcctgcacaagtacagtcatgagaaaacctcagtgctactgaccattcttcacgtttttgcttacattgctggagagaaaatggtgttgtctagtgagcatggcatatcaattgcagtgttgaaatacattgtcatgtttctagaaaacaaacattttggtactgtggagggcagttctcgattgcacccaggcaagaacaagtgtccattctcagacaggtcttcctcgctggaggctatggcatctaagctcatggaaattcttcaggaatttactgagtctaatactttgcataaaagcttgactggttcattgggttctagccacctagagaagaccgagtttaggccggcacacaaagatttccagtgtgtattgaccagggatcaaagtatcaatctctgtgaca

SEQ ID NO: 135129 - DNA, 691 bp, Arabidopsis thaliana
  unsure (1)..(691): unsure at all n locations
acgcttaatcgagggggattcttttttttttttcaaaggcctaagaaaaaaaaaaaaagtgtcgcccccgttttccacctaaggggtccaataggggaaacagaagggaacaagccggaaagggtaaagcacagcaggacccaggcagggggtctcggaacggaaaggaccaggggcaaagnaaaaccaccaccaccaccaccaggttttcaaaaaccaatgcagcctcctactgaggatgttcttgcaacttccgcttgacgtatctcaacccccatcaaaggctaacacttggaactcctcaattttttggtatctaaacatatgagggagtattacttttcagagtagccaactcaaaggattggtccataaacttttttttttttctttttcttttgatagtttttgcaatagagattggagagtagatattagtgggactcgtcccgtgatgaaagttagagcatccaaaaagctcaagttcctaaattccattgaattttttgttttcttaatatgtagaattttcattcttatcaaaagaaaaacaaatgtagaatttcctttcattagatccaataatatttgaacggcaaaaaaaaaaaaaaaaaagggcggccgctctagaggatccaagcttacgtacgcgtgcatgcgaagtcatagctcgtctagtagtgtaacgaag

SEQ ID NO: 135130 - DNA, 653 bp, Arabidopsis thaliana
atattttcggaagaagagagagagagacggagagtgaaggcggaggaagggagagagagatgataccgcagcaatggacgccgccgtgtgggagcaaatgcacgaataagtactcagcatttacgcagcttccatggagagtattctgcaaaaagggatgtgatgccgatagtgactcatgggaagattgtgtaggagactgcagtgaaatttgctacaaagatcctgtgctaaaagacagaccatggactgctgttatagatcgttctcctggagatgccaaatactctgaggaatgctttcacgcatgtgtagcaggctgtggttacaagtttgatgttgaagctgagatagtcaataaggtgaaaccaaatggggacctccaccaccaccgcccaaaggccacaaccaccaccaccatccaccacgttctcaaaaaccaatgcagcctcctactgaggatgttcttgcaacttccgcttgacgtatctcaacccccatcaaaggctaacacttggaactcctcaattttttggtatctaaacatatgagggagtattacttttcagagtagccaactcaaaggattggtccataaacttttttttttttctttttcttttgatagtttttgcaatagagattggagagta

SEQ ID NO: 135131 - DNA, 649 bp, Arabidopsis thaliana
caaaaacctctgataagttttggttcttgatataaacaaaatgggaagatcaccgtgttgcgatcaagacaaaggcgtgaagaaaggaccgtggctgccagaagaagatgataagctcactgcttatataaacgagaatggttatgggaattggcggtcgctttcctaagctcgctggacttaaccggtgcgacgggagcagtcagctcccgtggatgaacatatctacggcctgatatccggagaggcaaattttccgatggagaagagagtactatcgttagactccatgccctccttggcaacaaatggtcgaaaattgcgggtcatcttccaggaagaacagataatgaaattaaaaactattggaacactcatatgaggaagaagttattgcaaatggggattgatccagtgacgcacgagccaagaaccaacgatcttagccctatcctcgatgtttctcaaatgctcgcggcagcaatcaacaatggccaatttggtaacaataacctcctcaacaataacaccgctttggaagatattcttaaactccaattgatccataaaatgcttcaaatcataacccccaaagccataccaaacatcagtagcttcaagaccaatttactgaatcctaaaccagaac

SEQ ID NO: 135132 - DNA, 646 bp, Arabidopsis thaliana
  unsure (1)..(646): unsure at all n locations
taatttgggcncaaaaggcntncngcaatcccggccnaacngggncccaaannggcccccttttttttttgggtcccccctttaaatgcaagggccgaagtaaaaaaattttgtttgtcaaaaaaagaaaacttataacccttttaacccttaaatggttatttaggttttccattaaatatccagaaataatgaattggggtttttaaaggcattttttgatgccgctattgaaatagcttttcttgctatatttgcgggtacaccaccccatttcaataaaggattttccctggtttaaccacagctacccaatactcaggggatcctttcccagaacccatacgcgtttccgcaggtcttactgtaactggtttgtctggaaatatacgtacccaaatttttccaccacgtcgtacattccgtgtcattgcgcgtcgccctgcttctatttgtctagatgtgaaccaagcgggttcaagtgtttgaagagcatatctgccaaaacaaatacgattcccacgagaagatattccttttagtcttcctcgatgttgtttacgaaatctggttctttttggactaagcatagcaattatatcaaaggagttttgatggaaatttttattcaatcttataagaattg

SEQ ID NO: 135133 - DNA, 507 bp, Arabidopsis thaliana
  unsure (1)..(507): unsure at all n locations
gggtttacgcaaagtctgatttctctattcattgctaataaagagaaaaacaacctgtgctaatatacacattgagatctatgtttcaaagaaaaggcagacaaaatgttcaaagcaaacagagtgtttctgcattcagataaagaagaaattacaaacactttcaggctccggagttggatgattaaacggaatttggttctccaaatatcattctgcagaataaaatgatctccatgtaccatcagaaacaggatccaagaaaggaatgtcttcatcttgttctttagttatcatataatcaacagacaaagcttccccctctagagatgttgatgatgatgcttctccctcccctaacggaagctccatatttagagcggccaatcctgtgtctgcgacaatttgggccccggctaaggtgggatattcttcagatgtcccgatgcaacggaaccgntctggctcccgangcngtgggggacccggtctggggaaaangggcgt

SEQ ID NO: 135134 - DNA, 495 bp, Arabidopsis thaliana
  unsure (1)..(495): unsure at all n locations
cataatccattaattatcttttataatttccatcttataacgaacccattccaaggctctagaagacatatttgttggccaaagccgactcttgaaccctaaacccctaattaccgctttggtcaacaatcaccaactttgaccttctcttctccatttagaaatttgcaatcaaagggacaccaaacaagggatcttcaaattttttggcaatgcagattggaaaagaagaaccacaaagaatttaagaagctggtacacaacccaacctttttctattaaaactggaaatcatttcgnttcttttctttcttcctataggaacagacatatatggatgaagttataatccncatcagattcagacccatgaggttccattattatcccaattatggccaggnaacttcagtggggccagncgtcgnggnatgaccnnggcaaggcacagccaagcacacacnggcccaacccnggaatgcnngggggggggga

SEQ ID NO: 135135 - DNA, 567 bp, Arabidopsis thaliana
  unsure (1)..(567): unsure at all n locations
aggaaactgaaaaagacaatgagcagcagcagcgatactcatgccggagaatctcgtcatcgccgtaacccgatccggtggctactcggtttcggtttcttcgtacaaggattcagaggattcccatggcttggagccaatttcttcctcacagaacagctccgtgttaatccttcagttcttcagcttctttcaaaactcagccaatcttccaatggtcgctaaacccatctacggcgtcgtttcagactctgtctacttctttggccaacatcgaatcccatacatcgccgttggagctttgttacaagcaatctcatggctagctatagcattcttgtcaagatccaatgtatcaatcttagctttatcgatatatcttctccttagggaatctccggtgctttccttcagtaggaagtcagcgcaatgatgctaattngttgcngnaatccgggaaagcaaaaaaaaccttagnggcgngaatcccggtgngggtacccgnaattngttttgggtggnttctttncttnggtggnatntangggaanccttttnnggnggntt

SEQ ID NO: 135136 - DNA, 418 bp, Arabidopsis thaliana
aacaaggaatcactaatagcgctagccccaaacaaagtcacagatatacaaagtttgcttctaccatcgaaatatgaagcaaaatcaaagaaaaagctacacaatcgaaagttggaccatgtagacaatgacagagactatgtaaaacctcaaatcacaagaatgtcacaaagatatacaaaggtcacattaacccaaatgaactcactctatctttttactcttctcctttggttccgcttcatcatatatccacgaagttaagatcaacgggatcccaacgcagaacgcttttatagcgagtccgcgagtaaaccccgagaaatcattctttgttacaccgacaaacgatgcaagaacgattccaagatatccgctaactatgaatgcaagagcaatggctgacatgacaaatgcc

SEQ ID NO: 135137 - DNA, 506 bp, Arabidopsis thaliana
  unsure (1)..(506): unsure at all n locations
aagaaaaaaaaatattgatttcattttgttgattttctacaaatacataaatcatttccagaaaaggaaaacagcatcaatttaagcctagaaaaccctaaaaactctgtagaaagaaaatgagaaaatttaaaagaaaacaaaaataccagcagagtcataagagcaacagatgacgccatggcatttttcttacctcttcctaaaataaaattaggataacaaacataacaaacaaatctaaactaacataagagagattctattggaaagaacccaaacaagtctcttacgttatctggtatcatgactctttgttgttgttgttgttgtcgttggctaccaccactactgttggttcttcattaaacctgaaccatcggatatcatcacctccgctgctgagccatctcaacctgncccaccagngntctcttcggaccgncgancttctgtccgataatggcctgagtngtgtggggagtgnagattttgctccnaagatt

SEQ ID NO: 135138 - DNA, 688 bp, Arabidopsis thaliana
cttctttcctattttttatctttttattgttttgtatataaaatccctaaattcccgttttatgtaacggacataataagccgcgtacggcgtatccggcaaatcggcccagctcgagccatcatcaatctacggaggagatccatctctctctctctctccatatcgcaacaacactgctgaagatttcggggggttgccgacggagctggaatctagctttttcttctccagatctctaaaccgattctcaccggttaattggtattataaagccatggttcttgatgggcttgtatcttcaccgtcaaggagacaacaatgtctaaagaagcagtgggacgagttgggtagctggtcgactcttattcagaggcatcaatatctcttaacagctttggctcttttggctttcctctgtactgtttatctttactttgcagtcactttaggcgctaggcactcgtcctgctatggcttgaccgggaaagacaaggcaatgtgtcaattacaacttgttcaagctctctccaaagggaaacttaaattcttctagactgtttatctatcggtgaaagtttgaaacccccacatttattgttcttgtactaaaacattctttttcttctttattctataatgcaatttgtgtgtattattacatggtgaaataaaaccagagattcat

SEQ ID NO: 135139 - DNA, 518 bp, Arabidopsis thaliana
  unsure (1)..(518): unsure at all n locations
gaaaattcgaagctttctcggcgatgatggagcgaacttacggccgtcgcatgccggggatgttaaacgacgacgtctcgcgggcggaacatatttttccgtcttcttcatctccagaactcgagccagttgatttctcaactcaagaatcatcttgtgtctggaattattctttaacatatgacattgaataaaggatgtctctgtcttttatctgattgccttttaacagccgtgaaggtattaatgaacctaacaaatgataattctgttggttgtcgggaagttgctgcctgcggaggactggagagcatggctgaattaagttgttggacactttccttcctttaacagattcttccgctttaacagtcagaattggagtccggggcaatntccaccaganaggttaaacancttanaagaccagggnnttangattttctttntanccnatnctgggggntcttggnaaancttngtnggnggaaaaccggggttaancnnggntaangnnt

SEQ ID NO: 135140 - DNA, 505 bp, Arabidopsis thaliana
  unsure (1)..(505): unsure at all n locations
actaagatacgatatgattaactctcattaagcaatctatttctatatatctgtttgttctttctttgtatgacaaaagtacaaaagaatgggggatgtgaattactaacctaagctgaaccaaaaaaacaaaacctcaaaagaaagaactaaaagatactctatttgggtctatattatacgtgtaacatgttccattgtgtgagaccactaactataagtgtggagcaaacccaaagtgtggcagaagctgtacagtgagaggagaacgaagatgtcgcctgtttttttccctccgttctatggcaatttgcacgactcgataacttccataaccactttatgtgtttctggagggatcatgtccagtgttgtatgaaacgccacaaatctatccaacacggggaccagaattgccatgncgcgttttgggngaaanccccgaggnattccgaaactccacctcccgggggagaatgcagagagggggaaagcccccgccaca

SEQ ID NO: 135141 - DNA, 571 bp, Arabidopsis thaliana
gagctctccaccgccaccgacgaattcgaattctcagatgatgatgaacagaacgacgccgttgacggaattctcagcagatccgggttttgcggagagagcagctagattctcttgttttggtagtcggagctttaacggaagaaccaatacaaatcttccgattaacaacggtaataacatgggcaacaactccgggaagctgacacgtgtctccagcacaccagctcttaaggctcttgtttcaccggaagtcacacccggcggcgaattttcccggaagagaaaatctgtgcctaaaggaaaatccaaagaaaaccccatttctatcagcttctccatctcctagtttctcaaagacggcgggaaaagaatggtggaaaaggaggacaggtaaaaagttcacgttggaaaaaaggaggacaaaaggagaaggcgaagatggaggtgttttgaagaagaagaaggatggatggtgtaaggggccaaaagcaatttctcaaaaccacctgagcctcctaaagattacattcatgttcgagctcgacgaggccaagcaaccgatagtcac

SEQ ID NO: 135142 - DNA, 522 bp, Arabidopsis thaliana
agtggaacgaagactaaaccaagcggctgcagctgatcattctactcttcctgcaacaagtaacgctgagcagaaacctgaaacccctaagccgcagatagcagttataccaaataatgcaagcacggcaactgcagcagcactgttaccttctcataaacctagtttgcttggagctcctaggcgggatggccttcacttttttctgatggtggaagaccccttatgatgaggcctggtgtagatataaggaaccaaaactttaatcaaccccccattctggctaaaattcctatgcagccaccttcctcgtctatgcattctccgggtggttggttggtagatgatgagaatagaccttcttttcctggtcggccttcaggactttatccaagtcaatttcctcatggaacaccaggttctgctcctgttggtccatttgcacatccatcccacttgaggagtgaagaggtagcaatggatgatgacctgaaaaggcaaaatccttcacgtcaaacaaca

SEQ ID NO: 135143 - DNA, 464 bp, Arabidopsis thaliana
aaaaaaaactatcaacttagactacatatatacaatcactatacacaagacaaagcctaattgaggtggagccttgggtgcaaggtttcatactcactttctcaaaactctagaaaccaaaacagcaagagtcatgagactagctccctgaggaataggccatcttttcatcaaaaagtctcttatttgggacactttgttaccttttttgatctttgcttattttctcacattggtaatgaatatataccgtatgtcttcttccccacaatcacatctctctttcgacctaaattttgcatttctgcaaaactcacaactctgaaatgttttctttaggcgcttcctcttcaagtcctttgtttgatacatcttcactgctttcccacaaaaatccattatcattttccggacctttctctgtttctctagctagaggtgccacatgtgcaacatacttttca

SEQ ID NO: 135144 - DNA, 462 bp, Arabidopsis thaliana
atcaatcaaaccaaaaagacttctcgtattcatgcctctccctcctaagaaaagaaccctaatttttattatctgcagaaatcatcatcatgaacgagattcatcaaccgctggcgaggagagtatggagaagcaacgtcgatgaagagatggctcgtatggccgaatgtctcaagcgattcccactcatcgctttcgatacagagtaccctggcattattttccgcacttatttcgattcctctagcgacgaatgttacagagccatgaaaggtaatgtcgagaacaccaagctgatccagtgtggtttcactcttttcaacgccaagggtgagatcggtggtgttttgggaggtttaaccttctcccaattttcggcgacccattcagacaacacgcaatcgagcttttccaatcgaattcctgaggaggcatggtttggatttgcagaagattagagac

SEQ ID NO: 135145 - DNA, 414 bp, Arabidopsis thaliana
gttcatgaacgtggacagaattgtgcactatatacaatgggaaagaaaaaagagaagaatcattgcgaaagcgataatgttggtggattagtgaaaaatacagctgatattacacattgtgcgttgtattatcgtactacaagcaaaaaacttcaaaagggatatttttggagttggatgttgtctgtcatttcttggccagtaatttctttgggagcttatcgagtggcgttgatttaagtaaaaatagcctcgcagctcgctctcgcaatgtccctccgcacttcagaccacgtgactgaagctcagtcttcaatctctccatccccaaaacctccatgtctgctggtgaattgaagtcatcaaagttaagtggttcaacaggtttgcaacatactgcatcaacagacactg

SEQ ID NO: 135146 - DNA, 490 bp, Arabidopsis thaliana
tgatttcatcatcatcactccgactaatatcaacggcggaccaaccgcccatgcgggaatcgaagctagcaacggtgtgaaaaacatcgctaacaagaaataaacagccaccgtaatcgccgttagacccgtcctccctccttctcttatccccgtcgacgactcgatgaaaacagtcaccggagatgtaccaagccaacgatccgatcacaatcgcagacgcgtcagacataaacgcgcaatactgtccggcgaaatctcctttctcgtcgacgaatccggcggatctagccattggagtacaagcgttcccgtccgtatccaacaatatcatacgttggagggattgtcaccctgagggcttccctgaaatgtcctttgtttatcccggagaagcttaaagctccggcggtatgtttaatgacgtgtacatcaacgatctttttgaaataatcatgagctgcatctccggccgatgtgttcggaaacg

SEQ ID NO: 135147 - DNA, 581 bp, Arabidopsis thaliana
  unsure (1)..(581): unsure at all n locations
tttctttttttttttttcttacaacaaactcagagtttattcgaggacttactgtttttttttttttctttagttacacccaaatatacaaataataaaaaaagaaaagagattataccacaccattacttactttaatcacaacataaataactatataagaatttatttatcaaaggagctttaattacaaagctcaattcacaagtcctgggtcgaaactaacgcccgttgacggcaaccatatattcccgtcaataaaactcgccacagtgaatttttccgcttccggtcaccgtcaaagacggatgacacccactccatttaacccgacccgaaaccgatgatccaggaccccgaattcccatattctccgnaaaacagagatttgnaganccggnaaccaccccgnccaagggggccaacccgncggatggaatcgnncccgccggtaaatgattgnatcaccaacgncctcngatnatcccttccacgggcggccaaggtaaggcatcgnttccggcgggggtcctggaagtttgaatcgnggttcgggggtttnncccggnatggncggccnt

SEQ ID NO: 135148 - DNA, 415 bp, Arabidopsis thaliana
gcaaaaccgttgctatacttgttatcaacccttgcaatccatgtgggaatgttttctctcgccaacatcttcaaaagattgcagagacggcttgcaagcttggtatacttgtgatcgcagacgaagtctatgaccattttgcctttggggataaaccatttgtgtccatggcagagtttgcagagctagtgcctgttattgtcttaggtgctatatctaaaagatggtttgttcctggatggagactcggttggatggtgactcttgaccctcatggcatcatgaaagattctgggtgtgttcagactcttatcaatgttggtcaacatgtcgacggatcctgcaacgtttattcagggagcaatgcctgatatcattgggaatacaaaggaagagttcttctcatcaaaacttg

SEQ ID NO: 135149 - DNA, 460 bp, Arabidopsis thaliana
agctaacttgtcgttgtttgacggtaatgaagctgagaagtttccttctgctagtggaggatatggcttttcagatcaaactggattagcttcacataatgctaatggtaatagcttggctgataagagtagatatcccatttcttcatttggggaagatcctcagcgacagagtttcatgcaactgagtccaaagcccttgggataagcaaatcatgaatgctgagcagcttcttgggaatgacagggaaagaaacccttttagtgggaaatctcgacatggctttgttaacgacatgattactgagagtccaggggatatggaggtgaacccctgtggatttttctcgcttctcagattccccggacttcgccgctcgagagtcttagcagaagttttattttgctaatgggtgtgatttgcagttgacaattgagatgcttactcagcttgagctac

SEQ ID NO: 135150 - DNA, 574 bp, Arabidopsis thaliana
  unsure (1)..(574): unsure at all n locations
ctcaaacactccaacatttgccacaacaatccttcgcatacacaacgaaagatgggaaggtgttccatttatattaaaggccggaaaagcgttgaattcaaggaaggcagaaattcgcattcaattcaaggatgtcccaggcgacatattcagatgtcaaaagcaaggaaggaacgagtttgtgatacgcttgcaaccttcagaggcaatgtacatgaaactaactgttaagcaaccaggtctagatatgaatactgtgcaaagtgaactagacttgtcgtatgggcaacggtatcaaggtgtcgctatccctgaggcatacgagcgcttaattcttgacacaatcaaaggcggtcaacaacatttcgttcgtagagacgatttaaaggttgcgtggggggtcctcacgccgctacttccacaggggtccgccaaaggggaagttaaggccatcccattcaaacccgggtgccgaggcccgaaagaggctgtnccctcttnggnacctggttntttagcttcnggttttttggtccccccccntttaacccncctttttnagtccntncctnnt

SEQ ID NO: 135151 - DNA, 317 bp, Arabidopsis thaliana
accgacaaaggagaagtaaagtcaaatcccatacaacccaggaacccgaggaccgaaagaagctgatcagctactagagaaagctggttaccttcagactcacggctatatctggatccctcctacactataaaaccctacatatatataaatacacaatacatgtacctacatgtatatgtataaattatgctgaatagtccctcctcgagtttggtgtttgtacgtgaaacttgctacttcagctgttcactttgacacttcctttggtcttgtatttgcggctttgtaaaaataaaaataaaaatcttaccaat

SEQ ID NO: 135152 - DNA, 497 bp, Arabidopsis thaliana
  unsure (1)..(497): unsure at all n locations
ctctctctcacctcttcttatctctctcgttctctttctctaaacttcaacaatcgcttctaatcgtttgatcacattgcacaaacattattaatagagcttatgatcaaagagtgttgccggaaatatggggaagaaagggagtggtggatggttctcgacggtgaagaagaaagtcttcaaatcctctcctaaagactccaagagagagaacaacattggtagtaataacgccgacatatggcagcagcagcatgatacgcaagaagtcgtgtcgtttgaacattttccggcggaaagttcaccggagatctcccatgacgtcgagagcacagcatctactccagcaactaatgttggagacagaaaacacgctatggctgtagctatagccacttcagctttctgcngaagccncggtttnaagccgaacaaagtntccgctnaaagtgggttngnttttcccggnttcaaaccttcaancnggnggaagaata

SEQ ID NO: 135153 - DNA, 387 bp, Arabidopsis thaliana
aaggaaatcaaagtagattttgaccgtgacgttaaaaacttgagaagacatgttcaattattaatgtcatatacaattatgtaacagggaaaatatatttcaaacaagataattaaccaaccacacatgtaagtttttattcaagattacatatactttcttctaatgatcatgcctccagcctctctttccaaacccggtaggactttgactaggactaaccggtttacgtcggatatccgattttgggttcggactcctaggaccgggataaccagttgttattgctccacctgaacttgacgaatcacaacctgatccattaaccgacccgtttttggtcgaggagttccaatacggcataaacgaagttccttgtagtttgac

SEQ ID NO: 135154 - DNA, 601 bp, Arabidopsis thaliana
  unsure (1)..(601): unsure at all n locations
cctggccataatccggcagcatggatgcttgatgtcactgcttctaccgaggtacaccggcttggagttgattttgctgaaatttacaggaactcaaatctttgtcaacgcaacaaggagctgatcgaagtactcagcaagccaagtaacattgcaaaagaaatcgagtttccaaccagatactctcagtcactgtatagtcagtttggttgcttgcctgtggaaacaaaacctatcatattggcgaaacccacaatacactgcagttcgattcttctacaccgtggttatctcgctgatgcttggaacaatatgttggaaatttggctccaaaagggacactcatcaaccagttatttaatgcaatggggatcgatgtancgctgcggtnctcttcaattgggattcaccaatgcaaccgctgcacaggcccgttgtttccattngaaagatttgttttaataccncggggagngcagcggggatttncttgggacttcccttttgcaatttcaacaggggttttngnanttcntnacgggttggcaaatccccanttcaggncntatttttnnaatggccgggtttnattggcccgntc

SEQ ID NO: 135155 - DNA, 563 bp, Arabidopsis thaliana
  unsure (1)..(563): unsure at all n locations
ggtnatatgcacttggccaaatatatactagcaaagatgtgtacaaccagtaaactagagatatatctctattacagtactggttcatgatcagtgattgttatagatgaccaatacacatttctcagaaaaaatgacaaggaacataaaacacaacacaagcttttattgatcccatacatgtaatgacagaggaagaataggcagtcccctgccttcttgggtataaaagccccagtatacaaataaacaatagatgattgttgtatacgtgtatatatgaatatgagagttggtaagtggtaatcaatccatcatcttctctgggaattgaaagctttaatggcgaatgcaaacacaagggagaagaagccgcaaaaggcgacaaccataatagctgaggcacctaaggaggcatgtttttatcccatcacatcctcaagcagttgtttcaccatcacctgatgggataccgtccgatagcttcaccgatctttcatcatcccggtctttggcaccattggccttcagtnccagnccccggtttcccgtgncccntntac

SEQ ID NO: 135156 - DNA, 651 bp, Arabidopsis thaliana
aaacacaacacaagcttttattgatcccatacatgtaatgacagaggaagaataggcagtcccctgccttcttgggtataaaagccccaatatacaaataaacaatagatgattgttgtatacgtgtatatatgaatatgagagttgggaagtggtaatcaacccatcatcttctcgggaatttgaaacctttattggccaatgcaaacacaagggagaagaacgccgcaaaaggcgacacccataaatagctgagacacctaagaagtcatgtttataccccatcacatcctcaagcagttgtttcaccatcacctgatgggataccgtccgatagcttcaccgatctttcatcatcaccgtactgagacaccaatagaccgtacagtgtccaagccaccggggttgcccagtagtaccatctccaccacagaggaatcctcttggatggggtcatgaagccactgaaaaggttccagagcatgtagaagggtgctgctataatcgaggcgacattgtggtttggggtgattgctgtcgtcatcatcccgtagaaggtgaagtacattatcgaaaagtacatgaagaataagtaccacaagaacttcaccgcggaccattcgaacgcggccattgcatagaatatggtgc

SEQ ID NO: 135157 - DNA, 465 bp, Arabidopsis thaliana
tccctatgtcgagccgtgggagtttaccttcgaaagaacagatttcacaggtattatcacacattcaagatgagattgaggctgttcatccagatgctcgtttgactcttctagttttgcgtgagataggcaaggcccttagtaacctagctcaacgagctgagtgccagatttctacaggccctgagacgcggcagatatcaggtcctgcgacttcaacacagatcaggaacttcacattatgtcagcatctgcaaggaatccacacacatatctcatccatggtagcggaccttcccagtattgctactgatgtattgtctccttatctggctgcaatctatgatgcggcatgtgagccagttacacctttgtttaaagcaatgcgagacaagctcgagtcatgcattcttcaaatccatgatcaaaactttggtgctgatgacgctgacatggacaacaacg

SEQ ID NO: 135158 - DNA, 438 bp, Arabidopsis thaliana
  unsure (1)..(438): unsure at all n locations
atgtgagagatatagtaactacaactgaatgaaaaatccatgagacaaaaaagttcgcaatagaagaatattgattcggtaacaaagcacagcttataagttttcttgtgttaaagatgaaccaatttgaagcattagaggataaactggactaaactctttgtcccctctcgatctgatcttcactgcataatcatccaaagttgcttttatccctttccagatctgatcctctctttggttatcaagccacagtgagtactgtttaggacttagtctgttcttctgcatcgggggactctaactcggcctggggcctcttgctgtagagatgcatgtaggacgatgcccgggggggaagaccattggatgagnggggnggnccccattggggaggttcccgggaaaccaanggcnaaagncncanagggcnntnaa

SEQ ID NO: 135159 - DNA, 514 bp, Arabidopsis thaliana
  unsure (1)..(514): unsure at all n locations
cgtccgaacacaaatcaataacatactaaatggcttcaagaaaaccaaaggccaaaccggttaatcgccaatctgtgaggcacccaagtcacaaccatccgctgcgtgtctttaaagccaaagaagaggatgagaccgcatgctctggctgcgagctagagctgaccgggcaagctttcaaatgtataaagtcagagtgcgattacttcttacacaagtcatgtttcgaccttcctagtgagaccaagaacaagtctcaccaggaccaccctctgaccttgcttcattccccaccagatgatcggtctgtctacacgtgtgacgcgtgtgaccaatacggatctggattttcttaccattgctcaaacttgcaactacagtcttcatgttgggnatgnggcggttatncctgaatnccntagnatcggtgangntcatggacatcccactcanctcttcntttatttgnnaaccgtgtanagggnggtnnaggcaaggnncttaactttaancg

SEQ ID NO: 135160 - DNA, 544 bp, Arabidopsis thaliana
tggtagagaggatagcacaagtcagctcgcccagatcatccagttcgcccagaagagccagctcatcgatagaagacagctcgtcgagagaagtcgcctcgtcaagatcatccagctcgcccagaagagtcagctcatcgatacaagtcggctcgtcgagagaagtccgctcatcgaagatcatccagctcgcccagaagagccagctcaccagaaccaccagctcgaaacagcatcgcctcgtagcgccctcaactatgctctcagttcgcaacaagcctttcagcccgtcgattgtccggcttcaagttcagctcgtggattagagattgattcttcaccttccccagagactcacccgtacttgtttaattcgtgcattaacagtcctctactacatgcaatattagaatgagtttgaacaaagttattcatctaccatacccatttattcatctgcactgtatccttagttatttattccaataaacgctgaattttatccaacccaaaaataaataaatagaaatttgtgttcgaaaat

SEQ ID NO: 135161 - DNA, 784 bp, Arabidopsis thaliana
  unsure (1)..(784): unsure at all n locations
cgcgtccgcggaatatttgctttgatgatccagaggaaaacattttacgttcacctctcaagaaactgttcgttgaatccacaaccacagaggaagaagaagaagagtcagatacggtgggtccatattgttcatggacaaatcgtacggtggagcaagcatcaccagagacttgtcggaaaagtaactcaacagggctctcaaagctatggagatttagagatcttgttttgagaagtaacagtgatggaaaatatgcgtttgtgttttttagcaacggctcttcatttacatcgttcacgtcgtttacgacggcgagattgagtgttgtggttaagtcgtcggagaaagggaaagagaaatctaagacggataagaagaaggataagatgagaacgaaatcggcccatgagaaattgtatatgaggaccagagcaatgagataagaagggaaacgaagatcgtatcttccgtataaacatgttgggttattcactaatgttaatggtttaaccacaaatgttcatccctattgattaaaccgatctgtcgtaccaaaatctctaccgacaaatctttgccttttgtatagatctaaccttttttttggtttatgtgtattataaaaccttctttttgtaagtaaaagtgaaactttacttattaacttttcgtttgtatcaaaaaaaaaaaaaaaaaaaaaagnnnnnnnnnnnnnnnnnnnnnnnnnnnnnnnnnnnnnnnnnnnnnnnnnnnnnnnnnnnnnnnnnnnnnnnnnnnnnga

SEQ ID NO: 135162 - DNA, 1387 bp, Arabidopsis thaliana
cacattgactgtgatctatctgttcatgggaacgagatggaagctagcgaggatgatgatgatgatggccgatacatgaatagagaaggagaactcagttttgattacagaacaactgagcagaaggtagaagcttcttctctctctacaccatgggccacaaagatggatgatacagacctctcgtttcctcgcccttctacaacaagaccagcagcggtaaatgctgatcatagagaagaatatccagtttcaacccgcgataagtatttgagcagccattcagctccgttgttcccagaaaagaaacctgatgtatcagagaggttgagacaggcgaatccatcttttaatgcctacgtattaccaacaccaaatgattcaaggtactcaaaaccggtttcccaagcattaaatccgaggccaacaaaccacagtgccggaaacatatggcattcatctccgttagagccgataaaaagcgggaaagatgggaaagacgccgaaagcaacagcttctacggccgcctccctcggccttctacaacagacacgcatcatcatcagcagcaagcagcaggaagacatgcattttctggacctctcagaccgtcctcaacaaaacccatcaccatggctgacagttattcaggcgctttttgtcctctgccgactcctccagtactccaatctcaccctcattcatcatcttctccaagagtctcccctaccgcttcacctcctcctgctttttccccaggctcaacgagcttcacgagcttccaagacccccaggccactttgcaccacctccaaaacgagccaagtcccctggtctggttggtcactcagcgcctctaaccgcatggaaccaagaaagaagcactgtcactgttgctgttccgtccgccaccaacattgtggcctcgccgcttccggttcctccgttggttgtccctagaagctactctataccttcaagaaaccagagagctgtttctcaacggctggtcgaaaggagagatgatatagtagcatccccaccgttaacaccaatgagcctgtctaggccacttcctcaagccacaggagttgctcagaccagtcaaatcagaggagtaggaaagctgatcgaacgatgaggctgccgcgtttgcgtcacgtttgaccaaaacgctgattgtacaaattcacggatcttcacaagtgaatatagaagtcagtatatgtattattctttagttggttaatctcctttttttttttcccattgtaaatctgaagcctctgctctttattcccttttcattttcaaaaaaaaaaaaaaaaaaaagggcggccgctctagaggatccaagcttacgtacgcgtgcatacgacgtcatag

SEQ ID NO: 135163 - DNA, 372 bp, Arabidopsis thaliana
ccatgaggtactcgcaaagctccacatggtagcataactactttgcaacaaatgtgtctcttttgagatcagtcatgtactaaggaatttaaatgctgatgcggatgagcaggcaaacttggctgtccgtcttcccgaaggagaagttgaggtggcgtgaaggctaattatcgatgaactaatataaagatccggagttacacactagcgactagccactagaaactggtgaagaaccagaatgagcacagagaattctctgtcagatctcacagagaacagcagaaactgactcatcatttgtcttctctttacttcagatgatattttgccggcgttctaacgttttattttgctttgctcttacactag

SEQ ID NO: 135164 - DNA, 774 bp, Arabidopsis thaliana
atctagtacgcctcacataaggataagctggtacgcttgcaggtcgcggtccggaattcggggttcaacccacgcgtccggcccggtgttttgtcattctctgtaatagagattctcatgatggttgtggcttcgtttgttccaaacttcttgactggtcttttcactggagctggccttattggaatcatcatgacgtcttctggattctcccgtcttcttcctgatcttcccaaaatcttttgccgtttctcgatttcctacacgatttcttacatgatttttggatcttgggccatcaagctagggcacaacaacaattttctcgggcctctatcaccggacgagccgaaaatgacaggagaagaaatgaatatgaatgaatttggagtaaaggtgacgcattcaggatggtggggcttccctgagattgtgatagcaatccttgtgtgtacctggcttcttttcttcgtggcccaaaagctgaaggagagagcacgtccagcttcaagggtgattcaggcgaaagtttatgttaatgtgcagctttcataagatcagcattatcatctatgagatctggttatctatttaagatcagcagtgtcagtgttggaataagttttctttcccaaactctaaacccgaatgttccactattgaaacttttttttgttaaaaaaaaaaaaaaaagggcggccgctctagaggatcccagcttacgtacgcgtgcatgcaacgtcaagatagtgtcacgtaaaacgaaaacctcaa

SEQ ID NO: 135165 - DNA, 639 bp, Arabidopsis thaliana
  unsure (1)..(639): unsure at all n locations
ancggttccancgaaagntccagaggtggccgtttcaactctncngctttcntgnctgcctatggaccacangcgnctcgngatccccgncttctcctgatctccccaaatctttcccgttcncgattccttccacgattcttacatgattttggatcttggcccatcaagctagggcacaacaccaattttctcgggcctctatcacccgacgacccgaaaatgcccggagaagaaatgaatatggatggaattgggagtaaaggtgaccccatccaggatggtggggcctcccctgagattgtgatagcaacccttgtgtgtaccctggcttcttttcttcgtggccccaaaagctgaaggagagagcacgaccagcttcaagggtgattcaggcgaaagtttattttaatgtgcagctttcataatatcagcattatcatctatgagatctggttatctatttaagatcagcattgtcattgttggaataagttttctttaccaaactctaaacccaaatgttccactattgaaacttttttttgtttttcctcctgttttttagcaacaaaatgtagggatatctgtttttttcttgtgatgactgtgaataaagaagaaaagagatttgtactc

SEQ ID NO: 135166 - DNA, 761 bp, Arabidopsis thaliana
  unsure (1)..(761): unsure at all n locations
tcgacccacgcgtccgcgaaaaaataaaagaggaatcaatttttcatatatagccagagtcacatagtgattcttctccaatcaaatctctatcaacaatgacaagcttgcacaaaaccctcttcacacaaaatcccactactttagatcaactcatgatgtgccacacgggaagagacaattcatggaaaaaactagaaaacatagacgaagaaggtccatcgacggtggcacgtgaagtgaggacggcgttaccaccggagacgccaacggagatgatggagttcttggggagatcatggagcatttccgccgtcgaactcacgagagcttttttcaacaattccactgccgacactaactcttttcttctatcttactatcgttaacaccaaccaaagaagacagagaagatgaagaagattctacttccatggcttcttctcgtgaccttctgctgccacatgtgggaaataagaccagccctccaataactccaagaaccggtagagaaatgaagcatttgtacaagagcatgataagaggaagaacaatgggaagaagattaaaggatcagaaggagaagaagaaacaagagaccagaactcgcaacgctgagattcacgccgcggtctctgtcgcaggagtagctgcagttgttgccgcaaccgcagcatctaacgctagtnnnnnnnnnnnnnnnnnnnnnnnnnnnnnnnnnnnnnnnnnnnnnnnnnnnnnnnnnnnnnnngacacgaact

SEQ ID NO: 135167 - DNA, 441 bp, Arabidopsis thaliana
  unsure (1)..(441): unsure at all n locations
aaatcacaagaaaccatatcaagtccttgttcgtggtaaatgttcttcccttctaggtagatgcgtaagcggacaccattggtcgaaacatattgtggcatgcataaaactttaaacataaatctttgtattaagcttgtaagtcataaggaacaacaaagctaagacacttttatataggcccaaaaacacatgatacccttagatataggaaatatggaaatactctaataattgtttgttactacaggatcttgtcattgcagggactgacacctcggtgcaagcaacacagtggacaattgggggggctcatttacaacccctaggggctcttgcgggggtttgtggaggaggaatccgaatccggttttagggggggccccaangggtttttttnttgggnaannngtttttccccaanccccccctttnttttta

SEQ ID NO: 135168 - DNA, 537 bp, Arabidopsis thaliana
  unsure (1)..(537): unsure at all n locations
gtgtaatctctaagaatacttttcattattaattataaatttattcttcatcttgtagaacaatatcttcttccttaataataatttgtttttttcactttcactctgtttttagcttattaattcctgctccatcactactcactcactcctcctacaatttcgttactcaattttttattatattttttgtaaagaacaccaaatccaccaaaaccttacttccttaaatcccttcaattctattctcatttccatatttatttatatactttggcattgtaaacaaaaagaaacattcattaggcaaaaataatgacggctgacatcgatttaggacaaggaggagcttttggatatcaccggaggcgttggacgggaagtgacgncagcgtatattattcagacgggtgaagatgtgatgtcatgctnctcttactttctattcgncggcctggnggancggatgatncgngggggnnnagccggggaagttnggcgggtaatnggccncgncggcgggntagatgatnntnt

SEQ ID NO: 135169 - DNA, 996 bp, Arabidopsis thaliana
  unsure (1)..(996): unsure at all n locations
tcgcggnacggcgaatacggctggtacataatgttgaagctttggagatggtaccagcgatgcctgacggttcatcctgtgaaaactcaggtcatcagttctggatttctttggggatttggcgatgtcaccgctcaatacatcactcattccactgcgaaacgtcgtcttcttcgtctcaccgaaacgaataaagatgttgacgcagatgcagaattcaaggtcaactggaagcgagatgcagaattcaaagtcaactggaagcgagtagctatcacgagcatgtttggatttggttttgtcggacctgttggccacttttggtacgaaggcttggataaattcataaaactgaagcttcgatatgtaccaaagtcaacacgttttgtagctgccaaagttgcaattgatggtcttatctttggacctatagatctactggtgttcttcacatacatgggattcgccacaggaaagaacacagctgaagtgaaagaaggcctccaagagagattttcttccgggctctagctccttgaaggcggagcattggccacttcttcagcattgcaaacttcagatatgttcccgtgcaataccagttgctttacgtcaacatcttttgcctagtagacagtgccttcctctcatgggtcgagcaacagaaggacgcagcttggaagcaatggtttacttcatcatttcaaccattaaaagaacgaggaggccaaggcggagtatgatcgttttccctgtcataaactttgaatgaaaacaaaaacgagtgtaattggcgattttcaacaacgaaagttgcctaggatacagattcttgatcaaatattatttcgtttcacgagaattcagtacaagtgaataaatgtctgttagtttttnnnnnnnnnnnnnnnnnnnnnnnnnnnnnnnnnnnnnnnnnnnnnnnnnnnnnnnnnnnnnnnnnnnnnnnnnnnnnnnnnnnnnnnnnnnnnnnnnnnn

SEQ ID NO: 135170 - DNA, 483 bp, Arabidopsis thaliana
  unsure (1)..(483): unsure at all n locations
ccacgcgtccgattcaccagggaaaaatgttgcagaagttttctcatgtctatttctttatgtaacggcgatcaatttaagccgttaatatacctcgccggagctccgacgaacttcatctcttcccctctctcaggcaagaagaaatcatcttctctgagaattaaaaggatacaacaacttcaaagtacattagaagatagaataaatccaccactagtatgtggaacagtatcgccacgtcttagtgttcctgatcatatactaaagcctctatatgttgagtctagcaaagttccagagatatcaagtgaattacagattcctgactctataggcattgtggaaatgcaagaaagcgtgtgagctcgcgggctcgtgtattagactattgcaggaactttggttagaccctttgttactacagatgaaaccgggtaagnagttcatcagcngggtattnagtttggtnnattcnntcac

SEQ ID NO: 135171 - DNA, 827 bp, Arabidopsis thaliana
  unsure (1)..(827): unsure at all n locations
tgcaaagcaattactggagaatccactgataggtccagcttcttacgcagggttgagcccgtgggtttcaggaccagaccttaaagagaggatgattaagtacggaagaacagctcatctttttgctctggttcgggacttagggtcaggtgaggttatgatggaaaacgaagttacatacaggacaaccaagaaagatagagagaatctgagggcaggtcttagacaagctttgcggggtttcggttgcagctggtgcagttgaagtcggaacatataggagtgatggacagaagatgaagtgtgaggcaattactaaagaagccatggaagagtttctagacgaagttgatgctgttggtggggttggcacaaaaggagagtattggacgacgtacttctcggctcaccagatgggtagttgtaggatgggagtcaccgcggaggaaggtgcgttggatgagaatggtgagagctgggaagcagaggggttgtttgtttgtgatggaagtatattgccaccagctgttggggttaacccaatgatcacccattcagcctactgcttactgcatccccctcaaagatagttgactccgctgcaaaaccaaacccaaagtttttggggaggttaaaaaagaaagaactggaaccacccccgtagttcccataccgaataaatatgttttcccctgcaaagacaaattttgtttaagaatcatggaataacttatcttaaaaaaaaaaaaaaaaaaaaggacgaaggtcgaccgctttanagcatacgtgcgcgtgcatgcgacgtcatagctcttctatagtgtcac

SEQ ID NO: 135172 - DNA, 414 bp, Arabidopsis thaliana
  unsure (1)..(414): unsure at all n locations
tcaacattcgtgaatctcctccactccctctctctctctctctagatttcaaatttgttatctcaatcaaaaatgggaatctgtgtgtcggttcgtcgggaagattcaaattcttcaccgacggtgaagatcgtgacggttaacggcgatctccgtgaatacaatgttccggtgatagcatctcaagttttggaagctgaatcagcggcagcttattcatcttcgtcttcctctagaccttcttcatatttcatctgcgattcagattctctctactacgacgatttcataccggcgatcaaatcggaagagccgttttcaggcggaccagatctacttcgttcctcccgntttctaaacggnnaaagtcgttttaacggcgtngggntntggcggctntcgcgtttaaagcaa

SEQ ID NO: 135173 - DNA, 494 bp, Arabidopsis thaliana
  unsure (1)..(494): unsure at all n locations
cacgcgtccgcaaattcccattttaaccatgccaaacgttggttattcttagtgctattctcatggtgttttggtttagcattattgcctttaattcgaatgatttttgtttgaagtaaacaataggtgataggaaaccttgaccgacaccgagatagttgaaagtaaacatggaatagaactcacccggaaactggcttagaggaatagacaaaccatgctatactaagccgttgcccgatctaggtctagctgtttgggactctaacagactgagtggctgatatactagtgttagtgtagtacacctatgcagttaatctgatcataaagccttcttacagaggaatatttgttgggncctntataaaaggttgttggtcaggtgggtaattttntncggaatggcttttttttttttgnccccttnatctgnccantttcacggatnccncaccagtntttcagggtacatttcagggggggaatttttt

SEQ ID NO: 135174 - DNA, 489 bp, Arabidopsis thaliana
  unsure (1)..(489): unsure at all n locations
gtagcagctggtggttccatggggagcaatcacatctgcttgcagccacttgctgcttgaggaaccatctgtagaaggaaaagcaagtcagtgggggagcgaagtcctaagtgttaaatcagatgctagtattcctgcacaagtggctattgagaaggcgatggaatcagtttgtcttattacggtcaatgatggtgtttgggcttctggtattattcttaacgaacatggtctcatactaacaaatgctcacctgcttgagccgtggaggtatggaaaaggtggtgtatatggtgaaggatttaaaccctatgtcttaggagccgaggaattttcttccacgggaagtaaaattttgggaacagaagagtcaaacattgccacgggaagctccacggaatcattattccgtctgttcggggggaccatcaggggatacaaacacanttttccttcanncttggaattgggcanncgnntgcgtttntt

SEQ ID NO: 135175 - DNA, 356 bp, Arabidopsis thaliana
  unsure (1)..(356): unsure at all n locations
gagaaagtgagcatncctnctaatctcgtcaatggaaatnagcaacatgacctaaacattgctccaggtgaagatgcttcagcggctaagcaaccagaaaagaagcgatccaggtcttaaaagcgcaaatcaggcaacaacctgggatttggggaagatggaaaagagcaagccttccgatcttggcaaatgaggatgagcaaacagagcccaagtcaggcaacaacttggatttagggaatatgaaagagaacacgccttcggatctggctaatgagaatgagcaaacagagcttaggctacctaacaactgggattatgggaacatggaagagagcttgcctttgaatcttgct

SEQ ID NO: 135176 - DNA, 509 bp, Arabidopsis thaliana
  unsure (1)..(509): unsure at all n locations
acnggatcaataatggcttttcttctttcagttacatgcgtatatcttaaaacgtttataacgatagaacaacggaagcactaagtgagaaatacaaattatctaacaaaattgttgaaattaagaatctgttacacttaggtagacaagtgccatttcaaaacttggtttcatgacaaacaccgaaatgctcattaaaacaccaaagtggaatgggcatcacacttctcttcttctttccggttttgccttaggttggtgcagtatttgagccacactgctcattgatcggaaggtatgctccggtttttcctcaatcaaacctgacttggtttccctgggctcaatacattaagtggaaggcattttcctcttccatattcgttaaccgaatcaaagttgctaagctaatttgcgctttttcttttttggctcctagcggggcagtgttnnggcaggtgncantccncnganagntcgnggatgnncttcncnaacgggcaaccgtg

SEQ ID NO: 135177 - DNA, 530 bp, Arabidopsis thaliana
  unsure (1)..(530): unsure at all n locations
gtagaagaatagttttgatgttgtgattattataaaaacattcaaaatttgtcttaaatgatagcatatgaatgcagctttttctttgaagccttcttccatcgggacctatcttcttggcaggaaaggcttgacggattcgatcacaaccctaccgtcatatgacaatgatgcaaaaatccaaggctcacgcgagctccaagcaaggccgtagacactgtcttcgtagtcagtataagagtttagtaacgggttcacacgctgacgtgatgcttccaccgggctttctgatgttttatgctcactagatgctgaaagcaaaccacaagttgacagctgagtctgttccaacgctcngaattagctcttcatactcagggntacacctgacagnccatggtccagtgngnattaccagggagccctgacaggaactttgcttccgaagatccngngatganaccagntcannncgagaacggnatgtcnccctggnttgagcacntncgaangggccgnaatgnantaat

SEQ ID NO: 135178 - DNA, 496 bp, Arabidopsis thaliana
gcgtccgggggaagtccctttgagttttgatcccttaaacactaccccttctgaaagccatggtgacaataccggacggaagctgaggatcttgtgcttgcatggatttaggcagaacgcgtctagctttaaagggaggaccggatcactagcaaagaaactgaagaatattgccgagcttgtgttcatcgatgcaccacacgaattacagttcatctaccaaactgctacccctccatccggagcatgcaataagaagtttgcgtggttggtgtcatcagattttgataaaccgagtgaaacaggctgggacagtggcccaatgccagttcgatccattggcagtaatcagactcaaactcgaagggttttgattaaatcggtttgacatacttgaacggacggcacttttgaagggaaaaggggcctttttggatggcattctccgggttttctctcaaggtgcagcaatggctgcggctgtatgtgggaaaca

SEQ ID NO: 135179 - DNA, 509 bp, Arabidopsis thaliana
  unsure (1)..(509): unsure at all n locations
gtcgtcgttatagtttaataacttttacttggcaagagtacaagtacaagaaatatttgattgcaaaagcgtcttcttgtcttcttaataaagtcctcaaatgaattggtaaaggaaagctttaatctcatcaatataaggagactttgtaggaatgatgtggccaaaatcgtgctcaacaatggtggcgcaaccatcttcaaacaaccccgccaggtctgagctggcttgagtcacaatttgtctgtcttttccaggctgacttccgaatatgtgaagtgaagggcatttaatccgatcgtttctccttcatctccaacaatggccacggtgtgaacccgagcacaacacgcagaatctgaagccatttcacctacgagcgntcctgtttccacatacagcggagcatgcgnaccttgaggaaccgggatgcacaaaggccttccctcaatgcgctcagagcacgnttacaaccncagttggccgannganggnnatggatggnctnt

SEQ ID NO: 135180 - DNA, 625 bp, Arabidopsis thaliana
ccacgcgtccgatcttgttttcttatcaaggaatcagtctctctccgtaaaggtccaagcgttagtgctgaaaccgaacagccaaaatggtgggagaggaaagcagggccaaacatgattgacattacctcagctgagcagtttctcaacgcgttaaaagatgcgggagatagattagttatcgtagatttttacggaacttggtgtggttcttgccgtgcaatgttcccaaagctctgcaaaacggcgaaagaacaccctgacatcttgttccttaaagtaaactttgacgagaacaagtctctctgcaaaagcttaaacgtcaaggtgttaccgtatttccacttctaccgcggtgctgatggccaagtcgaatccttctcatgctctcttgccaagttccagaaactgagagaggcgatagagagacccaatgtaggaagtatcagtaacatctcttcttcagcttctgagaaagttgaagattcaagtgaataatcaatgcctggttcagattgatcccagattattttgttaaatcgcttccctgtatatatgttgactgcattttccatgtggtgcatcataatttttgtacataaataaatgagtctgacttcgagtt

SEQ ID NO: 135181 - DNA, 440 bp, Arabidopsis thaliana
  unsure (1)..(440): unsure at all n locations
acgcgtccggactgaagatagtgggacttcagctacacttgaaggtgtgcacaaagcagtgggaccagtggtcagcagcttttgcaatctctcttttctggtagttctcgttcagatgagactggtcttagacgcgggcaaggttcagatgatcgtgtagatgtctcaagtgcaatgtctcaggtcctggagagccctgtattggatggattgctagcaggggtatctcgacaagctggtgttgattcaccaaatatgctgagaaatatgctccagcagtttacccagaatccacagatcatgaacacagtccaacagattgcgcaacaggtggatgggcaagagatagaaaatatgatgtcaggtcggagctccaaggccgagggcggcggcctttttaatttccgataggaatngtncancaaattaattnccttagt

SEQ ID NO: 135182 - DNA, 384 bp, Arabidopsis thaliana
  unsure (1)..(384): unsure at all n locations
aaaganggaaatatcaaattgaatcggccctttagggaccagataaattacgtttgcttatgtttagcagagtatagaccatcccaaaccctaattcttaatacataagtgagggatctcagcaaataaacaaagatacttcaaagatatgacacttacagaaccaattcaaccaaatatcttatagaccttgatcatcttttagccggccttcgatatcacgtcttagcaactccgcatattcttgagaaagagcttcatcacagcaaagctcgttcactagttcgtcttggcttaacgcagcattttcgaccattgcacggaagacatccctgggtggatcagagggctcaatcattggagccatggattgaacatttacct

SEQ ID NO: 135183 - DNA, 330 bp, Arabidopsis thaliana
  unsure (1)..(330): unsure at all n locations
aaacagcaaagcatttnttttacaacaatgggtaagagtcataatacacaaccaaagtctcgaattcaatgtgtaaagctttttaatntcaaatgtttgacgttttagnggcaagatggatcaatgctcgtcgatgataggtagtacgaagcttcttgtatttctgcacaaatgctgctgtatcaatctccttctctaggaacttttcttgcagggcttcggattcttcatccacctgattcatagcctcttgaagtttatgaacgaagagaaccaggaggagatagaatttgaggatctcctctttttgcctcttaagctcattaagct

SEQ ID NO: 135184 - DNA, 479 bp, Arabidopsis thaliana
  unsure (1)..(479): unsure at all n locations
gggtacccaaatatacaataatattaaaaccagtttaggaatttctttatgtacaactttttccataagtttaaaaagagagtttcttttgttttcctagtacttatacttattgctattcttttgtacaaaatcctaaaaaagaagaaaactttttaaaaccatgttaaaaagaagaagaagagcttcctttcgtctcttctaacaatccactcttctcttccactaccgcttctgctaactttttacaagaacctaacttaagagagatggaaggaaccttgaccttccgttatggcataaatcagcttctccttcatcttctctttggatgaataaggaggaagcttcagataaattggcgcatgtcatcacactagggaggtcagtatcttgaagaatcgctaccatgccttgcggacgatttttagntttgggctntgagacgccaaacnccnttagggnaaccnngggnggcc

SEQ ID NO: 135185 - DNA, 384 bp, Arabidopsis thaliana
  unsure (1)..(384): unsure at all n locations
taacataattctcggtgcaaattttcaaaccctgacacctagaaaggatgatggcaaaatagatcacagaaacaataatattctctgatcgccagaaaaaaataatatggcatattgatgggattcaaataaaaatgacaagttatcaatttggcttttaagcctgtaagcagagagcagtgttgagtgttgggatcgtactttaaatcatgatacgaaggacggcgagtcccactgctgaaatcgacacaagtgtacctatgcaatatttgatgacttcggattttgaagcttctaattgagctctcaacgcatgaatttccctggcaagccttgttgtgaggtttgttggttcggggaanccgattaancaggccanccgga

SEQ ID NO: 135186 - DNA, 446 bp, Arabidopsis thaliana
  unsure (1)..(446): unsure at all n locations
ccacgcgtccggggaaagaccagttgacatggatactgtaagtcagtgtgccccaaggtgacaagaacactccgggttctgatgtcgccgctgaaaccgccgccgctctagccgccgccgccattgtattcagaaaatctgatccttcttactccaaagtcctcctcaaacgagccatcagtgtttttgcatttgcggacaaatacagaggaacttatagtgcagggttaaaacctgatgtttgtccattttattgctcttactctggttatcaggatgaatttgttgtggggagctgcttttggttacaaaaagcggcaaaggatttaaaaatattttggatttccattaaaaattnaatgggcaaaatnccttgggggcttgcnnggattatgggtnacnncttttttggtttggggtaacaagcancngttggggnccnnnat

SEQ ID NO: 135187 - DNA, 312 bp, Arabidopsis thaliana
  unsure (1)..(312): unsure at all n locations
ggggaaatggtaacataactcatcagcagcagccttcatcatcttcttctgtctatggttcctcgtcgtctcctgtttcagctcttgaacttttaagaaccggagttaatgtttcttcaagatcaggggttaactcatcgttcatgccttccgggtcaatgatgggttcaaacactgtgctttacacttcttcaggggttccaacaaatggtggggttacaagcccaagtaatctcttccttctctaccggtcatcaaagggcttgggcaaaaatagcaaccaattagggntttangnnnttcaaaangggt

SEQ ID NO: 135188 - DNA, 540 bp, Arabidopsis thaliana
  unsure (1)..(540): unsure at all n locations
gggtattccgtaaagaaaggtcctaattatgctcccgagagaaagaaagtggctaccgatttgactcgagaaaatcttcaaaactggaaagagttagagtttaaggagtataacttcaaagctaaaggagcgcctgttgacgctgggcatcttcacgctcttctcaaggtgcggaagcagtttaaagacatatttgttcagatggggtttgaggagatgccaacaaacaactatgtggagagcagcttctggaattttgatgctttgttccagcctcagcagcaccctgctcgtnattctnatgacaccttctttctaaaaagttccctctactacaagaacacttccggaagattatngttgagagggtgaaacgtgttcatgagtctggtggttatggtcaagagggtataattatgattggaaaaagggnaggagcaaacaaggatntntttcgtacccacacaacgggtggcttaatttgggntncttttttgccctggncagaaanccntttntncccaanagnnctttncggtt

SEQ ID NO: 135189 - DNA, 491 bp, Arabidopsis thaliana
ccacgcgtccgctctctctcttctttttccggcataacttacttaccgtattaccctaaactccataacctgtttcatcgataaagtgcctttgcttctatctctgtcactcttactacttgttgaacaatattctacaaaaaaatgtcgggaagaagatcacgttcgaggcaatcatcaggaacttcaaggatctcagaagatcaaatcaatgatctgattatcaagttgcaacagcttcttcctgagctcagggacagtcgtcgttccgacaaggtttcagcagcgagggtgttacaagatacgtgcaactacatacggaatctgcatagtagaggttgatgatctaaagtgagaggctatctgagttactagccaaactcaggcacttgcacaagctgcttttatccaagaagctttcctttaccccataattcctatctacctttttcttcttcttcttttttttggttactataataataataata

SEQ ID NO: 135190 - DNA, 510 bp, Arabidopsis thaliana
  unsure (1)..(510): unsure at all n locations
ctctctattcatccatgtccttactctagccgtcgactctcgatccttcgcagccagacgaatccggcatcactcgcaacaccgattctacaggatgtgctgaaggagatatcggtgaagcagaagtggaatctagaggaagttagattttcgaaattggaagttaagaagattcgtattggtacgagtcggagatttgagatccggatccgattagggaagagcagattcgtattcatcttcccggatgaagtaacagattggagaagaagcggcggaggaagagatgttgagttgcaggaactagttcgggaagttaattcgagtaaggttcttgatccaccgcttgtactgaaaggtccatttgagctacgtgtcgatggcgatgatccgtctctcgcttttcgttgccnntgaacattttcaccatagcgggtttaaaacgngttntttntgagtaagggcattcnagtnggaaaaagggnagnccaaacagtcttntttttcctc

SEQ ID NO: 135191 - DNA, 805 bp, Arabidopsis thaliana
  unsure (1)..(805): unsure at all n locations
gctaagggaaatagggccgaacgggggggtgaagatataccagagtagtgtcacggggagaaaaaagttttttcgccccctcgcctggcgagataaagagggggattcggatggggattgtttagcgttcgcgcaaaaaaagtccaccggttcaagggttgggcaaacgaggaagggggttcggaaattcgggggttccaggggatcaggaaatatggcattcaggtgaatctcagaccattattcttccgtttgcttgcagggatggttgttgtactagttgtgctggacgtgtaaaatcgggagagctaggcaagcctcaagcattgggaatatcagcagaactgaagtcccaggggtatgcacttctttgtgtgggtttccccacatctgaccttgaagtagaaacacaagacgaggacgaggtctactggctacaatttggaagatactttgctcgtggaccaattgaaagagacgattacgctcttgaactcgccatgggagatgaatagaaaccaaaagaagcatgtaaactgtaaagtggcagactttctgtattagaggtgactagtgagttcaactttcttagtcctgaatatcgtggtgcatcctcgtaaatctcttactgaactcaacgatattccgattaaacttctcaacaattcaacatttcatgaaaaactttacaatcatttaacaataaactccaaatccgaaaaaaaaaaaaaaaaaaagnnnnnnnnnnnnnnnnnnnnnnnnnnnnnnnnnnnnnnnnnnnnnnnnnnnnnnnnnnnnnnnnnnn

SEQ ID NO: 135192 - DNA, 508 bp, Arabidopsis thaliana
  unsure (1)..(508): unsure at all n locations
gccgcgaaaatcaaaatcctccaaaactatggctctgattttnccctgtacattttgtacttcgcttcagaagaagaattttccgattaatcggagatatattacgaatttccgtcgaggagctacgactgcgacgtgtgagttccggattcctgtagaagtttccactccatcagatagaggatcgttggttgttccttcgcacaaagtcactgttcacgatcgacaacgaggagtggttcacgaattcgaggttccagaggatcagtatatattgcattcagctgaatctcagaacattagtcttccgtttgcttgcaggcatggtctgttgtactagttgtgctgtacgtgtaaaatctggagagctgaggcagcctcaaagcattggggatatcagcaggactgaagtccccagggggtatgcaccttcttggtggtggggtttccccacatctgacccttgaaggtaggaacacaagacggggccgggggctatttgttacaa

SEQ ID NO: 135193 - DNA, 493 bp, Arabidopsis thaliana
  unsure (1)..(493): unsure at all n locations
caacgaaacagtggtccctctgaggtacacgcctagaaagtttgttctccatcccaagcggaagttgttggttattatcgagagtgaccagggagcattcaccgcagaagagcgtgaagctgcaagaaaggagtgcttcgaggctggtggagtgggagaaaatggcaatggcaatgcagatcagatggagaatggtgcggatgatgaagataaggaagacccgctttctgatgagcagtacggttatccaaaagcagagtctgaaaagtgggtctcttgcatcagagttcttgatcccaagacagctacgacaacttggtctcctggaacttcagggcaacgaagctgcatacagtgtctgtacggtggatttcccttggttaaagggtttggtacctttttggttttggaccgncaaaggggtcaattnttgccccaaaagnattttgtngcttggtncaaaaantttnaggttttgggggtggaaacnttt

SEQ ID NO: 135194 - DNA, 502 bp, Arabidopsis thaliana
agtttacgctcacaaggagatagctgaaggtgggaaagaaaacaaggacattacaagcctacggtgtattgggaagaccctgacaattggagaggacaccttcgaggatctagatgaggtcatggatcgatatgttgatcctttggtatctcatcttaagacaatgctcaactatcggaaattccgtaaggggaccaaatcagaagtagatgatcttcttaggatcgagaagggcgaaaatccttcaagaatagtttattgttttggggatttcacacggacactccaggcactttttattcttgtcttacataaggggcacaaaccccccatcatgagtatataaggtttatattcccaaggggtttaagttcaggaaaaggatgtttgaggacattgatcggcttgtggcatacttccagaggcatattgatgacccattgcaagaatcggcgccatcaatcaggtctattgctgccaaggtaccgatgagaagcccagc

SEQ ID NO: 135195 - DNA, 477 bp, Arabidopsis thaliana
  unsure (1)..(477): unsure at all n locations
caagangttgtgatcgttggaggggctcatccattacatcgtcatgagaagttagctatagctgtctcaaaagccatgcgtgggcattcccttcaggaaacgaagaaggacggaagatttcatgtgcataccaaaacatacctagatggtgctatcctcaaagaagagatggaaaggtcgactgatgttctagctgctggtttgctcgacgtgtctgaccctgggctttctaataaatattttctccgccagagctgggatgatgaatctgaaggttcgagtaattccatagtaaagcacaggcctctctggtcatctttatagctcaaaacctcagaggggcaagaaaaaagaaggcggttaagaaaaaaggcgactctctcccgctcttttggaaccagggtttttcccgtgtttatactctcattagccgatgtggatccaatgctcatgatggaagatgagagcctcgtgtgg

SEQ ID NO: 135196 - DNA, 485 bp, Arabidopsis thaliana
  unsure (1)..(485): unsure at all n locations
cagctcacttggtaattnatgtggcctctttgttttctgcttaacaagctattaagagttggggggaggaatcaggggatattagacggaaatggagattcgacttttccgaaatactgcctattcgatgatcccttggtgagtgatggaaagtacagagatgcagggttgccatcctcgtcccacatggatgtccctcatgtacatcagttagcttcatgggattgcggtctcgcttgtgttcttatggttctcagagcaagtggcatcgcaagctgcactcttgaggatttggctgagatatgctccacaaatagcatttggacctgtcgatctcgcatatttacctgcagaagttctgtgtgggaattttccatattacacggtaacatttggagcaaaccccaattattccatagaggaattttacaaaggagcagttccctgaanatcttggtcgngtcggatttcnnttcaaggaaagc

SEQ ID NO: 135197 - DNA, 425 bp, Arabidopsis thaliana
gagagatataaaaaacaacaaaattagacgagaaaatatctaagaaaggcgtcggaaaattgcgggcagatagatatagagacgacgaacatgcatccgattaatgcggtggttgcggcgaggatgttagccggaatcagtcaatctaacgccttacaaagcgaggcgattccgtttggttcgcttgagtggatcacttacgccggaatctcttgtttccttgtcctcttcgccggaattatgtctggtctcactttagggcttatgtctctcggtctcgttgagctcgagattctccaacggggtggtactccaaaagagaagaaacaatctgctgcgatttttcggttgttcagaaacagcatcagcttttagtgactctgcttctgtttaatgctcttgctatggaggggcttgctatatac

SEQ ID NO: 135198 - DNA, 371 bp, Arabidopsis thaliana
  unsure (1)..(371): unsure at all n locations
tgcaatgatccaccagaagaccctgttgtaactttntttggccatatattctgctagcagggtgtatcagattatatcacaggggatgaggacacgtgccctgcgcctagatgcagagaacagcttgcgcatgatgttgttttctctaaatccacgcttagaagttgcgttgctgatgatttgggttgtagttcctcagaggataatagtcatggtaaatcagttttccagaatggcgggctttagttcatcaaagatcaaagctgtcttagatattctgcagtcgctttctaaccaaggcacttcaaactcaacacagaatggtcaaatggcttcttcctcgcagcagccgaatgatgatgatgatgatg

SEQ ID NO: 135199 - DNA, 324 bp, Arabidopsis thaliana
gaagactctaagatgcggggaatgcccaagcagtgagtccacggcacgcagatctttaagtgttgttatgccaaacttgagtgatgttgaaggagaaacatgggaagaaatagacacttcagagattggccatggtggtcaatcattgcgttggcttgtttggccacgaattgataaggattcactggagatgttatcctcggagtgtccaagaatagtggtaaatcccaagccatcacttgtcggcgtacagagcagacgaggttcctcgagaagcacttaccagatgttgccctggccggaccatttgtcaaagggattgtg

SEQ ID NO: 135200 - DNA, 314 bp, Arabidopsis thaliana
  unsure (1)..(314): unsure at all n locations
agtcaccaaaaagctagggagatcctntnaggcggatcnggttgcatacgcagagtccggctctttggttgagtccacaaccatccaacgatcatcctctgattcaggtctgaccgagcttagcaaactaggagcagcaaagaaagctggcaaaaccaaaagaaaccgtctgtacagaacggaaatcgcactcgcgtttatcctcttggcagcctcggtgagaagcttgtngtctgcgnaaggnatccattttaattccccctggttcccagggaataangtccgaaattnggggtttaggttttaatcggggg

SEQ ID NO: 135201 - DNA, 753 bp, Arabidopsis thaliana
  unsure (1)..(753): unsure at all n locations
atttccggggcgacccaggcggtccgtttccagctcgtgtccaagatcttagctttatccgacaaatataatgcatccgaactaaaaagcgtttccttaaaattcactgcagaaaacctagcagctgttctgcagacaaaagcatatgaagatctgaaggatgactgtccaaacctccagtctgagctactaaaggcggtcgctggttatgacgacacaagtagcagcggaggaggaaagtctcagagtgtttgggctcaactctctaacggtggtgagaccagtagccgaagggtcaggcagcgaaccacttagaagtgcttcttcacatgttgttaacaaactacttttgcttaccactcgtaaacagattaaccggtttatctagtatgtaccgaatgaaagggaagcggagccagaaatcttgtaccacaagagaagagctatgcggctgtgcactagtgattaaccggtgcttaaccggtgcttcacctttcagttccttcacgtctctgtggatttttgttgttgagtctttttttcaaattcttttcccagcttcaaattactagaaacttatgatgatataatagaaagagttaactatattcctgtatggaagttataatcttgcaacttgtaacacagtatcctaaaaaaaaaaaaaaaaaaagnnnnnnnnnnnnnnnnnnnnnnnnnnnnnnnnnnnnnnnnnnnnnnnnnnnnnnnnnnnnnnnnnnnnnngaaatccaa

SEQ ID NO: 135202 - DNA, 540 bp, Arabidopsis thaliana
  unsure (1)..(540): unsure at all n locations
acgcgtccgctctctaaaactttttagagatgagagaaagcttttcccgaccagaatttttctggcttttgccatcctgatgtaatcaggctttcgtccagcatcttactttcatagtgattgatggctggctctatgtctggcatcgtccggcttctatagcggtgttggctggcttttgggtttttccggcgtagtccgacgttatctctccgtgtttcaataatttcattggttatgtgttggtggaagtgttttaagcgatcactcgcttaacggtgtttcttttccagctccttcctttgatctactggtttacaaaaactcatcgagtttggtaactaaagttgaaggaaataaggaattttccgtcgcttattttaatttgccttttagctgttatttttatggggcttcgattaggttagcaaaaagttgtgggttaatcagatttgggtttctcttaaccggccggtttnaaacccctgcgggcccattgggaagtaacgggnnggaccaaagggtnnaaggccggnanat

SEQ ID NO: 135203 - DNA, 514 bp, Arabidopsis thaliana
  unsure (1)..(514): unsure at all n locations
agcgagagaccccgagacaaaaccctagatctgagccgccgccgcctcttcgccgcccgtggcttctgccggcggtgtgagagggcttcccccctttctccttttcgttgtcttgtctattagtgtagaaataaggtcgactcgttgctcctttctccggcggctaaggtgaagctaaacgacgacggtgtgacgatgcggaggcagtagctggaggagagagatctccgctcgatctttatccgggagactggtggggttcggagctgctccgagcagctgtttcgatccctgtatcccccaggagaaccaagccgacggaagaacagaggcagagtcgcagtcagagtctttcaaggccgtggggatggagttttggtcgccggtggccgagataatccggagatcttagtgaaccgtctcaatgtnttggccaatcccgcgattgagccaagnaaaaaggatttttcggcgagatcctttttggaattaaccctttattttaaggcntacc

SEQ ID NO: 135204 - DNA, 361 bp, Arabidopsis thaliana
  unsure (1)..(361): unsure at all n locations
attttatatatctaatcttgaaatgttgccaacgcttcttgagagctgcccaaaacttgagtctcgcatattggtaatgagccgcttaaacccttcttgagagctcctatttacacatattgtttgagataacctcttatatgtatctctctactcaatttgttttcttttatttattcttttgttcctgtttttgcaggaaatggtcaagaaccaatccacgcgacgtcatggggagaagcgagaaccaaatgtgatggtttcaacagtgccttggtgtttgggatcgtcgctcaagtttgtgggattgaacggtcaatcccaagggntgaagggggaatggngctagtaaggtanttcc

SEQ ID NO: 135205 - DNA, 726 bp, Arabidopsis thaliana
  unsure (1)..(726): unsure at all n locations
aatggagatggccagacaacgcaggacgtggctgaagctgcttcagctggagataatgaggctgtcgagtctgatccctttggactagatgcctggattcccagttctggaaagaaaaatggtaaaacaaagataaagagaacaaatgaagatccagatgccgaagagaataagaggtttctcaggtcaaaaagagaagctttgattacatgcttggagattgctgcacgccgttacaaagttccatggtgccaaacagttatagacatattggtgaaacatgcctttgagaacgtgtcaaggttcacatcacagcagagacaagcagtggagaaactctgggcttctgttcgagaacaacatctccgtaggaagcaaggcaaatcagtcacaggaaaactcgacgttacagcttttgaatcgcttcaggataaatacgccaacgagaaaatgagcatccgaagctcagttggagccagcggtgaacgccgtgcacagcaatggctcggttaataaaacagtttccaaaaaggtctgattggtaggatttgttcactaagacatgaactagaaaagcaaatagagaaaaatattgctctgtttctgattgtatcttagaacaaaaagttaccacctttatccaaaaaaaaaaaaaaaagnnnnnnnnnnnnnnnnnnnnnnnnnnnnnnnnnnnnnnnnnnnnnnnnnnnnnnnnnnnnnnnnnnn

SEQ ID NO: 135206 - DNA, 743 bp, Arabidopsis thaliana
ttaaaagagggcctctttcattttataaagggcaaaaaaaattgggtaaacgccctagccaggttcccccggtccccggaaaattccccggggttggacccccccggggccccataaagtggtccaccctccctttaccgagttggggaaagaacccccccctcctaacagaggctctcagctcctccttcaaagtgacggctctctttctcatttcctctccttcttcgaaaaccgttaacctcttcacagctctctcgaccgctcctctttctagatcaccctccacttgaatcccaattttccaaacacactccaagtaccttgcgttcacccgaaaatggcctgcaaatcaccggaactccttcgctgatcatgttttctagtatcgagttgcatcctttatggctccaaaacgcccctattgcaggatgagcaagtacttccttctgtggagcccttttcacaatgtagttgatacatatgttttctacttgtttatagggcggaagctactgttactaagaaacctgcttttcctccatttccaaaacccccaagaaaactaataagtagctctctaagctccgggcttatagattactctgcttctcatcctctttgaacgttttatatatataaataccagattctcgcttgtggcccctaaaaaaaaaaaagacgaccgctgtcgggcgctctagaggacgcaagcgtgcgtacgcgtgccagctagggcatag

SEQ ID NO: 135207 - DNA, 746 bp, Arabidopsis thaliana
  unsure (1)..(746): unsure at all n locations
caaagctttaatacgactccctataggaaaagctggaccgcctccaggtaccgggtccggaattcccgggtcgacccacgcgtccgactatggatgatcataatgaagtggaagatgaagacgccaaccctaattataacagggaagatgagatgactactcaagaagctgaggaacctgtggatgatgatgctcatgatcttctcgctgctgctgggctcgaagatcctgatgttgatgatgatgaggtacctacttcgggtgtaaggcgaagaagggcgttatcgtcatcagacgaagaaggtgaattaatggaggagagtcatccaaattcaagcccccagaaagaaaaagaagagagcaatggggaagctggtgatcctaacatggaggaagaagaggaagaggaagaggccaattgagagatatttcatacataacaacagatatctcttgtgtgtttgtaactttagtgacaaagatttcattgattcaatttctctagtagtcagagtgtgaagacaatttacattcacaggccaaggatgatcagtttgtattttgggttatttggattgagccttgtttttatttgctattgttactaatagaaaagcttttttctttaaaaaaaaaaaaaaaaaaaaaaaaaagnnnnnnnnnnnnnnnnnnnnnnnnnnnnnnnnnnnnnnnnnnnnnnnnnnnnnnnnnnnnnnnnnnnnnnggaatccaacccgggggggggg

SEQ ID NO: 135208 - DNA, 454 bp, Arabidopsis thaliana
  unsure (1)..(454): unsure at all n locations
gagagagattcatcattataaattgtaatacatgatttaaagttagcgaaccaaanctaatacctagcatgcaatattatcaccaaaaaccaaacaaacactcacattttctctcaacgggcttcgttttgtatacaagggatgataagggacgtagcccaataagcccgtgacgttagccactacttcgttgcattttgacaaaaggttgagcatctggtgagagatgtccccagcgctaaccgctgggatcgggccacggaagtttcttgaaggtggcattggtggttcgacgtggtctactggtttaatgggaagttgttgtggttttgtgtattgtggagggagggggaagaattggaggcaatgtagaagcagcaagctgttcctgatgaacaacgttttgaaacntcttactnaanaattccattggnacagatgatgatgatgaaaa

SEQ ID NO: 135209 - DNA, 447 bp, Arabidopsis thaliana
acgcgtccggggacatcatggttagggaagcttcctcatgtgaccttaaggatcttgttgctaagtccattcctgaagctattggcagggagattgagaaggcaactcagggcatctaccctcttcagaatgttttcatccgtaaagtcaagatcctcaaggcccctaaattcgaccttggcaagctcatggatgttcacggagattactcagcagaagatgttggtgttaaggtagacaggccggctgatgagatggctgttgaggaacctactgaaatcatcggagcttaagaaatcgagagatgtctttttcttctaaactttagctttttgatgctctgtcgtttcacacactcttttgttcccggtttaattctgctgtattgatgacttttctcagtgtaaacttgcgagtttttgataatttatggaacaccttttctct

SEQ ID NO: 135210 - DNA, 472 bp, Arabidopsis thaliana
  unsure (1)..(472): unsure at all n locations
ccaacaactagttgatattgacgatcttttaaaagctcaaaatcttgaggtagttgatctccaaggctgtacaagactgcagagtttcccagccaccggtcaattgctacatttacgagttgtaaatctctcaggttgcacagagatcaaaagtgtcccagaaattcccccaaatatcgagacactgaatctacaggggactgggataatagaaccaccacttgccattgttaagccaaactacagagagcttttgaatcttctagctgaaatcccggggctttcaggtgtctcaaaccttgagcaaagtgatctctaaacctttaacaagcctgattgaaattttgccccatctttcccaaaatccgggcaagcttagttgcttggggcggaatattgtcnccgtttgnggggtttcccaanangggtaatttnggacttttaaaagcccttntttttntgggttcnaagg

SEQ ID NO: 135211 - DNA, 371 bp, Arabidopsis thaliana
  unsure (1)..(371): unsure at all n locations
gaatttacagnaagccttttgattaccatnggtataagttgttacaacctaaagaagaaaatcaatggggagaagcaggacgaactttggttttgaagaggagaacgtagagtttgtccattgagaaataaataaaacaacctgccgaatgtgtcacaaacgacccgaaacttgatcccactatgcaatgccatgctggtccataccctttgtcaaacgcccttctcgagattgaaagccatgtgcttcgaactaaacgtctccaaactaatcctaaagtcattctcggcacaccctaaacgcatgtgccctgccataaaccccggcatgtccgcagctagatccccaccggcaaaatttccgcggggggc

SEQ ID NO: 135212 - DNA, 521 bp, Arabidopsis thaliana
  unsure (1)..(521): unsure at all n locations
gattagagaaataacttagggaaacagaagcgatgcaattccattacatgaattatacatatgcgagcttcagtgatatatacaaaagaacagagttaaaaaaaaagaaacaaacagtttctactaattttcccaagtacatatctgatatgctctcataagttccattccaccaaaaaacatgtaaacaaagtatacactatcgtatatataaagctaaggagaaactcagtgtggcgagtgaggaaaaattaactgagacattgaaaagaccgcccattggaaatgcaaatatgggatgtgggagtgggcctaaagcaaccttcttactgtagatggaattagggtgcagagctgagaggaagacctaatggcattccagccattggtctgcgacaatctggtcggatggcttcttggcctagccatatggggggacgccgggncccttccttgngggtccccnaaaacccngcccgggngcttnnggcccagggatgccctgtngggcctanttggng

SEQ ID NO: 135213 - DNA, 430 bp, Arabidopsis thaliana
  unsure (1)..(430): unsure at all n locations
ggaatccccttggtctcaaggctttgtnatgtcgagaatggntctnnngtcgagaacctgtacctgaagctgcttagttcatttaagatgcctactgaattctttacagagaatcttgaaaacccaactgaagaagaagccactgataaaacagataccgatggtactacttcagttgaggatacaaattccactgatgtgaaggagactactgaatctcttccagatcctgtgttgaggctttacctcaccgacggcagagggaactcggtagaagctgaaattgttgaaagaaaaagcctgtaaatcaaatccaagcggttgaatgtgcttgcacgttggcctgtaaaagagcttgacgtttatgatacttgtcttctgagctccttacctgaggtttccaaatctggaactaagagaccccaagaat

SEQ ID NO: 135214 - DNA, 463 bp, Arabidopsis thaliana
  unsure (1)..(463): unsure at all n locations
caggnaagagcctactgaagatgaatgcactaactctgaagcttatggcattgaacacggagaaaaaagagttaaacagtctactgcgaaaaacttgaaagctaaagtttctgcgaaagctatctcgaaagaacagaagtcattgacgagaacaggtaagcagcaaattcagtcaaaagaagaaacatcatcgaccatctctagtaaattactgaaaactgaagaaattatctcatccccgagtcaaagtgaaccgtggactgtacttgctcataaggaagcctcagaaggacttggaaagctttataaccccaaggcaatgcaggcctccccctctttccagaggggtccccacatgtgttgaaagttaatgactttgggattgtttaatggaccttgggaggattggtttgaagtttgagagcttctccttgctctgcagcttgcccaaagagaaaatttt

SEQ ID NO: 135215 - DNA, 464 bp, Arabidopsis thaliana
ggcaaacagacaaggacgtttctggattttaacttgaatgtacctgacgagagagtccttgaagatttggcttccgaaagatctggaaatgccacaaattgtacatctggtatcacaaataattttgaccaagtacgttctggggtcatgggttcagcccttgatcattcttctggaggccttgatcttgatctaaacaaagttgatgatttaactgatatgaacagctacacaatgaacagtagtcatcggctagattcatcttttcagcaggttaaattaccatcgaccttggtggtcgtagacgattttgatttaaattggatgggcccgtttggggtgatgatgcagcggttgagccatctatggttctaaatcaacattcacgaagtggcttgccatcacaaccatctctctctggaattcgagtgaatggcgaaaacatggctagtttctcaacttgg

SEQ ID NO: 135216 - DNA, 525 bp, Arabidopsis thaliana
  unsure (1)..(525): unsure at all n locations
cagctcaaaaccgcgttttttcattcaactcctgtcttagaacgcaaacgtcgcacttcctgggaatcgaaagcaaatgttcacaagaagaggttcagaagaatgagggaaaagcaagagttattgcgtaatgtcaatgcttttgctgcaaacatgtttacgagctggcatgatgagtttgatgacgatggtccctcatcccggaagcaaacctcgtggttcaaaaaacagtactccaaggaacccaaaggaaaccagaataacaaacacggcccctacacttggggtaaaaggaattttgatttttgcgaagttgatgaggactttgatgtcgactatgtattccgaactgcttttggaggatcccgaggtttctctttttcattcactcatgaagaggatgaacctcgatggcggcatcactcttcaaaggtttccaacaactttaacaggctttggggntncgaaatntccggtnaggttaaggttnngaggngnggctttnnttanctccagtgcnttngg

SEQ ID NO: 135217 - DNA, 591 bp, Arabidopsis thaliana
cgaatcataagagcaaaacttaaagaagtaaagaaccatgtcgctagcgcgaatacttgttctatcgtcttctttctattcttcactgtctctttcgccgtctccggccaaaagccaaccgcttacgacgccgtcaaactctataacttaccaccaggaatcctcccaaaaggagtggttgactatgagcttaacccaaaaacaggcaacttcaaagtctacttcaatgacacgtgtgaattcaccatccaatcctaccagctcaagtacaaatcaactatctccggcgttatatcacccggtcatgtcaagaatctgaaaggagttagtgttaaggttcttttcttctgggttaatattgctgaagtgtctcttgacggcgccgatctcgacttctccgtcggaatcgcgtcggcgagttttccggctgctaattttgaagagagtcctcagtgtggttgtgggtttgattgtaataatgggcttttattttcttcttgaatctgttgggccttgtgttgtactcaataaaaaatgcccttctctcatccttggcttatgagtattgattagttaattaataaattgatt

SEQ ID NO: 135218 - DNA, 475 bp, Arabidopsis thaliana
atcaaagccaattggattaaatattttatacgaaaaccctaatctacaatatttatttattcatatcattgttttttcttagggagaggcatatgtctttcactatgtcactcttagacgtatgaccgtatacacacatacacacacaccacatcacacatgttattttctctctttttttataaggtcattcaaccctaagttcacgatcttaacgaacccggagctgattttctaccactccgatgatcccctcgaaccttcggggaaaccttcccgccctgagatttaggagacagtggccaatgaccagaagaaaccgccatgtccttataatgtatgagactctctagagcttccacaacggcaagcattttgggccggtctttagggtttgggctcacacattgtaaggctagaagagctgtatctttagccgccttgacggagtattgtccagcgagcctcgggtcca

SEQ ID NO: 135219 - DNA, 951 bp, Arabidopsis thaliana
  unsure (1)..(951): unsure at all n locations
caagataacaacaacaacaaacctctccaagccgtagccatgaccaccactactgttactccctccagctattcgctcgttaccatcgccggtgaaatcccaaatctcagtttcaagatctacgaatcaaacgcagattcttggagcaaagaccaagaactggaatcagtcaagaacaatgattcatcattacatgatgattatgatactgacagtggcacagtctactttcttagcaaacaaggaaacgttgtcgtggcgagtaacaaatcttcagaggagtccgtcgaagcaaatactctttccgttatttaccgttacaagatggagcccggaaatcggcctattttctcaaagctcttacggggccaaattgtagcttgtgatctcactaaacgatgcttcaccgagctaccaaagcttcttcctccgttcctagagtactccatcgacttggtggaatgtgaaggaacaatgtatgtgattcttctctctgagttctttgaaagcgcaagtttaaggatctggagacttgacaataaccgggaatgggttcaagtcgggatgttgcctcccgcgttgtctcatgagttatacggtaagaaaggcgacataaactgcgttggaggagctggaaacaagatactcgtgtgcttcaatgctagtcctccagaagtgtattgtagatactttgtgtatgatttagttgcagaagagtggaacgagttgccgaaatgcttcaaggatggagaagctgtggattttgtttccgctctttctttccagcctaggatcgaggctacagtttgaaattttttagcttttattgtatggattgtgtgtattctttctattcaggaaaatccaaagtaaactcatctgtaatctgttgncattggttagnncgaaaggtgctctgtattatgcaaaaaacaaccaaaagggcggccg

SEQ ID NO: 135220 - DNA, 420 bp, Arabidopsis thaliana
atcgagcttcagttgggaaacatggataggtgtagaaagttatatgaacggtatcttgagtggtctcctgggatttgctatgcttggagcaggtatgctgaactagagaggtctcttgttgaaacagaacgagctagagctatttttgaacttgcaatatcccagccagctcttgacatgcctgagctgctttggaaggcatacattgattttgagatatcagaaggggaattagagaggacaagggctttatatgagcgactcttggaccgtactaagcattacaaggtgtgggttagctttgcaaagtgttgaagcttctgcctgcggaactagagggaggcggggatgtaggtgttggccaggaagaagatgttattgaacacaagaaagattgcatcaaacgtgccagagcaattt

SEQ ID NO: 135221 - DNA, 964 bp, Arabidopsis thaliana
  unsure (1)..(964): unsure at all n locations
ttggagctaaggnttctccggtctccgacgtgtttggcggaggtgcaggcgacaacnnggcaacggaacaatctgaacaaggtgctaaggagattcggatggttgtctctgatcaacctnganngagtaatgctagaggtggtggtgatgatatcggcggtcttgatagtggagagggagaaagagagatagagaaagctacagcagggctganataaaatggggtctaattccacggcggactagnaggcggctggtggagatggcggcggcaacaacggaacacatatgccgccgacaagtgtgatgacacgactgatattgataatggtgtggagaaagctgatcagaaacccaaacacgtactccagtctaatcggtctcatatgggctcttgttgcttaccggtggcatgtggctatgcccaaaatattacaacaatccatctccatactctcagatgctggtcttggaatggctatgttcagcttaggtttattcatggcacttcaacccaaaatcattgcttgtgggaactctgtcgccacgtttgccatggcggtcagatttataaccggtccggccatcatggctgttgctgggattgccattggcttacacggcgaccttctccgtatagccatcgttcaggctgcgttgcctcaaggaatagttccgtttgtgtttgcaaaagagtacaatgtgcatcccacgattctaagcactggggtcatatttggaatgttaatagccttacctataactctggtctactatattcttcttggcctttgaattggtcccttcagtatcaactggctttttagaggccctcggagattggtctatttatttntnggtaacggggnaataagcaaagcctttattttcggtgggaaanagtgggagggtgagaagaggtatgccntngggtttgggtccatatttttgggcccaccaaaag

SEQ ID NO: 135222 - DNA, 405 bp, Arabidopsis thaliana
tttttaaccacttaactagaaacttcaattaataaaaaaaggtgcatattacatatctgcttagccaaaatctacacataaattaacaaaaacagaaaatgaaaaaataaaggtaaggaagagagattttttcttcttggcgtctaatgaagacaagatccttaatccattcaagtcttgttcactaaatcctaagtacttttgttgtgttccacaaatattggaaccaaaaaccaaaggcatatcttcttcttcaccttccactctttcccacgaaaaataaaggctttgcttatttcctcgttaccgagaaataaatagcccaatctccgaggctctctcaaaagccagttgatactgaagggaccaattcaaaggccaaggaggatatagtaggaccagagt

SEQ ID NO: 135223 - DNA, 494 bp, Arabidopsis thaliana
  unsure (1)..(494): unsure at all n locations
acaagttgcagtgaagaggttatccaagacatcaggacaaggtgaaagagagttcgcaaacgaagttattgttgtggcaaagcttcgacatagaaatttggtaagattgctagggttttgtttggaaagagatgagaggatacttgtctatgagtttgttcccaacaaaagtctcgactacttcatttttggtcagttatgttcaatatttagcctaagataaattttttacaaattgcataccattcattgtttctaacattggaaattcatatgcgcagactctaccatgcaaagccttctggactggactagacggtaaaaaaatcattggaggatttgctagagggattctttatcttcatcaagattcacggctcacaatcatacatcgtgatctcaaagaaggtaatatcccccccgatgatggtatgaatgcaaaaatcgccgcctttggatgggggatttcgggtggcccnnagagccnttttggg

SEQ ID NO: 135224 - DNA, 387 bp, Arabidopsis thaliana
  unsure (1)..(387): unsure at all n locations
ggatatnactatcgttgccgtgggcgacgcggctgaagattgcggtcgcagctgctgagggtttggcgtttttccatgatttggagagtccaatcatttaccgtgatttcaaaacttctaatatactacttgattcggattttactgcaaaactctcagattttgggttggcaaaaatgggaccagaaggatccaaatctcatgtcacaactcgagtcatgggcacttatgggttatgctgctcctgaatatgttttcaaccaggggcattttaaccaacaaagaggtgaccggggtataagttattgcgtcgttttactcgagctcctaacgggaagaagagccacagaaaagtcacggccaaaaaaccagcagaacatcatcgac

SEQ ID NO: 135225 - DNA, 403 bp, Arabidopsis thaliana
  unsure (1)..(403): unsure at all n locations
aggaagaatacaaaacacatttcacagttttgacttttgatataacttaagaaaaaagcttaatctcaatcatcctcagaagcagcaaccttctgcttcttccatttgtatgcagcttcaagaatcttgagattcgctgtttgcgattcttctgggtataaataatcgatgtattcttcgtactctgttgacccgtcttctctagtgatcgcctttcttttcttgagcttctttggaagcttcgantggaacaatactaacatccccgagggtaccnaaggctactctccatggtccagccaatccnccnagagcgtancggntccttccctcagcncnggngnggagccttggaaaaagggtgggccnaccgaaaatggcccgggacgttgatggaaccttc

SEQ ID NO: 135226 - DNA, 666 bp, Arabidopsis thaliana
  unsure (1)..(666): unsure at all n locations
gatgaagtttggaattcaatccagtaaggaaaccaaaaattgaaatgttataccaaaactaaaccattcccaaagggagataacagtcaaaagctctaaatggctaaatctataacaaatttaaagaaaaacatatataagccaaaatctttgtttctttgagccaaaaaccaaacccaacaaaatagaaattacaaactacttcttccgtagataaaggaagaagaactgaatcatttcattctttggtagcactaaaactttgacgagattcttttttcttttagcgaccaccaccgcggtagtaaccatttcctcttggcctgtagtcacctccatcctggtttcctctgccagacccacgcccaccaaaccggcctcttggtgcttctgttgggtaaccaccccttccacgtcctcctcctcttcttgctccgcgaacaccagcgggatttggcccgccgtcctcaatggatacttggccttccanccaagtatataggngaagccttaatcgnatctcaanggagcatgtcccaaatcaacaatggtaanaaagccanaaancttgngggtngagganaaccatcagggtgatgaccgagtctnaanctcccattaaagagatggggggatncacgaacggttnccaagttaacggggttt

SEQ ID NO: 135227 - DNA, 504 bp, Arabidopsis thaliana
  unsure (1)..(504): unsure at all n locations
caaccnttttatagtcaagcagctctcaacgcttttttttcaaggtctgtgaagcctcgaaattatcaggattttcaatctccgtcgccgatgattgatctcacgtcggtgaatgatatgagcttgtttggtggttctggttcatctcagcgttacggtttaccggttcccaggtctcagacgcttcagcaacaatcggattacggtttatttggtgggatccgaatgggaatcgggtcgggtattaataattatccaacattaaccggcgttccgtgtattgaaccggttcaaaaccgggttcatgaatcggaggaccattgttgaataagtttaagagagcttgggagacaccttttagatgatgacgatgagagtggtggtgatgatgacgtgtcagttataacaaattcaaattccgattggattcaaaatctcgtgactccgaacccgaacccgaacccggttttgtctttttcaccgagctcttcttcttcgtcttct

SEQ ID NO: 135228 - DNA, 515 bp, Arabidopsis thaliana
  unsure (1)..(515): unsure at all n locations
gtttggagcctgtttactgatagatatattattccatatttttacatgagcaagctctctttagaagcaaaacatgtgactctctagctacattctactcaagactttagcaaaaagctgggaatggtgaaattttgaacaaatcagagcttgagaataaggccaatggggcaatgatcacttccattgatatcagggaggatgtaagaatcatggacattggccgcaattgattgggacaccaagaagtagtccagtctccatcctttgttggttttgcggccaccatggcgataaccccaataagtgtacccgacaacaccaggatgttgttttctaaaggtatctacaaatccccttgtctaagaagtttgcaccaaaggactggcctttcctcctctggtaaaccagcactcctttggttccccgcaggtttgaagatgccaatttctccatgagcacagtttagatcacccgtcaagacaaagggtagcttcctgtcttgaggtgngggt

SEQ ID NO: 135229 - DNA, 556 bp, Arabidopsis thaliana
  unsure (1)..(556): unsure at all n locations
gcggccgcccttttttttgtttttttatgattaaagatttgagaatttttttttccttcgcagacgaacacagtagagtttcacagaaaaaaaaaaggattcaaacataaaattctacaaacgacaaaaaataaacctaagcttaacaatgatgaacaagacaatgtccgaaatcacgatgataatttgaaattcattagtccattaaaagcttttctaacctttcttcactctcgcaaattcttcgccggaaaagcttctccgccggtatatatataatgattatcaatatatacacatcagaaaggacctcttccaccggaattccccggccaaccttccaccggaagttgcacatttggttgcatattcatcggtaaatttaaagaacggaggtcctcctcctcctcccagctgccacctccggaggaaaaaattacccccgccggtcagatcccccnccangcgggtgctgggtgggccacctccttctaagggaggccccccataggnaacnttggaancggggngggaancnatacggggncancgngga

SEQ ID NO: 135230 - DNA, 465 bp, Arabidopsis thaliana
  unsure (1)..(465): unsure at all n locations
ggacatcaaattgatttgcacacaagattgtaattttnnaccgttacgccacacaagcacaattgatgactttacagacgacgcgagtacatcgtctacaccgcttaatattatacgcaacagagcacacatcaaacacctacgcttgtcaactccacgtggcactaatgacagcgctgagccagcagcgagtgaagctttatcacttgagtacgatgcaactcgcagcgatgtgcctggcaacagtagcttcggcatggcacataaaagtgtttcgatgtcgcgggcacctgtgtttcggtgctatgtttacacatgaggatgatttgattcacaagggngtttagttgagctnaccggcatcaagnanccaaacactttaacgnttncttcaantttatcntcttnngggngcattngggnntgancatacatacccttngtgtcccaccaacttttggaact

SEQ ID NO: 135231 - DNA, 593 bp, Arabidopsis thaliana
gcggccgcccttttttgtttttttttttttttaaaaaagagattttacttatgagcaaaaaaaaaaaaagtgggcgtacaaaagtcaacaggcagttaccataaattaccaaacagattaacaaaggaacttcggagttatggtcaaacaaagaaagtaaatgaaaaacatatcagtgtatgtgaggcaggcgtgtgatggatcatactactgcagttctttctccagttcatcgaattcccatccatcaacctcatctgcagagtaatcacgagccaccttaccaaattcagattccagctcggctagttcggcttcagggttaaactcttgactggaaccagctgcaggattgggtgcctgaggagaattgctcagctctggcttttgggtctgagtagattcagttgaagcattcatgctactactgctaggcttgggagatttgggtgatgtagcactgcttttaggggacgtaacactgcttctaggtgatggaatctctatctctaacgttggcctcgctatggattcaaattgctgcctcattttctccatgtcatcaaacagctctctcacacgccggtcgtcct

SEQ ID NO: 135232 - DNA, 453 bp, Arabidopsis thaliana
  unsure (1)..(453): unsure at all n locations
tnaatgagatgaaattnattggatacagtcctgatactggaacctgcaattacttagtgtcctctctctgtgctgttgataagttggatgaggccatcaaagctgctgaggaaatgagtgcagctggctgcattcctgatgtggaatgttatggggcggtgattaattcattgtgtttggctagaaagactactgatgtggcgaagattgtcaaagagatggtgagcaaagctgggatctctccacggaaagggatcctgacaaaagtagcagcagctcttcagagccaccagggaaatttggaaagccattgagatgatcgagtttgtagaaagtcgggattaccctgtggagtttgagagttatgaggtagtagtcgagggttgcctggaggttagggaatacattctggcagggaaggtggtgatgagaatgactgatagagggttcata

SEQ ID NO: 135233 - DNA, 540 bp, Arabidopsis thaliana
  unsure (1)..(540): unsure at all n locations
ggnatgtatcctctggtaattnctattgtaaaatcaagttcaagagtttcccacgccagattgtttctgttcccgttctgttgcgaaccgaatcggaatcagagtctcggtgttgttccggtaacgtctcaaccgtcgctgcttgctttagtctaagtaagtctcagattgagacgtctcttaagaaggctaaatggagtgttctctccgtcgaggtttactctcgccgtagtgcgtcgtgtggatttgtcgctgcttccggtgagaagctgattggtcggtttcaggttacgcttgatttgaaggcggcggagtcaaagacgtgtttggcacacaacggctgggttgatttgggcactaaatcgaaggaataataagaaagtccgggtcggatcctgagcctccacgttagcgtacggggtgaaccccacaacgaggttttgtgtttcaaatcgacgggcgagcccaagtgtagnccccaagggttttnaagncnaaggaaccggaaaanaanctgttttnnnttncaancncgggtna

SEQ ID NO: 135234 - DNA, 394 bp, Arabidopsis thaliana
ggcgtttgccaacacgacttcaagctccaacctttacctccatcgctgccgtaaaaaccatcctcttccatctccgtcgttcttttcaccgttccggtcgtctccacttccttctcagacccttttcctcgtccccactccaaaacctgtacgacgcatcgcggtcgctcctctcggccctccaacgccgcctagtcccgacccacctccgcctaaaaacacgactgagctcacaagtcttgtgggagtagcgtcgatgattcaagaccgtgtaaagatctttctttcagtactaatttggatctctctcttcttttgggcttcggctttacaaggaagaggcagcaaaggtaatggtaaagggaagaagggttcacgcttcaaatagtattag

SEQ ID NO: 135235 - DNA, 591 bp, Arabidopsis thaliana
gcacgagaggaaatagaaaaaaaaagaagagaacaaatctttttgatctgtgcgtatggttgttgtgtctcttcttcctcgaatctcgatcgttacatcaccgggttctagccttcacgatgtgcttttgagcatgagatttggtttgacgcgacatctccctctcaaacgatctttctccaattattcaatcacttccgtatctccagaacaacagctcaaatctccggtgaccatggcgacgaccgagagcaagaatcttgtagaagcttccaaggaggagacaaacaagaaggagacagaagataagaaggaggtgggagtttcggttcctccaccgccagagaaaccagagcctggcgattgttgcggtagcggttgcgtccgatgcgtttgggatgtttattacgatgagctcgaagattacaacaagcagctttctggagaaactaaatcaatttgactgatttttcctcgcattgttaatggagaaattaaacatttgtctttgtcgatttgatgatacagtgcttttgttgaacaacatgatgtttctctctaaaaaaaaaaaaaaaacaaaaagggcggccg

SEQ ID NO: 135236 - DNA, 472 bp, Arabidopsis thaliana
  unsure (1)..(472): unsure at all n locations
aaatacaactttggaaatattatattatatagagaggcccaataaaagagtatgttgaagcccaaacaagttatataacatatctaaaggcccattttatacaacaaacattcaaatcaaagaaacggtgcggtttaccgtttggctgaatcaagcacacaccaaacacatctagtcatttacaatctgaaacagctttcaataaacaatgatattgatttggcattttgacttaaatgcaaactactttagtttcatcacagtagagtaatctctatagctctaagctagaggatatcgtaagaagaggaacaatctagtttctagtataaaactggaggtctgacaagaaatttgctttacttggaaggatatttcctctggaatatatacacaaacgtgtagaggagttttcatccatcatcatcatcatcaccacaccatctactaaaccatttgnggcgggacccaa

SEQ ID NO: 135237 - DNA, 619 bp, Arabidopsis thaliana
  unsure (1)..(619): unsure at all n locations
ctgttgttcacaggacatcaaaattcaaggggctattgggccatgctcatcattagagaagaaaggtgctagtgtggctgacacggttatcgcagaggggaatacttctgcttggaggttgtgtggccttgataaaactacgtgtttgacgatattttttgacatatcttcaagcgggtcaaatactcctggagctgcgaatccacagttttatttgcaagtttctcacaagttatcaaaaccctgaaggtcaaacattgctccgggttactactgtatgcagacagtggatagacagtgctgtgagttcagaggaacttgtgcaaggctttgaccaagaaactgctgctgtggtcatggctagattagcttctttgaaaatggagtcagaggagggatttgatgctactcgctggttagatcggaatctcattcgtctttgttcaaaatttggagactatagaaaggatgatccagcctccttcacgctgaatccctttttccggatatttcctcaatttatatttaatctcgggnggtcgagttttgtncaggnatttaccaaagccctgattgaanccgcatattttnncangtncntaanccgggggaannattt

SEQ ID NO: 135238 - DNA, 608 bp, Arabidopsis thaliana
  unsure (1)..(608): unsure at all n locations
gagagagtgtagtagagagaggggttaagaaatggagaaaagagtagtgaagagaaggatagtgttggttccacttccattactaggacatttcactccgatgatgcaactcggccaagcccttatcttgaagggattctcaattatagttcctcagggagaattcaatcgagtaaactcttcgcagaagttccctggttttcaatttatcaccataccagattctgaactcgaggcaaatggaccagtcgggtctctaacacagctcaacaaaattatggaggcaagcttcaagggctgtataaggcagttgttgaaccaccaaggcaatggtattgcatgtatcatctacggcggggtccatgtatttttgtggggcccgtacctgaggggttgaagcttcccattttcatctttccagtgctcaaacctgctccccctaaagtttgctgcaatgttttaagcaaacttaatgccaagaagtacttgatcgacatggaagagcatgacgtgcanaacaaggtagtggaaaatatgcatccattaagatacatagacttaccaactgcaacatttggagaactagaaccttttttggagctctgtag

SEQ ID NO: 135239 - DNA, 650 bp, Arabidopsis thaliana
  unsure (1)..(650): unsure at all n locations
cagagaatgaacgagatgagtttacgaaaggatgctggatgctcttggatcgaactaaacaggaaggtatttagctttgttgtcggtgaaagattcttagatggttttgaggaaatcaaaagtctttggagtatattggagatgaagatatcgaagatgggatacagaccagacacaatgtcagtacaacatgatctaagtgaagaggagaagattgaacagttaaggggacacagcgagaagcttgcccttacctacgggttgattaaaacttcagaaggaacaactattagagtttacaagaacctaaggatctgtgtggactgtcacaatgcagcaaagttgatctccaaggtcatggaaagggaaatagttgtgagggacaacaaaaggtttcatcatttcaagaatggggttcgttcttgtggagattactggttagtaggactgtaataaaattggtgaaaacagatgcattagtaatagtagctcttagtaaattcagtattgtgtgtatttatgttcaggcgagacaaacatcaatgttaatatgttatnnnnnnnnnnnnnnnnnnnnnnnnnnnnnnnnnnnnnnnnnnnnnnnnnnnnnnnnnnnnnnnnnnnnnnnnnnnnnnnnnnnnnnnnnnnnn

SEQ ID NO: 135240 - DNA, 541 bp, Arabidopsis thaliana
  unsure (1)..(541): unsure at all n locations
cacgtgtccacactttttcacaaagttatctaaaaacaaaaaacaattttttttcattcgacgtgtacatatcactcgccacgtgtacaagagccttggcctttttgcttcttcttcttgtctattaatatcatctcctgattatactctcttttgaccaagctgcttcttctccatctatccaacatctcaaatctcagtaatcttgttccttcgattctgttttggacgtttgtaatggattctcaaggacatcagataccgcggcggagacgacagagacgctgcaacgacggctatggccgagacagagaggaaaagcgctgacgacaacaaaggaaaacgcgatcaaaagagggcgatggcgaaacgtggtctcaagtctctgacggtagcggttgcggctcctgtgctcgtaaacgctcttcgctacgtatttccctcgggcacaagcgacggntacggggnattcgagcttaagtccctcgtcgtnggtnccanctttttnggntcctncaaaaaaacgngttctccggttttt

SEQ ID NO: 135241 - DNA, 641 bp, Arabidopsis thaliana
  unsure (1)..(641): unsure at all n locations
agaatctgaagatttcggtttggagacaaatattctgagaaacttacatgagaaggacgtaatggaaactccggtgcaagttgctgcttataagcaagaagagaactggacggatcctggtttaggtggtgtgtctagctctgggagaggaggtcgaccaccacgaggacgtggccggcctcgtgcccgtggcaatggcaagaaaccggcagtttctgttaaaccaccacgaggtgcagcaaactcaaatggtgaaaccatgttgagaccgagagcacaaccacgtgggggtagaaagaatgggcggcgtagtggcaccaaaggccgaaagaggaccaacgcaaggaacactcggtatatgtaatgaagtaggaggaggacgtcgggttaaggaagttgctgtaaccgccaaaaccagtcttcctgataacgatgacgattggttcgaaacccctgaactgcaagaccgatgacggagaagctagcaagctcggggagatcgnttcaagtatgaggcctatgatgatgnttgattgtcattggctcccgatttnatggttttaattggnggnggcgnantcaaagtaaattttgtaggtnaggggggaatttngnttncaatagtntngttgantccggga

SEQ ID NO: 135242 - DNA, 961 bp, Arabidopsis thaliana
  unsure (1)..(961): unsure at all n locations
acttatgggacgctcttcacaaaggctttgttcatcttgagtggcggactcgtcatcaaatcgcggttggagtagctcaaggattggcttaccttcaccatgatctctccccaccaatcattcatcgcgatatcaaatcgacaaacatcttgttggatgttaactatcagcctaaagttgcggactttggcattgcaaaggtgttacaagctagaggcaaagattcaaccacaaccgttatggctggcacctatggttacttggccccagaatatgcgtactcgtccaaagcaacgatcaaatgcgacgtgtacagtttcggggttgtgttgatggagctgttcacggggaagaaaccggtggattcgtgtttcggggagaacaaaaacatagtgaactgggtgtcaacaaagattgacacaaaagaaggattttttgagcccctagacaagagattatcagaatcttcgaaagcagacatgatcaaccccttgcgtgtggctatccgctgtacaagtagaactccaacaatccgtcctaccatgaacgaagttgttcagcttctgatcgacgcaacgcctcaaggaggacccgacatgacctccaaacctacgaccaagattaaggattcaatagtgtcagatcatctcacgcaaacaagactctagtcatgctttcttggtgaagaggtgtagcaaacagttcgtataacttctaaagatatcatgtatttaaatatatatcatagaagaaactgcttatatatatagtcttttaatacttcaatgtattttaacatctatcctttaaagactttggttatttccggttttaattcaaaaaaaaaaaaaaaagnnnnnnnnnnnnnnnnnnnnnnnnnnnnnnnnnnnnnnnnnnnnnnnnnnnnnnnnnnnnnnnnnnnnnngagaannnnnnnnnnnnnnnnnnnnnnnnnnnnnnn

SEQ ID NO: 135243 - DNA, 529 bp, Arabidopsis thaliana
gtttgaggcccctgcacctttcgcaagcacctctagtggcttcttcacctcataaagcaccatcacaaggatcctcagcaactacgtcagaagatctccagggaaaaagaggcatccaatcttattcttatcttttctatagccctggtgtgcttatacttgccataatcactgtacttgttatttgttcccgcgcactccgagaagagaaagctccagatcctcacaaagaagctgtaaaaccaaggaacctggacgctggttcatttgggggatctcttcctcacccagcaagtacacggtttctgtcatatgaaggactcaaagaggcaactagcaattttgaatctgctagcattctaggagaaggtgggtttggcaaggtttacagaggcatcttagccgatggtactgctgtagcgattaagaagctcacatgtggtgggccacaaggtgttaaaggaattccaggtggaggattgatatgcttaagccgtcttcatcatcgtaatcttgtgaaacttgtggg

SEQ ID NO: 135244 - DNA, 491 bp, Arabidopsis thaliana
  unsure (1)..(491): unsure at all n locations
gaagcagaattaagttcgagtagattcgcggctgtcgacgcttctgaatttgttgtatttggcgttttttggaagagttcattgcttctttggttgaggattcttcgtgaatcgctgggattttgtgttctaaggtttttgaagcaagctttagcttagggaaaattttgagaatgaaaggtgaaagagaagtgaagaatggtgtttctgaggaagagagagaggtgaagaggaagagagtgatggaacggtctgattcgccacctccaccactagttgcgaaaggagaggggaatggtaacaaagtgaaaggagaagctcaaagtagaggtcgatgacggccgagaatnatgntgatgaatccttccaaagggagaggaaagcattcaccgccatnttgaagtccgncgtgattgnccnnatcctnanaaccgtaaccnccaagngttggattttaaattccagnggttttnccctgcccattgcaaaac

SEQ ID NO: 135245 - DNA, 942 bp, Arabidopsis thaliana
  unsure (1)..(942): unsure at all n locations
ctgattttggtgggaagccatttgcatcagagactcctcgttcagacttcctgttcccaggaagaagcccctttatgttcgactctgtcccaagtacacccgccgcacacgatgacttctctaacaacagcttctcccgcttcgattcattcaacagcaacaacaacgatgctttctctctatcccgcacagactcgatgcgcagcacaagcgagcctgacccattcgcatcaaggtttgattctttcaactatcaaagatatgattccttcaatgcacaaagctatgattcctctagcaacaacaatgcatcggagacgcctaaagcctcattgacaagattcgactcaattggaagcaccagggactctgattacagtcatgggtttgggttcgacgaccatgacccgttcggttctacaggaccattcaaaacaacgacaactacagcagagacacctcggagttctgataattggaatgctttctagccagaagcccacgtgcgatatgaatatgatcacatatcatatactttgctgcttttatagtttgaatttaccagtcgaagagttatatgtatcttcatttctttggtttcacctgcttgcttcattttttattgttaatatataatagtcttttttgccattttttcttttaaggatttttcgaagagtgtcctttgttggtctctgcgtagtgtttctttttatttgtgtctttgtttgttaacttgaataatgaattattatttgtccctgtgaaaacttctattgtatctttgtaatcgtatggatacatttcagatgttgttatattagattgattggtaattttgggaataaaaaaaaaaaaaaaaaaaaagnnnnnnnnnnnnnnnnnnnnnnnnnnnnnnnnnnnnnnnnnnnnnnnnnnnnnnnnnnnnnnnnnnnaacggaa

SEQ ID NO: 135246 - DNA, 773 bp, Arabidopsis thaliana
ctgcagtaccggtccggaattcccgggtcgacccacgcgtccggctagaggcattgtaaccgcagtttgttatcaacctgatgggcaggcagtgattatcggaactttgacaagcgattgtcgcttctacaatgtatcaggccactgccttcaacttgatggtcatatatgtctgcacaacaaaaagaagtcgtcgaataaacgaataatcggctttcagtttctcctgcagtttgattctactgacccaagcagagtcatggtggcatcagcagattcacaagtgaggatcattagtggtcgcaacgttgtccacaaatacaaaggatctcgaaatgctggaaaccagatatcggcatcttttacagcagacgggaagcatatagtctctgcgtgttgacgattcatcggtctacgtctggaactgcgttggacacgaccctgaacagtcgtctcctggttttttctctcacaccaaacgacttaaaatccgatcattcgaaaaattctctgcggatgtttcagtagctatcccgtggtgcggatttacgcctgtactctccggcggatccgagctatcgccatcgctcttctcattagggcgcgagtacgttctcgattctcccaagggatctgccacttggccggaagagaagctagcgagctcgttttctccggtgaaagcgatccgtagatcgcattacaaattcctccggtcttcgtgccggagaacgttggagtcatctcatctctggggattggttatagtcacc

SEQ ID NO: 135247 - DNA, 708 bp, Arabidopsis thaliana
  unsure (1)..(708): unsure at all n locations
cagaagtaatggaaacaaggaaacacacacataaatccgatgtttactgtttcggtgtacttatactagagatgttaactgggaagtctccagtgcaatcaccaagccgggatgacatggttgatctcccgaggtgggtacagtcagtggtgagagaggaatggacaagcgaggtgtttgatattgagctgatgaggtttcagaacattgaagaagaaatggtacagatgctgcagattgctatggcatgtgtagctcaagtgcctgagggacgacccaccatggatgatgttgttagaatgattgaagagatacgagtttcagactttgagaccactcggccatcttcagatgacaatagcaaacccaaggactccaacgtccaagtttaaatcaccccttggatctcattccctttttatcaaggttttcaagtttgaatgtcttataaggctttatgttgattgtttgaacaccactcgcctgagtaataccgcagttggaggcgcggtaacatttacatagcaattattattgtaggctcctttttctgtatctcataatataaatgaatatgattcagttttatgcaagcttaaaaaaaaaaaaaaaaagaaaaaaaaaaaaaaaaaaanaaagggcggccggtttaaaagataccaagttacggaagggtggannnnnnnnnnnnnnnnnnnnnnnnnnnnn

SEQ ID NO: 135248 - DNA, 1061 bp, Arabidopsis thaliana
  unsure (1)..(1061): unsure at all n locations
taccgcaccggaattcccgggtcgacccacgcgtccgaaagatgattccgaagacgattgagaatacaagagaatctgatgaaactgtttgcagacctgacgatgaagaattgtttgcggatattgatgctgatgagtttaatccagttctgagacgtgagattgcacctaaggtcttgctcacaacatgtcgtttcaattccactagaggacctgctttaatacctgagtcgctttcggtgataccaaactctcattatcaaaagagaggaacctatgatttgaagaagattgtagaatacgcaacgaagaaagattttacatctccttaattgttggttcatacaaatcgtagagaacctgatgcgcttcttatcatcggtttgccaaatggtcctactgctcatttcaaattgtcaaatcttgttctaaggaaggatattaagaatcacggaaattctacaagccatcaaccagaactggttttgaataactttacaacgcgtttagggaatcgtgttgggagattttttcaatcactcttccctccggatcctaatttccgtggtaggagagttgtaacattccacaaccagcgtgactttatatttttcagacatcaccgttacatatttgagacaaaggaaagcaagagtgataaaggaaaagaagagacaattaaaacctcgtcttcaggaatgcggtcctcgattcacgcttaagctagttactctacagcatggaacttttgacaccaaaggtggagaatttgaatgggttcataagcctgaaatggacacgagcaggagaaggttcttcttataaattctgctgtcttccgagtttcaccaagttttgtgtttattttgcattttcgaattttccctacctccgtccaaaattgtatgtctttaaaacttctcatttcttttttcaatatagccatgagccatcgaacccnnnnnnnnnnnnnnnnnnnnnnnnnnnnnnnnnnnnnnnnnnnnnnnnnnnnnnnnnnnnnnnnnnnnnnnnnnnnnnnnnnnnnnnnnnnnnnnnnnnnn

SEQ ID NO: 135249 - DNA, 477 bp, Arabidopsis thaliana
gaaaaaggtagaagctttaattgtgaagtgatttggtgggttattggcgcttgcaaacatatctctgcgtttcaagtttccacctttacaatcttcttcttcttcttcttcctcgttcaatgctactttaatcaataccagaaaactctcttcaatcgtttgctcgaaaccctcctctaatgacggcggcaaagtggctaatgacgatggtggcgcaaagccgcggaagaagttgtcggagcaatcgtcatgggaagttaaagattcagaagggaaggattatctctataggcttggcgcggaatcggttaatgttaaacatacgccgttggggcacgaagcggcatgatccaggtggttttcttcggggacttccttggaaaagattctgatattgtgtttgattaccgtcagaaggcgacgaggtcctttgaacatcttcaaggagattattacattgctccatcgtttctggat

SEQ ID NO: 135250 - DNA, 623 bp, Arabidopsis thaliana
  unsure (1)..(623): unsure at all n locations
gaaaatagtcctgctatattgcaggtccatccaggtgcctttaaacaaggaggcattcctttggtttcatgttgcatctctgcagctgaacaagccagggttccaatatccgtacactttgatcatggaactacaaagcatgagctattagaagctcttgagctaggactagattcagtgatggtagatggttctcatctttccttcacagaaaatttatcctacacgaaatccataacagagttggcccgttccaaaaacattatggtggaagctgaactaggccgactctcaggaacagaggatggcttgactgttgaagactatgaagcaaagctcaccaacgttaaccaggctcaggaatttatggaaactggtatagatgctttggctgtgtgtatagggaatgtccatgggaagtaccccaagtccggtccaaacctcaagcttgatttacttaaggaactgcacgccttaaggttcgaagaaaaggggttttntttgtncttaagggggntntnggtttttttngganccttnttcaaggnttnctttnggattggggttnggnagttaacgnggccccagggnnnagccggtttaatgggngcctttgctttggg

SEQ ID NO: 135251 - DNA, 1162 bp, Arabidopsis thaliana
  unsure (1)..(1162): unsure at all n locations
aaaggctgtggcaaaaaagattagagatgaaatcacaattgaagtttcatgaatgaaggaatcaattggtgtgattcctggtttagcagtaatccttgttggtgacagaaaagattctgcaacttatgtgaggaacaagaagaaagcttgtgactccgttggaatcaaatcgttcgaagttcgtctagctgaagattcatcagaagaagaggtgttgaaatctgtatcaggattcaatgatgatccttctgtccatggaatccttgttcagttgcctctgccatcgcatatggatgaccagaacatactgattccggttagtttggagaaagatgttgacggatttcatccgctaaatattggacggcttgccatgcgtggaagagaacccttattcgttccttgtactccaaaaggatgcattgagttgttgcatagatacaacattgaaatcaaaggaaagagagcggttgttatcggaaggagtaacattntcggtatgccagctgctcttttactgcagagggaggatgcaaccgttagcattatccattcaagaaccaagaaccctgaagaaatcacaagagaagctgatattataatctcagctgttggacagccaaacatggtcagaggaagctggataaaaccgggcgcagtcctcatccgatgtttgggattaatcctgttgaggatcccaagtgctgcgcgtgggatatcgattggttggagacatttgctacgaggaggctagcaaagttgcatcagccatcacacctgttcctggcggtgtaggaccaatgaccatagccatgcttctatccaacactttaacatcagctaagaggattcacaacttccagtgacgtcacttaaaaagaagattgctggccttttgggaaacaaacaaatcgtactctgttttttgaagccaatgatttactttggtctttaaagaaagttatcgttttgttctatgaaacaaaacatgtagtttttaagtcacataaattgtcttcaacattgtttgtctcttcttggtattttgagtcagaactagttttaactaaaaaaaaaaaaaaaaaaagggcggccgctctagaggatccaagcttacgtacgcgtgcatgcgaagtcatagtcgtgtaaggtaacggaattc

SEQ ID NO: 135252 - DNA, 383 bp, Arabidopsis thaliana
gttagcaatcgcagcgacggtggcgataattgcaataatcgttagacttggctcgacacaatacggatggaacaaagaggcggcgttggataaagctaaaggaatggtcagatcggctggggatttgggcgattccaacgtatgtagcggttcacacaataaccttagctctttggctccctcacgcccgtcttctttgaagcttggtgcttctttgctctttggtttccttcctgctcttctctgagttttctctgctaaagttctcgccgcttctttctccttctggatcggcaggcttgtttttaagagttccaccagagctacagggtgggcgcatagcaacaagtacttcaatattctctcaagaggagttgagcgcg

SEQ ID NO: 135253 - DNA, 414 bp, Arabidopsis thaliana
cggaaagttgtttaccagagcctggcccccttcttcggtgtccttatctggatgagatctctgattctagcactggcggcatcatcaaattctattcttcatctatttgggcgcataacaagcaatctcttaacctgtctattacttaaatatgtgtaaaaatatacatcgaaaatatcacccaatctagttgaagattttgggagcggctttcaccacactgtatgggctaaccgtactgataactttacgataatcttgttgatcgtgtttgcaaagtattacctgtatattgaaagaatcctgtgagccgaaatcttaattattgtgtattagtggttagagaaattttcgtattgctttatgagggtttgcattttttattgtctttcatacttctgcaaagcatataac

SEQ ID NO: 135254 - DNA, 650 bp, Arabidopsis thaliana
ggctcgccaagccgacgcattcattgcccttcctggtgggtatggtacgttagaagaattgctggaagtcattacatgggctcaactcggtatccaccgtaagccggtgggtcttcttaacgtggatggttactacaactcgctgttaacgtttattgataaggctgtggacgaaggatttatatccccaatggctcgtcgaatcatcgtctcagctccaaacgctaaagagttggttcgacacctcgaggaatatgaaccggagtttgatgagataacatcaaaattggtttgggatgaagtggaccggataagttatgtaccgggttcggaggtagctaccgctacgtaaggatgtattatggggagtttattttttggtaaaagcagtgtacagcggaaattaagttgtttaacatcagaaggtaagggcggaaagaagacaaaagaaagtattggggtcgttttgataaacattattttgtaggggtggtttaaatgtgtgaagtggataaaccatgtgggtaactgctaaccgcgtatataccaaaccctatcactccccacttgtctttgtacattttggtttaatggaaaaaaaggatagggctattttcaagaaatgacaaaacgatccttttcttttggtt

SEQ ID NO: 135255 - DNA, 601 bp, Arabidopsis thaliana
gacccacgcgtccgctggttagcataggtgttaaacctgattcccggacgtattcattactggttgatgctcatctcattaaccgggatcccaaatcagctctgaccgtcgttgatgacatgatcaaggctggatttgaaccctctagggagacattgaaaaagctgagaaggagatgtgtcagggaaatggacgatgaaaacgatgatcaagtggaggcattggccaagaagtttcagatcagaatgggaagcgagaaccgcaggaacatgctgttcaacatagactactccaggggccgagcattaaacaattgaaatccaaaatggatggttgtaataacgaacccttgtgagaagtaaggaatgaagccccggctcatctagttttgaagttatggatcatcatgcccagtgtttcattgatgtatattgcttcattttattcttccgagtctcttaatctgatttttatccaatacattacttggcttctttttttctttttcggaaaccaatagagttgggttcttactttcttaggatcgatagtcttaggaagatgcttttgcattgaccaataatgtcaaaacctttggaat

SEQ ID NO: 135256 - DNA, 515 bp, Arabidopsis thaliana
ccacaacgccgcggatccaagactcaatagagattatgagcctacttctgtttggaaggctcttgagatagcaatgtcttgcgtgaatccttcttcggagaaaagaccaaccatgtctcaagttactaatgaactaaagcaatgtctaacattagaaaactcaaagcgaggagtgagagaagacatgggatcaagaagttctgttgaaatgagcacaagctttacgaccgaaattaacccacaagcacggtaacttgtgccaaaaaaaatcccatggttattaaggattttgggtttccctgacttacttttcaaaaatataaatttttgggtgggccatttattttgtacggccttcaattgtattttccttgtgattgtgggccggatgtgataattaggggggatgtttggttgggttgggttgggttgggttttatgtgggtgggggccttgggtgtgtttgggcggggatccatcataaatgattcttttgcaaatctctgatgattttt

SEQ ID NO: 135257 - DNA, 660 bp, Arabidopsis thaliana
agctctcgcagagttgaagagggagcatgcggccatccttcaaaatagaaatggtaaaggagctggagttagctgggaagaatacagacaccaaatgactttcactaacatggtgataaatgagactcttcgaatggcaaacatggctcctataatgtatagaaaggctgtgaacgatgtcgaaatcaaaggttacacaattccagcgggctggattgtggcggttataccaccagctgtccatttcaatgatgctatttatgagaatcctttggagttcaatccatggagatgggaggggaaagagttgcggtctggatctaagacgttcatggtgtttggaggtggagtgagacagtgtgtcggcgcggagtttgcgagactccaaatttctatcttcattcatcatcttgtaacaacctacgatttctcattggcccaagaatcggagttcatccgtgcaccactcccatacttccccaaaggactgcctatcaagatttcccagtcactctagtatcttgtgtaatcatatatgtcactagtaaagaatccggggaagtatgttcaatggggcaatactaaaataataaagaaatctatttttcatattatgttttataaaataataataagaataatattaataatattccaagt

SEQ ID NO: 135258 - DNA, 733 bp, Arabidopsis thaliana
tataccatatatatatacatatatgaacatataaggtatattgtatatctgaacagggaacagcactaggccatgactataaatatgaaaagagttgtagaatataatttagataattcttagttatggttagaatatacttttgattactacttcatttcttatgagcatatagatgaaaaaaaataatagtctcaagcatatgatacattaacgatttccatctttggactctttattatttgtattatatatgctccaagattaattgtaagttggtcaaatgaatttgctagatttaagcaaattagttgggtcatctttgtttttcagatggcacttgaatcactgacgctaggataccaatttttagaagctatggcttcttattcccaacataatgaggggttcattctgatgattttaggtaaatttaggatttttaatggtttattatgaaatcttttcaaatcccattttaaagcaggggatttagattggtctttttttttttaagagattggtatgcaagtttaaacaaaaaaaagctactaaaatccctttagaataattaagaatccaatacttgaagtgttttcaataatagcggattttaaaaaataatatttcaaatgcttgattgaatacacttccgcaagacaacatccccttttagtggttaccttagaccaactccaaaagaagtttcttagtagaaactcatacaattaac

SEQ ID NO: 135259 - DNA, 572 bp, Arabidopsis thaliana
gctgtgctggtcagaaagtagtcaaaggaaatccttatccgaggagctactataagtgtacaacaccagattgcggagtaaggaaacatgtagagagagcagcaactgacccaaaagctgttgtaacaacatatgaaggtaaacataaccatgatgttccagctgctagaaccagcagccatcagttaagaccaaacaatcaacacaacacctcaacggttaacttcaatcatcaacagcctgttgcacgtttaaggcttaaagaagagcaaatcacttgacagagaagaagaatacgacggcgcttgagcttttgtgagtttaatgaatcttctttttggttaatgaacctgtttttgttgcctcaaaacaccacaggtttctctggacagaatctctgatattacagtttcaaaaggtatgttcttttatttcatgttggaatcttctgtgtaatcttaagaagctttaggaggtaatgtaaaaaaccagattcaaagttatgcccttatgtgaattcttttgtacatgggataaacaaaatttacaggtatcctttttgttcttgttgt

SEQ ID NO: 135260 - DNA, 358 bp, Arabidopsis thaliana
aagagaaccacttgattgattgcacaggaaaaccctcaatgttgagtcactgaggcttctcgatcaagtctattattcaagccaacttagttgcattgttagcctacaagcattgactagagagatagagagagaataacaatgggagagtctgcaaccagactgcatcaggatctctggctaaccttgcctcctgtcagcttcgctgactcaaacaacatgtgattgatgagtccccgagcagcatcatctttaagcttctgaatcttctcagggtctgtctcattcatgtgtttcttaaattgttgcctcaccataccaaccactagctcagtgttgtgttgctcggacgcgtggg

SEQ ID NO: 135261 - DNA, 513 bp, Arabidopsis thaliana
gacaatacaaccgctaatgactctttttatgaaatctctaactaaattctacaaaattcattttgaaaaaaattgctacaatacatggaatgaagatttcctgctctaatcgacgcttcattcactcttcttctccgacataagaggtagaaggcaacctgaatttaatttcaaagtatctcttcttctctctcaagttacataatgttacactcactcttcttcttcttcttcttcttcttcggaagattcttttgatttctcgatttctgtcacctcgttttctgaggttgctgtgtcgtctatcttctcatcatcatctcgtagtgtctggcttgacgcttgaggatctgatgtccgagtatggcttgttggttctggagcactcgagtccgacacttgaggggtttgactcatttcagactggccagtaccaataggactgctttgtgactgaccaataggactgctctgagattcactcatttcagatcttcccgtatctatgggact

SEQ ID NO: 135262 - DNA, 457 bp, Arabidopsis thaliana
gcgataaatatccgcttacatactatttcttatttgcatgttacaaagcagacgggtcaatcgtgaatggctgtggcggggctggctcgttagcgtccacacccggcactagtgcagtcaatgtatcgtcactgactagcgtctccggctcacctggccgattatcacgtagcataacgaatccacctagatcgtgtatattcactggtgtgtaccgttgtttactacgcactcgcaacacatgtcgctgctccagtgtaactcgcgatgggttatgcaatatcgtatatttaggctctgggcttctttgcttcgtcctttcctttgtttcctcactatcctgccttcttctctggcggactcatcagtacttgttttcatctcagtatcaccgcctgttggctcagtcttcttttcttcctccacctccatagcctgggacgtgtcacgctgtaac

SEQ ID NO: 135263 - DNA, 535 bp, Arabidopsis thaliana
  unsure (1)..(535): unsure at all n locations
aagagcggggctgcaagaaccgattctnagccggaggtttcgagtttctggactacttgtccatactgctacgtgctttacgagtatcccgtcatttaccaggaaagcgtgctataaatgccaaactaagagctgcaggagagcttaccaggcagcgaaagttccttctccaccgccagttgccgaagaagatagttactattgctgttggggtttctatccaataggattctcagaagtggtgactaaaatcccagtcactggtgtacatactaaaatcccagtgagtgatttacccaaatcagcacccaaaaaaccatcttccaaaggtatactattatgacggcggagaagaagatgatgatttcatacattggttctgatcctagtgaggacgacgacaatgatgactggctgatgaatggtacaaaaaggaggaagaatgtgaagcagagtaaagctaaagcaacaaccaaaccaaaacgtcaaaaagtaattgaggttgattgagtaaaatcagtcgggtagggaacag

SEQ ID NO: 135264 - DNA, 444 bp, Arabidopsis thaliana
  unsure (1)..(444): unsure at all n locations
gaaaaaaagaccaagaagcaatggagtcaactgatcgttcaagtcaagcaaaagctttcgacgaggccaaaatcggtgtgaaagggcttgtggattcaggaatcacagagattccggccctgttccgtgcaacgccggctactcttgcaagcctgaagtcgccaccacctccaaagcatctcaccatccctaccgttgatctcaaaggagcaagcgtggtggagaagatcggagaagctgctgagaaatggggattattccatttggtgaatcacggcatcccggtngaggttctngagaggatgattcaagggattcgcgngtttcacgagcaanaaccttgaagccanganacggtttctacctctagggntnacactagngacgtgctttactttagcnatnattgatctncaaaanttccgnggncgcccaatttgnaga

SEQ ID NO: 135265 - DNA, 577 bp, Arabidopsis thaliana
  unsure (1)..(577): unsure at all n locations
aagatttactcaagcatcatcactgatgggcataaattcttcatatatatgcgaccaagaacccgatttggtggaagcgtatgtgaatttcgcatcagcacttatccgtagttgtcataaggagttgttgggtacttctggaacacttcttgaaatttctttccacaaagcggctatatgttgtacagctatgcacagaggcgctgctttagctgcaatgtcatacttatcaggtttcttggaggtttcactttcttccatgatcgaaaccgtgaatagcatatcagatggatcattcagcgtggtctctgtccaggtcgtatctcacttgtggagagggacttttgtctaatctggtctatgctctacttgggaggttgcagctattgtcaaaggggcccataaaggtgttncaacggtacctgcaagtttaattgtgnangagggccttnaatggnaaagggaattgtttgtgtttgggaaaanttntcccaaaggattggntaaacnntaancgggttttgggnaacttnccggggnggggnnttcnttaaaannaaaaggggnaaccccgntg

SEQ ID NO: 135266 - DNA, 562 bp, Arabidopsis thaliana
  unsure (1)..(562): unsure at all n locations
ggtaactaatgggatgtattttatttatccttctcatcagatgaatctaagggagagtggctcaagattcttcatgaggtttcttttcctctcctactgtacattagaaacagagcatcgacagaaatgaagaagatgatggatcattgccctcattattaaggcaacaaaataaaataaacattacaaaaaaaaaaagtttatcgattgatttattcatatgatgtttggatttggatcgtttcgatgagaatccgcaaaatctctcactaatcgcttcaatgttcgaccgtgtttcccttgcatatgtcctcctggaactggttattgcttcccaaattgcagcttttggtccncaagataacgntcccggnacncctagagctttntggaccatncccccacaaggntttcngggttcccctggcttaggaacccgccnggaagggnccaancgngggngttagccccctggggggggttcccaacanaaaatcccttccagnngccccccaaaaacggggnacgggaanctnngggcctgnanggggacccagggggg

SEQ ID NO: 135267 - DNA, 747 bp, Arabidopsis thaliana
tgtgtacactaccagctctgacgtcgcatgccccgcttccgtaagctgggatcctctagagcggccgccctttttttttttttttttttttttttttaaaccaataatgaaattgtacaactcgtaaaaaataaaagacaccccaaaaccctaaaaattgcaacagagtatgtggtaaaaaaaagagacagagagatattataaaaaaaaagaccctaccaaaattttctctagagttcccccacacaacttaacttatccaaattaaacaacacaaattctcagaagctaaacttcaagaacccaaactatcacaatccacaaaaatgccttttgactctttagattttgtcctccgtctcttccttctttggcctcttctacagccggttcgccaccagtctcttccttcttagcctcttctacagcctggtcacccccaggttcttcctccttggcctcttctacagccggttggtcctcaggcccttccttctttgccccttctacagctggttcctcctcttgagcatcctcctcagaatgctccgtgcttttcctccaacttttttcaatacgttcctcgtctttacggccattgccaagaccaaagcccatcttccctgagatttctcattaggcttctccatggcttgagcaatgtccttaagcttttcagcctcgagcttcttgtcaatctctttccaatcctggccttttttagccagaacttcctctttaggtctt

SEQ ID NO: 135268 - DNA, 430 bp, Arabidopsis thaliana
  unsure (1)..(430): unsure at all n locations
aaagatgagagaatacatggaaacttctccgtttggtcaatgacaaaggtttttgaaagggcggaaataaaaaaagacattgaccggtcagaccaaaacatggaggaagagaaacaaaccctagagacgattctctccgcaactgttaaaaatttcagttgcagagagattaatataagacactgaaattgaaagacaaactcctaaaagaaaaaggcttctctttgctttgtttaagattcggacaatttgctaatcggcatcccaatcaatctccacagaagggaacttctccagcccgaaatccccatctccattcaaatcccggatcccggaaaggnccaagacgggngnattnccagttncngggggaaaanttcccncnggggncccctnggaaagggtttcncngggtntngagnaccctttt

SEQ ID NO: 135269 - DNA, 401 bp, Arabidopsis thaliana
aaaaaataaagggcatatcgaaatatataacaaagagaaaagaaaaacaagaactgtttgtgtctaaattaataaggtggggtattactacgtggtggaggggggtgtatgttgacgaagtcgaacgaccttattaagcattattcacaggcgtttttttctttaacagatttggcccaaagacttaggagagaaggaaagacagaatatgaacacgacagtgcaccagttggagaaaacagaatgtcttgggaaacaagatatcacttcccttcaattctcatagcatcaagataagcctctcctgtggagctcacgggaaaacaagccactcaagttggtcttttaggtttccaaggcttccttaacctttggaggcccctttgtcttttggacaaagg

SEQ ID NO: 135270 - DNA, 402 bp, Arabidopsis thaliana
  unsure (1)..(402): unsure at all n locations
cacagttactttcgatcttccgatttcggagcttccaaaatgttctccagcagccaattcgagcctaattccggctcctccggcggcggattcatgtcttctcaaccttctcaagcctacgaatcctcctcctccaccgctaagaatcgtgattttnaaggtcttgttccagtgacggtgaagcaaatnaccgaatgtttccaatccagtggtgaaaaatctggtctcgtcatcaatggaatctcactaacaaacgtttcacttgttggattagtgtgtgncaaagatgnatctaaagtcacagaagttagatttcactcttggntgatgggacaggacgtatttgacttnnaaaanatgggttgantgaaacttttcgncggntagagaantgggagtttt

SEQ ID NO: 135271 - DNA, 456 bp, Arabidopsis thaliana
  unsure (1)..(456): unsure at all n locations
ctccctcaacaacaatgcccgtcaagtgggttttacattggcaaccaaaccaaggatcaacagtaagcagccgaatcctaaacgaagcaacacaatgtgtagagagcatcaatggtgtgaaagaaggaagatggaaagcaacactcaactattacaaacccatgttaaaagaccaagcgaatcaattggagtttcctcgtgattttctagggatttcacttgcggatcagccgaataagtactatttcattatcaggacgcagaggattgtcttggaagctgattcttcgattcagttgattatggagaagcttcagtcttataaatctaaagtggctctttactttgatgggttnaagtatcagcttggngnnttttnnggttgagngttggtaagttgttccnnctcatnctgggatttaggggnatttgcatggggggtggggttcttcccnt

SEQ ID NO: 135272 - DNA, 577 bp, Arabidopsis thaliana
atttaaatgatacaaatgttattgctgtagtataaatttctaaaatatgtatgagaatgtcgtttgcaacatcacagcccgtttgcaaacatgaaatctaagagcaatagaaacaaaatataagaagccatatatatcgggtgatcaaaagctttacagaaagaaagaaactcataagagagcaaccatgtaacatatcatggcaagaagaagagaaaatcattcaaaaccaaataaacatttaaagatcaaacatattactatattagtgtcctcccaatttatttgctgatatcggaaaagccatatactacttctcctacctttagaaagattcaacagttccatttttacactcggtatgtttgctagttgagtcccccaagattgcatctgggagtaaagagctgtccccatgttcgtctgccgagcccacgtgctgaattgtcccgggtgaataccaatgggatccatgcatgcgatccccattaaaaccatgtgaaaggagggtctccaatgattcgagggaatcgtatgccgcttcttcccgtggaaatgttccgccttccaagctggt

SEQ ID NO: 135273 - DNA, 446 bp, Arabidopsis thaliana
  unsure (1)..(446): unsure at all n locations
gtttcaaattgatttaccatatcaagatggtttaatattactttttgtaccctatgttttgaatgaaaaatgacagtaagagagatgtgagactggagagtactgaaatactaattagctctgaacttcattgaatttgaagacacagtcatagagccgtcctccgagaaactctgctacttcaagatgcttcaccattccaatcttgagagaatcacacttgaactgagcataaaggtttgtctcaattccacgacccangccttctacgatgacnaagtcggcatcagatgaaggtaagcaagcccctgtgatacgcttgagagatcgataacggggtagtcattncccggatttgcatcagagcttcgaggatcacaccnagcatnggcatttcancctcacngnncaaattngtaccggaatgntgctgnanggggccttgg

SEQ ID NO: 135274 - DNA, 679 bp, Arabidopsis thaliana
  unsure (1)..(679): unsure at all n locations
aggtctaccgggcctgatccggcccatattttcataggaaccaaacttgcaacgtttgatacaaaaagtcaaaaagataaatcaaacattttctgtgtccaagaatcaatcacatgtgttcttgaccatttacataaatctcaaaatgttagatacactaaccgttgtttttagccagatttctggataatgtcatgatgattagatgagaaagtcagcattttttccagtgtccatcgacagttctttcaaacacacgtggttgcctccttgggaatgttttgctccattctgggatatttcagtaaatatccccaattcctaaaacacacaaaaagaaagagaatgcaatttttcccaatgtcctggattgtggtccaagataaatggtccagtgggaagcttcccaaaatggctaaccctcccttaaactggttacggagccctggggccttcaagcaagagggtgagggggganaagttagtgggggnttccttccancaggnaagcggnttaagtccccaaacaaattccaaccaagnggattggccagcgggaanggngcggtggtgagccnacccggttttggggccaaaggggcaaggaaattcccctncaggngggacnttcaaacgggggggaacccggggtctcnanngggncnacccggggaannag

SEQ ID NO: 135275 - DNA, 322 bp, Arabidopsis thaliana
agattatgtgctttgtttccccttgttggaggattgctggcggaatttgtttggttccataagttatgtaaggctctagtcttccaagacccatcacgatttggctctctttcagaacgatctcgttgcccaagttttgttacattggcaaacatttgacagctgataaaatttagcttgtttctataaatcaagttattattattcgtatcatcaagtaacaaaattgatcttacactttgacgattaataaggcgggaacatgttatcgaaaaagtaaacttttttttttacattttaaaaaaaaaaaataatactaaaa

SEQ ID NO: 135276 - DNA, 542 bp, Arabidopsis thaliana
ccagaatctccggtgttatacctcatgagctctctcactccaccaatcttgtgatgcttgacctcagcaacaatcaactgtctggtccaataccttcagaagtcggaagacttaggaaactgaacttacttgtactgcaaggcaaccacctcgattcttctatacctgattcactttctaatctcaaatctctcaacgttcttgatctgtccagtaatctcctcactggaagaatacctgaaaacctctccgagttgctcccaacctcgattaatttctccagcaaccggctctctggtcctatccccgtctcattgataagaggagggccttgtaggaaagctttttcgggttaaccctaatctctggatttccacccaaactgctcggttcatcagcatttgaaggtttcccgattgtgtccaagggcctcacgggcaaagaagaagttgtgcgccctctgggcggtacttgtcttagttttcatcctagtcctaggggtcatcatgttttacttgagacaacggatgagtaaaaacaga

SEQ ID NO: 135277 - DNA, 446 bp, Arabidopsis thaliana
agttattaagcttttaaattttataaataattaattattatcttaactaatcttgatcttttttattttgtatttttttggttagctggaaaataaattgtcggcaattacagatcaaaatgaggcggagaaatatgtagatgtgattgacccaagggatattaagattgggagcagaaaattttatagatacattggatcacttactactcctccttgtacgcaaaatgttatttggaccgtcgttaaaaaggtaaatactcatcgttattttcttctcttttttacttaatcaaacatagcattaatagatcattacaaggtactaatagtgtgaatatccatatccaaaagggtttatccatctaccatgttacccagggtctcatttttcccaattttaaattttgacgttttattttaaaatcattcgtttaaatttattt

SEQ ID NO: 135278 - DNA, 580 bp, Arabidopsis thaliana
caacaaagaaaggaatggacgaaaacgtcttttatgcggcagtaggtgctttgcaacacaagataagagcttcttattctgaggaacttaggatagaaaaatcagaactggtgtctatgatgattttggatgggtgcttcattctcatgttgttacttatcgtgtcaagaaagatagatttggatatgaataaggatccaatcttcacgatcccctggattttggcatctattcagagtgatcttctcctcttggaaaatcaggtccctttctttgttcttcgaactatatttgataaatcaggaatagggtcacctggtgatctaaacaggatggcgtttagcttcttcaacctctcaatagataaaccagatacatattgggcgaaacacagagaccgcggggctaaacatcttcttgacctcaaccgtaagaccttcatacctagcatgagatctatgggtgaatcagaaacaacaccatcctcgaaatttcaacactctaagggtaaatccggaggaagtatcatcgtcagagtctacatttccgttgatactgtcggccaaagacttcgcctcca

SEQ ID NO: 135279 - DNA, 618 bp, Arabidopsis thaliana
  unsure (1)..(618): unsure at all n locations
tgacaagtcttcgtttttgaattagggtttttggacaattcttctcttcttcggctgcaaaaggttttcgcaagatatggctggctctgttggtgaggaaactgagccagaatggattaagagagtgaaattagagggagctgttccatgtcttaagccagacgacaactgcaaaaatggttggacgacgccatctcctgacacatttatggttagaggaccaaagtatttctctgacaaagttaagatacctgctggtgatttccttctaaagcctctgggttttgattggattaaaggtcctaaaaagctttctgagatcctgagttatccaagcagccgaatcagggaaagttatccgatgaggagtttcaaaaaagatgggactaaggccttttgtcctgggcattcaatcctccagcttcctcacaaaggcaattccagtgctgtggcttactttgttaccccagggcctttccttgaaggctccctgatggcccggtttttgaaaggagattattgggtccagaaatcgggcttancttgnttnaanaatttnaaagcccttggtttngnaacnttttgggnaancgcctttntttttgcgccctnttttgc

SEQ ID NO: 135280 - DNA, 518 bp, Arabidopsis thaliana
  unsure (1)..(518): unsure at all n locations
gcactggaatacatgccagagggtctaaggaggcaaattgataagtgcttgtctatgttgaaagaagcacagctaagcgggaatacaaaccttggtgtgtctgtgctattccctccttgcggactcgaaaatgtcagcttttccatgaatcctcctctgaatcagggtgatatgattgctcccattctgcatggtaaagtatcaagcaacactagtagtccacggcagactaatcattcatatatcacaacttataacaaagcaaaagaagctgagattcaacgggcacaagcgctacagcatgctttagatggaaagggaatggngncagagatgctaggaatttttaagggttcaaaaaccaaggggcgcaanaattgggtgggttcagcttttaaggcttncattcattcttttnaaggnaagggggaagnttntnaccccaattgntcccaggaagccttaggngtttggnttgnaaaaattcngcttttttcgnngctnttttggcaaaccat

SEQ ID NO: 135281 - DNA, 480 bp, Arabidopsis thaliana
  unsure (1)..(480): unsure at all n locations
aaactgtgtttccatatctctagaccgtttagtcggagaaatatcaacgttggtcgacaaatagtcataattcgccggaataccaaaattagagaaatacccatcagtcccagaaccagacccactaagaaaatcagccggagaactattctgacggtgaaagccaccaccttgatgatgattatacaatccttgctcaacagaactcaggaactcgaacgagtcgtcacgactcgttatcactcctccagagttattattaccagtaagcagctctgttaaacaaaggttaggttttaaaccttcttcttcatcttcttcgagtagggtttcaatccaagtagctgggagctgaacgggtccggggataatccactttggctcacccttcctccttcttcaccaccaccacggtaattcccgcgggttatntgggggggtttcatcgggggcttccccggggaatntntttnnncgggg

SEQ ID NO: 135282 - DNA, 386 bp, Arabidopsis thaliana
  unsure (1)..(386): unsure at all n locations
aagaacgtcaagggaagaggcctctcttgactggtgatgtgcaggtcacgttgtttgtaggtgtgggaacattaggggaacttatctttacggacaactcaagttggattagatgcagaaaattcaggctgggtttaagggtctcttcgggttactgcgagggaatgcgtgtacgcgaggcaaaaacagaagcttgtaccgtgaaggaccatcgtggagagttgtacaagaaacattacccacctgctttggatgatgaggtctcgaggttggaaaagattggaaaggacggggctttccataagaaactcaataaagcagggatctaccantgttaaagaaattcctncgtctttatggtcaaagactcttcagaaactaaaggg

SEQ ID NO: 135283 - DNA, 523 bp, Arabidopsis thaliana
gcgtccggattctctctctagcgatgtcgatcaaaccggagaattctccgattccgttgattgggattaataatacgtgtgaaatcatggtgtctttgagttcatgaagaacggaggttaacctaatcgaagatttgatttgggactgcgaatgagagagaagacgttgaaggctcaaattggagatttctatgaatttgttgatttgagagaagaattgaggctcattcgtaacggagggaaggtgacggtgacggcgatggtgaatttatagttgtacacggagctggaactcatcaaggacaaagaaggcaaagctactcatctacttaagttctgctccaaagctgaaatacggagattcagatcctttgttcccatgaatcaactacagacgctttaataatctgagggaatcttccgtgccaatatggagagatcatcatcatcatcatcatcatcatcatcatcatcatcatcatcatcatcatcatcgtcatcgtcatcgtcatcatcatcgtca

SEQ ID NO: 135284 - DNA, 414 bp, Arabidopsis thaliana
  unsure (1)..(414): unsure at all n locations
ctaacataagattgtctgaaattggcgtccaagaagcagatgttaagaatatattctacctaagagaaatcgaggatagtgatgagcttgccttggctatggaactatatgtgcaaaggggaaaggccgccatcattggcggcggtttcttagggcttgagataagttctgctctaagggctaataatcatgaagtgaccatggtttttccagaaccttggcttgtacaccggtttttcaccgctgagatagcttcattctatgagagttactatgccaacaaggggagcaaaatcatcaagggaactgcagctactgggatttagcaccaactcagatggggaggtcactgtgggggaacctgggagggttgggaggacccctggangttancataggttttcggcttggntt

SEQ ID NO: 135285 - DNA, 584 bp, Arabidopsis thaliana
  unsure (1)..(584): unsure at all n locations
gggaaatcacagacagccattagcaaattcaagggatctgtgttagtttacccaaaagacaaactcccatcaaaaggggggaaaatcgattcaagtgtgatggcttttggtgcagcatggtgccaacggtcttaatcttctagaagcacagcattgttattctggtggagccacttctaaatccagctgcggaagcgcaagtgtctgggcgtgttcaccgaattggacaagagaagcctactctagttcatcggtttctggtatcgggcacagtggaagagagcatctacaaactgaacaggaataagaatacaaacttaagttcatttagcagcaggaatacaaagnatcaaggtcaacagttcttgacactaaaagatcttgaatctcctatttgcttcaccaacagcagnaaccagcagagntngaccaaaacccnggggggggggccaggngatnttgnggggtntttccccccctaagttggttnaagatttnccancccgnggggggnttnnggggaagnatttnacccctattaacttcaaacnggttntgcntttggaaaggttcagggggtttgt

SEQ ID NO: 135286 - DNA, 393 bp, Arabidopsis thaliana
ctctctacttcgaacaggaagaagatagattctctcagttctttcttatccataaaaatatacctggaatcttgtttctatacttcttctgtttctcatactctctactaatactaacatttttccagaattttgttaaaccctacaaaaatttgaactttttaaaaccctagaaaattccaaattcgtaaaaccctagccaagttcctctattgcgtgaggggaactcatcagaacccacgaatcgaaatgaagaatccagaaaaacccttacttctgtttctaattttagcttcaagcttagcatcaatggcgactgcaaaatccacaatagagccttgctccagtaaagacacttgtaactcattgctaggctacactctctacaccgac

SEQ ID NO: 135287 - DNA, 538 bp, Arabidopsis thaliana
  unsure (1)..(538): unsure at all n locations
ccnttgggggnaagaatntggnccctcacnacntctgttccggtggagtgaccccccggttgtaaatatgggctacttcttcccggtatccaacaagctggttaatttatcttttgggattaagaataaccgaggttggaaattgctggcaaagatgcttaagcagtgtcccaaagcttgaaactctaaacatccctggatctcaagggttacagaagagatgtctcccatgcgtcggacccaagtgaagtttcaaattctggattatggaggaactgatgaagagtttgaacagttaaagagttttattgggagtaaacgtaatgcagaagctgtggtggatgatggcacaagattgcaaacgaaaagaggatgtaacgatgcttcttggagtttcactaaaagcaaattgccattccattgtcgcacaagtcatctagtttattcatactaccctatgtaaaaacttggtcacatccaactcacttatatgtgactatgggattggagtttgtttcccgttccttatgactctgtt

SEQ ID NO: 135288 - DNA, 424 bp, Arabidopsis thaliana
  unsure (1)..(424): unsure at all n locations
gcgtccggacggttaagaaactatcagttgactacgactttcatcgtgtggatgaactgtcatttgacctgccaaatctcgagtgccttcactactctgatttcgccttggatgagtacccacaagttaacttgcaatcccttgttgaagctaagctggaacttcatccggctgaacatgtcgagaggccggatataacgaatctcattatggggataagaaatgttgagatccttcatctatctcctgtttcggttgatgtgatctcttcgtgttgtaaatatgggctacttctaccggtattcaacaagctggttnaattaatctttngggattaagantaaacgggggttggaaaattcctnggcaaaagatncttaagncagtnnccaaaggtttgaaanccttaaannatcccnggntc

SEQ ID NO: 135289 - DNA, 537 bp, Arabidopsis thaliana
  unsure (1)..(537): unsure at all n locations
acgttacgccccgggcttaccaaccgngnttttgccccccgnaacgttctccccggtggattggtccgatctggaaagcttcccggaaaggaattggggaaaaccaatattgctgcacaagacttcctcgccaacattgaacgtaagtccaagcaatagtgtaacgtaatctactttatgttcggcaacatatccttaatgggccaggctttaggtctatttgaaaaatatagcccatcaactttatttgatttcttttacatgtatgtagaaatggagattccacaccaagcagggataggacatttctatcacattttctatgaaggatgtctcactgatcacgaagtcggagaagacgaagaagcttctagtctttatcctgacgtcaagtacaaacgcatggatgattacttaagaatgttcctctgatttgaccaagtcttatctatactaaatccccatatcaaaagtttgatgttttatattcattcatgttctgctatatatgcaaaattaaaaatatattcttcatgc

SEQ ID NO: 135290 - DNA, 843 bp, Arabidopsis thaliana
gcgcatctgaatttggtatggatccaccacgtatgggacatgcgctaccgcccggaagagaaacctttgaccagaaaatggaagtgcgtcaggcgatagaggctgccggaattccttacacttacgttgtgggtgcttgctttgccgcctacttcgccggaaacttgtctcagatggtaactttacttcctccgaaagaaaaagttaatatttatggtgatggaaatgtaaaaggtaaaattttcaaactcttttttaactctttgtggttatataccttttaagactttaaattagatcaagcccatctaaaccaatcaatttaaaccgttttatatttgtagtggtgtttgcggatgaagatgatatcgcaaaatacaccgcgaaaacgttaaacgatccacggacattaaacaaaaccgtgaatattagacctcccgacaacgttctcacgcagttggaattagttcagatctgggaaaagctaaccggaaaagaattggagaaaacaaatattgctgcacaagacttcctcgccaacattgaacaaatggagattccacaccaagcagggataggacatttctatcacattttctatgaaggatgtctcactgatcacgaagtcggagaagacgaagaagcttctagtctttatcctgacgtcaagtacaaacgcatggatgattacttaagaatgttcctctgatttgaccaagtcttatctatactaaatacacatatcaaaagtttgatgttttatattcattcatgttctgctatatatgcaaatttaaaaatatattcttcatgcaagaaaaaatattatctttggtttttaac

SEQ ID NO: 135291 - DNA, 674 bp, Arabidopsis thaliana
tccagcttgatctcatcaccaccgatgaagggttaaaagcggcagtgcaagaacaaagagcggcctcaacaacggggatgagctcaatggttgcagactcatcacctccgtatgtgaatctcaagaaagagaagagaagcccagaagaaaagttagaggcatcattaggacctcttcaggtccaacatattgttcttgaagagagaatagaaacaaaaggaggtgctccaagtgtcgaacaccagttcatgcccaccttcagcggtcaatgttccgcttctgcttggcctgagactgctagagaggatcttgttgccggctttacaaatggtagctgcgatggggatttatgtgttggactacgtttaggagacgatggagctaaacgcagacgcactcaggtggccaacgaaagaatgagacccgccgaatagataaaaatgctaaagaacttgaaagtttgtcttgctctttgccaacacttccattgagagctttggtttggatttgtctcatggcaatcgaacttgaacatagccaaatttagcctcagttggatgcggttaccattctcgtttattctgtttgtccaatcccatatctcagcatcattgtatcattgatgtccaaaaatgtacaagttatcaaagttgagaaaaaaattgttatgtaag

SEQ ID NO: 135292 - DNA, 534 bp, Arabidopsis thaliana
gcgggaagaaaaaccaaggaagagcctgaccagcagtgtcagctgtggttcactcaaaaccaagaatccgtttagccgtgtgaaggacgaaggtgagaacagaaacaagacgggattgtcgatgaggaagtcgtggtccacggactcccttggtctgctcagccagagcaaccggttggggaagacggtctgtatctgtgctcctacaaagcatgaaggctcattccgttgcaggcttcaccgttcatcagccacaagccatggtgcagcaactgcagaacttcatcttccccaaagcccttgctttcttctcgtcgtctcggtgaccaataatgtcacatagtctctctttcgttattcacaaaaccagtatggtgccgtcctgattgtctagaagattgttttttcctatccatgtgatgaatccatttggtatccatgtgttcatataaaacatgtgcttatgtgtatgttgatgcacttctaaatctttttttttttggtggtggaaatttcacatatatgtttcttgcc

SEQ ID NO: 135293 - DNA, 509 bp, Arabidopsis thaliana
  unsure (1)..(509): unsure at all n locations
ctggttccatcggaaccatttggcaagggtctagaatctgnaagngcttattctccagcccgggttccaagattgggggtagaattcttacccggggaagtcgagatggttctgaaacttgggttactctgcaccaaatgctatgccagaatcaaggcctgcgatggaacaagtggtgcaataccttaaccaagacttacccttaccgattttctcgccgtctactccaggtatcggggcttttatgcccagtttctatggaagcattatctgccattggggtctccagtgtaaggaactcatcagtttctatgtttgttactcacacaatcttggacgggcatggaagataagatctaagaaattctatactctatactcttttactctctgcatctaaatctgtttagctacgtaaatgttttaacttaatgtattgactatgttgttggttgatgttgtactcaaacttctttaggtcatcaattgacaaataaaacagttcttct

SEQ ID NO: 135294 - DNA, 416 bp, Arabidopsis thaliana
  unsure (1)..(416): unsure at all n locations
tggccaggctgaggatgtgaacactctggtccaaccacaatggtgctttacttcaccggagccaccaacattctctacacctttggtggccacgccgtcacagtggagataatgcacgctatgtggaaaccgcaaaagttcaaggcgatatatctactagcgaccatatatgtactaacgctaacgctaccatccgcgtctgcggtttattgggcgtttggcgataagctactaactcattccaatgcgctctctcttctccctaagactggttttagaggtaccgcagtgatcctcaatggtcaattcatcaatttataaacgttcgggnttnnggcttaaaacggttataatttttttgggggggaaatttttangggttcnanttgnnccggnggncttttttaaaaagggcc

SEQ ID NO: 135295 - DNA, 1001 bp, Arabidopsis thaliana
  unsure (1)..(1001): unsure at all n locations
antcctcccatttcatgcntgcgtcccttctatccgntgggcccctntaggcaaaatttgtggccncaacncctgcgntnnttgccanaatnttacgggcttccccngangacccntagggcgattttnttcgaacnatgggnacatgtgtggagcaaatgtctcatctcgtcttggacatgcggnaggaggattatcaattcccaaccaccacgcctgatggttcgaatcccanttgctacattgattactcaggttataaacaatcatcgtggacatctagagagctgcgtgatcatgcatgtcccatatcaaggtggaaatggaatgctcaattcttggattcgattactgagttgcatgaaacgcacgaaagttctcacacttagaaccattatgatacttgggatcgaaagttcaaaacttttaacttttctcccgactccttgtcccatccaagtcttatgtcactctcgctacattcatactttctcgaaagctcacatcccttgagaaactgctcgaagctttggaccctcaaactattatcaatcttcgctcccgagattggagtattaacagggtactcgcatcttgcccttgtctcgaggtgcttgtactaggcatctgctgcttcaaaaaaagtagggttcctttgaagattgagaacaaaaaattaaagctcttgcaagtgtcttctcttgaacgcattgatgccattgaagtgtcaacaactagtctagacattctcgccatcatagatatctgctgtcggagagatgacctttccctccagtccccccaactccaatttaatagaaacttttgggttctagggccttacgtgcctcacatcagctacaacatatcagaggaaaagagcattgggaattgaagaattttgtgaacaccatatatgaaggtgtgaagacggttacgccaagtctttagggtttatggactcgtaaaatactggagctcgagattatatttaaggataa

SEQ ID NO: 135296 - DNA, 560 bp, Arabidopsis thaliana
  unsure (1)..(560): unsure at all n locations
gacctgaagaaaaaaatattattgtgaagttcgtatcaaaagtgttaatggggtatgtaccctaaaccactttcggcaaatttagattgaaaagatttgaacttttgaaccaattaaattcgattagaaacatttgatggtaagcttagtttgaagtgcctgtagtttggccactgccgcttctatctttaacctcttccttgcaggaaaggttgacgtcttgatcatcatcttctcgaccacagtcccttgcctaatcaaacacgtcatcaagggcaaactcttcctctggagccggctggaaggttatacatccacacaggtatccacgcggggaatttagcatggggggacggggatctttcctattattagcccccccacaacttcttatcccaggacctatttcctccctagggacattggtaacccctaaaaaaaacccggggncccggttttacgggggccanaacnaagattggnggaaccccncaanccaanggggggnccaaatnttatccaaggcttccccgaagggnncgtggggnccganggccttc

SEQ ID NO: 135297 - DNA, 427 bp, Arabidopsis thaliana
  unsure (1)..(427): unsure at all n locations
cccacgcgtccgcattgttggcgttggacttttgagcatcatttctggtgtggttatctttatcatccgaaaaagaagaaagcggtacacagatgatgaagagatacttagtatggacgttaagccttacaccttcacttactcggaacttaaaagtgcaactcaagattttgatccctcaaacaagcttggagagggaggatttggccctgtttataagggaaaactcaatgatggaagagaggtagcagtgaagctattgtcggtgggatcccgacaagggaagggacaatttgttgcagaaattgtagcaatttctgcagtccaacatcgcaacttagtaaaactttaatggggtgntncntattgaagggngagnatcggttntnttggtatntgaatanccttcctaaacgggngtntttta

SEQ ID NO: 135298 - DNA, 500 bp, Arabidopsis thaliana
gtggacacacgttttcataaagtaaattccactcggttggggctaaagctaaacatagcagcccaacaatacataaccataccggtttcaacaaaactaatgataatgtttgttcatttatatttatgagtaacaggtttggaaattttaagccacaaaaataaaagagatcgtcacttgtgaagtatgctcttcttcacagttttttgcttcttattgctgtgatgcttttgtctttcagcagcctcctgatctgttctctctttccagctactctttcgtagttttatcggacgatttccaacatacttaccattcatttcttttaaggctgctgctagatccgcaggttttaagaaactcacaaacccataacccctgggtttaccagtccgcttatctccaatgaccttggccatattgaaggtgggggatctagcaaatgcttgggagacaccctcatcattcacttcgttcccaagatcaccacagaacagacg

SEQ ID NO: 135299 - DNA, 375 bp, Arabidopsis thaliana
ctctgaccatttgaacttttgatgtttgaagtctataattacctacgcgagaccttcgaatcttcccaaagtggcgaccttgaattaacacctgcataaagtttccatttttcattcttcgtttcgtgatcatggaggaagaagatagcgtgattcctaagaatacagaaggagatgggcgtgttggaagtgatcttgaaggaatccgtaagccaaagaagatgaagaagatgagaagcaggaagagtgatgataaagagacgtggaagatgatggaaaagttttggatgggttgtctccagagctgaatcagacgaaagtggaaacgtcgatttgactggtgatttccctggcgaacgcactgagccgactcac

SEQ ID NO: 135300 - DNA, 533 bp, Arabidopsis thaliana
  unsure (1)..(533): unsure at all n locations
gatgaataaagaagtttactgctgagttttgttcaaagtacacgttaatcggatttatgaggcggcgattacacagactgacccaaagttggtaattgcggcatccgacttacccgaactgcatgccgttttgcaaaatctcaaaatgaaaaacggcatggtttccttagtaattcttactctagttctagcaaacctgacttgttcaattgcacatagagatgatcaactacaaacacagctaatgtttcaaactataagatgctgactacgtctgatgtactcaagcttgaggacgttccgaaattacggtgctttccatcggctaggttagccagagagtagccttgttcatgggagttgattaatcaatagagtctccaaactgacaagccatgctcttaccttgancntaagggatagaaacttgaccctgcagtccttcctttgctcgtgngacgatccgcctcaagatatcgnctgccatgaancctnacngggncgatnanacgctgagccactgantggggggc

SEQ ID NO: 135301 - DNA, 743 bp, Arabidopsis thaliana
caacccacgggtccgttcaaaaattgaaattcttaccaggaagaaccgacaacgagatcaaaaactattggcattctaatctaaagaagggtgtaactttgaaacaacatgaaaccacaaaaaaacatcaaacacctttaatcacaaactcacttgaggccttgcagagttcaactgaaagatcttcttcatctatcaatgtcggagaaacgtctaatgctcaaacctcaagcttttcgccaaatctcgtgttctcggaatggttagatcatagtttgcttatggatcagtcacctcaaaagtctagctatgttcaaaatcttgttttaccggaagagagaggattcattggaccatgtggccctcgttatttgggaaacgactctttgcctgatttcgtgccaaattcaggatttttgttgggtgatggggtatcatctgggatcgggttctgtacctcattttcagacaactttttgttcggggggctcatcaacgagctacgaccaatgtaaatgttcggagagaggtccaagtaaatatagtttagggtttaatttaagtagacggggataaaaaagagtacataaacaaatactttgtatgcccaacaaatctgtaatttcttcactatataaagttataaacattccttttaaaaaaaaaaaaaaaaaaagggcggccgctctagaggatccaagcttacgtacgcgtgcatgcgacgtaatagctcgttgatagtg

SEQ ID NO: 135302 - DNA, 398 bp, Arabidopsis thaliana
ataagaatgcgtttgcattcataaagaaactgtagttatttgtggtatagttagaattcctttgggggttatttgaaaaaaacattggcgcaaacagaagataacccacaaacttgaaaccaataatgggttggaacttcaatgcccaatttgggcagaggaaacccccaaacttgaaaccaatttttaacacgaaattgcggcgttcaaaaatcaattgaaaaattgcttgaagtcactgatcttactcttttggttagatctccaagaacttgttcatatttgttccaaaaacatatgcattgcttgtttggattttggttcatggaactgttctttgcagcttcacagaagattactacagggtcaacattccctttgacttggtcattttggtt

SEQ ID NO: 135303 - DNA, 589 bp, Arabidopsis thaliana
ggccgccctgttgggagaggtcctggcttttgggcttgaacctaatacgtttatttaatttctaattataccttgcacactactctgggtacccaactcctatgaaataatctgggtggggagggaattaataactcaaaatgacggtatacagttcttggaaccaagactaagtatctcgattcacgagatgattttaaaacataaaggaccagctttttaaccttgagagaaacgaacaggtaccatcttccgatgagaatacaacgccgtctcagcaccaccgccaccacgtgcagcttatttagaaaatgggtactcactcaagtggtgggttgggctttctcaacactggtcctcagaagggagatgacatctcctggctccggagctccaaacactgaacttccagcaacaatacagttggcgcctgctgcagccgctgtgtcgatcgttgaagggcctaagccgccatccacctgaatatcaagtgttgggtatttttgcctcaatgcccggaccttgtccatcatgtcaggcataaacttctggcctcccggacgcgtggagtcgacccgggagattccgg

SEQ ID NO: 135304 - DNA, 763 bp, Arabidopsis thaliana
gattgtcccagaaattagtccacaagcaaaagcacacacagagtcattaatacattgaagagcataaataccacacaaagaactaggaaataaaccatcaaagtttacacttgggtttgattcttgtaagtaaataaacaaaggtcactcatctttcctttagttggcttccttggatcatccctggaccttcgttaattgcaggcttgaaggtgtcttccataacttaaaacctggtcaggttctcctaccatgtggttgcacggtttcaaatgcctctacgagtaatgcaactttcctcttccttggctggggcaagtttgctcaacagcacgctgcagagcataatcaaacatccaatccctctgaatttctcctctcacctatggccttgatgcttgagggccacttttttcagcatcctcatccattacagctggaaggtaatttggttcccttggattaaattctcttaaatcctcggtctctgcaacgggtttcttgcatttgatgatagtccatgaaatggtagagcctgactcttcttgtttgcagggttttcgtgtacggttaaatggaacctttgcattttcttctgtcatcaatataacttcagtctggcctttagacacctctttgcaatcttcagctttatcctttagtgtctcattcaccagtagcatctttatcctcaatagcatcacttgcagctcggacgcgtgggtcgagccggaaattccggaaaggtactgcagacggtcac

SEQ ID NO: 135305 - DNA, 677 bp, Arabidopsis thaliana
atatgaaaacacgtttcatatcctataatttaggaacatcgatcatagcggcggaaataagactgaaagccgatcgggagatctttggaccaagtaattattggcaacgtacagcgctttatccactattgaataagtgaatcagagactctaatttgttgcctttaccaaatcaaaatacatatactaatgggaataagttgagagaaacatgtaagggcttttgaatgcacatggaactatcaaaactagtccaagtaccagaatatcgccatatctatctcggcaacgtacagcgctttatccactattgacataagtgaatcagagactctaatttgttgcccttcctatcaccaaaacgatttcatataacatgtaacacataagatttcaaacaaacaaactaggctcagattataaaaaggagtttacatcaacgagcgaaaaacctctcaaagtttgatggtaatcttgtttcatcatcatcgccgaagtaaaaataaaactaatgatcttagatctaaagcctcagaaagtggaggtaatcgtcaaggagaaactcagatggtacggacaatatcaaacatcacaggctacgatcctaagataacctctaacaataactaaaagatgcggacgcgtggatcgacccgagaattccggcgaagggccgc

SEQ ID NO: 135306 - DNA, 756 bp, Arabidopsis thaliana
atggaaactgtaaatttatttttacctaacctttttggtaaatttggaatatctttcctgaaaaaacagtgcccacaaattccaaatccaaaggatactaacggtaacggcagtaacaataacaacggtccacgaaacccaaacccatctgggtatgacgtcatcagcgcctccgctgacgtaaaaccacgtcatcttaacgataagcaacggcgctagaacgcacctgcagacgctataggacgcgtaaaacggcaccgtaacgaaccggtgcaaactcaccgctagaggcgcgtctttcccacgcgcatccgcgagcgtccacgtgttctgacacgcgctcgtggcctccgcgacgactagcagcgcgagcagagcgcaggcgccgtgagcaaccatgtaacggcaggtgaggaaaacgaaaagcacggcgaggtgatgagcggcgaaaagcgagtctccgccggcgggagaaggaaacacggcaaggtggacgagatcagcgaggaaataagcggagctgaaatcgagaattgagttttgagattgggtgttgacggaggagaatccacggttaggatcggagagtaaggcgttcgtggcgaggacgacggcggagacgccgtggaggagggagattaaacagctggaagctaaaggacgagtctccggagtccattttttgaaaatgaataagtaaccgagaagataaacgcggacgcgtgggtcgacccgggaattccggtccggtactgc

SEQ ID NO: 135307 - DNA, 424 bp, Arabidopsis thaliana
  unsure (1)..(424): unsure at all n locations
aggatcaaatgttatatttacatagaatggaaattaattccggggatttttgtgttttggcaatggtcttgtacaatacacataacaaccaaataaagaacatattacccaccaaaaagataaaatttggaattttgtttttttctcaatctatcaaaaaggaaacttttgaaatttggagatgaataataattattatctcaaacaacgattcttttgcctttgaccttagaagccattcttctctctttgttaatatcgtttcttctccttgtggttgantcaggtgctccaatggganccaaaggggctgaccaatttgaaatggntctttggagtatgangangtnaatgantttgtgctatacggnatctctganggatccatccctgaaattcccctgaaaaccaatgaaccgcctga

SEQ ID NO: 135308 - DNA, 569 bp, Arabidopsis thaliana
  unsure (1)..(569): unsure at all n locations
attcaaaaagagtttgtattataaacctttcacttcatggattggggtaatctactcattataaaagcacatctaaagagtttataaaacaacaaaacacaattatttcaccaaggctcatcaggataatcgaacggtacaggttgaagaggggaagtcttgcctagatccgagtgtacgaaaccatatttacgcatcacttgattatcagcgaaattaatggctttgatcatcccattccaacacgtgtcaccatcgtacatcttgttatgatcaccactacaaggttgacatcccgtaaaatgcgtcacgaacggtctccgtttgcttcctttcccggcctctttctccttttaaaaaccggtcctcacgaaacgcagcgtatcgttcggtcactttctctggngggcgggctangcaagngggggcttctctttccatnccagaaccgtccgttacgtnggtaaccnggangnttttaancaanacctcgaaaaaagncctccgggaaacttgggaaaanctnccgggtgaaggaagaanaggngtgnaactgccnggnggtnctt

SEQ ID NO: 135309 - DNA, 456 bp, Arabidopsis thaliana
  unsure (1)..(456): unsure at all n locations
cccaaattatgttgggaacattgatatatatgataaagcgggttacacaacatacatatatgggctgcaaaaaacacaagcattcattaacaatattctgcaagccatcttagtatgttttaataggccttaaaaacacgtatagcataagtatgtttaatagagaagaagaaaacacaaattgtaaaagacaatgttatataggccttttgagtggactgcaaagtttggaggcaaaaccataaaaacttcaacgtctagggggtccttccgggttttaaagaacctttcccctgattggagatccaccccttttggcgacttcactcggttgccaaccgggtccgtaggganatcctccaaaggnccctaagnccncctccaaaccaggggcaagcncncggcgnncngggaccanccttaggccatgggagnaccncttgccgaattcggaac

SEQ ID NO: 135310 - DNA, 572 bp, Arabidopsis thaliana
  unsure (1)..(572): unsure at all n locations
ttttttaatagaacattcttcttttatttaagttaattaagggtaataaataacattcactgctaattcttaagaccccaccccaaataaagagtacagagtatatatatttctacaaatacagagcaattacaggcaacgatttgtcttcttgtctgattcacaacaagaacagcagaaactgatagttgttgtggtgtttcatttgagctccaagaaacttggatttggattgtaagagttatctgatgaagaagacattgaagacacattaatgggatatacctccgttacttcttcagtcttctcatcaaagtagaccacatcttgcattgttagctgggggatantcgacgactcccccccagatagagggtttcgcggggggnanaccgngtttccatgggccaaccggggccttccccagctaacaggggttccagttgaagccgcnccagancatcggcaaccngcctgactgcggcacaacgggtccccccagancctaattcctctccagcgggggatcgtgntcngaaancannagnctaccacctcgncccgggaaagtt

SEQ ID NO: 135311 - DNA, 596 bp, Arabidopsis thaliana
  unsure (1)..(596): unsure at all n locations
agtagaattatcagcaattatttgggtatgctgtaacgaagagcgaaaaacaatcgggttgtaacacacatatatgatgttgggtaattactcgccaaaagagaattgttcctctagctagctaggattaatctgaagaacatatgcaggtaatagatgatgaagttgtgtatactatagcaatctcattaattggcatatatgaacgaagaaggtcagagcttggggatatagtgagcgtcactccatgaacgcccgcactcaacatgggggctccaattgctgttgacatgggaggctttgtagcgtttccagtcacgaagaacaagagttagatcaggggatcttagcaaggatgtggcggcaacagtnggcctgggacggtggtgacaagcccatgtccatggctgtcntggccanaagccactggaattncggtaatngttgaggaagcaaacgttgaggccaanctggtaaaagaaccngggctnggggnccntaagggcatctggtcntcatgccgccgattnngcccatgcgacattctggaagggnntgctnttgtgccnaccggaaaccggtncaaggcccacagc

SEQ ID NO: 135312 - DNA, 518 bp, Arabidopsis thaliana
ggatcaaacataaagcaaaataccaatagcactacaaagatctgtctaagtagggaatatcaatctgaggcaaacaaaatatctgatcaaacagaacaagactgaaaaactgaagagtagagagatacatggtgttaaatcactggcttggagaacggtctccattttgggctccacgagggactggggtcgggctcctgctctgcctagggacagggctttggctccttgcttgttctggcgtgtagctcctgtttttctcttgggctcacgcttcttcttgggcttctgctggggctcttaactctcccaggacttccactgggaacccttgagccattatggggtggtgagcgagagtatgacctctccttctcatatcgtctatcctgaggtgagacagacctagattgatgtcttttagcaggaggagaattatagccgcggctacgtgatcgtgatctacgaccacggcgaggaggagaccgagagtaccgaggaggagaacgtcttctctc

SEQ ID NO: 135313 - DNA, 557 bp, Arabidopsis thaliana
  unsure (1)..(557): unsure at all n locations
gcctcattaattagagctaatagtgatgctgcacatgtaaatgaggttcataaagcaggcacatattttcttttcaccagtggatgaaatgactaccaaataactaatgattgagctgaaacgtaggtataaacctgatgatctcggggaggtcagaactcgagaagcatcaaggtctcaagttttggattgatgagatgtatgagcaaccagttcttcggaatatcggatatgatctctgtgcatgtaggaagtcttaacaatagtttcccacttggtaccatttctgtagttttctgtaagatcctgcttttgggggttgaatggatgatatctacgtgaagtgatctgagaagttcctgaaggccagattatgacaaagccaagatccagaaggcctttgggaaaggtggtgccaaangngaccgntcnaaaccnctacggtcncaacaacccattcccctcaccattcacnactccaaacctnatttcccanagcttcagtcngggtggacccgggnccnccngcnaacnggncccnggaagncggnttngga

SEQ ID NO: 135314 - DNA, 556 bp, Arabidopsis thaliana
tttaaaaaataacgcagtaacttattataatcttggcatacaaaaatacataacgcgacctctaacattttaaacaagaacacaaaaaacttaaaattgagttgtagaagtttaaaaggttgatccatatccttttttaccagctcacatgttactttgagcatttgcatcggtttaccgatgaatctaatcggttccttggataccaaactttcatcaacctgcatcattcaggaacaacttcttgtttcttgttgctccatttgtccaaccttttggaagcttcttccacttcttttgtccaatctgttctaaacgtgacccacgccaaaataaacgtttgtataaccgtaccaccgatcatccccgtccatatacccttggcaccgaagttaaagtaaaacccaaagagagccccaagaggaattccaataatgtagtaacatccaacgttaaccttcgccacaaacgtttgccaaccgcatccaaccgccacaccagagaggacaggttggattccgttaaggacaagtgttacggcaagaagcggacagag

SEQ ID NO: 135315 - DNA, 397 bp, Arabidopsis thaliana
gtaaagtgaaagaagctacaagcgacaaaaagtgggagtttagtattctgtgcgggtgaggcacacgtttatacgatggaccaactaatgacagcatcagctgagttattaggtcgaggaacagtggggaccacttataaagcgttgcttgatagccgtttgatcgtcacggtgaagagattagatcccatttagtttagcgggtgtagggagagacaaatttgagcatcacatggaatcagttggtgctttagggcatccgaatttggttccactcagagcttattatcaggccaaggaagagaggttattgatttatgattatttgccaaatggcagtctctcgtctcttgtccacggtacaaaatcgtcgagggcaacgccattgcattggaca

SEQ ID NO: 135316 - DNA, 444 bp, Arabidopsis thaliana
  unsure (1)..(444): unsure at all n locations
cactgcttcttcttctctactttccacaagactttgacttttaagagcagaaaatggaaggaagaggtaaagtcagcatgatcaacggtggagatggaactagaaaaggtggtagagaacacagtagccgtccgatcccgaagagagggcaagtcaaagttgggatcttgcttggttttgctaattcttttgcttccatctttggctcaacgagaaacttccatggatcctaaacttaatcttctatcttctcatttcccacagaaatattttcattcactttttagaattttctgtggctttattggagtgagataagattggtgatcttgtagtgtctagtttgttgagttcaatttcattttgtcatttcatttttgtacaaatcctatgtaggcttcccttggtaaaatatatataaaatggggggggccnttccccctt

SEQ ID NO: 135317 - DNA, 438 bp, Arabidopsis thaliana
attcgaatcagattatgttatactgccctaagagaagaaagatttaagatttacaaatcacagaagaaaatgtcaacaaaatgctataacaaattgccaaaaccattaaagcgattcctataaatactaacacagattttaacaccagaagaaatggtgaacaaatgtaacccacctcactgtcttgctctctcttcgtctcgcctgtgatctgttaaaggccagacgtgagttctcctttgcatgactctgaaagactgaaacaggtcttgagtcagatatgggatcctccttgggagctccaagggtggctgatttcttccggacattggcgcccattgttgagtttcagaacatttttgtcacgcttgaagcacttgacaatgcactatatggctcttcaaagctctccctgcaatactcgaccatatattactg

SEQ ID NO: 135318 - DNA, 572 bp, Arabidopsis thaliana
  unsure (1)..(572): unsure at all n locations
aanccagncagcacattttacgngngatgccncccntatttggaccatcccccgctttagggagccggaatgttgggaaacccagctttaccagcaccagcaccagctgggggaggttacatgtatccgatgttagcgggtgctctagcacatggcgggttgggttctgatatggtacagtctagtcaaatgggtgggattggtgttgatccaagcgttggtgctgctggtctttcagctctaggttcttactttagaggtcagagtctgcctagtacttatcctgattcggatgctggtggaaaaagagggacgggtaaagattcggatgctggtggctcctcctttcatggctactcaaactattcatgatggtgtgggctgagcatgagaatgataaacatgcagtttctggggatttctttttaacatttctatcaaagtcagtacgttttagtttttttttgtattgttttttcttcctttcttttttttctgtttgatgtcactcttgtccgataacatacgatagacagtctgtggataaagtaatatcattgtgattattcgtt

SEQ ID NO: 135319 - DNA, 522 bp, Arabidopsis thaliana
  unsure (1)..(522): unsure at all n locations
agggtttggatttgttatgttcaagactaggaaaggagctaatgaagctcttaaagaaccgaagaagaggattcttaatagaactgccacttgccagcttgcttctatgggtcctgcggcttcaggaaaggggcatgatcaacctggtccggtgaagattagtatgggttcgatggctaatcatggacagtctcagcaacagcaggtacaaggtcaacatgtgtttaacggtggtggaatggctgcttcgccgtttatgttagggaaccaataccatccgctttatggagctggaatgttgggaaatccagctttagcagcagcagcagcagctgggggaggttacatgtatccgatgttagcgggtgctcttagcacatggcggggttggggtcctgatatggtacagtctagtcaaatgggtgggattggtgttgatccaagcgttggtgctgctgggctttcaagctctanggtcnttnctttaagggccagggttnccnaganntntccctnattngg

SEQ ID NO: 135320 - DNA, 484 bp, Arabidopsis thaliana
ctcttcgttcccattgtcgatgacgagtctggtaagcacgctctgcatcctcaagtttcctcctttgctctctctctttccttgaccgttctctttcagcctccctctcgtatctatccatttcttgctccttctcacctctttctctgcttcttcggtcatttctcttactccaatcaggtgagcttgtgtcaggcctattgtgttctccagaagtctcaacatcatttgctgcggcatcactcctagctacgtcagtgttggagtcaccatccttagatttgaaaagcaaattccatgccttgaaccatcagcaaggttggtgggtggtggaggaggcaaagggttggactttaacctttcttcaatagcagtttcaatcttttccatagcctctctgtctgcttccctttcttcatcagttaggacagcagaattcgcaatatcgatgttttctttaatcttcgattctccatccttccct

SEQ ID NO: 135321 - DNA, 470 bp, Arabidopsis thaliana
acaagaaagaagaagaaagcttcaatggagaagagtaatggccttcgagtgattctgtttccacttccattacaaggctgcatcaaccccatgattcagctcgccaagatcctccactcaagaggtttctccatcactgtgatccacacgtgcttcaacgcgccaaaagcttcaagccatcctctcttcaccttcttagagatcccagatggcttgtccgaaacagagaaaagaactaacaataccaaacttctcctaacgcttctcaaccggaactgtgagtctccgtttcgtgaatgttttgagtaaactgttgcagtctgcagattcagcaaacagggggaaggggaaccagagggttaagctgtttgatcccgctgattcctggatggttggtcccacaaccccttgctcagagtttgaaactcccaatattggtcctcagtgtgtttacagtctccttctttcgc

SEQ ID NO: 135322 - DNA, 328 bp, Arabidopsis thaliana
cacgtcacatgaacttaggccaatgcaacaagcccttcgaattttagaggtacggtctgcttattgtaaaaacgatttcgaatgggataatatgaagcgcctcgccttcaagaacgtagatgattccaacacaagactcatgcgcgagtacgtcttggagactagccatgtcgaaaccgattctgataagtgaaaccgaatatctcttcgaatcacattcatatatatagagtcttgagagtatacacacttgaaaccgtttgtacatacatatacataccattgtgctatgttactcccaggtttttgataccttaagttttttttt

SEQ ID NO: 135323 - DNA, 575 bp, Arabidopsis thaliana
  unsure (1)..(575): unsure at all n locations
aaggcaggctgcnatgggaccntggaacctgacccaagtgccccccctangcngtatccggacaaantcttnctgggngacacccttcaaggatctctgacctggttccagggaaaatccctttccatgccccttcgagtgttgttaacgggaaaactccatggtcctgagatgggcaccagtattgttctgatttacaaagctggaagtcctggtatagtggttccctcaaagctgggtttgtgtcccatggaggaacggtttaagattcttagggagatagactgggaagctttgaacaaagatgagagtgtgcctcttgaatctacagccacagtatcaacctgagaaaactcccctttttttttttttttccttcaatatttggttagttggtgagagaaagacagcccagagattttgattcctcgtgcatttcttgtttcccgaaacaaatggcacaaagaaatttgtagattataatgtatcagcaaagcaaacttaggaacaaaccagagagcttgtaacattatcaggccagttttaatttgctttcaatgctctgttttcttaac

SEQ ID NO: 135324 - DNA, 542 bp, Arabidopsis thaliana
  unsure (1)..(542): unsure at all n locations
ggtcaacatctgagggcacttccaaatgagaaactaacaaaacttgttggtgagcgatggaagagcgctggtatcttaatagaatccgaggggagttttgtaaatgaagctgtcgagcttctcaaggatgggattgagttggtgacagattcagacaaagtacttttgaacttgctttcatatcctctacacgctacattggctagccctgaagctaagcctgctgtggaagacaaacttcatgaagtagcagccagcctcatagctgcttatgacagcggagagattccaagcgctttagaagaaggacaaggtgcttggcagaaatgggtgaaagcctttggcaaatccttgaaacgcaaagttagtcatctctctaatgcagttaataccggaacaaaatctactttacttgggtgaacaaaccttccaagagattcttctgatgctggttccagggtaaaccacttttcatgccactccgagtgttgttaacggggaaaccccctggccngaaatgggnccaaattttctgtttaant

SEQ ID NO: 135325 - DNA, 745 bp, Arabidopsis thaliana
attgactgcattgtttagtcaataacttcaattgttttgcccgccttgaaggctaagattatgcaaggaggaaaaagacagataaacaaaatgttgcacaagtgaaaatcaaaaagccttttgaaaacaatgatctaaaattagtctgaaaccaacaatggcagctccgaatctataccagaactgaaaaaatgccagcttgaatcatggaatgctgcaaaataatcatctgattccgtctcaatagcaaactcgcttgtgactctttgtgcagctatgattcgtttggtagcacagatgacttctgcgtcaaatgaaacttgctcctcatacatctgaaagctggttcccaaacaatgcgattttcgacagtcgatccattctccaatttgcttgcaataggttgctgtatagattggcctcacagtgtggcatgaagaaaagagtaggctttaaagcttccctacgagcttgctcattcacagatagaacactgcatcccaaagattctaggtaactagattcagttgcagagagaactgggtcaaacacttcaatgttatcaccaacccaatcaaactctctcttcatcaagattgcaatgctcagctgaaacctcggagattcataagactcaatgctacctataccgtacatcaccatctgcaactgtgtttcagaccctaacacgaggcgaatctgattcgaaacctcaggagacttaagctgctccaagaatgctgtg

SEQ ID NO: 135326 - DNA, 380 bp, Arabidopsis thaliana
gagaagacacaggcgaagcagaagcagaagcggaagcaggagcaggagatcacgcaggcacagttcaaggtcacggtctaggtccccatctaggtcgttatcacgctctccgaaacgctcacgcagacgctctccatcttattggaggtctcccaggcgaagaagcagcaggtcaaggcactgaagagaggaaactctaattgttgcggcagctttttttgttgcctctgttcatgtttttttttttttttctgtgtgttttcgtatccttacgattcagtggtaaaatatggttttgtgggtttacatgggataataacaacgttttcatatgatgttttagaaatttataagatgttataaaaaaataattatttttt

SEQ ID NO: 135327 - DNA, 685 bp, Arabidopsis thaliana
  unsure (1)..(685): unsure at all n locations
ggctgtcagatggacatagccttatgttgtctacctactggcgcagttgtcgagttatactcagcgtaaatttgctaagcggtgaagtgtcacgtgccagccctagtgattcagattattcatggaacgctcttgcgctagatggtgatagtattgttgctgtgtctagcagcccggcgagtgttcctgaaattaagtatggaaagaaaggtctcgattcagctgggaagccttcatggctctggtcgaatattcaaagcccgatcagatactctgagaaggttatggcagggctttcatctcttcagtttaaaattctaaaagtaccaattagtgatatttctcgaaggtcttgccgaaggagccaaaaatcctattgaagctatatatgtatcgtcatccaagtctaaggagaatgggaaatggggtcccctaaattgcctgttcttcatcggggggtcctctttcgtgtttcaccttgcagcttcttccaggactatggcctatctctcctcaattggatatagtcagctgattataaattacaggggttcattaggatatggggaagatgctttgcagtctctacctggcaaagttggtcccaggccgtgaaagattgtctcttggctgtagtcatgccattgaatngggattcagnccgttggataaccgtgcnggtggt

SEQ ID NO: 135328 - DNA, 496 bp, Arabidopsis thaliana
agatttttatccattaatggaagataatcagcgaagcggattcagaaaaatctgtgtcttttgcggaagccactctggtcacagagaagttttcagtgatgctgccatcgaactcggcaatgaactcgtgaagaggaagatagatttggtttatggaggaggaagtgttggattgatgggtttgatatccaggagagtctatgaaggtggtttacatgtacttggaatcattcccaaagctttgatgccaattgagatatctggtgagactgtgggagatgtaagagttgttgcagacatgcatgagcgaaaggctgcaatggcacaggaagctgaggcccttcattgcactcccctggggggtttttggaacaatgtggggagctgttggagatgattaacatggtcacaaaccttgggatcccttaagaagaccgggttgggcttttgaaattgttgatgggtactataacaatttgcttgctttatttgatac

SEQ ID NO: 135329 - DNA, 561 bp, Arabidopsis thaliana
  unsure (1)..(561): unsure at all n locations
aggtgaagtctttttttttttttttggttttttacccaaaataccaaacttaactaacataatcagcaacattttcatgttggggacccaatgtgctgtttcatattgcaacaagatttgagttttcttatacacattgtggattctgcaaataatttagagactaaacttgaaatggaaatagcttatgctaaacaataataattgcttttattgcggcttgttttcttgtcccgggtaatctccgagttcttcaactttccagctttcgtgcgatgcaacatgcatgtgtgaaaggggtaatattcctccatccttctcccataagctccttgggctggtggagcagaaaccacaatgttacgngcacccgggcttgataaaaccctcctcggaaaccggnatccaataaagcaagcaaatggtanaagnacccancacattccataggccaccggctcctaagggaccaagtggggccaggtncatcccaaaggccccatgnccaaaccccagggngaagangccactcnggnatggcttggcaganntgaaaaccta

SEQ ID NO: 135330 - DNA, 523 bp, Arabidopsis thaliana
agagaatccatctaatgtcaaggcagcaaaattcttatctatggggcacaagactttggttcggtgtaaagaagaactggggatattaaagaatgcatcatcaattgttagagagtcgaactcatttgacaaggccctagaaagtgtagatgaggccctcgttagactggaaagcctgctacaggagttgtatgtatcaaactcatcgtctggaaaggaacaaataaaagccgcgtgctctgacctagagaaaatacggaagctttaagaaagaggctgaatttctggaggcaactttcagagccaaagcagcttcctttgcaacaagggaggtgacaaaaatgattcttcaaggaatcctaccgggggtacaaaaaacgggatttttaaaggggaagggccccaaagatccgcaaattagttcttggggttcaaggcaaaagttttagtccgggggtctggggggtctttgtacggccttcaaggaagaagcttgatcctgagttatcgggagatgaatata

SEQ ID NO: 135331 - DNA, 572 bp, Arabidopsis thaliana
aacgaaaccaacacggttttcctggatgattctccttacttggttttgcttaacccgccatatacagcaatattccctcattcatacaatcatcagaacaagacagatacatctttaggtaatggaggtgatctgagacttcatcttgagaagttggtagaagcggaaaacgttcaagatttcatcaagaaaaaccctttcgggcaagaagctatcacggaagtaagcgaatcgtgggagttttaccgagagatcattcgtatgctacgtatatcttctcaaacgtacagattaaggaacttcatacggtagaccacacgaggattgcttcatacggtagataacaaacgtaaaggaaagtagaaagattgactaaaacaacgtgatgttctgatgttgttgttacagatgtattggtgttttattttataagttgtataaccacaagtagttgcattttttcttgtgtagttatttattattaaaacttgtatttcatatctttattctcggttgtggtgttacttttttctttttaaacaaaaaaatttatttcaattgtaactttagac

SEQ ID NO: 135332 - DNA, 498 bp, Arabidopsis thaliana
agactacttcaacgctgactcttcctttactcttgctcatcataagtatccttatgctttggaaggaatggatacatactccactgttctttatcacctgaaagaagagatgaggttgggctatctggctcaggaactgatttcagttgatcgcctgtctccagaatcctggtgtgcagttgggaactgttacagtttgcgtaaggatcatgatactgctctcaaaaatgtttcagagagctatccaacctcgaatgaaagattcacatattggcacatacccttttgtgggccacgagtttgccgcattggaagaattcgaggatgcagagagatgctaccggaaggctctgggcatagatacgagacactataatgcatggtacggtcttggaatgacctatcttcgtcaggagaaattcgagtttgcgcagcatcaatttcaactggctctccaaataaatccaagatcttcagtcatcatgtgttactatggaa

SEQ ID NO: 135333 - DNA, 648 bp, Arabidopsis thaliana
gaacgctcttcaacacttaggtggacctcatgtagctacgcctaagcaaatcagggagtttatgaaggttgatgggttaaccaatgatgaagttaaaagccatttacagaaatatagactgcatacaagagggccacgccaaacagtccctaacaacggaaactctcaaacgcaacatttcgtagtcgtcggtggtttatgggtaccacaatcggactactctacgggcaagactaccggaggagccaccaccagcagtaccaccacaaccaccggcatctatggaaccatggccgcaccgccacctccacaatggcctagccattccaattatagaccgtcgattattgtggacgaaggatcgggaagtcatagtgaaggggtcgtggtccggtgtagctcgccggcgatgtcttcttctacccgtaatcattacgtcaagaataattaatttgtttttactgtactctaatgttttgtggtcatttaatactattattttgtttattctctctatactgtattagaatttgatgccgggattaaagagtgtatagagttttgcaccaaatcaatctttctattttacttataatgtatttcatatttattttggagttagttaataaccatcttctttttttgggt

SEQ ID NO: 135334 - DNA, 409 bp, Arabidopsis thaliana
ccgagccggttcataaggagcgattcggaatgtcaaacattacaacccgggatctggtattataagatagtggaagcagatcacataatgttcatagtgaacagagagagagctggtgttcagtttgatctgatatacgacagcatcttccaacgttgcaggaaacatgtttttagaaagattcctcagactctccccaatcaatctccttcttctcctcgttcatcatcatcacccagaataaacaactttgtacattgatcacatgcaaaaaaaaaatgttttagggttgttacgttgagggcttaagtttttgtttaggctatttactactaatacagattattcattgttcttcttgttctcctctcgatttgttgtactgtaaaaaatatatcttccattttgg

SEQ ID NO: 135335 - DNA, 585 bp, Arabidopsis thaliana
  unsure (1)..(585): unsure at all n locations
agaaaaagactaatataagttcaaatttacacacatagcaaaaaaattgaatggtaatcacattggcacacaaatattttgtatatataagaatcatcaacaaaaaaaaatcccatcaccaaaacaaatcaaaaccatccataaaacacaaaccttcttttaggtttcaaaaatacacaaatgaataaacgtactaaattaaatgaattaaaattcccaaccatctttcttgtttcttcattcattcaaagatcggacacataatcttatgcttgggttttggacctgtagagcaccttcttcttcttaaaggtttggttgtcaatcgtgatcacgacctttcccgcctcacttgccttgaaagaatcggttatcaccgggtcatcagttaaaccgaccttccgggtcttagagacaatcacggtgtagcttgcctcattgcttggctcaaattgagctccgtagctcacgtccgcacccaaaaccctaagctcccatgagagcgtggaaccctctgtagcaggcaaatcaatcggcgcggggcgccgggatccgncggactgagggacagntnccaaaggggcg

SEQ ID NO: 135336 - DNA, 485 bp, Arabidopsis thaliana
  unsure (1)..(485): unsure at all n locations
aagaatccaaactaggaccaaactcattataatatttttgtgaagacattacagttttttttaactaaaaccaaaagaaatcgaataccaacaccttatagatacaattttcatcaacccacttttgggttttttctttgtatgtcgttttctattggtttatttattgttcagattaaaaccacactcgaaacaagtactttgcgtcatgaaagtttatcacgacagattctaatcggttaattaattaaccgcagagcaaaccctacggatttccccattagctccggtaaccacaccgatattactcattctgaccattgacctcgcaaactcaacgttgaagggtgcttctaggagccatcaattgttgcactatggggctagtggctggatcgggtccaaaggacttgatccggattggagaactccacggcccacggcttaaggttgttgttgtaagaagggcccaagggnttcgnttc

SEQ ID NO: 135337 - DNA, 482 bp, Arabidopsis thaliana
gcaaaccctaaccgccaaggctacgatcacgaccacgaccctaccgagtcacgacgagaccaagacagaatcaacagagttcgagaaaaatcaaaaacggtatcaagacctcatctccacgtttcctcacgtgaaaggctggagaccgtaagagcccctgatcgagtatggtggttactggtggctaccgtctctcctcgaaggttgtattcacgcgcaagagttctttcaagcacgacccagtgacttcctcgtctgtagctacccaaagacaggcaccacttggctcaaagccctgactttcgccatcgcaaatcgttcccgcttcgatgattcctccaaccctctcctgaaacgtaaccctcacgagtttgttccttacattgagatagatttccctttcttccctgaagttgatgttctcaaagacaaagggaacactctgttttcgactcatatcccatacgagttattacctgatt

SEQ ID NO: 135338 - DNA, 512 bp, Arabidopsis thaliana
gttaactctactcttcaagcacctagaagaaagtttgtagatgaaggaaagttacgtaagatttctggcagactattttctgattctggtccacgacggagttcaagactgtctgctgattcaggggcaaacattaattcaagtgttgcaacagtaagcggaaatgtgaacaacgcttccaagtatttgggaggttctaaattgagttctttggcacttcgttctgtaacacttcggaagggacactcctgggcaaatgaaaacatggatgaaggggtccgtggggaaccttttgatgattcaaggcctaatacttgcctcaacgcctggtttctatggcttccaatgatcaagaaggcggaacaatgtcgattggtcggcatagcaatgagttctcaaacaatcacaatttggtgtttcggaaattttaaacctccttaggacactcggagaagggtgtagactttcatacatgtacaggtgtcaagaggcactggatacgtatatgaaac

SEQ ID NO: 135339 - DNA, 850 bp, Arabidopsis thaliana
gtatgttagatgtgggagaggaatggtgaatggagcagcagcaacacaacagatgatagatgtgttcaatgtgaaagggatagtgcattttgggattgctggaaatatgaacaactcaatgtccataggagatgtgagcatccctaagcaaattacgaatgctggcttgtgggattggctgaatccagacaaagtaaagggagttgaggatatagcgtacttagatgtcggaaactataatgttccaaaaggagatggcgacaatgagttagggagtattggatataattacgggcaactatattcagtcactggtcacatcaatgcacctcagaatgtgttttggatcaacacaactcaagagtggcttcatcttgcagctgatctagagaagatggagctatcgcagtgtgtaaatgcaagtttgtgtcttccaaagaaaccaaaattggtagttggattgaaagcagccactgcttacatatttgtggataatgcagcctatagaaatttcttatacgatacttttggagtctcctcctctgatatggagagttctgcagtagccttgacatgcgcatcaagggggtccccgataattgtgatagggggtttatcagatttagctggagaaggaggagataccactgtccataagtttggatctttggctgccactaacactgccaaagctgttttagagttcattaggaagctcccaccgtactaattcctctagtgtaacctatttatcatgaatgtttgaatctagttctctagttcatatcaacgaacccgtgacaacaaatgatttggattgttatcaaattccattttccatgatcgtaac

SEQ ID NO: 135340 - DNA, 436 bp, Arabidopsis thaliana
aatatcaattaatcaattcactttttaaaacatatatcaaatgttaacggtcttttaaggtacggtgtcttcgtttaggttttcttgattttgtgcctgaaacaaatttgcaccaaagttacaactcaaaacatatagccgaatatgagttctcttgtctcaaacataacgttttttgaagatattgtgtcgtttggttgggtctttaggtttcttggattggttaccagatttttgacgacctgagttgtatcccatgtagacccttccatttgcaccagacattgcactcatcgatcccatgctttcgtcgcgtcttctagagcctttccatctggggcttcttcaagttgttctaaaccaaccatatcgtctccagcattcaacacctttccgagaagagacaactgttcttcttgactgtggtagcccaagc

SEQ ID NO: 135341 - DNA, 523 bp, Arabidopsis thaliana
  unsure (1)..(523): unsure at all n locations
cagaacgaagagcttcgtggtaaagtggttctcgtgcagtttactaatcctgctcgtagttcaggtaaggatgtgcaagatgtagagaaacagatatatttgatcgctgatgagatcaattctaaatttgggagacctggtggttataagcctattgtgtttgtcaatggacctgttagtactttggataaagttgcttattacgcgatctcggagtgtgttgtcgtgaatnctgtgagagatgggatgaatttggtgccttataagtacacagtgactcggcaagggagccctgctttggatgcagctttaggttttggggaggatgatgttaggaagagtgtgattattgtttctgaggttcatccggttgtcctccatctctgagtggtgcgatcccngtttaatccgtggaacatcgatgcagtcacttaacgccatgagctnctccaatnccggtgtccgccaaaggggaaaatctttgccaccagaagcatcataagtacataaagnncctcacaat

SEQ ID NO: 135342 - DNA, 502 bp, Arabidopsis thaliana
  unsure (1)..(502): unsure at all n locations
aaaactcttattttcttcgtaagagatggaactagcgttgtctctaggcgacaatactaagaaacagttctcttttatggagaagaactcgaagattaagaatccctctgtctcgtcgacatctatttccgagaaggatcttgggttctgcatggctttagatgttgcttttggtggtcacagatcgttgtcatcctcttcgtctccgtcggtagaggatgagaagaagaaaccggcgcccagaacaaaaacttctgacgaatttagggtttcgtcttctgtagatccaccattacagcttcagcttcacttccctaattggctccctgaggaccagtaaaggtcgaccaaggagggaggaattccccttaggagcagctacggtttntgggaggaggaagaggaggangnnggaagncggtgcctaggnatgtcagtntcgcccnccggntaagtttaacggcnggnngttnaaatttggcntttttgggttaaaaagtna

SEQ ID NO: 135343 - DNA, 733 bp, Arabidopsis thaliana
  unsure (1)..(733): unsure at all n locations
gcgtgcttgatggcaatctcgaggcacgggtatcggattttggtctagccaagttgttggaagacgaagaatctcatatcacaaccattgttgcaggcacatttgggtacctagctccagaatatatgcaaagtggtagagcaactgagaaaaccgatgtatacagttttggggttttggttcttgaagtcttgagtggaaaaagaccaaccgatgcttccttcatcgagaaaggccttaacgttgttggttggctaaagttcttaatcagcgaaaaacggccaagggatattgttgatccaaactgtgaaggaatgcagatggagagccttgacgctctactatcaatagcaacacagtgtgtgtctccgagtccagaagagcgtcccacgatgcatcgggttgtccagttacttgaatcagaggtcatgactccttgtcccagcgaattttatgattccagctctgattaattgcataaacccaccagtccaaacgtcgagaaaaaaaagtaaactgaatctggtttcccgggggaaaccttcaaatggtattcgntttccggttttgntcccccgggaaaacctgnaaattccaacgggccttcattttccagtaatggganaaagccttggttttgggtccaattantttgnccccccagtttaaaaagttngggcatcntacagncctttncttttggccggttttggaaaaacttttttaaaaaaat

SEQ ID NO: 135344 - DNA, 576 bp, Arabidopsis thaliana
gcggatcaaggagagaactcttgatgttgaagcaaagttcattggttttggccgaatagctgccaggttgtttgaaacgaaaggacgcacaacttggatggataaactatggtgcgagtggttaggagacgagggtccttcagatgaggagaaggctacgatcccggagcatgactttgccattgtcacattctcctacttctacaatttgggtaggctgggtttgcttgatgatccgggccgtcttctcacatctagtcagtcagaatcagggaatggtgaggacagtggcaggaagagaaagaagtctttctcggatccagaggacaccagtgaatctctgtgtaatcagtatgactctccttgaggagggttcttcaggccataattcaaactcgtcaaggggtcttatagccgattatgatgatagtctcatgagcaaaagagtcgtgaagaacagaacggtaagacgggagctgaggaggcaacaacgaatattttctgaaagaatatgcgaagtctgtaaacaaaagatgcttccagggaaagatgcggcagcaatactaaacatgaaga

SEQ ID NO: 135345 - DNA, 426 bp, Arabidopsis thaliana
  unsure (1)..(426): unsure at all n locations
ttcccgggtcgccacgcgtgcgagaaataggcttccttgcataacaagaaatcttgattccttgtaagacaagaaaaccgaagcactaaaacccagtggcttctttccgccaaacccgttaaacccgccatctatcatccctccaaacccgctcattccttctatcccaacccctactctccctccaaacccgcttattccttctcccccaagtctccctccaatcccactaatccctactcccccaactctccctacaattccgttacttcctactcccccgactcctactctgccaccgattccaacaaattccgactctttncaactctttcgggttcttcaactgtccntatcggtaaantccggtttgaattacggcaaccaccaacttttttttcccntgttnnggtttcctttcnggnt

SEQ ID NO: 135346 - DNA, 450 bp, Arabidopsis thaliana
gcgccatgtatcttcaattgctaaggtccctaccttccaaactggtggagctccatcctcctctgaacagcctaagcctgtggtggtgaccaccagtggtcccaaggttacgccgcttcagcagaaaaaagcagacactcttgagcggttgaaggagactcttcgtaaaaaacaggaaatgctggagcagaagcgtaacgagtaccgcaaaaaattggctacacttgaaaaacaaggtactgttgtcaagagggaggaagcagatgagccagatgctaagcgtgttaaactagacacagcctctgattcgggagctgcaattgcatcaccaaaaacagagtcatcgacagataagaaagtgcctatcctgaaaccactttccaccgccaaactaagcacagaaacgccatcacccgattcaaaaaactgtaagcaaagaccatattcgtt

SEQ ID NO: 135347 - DNA, 421 bp, Arabidopsis thaliana
gcgatcaaccaaatggtccctggaattaataaacctctaataataatggctttgcttttactctgatgacaagttcaaaaatggaacaaagatcactcctttgcttcctttatctgctcctactattcaatttcactctcagagtcgctggaaacgctgaaggtgatgctttgactcagctgaaaaacagtttgtcatcaggtgaccctgcaaacaatgtactccaaagctgggatgctactcttgttactccatggtacttcggtttcatgttaacttgcaatccctgaggattcaaagttaactcggtgtttgaccctttgggaatgcaaaactatctggaaagttggttccagaacttggtcagcttttaaacttgcagtacttggagctttatagcaataacattacaggggagata

SEQ ID NO: 135348 - DNA, 433 bp, Arabidopsis thaliana
ggagttggccataagctcggacaaagggaaatcatgcgggctatgctaggatcgtaaaggaatcagctgggtcagctcgtccgaagctcaagctcagctggaaggagtgacggttactcgggttgagtgacagtccacctcgagcagctgggcgagtgacggttgagctcgaggcagctggtcgactgtctgaccagctgggcggttacccggacggttacttgggcggttacggtcgaacgggtgctcgcccaaagggtggataagggcgagcagttacggaccgagagatgcaactctttcggaaaaggtgcaaaggaacggaggtgactcctttcgggaagcatcaattttcgccccttatatcaagggaggggctgcccaagacctttagaggcaccagaacacacagaaaataccggatactcactat

SEQ ID NO: 135349 - DNA, 549 bp, Arabidopsis thaliana
  unsure (1)..(549): unsure at all n locations
gncccccttttnngnaggnngtnantgcccgtcggnaattgcaccnngggtacggtaaggcttggnatccctnttaggancggccgcccctttttccccttttttttntattgggctttgttaaaattcacatttgctgctaaacccaaatcatctcataacaatggctttacatattccggttaaattcagcatctttgactaatttttccactacctgaggcagtaaacaagcctgaaaatcaagacttgcttctccaattcctttgaaaacaacgagtcttccattgagatacggtggtccagctcttgcagctatcggtttaccccaaccgaaatcattacagtacacatcgaaccggtgagagtttgtgacaactaaatctttgctaccaacagaaaccggaatcttgatatttttcacccaattctctgcaaatgctttggctttttcatcagtttgtgacagctccatgttgttgatttgcattgcagcccagcctagtccatggtccagcagctctccaaccgtgaccgtagctatccccg

SEQ ID NO: 135350 - DNA, 436 bp, Arabidopsis thaliana
  unsure (1)..(436): unsure at all n locations
tgacataccaaactagtgaactacaacgtgtttcatgttatttatttggttatatagttaagcccattaattgtccctagcccctaggcccattatcaacctatcgtcgaagtttgatggaattttttacagagctcgacggaatgttgcaaccccagcggcgagtgtttccgattccgttcagtaaacaagcctgaaaatcaagacttgcttctccaattcctttgaaaacaacgagtcttccattgagatacggtggtccagctcttgcagctatcggtttaccccaaccggaattaattacagtacacatngnaccngcccancctagtccatggtncncaagtttttaaaccgtggccgnngntattccgggttnggtttaaatttctccaaaaaaatntttttttttngggggggttntcncnnccctncc

SEQ ID NO: 135351 - DNA, 507 bp, Arabidopsis thaliana
  unsure (1)..(507): unsure at all n locations
gccaaagatgcaatgctacttttggaagtggatcgtgttctgaaacccgggggatactttgttttaacttctcccacaaacaaagcacagggaaacttaccagataccaagaaaacgagcatctcaacacgggtgaatgagttatctaagaaaatctgttggagtctaacagctcagcaggatgagacgtttctttggcagaaaacttctgattcaagttgctattcttctcgttcgcaagcttctatacctctttgcaaagatggagatagcgttccgtattaccacccattggttccatgtataagcgggaaccacgagtaaacgctgggtttctatacagaaccaggtctgctgcttgcagggaccaacctctgccggggcttgaaattcatggtttaaaaccgggaggtttcttcggggggtacccaatttgggggttcagctctgaaaaactattgggccttggtttaaccnaaattttntttngccccnccngggggncng

SEQ ID NO: 135352 - DNA, 455 bp, Arabidopsis thaliana
  unsure (1)..(455): unsure at all n locations
ggagattaagccgttacagcttgacgaggatttgcctggaatgggtcaattctactgcttacactgcgatcgatgcttctccaacgcatcagtgagggatgatcatttcaagactaagagacacaagaagcgtgcgagtatgatgatgggacaagcgccacactcgcaactcgatgcagatttagccgcgggaatggggatgccgcacaatggcccaaagctgatgtctaatttggtacttcacagagttgcgtagtccagagacggaggatgcacctggaatgggtcaattcaactgcttactctgccatcggaacttctccaattgcatcantgatgggttatcatttcaaggctaaggaaccacaaaaagcgtttttagnaggtnngggngcccaccnccacantngnaacttgnttnagntttngctgggtggatnggnttcccntnccct

SEQ ID NO: 135353 - DNA, 304 bp, Arabidopsis thaliana
  unsure (1)..(304): unsure at all n locations
gcgaagaatgggaccaacgacggagaaggatgaggaagaagcggttcgagctaagtgcattccgagaaaaccaaagccggtggctaaaaggaacaatggtgggcagcagtaacaaaaacggcacgatgagtctaacaagcttattttgggtttaagtagaagagaaaagtagaatagggaatgatgagtttntaaagcattgtgaattgtgtaggtaaactataacaattcctttgcatgctaaaaaaattaagagttaacatgatgggtgaatatataatatataatgttgtagtctgagcct

SEQ ID NO: 135354 - DNA, 521 bp, Arabidopsis thaliana
  unsure (1)..(521): unsure at all n locations
gagaaaatattaccattgatatttactatatcaacaggcattattcaacttcaaccgggtttcaacatcaactaacagcccttcgatacaacagttcaatccaaaagaacacacggtatgtccaatgtcctgcacggagccattgactcattgtgcttacacttcaagttgttaagaccactcctctcttactcttatgtcctgcaacaactctccaaaggctgtcggacccatctctgtaatggtcaagagacatacaaagctgtcttatagcttctcttttctgctcagccatttccgatgnagacactctcggcctttccacttcttccngtaagctcacttgaccggctttctcagcctcanttggcnccatgggaaggnccnccaaaagggtttccgggttcccttaacctcccctccctcttcccaattcntncntagggaaatgggcccgggcccaatcgggggngtttccaagncccccncaaggtcccccgggtaaggttcctcccggaagg

SEQ ID NO: 135355 - DNA, 520 bp, Arabidopsis thaliana
  unsure (1)..(520): unsure at all n locations
gcgggtttcggtcaaaatacttgataaagatagttactcagacccggaacgcataaacgcatttagacatgaattgacgttgctagaaaaagtccggcatccaaatgttatccagtttgttggagctgtcactcagaatataccgatgatgattgtagtcgagtataatcccgaaggagatttaagtgtatatctccaaaagaaaggacgtctttctccatccaaggcacttagatttgctcttgatattgccagaggcatgaactacttccatgaatgtaaaccagatccaatcattcactgtgatctaaaagccaaagtggcagaaatattttgcctggatagaggaggggcaatttaagggtcctcagggtttgggactgataaggttttnggaaatttcccaaggcaaggggggaagtgggcaacccccnaaggccctttgggtcctcctnantnnntaatttncccngggnttttaaaanggggaattttcncccnaggngttgtcccccccnct

SEQ ID NO: 135356 - DNA, 405 bp, Arabidopsis thaliana
  unsure (1)..(405): unsure at all n locations
atatctncttgatggatatttgaataaaacctttcaaaatgattcttcatctgttgtttgttcatcctctaattgcaacgagccggagttcttgtgtttgttatacagtaacgcgtttataaactatacaaacttatgcatacagccccataaagatgtggaatgacaaaaagaagaaattatcttctgttttttgttctacacaaaaaatatacatagcaagtgagtttggccatgtccatatgactgaggaacactgaaccggattttgtccacaaatctcacgcccctctggtttctcccccctcctcttcccctttaatnccaggggacttgaagggggcttccccccaccccggttaggnaattgccancatttgggcaagcggaaaanttccgggaaag

SEQ ID NO: 135357 - DNA, 452 bp, Arabidopsis thaliana
  unsure (1)..(452): unsure at all n locations
ggtgatgcttctttgattacaaatcggcgttgaacaattctccgtttttacactctaatcgaatcactttggggtgttttgttaatcgctgttctcaagatctgagatttacagggagaagtgagctggaacaaggtgccggagtagatggcgatcatatttgcgttggtggctcgtggaacggtggtgttatcggagtttagcgctacttcgactaacgctagctcaatctcgaagcagattttggagaagttgcctggaaacgatagcgatagccatatgtcttactctcaggatcgctacatcttccatgtgaaccgaccagatgggcttacccgttctctgtatggccgacggaaccgccggaaggaatattcccgtttccgtttttggggggtatccatcaaagggttttggaaaaaaaattggccccggncttttaaancnnnnnt

SEQ ID NO: 135358 - DNA, 484 bp, Arabidopsis thaliana
  unsure (1)..(484): unsure at all n locations
cacagccacaaattcctcaatactctatatttctcttcccgtttgaaactccaaagcttgtttgatgaaaacagagtaaacggttctgttcaaaacatttttcaagctctgttactttgttttttcaacgatgaggaagttaagaggaatcaaaattagaagaccgattaaacaaatctcaagatggatcctccggagaattaagattcgtcgttcaagatacacccggttaagcccaaaccgcccggtttgcaagccgagagccatcacaaaactcataagttgggggtcgaagtctcacatcccacagcgccaggtttattgggtctaaaatgctccaattcagggtaccataccatttggtcaaggaaccccttcggggaaacctcgacccggtttccgaaaggtcacttnggngggtttcatcgggtaaaaaaggcggggggcttttanaggggttttggggcctntcggttnntttacc

SEQ ID NO: 135359 - DNA, 737 bp, Arabidopsis thaliana
aatttttcaccacaagggaaacaagctatgacccatgatttacggccaagttttaaataggacttcactataaggaaaagctgggtccgcctgcagggtaccgttcggaaattcccgggtcgacccaggcgtccgcggtttattcgcaaaagacgagaagtcttgacagagaagctatgaaaggaacatgtcatgatgagataacagagccaattcagagcttggggcaatcaacctctggtcttaaccgaagcttcaacggaactccacttgtcacaaccgatcatttcttcgtacctagcaccgtaggttactacgtgggcagagacggcggatatgtgcaagatgaacacaaacaagatttgatttgtttgtccaatactcaaaccaatgaatcggttaagcccaatggagttctaggccaaatcttatttgatgtttatattccgaagaatgttgaggattgggatataaagctatcagaaaccgggcggtctaggcggagaccggggaagagatttatacgtagatcgagattgtaacatctgagttatatattatatataccatgagtacccatttgttttcttcagatactgttgcagaggtattccatttggttttccctcgcaaagattaataaattaataaaataagatctattttaaagccaaaaaaaaaaaaaaagggcggccgctctagaggatccaagcttacgtacgcgtgcatgcgaagtc

SEQ ID NO: 135360 - DNA, 491 bp, Arabidopsis thaliana
cagggtttatttatgactcatgtcctgtggatttcactagcgacttgggagctcgattagcggttcatccaactacgcttaaaatgtctagtccacctaaaccgtttgtatgggcagcgaatggtattgcttcgagtctcgattatgtttttctcaacaggtttgaatcacagcgagccgagtactggcagactctttactctactataatcatgagagtaccttatctcattctatgctctgaaaacgatgaccttgctccttatcaaactatacacaatttcgctacacgtctccaaggactaggagggaatgtaaaaccttgtaaaatgggatggttcccctcattgtgggcattatcggtataaccaggtcggctttaaagctgctggatccgagttcttgtccaaagcagcgtcggtttttccgcagaagacgagaagtcttgacagagaagctatgaaaggaacatgtcatgatgagataacaga

SEQ ID NO: 135361 - DNA, 541 bp, Arabidopsis thaliana
tccaatctcactcaaaatctcctccatgttcatctcttctccacctggcaaaagcttctgcaattccttcaatctcttcttgatctctcctccttcttcttcttcgtcgctgtcttggtgtttttctccaccttgtctcttgctcgatctttctagaatctcggaaggagaactactagtgctaattggatcatcataaggggaagataatagcttctgttgcaagaaacggctccacgcgaattcttgagcagacaatgcgaaagccatgtctacttcatgtttcacgggttcttgtttggttggagagaaaagactcgctttctcttgtttataatttgcctctccatgtgaaattcgtttgcttcgtcggaactctaacagggagatacttatatagagcaaaaactcacgagagagagaaagagaaagagatggtttggtaatgtatgtgaaaggagtaatgctatatatattaactcatgtgatatttgacacgatcgatcacactttatgaagttatttcttttgaaaaaaaaga

SEQ ID NO: 135362 - DNA, 410 bp, Arabidopsis thaliana
acctggcaaaagcttttgcaattccttcaatctcttcttgatctctcctccttcttcttcttcgtcgctgtcttggtgtttttctccaccttgtctcttgctcgatctttctagaatctcggaaggagaactactagtgctaattggatcatcataaggggaagataatagcttctgttgcaagaaacggctcccacgcgaattcttgagcagacaatgcgaaagccatgtctacttcatgtttcacggtttgttctaaactttgtttgttggtttttgaagaggatttgttcatgttgatctttttaagagctggaaccaagtgactcacgtatcttcttgcgaaaactgccttagggttcttgtttggttggagagaaaagactcgctttctcttgtttattaatttg

SEQ ID NO: 135363 - DNA, 652 bp, Arabidopsis thaliana
  unsure (1)..(652): unsure at all n locations
tgttaattctagggtttccattaacaatggcagattcttcttcttgctccttacattcacatggtgcagcacatgatagagaaatgtttgatcttccatatgagcaaagaagagtgtgtggaagctctctctaagcatgcaaacatcactcctgtcatcacctctactgtgtggaaggagctggagaaagagaacaaggaattcttcaaggcgtatgaggagaggcaaagcaaacaagagcaaatgtcggaggaagagacaaaccagatgatccagaagattatctcggattcatctaaagaatccgacgactgatcgcgatgttcgatcgttagatttcgaaaaccttatagtttatatatatgaatctcatgaaaacgatttatccctgacgcatgcatgtttataagtaaatcgttttttcatcttagcatcggtccaacaagcaagacagcaaaaaaaggagtgatgacactctttttggtacgttatacgtacgtggtccacataatattgcctctgtttaattatatataatgaaacggacgctagctcatacatggatcgatggtgtggtgttttaattgaatgtatcgtgtgtatatattttcgaataaaaaatttatttnnnnnnnnnnnnnnnnnnnnnnnn

SEQ ID NO: 135364 - DNA, 492 bp, Arabidopsis thaliana
  unsure (1)..(492): unsure at all n locations
gaagaagaagatgtcttatcaagacccacaacatcccgttagtgctcctcctcctcaagggtatcctcctaaggaaggatatccaccagcaggttatcctccaccagcagggtatcctccaccgcaatatcctcaagcgggatatcctccagcaggttatcctccaccgcagcaaggatacggtcaaggatatccagcacaaggctatcctccaccgcaataccctcaaggtcatccaccacaatatccttatcaaggtcctccaccaccgcattatggtcaggctccaccgaaaaataaggaagataagaagggattcaggaggcttcatggaaggatgtttggctatgctctgctggttgcggttctctttgggagcttgctttttgatccgaagatgagcttatatttgccgttgaccgtntttggggntntttttnaattttgtnaaanattttaaaaggggnttttnanaanatttaggcncttnnt

SEQ ID NO: 135365 - DNA, 490 bp, Arabidopsis thaliana
  unsure (1)..(490): unsure at all n locations
agaaagagaacaaaagtgggttgctttcttttttggggttcctctagttggaaagaatgaatggcttttatacaaaagataaaacacacatatacaaaagatggggaacataccctgaatcaatcaatagtcatgaaagtaaacaagacctcaagtcaaattcggattcattcataaaattaaagaaaattaaagaaacaaacccaaaacgtggacacacataaccagaagaagagatctaaaatgtatatcaaacacgtctttttaacatgtttgacaaaattgaatagcatcctcaagacgggcaacggcaaatatcagctcatcttccgatcaaaagcaagcttccaaggggacgcaacagcagggatagccaaacatccttcctgnngctcctgatccttcttatctcctattttcggtggggcttccntnattnggnggtggnggccttttaaggntttttgggggtncctttnggttttcgggg

SEQ ID NO: 135366 - DNA, 825 bp, Arabidopsis thaliana
aaaaagcgattttctaaagtctcgctctcttctctctctaacattcttcagagagggagactttatccttattctgccgtccagcatgattgctggttttccgttgccgtgttcttgtcgtccggtttcatgccgacttatgtaccaaatctccggtaagttaaatcttttatcggtgaactttgtgccatggcttatgtgccatgtttcttttggtttgaatagtttccatgataaaggagatgatgttgtcgatttgatagcttcttctcgtttagttgtggattctctttatgtttttgttgaataaacggtttacaacaacaaatcaatgatggttacgactaagaagttgaaaagaagattggatccttgcaaatttggattgcctgtagctgttattacaagaaattggagctttgattagagcaaatttatgtggatcaatcagattttcatcctttgattacccgattttcgccaaatttcattgttgatgatttggcaaacggatgaggttgaagattctgttatttgtatcccttctaagctgattttgcagttttcggtgagaaaaaacgaaaatcgacgatcacaaaaaaaaattctgacgtcgatggaggtcaccggaatcgaagacgttgacggcaaaggatgatggggaaagttacgcagctctcatgcaacacgtgtctttgttatctatttgctggatattgtgtttgcttgagtatatccttctttttcttagaattgtaatcgtatgggctttatgggcctttttgggattgtaaaccttgaatattaataaaggtcacttatgag

SEQ ID NO: 135367 - DNA, 550 bp, Arabidopsis thaliana
aaacatggtgttaaccagcacagaccgtttggttgagaaaaggaatcctataaaaagatttgtttccttccagaaagaggaaagttgcattaccaatggagagatatctctcaggagtgatgcagatatcagtgattctggtgaagatgtgtgtatttctgataatttttgggagaataccctgtcaagggtttgtagtagtagtagtaataggagtatcaaatttttggggactgatagaacacttggagtagaggaatatttttcagcaaaactgtcagtttccagctctcaagaaacttgtaggccgtacatgatttgtgatcttatactacagaaaaggttccacattcaagcaacgggaagcagtgttgctgcttgagtagccaggacaagttgtacgtgctactggtgggtgtgactactgattatgaagggagtaccttaagtgtacctgtgttcccatgaaatcaaggatttacaagacgtatcagttggtctaggacttcaatttgtgaggctaccctttttggaggatgtagaatacatt

SEQ ID NO: 135368 - DNA, 753 bp, Arabidopsis thaliana
  unsure (1)..(753): unsure at all n locations
cgcgtccggagattggggtaataatgatactggaactgcagatggaggttggggaaatagtggtggcggtggttggggaagcgagtctgctggtaaaaagactggtggtggcagtactggtggttggggaagcgagtctggtggcaataagagtgacggtgcgggcagctgggggagtgggtctggcggtggtggtagtggaggttggggaaacgattctggcggtaaaaagagcagtgaggatggcggttttggaagtggttctggcggtggcggaagcgattggggaaacgagtctggtggtaaaaagagcagtgcagatggcggttggggaagcgagtctggtggtaaaaagagcgatggagagggcggttgggggaatgaacccagcagccggaagagcgatggcggtggtggtggatggtgaagaaacacaacctcggctacaaatgttggttgggtaattaaattacgaaggcaaaaggcaagacataatagtataaacacattagtagtaaattagctttctccctaaatgccttttacttttactttgattctctgcatttttgtcttaacctgtcggtattagtatcggtttatgtcttgtcccgactcttaacgttccaggaaagtctttttaagtcgatgcttacaaaattttagaaaaaaaaaaaaaaaaagnnnnnnnnnnnnnnnnnnnnnnnnnnnnnnnnnnnnnnnnnnnnnnnnnnnnnnnnnnnnnnnnnnnaa

SEQ ID NO: 135369 - DNA, 453 bp, Arabidopsis thaliana
  unsure (1)..(453): unsure at all n locations
ttntncgttaaaaagccnntnggatcccgtttngaaanggttctccctttccggaaccgttgggcaaccgattgtggtggtaaaaggccccttcccaaattcccgttggggaacccattctggtggtaaaaaagcgccggttggaagaaggccgttggggggattgacccccagcagcccgggaagagcgatgccggtggttggtggatggtgaagaaccacaacctcggctacaaatgttggttgggtaattaaattacgaaggcaaaaggcaagacataatagtataaacacattagtagtaaattagctttctccctaaatgccttttacttttactttgattctctgcatttttgtcttaacctgtcggtattagtatcggtttatgtcttgtcccgactcttaacgttccaggaaagtctttttaagtcgatgcttacaaaattttag

SEQ ID NO: 135370 - DNA, 511 bp, Arabidopsis thaliana
  unsure (1)..(511): unsure at all n locations
agccaggagactcttccaaatatagcttccaaagcataaagagtttttcaattagtaacaaaggacaaacaacagaaacaagagaatcttgatttgagtttttaagataattttagtaactacaaatacttgtagccatgagcacatccatatattgcttccaagtggtaatcgaggcatgaccgcattactaattccacgaaaccagtaaggttcttctacaggtgaaatccattttccatcgacaaggaatggggcaaagtgggatgacaagctaagggtatccagggattacttggaatccttgcacttgaggggaggctcctgtggggacctccctgaagttgggcttgataccccaaccaaacccttaccggttggggggtccggggaanataagggggngtccaaatnggngtttnccccaaaatttgggtgggnccncccgggngggggggcccccgggatccnggnggggnccnggggggnacaggttccccnangggggcgg

SEQ ID NO: 135371 - DNA, 469 bp, Arabidopsis thaliana
cgaatctacacgacgatgccgtcgaagctccgatcttcttcttctcttcttccacgtattctgctcctttctctcttattactccttttctattccttaattctccgccggccgattacttcaaacattgcctctcctccgccgtgcgatctcttctccggcagatgggttttcaatccagaaactccgaaaccgttgtacgacgagacttgtcctttccacagaaacgcttggaattgcttacggaacaagcgagataatatggatgttatcaattcatggagatgggagcccaatggatgtggattgagtcgaattgacccgacccggtttctagggatgatgaggaacaagaatgttggggttgtttggggattctctgaatgagaatttcttgggttcgttcttgtgcatacttagaggggctgatccaagggcattaagtgaagaggaaaagttgggtgggttt

SEQ ID NO: 135372 - DNA, 230 bp, Arabidopsis thaliana
ggcattcaagaagagttggtgtgctaatgtatgtcattttcgcggtgatcctcttctggggtttggtcactggtgtgtttcacagattcaagatctatcggaaactctaagttgaccgtgaaaatacctaactctatgttgaagttgttatagttgaggatatataaaatcaaatccatggtcagtgatgtagtcaaattcatgataagttatgtatattttccgtaaaa

SEQ ID NO: 135373 - DNA, 536 bp, Arabidopsis thaliana
agctcctcctgatggtcctccggtccacactttcaagcaagcttgtgtagctgtttacccgagtactgtgcagcatgagatcatttggttttggccaaacagtgatccaaagtacaaaaacattattgaaaccaacaagcctccttacattccagagttagaagacccatcattcactaagttgatggggaatcgtgatattccttacgggtacgatgtcttggtggaaaacctcatggacccggctcatgttccttatgcacattatggactgatgcgggtttcctaaaccaaaagggaagattgccagagaagggggggaaacccctcggaaatcaacggtaaaaaaacttaggcaacaaaggggtcttttcaaaaacaaggatcggggcttattctaatttttttgcaccatgtgtgtatcgctcttccacagaccctctaccagagcaggaacatgagtatcccgcaccagctgcttctgacaaggcggcattgtcaaagcggagattggctttgatctctatatgtattcc

SEQ ID NO: 135374 - DNA, 488 bp, Arabidopsis thaliana
gacctattcgtgtggccaaacaccagaatatcgccaaaatcgttgaaacttgaacgaagaaacagacttgtcacagctcagccgccggaagactttaaggaggtatggatttggtgtggttattaagtgttttacttgttggagctgcacttggatattacatcagcactttacgacaaacccgccgaatctttctctcctccaaatctgtcgccatagatgcaggatccagcgggaataagaaaaccaagtccaaggaacccctcgagatagagaaactcgctgattttcgcaaaattttcaaaatgggttttggttgtgaggaatcgttctttaaaatcgggtaaagggaagattgcatctcaatgcagtcatgcaactttaggtttatacaagatactccttcaacgggcgccaaaagccttgaacagatgggaatattgcgctcagccaaaagttggtgtcaaaattgaaagtgaggaagagat

SEQ ID NO: 135375 - DNA, 631 bp, Arabidopsis thaliana
  unsure (1)..(631): unsure at all n locations
agcttaaacgcttcagtttatagatacaatagacaaaacaaaggagagcatcaaaacttcatctttaaaatgttgtgggataatcagcaaatgttgtcatatgattatcttctagtaagacaattgtacaaatccatgtaaaatggagttatctactcagaagaagggaaaacagatttgtcaccgagaaatgtcgaaaacttgggagccaattagcatgctctcctttctgccagagtgttggtaatgtcgaatccaagagttattacataagctttagtccacctgttacttcatcaacattatcaacaggtccaagaatagccattactgtccttgaatttgggagcgatctgtgtttttccccgcatcaatgggtgatatggggtggcagtttcaggggnctttgcccctttccttgcaaactagcatctcttcctcactttccaattttgaccaacaacttttgggctgngcccaatatncccancggtcaaggntttngngcccgttgaangnggtcctgnaaaaccctaaagtggcagnnngcatgngnggganctccccttacccntttnaggcatncccaaaccaaccntttgaattttnggaacangggtcccanccggga

SEQ ID NO: 135376 - DNA, 568 bp, Arabidopsis thaliana
ataccatcttctacggttgtatgattacttttactaccgcgagctcttgctaattgtatgtgaatttcttaaggccaatctatacgaattccacaaatttaacagagaatcaggtggtgaagtttatttcacgatgccaagattgcagtcaatcactatccagtgtctcgaatcacttcaatttctacatggccttggacttatacactgtgatttgaagcctgagaacatattggttaaaagttatagcagatgtgaaataaaggtcattgaccttggaagtagctgtttcgagacagaccacctatgctcctatgtccagtcaaggtcatatcgagcaccagaagtcattttgggacttccttatgataaaaggatagatgtgtggtctcttgggtgcattttggctgaactgtgtacaggcaacgtcctcttccagaatgattcgccagccagtttgctagcaagggttttgggaaccgtaggatccttcggtatgaaatgcttaccaagggacgtgattcccacaaatacttcacaaaaaaccgaatgctctatgagcggaacc

SEQ ID NO: 135377 - DNA, 517 bp, Arabidopsis thaliana
agaacattatacggtgcaggagagaaagagtgataagttgtttgtgaagcgatctgttcacagacaccatggttcacagatgtccccagtagaaaattcagaaggaaggagtcggcctgtttctagtaaagtgaaagacagtgagcaggttgagaaagaggataacagcgacctggatgcaaacctttcctgtgattctaaggataccatcagacatcaaattaaggataaaattagaagcaagaataaaaggtcttcaagggaagaagtatcttcagatgataatggcagctctgattccgacgtagatgataggaaggaggctaataggaggaggaaggaggagaagacaacgagagaggaggagaagaaacgtacgccagaggagagacatcgtccaagggaagaacgtcgtggtggaaaggagatgcataagagactagagctttctgatacttcagaaggtgaagttgaggcccgttctaagattaaaaaaggggaggaatctgatccaaag

SEQ ID NO: 135378 - DNA, 530 bp, Arabidopsis thaliana
actgcatatacaggggtcttgtggattcagagatgcaatttttcacgattcctgccaaacgcaaccactcggaggtgggccgcagcttatcaagagattgtccttcggaaatagatctcaacacacgtcaacattcagatattgagaattatagcatcaagagcatgctcgatggctcactcacatatgacactgaaatgtcttgcgaagacggaggtgacgttggcacacgttatggcagtgaaccaaccagtgtttgtgaagattgcagcactagctgggtcaaatcaatgtgcaaaattccaagagctcttcttagaattagatcccatatgaatagtgaggggaataaacgcaaaagatggtgtgggcgtactgctgaaatggattgtcttcctcgtatttcatttgccaattccgagtcaggcacacaccctatagaggacaagtatgagatagcgttggcactgaaggaattggctagcagaggaatggcagcagaagcattttccgaaatcagcaccatggat

SEQ ID NO: 135379 - DNA, 424 bp, Arabidopsis thaliana
  unsure (1)..(424): unsure at all n locations
aaactggagtggttctttcattacatagtaagacagataacaaagattcaaagggaaccaaacaaaagaagctaattcctattgtgcactcagactcttttccaaactggtgagaattgagcataatcggtgccatctacataacgaaattgttgtgtttttatcactaaagctttgatcgaaccatcgagtttgtgactcatatcgatctttttattctcccgtttgccatttgcagactgtaacctcttcaaagctgtgttctttaagcttccttggttatctgatgatcactctcttatagtctttggcttcaaacaaagacatagaaactgcttcttcttctccgtctttctcttattcctgccccgattctgatctggggtttagcatactaggaaagccaggccgancggggggacgg

SEQ ID NO: 135380 - DNA, 683 bp, Arabidopsis thaliana
agcagatcagcagagggctttctgccaatttgtaactggtgcttcctaggcttcctcctggtggcttagctgttctgaacccaaagcttacgattgtgagaaagcactcatcgacctcaagtgcagcagccaacggagcaggggcttcggagacagcagatgatgatttgcccagtgtcatgacttgcgcaaactaccttaaactccctccttattctacaaagggaaatcatgtacaaggaaactgctctacggccatcaacgaagggcaaggatcgttcgacctctcataagcaacatatggctgtgtttcttcctcccctctcttgtacattacatcggaagactggttttgatttctctgcttttttgggtttttatgatctgacaaagccgaagataccccaaaatccaggctctgcagaaggcgccgccattattgtgtagataaagaaagatgataggcttatcttttccttcctttttttttttttcttcttcttcttcgtttcttagattccctctatgtaaaagatcgatcatttcatttggtcggtcaaaactatggaaactcaagttcgatccgtctcagaaaactagaatatggacggcactttgaattatgtttaacactgagttacttttttagcttagcttcattatataagctctcttattacatc

SEQ ID NO: 135381 - DNA, 450 bp, Arabidopsis thaliana
  unsure (1)..(450): unsure at all n locations
cgaagggcaaggttcgtncgacctctcataagcaacatatggctgtgtttctccctcccctctcttgtacattacatcggaagactggttttgatttccctgcttttttgggtttttatgatctgacaaagccgaagataccccaaaatccaggtgactactgttgttctcccggagactttgtaatggaggggatatagggttgtgacttgtgatgtaaattttgtctttgcaggctctgcagaaggcgccgccattattgtgtagataaagaaagatgataggcttatcttttccttcctttttttttttttccccttctttcttcgtttcttagattccctctatgtaaaagatcggtccatttcatttggtcggtcaaaactctggaaactcaagttcgatcccgtctcagaaaactagaatntggacggcnctttgaatatgttt

SEQ ID NO: 135382 - DNA, 777 bp, Arabidopsis thaliana
acggtttaaaagctgttttttaacgacccttgccagcccaattgtttccaaagggcttgttgttttttttgtcaagtagagaaagcaaaggaagacatgctgaatcaattttacagttctataagtgcaataggcaatgaaaggattgagtcattgatacaagaggatcagaatgtcaaaagacgaagagagcgttaccagaaacaatcctctcttctttctaaactcacgaggcagcttagcattcacgacaaccgagcagcagctgcttcaagttattcggacaacagtggcactgagagtagcccaagagcaagtggaggttcttcaggggacgactggatgaatgccttcaactccgctgctaatggaccctcagactcattgtcaaagtacggttccggtggtcacagccgccgttacagtgaccctgcgcagaacggagatgcagcatcaccagggtctggtagcaaccgccgcaccacccccaatcggttgccaccagcaccaccgcctacaggttcagcttataggtattagaacctgaagaaaaaaccctggaagcgcattgtgtcccgttttctgggactacgttactcttattttttctagtttaagacagtgattggatgattgtactactgttttttggtctttgtagatagatattatcacacacatgtgttggcagctaaaaaagagtttggtctcatgagtcaaatgtctgtttgaatttttggtttaaaaaaaaaacggccgcggattcgatatctagct

SEQ ID NO: 135383 - DNA, 634 bp, Arabidopsis thaliana
  unsure (1)..(634): unsure at all n locations
tggggaacaatntgnttncgcaactctctggtttagaggntttgggnacactatnttgcttgcgaaatctgaatattcgnggaaacccgatttctnataacgataagtcagctaagaaggtgagaacgttgcttctcccttcagtgattgttttcaacgctcaacccttagaaaaaaagctcaaggaatgcaaagcattattcggcttgatgccgatgatgaaacctttgatgcctatcacaataaatcagcagaagaggaacaatctaaagaagatcgaaaacgcaagaagagctctaagagaaataagtcagaagaagaagaagtcaacaatgaggatcacaaaagcaagaagaagaagtctaagagcaacacaaatgtagatcaagttgcaacaaaaaagaaagaagaacataaagagaagacaatcccaagtaacaatgatgatgatgatgatgctgagaagaaacagaaaagggctactccaaaggaggaactcgatgctatagatgatgctgaaacctctttcgcagaaatcttttcccgggaaaatgtgccaaagggttctgaagacggtattgagaagaagaagaaaagcagcgtccaagagacaggtttagtaaaagtgatagat

SEQ ID NO: 135384 - DNA, 745 bp, Arabidopsis thaliana
  unsure (1)..(745): unsure at all n locations
aactatcnatgagctatgacgtcgcatgcacgcgtacgtaagcttggatcctctagagcggccgcccttttttttttttttttttacatgaaatttcacaaagatctattaacaccacataattaatcaatatttgaacaaaataatagaaatttacaaaaccttatactacattcatgtatgtacattatgaactattatgatggctgagattcaaagtccatcgtagtgacccccaaaagatatttgagctcttacgacaggaacacctttcataccaaagattgcttcattgagctttgttgcatgattcacaacttctttcatcctcttattatcatcggagtaaatctgggaccgaagcatctggttcttgttcttacagattttgatattgttgtgtccgagggaagaagacacatacggtaagcagcagcagcggcaaccccaaaagaacaggttgctccaatcccattgagaccagccttccacagattcaatctctcaccaccactaccatcttcatcttcttcctccaaaacaacttctttcttgtctcgcaagtcatcccctccttctaaatcagagggtttcgaagcagcatcatcgatctgaggcagaggactcgtgatcctcgctggtgggtcaatttttcatgtcggcaaattcagggtcctttcatgatctttgaagggaaactttttggtgaacaaaacaaaaatcccgttgaaaagggtccgggttt

SEQ ID NO: 135385 - DNA, 956 bp, Arabidopsis thaliana
gacgcagttcttttctaaagcaccggagaggaggagaagcaacgatggagaatgattgcacggtgaatattgtctctctggagaaggatcgcgatgtttcggaggcgtcggctgaatctcagagcgagtcgactctttcgaactcgctcgattccggtgttacggctgagacctctcgttctgatgctgattccaaactggatgaatgtactgcttggacgaatgagaaacacaactcatatcttgattatttagagagctcgtttgttaggcaattatactccttgcttggaggtgggactcagagacttttctagaactcgtgcatgtgcagtcttaactctccataaatcagctgatcagtttaccgtcctacaaaatggttgctggcagaaggttaactttggaaagaaacaatcttgtttggagacttcatctgagtttcgttttcacagaaattcattgagaaataagcctgaaaattccaacggaaattacaccatgggaactactgtccaaggagatgtgttatgtcatgacgaaaccaaacactcagaggcgtcagggcagaatttcagagaagaagaagaagaagaagagaagggagaggtgagcaaaaaacgagaaagagaagcaaataacgatgatagttcattgaaggaggatcaggttgtgccggtaaggatggtgaagcccagaacgtgaaagcattaggaagtgtagatgaaatactatgaatagagataaagaaatagaagaaggtgtggttacgaatgtggagagggttttgtttgttgtatagcgtgaggctaaagagagccttccttataaagggatccaatgggatatggaaataggattggtgtttgttttcgttaaattttgtctaatgttaactaggggaaaagttatctgatagtattagcataaaatggcaattttattcttttgaattc

SEQ ID NO: 135386 - DNA, 429 bp, Arabidopsis thaliana
tagcatatagtgaggccaaaggaaggatcaagaaaggtgatagaatttggcagatagcttttggttcggggttcaagtgcaacagctcggtttggagagcggtaaggtcggtaaaccctaagaaagagaagaacccatggatggatgaaattcatgagttcccagttgaagtccccaaggtctccacaatctagaaaccacttagtggcaaattttcagaagaggtttttgagttttcagcttttgatattttgtgtcttcccagtgaatttacctttttcttgatttgataatcagatacaccaaactggttaacaatatttttcttcttttttgcggaaaaacttgttgtagtcagtagcagaccgtcaatggtcggtccagcttgtgtttttggttgttgtgtctgcatatatatttcctttaagc

SEQ ID NO: 135387 - DNA, 484 bp, Arabidopsis thaliana
  unsure (1)..(484): unsure at all n locations
tacctcaagtctccacattccaactcttctcctcctacactctttttcctcttctccttcttcctctctcctttgttctctcccctctcctctcccccactccactcaacatgtccggcaaggctacccctgctcccactgatgcggctgccaaggtgatcaaggaggtcgctggtggtaagaaggacctgaagcacgtcagcgccccctccggtgggctgtcagccgcagagaaggaggcatacctcgcagagaagaacgggaagaagtaaacatcaaccaacgtgacaccaaccttgatgacccaccccctgccctgcacttgacctgtgccatcggctgatgccgtgtgtgaatggtggagagtttngggttaggggtgggtttnatgttgttctgattttgntncccttncattttttttttccagtgngggngggaaatgtttagntaatttaatntccnttttgaaaagggtnagggg

SEQ ID NO: 135388 - DNA, 461 bp, Arabidopsis thaliana
  unsure (1)..(461): unsure at all n locations
actgctgtatgcgcagcattcaaggttttcatacttggtctccagggatgctgagaaagctaggaggattattgtcgaagcacttgaccatgtacaaccgtcaaaacctctcatggaagcactgattcattttgaggcgattcagccaccaccaagagagattgattaccttgagccacttgtagagaaagttataaagccagatgcagatgcccaaaacatcgcaagttccactgagagggaagagctatccttaatatatatagagttcctgggtattcttggagatgtgaagtccattaaaaaagcgggtgatcaacatgttaaactgttttaatccccaatcggggcacggtgggggctaaaaaaagggtcngcagnttgttttttncngnaancaaannngggcggnaaattggaaaaaattttaaagggggttccccccnttttgncngnntttc

SEQ ID NO: 135389 - DNA, 543 bp, Arabidopsis thaliana
  unsure (1)..(543): unsure at all n locations
ccccgaaatcatcgaattcaacattgttcgatgattatggacgatccattagcttttcttcttcagggagagattcttctgttagctcgaattctgctaagatcgtgagagctgttcctaaggctgatgtgcaggaagattccactggtggtgtgcagaaatttcgtgtcaaattgttggctgagacttatggacaaaccacaacagatgttctttgtcagattggtttggatggccttcgtatgcttgatccaagtgctagccgaactttgagaatatatcctcttgaggacatcacaagatgcggaaaactagattcggcctattcctggctttctgggctaagactccggtagacattgaagctaaacgtatcagattgcaatcaaatagttacaccaccaacacccttctggacactgtgacggctgcaatgtttcaggccaaggagatcgngggaagtagcaggcctcccacctctggaaaactgattgaacaaactgctgagaagaaaaaaggattgggtgattggatgaacattat

SEQ ID NO: 135390 - DNA, 484 bp, Arabidopsis thaliana
  unsure (1)..(484): unsure at all n locations
cagtaggacaacagtcttcatgaaaagtataagatgttcatcactcaaaggactttcatatacacacaagggggaaacaccatccacatgagacaggacaagaacttattttgatgtgatcaaacccaattcaataaccaaatgaaccaaatctcatacttataattgatatatatgtcaagcaaaaaagcgggtaggaagatcaatgtgcgctaacgaggaaagggttttggcaaactccgcactcaatggtctctgatcctgagactggaacctggacctgtaagtgcacagggcatgttggacaagctacttctttcatccgcctcccagatcctttccctcaaaccagacgaagacttgngggttctcnccatttccnccnggaactttctagcagggcttcatggctctgagggtcanatcctgccangggttcctnggattaccaccttggganctttgcatgacggnnaaannggtt

SEQ ID NO: 135391 - DNA, 776 bp, Arabidopsis thaliana
cactctagtaccagctatgacgtcgcatgcacgcgtgcgtgagcttggatcctctagagcggccgcccttttttttttttttttaaagcaatgagaagtttattgaagagtgagatggagaaatctgaaaccttttcattggttcttaacaagactggatccaagattgaagagatcaaccataagttgtcgtctttagaagctgatcttaaagttgagagatggaaggcttctcctttctctgatcatatccgtcacaccattgctccaatatccgctgtcctgagagtctttgctacggttcaagagcttgagagatctctcgtgtcctctgatggagtccttggttatgtttcggatgttaaacgtcttggagaagcgatgaagcttctctccagtagctgtgttcttgctcttaactggctagaagatacgatcgagtacctaaccgaaaagggaatgcctgaagatcatccttgcggtttgcggttcaagacttccatagagcttctccgggaattgcaaatgaccgagtctcgtgcttatctcaaaggaggtattctttacacagcgctgaagaatcttgaaacagaattcaagcggattctccaagagaagccggttttctcagaagacaacttgagaaaattggcaggctatcatgaaagagattacatgcttacacgccgtttaacaagctgcgttcccagtttacatcaaaggtccgcaccaagggtcattccagaaaccggtttgagattaatttatgagttttg

SEQ ID NO: 135392 - DNA, 745 bp, Arabidopsis thaliana
  unsure (1)..(745): unsure at all n locations
gacgtcgcatgcacgcgtacgtaagcttggatcctgtagagcggccgcccttngcttttttttttttttttttttttttttaaccaggcggagccatagcttacaaagtcttaagttcattacaaccatcgaccaaaaggcttacaaaggccaaagttcttaagttccttagctaattctcacacaagaaacaaaaaaagaagactaataagaaccagaaacatagatgagaaacatatatcctacgataaataacaaaagaggcattacatctccattaaacctaaacaatccaagtccttcttcttagatagtttcagcaatcacagaagccacctccttcaaaacatctatcttctgcgacaacaactcaagttccttagcctccaccatcttcatcttctcttcaatcctcttcttagtctccttagacaccttactccatttccactgcacaatacactcatccacaccaagcctggcaacaacccgaaccaaaaacgacttctcaaaccaattcgacgtctccgaatctcctccaagaaccaccacttgcttaccatcaagtccccaaatagacttagccaatcccaaacatttgttatcatgatccaagtctaaaccttgtcttgttctttacaccaaaatactttttgttttaaacctctaatcttgtcacccgaattggatcttactaacatcaaagcttatgtatcttttagcaataataaaaaaaccccatttc

SEQ ID NO: 135393 - DNA, 777 bp, Arabidopsis thaliana
tgacgtcgcatgcacgcgtacgtaagcttggatcctctagagcggccgcccttttttttttttttttcgttaaaatattctctatttcttcgaaagtcttacactttgcacaacatttcagtggaaaagtaaaaaagacaaaaaacacaagtgaatttaatatcaccaaaaagtattacatggtcaaaagagaaaattaaaaatcaaacgaggacctctttgtgaatatgcacacttaaataataaaattaggaaataatcaaacattcgttaattacggaatctacccatcccggcgaaaacgccgatcaaatcttgcctgtaaggtaagtaagactttcttctcttatccacatcaggcttatacgccgccgttttattcctccctttcactaccagagagccgtttccactcgtcgaaatcgaagatccctcgccgccgccatcgctgtggcttctccttagaagacccttgaaactgcaccgtttagttgctctcacggtcaaaacggctccgtcgctgtggcttctcctcagaaattcctttatacgacaccgtgtggaagatcctttactcttcaagctatcgtctctagccggggatctgatcggactccagaaacagtagaatttgctcggagaaatgttttccgaatcgtcagaatccgacgatgaaagtgattcccacggcgaagttagaaatggaggaacaacactccatccaccgtagaaaagattctttgaggtgactcgatcgtctgccacgtcatcgtcgtc

SEQ ID NO: 135394 - DNA, 797 bp, Arabidopsis thaliana
ttacctctagaccactatgacgtcgcacgcacgcgtacgtaagcttggatcctctagagcggccgccctttgtttttttttttttattcctttgaccgaggttgatcctcccatagtatataactatatatccatgtcaggactgatgaatcaaagaaaaagatacaacagcctcatgcaacaactatccattttctgtctaccaaaacttgtcatttcgcattaatttacagtttcagttcgtaaactccacctcttctctttcctttattaaaacccaagaccccactgttttgtgtcaaaagttataagggattccataagccgcagtatccaaccccgctgcaggttcttagtctacaagtagtggcatcaactccgcactctttgttgctccaacacttatgattgatttgctcgtcaagaacatggcaagcactctctctttgttgctcaggatgtctagagttaagagatatcagtggacagacttgtagtgacaatgcgctagctcgactttcccatgctccactctttgaaagggtccagttgcctgagaaataagtttctggtagtttctcatgccaggagctcacaacctgtataggatggccctcggttggaaatatataattccttttggccacaaatgagtcatcgaagaggagatataggtacttgcacgtttcagcgagaaagaaactgtgctgatgatcttccaattgcatggtcgtcacatctctaacacttgcaaatccccctggcacctttgtgtagagattaagagattttaccat

SEQ ID NO: 135395 - DNA, 719 bp, Arabidopsis thaliana
  unsure (1)..(719): unsure at all n locations
nnnnnnnnnnnnnnnnnnnnnnnnnnnnnnnnnnnnnnnnnnnnnnnnnnnnnnnnnnnnnnnnnnnnnnnnnnnnnnnnnnnnnnnnnnnngacaaatatgaagtctttacatatataagaaaaggtcttataacgaatacagattatcaattaatccataaaacatgaattctttaaaaagattcgtttcgattacaaaaaaaaaaaaaaaaagattttgggatgaatttgtttgaaataaaaattaagccaagagccagaaatctttgtgacgtttcggggggatcaagtaacctccattgttactcttcttccttacggcaatagccatacaatcggagttatgaatacaatactcgaccactcctcctcccattcctcccttggtacgccatttccaaatcacgcgccacttcgaggttctctttctctgccctaacaccaaaacgcctgctccttgtttctttgattcctccactatcggcttacctttctcctccgccgtttcaaccaccactatctccgttttgacgttaggtttcttgagttgacaaaaattcttcaatggatgaactagttcatgagcccttgagtttctctccctttgtgtctcatctatagctgggcctacgggtgttcttgtgacatggagaaaaagggatattatctttcatcttggaacacaatggtgtttaaaggccccatggaaagagcaat

SEQ ID NO: 135396 - DNA, 809 bp, Arabidopsis thaliana
actatagaccagctatgacgtcgcatgcacgcgtacgtaagcttggatcctctagagcggccgccctttgttttttttttttttattttaaagacaatggtattatttgaattgaatttccatttaaaaacccctaaaacttgcaacaactttgagtgtctaaaagtaggggaagcataaacagattcacttccccacttctgcatacttttttatataatatgatccgacaattaacgtttataaaccctaattctattctaagaattcaaaagagttatgttgcttttatgtcagattttcctcatgatcttgggttgggaaagaattgtgtaccggccatgaatgtattgatcggagttggataaagagcggctggatcaatgtacgtggctgccgcggctgatgagctgccaataccacccaggtttggagtagaggaagaagcggtagcaacggttacagagccagctgttatgagattcagctgttgagctccaccaccaccagaggagctctcaccggcgggaacaacgttgtagcctccgccaccactacttgcaggaccgaggtcgtattaaatgcctttgaaaatgtgaccaccaatgcttacagctggttggtaagaaaacttttcttcttcatcttctactgagcttacacgcacgcacctaaaacacccgcgatgaaacttactcccgccgggaaaattgcccaccttcttaacccttgaaggaaaaggtattgcgagtgccagaccaagaagaccatgaaagttgcccgggaaaattttttaccggggggcgttt

SEQ ID NO: 135397 - DNA, 799 bp, Arabidopsis thaliana
cacgtaggatgcacgcgtacgtaagcttggatcctctagagcggccgcccttcgtcttgtttttttttttttttttttataaaaacttgaaaacatttaaaccaaaaatgtatacatccacttctgtctcttgtttaacaagatcccaaataaccgtgatgtttgttttggtatgtagaacgaatttcgatttctataaaaatacacacaaaatttcaagagtaatttagttacaagcaaacacattcatatgatttgggaaattgatcatcatcatctagagaagagcctggtgaagaaatttccagagggaggattttgaagacaagagacatgagcatatctccctaacttgtccacttgtcttgcctcaccctttgtgtcctttttgcatatcttacatgttttggccacccatccctcctccacatattgcccatccacttcaacgtaggatttaaaaaagtccttgtatgttcccccgatttttgtcctcaatgccccatactgttcttgggtcatcttgccaccagatttgggggctttttcagcctcgaagagaaactcaaggcttttctccgatcgaacttgagagaagtccaaggcatgcgttattgagtgaacaaccaagggctcctcttattcttgtgtttacccacaactttctttggctttggtgagaacaccgaccccatttaggggttcccggaaaaaatcctggggcgaagttttctttgagaagggaacacttttgggcccggggaagaaataaaacccccacttttcttttgttttgaaa

SEQ ID NO: 135398 - DNA, 780 bp, Arabidopsis thaliana
  unsure (1)..(780): unsure at all n locations
cttacactatacaccagctatgacggcccccgcacgcaagcttgaatcctgtagctcgacagcgcccgcccttttttttttttttttttttttctgaaaagattttccaatttctgtaagatctatagcctaaaaagcttattgtgttcgaatgttcagagtagcaaaagagactgttttgcattcatcgaacaagaatctgagtcttggcagcgactcgggagcatttcttccggtcagattttctaagaccacatgcacaaatatcgagaagttcgtaatcttcttcccagaataacagtgatgccatctctggatttgctaggaggagtttagaagtcaagaatccagcgactgtccatgtctggtagaggcgagactgctttccaatgaatttgccagatcgggtgtcgtagtactctggccaacgatctcccaacagtctcttctcagccactgcaagagccttttcagctagctctggtcttcccatcttcatacatgctaatggggaactgccaaagaagtgttggccaggatccactgttgtgatacgaccaaggcgtgttctttgggtcgcttccagttattatacgccaatcatcgtactctaatgcagggtaacagatcttaagaagcatattcccaataaatatcgcccatttaacttcaattaagttcaataaaagctccattctggctttggtngaaacccaagggacgaaaccaattggacccagaaggttccccaagcggggaaagaaatctggaaaatcccaa

SEQ ID NO: 135399 - DNA, 570 bp, Arabidopsis thaliana
  unsure (1)..(570): unsure at all n locations
ataaaaatattattttcttagcaagatctgatttatttgacaaggaactcggagacattgatgatatattcatgattcagacaacaatctagtctcgaggtcgcgtgtgtaatcttcaacgaacgcagtgtatctggtagggggaggaacgtcgtcatttaacttctcgtattcccatgtccactttgcaatacaaactttatgatccttaggaacaacgtcaagtgttatcttatagctcttatattgctttaacacatctccttcaagagctaagaaagacaccgacttgttctcttcatctacgtctatcttctctttgatctgctccatttttccatcaacgatgaaattccagatctgaatagaggagttggatgtgggatcgtcacgatgaacataaactgcctctgtcttgtccgtgaaatttccttctttcttcttgaaagtcttgaagaatctctcggcggtnatattcacttggatctctaattcgagagtctggacaccagccatggctctaagataatccagtctctcacgctgacttttctgttgtttatctttacc

SEQ ID NO: 135400 - DNA, 794 bp, Arabidopsis thaliana
  unsure (1)..(794): unsure at all n locations
ctatgacgtcgcatgcacgcgtacgtaagcttggatcctctagagcggccgcccttnncttttttgtttttttttttttttcggaaaaataatgtgcaatttttcattaataaaattaaaaatattgagcagagagaagagaacaatcaaagcattggaggaggttagataaataaattaactttcacagtacagatatatgagaaggttctcccaggaatcaagggtcaagatcatttgataagacccataagataaggaaacacaaatctaattccattgaataataaaaatcttctgcatcttctcctctttctacttcttcttctacttcttctttctcagggtccaaagagactcagacaaactttttttgttacttagacttcactcaaacaaagaaaagagttttgtcttttgggtttatcttcttaccactttactcactttttttcataagactattattatagtttactcaaaagcccattttttctcatcaatgtcttgaatccaaaacctgctctgcacttcacagacaccgacaaaaagagaaaccaatttctgccacaggggaaacagagatggatgcaaagctcaaaaacactcttgttttgtcactaacctcaatgggtcctttcttccataaaaaaaaggctttcctcttttttgtcacttccaaaaatccaaaaaaccaagccccatggggaaaaagcctttgggttctcccagggaataaaaagggaaaaggaagggggggagaaaccggaaaggccatttaccaaccccaaccc

SEQ ID NO: 135401 - DNA, 802 bp, Arabidopsis thaliana
ttcccttagactatagaccactatgacgtcgcatgcacgcgtacgtaagcttggatcctctagagcggccgccctttgtttttttttttttttttacagacaaacaaagtccatttatttctgaccaacaaacaaaacattgtcacagcttgtacaaaccgatcttatttccagcaacaactaaaaccaaacggtaataaaacatttgttaattttaatctcactcgcgagcaacttcgacaagttgtttcccgacgttcttaccgtggaagagtccgatcaaagcagaaggtccattctcaagtccttgggctatatcctcaacatatgttatcttcccttctcttacgtgtggaagtatgaagtccaaaaacttggagtatctatcaaaaaattcgacagctgcaaaaccttgaacacggatgcgtttgtggacaatggtggctgtgttatgtaaaccttctggttcctttagattgtattgtgaaatcattccacacgctgcgattcggccatgtgtcctcatgttttggagcactgcgtctaacattttgcctcccacgttctcaaagtatatgtctattccttctgggaaacacctctttagggcagcactaagattcttttctttcttataattgaaaagcgtcatcataccccaactttagtttggaaaaaacaacccttctttttactgcttagcgtttccaacgacataagaatgccgcctctttcgcaaacggcccacaggtggccctactgggcccgaagcaggtgatacaaaaacaggcttttttttttt

SEQ ID NO: 135402 - DNA, 791 bp, Arabidopsis thaliana
ctatgacgtcgcatgcacgcgtacgtaagcttggatcctctagagcggccgcccttttttttttttttttttatcacagcaagaattcattccagcgaaaaataacatttgtacaacaggcaagattgtttaaagtttctatgcctgcaaaaccgaaggagaaactcttaaaacatgagaacaagagcaatagagcaagaagaaactgtgttcacaccaaagaatgaaaacgtgcattactggtataacatatggctggctatcataactttgaatattgtggagtcttggaaatgctgatgatctctttcagggtatccttaaggctgtgattatttgaggccatcattttgttaactttcctgaacccgtcaccgaagaatggtgactcatctgtttctatctgatgcttgcagaaatttaccagcctcttctcaaaatcagatgggtcaactttctttgatgtggctgtagatagaggagtgcgggaagaagaagaagaagaagctattgtggcagtatcaaaaacgtatgtctgacactccaaccacatgtagcctaacacttggcataatccttcttcaagaaccatgttaagattcctgtaaccattgggtctaagataagcatgcatcatcttatgggccaagatatatcctgtgagtaacctaggaagcccatataagatgagaattgcagtgaccttccacttgcgaacaaccctttgagactctggaaccgtatctagtatctgcttattcaacatcctccttactccttgtgagacactt

SEQ ID NO: 135403 - DNA, 740 bp, Arabidopsis thaliana
  unsure (1)..(740): unsure at all n locations
gactttaccaaccggtagacttcttctcgcccaactcagaaaacaaccacagagaaacattaccaaaacaagttctagaaaaggagaatcaaaaatctcacgggtttatgaaatcattaaaaacaatctgaacaaaaaatacgctttcaaatgaaaactcaacattttgttcccaagactcaaatcaaacagtgacacgacaatggtttcttctcttagtatgatgcttcagagtttttccagcccccataggactcctcgtccatacccctgcttcggttttccgagggcttgaaggagagagccacccaaatctctcctttgtactcttcatctttcaccacattgtatgcagttggtggaatacttccttccacgaaaaccggctccaacggaatagttgcttcaccaaccgcatcatcctctgtaccgacatctttgtcgaagattttcgcttttaactctgtagttccttcagacacagtgaagataaatgtctcattccattccggagttgtccccattccttctgcaacgttgctcttctgatcttgagtccgacaagtgagttgcacataaggatccatgttattcagaaaatctgcgtcctcgagacctttggcgctgacaagaacaacttcaagagttccatgaggcatttttttttggttttttctcttgtgatctttttgttttcaatttgaagattcagatcccaaganaganagatgcgaggcttt

SEQ ID NO: 135404 - DNA, 519 bp, Arabidopsis thaliana
  unsure (1)..(519): unsure at all n locations
acctaaaccatatatcaaaatttcgttagattagaacttttaaattcattcaaaagccatgaagaagatcgagttagggcaccatagcgaagtccctaaaccggactgcattaaagccctcattgtcgaattcatcactacctttctctttgtcttcgctggtgttggatctgccatggccactgacagtttagtcggaaacacattggtgggacttttcgcggtcgcggtggctcatgcattcgttgtggcggtaatgatatctgcgggccatatctccggtggccacctcaaccccgccgtcaccctcggtctactcttgggtggccacatcagcgtatttccgtgcattcctttattgggttgaccaatttgttgggctcctccgaagcatgctttcctcctcagtttaccttaaccgggggaattgggaactccggttnacaaaattggcaaagggggggttggtttaccccggaaggggcatatgggggccaccttaaatttnaattnttttaa

SEQ ID NO: 135405 - DNA, 584 bp, Arabidopsis thaliana
  unsure (1)..(584): unsure at all n locations
agacttcctcntcgccgancggnccccgccnntttncaccctgttntagcggaggtctgacttcagcaacccttgaccccagttnattgggaagggaccaaaggcagngatgaacctctggtgagcaatggtctcaagggtcccagaagaaggtttcgcctcttgtacaaggttgcagacatttcttcccttagtgcgtacaagtcaaggattatggaacttattgagaaagctgaaacacagccaaacttaacccatcggtgtgctcatttccatcgtgatcgtcttcctctctctcttcttcaagctcatatttggtggtgcaaaggctaaggtagaaaagaagaaaccggaaacagctgcagagacctcgacaagcgaggcaaagacagaggagaaagcagaagcggtggctgcaccacgaaagaggcagacgaggcgtgagagttagataaaaagaggattagattttgatttttggggctttttgttttgatttatcaccgtatagacaaacagtagtggacctgatattaagacgattattgtaacatgttttttttgtatgcttttagtttcacatg

SEQ ID NO: 135406 - DNA, 430 bp, Arabidopsis thaliana
  unsure (1)..(430): unsure at all n locations
atcttatttgacaacatcttgatatctaaagacgagaaggttgctgttacttacagacaaagcacttggaagcccaagtttgatgtggagaaagagaaacaaaaggcagaggatgaagctgctggtgaggcagatggtctcaagagttaccagaagaaggtgttcgacctcttggacaaggttgcagacatttctttccttagtgcgtacaagtcaaagattatggaacttattgagaaagctgaaacacagccaaacttaaccatcggtgtgctcatttccatcgtgatcgctttcctctctctctncttcaagctcatatttgggtggtgcaaaagnctaagggttagaaaagaagnaacccggnancagcttcagagnccctcgncangcgnnggcaaangccagagnnggaagcagaancnggtgc

SEQ ID NO: 135407 - DNA, 399 bp, Arabidopsis thaliana
  unsure (1)..(399): unsure at all n locations
aacggcggatcatgcacaaccaccaccaacaacacctcatctttagacggagtccccaaaggattccgattcagatccactcaacagcagcaacaacaacatgatcctagtcctagccgtcgcggcggtgatgtactgttacagtggggacaacgaaaacgatcgagagcctctagagctgagatccgatccaccaccaccatcacaaccaccgccgatgattcttcgtcttcttcaggtcaaggtaagatacaatcaaacaaaccgcaaagaagatcgatgaatccttctatgccacctncaccaccagctccgnngntttttttgggccggagtacaaaccctagnaacggtttcnttatnggcaaggantcttttttccctttccagggntctagg

SEQ ID NO: 135408 - DNA, 576 bp, Arabidopsis thaliana
  unsure (1)..(576): unsure at all n locations
agacagagaactttttttttcttcataattataaaaggggaattatgatttatgaagaagggatctccaccatttttttttgtacacgaaacaaaagaaaaagaatttaggaaccccccaaaaaaaaaccaaaagaaggaaaaataagagtaaatattaaaataaaaatagagtaatttctcgatcgatagctcgctctgctggttctctgttggcatacttcgcacgctcttcacaagcaagccacacgtgcatcttcatatttgttttcctcaaaagagaaatcgtaaaccatacaaaaagaaaatgaaaccagggaccaaaaatttactcggagtcggtgtccatattctccatgcctttcaatcctctccggttctgcttcttcacattttccttctccctaacttcataacgggtcttgggcaaatccggtaaccaatcccgggaaacaaactgagggggttacaaggtctagccgttcnggggcntggggagttagnccttanacngantctcctccttccagaaagatgagccggcactggggtccctccatancncttgggccggggg

SEQ ID NO: 135409 - DNA, 537 bp, Arabidopsis thaliana
gaaacataaagcttgtggtggtgaagagaaggttgcggaagaaggatctattggttcttctggtagtggttcctctggtttgtctgaagtttatactctccctccttctgttcaagcaacaacaaacaagtccgtggaaacaagcccttcaagtgcccaatctcagcccgtgaatttgggcaaagaagcgagccgaaacatcatagaagacatgccatgcgtgtcgacaacgggcgatggaccgaacgggaaaaagattgatgggtttctgtatcggtaccgcaaaggtgaggaggtgaggattgtgtgtgtgtgtcatggaagcttcctctcaccggcagaattcgttaagcatgctggtggtggtgacgttgcacatcccttaaagcacatcgttgtaaatccatctcccttcttgtgaccctttgggtctcttttgaggggtttgttgtttcggaacaatgttacaaatcctcattatctcccaggtgtataaacataaatttatcgaacaaaaaaatttcagattttatactt

SEQ ID NO: 135410 - DNA, 570 bp, Arabidopsis thaliana
  unsure (1)..(570): unsure at all n locations
ggccaatgnggtcaccggatggcgattcggagagcctncaatgagctccttggccncctgggtccccggcatttgggnagccnactntggngnagngctaaggactaagggtttccaaggtncttccccatggcccttttccccttcaggtggaacccnattcggctctcatcaagncatttcttcctcggtatcctctcaaacccaaactaaagacactagggcattgctaagatgtattgcctgccacgtatttgacgaaatgtttcaatgggttatgatgaattggtttcgttttttcagaagaaatcgaagaatatgctgaaaataacttcggttcttgttttttttattcagacattatcaatcgcaaagctttagtttctttacctttgtcagatcttgttgggaaaaatgaccaaagagattaagatggcaccgagacaactagagaggcaagcatatataagtatttttgtgtatttgtgaagagaacagaacaagagtagttaactttgtaactcttttattgcttacttcagatgattacaaatgccaagcacttctaac

SEQ ID NO: 135411 - DNA, 371 bp, Arabidopsis thaliana
gaagaccatttcctacatcaaaatttatggaagagccaaaaatggatgagattgcagatccagaaatgggcgaaatttcagaagaagagctttgtcaaatgaaagctttcctattgctctcactgagatgcaccggtcatgttggggaagctccaactatggtggaagtggctaaagaactaaagagtattcaaagatgtcttcacaatgacactttttctccttcagttgaaacccacttcggctctcatcaagacatttcttcctcggtaatcctctcaaaccaaactaaaggcactagggcattgctaagatgtattgcctgccacgtatttgacgaaatgtttcaatgggttatgatgaattggttt

SEQ ID NO: 135412 - DNA, 542 bp, Arabidopsis thaliana
  unsure (1)..(542): unsure at all n locations
gatcaaagaatcttctttttgccctgatatgagcttgttttacaaagaactacagtacatgcattgtttacatcagtgttatttgaatcaagctgaaacatcttcctcttcaacagaggagaaaaagacaattgaatagtgttttttagagacttgcacattaggccaataactcaacacgaatcacttccagctgaactttaggttgagactaaaaaaccgggttcaagtaaggctaacttcccgcataacctttgctacatcctctgggaaaacagggtttatgtaacaacctgtgccaatctcaaacccacctacccccagaaagctgagggacaatctgtaagaaccagtgcgtataaggtaattgtgattctggtaccttgagtggagaagtatgggtcatatagttatacggtggatcgttaagttgccttgcaacctcctgagcatgagttcagaagccccaaggcaaagcctaacgcaccgngtgatgaatgganatgtcttcggaaaccatccaaggncgtncnnaggnactt

SEQ ID NO: 135413 - DNA, 419 bp, Arabidopsis thaliana
gatgcagatatggcggggtttacctcgattctgatgtgatagttttgggttcattatcgtctatgagaaatactattggcatggaggatcaggtagccggtgaatcactgaacggtgctgttatgtcattcgaaaagaaaagcccattcttacttgaatgcttgaacgagtactacttaacttacgatgataagtgtttgcgatgcaacggagcagatctcttgacccgagtagctaaacggtttttaaacgggaagaatcggcgtatgaatcaacaggagctgaacattcgaccgtcctctgttttcttccccaatcaactcacaacaggtcacaaactattttgcataccctgcaatagaagatgagagatcgcagcaagacgaatcgttcaagaagatactcaatgagtccttaac

SEQ ID NO: 135414 - DNA, 358 bp, Arabidopsis thaliana
  unsure (1)..(358): unsure at all n locations
agagtgaagcattacctgtatggattactggaccaggacgagatgtgccaagctctttctatggtttacagcaccatgggcaacacgtgacttatgctccagcacaagctggtcacgtcgcattcccaggtatgtaccatccgggacaagcagtaacagcaacaggagtccatcatccgcttttacaacatgtctcaaggtgtggctggagctgaaatggttgcacctgcgcctaacgttttccaacagcctcagcaaacacagatgaattggccaagtaattactgaaacaggntgtataaaggnggaaaanatttttanaggtttcanccangtttcaaatttcctgggggattca

SEQ ID NO: 135415 - DNA, 648 bp, Arabidopsis thaliana
  unsure (1)..(648): unsure at all n locations
gagccttgattttatttgatgatcggagaagataagatagccacgtcatttctataaaaattccacaattgttttttttctctggtgcagaaaatccacattacgtgacaaatgatgagagcaagatcaaagtagactctttgcaactaaacagattacaaatcttcattgaacaaacacaggagaagatgaatagtacagtctccggatgaaagactattcatttgctatggaattgggctgaagaaaccatcatcactggatgttgatgtcgtggaaagatggcaagactgcaaccagaggatctccataacctacggagtctccgtcatctgaaagaagcttaaggacttctccagctacatctgacgtcactggaagttctgttcccaactgatgtaagtatccaataacttggccttcctttattgcatcaccctctttgcagctaggagattgtttctttccttttacagttctgctcccctgaaacctgcccactgccggagatgggactaacacatagttggtgganccagatgcctccaaagcagccaactttgctggtttcccatatgatgtattcttaaatggagacactttctcagaggaaggctttgcttgagatgggctaggagccgaagaagc

SEQ ID NO: 135416 - DNA, 477 bp, Arabidopsis thaliana
gtccgaaacacaggagaagatgaatagtacagtctccggatgaaagactattcatttgctatggaattgggctgaagaaaccatcatcactggatgttgatgtcgtggaaagatggcaagactgcaaccagaggatctccataacctacggagtctgtttgcacacgaagcatgagttcatatcaattcacttatataatttctgaatgttcatactaaatgaaacggtttgaatactcaaatgtttacctccgtcatctgaaagaagcttaaggacttctccagctacatctgactgctcgacaaatagcaagatcgatgagtctgattagatagtttcaaagaagagatggatatattagttaagatattaccgtcactggaagttctgttcccaactgatgtaagtatccaataacttggccttcctttattgtatcaccctaaggagtttttttcacttagctctttgatctt

SEQ ID NO: 135417 - DNA, 493 bp, Arabidopsis thaliana
  unsure (1)..(493): unsure at all n locations
ccaaacaaacaaaaaatcattattcgttatacttatacaacatgatgatatggggtccaaaccgtacaatggtgtcaaaataaataaaagtgtaaataagaactaaaacatggagaatttatttggtgactaaaaataatgggcagggaaggttcttaggccgttccgacaaaaccaaaaccggagacgaaaaaggctgtggcctgaagaaaaagatagaaatgtaaccatgtgtgcccatagatcaggccatagagtgcacatcctaatatgtatacccccaccatcacttccttggaattcactctttgataacaagattttctttggactacccgagagagtagcttactcttcaaagcatctcccagtttttcggtcacaacccattcgtttactcttcctccttcaagaggccatgcacgacctttggtcgtgcnagcattaaattccgacagccnattccggganaggttngnttcagggngaaaac

SEQ ID NO: 135418 - DNA, 565 bp, Arabidopsis thaliana
  unsure (1)..(565): unsure at all n locations
tccaatggcggattcatcatcaggaacattccggccagctccgccgataccgattcccaaatacgcaccatccaatagaaatcgtaatcagaaaactaatcatcaaaccgatacaaacccgaagaaaccacaatcaaatccagctcttaagcttccgcatcaccgaaccagatactacaaaccggttaaggaaggagttatctcctcagacggtgaccgcacaatcttaatcggcgattccggcgtctcgtatcagcttcccggtgcaccgttcgagtttcaattcagctattctgagacaccgaaagttaaaccggttgggattcgtgaaccggcttttatgccgtttgctccaccgacgatgccgagaccgtggacttggaaagcaccgttgaggaatcgnggaggaagnttccattgtttgnttcttttaatccacccgccggcgggggggaaatttggggttaggatttaggnatacctgggccgtancgntttgggggttccaaagnaggnntnantggggangggttttggggncntttagggttgggnaagattttta

SEQ ID NO: 135419 - DNA, 475 bp, Arabidopsis thaliana
  unsure (1)..(475): unsure at all n locations
agaagatgttgaggttggacccgataactacccaatggttcttatccaaataccaatgtacaatgaaaaagaggtctttcaattatctatagcagcaatatgtagtttggtctggccatcgagccgtctagtagttcaagttgtagatgattctacggatccggccgtaagggaaggtgtggacgtagagattgcaaaatggcaaagccaaggcataaacataaggtgtgaaaggagagataacaggaacggctacaaagccggagctatgaaagangctcttacgcagagctacgtcaagcaatgcgacttcgtagcagtcttcgntgctgatttccaacccgagcccgattatctnatccgcgntgtccctttccttgtccacanccctgacgttgctctngttcaagcccgatgnntatttngttancgngaacanntgcttgtngtcgnggntgcaagtgntngtcttgtt

SEQ ID NO: 135420 - DNA, 483 bp, Arabidopsis thaliana
  unsure (1)..(483): unsure at all n locations
ggtaatttatctttgagatttatgatatcaccaaacaaaaaggtaagtttacttgaacgttaaaccaaggcaaaagacgagttagaatgagatttgtgaatggaatacgtgaaagaagaaacaaatagcatatcacacaaggttcaaacttcccactcagtaatggaatataagtctactattcttcggcttcaggttttactgtccctcgattaaagcaagccaagaactctatgtttccgtctgcgccctttatgggagattcgataaagcctttgttggtaaatccatagcgctcaacaccgttaattacctccccaagaacctcttgatgtacttcggggtctcccactatgccacccttcccgacctggtggcttcgggcttcaaattggggttttaacaagggtaactaaagccgcaatctctttcatcacatcaaanaggggganncctaagatggnatgaagangggaagggcca

SEQ ID NO: 135421 - DNA, 381 bp, Arabidopsis thaliana
  unsure (1)..(381): unsure at all n locations
attaacatagctttgcttaactgttactcgcagttgttgtctgaacatgagaactggttctttgtttggcaaactggtgttgaagctttcgatgaaatggatagtcttgttagaagtcatcctcgtctctttctatctccgtttttgaggtcgataggtgtggcgtatgcggctgcagatttggttatctcgagagctggtgcaatgacttgctcagagattatggctttaggcaaaccttctattctgataccatcaccacatagcgatgaaggggatcaagtaaggaatgcttctttaatggcggacatttttggatcaaaggttaataacagnaagagganctagatacggttcaccnnttagnngctgccatgggag

SEQ ID NO: 135422 - DNA, 526 bp, Arabidopsis thaliana
  unsure (1)..(526): unsure at all n locations
gaaacaaaattattatttttgagagcatgggtgaaaaattgcattttgcacgttcaaaagtacgccgataaataaaatgacatcgggtaaaaatattttttcaacatgacaacaaacttaatacatgcctaaaagcattacaataagtaactaggcttgagcaattcacacaagataggttatgacccataggatgtgtttcgttactggtcatcacctctacgtgacaaccgagcagaaccagctttagccaaacccgaatagtagtctccgacgtttgcaacaaatagaggatctctctcttcaatctttagagagtcgtaacgttttgaaccatgatcgttcccttcatcagattgctccaagtcttctgttaaatcttccatggctttcttgagattagccttactcatcggtgcagcttccccggttgaaatccccaccatggctaccttgggaagatggactccgagattcccttcccaggtccaaccctgcccgggccctgggagggggggctttnnga

SEQ ID NO: 135423 - DNA, 423 bp, Arabidopsis thaliana
  unsure (1)..(423): unsure at all n locations
ggcgagaattcaatatagtgatcagagaagagagagcaaagggaaagggttaatcctcagcaatgggctctcacctttccaaacaactcgagcggcgaaaagccatctccacggagaagaaagccctcaccgatctcgagaaatcgtgcggctgcgagtttccggggtgtgattacatgccttccgatcgtaaaaactggatggccggcgttcgacctgaaaagcttcacatcaacaagatcgtctggcctgggacgcacgactctgccaccaacaaaatcggtatccgattcgtgtctcgtcccttttgttaagtgccaatctnttctccatctataaccagctcgtggcgggtactcgagtccttgaaaattcngggtccaaggagntncgccgtttnttccaanggtntcctaaaggctt

SEQ ID NO: 135424 - DNA, 362 bp, Arabidopsis thaliana
gaatagggtgctaatgagtaattactgtgttatatattgtcctggttactggacattcatgtgatcagaatctagctgctttgtcttttgtctgactgggtatttattattattaagtttctaaataagaagaacaagattagtttcacgtgaaaactaaatatgttcaatctaatttaagcttaatgtgatcttgcaaagaaaagaaaaatcaatatggcgtcttcttgcttttttagtacttttacagttttactatataattggcgttgttttagtcaatatattttgaaggcatgaactaatataaactatgattatgcagtctcattcgaaactatcatccgaggatagaacaaaac

SEQ ID NO: 135425 - DNA, 501 bp, Arabidopsis thaliana
  unsure (1)..(501): unsure at all n locations
acaaaatatccattttatttgcatccacaaggacataattatatgcattctcaaaactacgtaaaatacattttgcatgaaaaagcttataatatacacgagacgtgcatgtgtgtgatgatgatatgatgacataaaaatctatatctagagaaataagaaaaaaatgacgagtgaattaattatttaacaaagccttggaaaactagaacttgaatgtgtatgtccatgtctcacagatcttgacattacttcactcttcttctccttactaactttttcagaattattccattgcttcctctccaaattccatccattagatcatcttcaaacttctccgacatatcaaaacctttcaaacacaccggtatgggttcccctcctaagtacctacggggattccagacctggtttacttgggcctggcccccctgaggggggccggnccggtggaaatggtgggcctgnggctgacgnaaatngggggctggggttttt

SEQ ID NO: 135426 - DNA, 475 bp, Arabidopsis thaliana
  unsure (1)..(475): unsure at all n locations
aaactatctcctatatacaaggttgtaaaaactgtatatgcatcacctagtcgtgttaattttcatctggactcaaagaaggaagtggaaacaacacctgcctacccagaaatttgttttgccgtagatgattttgactcaacctttgatgctgtggttctgacagataaagatcattgctattgcgtactacttaattctcacgatggggcagcctttccaagtgcaactgttaaagattcgagtgattctaatacgaatgctgaccctagaactgtgaaagatcctaaggttactctgttttctgggtttgtcagctatcagatggttcgagaagcctatgacaggggggaggaatcggttttggaaggtctcctatctctcgggtcactattaccaggaaaagcaagacaggactttatatcgagaggcccaaggaggaccgttgacgaagtttaagtaaccttgtnncttg

SEQ ID NO: 135427 - DNA, 419 bp, Arabidopsis thaliana
  unsure (1)..(419): unsure at all n locations
gatgaaagggtctcttgggtcaaaaatgtacataatttataactgaaaaaaagaagaaaatttgatggaagaaacgtgtggaacattaggagaaagaaagagagggatataaataacccaaatttagaagatttaaaatacccgaaaatatgtgaatctgttttgattcggctgttacatatattgagatgataggcgatgtgttgaagctcaagagttgttatgtgggagaagctaaggtaagttttaggatgaaaccgatgatgagtccgatgagtccaaccatagctgccaacttccaggatagcccatttccgctgttcccctgggtttctccgcctccttaccggttccaattatgttgcacctgttggggtttgcttaanggggggatncgnccttcctaagncgnggaaaaa

SEQ ID NO: 135428 - DNA, 495 bp, Arabidopsis thaliana
aagtcgttagaacctgtttccaagttctcggatttgaatttgcccacctactacatgctagctgctggtttcctctggatgtctatgtggattttcggtgtcatcggtgccttgaacttctattttccgccacttgtgattattggtttggtgttaagtctggcttggacgacagaagtgatgaggaatattgttaatctaactgtgagccgggtcattgctttgtactatcttaggggaatgcagtctagtaccaggtttagtttccaaagggccttgtctcgtaacctcgggagcgcgtgtttaggatctttgtcttgttccaacaatagaagccttaagaatcttggcaagaggattaaatttgtcctaaaggggtgaagatgagttcatgttttgctgcgctaattgctgtctcagactcatggacttcatatttgaacatggcaatggctgggcctttgtacagatagcggcttatgggaaaggatttgt

SEQ ID NO: 135429 - DNA, 778 bp, Arabidopsis thaliana
atctcaatatatagtttcttactttaaggaaaaataaagttccatatctcttaatgggtcttacaatggttcacaaccctagaaaataaacatacaagaaatttcttttaaaaaacacttaaagagttgtaattagcctcttatacgtctatttttgtttgcttcctcataatcttatttgaactaattaatggattatgtccaaaacaatacaagcttcttaaatcttttgctggtcttcctcggagaaccctcagtatcactctttagtctcatctcctccatctccagtctactctctttctgcttcatcatcaccggattcgattccttagattttagcctcattttctctaaaacattcaccaaaccctctagcgccacgtcagcatcctcactcttcatcagctcctctgctacttgtgccggcgtcattacttccccgtcaatcaaacgctcaatctccggaaatagacggtgtggcatcgcagcatcactcaaacccaagtagttagaagctaaagtcttgaatccttgaaaagagcaatgccccatgtaaatgtgcatatccatacgtcctggtctaagcaatgccgggtcaagcctatctttatggtttgttgtgaatattataatccgctcgtctccacagcttgaccatagtccgtctatgaaattcagcagccccgataacgtcaatggtccctgagactcgccacggttcttgccttcaacaggctgctcaattctgttgggtaaatccactgcacaatcgatt

SEQ ID NO: 135430 - DNA, 467 bp, Arabidopsis thaliana
  unsure (1)..(467): unsure at all n locations
caacaactcgattacttccaacaataccaacaacgtgtgagtcgcttgattgggaaaccgcaaactcagcggctcgtgagtcaagcgcttgtattaatcacggtcggtggaaacgattttgtgaacaactatttcttgtttccatattccgctagatcacgccaattcactctaccggattacgtccgactcctaatttctgaatacaaaaaaatactattgaggttaaattcacttggagtgggtcgagttctagtgacaggagctggaccactaggatgtgcaaccggccgaactggcgagatcaaggtacgtccgaatggaagatgctcggccgggctacaacgagctgcatctctatatgacccccgagcttctttaaagtgataaatgacacttcaacaaaaatttggggagaaatgtgttttttgcgccgaacactaaccacctgcgaggggatttttnaa

SEQ ID NO: 135431 - DNA, 465 bp, Arabidopsis thaliana
  unsure (1)..(465): unsure at all n locations
ggagttgacattgatacaagtcgcattgaggatgctcactggcatcttaggaagtttgtcagaatgcagaattctactaagcctagtgaaaagaaatctagttctgagggtgccgatggagtacatggatcgaaggagccatctgtttctctctccaatggcgaggcaaaggcagatagtgcagaaactaaagacttgtctcagattgtgtcgtttcagaaagagaattttgttcaaacccgaaatcttgacgacaatcgttatgatacaattctatgtttgagtgtgacaaaatgggttcatttgaactggggtgatgatggtttaatcaccttattttcaaagatttggcgtcttcttcaaccggggtgggtatctttgtaattgggaccccaagcccttggaaattcttttggaaaacaatccgtcggtggtctcangggccaactnnnaattgttttcccg

SEQ ID NO: 135432 - DNA, 534 bp, Arabidopsis thaliana
  unsure (1)..(534): unsure at all n locations
gnccgnanaccccgtcccccggnttccgctncccangggancccatgggcttngggatccaaggggnggggccccccaaattcntacccntcccnggttctccttccttccatggacttccagggtaaggtaaacccctttagctgcttcactccaatatccttccatgtgtaaccaccaaaatggttaccatgtcggtttctaatacaccaatcccgggtttgtttatcgcagatgctatgaaccaggtgcatgaagaatccacaggagctgcaaccgaagtttatggagaaggatattcactcagctgcatttgtgcagaaatacaaaaagtctaagaagcaagtatcatcgacgggctttgattcatctcgctgctaaaacttcatctattggctgaaaacaaacttacacgttttgttttttttgcttccgaccttaattcgatgtgtaagtaaacaaaactggttaaaagtcgagatctatattcgagatcaatatatatcattgtattacataatcatgttatgctct

SEQ ID NO: 135433 - DNA, 452 bp, Arabidopsis thaliana
  unsure (1)..(452): unsure at all n locations
atgttcattagatcagagaagagcttcgcaaagaaacgttacatctagctagagaaaacttggagaaggaaccacagatcgtggagctcagaaaccaagtgaatgatatcattcaatctctgagtgagttaattaagtataggacacttctctccattcgtataatctttttaaaaacagtgcagaataatccgtacatccgagcttgcgactgctcaagagaagctcactgagcttgagaatcaaagagaagagatcctcacattctactctccaggttctcttcttcatagacttcaaggtaagtaaaaccatttagctgcttcactcaaatatccttccattgtgtaccaacataaatggtacatgtggggttataatacacaatcccgggggtttntttntcgcaggtnnctnttnnccccggtgggttnanggatntantggnggnt

SEQ ID NO: 135434 - DNA, 708 bp, Arabidopsis thaliana
  unsure (1)..(708): unsure at all n locations
ggttagcagctgagaagctaaatgctgaagcggccaagaagatcataggtataacaaataaggataatgacatatggaagttggacctgcatggtctccatgccacagaagctgttcaagccttacaagaacgtttgcaaatgattgaaggtcactttactgtgaaccgttcagtatcaccaaatagaggtaggtcaaagaatgcagctctgcgatctgcatcacaagagccttttggtagattagatgaggaaggcatgcactgtcaaagaacttcttctagagaactgagaaactcattgcaggttataacaggtattggtaaacacagtcgcggacaggcttcacttcctctagccgtgaagacattctttgaagataacaggtataggtttgacgagacaaggccaggagttatcacagtgcggcctaaattccgacacagctgaaaatttgtttgatctcaaacttagcaaatacttttgtgttacttcattgttgttgtatcatatccccttaagacttgtcatatcattcttctttgtaacatagtcaggttggccaattgtttagtgtactcaaaaggtcgataaaatagaatgtaatgtggaagagcagtggtatttgtagtgagatcaaatgtaacttaagtggggcttttatataaacaaagattgatttttttctcatgaatnnnnnnnnnnnnnn

SEQ ID NO: 135435 - DNA, 497 bp, Arabidopsis thaliana
ggagaaacttacatatgttgacaaagtgcagtgtaccgtccttgaggtcaaagttattgaaggccatggtattacagttgatgttgttttggtcaacggtgtactccgtgaaggtgatcaaattgttgtttgtgggtcacagggaccaattgtaacaactattagatcattgttgactccttatcctatgaacgagatgcgggtgacgggtacctatatgcctcacagagaagtaaaggctgcgcagggtatcaaaattgctgcacagggccttgaacacgccattgctggtactgcccttgcatgtgattggaccctaatgaggacatggaagaagccaagaaaaatgccatggaagatattgagtcagttatgaaccgcattgacaaaagtggtgaaggcgtttatgtacaagcatctacattagggtccttggaagcattgctcgagttcttgaagtcctcagatgtaaaaatacctgtcagtggtattggcat

SEQ ID NO: 135436 - DNA, 431 bp, Arabidopsis thaliana
cgattgatggatgtgtgcttcaatgtgagacaaaccctttggatcatctctcatgcccaatcgtgagcactgctggagatgaagacattgaaaatatcttaagccatgtggaagtgaaagaaactgttactggaaagattaaagcaaacagtgtaaccgttttgcagacaagaatcgagggaggtgcaaaggctgtttcaacaaggggagacttggttctgcagcgtgttcgagtcatgtattccaaggcttacctctatttctggtttgatgtagattatgaatgatttttgctggttttatttatttttcttcttctgtctgtaacattagtaatctgtgtgatgatgggaaatgatccatcttcatttgtactttgtgtttccccttaagaccagacaggtcctttgttgtatgcttattatgttcag

SEQ ID NO: 135437 - DNA, 495 bp, Arabidopsis thaliana
cgaaacgaacaaggattgtggatttcactcagccttacatagaatcagggcttgtcgtggttgctcctgtcacaaagctaaatgatactccgtgggcgtttttacgcccttttacacctccaatgtgggctgttacagcagcttttttcctcatcgttggatcagtaatatggattcttgaacatagaatcaacgatgagttccgcggacctccaaggaaacaaattgttactattctctggttcagcttctccacgatgtttttctcccacagagagaacacagtgagtacactcggtcgtgctgttctgctcatctggctatttgtggtactaatcataacatcaagctacacagcgagtcttacatcgattcttacagtgcaacagctaaactcaccaatcagaggagtagacacactcatcagcagcagtggacgagttgggtttcaggtaggttcttatgcagaaaactacatgattgatgagcttaaca

SEQ ID NO: 135438 - DNA, 488 bp, Arabidopsis thaliana
  unsure (1)..(488): unsure at all n locations
aggataccaagtaattcttttttttaagaactatgtatgatatagctttgccttacaagtttatgcttcactttctttggttaaaaaatgttccgtattcttcaaggcttattcttgaagtacagttaaaatcaaaatctgccttctactatataaggatgaggcatgtgtgtctgcatttcttcatctttcatgcttgagtcttgatggatctgccatattggtctagaaggctttaaagaaagatcatcgtttcgtttacgcttcatccttctcttggattcgtcttctttttcatcaaaataagctagaaatgtctgcaatgatttagaacgngaactttcnggggaaganactggggctctccncanattgccggggggaagaagcgcgganaactgaagaagagagaaggncgtaacaaggnnccccncaggaancccgagtcgggtaancgccgacncacgacgaccggggacgggaancna

SEQ ID NO: 135439 - DNA, 488 bp, Arabidopsis thaliana
  unsure (1)..(488): unsure at all n locations
gaaaccaagaacgagggggttgttgtagaagaaagccggacactttgagtctcccggtaaacagtcatgatttagccttcacgaagctgaaggaaatgaacagctgggcggatgataacttaataagggatgtattgttatccacagaggatgattttgaaatggccttagcttttttgaaaggaatggtttcttctggtaaggaggatgaggagccaacttcaaagattgaggggtattcatccgataacagaagatcggaatatagaacatttgagaaaacagttacaagttcggtgaagatggctgcaagttccacatttgaggatgctggcaagtatgatctggaaaatagtgatggaagctcgtttctggtcaatgcatctggccaatgaaaagttccctgatggtattcctgaacctgatagtttcattcagcggcttcagtccattcccgnnngncctaattggnngaagtggccnttnct

SEQ ID NO: 135440 - DNA, 467 bp, Arabidopsis thaliana
  unsure (1)..(467): unsure at all n locations
ggttgctcaccatgcgatgttagagcttggcgatgttcaacttgtgacctaccttgctgagaaaaaaccaacaggacaagtatttttcagaaaaggccttccttcaatcttctctttccccccaaattgtaaaaccgcagactgcctcatcaggtagctcactgactgaacccttcagtttaacggacaaggtttgaaggagagctgtcagcacatgcaattaccgattggttcgcgaccactgtactgggcttacctagagtattctatcacacaaaagaaacactggtatctaagttcctctccaaagttccacctaataaggtgaaaggccattttattctcacaaacaggtgagcgagcttacttcctattgttccgccaggctgcccaaaggttattgggaattttggcctctctatctaacgtggctttgggggaaggngggtgcatttttntggtngaat

SEQ ID NO: 135441 - DNA, 533 bp, Arabidopsis thaliana
  unsure (1)..(533): unsure at all n locations
cgccctctttttttttttttttttttttttttttggataaacagaaaatttagtactatatgtttgatgatttgtataattacttggtaactttaactatacaccaaactggtaatcacacaacaaacaaattgaacaacatttaattacatgagactttaaatctgcaggacagttgcatatgcttcctcgacactggtttgtcggtggatgtagatcctttaattttcaatctgagtcactcgaactagagcttgagcttgaagagttggacttcgtcttcttctcctactttcctttttgctctgcaatgggtttccaccgaattctctggagtttcttcggacacgggactctggacatttgcatcagtgttgcttgcagtgggctcagctttcgctttcncgggaanaacctcatcacttaggggtacattacanggctagcagcntccggggggataaccacnccctcagggatactccatggcaaccctttttagtcaaaggtggggaatctccanggccgggtcc

SEQ ID NO: 135442 - DNA, 584 bp, Arabidopsis thaliana
  unsure (1)..(584): unsure at all n locations
ccgatttgctctctcaaatctcaaatctcattccttgatttctcttggagacaacggatccaaaaccgacgacactctcaaaccaaatccatggagattttccagattccgattcagtttctccttctctaatcaatctcataagattcgcccaccaagtgtttgttgaaattcctgagagagagatgaaggattttccttcttgctttggtgaaaatggagttcaagttgcggattcatcgtcttcttcgaactccggtaaaaacgctcagaatttggttacttgtatctaccaatgtcgaattcgcggaagaaattgtttgatcactgtgacatgggctaagaatctgcatgggtcaaagtgtaccagttggtgttgatgatttctggtaaccaaaggcttttgtaaagccggggttaagccgtggctggttttctaaacggaaaggggcctaaggggtttgngggggattcggggaaaaaccgnttgtttttnggggccttncggtttnnaaattcgggncaggcccnaaggtttgggggggttnnttttggggtttttttnnaanaaangttttctttta

SEQ ID NO: 135443 - DNA, 511 bp, Arabidopsis thaliana
gtgtaaggaaatatatattgcagaatccaatcatgaatcaacaaaaaaaatgtcgataaggaatcaacaaactcttataaggtttttgttagcacccagaaactctctcttttgttctactcgctcttccaagcgtacagaatcaacgaaaagccaaaactatgagacttggagtttgttgttgtcacgtcctgtgagaaagacaagctcttctcagtagattgacaagtcctgaacatgaacacagcgtttcccgttgtaggcaacccaaagagccaactatgaacatcccatagaacttccacagtcattttattaacaactatcgtatcgttgccacgaaacttccacttaagccgcttcacctgcaacaacgtcttaccatccacacgaacaacgaggcaaggatcggggacattcgtggcacactcaatcaacagatcatggaatttcccatcagcaaaaagctgtggtttcgtgcaaacccttccaaaatggccttttggatgaa

SEQ ID NO: 135444 - DNA, 552 bp, Arabidopsis thaliana
  unsure (1)..(552): unsure at all n locations
ttttttttttgaatgtaatgtgtaatattattatcaatttctttttttttttttcttcacaccaactaatcattttacatgatcataataatcaaacaaaacaaaagaataaacacacacaagacacaacacacaaattacacgatctgaagcaaatgtaaaaccgcttttaagaagaatcatgaaactcaaactctcccaagatgaggcctttctccggaggcgactgtttctccgactccagcatgaatagctccggtgcacaacaactggggtagcactcacaattatagtcagaacttcaagagttcttagattggcttcggtccagcctatggttgatctccttgcaggccaatcccatggcgaggagagtgagagaccaggggattagagagggagccgcggcggagtggagattcggggagtcccttggaagaacgttgatgatcccggtgagtgatgtggccattccgacgacgccggggttacgggatttttcgaaaacggcgcatnnccncgggagtatcggganttccgnggaatttccna

SEQ ID NO: 135445 - DNA, 463 bp, Arabidopsis thaliana
gttgagccatgtgaaggagagagccttgtggttactgtcttcgtgttctaaagctcagagattccggcttttattggaagggagcttgagttccggtttcgcgctgttgttcctgaaacattggaaggcaaaccttacaccaattctgcggtactttgtggccgatacagcgatgaggagtttttccagattagatgcagaggaaacaaagagatttactttcaacattatggaagattcaagatcgataagatatggcgggacgacatcttaccttgtcgtctctatctaagacactgtgtgttggctgctaagaatctgggagatgaagcttataataactttcttggatcatacattcttggggggtcgcaataacaaccatctgagagtatttaagcagcacagggtctggtatcatggcagaagaaccaccggaggctctaaagtctagatatggagg

SEQ ID NO: 135446 - DNA, 446 bp, Arabidopsis thaliana
ctcgcagtacatattgatgcggtggacaaaagatgcaaaaagccggctttcttcaggagaacctcagcagttgcagactaggctgctgcggtataacgatttgcgcgaacgagcattcaagctgaatgaagaggcatccctctctcaggagagttacaatactgcattccttgctctcgaaggagctataggaaactgtgctggtattaatacttccggcagaagtcttccagatgttgtaacgtcaccaactcaaggtctgattcctgtggaggaggacaaccatagcacaagtgcatggaaaaccaggcagaaatagaatccaactaagaaaagacaagcgaacccagagcaggatgttatgccagttgcagcgccagagagcttgcaacagatggataagctgagcccatggacggttggcattgaaagctattatggaacac

SEQ ID NO: 135447 - DNA, 353 bp, Arabidopsis thaliana
  unsure (1)..(353): unsure at all n locations
aaagacaacaacgaagaaggagaatcaacaatagattcattcgctgctgagattcagattctcggtaacatcagacacaggtgcatagtgaagctattaggcggctgttcgaacaaatcagtgaagctgcttctatacaattacttccctaacgggaatctacaacagttggtgcaaggaaatcgaaacttggattgggaaacacgttacaagattgcaattggagctgctcagggtttggcttatcttcatcatgattgtnttccggcgattttncatagagatgtcaagtgtaataatattcttctggnttcggaatatgtagcgattctttnctgnattttggncttgcg

SEQ ID NO: 135448 - DNA, 895 bp, Arabidopsis thaliana
  unsure (1)..(895): unsure at all n locations
gagaaaggtacctcctttcatcaatctatagtcagaacaaagaactatctctctctttctcgttcataaatctccaaaaccactcgagcaagaagagaaccgagtcgggcaatcgcaaatttagtttctttgttcactgaagcttcaaagtgttctgagtaattggaattgaaggaaagatgagcaatggtggtttgagcattgatgagaaagaagggttgatagacaaagatgaagtcatgatccgtcgaatgaagaacagagaaagccaacgtaggtatcgagccaggaaacggatgcgggaagaagaagcgggtaacgatgataatctttcgtttgagacaatgggaaaacaagaagaagaagaagaagaagacgagggactagagtttaatggacctagtgggtaatgttgtagaacctttgttgcggcggggtttattccgattagaaacttggaaaaaacgaagctagaagagctcatttgattatgaacaaggctcaagatagttcttgtgagtcggttaaacggaagataaggccgcatcgtcgagattggaaagctgaagctagaaagaagaaaacttgattcttgaggattggtcaggttgctagaggatcttgcgaggtgatcgaggaagagaatgcacaaacaaagcagatttcagattcaataatctcttcaagatttctatttttgtagatattggaaatgatcaagacaaaagcaagtgatttgctttttcttgtctgtgactctgtctgtgtattcgaagatccatgtagtattatactaaggtttatgtgaaaaaaaaaaaaaaaagnnnnnnnnnnnnnnnnnnnnnnnnnnnnnnnnnnnnnnnnnnnnnnnnnnnnnnnnnnnnnnnnnnnnnnn

SEQ ID NO: 135449 - DNA, 658 bp, Arabidopsis thaliana
  unsure (1)..(658): unsure at all n locations
catacaaggactatggataaaaggtggagtctccaaggtttgactgctcttgtgaccggtggagccagcggaatcggtcatgctatagtagaagaactcgccggttttggggccaaaatccatgtgtgtgacatatcgaaaactctgctcaatcaaagtttatccgaatgggagaagaaagggtctcaagtgagtggctcagtctgcgatgcatccaatcgtctcgaaagagaaacacttatgcaaactgtcaccacaatatttgatggcaagcttaacattcttgtgaacaatgttggcacaattcgcacaaagccaacattagaatatgagggcagcaagatttttcgttccttatttcaacaaaacttggaatcttgcttatccatctaaggccaactttcacatccactcctaaaaggcttcaggcaacgggaattatttacttttaatttcctctgctgccagggatccgtatcattttgatgctgcatccatttatggcctancggaaagnnncttttgaatcngctngcccgnaantttggggtgtnaatggnaaaaanccgggattngngccaacgngggttcgcctaatttntcncnctngcntggnaaacctttttngaagcgntggtttacggggttttncggtttc

SEQ ID NO: 135450 - DNA, 638 bp, Arabidopsis thaliana
  unsure (1)..(638): unsure at all n locations
agaagtagagattttaggtagtgtcaaacacatcaatctagtgttcctacgtggatactgccgtttaccatcttcaagacttctcatatatgattatctaaccttaggaagcttagacgatcttcttcacgaacgagctcaagaagacggtttgttgaactggaatgctcggttgaaaattgcgctaggctccgcgaggggtcttgcttatctacaccatgattgtagtcccaaaattgttcaccgtgacataaaatcgagcaatattctactcaatgataaactagaacctcgagtctcggactttggtcttgcaaagcttcttgttgacggagatgctcatgttaccaccgtggtagctggcacctttggctatcttgctccagagtatctgcaaaaatgggagagcgacggagaaggcttgatgtctacagctttgggggttcttctccttgagctcggttaccggaaaaggaccaacagacccgatattcgttaaaagaggcttgaacggcgccggatggatgaaccctgttttaaaggnatcggtngggggtntattggcaanggntcncccgtttcnncgagggctttttggnattcccgaananttnggggttccagtcntcccgnnntgc

SEQ ID NO: 135451 - DNA, 520 bp, Arabidopsis thaliana
  unsure (1)..(520): unsure at all n locations
tcacttgtggtttcttcgttggtttgacttccaaggagtgaggaagtggtgttgagctttggtctctgaagtcaacactggtgtcggcggaataattgagaaacacaagatgaagaagggtaataatctcaatggagaggaaaatgacttcgttgatgtcttgcttggcttgcaaaaggatgaaaagttgtctgattctgacatgattgctgttctttgggaaatgatatttagagggacagatacagttgcgattctagtggaatgggtgcttgcaagaatggttttgcatcaagacatccaagataaactctacagagagatagcttctgctacaagtaacaatattagatccttggctgattccgacatcccaaaactgccgtaccttccagctatttgtcaaaggaacccctaaggntccaccccccctggnncacttttnttttttgggtncggnttcggtatccatggcggccccggagggtcctaaccttttncccnnctngaccatagntgc

SEQ ID NO: 135452 - DNA, 544 bp, Arabidopsis thaliana
  unsure (1)..(544): unsure at all n locations
caaactcatattctctattttctgtctagttattatactatccgcctgtaattcaacggcggagctaccgcggctcgtccaaccaccagaacccgatgggtcactcagttttctcgttgtcggcgactggggaagaagaggttcttataatcagtcccaagtagctcttcagatgggaaatattgggaaggacttaaatattgatttcctcatttcgactggagataacttttatgatgatggaataatcagtccatatgattctcaatttcaagattcgcttaccaatatttacacagcaactagcttacaaaaaccatggtacaatgtattagggaatcatgattatagaggtaacggctatgcgcaacctcagccccatactcagggatttggactgccgttggggttttttttagatcttatggttnttaacgccggggattgttggtntttnnttcgtgggtcaaanaccgtccgnggtnggtatttnnttnacccangggccntgtttttgttgggggggggatttccgngaattaat

SEQ ID NO: 135453 - DNA, 478 bp, Arabidopsis thaliana
caagttcggaaagctgatggtatctcaaagggaatatatcaagtggcttaatggaatgggactaaggtttctgtaaagatgcttgataaggatctctacaaggattctgacactataaatgccttcaaacacgaacttactttattcgagaaggtacgtcatcctaatgttgtgcaatttgttggagctgttactcaaaatgtccccatgatgattgtgtccgagtatcatcctaaaggggaccttgggagctatcttcaaaaaaaaggtcgtctttctccagccaaagttctaagatttgccctcgatatagccaggggaatgaattatcttcacgacgtgtaaacccagaaccagtaatccactgtgatctaaaacccaagtgccagaaatattatgctcggtagtggaggacatctgaaggctggcggcattttggtttgataagttttgcaaagttatcatctgataaatcaaa

SEQ ID NO: 135454 - DNA, 503 bp, Arabidopsis thaliana
  unsure (1)..(503): unsure at all n locations
tgaagatgagttttgaagattatttggttgtgtataaatcgtgggagtagaaactctcagcgagtggatcggtctctgtggttgatatatattgaaattcgaaggttgaatttgagtagttttgttcaggctttaggttttacgttgagatctgtgagaagcttcgtgaaattgattgtgaaggagatggaatcagcgagctgggatctagacgccgccgcttccgccgctgcttcggtgaacgttaaaaacgcttccaccgttttcgcgaggccgagtcaccgttgtttcgcgtttgaatcgtttgtttgtgggaaaatgtttgagaattttggagctccctgatttctcgagacgtgaggaaattcgaaaagnttnagatcccgttgacccgnttcagtactttgaccccggancccgggttncgtcttttttccanggttcgnnggtnaaaaagaacntnaagcgttnnacaatccgaanntnggggntncttntttngg

SEQ ID NO: 135455 - DNA, 526 bp, Arabidopsis thaliana
  unsure (1)..(526): unsure at all n locations
ggatggtgaagtcgttaaccaaaagataggctgaaattttaagaatccattgagaatccatggataagctgaatttgtgcgaagaaattcgaaaagacgctggagagacctacaagttaaatccagaagatgcagattatttgatgagatggggagaagctttactagagttatctcagtttcaaaacgttatagattcactgaaaatgattcaagatgccatctcaaaactcgaagatgcaatattgattgacccaatgaaacatgatgcggtttngtgcttggggaatgcatacacttcatacgcgcgtttnactcctgacggcactcaagctaggattaanctttggcttagcttatcttttnctcccgggatagctgtagctcagcaaccgggtantcaaggcttccctaaatcacttcgnantggcgggccaagggtccncaactncncacgggggtttttaaaaccngtttncnctcactnttgggtngnggttnancttttngcaatccctgnccntta

SEQ ID NO: 135456 - DNA, 853 bp, Arabidopsis thaliana
  unsure (1)..(853): unsure at all n locations
ccgtccgtctaactctcttacggaagaagaatcaaagagaatcagattagagtgtgagtttttagaagttactaaatggagggtaaaggacgagttggctcatcttcttctacttcttcttcttttacagccgaactcttcggttccaaagatccttcgccaccatcttcatcctccggcatcttctccaccatgttccctcatccctccaagggttctgcaagagatggttcaaactccaaacatggctcacaagctcaacgtagagaatctttaaatgctcaagaagacagagttgagccatgtcatctaagctcttctctttactacggtggtcaagacgtatacgctcgatccaccaccaaccaaacttaccctccagttaaaaatgaccgtagaagaagcggagaagatgacgctaattggacagaaccccgcaagatgtttcaagggggaactggtggcaaggttctctttattactaaagaaccacttccctttagtttctttgtaaatctctccaggaacacctgaagctcaagccaagtactaatatctacttaaccaagactttgtataaataagtttatgcagaaaaaaaaagttattaggagatttctaggttaagtaataatatcgaagaattctcctagtagtagtgtcctcaaaatagatttctctagtacttgttataatcaactgtatcaatatttactctgtttttctctgtctcgtgccaacaaagtgatgaaatcattagccttttttaccaaaaaaaaaaaaaaaagnnnnnnnnnnnnnnnnnnnnnnnnnnnnnnnnnnnnnnnnnnnnnnnnnnnnnnnnnnnnnnnnn

SEQ ID NO: 135457 - DNA, 503 bp, Arabidopsis thaliana
  unsure (1)..(503): unsure at all n locations
gaagaatcaaagagaatcagattagagtgtgagtttttagaagttactaaatggagggtaaaggacgagttggctcatcttcttctacttcttcttcttttacagccgaactcttcggttccaaagatccttcgccaccatcttcatcctccgggcatcttcttccaccatggttccctcatccctccaaggggtcttgcaaagagattgggtccaaactcccaaacatggcttcacaagctcaaccggtaggggattctttcaaatgcttcaaaggaggcagagcgttttgggccattgtcatctaaggtctttctcttttaactangggtgggtcaaagacggtattacggttcgnttccacccatccaacccaaanntttccccttccangnttaaaaaattnanccnttagnaaggaagccgggtgaangncggccggttaattgggcaanaancccncaaagatttttttnaaaggggggaacttggtnggaaaggtt

SEQ ID NO: 135458 - DNA, 953 bp, Arabidopsis thaliana
gtctctctgaaaaccataccggatattttcaaatccatgcagaagctcctatctctaaccctctcccgcaacaaattctctggaaatcttcctccgtccattgcatcactcaaaccaattctcaattacctcgatctaagccagaataatctctctgggacaatcccgacctttttatcaaacttcaaggtactagactcattggttctttctagaaataggttctctggggttgttccgaagagtttagccaatatgcctaaacttttccatctcaatctctcccacaattttctaactggtccactccctgccatgaagaacgttgatggccttgccactctagatctttcatacaaccaatttcacctcaaaacgataccgaaatgggtgacctcgtcgccgtccatgtactcgttggagctggtaaaatgcgggatcaatatgagcttagacaattggaagccagtgagacccaatatttacttttacatcgatctgtcagaaaacgagatctcagggagtctaacatggttcttcaacctagcgcataacctatatgagtttcaagcgtcagggaacaatcttcgattcgacatggggaagctgaatttaagtgagagactagaaagcctcgatctatcaaggaatttgatatttgggaaggtaccaatgaccgtggctaaactgcaaaaattgaacttgagtcataaccatctttgtggaaagcttccagtgattaaattcccggccagcgcgtttgtcggtaatgactgtctctaaggctctccgctttctccttgtaaaatttagcggcaaaaaggtacaattttgtagttgagtactgtaacacatagctatgaattagatttgtaatttcaacaaaaaaaaaaaaaaaagggcggccgctctagaggatccaagcttacgtacgcgtgcatgcgacgtcatag

SEQ ID NO: 135459 - DNA, 564 bp, Arabidopsis thaliana
  unsure (1)..(564): unsure at all n locations
accattccccnaaacggtccggatggggccnnnccccnccattccccgttnagctggtaaatccggnncatttggcctnngccattgggagcccgggggccccaacatttacttttccaccgatctgtcagaaaccgagatctcaggggagtcttacatggttcttcaaccctagcgcataccctgtatggagtttcaagcggtcaggggaacaaacttcggattcgacatggggaagctgaatttaagtgagaggctagaaagcctcgatctatcaaggaatttggtatttgggaaggtaccaatgaccgtggctaaactgcaaaaattgaacttgagtcataaccatctttgtggaaagcttccagtgactaaattcccggccagcgcgtttgtcggtaatgactgtctctgcggctctccgctttctccttgtaaaatttagcggcaaaaaggtacaattttgtagttgagtactgtaacacatagctctgaataagatttgtaataacaaaaattagcctactcggctacgccatacatggacatgattttttttttttt

SEQ ID NO: 135460 - DNA, 420 bp, Arabidopsis thaliana
  unsure (1)..(420): unsure at all n locations
agaaaatgcagatcttcgtgaaaaccctaacggggaagacattatccttagaggtagaatcatcagacacaatcgacaatgtgaaagcgaagatccaagacaaggaaggaatcccaccggatcagcaacggttgatcttcgccggaaaacaattggaagatggaagaacactagctgattacaacatccagaaagagtcgacgcttcatttggttctacgtctganaggaggtgcgaagaagaggaagaagaagacgtacacggaacctatgangnttaagcatacgcacaagaangtgaagctngcagttctncagttttncaaggttgatggaagtggggaannttcagnaggtttaagnaagagtgtccntcttgttagtttgtggtcctggacttttcatggtggtgtcattnccg

SEQ ID NO: 135461 - DNA, 420 bp, Arabidopsis thaliana
  unsure (1)..(420): unsure at all n locations
anttagggattgcgacagcctcactgaagcattacaggcagggattggctctgatagcttggtgtcagcaagtactgcgttaaaagcaattgctgtcaatgatgaaatatgtaaatctattgctgaatctggtggaatagatacacttcttcggtgtattgatgatagcggtgagcaaggcaacaaaactgctgctaagacatgttgttccctgttgtctaagttggcaggaagtgactctaacaagagtaccatagttgagaagcgaggtctggacaagcttatcacacttctcacaacggattctcctgatgatccctctagtcataccaagcagggtcattgttgataatcctcctataatctgtctgagatcaccagaccacgcagccaaggctatagaagctggagctggtgatc

SEQ ID NO: 135462 - DNA, 761 bp, Arabidopsis thaliana
gtgtcaacggcccctggccaagagggtaatccccgggttccctgggaaaatttcccccggggggtggagaacaccccacgggcggtccccgtctttttgtattgccagggttttattggggggcaccttatttttggggattttttttaaggccccacacccccagggggattcagccgcccctccgaggataaaaatattacccaaaccccggcccggtaactacggcatgaaacatccttcaaactttaatgccccctctatagcggtttttcatttagtggggacccacacagtaccaaggaaagttactaatgtagcagaggtagaagaaacatacccaataccagcaaggatgcagccgtctattgccatcgaagtgaaccccccaccgatgacactcagaccaggcgctactagaaccttctcagtcactatgaccgtgagatcggtttctggagtatacagcttcggggaggtaaagttaaaaggtagccgagggcataaggtcaggattccggtggtggctctaggacatcggcgatgaacaaatcgtgtgggtgttgtaatataatttttttgtaatatgcagtaataagagggtagttctagagaactgtgtctgctaaaaagaggaaaatgcttcatagcagtttgtataattagttattgatataaaactcccaaattatgataaaaaaaaagggcgagggcggccgctctacaggatccaagcttacgtacgcgtgcatgagacgtca

SEQ ID NO: 135463 - DNA, 494 bp, Arabidopsis thaliana
atccaagtgctgctttagatcctggtcttatctttgatgcaggttatgaggactatctaggattcttatgcacaaccccagggatcagcgcccacgagataagaaattacacaaacacggcctgtaactacgacatgaaacatccttcaaactttaatgcaccatctatagcagtttctcatctagtggggacccagacagtaacaaggaaagttactaatgtagcagaggtagaagaaacatacacaataacagcaaggatgcagccgtctattgccatcgaagtgaacccaccagcgatgacactcagaccaggcgctactagaaccttctcagtcactatgaccgtgagatcggtttctggagtatacagcttcggggaggtaaagttaaaaggtagccgagggcataaggtcaggattccggtggtggctctaggacatcggcgatgaacaaatcgtgtgggtgttggaatataatttttttgtaatatg

SEQ ID NO: 135464 - DNA, 599 bp, Arabidopsis thaliana
  unsure (1)..(599): unsure at all n locations
ccgtcntttgtnangcngtcagggaccnggcctgaagtnccngggctacccactctgtcctgggccacaagcgttcacgattcatcatcagatcatgctttggtgggtataaacaagctttcatcgctagcggaagcggggactctcaggtatatatatggcacagatctacagggaagttaatagttgagctaccaggccatgcaggagcagttaactgcgtgagctggagcccgacgaatctacacatgttggcttcagcaagcgatgatggaacaataaggatatggggacttgaccggattaaccaacaaaaccagaagaagaagctagtgcaaggaagtagcagtaatggtgtgattcaccgatgcaatgggaattgattatggtaaaaaaaaaaggaatgaccttcttaaaactatttaacagttatgttgtttctcctttcttcatcagcctctttttgtttgctccctttggtatggaaagcaaccggaaggaggtaaaagctgttttttttttcaaatcctggccccttaagtggggggccaaaggggaaaggaaggaatccatttcacctattcccctaaanaaaaaat

SEQ ID NO: 135465 - DNA, 546 bp, Arabidopsis thaliana
  unsure (1)..(546): unsure at all n locations
aaaaccaggtgcnnnccgtntncatnccgcaatgtancaccaccctgggattctgagtttgggatgggtgtgtatccaaacccttttgagccgagcagctgtacagggaagttcctcgctttttcaattccccttcagatacagaatcataagaggagatggggctggaagaagaaccagcgaaggaaacacaaaaactcgtgtctcctatgcatcttgaagtagtagaaaaacagattgacgattgcaaaaagagtgtatatagaaaggccggtgtgaccaggccaagaacttagggacccagtacttttcttcctgtaaattttttttctacatttttctctggtctgattgagacaacaaaacttgtggtatgtagatgagagtagcagctggaatatattcagagttgctttggacagggaagagagcatcatagtatgtgtgtaaaagtgtgtgtgcatgatttaggatatttcttcttgtattagagaacagtgctgcagtttctttgttatcatcatggtccaagatagggaagtggac

SEQ ID NO: 135466 - DNA, 516 bp, Arabidopsis thaliana
  unsure (1)..(516): unsure at all n locations
gagcttaagccggccactacagcgaccgacttctctcgccgtcgattaccggatcgtctccgttattgcgtgcttcatttaggtgtatcaagtaagcaatgagttcttcaccgtcgttggagattttagttagagaagctgaaggcttcactgtgtggaatggtcctccatttactaatggccagcccactctcaagcttgaacgagtttcatgctctaacacgaagttcagtgttgatggatcgaagttaatggcgatgaaatctgatggagttattagtatctatgatgccaccagcttgacagaagtgcggtcattcactatagcaaatgttacagctgctgagctatctcccatgtggggcttatctttcagacttttcaaaaaacccactanttcccaagggnagnatgtntccatttgggaatacttnngacagggggtcttgcncacagtcattncccaaaaatccntttcttaaggcntaatggccataaattnggttttttcccnnt

SEQ ID NO: 135467 - DNA, 421 bp, Arabidopsis thaliana
cactcaagaaaccttcttccttgaagagagggttatgggatctctaagagagatcaaagaagaaagctcaagtatggaagaaagctgtgatccatttctctctatgttttgtaatgggtttcttcactggcttcgctcctgctggtaaggcctcattttcctctaatttcgaaacgacttcttatacttctacaaaatctccgattcctccccaaccttttgaaaacgctacatacacacaacattccctcctcaatagaaccttgatcaattcccaaagccaagctccagctcccgcagagtcgcgagaagctggaaggagaaacaagatctctctccgcgaaagaagatgagaatcaagtaaaagtgacaccaagaggactagtgattgttgtaactccaataataactaaagatcgct

SEQ ID NO: 135468 - DNA, 760 bp, Arabidopsis thaliana
  unsure (1)..(760): unsure at all n locations
accgcagcaaccactcagccgctatgaatcgcagaaacgccgcgactggaacacgttcgtccaatacctaaaatcacaaaatccaccgttgatgatgtctcaattcgactacacgcacgtgctaagtttcctaaggtacttagatcagtttggtaagaccaaagtacatcatcaagcttgtgtcttcttcggacaaccggatccaccaggtccgtgcacgtgtcctctcaaacaagcttggggaagcctagatgctttgatcggacggctaagagctgcttacgaggaacacggtggcgggtcacctgatactaacccgtttgcaaacgggtcgatccgggttcacttgagggaagtgagagaatctcaagccaaggctcgtgggattccgtacaggaagaagaaaaggaggaagcctaaaaacggggtcgttgttgtcaagaaggatgttgcaaactctttcggctcctaatcagtcgttcacttgataaatttatcatataaaaaatttccaatataggtaatcaattttcaattctcttttttttctctctaatttaaagtttcgtatgatcttttaaaaaaattgaaattattctctttggatatctagactacaaaacttataatatcggattaataatagtgattgattccatcaaaaaaaaaaaaaaagnnnnnnnnnnnnnnnnnnnnnnnnnnnnnnnnnnnnnnnnnnnnnnnnnnnnnnnnnnnnnnnnnnnnnngaaaacgcacctaa

SEQ ID NO: 135469 - DNA, 456 bp, Arabidopsis thaliana
  unsure (1)..(456): unsure at all n locations
cgacctggcacaaggttactttgtactgttgaaggaacatacttggttcaggaagcaacacaaggagggatggaggagagagatgatctataggagaataatgagattgattttgtcaattttccctgcgagatgcctattgcaagtggccgaggtttcatggaaattgaagaccaacgtgggctaagcagtaggttcttccctttcatagtatctgaagacgaagatatttgtcctgaaatccgtagactcgtcagcacattagagtttactggaactgattctgcaatgcaagcaatggntttnatccacggaatcgggttgggcttctttcacaggaggtnacctcaagtcaaggctttncagcatcaggtncaaatcccnngggccttttttttttaaacngggtnaagtttnaaaaangggtctcaatgnccccggnatggnnnttttttt

SEQ ID NO: 135470 - DNA, 497 bp, Arabidopsis thaliana
  unsure (1)..(497): unsure at all n locations
cgcaacacccgtcggcggaagaattagcgacaaaggcgttacaaaagcgttacgaaggtttaatgatggtaagaacaaaagcagttaaaggcaaagggcggcgtgggtattggagtcaccttgaaccaatcttactacacaacaccgacactggtttccctaaagccgttaaactccgatgttctttatgcgacgccgttttctcagcttctaatccttcccgaactgcttctgagcatcttaaacgtggaacttgtccaaatttcaactctttacctaaacccatctccacaatctctccttctcctcctcctcctccgtcttcttctcaccggaaacgtaattcctccgccgtggaagctctgaatcatcatcatcatcatcctcatcatcatcatcaaggggcttataatgtgacggctcttagtgtcgttntcccccggggttntgtggggagttccggtaaanaggagccgatttnatgtttncggngggga

SEQ ID NO: 135471 - DNA, 473 bp, Arabidopsis thaliana
ctgtgcttgtacctgaaccggttacatctggagttccggttgttactgttcaaaactcagctacttcaactactgttgttcttccctttatagctcctccttcatctccagcttcgtttttgcaatcggatccttcatcggtttctcactcgcctgttggtccactttctcttactagcaatacattcttcgcctaagggggcctcaatctgtctttaaccgttcggaccatatggctaatggaactcaacccagtcactccttccggtgttctctgcggttaataactgggccatctcctgcaccggatcactccaacctcctgaatcaatcaggcccatataactacaacccttcttcaacctggaggtggccctttggctcaagttgcttacttcttcgttggagctaactcggagggatagtagtagtgggatgaatcaaaagttttcgtcttcgcactatgagtttcg

SEQ ID NO: 135472 - DNA, 526 bp, Arabidopsis thaliana
  unsure (1)..(526): unsure at all n locations
ctctcgatcaactttgatcatcttctttgcttacacaacattcatattaatcggttctatcaactgtagagacaacaacaacaacaatctggtaacaaaccaatccgcttgttcgtgtttggcgattctgtgttcgatgccggaaacaacaattacatcgatactcttcccagtttccggtctaattactggccatacggccaaaccactttcaaattccctactggaagagtctccgacggtcgtacaattcctgattttattgcggagtacgcatggttaccgttgatcccagcgtatctacaaccaagtaacgggtaaaaatcaatttccctacgggagttagtttttgcttccgccggtgccggagctttagtcgggacctttcccggaatggtgataaattttgaaatcacatttaaacaattttaaggagggtgaaaaattgttgagacttcggttagggggagcccaagggaggtngtnttnaagggnagttnntgttnaatcggggnacggtntantc

SEQ ID NO: 135473 - DNA, 500 bp, Arabidopsis thaliana
ggctagatgaagaggaacaaactgtgacaaaggagtttcttctgttacttgaggatgaagaaaccgagaagctgaaattttatcagcacaaaatggacatctctgaactgcggtctggcgaatccgtagacgatgaatcggagaattacctctcggatctcggtaaaggcattggttgcgttgttcagacacgagacggtggttacttagtctctatgaaccctttcgacacggtggtcatgaggaaagacactcctaagcttgttatgcaaatctccaaacagattgtggtactaccagaagccggaccagccactggattcgagctatttcataggatggcgggttcgggtgaggaacttgggtcaaagatatcttcgcttatggcggtagttgacctaatgggggaaaacaggggggcaagtggcttttgaaggaatagcgtcagcgattatacaagggaggaacaaagagagagctaacacgagcgcagcgcgaac

SEQ ID NO: 135474 - DNA, 437 bp, Arabidopsis thaliana
agttgaaccaattcctgaaatttttaaatttggtaaaaagacatttgactaatgtttgttgcaggtaaaatttgaaactcttaaaaaataatatacaaaacataaataaacaaatgcatcctattggatagtatgaatacccccaagatccactaatgccatttcacatcaggggtccctataggtttaagccacatatccgccatgactccaggtggcaagctccacaacatctcctcttcctcctcctccctctccctcctccttatattactcctcctcctccccttcctttcccattccggggtccacaagccattgcgccgcggtaagcctccgcttctccgccgcatctttcttcactcccccaatgtgcaaacttcctacctttaaccctttctcctcctcctcttccgcttgtactgctaccacaactg

SEQ ID NO: 135475 - DNA, 479 bp, Arabidopsis thaliana
tcacgaaactatacacaaattcacacataaaatttagaaaatatgggaggcacaaaattgacccatgtgaccaccactaaccctaataactccaacattcatggaccagtcgtagcgaagtagaaggccttattaaagtttacaaagatggccacgtggaacgttcccagctcttgccatgtgttgatccctcactacccctcgagctcggcgtgacttgctccgatgttgttatagacaagttgaccaacgtatgggcacgtctctatgtcccgatgaccacggccaagtcgtcgggtctctaagctccctttgattgtttacttccacggtggaggattctgcgtcggctcggcttcttggttgtgttaccacgagttcttggctagattgcccgctcgctcgcggtgcttggttatgtctgtaaattaccgtctagccccagagaaccctcttccagcagcttacgaagatggggt

SEQ ID NO: 135476 - DNA, 477 bp, Arabidopsis thaliana
  unsure (1)..(477): unsure at all n locations
ctggaaataagtcccataagcatgatgaagtggcaactgtttcagcaagttgatcaatctttccagatgcagcgtagctatcggaagcatgcttgacggtgaatctgacgaactaaagaaggtgtttttggaaggaaatccctatcttttggggatcacgatgtttgtttcgatgcttcattcagtgttcgacttcctggcattcaaaaatgatatccaattctggaacaaaaataaatctatggaagggctgtctgcaaagtctgttgtactgaactttatctgtcagtttgtcatcttcctctacttgcttgacaacggcacttcatggatgatactggctagttccggagtcggtgtctgcattgagttctggaaaataggggaagcccatgcgcataggggttgtccgagggggattgtccaaggttngggtccntnccggnanccgtttnaaanaataaaccccgggggttt

SEQ ID NO: 135477 - DNA, 408 bp, Arabidopsis thaliana
catgaagatcttggtttttttaattttaaaatggtctctatgaaaagaataagaaaaaaaataatccaaaagtctttaagaaaaccagttcaacattccctgaaaaagaccaccaaaccgagactaagaaaagagtaaagaaaaaatgtttgattcagttccttaaaaggaagagcagagtgatagcaaagcatcaaaaacctaaggctcaacagcagtaacttgttcccactctccatcaacagcctctttccacacagtcacgttgttgttcccatcggatacggccaataagttaccggtcaacgaccacgagacccgccacacaggagtcataaagtccttgagaaccttaccttcccattgctcaccttcttttcccactgtccatatgataactttcccatc

SEQ ID NO: 135478 - DNA, 561 bp, Arabidopsis thaliana
aacagaaatggctattcctctgttccaaatcaacccaattattgttatgattcggatacacgatcgtcgggttggcgagttcctgctttctcttcgcggaatgcttggtctaggagtaattcaatagttaacagacacttgatcgatgatcccatatccgcttactcaagaacatcgatttcatcaaccgtgtactaaaaatcatcatcctctgattattcctggttttgattttgtttcaaaagtatagtctttacatcctctttcagaacttgaaaaattatatattgttcttggcagagatttagtaccaccatcacatactcggcatcagattccaatccgtaacagcaacaacctgcgaaggcaacacctcgtggcactaaggcaaagccggttcacaaccaatcaacttggacccgaggagcagctcaaggtcatcatcacaaaccaatgtggaagacggggtcctcaaacatctttcaaaagggccttataaccccgttccaaaaagcacccttctcagaggctggattttctacagcacaaaacccggggggg

SEQ ID NO: 135479 - DNA, 419 bp, Arabidopsis thaliana
  unsure (1)..(419): unsure at all n locations
aataaatttaatatcatttgagagaattcaagtacaattaaagattctagcggcgacgaggattaccgaaaaggaaagtttcttccattgctcttaccacagagagtagctctaatgtgaagagatcattcgttgtcatgtctccggtgagatttgatccattagccggaggagaagagtcttgttttgtcggcttgagtatgacgaatctacagacaggacattgtcctttggtctttaaccatgggaactatacattcctccgtgaaacatgtggtttgcaaggagtgagcatcactggttccttggggctcgaagccttctaaacacacgggggcatcttttggccgccttcttcacccgggagattttgagggggttcttgagctttcngctncccgggggttttnntccngaag

SEQ ID NO: 135480 - DNA, 553 bp, Arabidopsis thaliana
  unsure (1)..(553): unsure at all n locations
ctcattctcaaatctctcattgtgtgtctgtgactatctctctatacaattcaaactcttcaagattacttcctcttcactttgagaagaagaacaaaccaacaaatctccaaaatacaccgaacaacagaaatggcgttggtgagttcaagagcaacgcaagactcaaaactctccagggaacggatagtccccgtcgtttattatctcagccggaatggccgactcgatcacccacacttcattgaagtacctctctcttctcacaacggtctctatctcaaagatgtaatcaatagattaaatgatctacgaggcaaaggaatggcttgtctctactcttggtcatcaaaacgaacttacaagaacggtttcgtctggtacggtttatcagatgaaggtttcatttttcccgttcatgggccaagaatatgtactcaaaagggctctcaaaattcttcggcccttggataataacccccggtaactttaccaccgtaaattaacgggggtaaccagnntttggggnnnttttgnccattncaaaggcttc

SEQ ID NO: 135481 - DNA, 450 bp, Arabidopsis thaliana
  unsure (1)..(450): unsure at all n locations
nnnnnnnnnnnnnnnnnnnnnnnnnnnnnnnnnnnnnnatatataaaggtttcagatcttgattttaaaaaccgggccaaccacaaaatatcatgtttttacaaattacataaaacattattcgggagaaactttaaaacttagccgagggttaattataaaagatgggatgttaaggccggttaatttttgacgtatttatatatgggtcggattaaatacgttaaaaactaaccgtttttaaacataaccaaagcgatttaataaaataaaaataaatgttaaaaggttaaattatgggtaaactaatattgaacataacacatctcttaaggattttgggatatttttttaaatccgggtagatttaacaacggcctattaattaatatttatagaaaaaaaagagtggaaaacctttagggaaaaaaaaaaaaaangccaattccc

SEQ ID NO: 135482 - DNA, 643 bp, Arabidopsis thaliana
  unsure (1)..(643): unsure at all n locations
gacttatataatggattctctttttccttctgttccatttggtcacaaatcaagaaaagaagacttggacgcaagaacttttcaaagacttgcatacaggacaaatcttagtgaatacatcacattctctacacaaactcaagtgccgacatggcactatcaacaccgatacttccttgacgttgcacattgtgcatctcatcctctgatgaatccccatgttgttgttgttattgttgtttggatcgatgtatgatgaagctgcatcatctatttcgctgtctccaaaaccttctttgccttgatctgcagcagctatcacactgttgttgtgtgacattgcttggttggagatttgcctttaagacattaaccacagactcattggtactttgctctgtagngncaattctgagcttccnttggcacttggttttatccccctccacaaagctctctattccttcttngttcanatcaatngatcttcgnnatctttctcttggaaggttccttggtcactccctttctcttatgttggggaaaaaaggangggagtgnntcttttttcaatccncaaaccntcgccantggggtgctggtctgaganttggcaactaacttngggtttggggtcaaccna

SEQ ID NO: 135483 - DNA, 333 bp, Arabidopsis thaliana
ttttaaaacaatggagatatctaatacagtcaaagagggaaacacagagttaaccgggacagtgagctaactagaagaacatgtagtgtttctggtttggttttttaaggatcaatataaaccgtccgattgtttcggattgctttgattttattacaagcgagatggcttcttcttctattgtttcgttgtatggtgtaatgttgggttttgtcttcatttttttttttttggttttgtgttgtgcttatgatatgttttgcaatttgtaatcattggcaaaaatgataggtttgattttatagtgaaataagaaaaccgggatacccgatg

SEQ ID NO: 135484 - DNA, 695 bp, Arabidopsis thaliana
cggtaacttccatccgtagtaaacaacctttacttggcaaagtggttgattcagttgtcgataaggaaaatgctccaggaagttgggttctcaacaaaaaaaacagacggaaatttgctggttggagcattatgttcacttgtattggaaacttccttttaagctatgcagcgtcaagcttcctcttgccaggactcctccgatattctctatgtggtgttggtggattgtcccttcttgtcggtttgattgtcctgatttgcatagatcaggatgatgctagacacagttttgggcattctggaggcttcatttgcccgtttgttccgcttttgcctatagtttgcattcttatcaacatgtatctcttggtaaaccttggagctgcgacgtgggttcgtgtatcggtttggctgttcctcggagtggttgtttacattttctatgggagaagaaacagctctcttgtgaatgcggtttatgtctccactgctcatctccaggagattcgtcgcacttctggacattctttggcttaagtctacatgaaaccatcaatggaagctcaaggaagtgggagtttcctttgtaaaatatgttcaacaaaatctgtataataatatatttttgagattggattatcctgtgtaaatacaaagttcaatgccactgctcataggcattgtatatttttt

SEQ ID NO: 135485 - DNA, 561 bp, Arabidopsis thaliana
  unsure (1)..(561): unsure at all n locations
gatatatacactctgtttctactgctttcttataataaaataatatcacattacagggaagctaaaacgtgaaaagatttgattctatgatgatatataatctttgaatcaataaaatacaattatttttcactcaaaatacgccgtgttaaaaggtttcaggcaaatgaggttcggtttgatcatttacttttgcctcactgatggatcaacggctagaaacagatgagggatgattggttgcgacttgttggctcgaagcttcgtcagcttgaagtttcttgactcgagccttatcgattcgtgctcttctcacagcttcttggatatgtcggtcatggtctttcaacacttgatccatgtttcctgatggaaccactaacggtcctgagtaatgaatcttgtgcccttttgatccataacccaagagaatggggtctttcttgttgcttcgaccattctcttcctggttgcttcttcagacgtttccttgaatgaacctggaagcgagtcattcctctggaagtcnctggtgtggnngctgtcctgtgcggnaaacag

SEQ ID NO: 135486 - DNA, 659 bp, Arabidopsis thaliana
acatttcctcgataaactctctctcccacaagaagtgactctgtatactgatgaagatgaatggtctagctggaacaagatcggtgatcctgtccttcacatcgagcttagacgttgggctgatgttttagtcattgctcctttgtctgctaacaccttaggcaagattgctggtgggctttgtgataatcttctgacttgcattatacgagcttgggactataccaaaccactgtttgttgctccagctatgaatactttgatgtggaacaatcctttcactgaaaggcatcttttgtctcttgatgaactgggaatcacacttattcctcctatcaagaagagacttgcctgtggagactacggtaatggagctatggctgagccctctcttatctattccactgtcagactcttctgggagtctcaggctcatcagcaaaccggtggaactagttaaacccatgatttccacaacatgcattttgtggaaaatcatctgttttcactatcttagataatagtagattttatcagtctgtttgcttttcttgtacatctcaaaatagctgtctggattgatgtatctggaggaccatttgcactactagctccactctgtttctgtagaaatgtctatgtttcttttcctcgctctt

SEQ ID NO: 135487 - DNA, 648 bp, Arabidopsis thaliana
ctttttttcatttcaatcaacacaaccaccaacataaattattctcatcgccgaaaattaaatatctccaaatgttttagtaacacgattctgaatactacttagttgaagaagtctccggttcaaatacttgctgctatacgaattacaccattagatcaacgttgagtgatccgaaacgagacgctgcagatctgtatgagcttaaccaaatagtttcatgcgaattatatcatacacgtgacacgtcgtaacaaattagagaatttaaagaccaattacgagaacaacaacacggactagagtgctttattagacctgctaaggttatgtaaatgggaaattttgaacaggcgattcgagcaacggaaatagaagaaaacttagttttctcatacatcattactgtataagaagttgagagatatgattgtggaaatagagactccttcgaatctcataaagctccatggtacctaaaccatgataactttctttctcatgattcattcgcctgaaaagctttatgcccttattcaacaagatagagacgtgcatttgaacccatctctaacaagcccgtttattgcgtccctgagcctatgataatcctcaggtttgctgtaaacttgaaaagaaatacgcaca

SEQ ID NO: 135488 - DNA, 625 bp, Arabidopsis thaliana
aactcctccgcagctctgtccacgtggcagctttccatcgttccggtgctgctagctacgtcgggaaatactgccgccgctacgtgtcggtcccagatggagtcacgaaccttgggaagtgtgttgtaacggatatacgcttggcgttggcgcttgttgatgagcggtctgttatgagatccgttactacgtcgtcctttgcttacggtggtggcgtaggaacgtctcggtggggtgctgctgcagctgaactcgtactctagctggagcgggacaggggagatgaaggatgatcgcacatcttggtggtcggaaggacggcacgtaatgcgtgagtgggaggttgaaacggcttcgtttaaggatttgcgtaggatcttgccacgtttcccgagtagatgtggatcgagggttgtgaggagtttgtgacgtaaggcgttgaaaccttctgtatggggaagggaattagcttggccaggcttgagagcttcttcgttgtgcctgttgagcaaacctccatgtcggcgggtatttgcatatgtgcgtgtgtaagggagagagagggtttggcaattaggattgtagagagatgggatttaaagaaaataaagtgggattaatgaag

SEQ ID NO: 135489 - DNA, 474 bp, Arabidopsis thaliana
cgagagaacgatttttaggtcggttctttgaattaatttctccttgttattggtaattcgttacgattgagagagggaccgtgaaagcaacggacgagcatcagttgacgatgtagaagatgcagaaaaaactcatcgagtttcttcgtcgacaaacgggagcagagaacggctgacgactcgcattaatgggccttgtcaatgggctttactgtgagattgaagaagatccaaaactcatcgagtttcttcgtgttcaaacggggcagagaacggctcaaggcttaaggttaattctcagcccattttcttgtttacttaaattcatatattttataattttcagttaatggggttttttcctacgggtttttaaagtttttttgcaatttttattcaaggttttgtttaaagggaatttttaatatttttcaggtaaaaaattttattaaatatacataatatttttttttt

SEQ ID NO: 135490 - DNA, 953 bp, Arabidopsis thaliana
acttgctgtaaatgaatgatttttctttttggagtttaacgttcgtcggtaagaggatctgttcccacatccaaatcctagacttcgtataatgcaatgccaataaaatggcaagttcagacaaatgtcatttgttcttctttctctataagcaccaaagagccaagagcctcacactttggattcgtctttggttctactacactcctgcgcatatggcttctgaggaccacgcagaacagcaaaactttccttcatctacatgcttaacatcaagacccacaaaccatgaacccgtgctgacgtcatcatgagcatacgaatgaagaatgtctctattgatcgatacaaatctagccaatgcgtgcgttataacatacatctccccataagcatgccggaagtatgctttcttggcaccggatttccaccactctgggtcataccatttgtgggtccggtctgagaagacttcgcctgatttcatgcaaccgatgtaagcccgggggttttccagaatgtgcctgcaaagcgtagttcccagagcatcttatatttacgtagatattggtcgatggcttttgcataaaactgtgcatcccacctatctgcagcataggcaaagaacagttttaccttcttagaagcttcctcgggtgcctcaactacatcatcgagaataatgaagtcatcggtttgactattttcagtatcaatgctcttgtccatgctgtcccctttatttgcacttcttccaataacaaatcttgcaatcacacccttttcactttcaagttttttaagtgatgcaccagtccccatccatgcttgacgaactgcatccctcttcttcttgttacccaaacttgtcattatcccggataaccactaacggtcttttcttggtttcagttccatcagcaagtttgggactttttgaaacaaagccttct

SEQ ID NO: 135491 - DNA, 554 bp, Arabidopsis thaliana
  unsure (1)..(554): unsure at all n locations
aaataagagacaaataatatttagtttcatgtacacactaaccattaatggcgaaacggttggctctcataaagaaaagaaagaaatttcgatggggttgagaaaagaaaggaagatttttttttttatgattatttagcaggaggaggaattgaatgaaaagagacaaataggggaagcaatttttgtttttgttttaaggttgagcaagtcttttgactattgcagccatgtagtttccttgatgttcagcaagagccaattctgtttctgttgcttctcttgacccatcaccagcgaacacacctgctccataaggagagcctccacgtatcgagtccatcttgaacattcccagctccaaatgtggtagcctattggtacaaatagcatcccatgggtgcaccaagctgtggtgattgctgtccatgcagtggggccncttgggcanctccttgagtgccagtgctccacaaagatccagcagncttaccagcaagactcggcccttccanatganccggcgatcaaaaaagctttattgggcgatanaa

SEQ ID NO: 135492 - DNA, 713 bp, Arabidopsis thaliana
atggaacttctacttaaggtattaatggattctcacaagactctggttccctccatttatcgattatcaacaacctaaggaagaaaatagagacaagagaagaagatggtgagtatcgttgtacacaaaccaagcttctcttatccatctgtatcggcttcttcaatgaaaaagaaacccaggcactcaccaacagttgtagcaacacagacaaaaccaatacaacaacaatggattcacttccctctctttcaccaaaccatcccccactccttttttgatcgaaaaacaatccattcaccggacccaactcgaagctttagactctgtcattacagacctcgaaacctccgctcaaaaaggcatctcattaaccgaaccagagatcttcgcttctcttctcgagacctgctacagcttaagagctattgaccatggcgttagagttcatcaccttatacctccctatctcttgcggaacaacctggggatttcatcgaagcttgttagactctacgcctcttgtgctacgcggaagttgcacacgaagtgttcgatcgaatgtctaagagagactcatcgccttttgcttggaactctcttatctcagctacgctgaattgggtcagtacgaagacgccatggctctttactttcagatggctgaagacggcgtgaaaccagaccggttcacatttccacgtgttttaaag

SEQ ID NO: 135493 - DNA, 364 bp, Arabidopsis thaliana
atcaataattaattattaataaacaatttatatttttccgatgtttttattacaaacccgattgggttttaccaaaaatagcggaaaacactatttaagtatcacaaataacaaatcccacccaacaaattttcaatttccccactccactccttaaaaaccctcccaaggtcaacaaaaaaattacagagagctttgtcttagtaactaaaaatacatatatatatatatatatatattaatacaaactggaatatccccctaaatttattcttataattcaaatccctattactaaccagaacgcagacttcactagttcaactataacctaaaccgaaccaccttctaaactaagacgctc

SEQ ID NO: 135494 - DNA, 477 bp, Arabidopsis thaliana
  unsure (1)..(477): unsure at all n locations
atgaaagaaaaaaacttaaatatccaaattgtcaaagtttccattctatgacaatgaaaggctgtacctaacatttctgccttgatgcgaaaaccaaaaaaaaaaattcaaaatgaatccaatcgttctctcattgcaacctcgaagaagaagaattactattcgtagcctcctttgactgacggagcagatcctcctccaccagaaccatccaccgtcccaaacacaccgggaaaccatcggtattagggttggttcatggttactatatccaaccacggggattcacgttggttcaaaggaaacatgtaanggccggttccggtgggcttnaaccggcgngttaaggctggggaattttatttgcccanggggctttttttnnaangatccnccggnngggtcccgcctttaannnggggggnaaaaaggggggtttttttnngggccccnnaaaacatggggggggggcccccc

SEQ ID NO: 135495 - DNA, 313 bp, Arabidopsis thaliana
  unsure (1)..(313): unsure at all n locations
tttttttttngaanggcgntnnccngggcccctaantgggattttaatactaatccaatggtgacgacgcatacaacacatgaatcttttcttttctaatcaacacaggagtctttcctttccttttgtaacatcaacacaagaatctttcattttattttatttgattctacttttccatactaatggttgggtcatcaataaatccattcctcggggagaagtttctccggcgaatcaataggattttctgcttcaatcttgataggtgttgttgccaacatttcgctcttcttcttcgaatcattttctc

SEQ ID NO: 135496 - DNA, 355 bp, Arabidopsis thaliana
agaagaccaaaatgggcattctgatttgttacccaagtaggagttggacattcatacattcgtatgttcatatacggaaaaacgtcttctcccgttaagtgagcactgttatgcttgctacaccggccatttaagacaactttgattcctcagcttttccatgatccgagtaaagaccttttcctacaactaaaatgacaccacttgctcgttgagtatgaagtttggcaggctggatgattctgatggtttagggttggtttcttcaatcacgatctcagttgaagaatcacttgagaatcctagcttctccattattttttctaatcttttcccgtttgtcagataccggacg

SEQ ID NO: 135497 - DNA, 397 bp, Arabidopsis thaliana
aagtggctctcaacgttggtgtaaaccaacttcgtcttccgtgtgttgcgtgatctcattgctctctccattcttgctcctcttgcttatatccgtgataagagaacaagacctcctttgaatcgacagtttctcttagctttcttcttccttggtttaacagggatatttggcaatcagcttttgtccctcattggtctgaattacaccaatccaacttatgctgcagccattcagccgtcgatcccggtttatactttcatcttggctctcattatgggagagactgaatttattcaagctagcaaggtcaagctaaggtaggaggcacactgatttgtgtcgctggggcggtgctgatggttttgtttcgtggaccggctttgtttggggaaac

SEQ ID NO: 135498 - DNA, 443 bp, Arabidopsis thaliana
  unsure (1)..(443): unsure at all n locations
aagacatggagtcactcgccacagtacaagatcggttattgccaacagtgtccggacaaggtgacatggccagaggccaagcttggtcctaagccgcctttgcacttcaacgccggtatgttcgtttacgagcctaacctctccacttatcataacctcttggagacggtcaaaattgtgcctcccactctttttgctgaacaggattttttgaatatgtacttcaaggacatatacaagccaataccaccagtgtataacttggtcttggcaatgcttttggaggcatccaggggatatagggctttgacccaagtcaaaggtgttcacctactgtcctgcttggtgctaaaccccggtggggctttcaactggggggagggngggggnaccttgggcctgggtggnccttttagngttncttnntaaagaatttggggggg

SEQ ID NO: 135499 - DNA, 751 bp, Arabidopsis thaliana
gcaacttacaatatgtaacaacggctacaactgttttgttccattactcaaaaactcttaccaaagccggggttggttcaatccagtgcggttcgaccaagttcaccgtatctcaaattcgaaattttgccaaatcacaggttgattatatccttggaaataatccaatgaatttgtcttacatggtccggatttgggacaaagtatccaacacaacctcatcatagaggctcatctttaccatcgatccaatctaaaccggagaaaattgactgtaatggaggatattcatactacaattctgatacaccaaacccgaatgtgcatattggtgcaattgtgggcggaccgaatccatccgatcagtatagcgacaaaaaatcagattactctcatgctgagcccacaacttacatcaacgccgcctttattggacctgttgcagctctaatcagttcttccggataaactcacgtttagattggttgtggggaaacaaatattagcgaaggagaatcattactcatcaacaaactattatgactacaaacttaaataattagtcaggggatgtctcgtttgctttaaacatatatctctatatagatagtatatacctaccgcacatacacacactctcatatttttcattgaatcgcatatctcagcctaagatggaaactatttaatcacagatggctatataggcttccttatctcattgtattgtatagattttttatgatacatt

SEQ ID NO: 135500 - DNA, 490 bp, Arabidopsis thaliana
  unsure (1)..(490): unsure at all n locations
gccaaatcgactggtctcagagttttctcgattttttttggaaagatgcaggtaatagcatctttctgttcgaaacctaatgagaatgaatttgttggtcgacgacaacttctttcttcagtctgttccaaaatttctcaaggcgacgtcgtttcacacccacccgtttcttctgtcaaggttactcaagattggaagtcgaatttacatgagttagctgtgaaaagtgtcccttcgacgacaaggagaatcttgttgacaagtttattcatgaatttgtgctttaatccttcaaggtacttatcagccttagcacttggtgatccatccgttgcaaccgttgaagatgttagtccaactgttttcccagctggaccttttttccctactgagggggggaattgtgcaactgtttgagaagaatactttttccgttgtcaacaactttnatgnggcatnacgggctaagccaaaanaacggggtnggtga

SEQ ID NO: 135501 - DNA, 258 bp, Arabidopsis thaliana
gcggttacatgagagcgtctgttgatacagaggtgttcttgagtgggatgatgcagattgaaacattcaatgatcttaccaatgactgtagagatggaatcggcacttgcagcgtagcagcaagctgatcgctctggtaagtatttcaaaagcttgttatcagagacagttgtttgtttgtaggttgatagaaaacttgaaccgtcttgttccacttgtttccactttggtacctatagaatagctgtttgtatgttc

SEQ ID NO: 135502 - DNA, 384 bp, Arabidopsis thaliana
gcaggcagtaatctcctccaagtctcttctaattagctgcaacagagccagccatatgattcttgttgctactaaacctaaagactctcgcggaagcagcagcgatgagatgatgatgaatgatctggatgagataatatttggtgagaatagtttgggtcattcttcatctgcctctggaaatgatcagaagaagcagaaatcgtctaaaaacaatgagctcattcacttgtgagatgtgttttgtttttcttagtggatttggattggtgtttagtctttgggaatatgcatcaacagttgttatgtaagtaaactaaaattagcagccttgtgggattgaaatatatttagggtgtaacctgtatatttcgctgcaaaaaa

SEQ ID NO: 135503 - DNA, 476 bp, Arabidopsis thaliana
  unsure (1)..(476): unsure at all n locations
aaagaagcaggtgagtatcaatggagaagagctacatgaagcatgagctatggggagatggagattttcaagaagatgatgtgtgggatgttcttgatggatatcaatcaccgtttatgattagtagtaaccatacgactaaaccttctttctcaacccaaactttacttccaagcgaacctagaatgattcctgagaggcagaggacagaaggaatggcacctatgagacaacagtcggtccctgtcaatgtccctgattggtcaatggttcaaagaaagaagacaaagaaagttgttgatgatgagaatgtgtcaccggaggaatatttcctgcggcgcagtcgatcatcatcgtcgtcttcagttatggaaggagttggaaggaaactgaaaggaagggggtttgtgcaaaggtaanggaatncaattttttagccaacctgggttnctttngntgnccaggtttttttaaat

SEQ ID NO: 135504 - DNA, 513 bp, Arabidopsis thaliana
gataagtgttacaagatcttggggtattttaattgtacgcgtagactcagcgactctctccaggaaggttactaccaagctgcgatctacgagtgtgcatcgcaggcgttcaaatttattgatacccctaaccctttcaacctgtggcccaacaaggatcctttgtccgtgaacgggaatctttattggcttgctcataaccaccctgagactcttgagtatttcatcgaaacctttgatttctccatggagattttcaaacccttttgtctactgccgtgtcggaaggactttggtagcaatgaacttgtcctggcggtttttaaggaagatcggttttcaattgttaaagcaatgtttcggaacaacggaggttttgagattttgggtaacaaaggttgaaggttgctagagagggggaagtggggtttgggataaagtttatgacattgccgacaaccaacttgcctaatctagatgatacttattgtcgcagtagttacttcatctttg

SEQ ID NO: 135505 - DNA, 421 bp, Arabidopsis thaliana
  unsure (1)..(421): unsure at all n locations
gcttataatgagaccagccatgcagaactcaacatcacaagaaggtaatatcaggcatttggtgtatctncttgaaaatgcaatcataaatcttcccaagggacaaaaacaaatgtcttggctcattgatttcactggttggtctatggctgttaatcctcctatgaaaacaacacgcgaaatcattcacattctacagaactattaccctgagagactcggtatcgcctttctctacaatccaccaagactcttccaagcagtctacagggctgctaagtacttcttggacccacgtacagctgaaaaggtgaaatttggggacccaaaagacaaagcaagtgatgacctgttgccggcacatttngcngttgggatnttccccaggnatttggggggttaggaacacttgggnntngtc

SEQ ID NO: 135506 - DNA, 450 bp, Arabidopsis thaliana
  unsure (1)..(450): unsure at all n locations
tnttgccattggtagctatgatcaaatgttgcgggtcctgaatcaccttacttggaaaacattcgctgagttcttacacctatcaacggttcgtgcgccctgttctgcggctattttcaaggaaatcgatgaaccattacagcttgatatgtctgagttatcgttggatgaaaactttatgccaagcaattatgatgcttcagaaggctatataagtgtcaggtatgaagtcatggaattaccggtagcttttcctttccagaaacctcctgcggacaagcctaacccaaaacaaggagtcggccttctagcttggagcaaagacaggccagtacatatgcacacggaacggcagtatgcccactgctctgtggntatgggacatgcggctnctcgaggttgcagccatcctggtccagaaggnacccatccgagcagctntgtgggatg

SEQ ID NO: 135507 - DNA, 478 bp, Arabidopsis thaliana
gacaatattgttcataactgtattgcaaacaagattatcccttctctgcctcatatcaagcatacatggggtgatgaatttccaatttcggaaccagattgggatttgatcatagccagtgatatccttctatatgtgaaacagtacccaaacttgattaagtctctgacttttcttctcaaaaaatacaaaccaaccaatgtcgttagtccagcagaagacacagaactgcctcgtcctgtgttcttaatgagctggagacgaagaattgggaaagacgatgagtctctattctttacgggctgcgaagaagctggcctggaggtgaagcatctcggaaaccgagtttattgtatcaagcttagaggaagcaacctctgaaggataggctgacaaactcatgaatcatccacatgctcgcctctgaaactaaaggacggtttcaaaaaggtaaggatggcaaagtgacaacaattag

SEQ ID NO: 135508 - DNA, 393 bp, Arabidopsis thaliana
  unsure (1)..(393): unsure at all n locations
tatcacacttgtactgtggattctccaagacctctgcagaatgcctgtggtttggttcggttacatggcatacttgtnctatctcatattctttccttggttctccggtgaagtgtttactgattctggagacagagcatacatgactattatgggatgggtggtgacgagctcaggcgcagataggaaacatgaatacattggacaacctgatgtaatggttgtggtgatcccacatgtggtctttgttgttatccccagtgtcttggttgtgtgttgtctggttgctgagagagaaatctncaangtcacattcgaactgttntnctggtnagaaagaggttgnccatnnnccggggaaggaagaagggtcaaaacgncggtnactgttat

SEQ ID NO: 135509 - DNA, 465 bp, Arabidopsis thaliana
  unsure (1)..(465): unsure at all n locations
aaaattaagtaaattaaaattaacaaaactggtaatgtacaatttgctctattccaaatgggtaacatatatatatatatatatatatatataaatatataaggaaatggagtccagcagctttgactacatccacaactatttatacctaagcaaaccacctggtaactggtaagggctatctctttgccaataacaaagttatggctttctcgggtaagccagcgtcanatcagctagtcgggtatgccaatctccaatatgagcnaccaaaaccggacactgctgccgtgtttccgactttttaaaaaaaatggggtttccggggaaccaaggttgttgagcctcctgaatcggtgggtcaacccagggttccaccgggcaaatgncgggcnnaatgtatnggnnccngaaccggggaaacttttntgggggggaancccggtttanggccccagggggttt

SEQ ID NO: 135510 - DNA, 420 bp, Arabidopsis thaliana
  unsure (1)..(420): unsure at all n locations
aagcttcacatacgtactattcctcttggagagcatnctcgtcgaatttnccatcaggagcagacacgtacatttggtatctgcagtttgggaaaccagtcaaattccgaagaatctgaaatgcactttgtccgtcttttggacgaccagactttcgagtttatgtcaacttaccccttggattcctttgaatatggttgttcaattctgagctgctcattcaccgaagataaaaatgtctattactgcgttggaaccgcatatgttttaccggaggaaaatgaaccaactaagggaaggatattagtatttatagtcgaagatcgggaggttgcagctaatcgccgagaaagaaaccaaaggagctgtttattctcctcaatgcctttaaatggaaaacttcttgctgctatttaatng

SEQ ID NO: 135511 - DNA, 454 bp, Arabidopsis thaliana
  unsure (1)..(454): unsure at all n locations
caaacatataaaccataaggaaaacagagaaagagagagatggaggacgacaatagtaacaacaccaacaacaacaacgtgatcgcacctttcatcgtgaaaacatatcagatggtcaatgatccttccaccgattggctcatcacttggggacctgctcacaacagtttcatagtcgttgatccactcgacttctcgcaacgaatcttacctgcttatttcaaacacaacaatttcagcagttttgttcgtcaactcaacacctatgggtttaggaaagtggatccggaccggtgggagtttgcgaacgagcattttctaaggggtcagaagcatttgttgaataacatagcgcgttggaaacacgcgcgggggatgttcggtcaagattttgggggccggttaggtttttaggggggtcgaccggtttaaaagagggcnnaggggncttgng

SEQ ID NO: 135512 - DNA, 544 bp, Arabidopsis thaliana
  unsure (1)..(544): unsure at all n locations
tagaagaccaagaggaatgtacttcagcgccaaagacaaaggagagatgatgtctatgatttataactggcctgctccgcaggtaggatatgattgtcatcactgatggtagccgtattttgggcttaggagaccttggagtacagggaattgggattcctattggaaagctcgacatgtatgtcgctgctgcaggaatcaatccacagagagttttgccaattatgttggatgtaggcacaaataatgaaaagctcctacagaatgatctctatttaggagtcagacaacctaggttggaaggagaggagtaccttgagattattgatgaattttatggaagcttgcatttacacggtggccaaaggccgtccgtaccagttcgaagattttccaaggcggaaatgggcttttcggaaccattttggaaagattatcgggaggaaatttttccatttcccaaatnntggttgtccccgggnanctncctgggttttnacctggcttggcctttttgggnnccttaaggncncaagggntggcc

SEQ ID NO: 135513 - DNA, 529 bp, Arabidopsis thaliana
  unsure (1)..(529): unsure at all n locations
caaaatcagggagaagctgaatatatcgtcagtgtctatatatacatgagattgttaggatatcctgcgaataagatatcaatattgacaacatataacgggcagaagctcttaatccgtgatgttatcaaccgacgatgtgttccgtatcctttcattggcccgccgagcaaggtgactacagtggacaagttccaaggacaacagaatgatttcatattgctctctcttgtacggacacgcttcgtaggtcatctacgtgatgtaagaaggttggtagttgcaatgtcacgtgctcggctcggtttgtatgtgttctgccgccgttcgctctttgaacaatgctatgagctgcaaccaacgtttaacttctttcttnaaagacccgtccggttcgggctcaaatttaaatgggnccacaggctttanaagatccgttttgggtggnggnaggttgaaaatntttatntnggncnannattttnaggnngtggnacananagtttccgcaaggttnacaagtttttcc

SEQ ID NO: 135514 - DNA, 535 bp, Arabidopsis thaliana
  unsure (1)..(535): unsure at all n locations
aaggataaacaagcttgaatactcaactagaagttacaaaaagtcggtgtggtaaggtcagacaatgctatttttttcctcatgtcatgtatcacttaccagaatttactcaaatgcagtaaaattatcttacagtagcaaaaaaaatccatgtttcaaacatcaactcacttatcaccctcccgaaaggataactttgaaattcccagtttgttttgtcctaattcttctcatcagcctttccattctcactgctaaatccattattgtccacctccattccaaccacctccttcggataattcaccgtctatgtctgggagattgggttagctgctgcatatttttttcagattcatcaccatctactactggatcactctccagncggggataccatctccatcngggccaagtggtttgggatggccaaaggccctgggccgggaanactggtaanccggngnaacangggggcaccntcaaaatcnggcggggaagattcantccccccacggtggaagggggccaaaat

SEQ ID NO: 135515 - DNA, 464 bp, Arabidopsis thaliana
  unsure (1)..(464): unsure at all n locations
aatatgaatgaaatcgccttttatattccgttgcaaaaaacaatctgatttcattcaagaagaaataattaataataatgaattcaagaaactgaaaccacacttgcacacacagagctctcttcagcaaccacaagcatctctttaatcatctcttgactaggaggagactgtgaacggtcagcgggtgaagaagtcatcaacgtcgatacgaaaggggaaacttgtgtcacctcttcactgccctcgtctatgtacacaacgtcctgcattcgtaagctggtggtattcaactatctcccccaagaaccgggtttncccccgcatacacagaantttcatgngccaaccgngctttctctgccagnagggctccagctggngncgatcaaatctcggntgcagggngngtccttccacggggggcccnncanngttggccntcccaagtgggaaaggcttcg

SEQ ID NO: 135516 - DNA, 780 bp, Arabidopsis thaliana
  unsure (1)..(780): unsure at all n locations
gagaaaaagaagaagaagagcaagtcgaaatctgttgaggctgatgatgataaggagagggtgtctttgaaaaggaaaagaccggagcctgaagagactaaagaagagactgaggatgatgatgaagaatcaaaacgtaggaagaaggaagagaatgtagttgaaaacgatgagggtgttcaagagacacctgttaaggagactgaaactaaggaaaacggaaatgctgagaaaagtgagacaaagtcaacaaatcagaagtcaggaaaagggctttctaactcaaaagagccgaagaaaccgtttcagagggtgaacgttgacgaaattgtgtacactgagaatagcaactcgtactattcaaagggtggtgctgaaattggctatggtcttaaagctcaagaggttctcgggcaagtgagaggaagggatttcccacatgagaagccgaagaagaaccgaggaagctccagaggaggattgatcgatcaagagtcccattcgactaagtttaataactcagacgacgaagaatgattgataagcagacaaccctgcctttttgacattgcttcgtttcgatttatctttttcttttcttttgctttgatcatttcaatacccgtaatagggctcaagttttgtgtctgtgcactcctttgatacttatatgaacatgattcagtttcagtttcttgttcaaaaaaaaaaaaaaaaaaaanaaagggcggccgctctagaggatccaagcttacgtacgcgtgcatgcgacgtcatagc

SEQ ID NO: 135517 - DNA, 522 bp, Arabidopsis thaliana
  unsure (1)..(522): unsure at all n locations
aattctcaaagtggttataaactattagaagcacttcctgagcatcaagaatttccaatcacttctnttcctccaattgagaagaagttatggtcacgattatggaaagtccaaaccatgcctaagataagacatttcatgtggaaggctctagcgggagcattagcagtttcagacagattgcaatcgagaggtatccacatagacctaacttgtaaaatgtgtgggaaggaaactgaaaccatatgccatgttctcttccattgtcatgtggcaaaacaatcttggggactctctaatatccctgctcccgagatgggtttctctaaaaactcagttttcttaaacctttttcaccttcttaatcgtgctgaaagacggtgacagtctcaccaataatacacaagtttttcccttggctttttgtgggcantaatggnagnccnggaaactcattttgtggtttnaagggnangcnctttgatgctaacaggatttnggtnaagcccnngaaggtcnntc

SEQ ID NO: 135518 - DNA, 478 bp, Arabidopsis thaliana
  unsure (1)..(478): unsure at all n locations
caacaacagactaaaaatataatataacaaaaacacaagaccattttatgacgaaattaagaacactaagtaaatggactgataaaacaaaacaaaaacaagtccagtaggactgcaacaataaaacgtaaaggcacgaagtccctgaagaagaatctcaaaccaagagcttagattcctctatgatgatttctcgtagccacaatggcccctcccgtgcaacataagattggtaacgatgatctctcgtgaaacttgttgctatttcattagccacccgnttacattcagttgcagaattaactataactggaaactccaagggatccaaaatcttccaatgtctggatcaagtgtcgaaanngggggntctatgtgggtacgcattgcttccctaanttttggggngaatcccaagtgacttgtttgncanggactaagntcactgnccnagngggcaggtcgttaaaggtgattt

SEQ ID NO: 135519 - DNA, 686 bp, Arabidopsis thaliana
  unsure (1)..(686): unsure at all n locations
caatagaaaagttactttatttccaatcttaactattcttacaaactgtacaaatcaatgcactatttaagagaaacaaaatgattattctaaggaaatagaagaaggctcgcataaacacgaaccactagatgaagagcctgattcactactagagctactcgaactgctgctttcattatttctacatgcagcatctttttctatcttaagaggaggatggcttgagaccgaggggtcattcccaccaactatgtcaacatcccccggcaaatttgcagatcacctttactaggctgcaaaggggaattactgaatccagagtcatgaacaatctccatctcacaaggtccgctcttttccatggattccttttccccccttaaataggcatccaggagtttccggaccatgaacaagatttcatcagaaagcgcttctatatccttctcattctcaccttctccagattgaccatcactgccactttgctctctcaggagatcagcaatcttttgagggaaatcttcttctaatgccatcagatcttggcctaattttttcttctcaccatctgtcatgaccaacttagcaggttccaccctcagcttgttatcgttcattgcagcttccttctttctcatcggtgctacttcgaaagggatttcagactccanagaagcaga

SEQ ID NO: 135520 - DNA, 488 bp, Arabidopsis thaliana
  unsure (1)..(488): unsure at all n locations
aaaacacacaaagctgcaccaagtagaggatagaagagaaaatcctgttttaacaaaaaaaagaagcaccatgaaatcaataacctattcgagtctaatgtttttttcatacaaaagaacaaattgaaacgtattccaaagtcttagtatttgaagtcactaaaaattgcagtcagagttggtgcaccagtgtccaacattgttgcttggctagctgaacttcctttcgcccattctactcctctgatttcatctctgtacatcacaattgttaagagtactaggctctactaggctctacgagtcgcgctgctaacccacaagaatcttcatcacttggtccttcacnaatcttcaaacccttgggtgggagcgtcccatagggntctcncgcggtcgnggttaaggccaagtcncgctagnaagcctaaagggggncggnccattaaaccccnggcaanggngggaccccanatgtgnaaagnggg

SEQ ID NO: 135521 - DNA, 328 bp, Arabidopsis thaliana
  unsure (1)..(328): unsure at all n locations
agaggaatcacacagacaacatttccattaaaaatgaaaacaaacatgaagaagacaaagttagtaagcaaattccacaatgataaaacaaaccctagctaggattcgctcgaaatcaaacaaacaagtgaaaaaaacacaaagaatctcttcttaaaaatttcaactttcaaaacataaaagattagatctcacttagcaaccatccttgctatgaaatcttcataccggatctttccatcggatccaacatccacctccttgatccactcatcgagctcattaggcgccagctgtctcttcgatactggtcagantatgcctcagg

SEQ ID NO: 135522 - DNA, 440 bp, Arabidopsis thaliana
  unsure (1)..(440): unsure at all n locations
caaagtacaaagtagttcgggttgacttgaaggaaccgagcagttggactgatgtnatcgctgaacatgaaaagnatgtnctctcaacagcttctgcagttaatggagaccaactggttgttagctacatgagtgatgtaaaacacatcctgcagattagggacttgaaatccggttccttgcttcatggattacctgtagatattggctcggtatgtggagtttttcctcggcgtaaagacaccacgtttttctttaggttcacaagcttccttacacctggcgtcatttacatatgtgacttatcccatgaagctccagaagtaacggtatttcgtgaaatcgggtgtacctgggttcgatagaaccttgcatttcaaagtcactcagggccttttatccgggtaaggacgggaccaggttttcccggtgnttttnng

SEQ ID NO: 135523 - DNA, 558 bp, Arabidopsis thaliana
  unsure (1)..(558): unsure at all n locations
actctagtacattttctttataaaagaggagggactgtataattataatatagnagctctctctaaaacataacaagaaagaaaagctaatctctttgggtaaattctagtcgatccatgaagcatccaccatcttcgccatgaacgaatatctatcagccgcttcatcaatcatcttttgcgttggacgtcctgctccatgcccggcttttacttctattcgagcaattatagggttcgtctgtggactattctctaaactcaaacctaattcatattgcattggcgcaagcaacttgtaagaatgaagtgggacgactctatcgncatgatcagcagttaacaacatgggtgatgggnactgaaaaaacagatctgtcttctggtccccangggctcttcacattatgcagnggnggatactttatcagccaatgggannccccttcctggtcggacaaccaattccggnggcccagcangccnagggaaactttgnaccgggnatgcctggcccaaanggccngggncccaaaggccggnccggtatgagnccnc

SEQ ID NO: 135524 - DNA, 488 bp, Arabidopsis thaliana
  unsure (1)..(488): unsure at all n locations
gagacgagaaatgtctctaaaaccttatttctctctactatactcatctcccactaatgtaaaactttccgacttcttaatcgctcaacaaccctccggtgacctgaaaactaccccggccgaggagttttctccactggttgagaaattcaaccgacggcttcttctgggtgtaggatcgtcctctgttcttgcgattggtgcgaatttcggaggaaccacgagttttatactcggtttatcgccagggataggccggaatctaaaactcgacgtcatttatccgattggaggatatagcagatgttatcgatacgggttgaaggattcgaatttatatatccggctacgtgggtttggagaccagacgcttttgttatagagcggcggagaagatcagaaccggggggaattncgttagacctttcttncgggaangaaaacagtngccggaaaaacgttnattnacccgttttttgattttggtc

SEQ ID NO: 135525 - DNA, 476 bp, Arabidopsis thaliana
  unsure (1)..(476): unsure at all n locations
gcagnattncaacacaaaacnnaatntaggaatggaaancgtggaaaacncttccncnagcctaccacaccaaatgtacccaaacctaaagttaaagttgaggaaatatatacatacagttacctaactagatgtttgatcaaactgaactaaaaccatattgaagttaaccttttgattttatttcaacaagttaacctgaagatgtgtctgaggaagaagcatcagcttctgcttctgtattgttcctcttcattttcttctttctcacatgttcggaagaagaacataagccagaagtggaagagtccaagctaacaaactcgtcgtcggaagaagacttcgagttcgaaccatcaccaccggaatcagaaggatgaggactcaccgtgattttgattggcggaggaatcgggnacagaaacttctcgaaatcaaaagaaccgagtttgtttttcgattccaatcgactttgg

SEQ ID NO: 135526 - DNA, 553 bp, Arabidopsis thaliana
  unsure (1)..(553): unsure at all n locations
caagctaattgtttcaaatttaggaagtgagagggtttttctttcacatttccacgcatgccaacccaaaatgcaaaatatatggtaatgttgtgaacaagaacttagatatataatatagaagaaagaagaagaaaatcaaaatctagtcaacttgaacaaagatggagatcgaagaagcttgtatgagccgttccgtttcatggccagaggatccgtaacaccaccaccgtatgatctatagggactacagacaaatccgcaaatcggggaattcgtgaaaccatcatcatcatcataatcatcatcatgatcatgatgaccaggatttagacttcatatccgccaaagccttggaagaagaagtcaacctcacaaggaaggacaatgggnccatccgcgtctatatccatactcagtctcagcatcttctaaacaagttcttgaccaangntgggtcagaagttttgnctcccaacaatccttgttcgngggccancgtaaaccgggaaaaccatggcgggggncttcttngggtcccttgatcggggnc

SEQ ID NO: 135527 - DNA, 438 bp, Arabidopsis thaliana
  unsure (1)..(438): unsure at all n locations
aaaacaaagtctacacttctattattcagcgatacattcttgaactaacaaagatccatctctcaacaaaaccaatttagcaatgagaaagaaagagcaagtgtaacaactatgaccctttataaaaccttaatcagctttgtatcttgagctcatacacggaacaaaagcagaaaaatcgaacctttagatgatcactccaacacaactttagcaccaagtgctttcaacttctcaagaatcttctcaccttcttctttagacaaaccagctttcaaaatagcaggagtcttctcaacccaaagctttagcttcctttcaaacccaaatcagtaaaactccttaacccctttaatatcttaaccttagcagagggttcaaaggcncccacctttatccccaanacgggcttcnccactttagggtnctncacncaac

SEQ ID NO: 135528 - DNA, 611 bp, Arabidopsis thaliana
  unsure (1)..(611): unsure at all n locations
acaaaaacagagaaagtgggagatagaagatgacggcatcaggaggaggatcaacggcggcgacggggaggatgccgacgtggaaggaaagagagaacaacaagaagagagaaagaagaagaagagcaatagcagctaaaatcttcaccggacttagatctcaaggcaattataaacttcctaaacactgtgacaacaatgaagtcctcaaagctctttgtcttgaagctggttggatcgttcatgaagatggcaccacttatcgaaagggttctcgaccaacagaaacaacagtgccgtgttcgtcaatccaacttagtccacaatcatcggcctttcaaagcccaattccttcgtatcaagctagccctttcatcgtcaatcttacccaagtccgacccggttttgacccggaatcaaatcctcggcttatctcattccctatctccaaaacctagcttcggcttngaaaccnggttctttacggatttccaaatagnggcccttgttcaccggccgntttttttancttggaggttaaatccggggttccgnggtggaaaggagaanttccngtttnggttcgtaagccaaagggggttttttttagc

SEQ ID NO: 135529 - DNA, 495 bp, Arabidopsis thaliana
aactttcacacacttgcatttttcattatccaccattacatataaaaaaaaatactagattttgtgaaatgaagcattgataattgattatgactgtacaaaatagtcatgaagacaaataccaatctattagctacgatttaaccggaaccaatctcgttccggacccgactaaatagttaaaccacgatattaacctagccgcgtcctttggtgttgagacctagcgtcagctccaagtcatggataccaacatcgtgaatcttctcaccttcccacggcttcaccgacacatctactccgacggagctaacgctttttccgaccaggttaaatgtcggcgacggaggacatgtctgagaaacgttaaccgattggaaatttccccatcgacaagaatcaaccgtcgaaacatccgattcatcgcattctggaatcgatgtgtagtgatggagacgccgtgttgggcttgacggagctgagactgggaaatta

SEQ ID NO: 135530 - DNA, 593 bp, Arabidopsis thaliana
  unsure (1)..(593): unsure at all n locations
gncaacgcaaacaaaccaccaatcaaaatcgagttcaatgaccatcaccgtactactgatgacgaccactcgccacttgccagtgcatacgagccaataccatcaagtagatcaacatttcgtacacatgatacgcataagccaatagagcaccgcaccattgtacaatcaccatactcacgcagcgagctgaagcaacgaggcggcagccttgtagcgctgttctggggcatgggcgaactcacgatcgcagtcggcttgattggcgtcatgggctacgtcgcatggacgttcatggacataggcaggatacaaggtgcaatcaacaacacaacgaagagcatacgcgagaaattcaacgaacgcaaaagcacgccatctgatgacgggcctgagtcgcgccatgctgctgatacaacggttcaacccaactgttcgttgaacccagnaacccgttgcggattggatnaaatgctttgcaacaacncctttgcnggttttctntttcggttttncgttnacgancgtttcnggttggttattcctaatttttttgggtggatttatttnttnttttnggtaattngnncgtc

SEQ ID NO: 135531 - DNA, 497 bp, Arabidopsis thaliana
  unsure (1)..(497): unsure at all n locations
ggcatcatcagccaaattgtgtcattgaacattagtttttttcatgttgcatctcgatggtcatatcaaacaaaacatcacgcgcctgtgctcttgcctgatatgaagttgaacttcttgtgtgcaaccgccattatacgcgatgccttgctccagctgctaggtgacacacgcttgttgatatatgcttgatatgctgtttcagctggtgatggtatagcagcgctacgagacgtactagcacggaaaagctatcagacacggctgattgagcaggtatattctgtttgtgtactacgcctgctttgtcacaacgatgtaatgcgtgcatgacatcctccctcacatcattgcactccttcaagtaactcngggggcnccncatcanctatgtcaaaacgccgnaagtacgnccaaaaacncangcagnaattggcaaaancggttgccagnggatggnngngcangcagcctntggaaagnggatatttatcgtt

SEQ ID NO: 135532 - DNA, 749 bp, Arabidopsis thaliana
taagggtaaggagcttaaaggtatagttttcccggttcttttttctcttgaaaaccagttgaacgagagcttgcatagtgtcaaggttcaaaagacacaaatcctgctcaaccagattgagagatccaggatacaggagaaaaaagcattggaagaaaaccaaatcttgcgcaaacaggttgagatgttggggagaggttcaggaccaaaagtgttgaatgaaaggcctcaagattctagcccagaagccgatcccgagagctcttcatcagaagaggatgagaatgacaacgaggagcaccattccgacacttccttgcagttggggttgtcgtcgacggggtattgcacaaagagaaagaagccgaagatcgaactggtctgcgataactctgggagtcaagtggcttctgattgatggaatcgattatttttctaattctgggtgtttagggggctctatgtgtcttcttgtttctggctgttcttttgctttatttcatctcaagtagagttttcttaatgtttaggtggaacatttttccataatcaagaagggatttgatcaatcaataacattagattttcttagttaaagacttaaagttgcccacacaccacaccatatgtgattatgatgaatttacattttataaaaaaaaaaaaaaaaaaaaaaaaagggcggccgctctagaggatccaagcttacgtacgcgtgcatgcgacgtcatagctggtcgatagtgtac

SEQ ID NO: 135533 - DNA, 451 bp, Arabidopsis thaliana
  unsure (1)..(451): unsure at all n locations
attgcggaaagaatgaaagctcttcaagaactcgttcctaacggcaataagacagacaaggcatcgatgctcgatgagatcatagattatgtcaagtttttacaactccaagtcaaggtactgagcatgagcagattgggaggtgctgcttccgtttcttctcaaatctccgaggctggtggatcccacgggaacgcatcctccgccatggtcggcggtagcaggacggccggaaactccaacgacagcgttacaatgacggaacatcaagtggccaaactaatggaagaagacatgggctcggccatgcaatatcttcaagggaaaggtctttgtctcatgccaatctctttagccaccggcattctcaaccggcacgtgtaattccgtaacctttnatccctggggcttttccgncggcggngntcttccctnccantntttttgcatg

SEQ ID NO: 135534 - DNA, 462 bp, Arabidopsis thaliana
  unsure (1)..(462): unsure at all n locations
actagttctagacccttctcctatactcgattacagttccacaagttgttcaacttgcgcccgtgagtccactggtttcaggtacaaatgttcaaaaactgattgcgatgatgagataacaattcagatagattttcgatgcattttagttcctgattgtttcacccacaaaagtcatgaacatcctttattcatctccacatcatattctagaaaaggaaacatttcttgtgatggttgcaaagatagtgttcgtgatgagtattatctgcaatgtactatttgctcatttgctatgtgttatcgatgtgcgaccattccatatgaggttatactacaaaatatgatgcacatctttctgtcgctttgctatggggaagggtccaggggaaggcatatttggngttaaggtttcggggaaaggatttgatnccaggggatgggtntccnatngacaaaang

SEQ ID NO: 135535 - DNA, 711 bp, Arabidopsis thaliana
  unsure (1)..(711): unsure at all n locations
attatttgtttcagtgggcacacacttgctgtgacttgtgtcaaatggggcggagatggaattatttatacaggttcgcaagattgtacgattaagatgtgggagactactcaggggaagcttattcgtgaattgaaggggcatgggcattggattaactcccttgcgttgagcacagaatatgtncttcgaacaggagcttttgaccacactggaagacaatatcctccaaatgaagaaaagcaaaaggcgctcgaaagatacaacaaaacaaaaggggattcccctgaaagattagtctcaggttctgatgatttcactatgttcctttgggaaccatctgttagcaaacaacctaaaaagcgcttaaccggtcatcaacagcttgtaaatcatgtctatttctcacctgatgggaaatggattgcaagtgcatcgttcgataaatcagttaggttatggaatggtatcacaggacaatttgttacagttttccggggccatgttggacctgtttatcaggtcaagttggtccgcagacagttagattgcttttgtgtggcgggcagtaaaaggcctctaactcttcaaagatattggggaaatttagggccggaaaaggtttaaaccaaggtcttcccttgggccatgcctgnttagggtttttttccggtgggntttggggtccncattgggggggaangttgnttt

SEQ ID NO: 135536 - DNA, 513 bp, Arabidopsis thaliana
  unsure (1)..(513): unsure at all n locations
cccgggcngcccactgtgtccaatggcctaccaaccnggtaacgatgtcgccgccgccgcaacgtatcggcttgccatggcctgagcttaacgatggtttggcatacaaggatgccatctcttcttctgaatcagagttaacgacggtgtcagaattctacttcaccaaatacaagagttcagctccattgctagggtggattcaacgaatccaaaacggacagatacaaattgacggtgaagttgtaaaagatcccaacacacttcttaggagtggttcgaaattagtttacagtaggcttccttggaaggaacctgacacgccatactcgcttgaagttttgtatgaaggtgatgatttgatcgctttaaanaagncttctnggcttcaagtatttcccggnggctttttccagaacggntttttttnacggagctnnagtggtgttttgggaaaantnncttttaaanggntcgggggnatccccaatctntccctntaaatngcttggt

SEQ ID NO: 135537 - DNA, 499 bp, Arabidopsis thaliana
  unsure (1)..(499): unsure at all n locations
agctcaaatattgttcaatttccaaggactgttcatctcaaggtatacggaatctatgaggatgacgcctgatgatctaattttggacccatcttcggcaaaggctgcggcatcatctacaagatcgggatcaaagcactttggttggccgcccgctacataaagagggtcccctaccaagggatgtcccatgtatgcaagatgaatccggatttgatgtggtcttccagattgtatctctaccttaacaagcgagcaatttttttccctgtccctctccagaacaaatactttactgaaagcagggttcccttccgggaggaagcaacatataatccttgtgcggaccccagggatatcgaaccactcccatacggcggtttgattactacctcggcttcttcaactataccctccgggaaggggccggaaaaaccttggaaaggtttctcccgggnccaancnnnttnnaaaaggtngggggggccnaaaaaaggtt

SEQ ID NO: 135538 - DNA, 481 bp, Arabidopsis thaliana
  unsure (1)..(481): unsure at all n locations
aaacatcatcgtcctcttcaggtacctgagattctnactccagacattggtgctggtgctggattcagtgtgtataacaatcaagttcaagctcagagtcgtcatcatctgacggttgaaatcccagattcatcgtctcacaatcttacatctaagagacctgtggtggttcaatcttctaatccggtcaacgttgacgatttccgaagacagcaacgcacaagcttgggttcgatttcatcttattgtccgtcggatctcttatcgtttttttcttcttctcttccatcgatcccatcggcggctaatcagaagcttcttcggcatgttcttagagnccggtttgaaaatgtttcccaccttcggtttctnaattcttncnctccggttccccccnccccaaaaactttttccccggggggataaggtttcaanatnnttccctcccctttgggcttnnnngngnaaccggnttnctttt

SEQ ID NO: 135539 - DNA, 503 bp, Arabidopsis thaliana
  unsure (1)..(503): unsure at all n locations
ttcaaatggcgatcctcgacacaaagtccagccgttggntcccacacaaccttctntttcttctcctcttgctcttgctccagtcagtaccgtatggattcggtcagactcagaccacaccacccggaacaacaaaaacgaaacctaacgatccagttgttgttgtaatcacggttttgtttttagtgatctttttcatggtcttcggttccatcttctgtcgtcgaagcaacgcacagttttcacgttcttccattttccgatccacctacgcagacgccgagtctcaggtcgtcaggatcaggaggttgaccgcgcgtgggctcgacgcggaggctatagaaactttcccgacggtttctttactcggnaggtgaaggcggtgaggntcgggaaaggttggttttgnagttttcgggtttntntntttnnaattnnaagacggcggaacgnttcggtttaatgcctccttnttnccacgggttnaaggcgatttnttttta

SEQ ID NO: 135540 - DNA, 518 bp, Arabidopsis thaliana
  unsure (1)..(518): unsure at all n locations
aaaataaaacccaactccatttatccatcaaatgtgtaaaacccatctgctacatttcaaagattcacaatctcacacatacttttttctttctgaaaccttcaaacgatttgttttgacaaaaaatagttgtcatttttgttggtcatgctcaaaagaaaaaaaacgcaaataagaggcatgacaacattaaatcccaattacaaattgtaaaaaagaaaaaaatatatattatttacactcgttcatctggtcggagccgttcgaaagaccgttcaccagcttcaatcggatgtcgggaagattcttcggcgcatctccgggagaaagtagaccggtacnggaaccactccgggnaangggattgaaaaaagacagcgaatggaagccggccgattggnaataattaccccttacgncccgnacgggggaaagnggttttttngggccccgggggtaccgggttntaaaacgggcccggggnannccccnccngggggnnnaacncccgggnccca

SEQ ID NO: 135541 - DNA, 519 bp, Arabidopsis thaliana
  unsure (1)..(519): unsure at all n locations
gtacatttttttttgtatttcaggaaactccgatggcggatctcttcggtggtggccacggcggcgagcttatggaagcacttcaacctttttacaaaagtgcttccacgtctgcttcaaatcctgcgtttgcgtcctcaaacgatgcgtttgcgtctgccccaaacgacccattttcttcttcttcttactataatcctcatgcatctttcttcccttcacattccacaaccacttacccggatatttattctggatccatgacctatccatcttcattcgggtcggatcttcaacaacccggaaactaccaatctcagttncatttaccaaaacaactatcactttnanttnaccaagggcaaacaaacanttnnaatggtcaaacttcaatttgnggccgnggcaaaccggntttttntgnnccaaccggggtncgggttngggnttgggtttaaaaccgggtaagggtttttagggggggtngggnaagnaatttgggaaatgggttggggggtc

SEQ ID NO: 135542 - DNA, 567 bp, Arabidopsis thaliana
  unsure (1)..(567): unsure at all n locations
ctgagaaaacgttaacnagtctctaatagacaccaacagcacagccaaggttcatgtcttcatgagatacaacaagcaaaccaaactaagataggagttaccatcaaagattcttcatggatctgaaaagccataacggatcaaatgattgccaaaagaagacgatcctacagattatttggtgagacaagaaaggcgctaaccgggaaaagttttgttcaagcgttgatggcatctgattctttagaccttatgatcttggcttgtagtttctgcataaaagctggattggcacggagtctttgttttacatatggaagttcttatgtcttcagcgatcttgttggctttcccagcttcttcctatcaacccgtaaagagtccttaagcagtctttnccggtttnccncccggnggtcnaaccnctcgctggggattgaaagcncgctttccccgaatggganctttncccaaaagnnccctagcctttagccngangcttgnggcccagccttcccggaaagaattaacttccgccttggngccgnnccccngggaanacctgnt

SEQ ID NO: 135543 - DNA, 895 bp, Arabidopsis thaliana
gcaagtaccatttggagaaattctggtttttcgggggccattgcaacgacgacgctaggtatcttcgtgattccaaaagccatgattggcctcattcttgtcgataaatggggcagacgtcctctcctgatgacttcagcgttagggatgagcatgacttgcatgctacttggggtcgccttcacattacagaaaatgcaattgctttcggaactaactccaatattatcgtttatatgcgtaatgatgtatattgcaacttatgcaataggcttgggaggtctacccttggggaattagggcggagatatttccaatgaatataaaagtagccgcaggaagtacagttacgttagtctcattttcaagtagttcaatagtcgctaacgctttaaactttctgttcgaatggagccctcaaggaacgtttttaatattcgcgggaatcggtggagcagcgttgctttacatatggttgctcgttccaaaaactaaaggattatcactcgaagaaatacaagtttcacttattcatcagcccgatgaaaaaaatcaaacttaatttgaattatttttttttattataaaaatgctcaaattcagtttatggtgttatatatgtttatttgcaaacaaagatttttttttttcactatgtaattacgactttatttttctgggtaattagccccatttttatgatgtatatttccgacgatgtaaaacttggcctacgtacatgtgtattttatctctaaaattgcaaatgtaatatttttcggacatatattaaagaagagtttgacttcaaaaaaaaaaaaaaaaaagggcggccgctctagaggatccaagcttacgtacgcgtgcatgcgacgtcatagctcttatagaggtc

SEQ ID NO: 135544 - DNA, 475 bp, Arabidopsis thaliana
  unsure (1)..(475): unsure at all n locations
caacatcttccttctcatcttacaaccatatctctagtatattgttttttggaggaggatccgatgccaactctagagaaactcctacaattgaaagtggtttctttatggtacaacgcctatgttgggaggagaatggtttgctccggcggtgggtttcctcaattgcagaggctttttttatgggaactatatgccttggaagagtggatagtagaagaaggctctatgccacggcttcatactctgcatattgaattctgtaatacattaaaggagattccagatgggctgagatttatcacttcattaaaggaattggttatcaacacaacagaaagagaatttcagaaggaagtatccggaggagggagcaagattactataaaatccaacacattaccccttattcgggtatggaccattaccacaagaacccggaaaccaccgggggcaattaanannntcnncagnt

SEQ ID NO: 135545 - DNA, 524 bp, Arabidopsis thaliana
  unsure (1)..(524): unsure at all n locations
ggatcacgatctcgacaaattccctttactctcttacgtccttcatcaacatgactccaatctccacgcgccgccgtctatggccgcgcaagaaactctccttccttcttttcctcttctctccaatccacaaatcatgtctacgttgactcaatccatcccctcaacgatcacacagacgcttttcgtcttcaactctctcggctctcgccctgatcccttagcggtttcctctgctcggtccaagatcgctcagattatggattcactctcgcctgaagatgcggcgaaggagtcggagatttatgccggagttgtgcggttggatgaagtgcacgatagttacgagaagaagttgaaaggattttggaggaggagctttctaggggctattctacggaggtggaatcgatgtttaaaagcggcgagaagtaaaacgngaaggttctttcgggnntcaaaggnggcggaatccggngnaccnttaaagggtttnctntcttccaaaagtaaggtntccnttc

SEQ ID NO: 135546 - DNA, 406 bp, Arabidopsis thaliana
cgcgtccggacgcgagaaatcacatagtagtcaagcgttatttatatctaattggatggcttttttgaggaaattcgggaacatattgaagcagaccacaaacaagcaactcaatgctcaggtttctttatcaagcccttcgctttttcaagcaataaggtgtatgtcatcttctaagctctttattggaggtatggctttgtcctcccctgccttcgccggaaaggctgtgaagcctgccgcatcagatgtcctcggaagcggccgtgtgaccatgaggaagactgtcgccaagccaaagggtccatcaggcagcccatggtacggatctgaccgagtcaagtacttgggtccattctccggcgagcccccgagctaccttaccggtgagttccccggtgactac

SEQ ID NO: 135547 - DNA, 570 bp, Arabidopsis thaliana
  unsure (1)..(570): unsure at all n locations
agttattgatgataagacttgtgaagagaggctttggaagatgaaacaccgtggcgagacaaacttttatttatgggagataaccggagatatgcatattgatgctactcataagggaaacacatcaagatatattaatcatagctgcaaccctaatacgcagatgcagaaatggataattgacggcgagaccagaatcggcattttcgccacccgtggcatcaaaaagggagagcatttgacctatgattatcagtttggtcagttcggtgcagatcaagactgccattgtggggctgtaggttgcagaaggaagcttngtgtaaaacctagcaaacctaaagatagcctcggatgaagcttttaatctagtggcaccatgaaattggncccagacaacttccccagggtgcatcaaaatgggcttttaaattggcacatnggttcagggnaatccttggncaatctnggcaaagggtncaatntccgnggaattccatttggngtnggnnncngggtttttnnccccgggttataggggttttgccncntaggcanttttntngggtt

SEQ ID NO: 135548 - DNA, 513 bp, Arabidopsis thaliana
  unsure (1)..(513): unsure at all n locations
gcattatccacctgctctgaatgatgatgtgtggagattggacaagatcggcaaggatggggcattccattaaaagcttactgctgaaggtataaacactgcagaagattttctgagagtaatggtcaaggattctccaaaattacgtactattcttggaagcggcatgtcaaacaaaatgtgggatgcactagtagagcacgcaaagacgtgtgtccagagcagcaagctttatatctactatgctgaggattcaaggaatgtccgtgttgtgttcaataatatctatgagctaagcggccttatttctggagatcaatacttctctgctgattcacttacctgatagccaaagggtatatgttgaggggcttggtgaggaagcatttgaaactggacccagtcatagngtntgtggaaaanctctttngggctttaggagccccnaggttgggtttnccnccnctaacctggaaaatacncggctgngccttacccccantnanntngtng

SEQ ID NO: 135549 - DNA, 1060 bp, Arabidopsis thaliana
  unsure (1)..(1060): unsure at all n locations
ctttgtcatctttcttagcgttatcccactctgagaatttcgaaatcaaatcagttctcgttgttaaagaccgtcgcagagtcgaattagcgggaatcagaaagaaagaatcaaaaacccttaagcttgtgtttaggaaccgtttattctgaaattgaagtgtgaagaaatgggaaatgatcaacataaccacagtgacagaggattcttccacaacttagcagggtttgcaggcggccaatacccgcctcacggtcatggttacggtcatcatggtcacggttatggatcttcttatccatacccggctcctcctcctcctcatggcgtttccaccagttgcttatcctccacatggtggttaccctcctgctggttatcctcccgctggttatcctccagccggttatcctgctcacggttatccatctcacggttatccccgtccatctcactcaggacatcaccatggaggcataggagcgattatagcgggtggagtggctgcagcagctggtgccccccatatgtctcacccccccatggacacttatggtccacccccccatggtcatggcttatgggcctacggggtatcacgggtcacgggaacgttcaaaccaccggtaagttcaagccacggaaaattccggtaaacacggcatgtttgggaagcataaagggaaattcttcaagaaatggaagtgattgttttcccaaaagattaatccaattcaaagaccatacattatcattacataaaaataaaaaaattaaagtctttgtaattgcattatggttccaagcctagagattagaaagttgtgatctttcttttctgtatttggttgtatcaagcttgttataaagtttgctccttttggtagttggaaactgagatccacttgtttgaaaacgatcactctttaatattgttgttgatgtggaatcttcaataaacttctttccactaaaaaaaaaaaaaaaaggncgagggcggccgctcaacagagactcaagcacgacgtcagcgtgcatcaacgctcgtagatagtctaaa

SEQ ID NO: 135550 - DNA, 414 bp, Arabidopsis thaliana
aaacagataaagcatgcgttttcccgtaaaggatccatgaaaccatgtgttgggcataaagaaatcgttcctgaatctgattctggaactgattctgaatcttctgatgatgatgatgcgtttacctgtgtaaagaacctggcaacagaaccaggaaaacttacacgcgatgggaatattgaaagaacaggagatgatgatcatgtagattcaacaacattagcaaccgctaaggaagattcaagtggtgatatattagaggattcgacagatgttgaagctaaagaggagaaattaaaggaagcagcagagtcagaaactagagatatggacaccgccatgaacatcaaaactgaagatgagaaaggagagacgcttaaaaatatcgaaggaggggaagaaaaggaatcatct

SEQ ID NO: 135551 - DNA, 583 bp, Arabidopsis thaliana
  unsure (1)..(583): unsure at all n locations
aagtaaaaccgcatgtatgacatctgctgacatcttcagctcatataatgaccatacaatcgatcaattggatctcttgcttactcaactcctccttaaatcttcccaagacaagcgatttgtttgtgaagcagcagaaaaagcattagtagcaatgactgcacatgtttctcctgccttgctgttgccaaagcttcaaccttttctcaagaataggaatcctcggatccgcgcaaaagcatccacgtgcttctcccgatgtgttccccgactgggcattgaaggcattagagaatatggaattgagaaactagtccaagcagcatcgtctcagctcagtgaccaactcccagaatctcgggaggctgcacgggcagtcttactggaacttcagacagtgtacaagaaaacttctaatgtcggaccgaaggaggagcatccagagccagtcacttggcaaatcttctgccaatcaaacctctcacctcttggggcaaggttttgtacgggtaccaatttngcagttttgcttanngggcttgttnggggtnttgnagnnaaagccaatgttgnttttntgctc

SEQ ID NO: 135552 - DNA, 549 bp, Arabidopsis thaliana
  unsure (1)..(549): unsure at all n locations
aaccccncntngcccccnggttccttncctcccccccntttnngggattnggccngntccattncccccgggaccgcttgcccttgttcccccagcnttattcggccccttttnggnaagctggtccccctgcagtncccggtcccggattcccnggtcggcccccacgcgtccggggaagccgtgatggaggagaagtcggtggagttgagggaaaacctcaaagaaatggaagcgtttagcgatggaagcgggtagagaaggaggatcttcggataagaacatggaggcttttgtggaggatatttgtggagaaactcttgttcaaaacttgtgtgaagcagaggaggttaaagtaaagtaaataaaggacaaaagagttggtgtctagaagtggcggagtgttatttgctaatactgtcactttgtaatatcaaattcaattaaacataaaatttactccatctagataaatatgttttttgaataatggtcaattacaaaacatgtttgattgaaaaaaaaaaaaataaataaatatttacaaaa

SEQ ID NO: 135553 - DNA, 528 bp, Arabidopsis thaliana
  unsure (1)..(528): unsure at all n locations
accccnttttnggatttggcggtncanttccccgggacccntttcccntttttccccaccctttncccccccctttgggganccttttcccccccagttcccgntccggattcccgggtcgccccctgagtccggcagacctggggcaggtcttgttcaatctccactagataggattattgtgagctgcacttcagaagatcgccgtgagaagctttctcgatacaagaacaagaagagcaggcgaaatttcgggcgtaagattaagtatgcttgcaggaaagctcttgcagatagccaaccgagagtccgaggaaggtttgcgaaaacagaggagaggaaatagaatggttcaagaaaagggctcaaaggaaggagactaagcaaaaggaagaaacatgaagaataaggagataaagcccatctcattagaaactagttttgttttatatatctatgtataaactttaaaatcttataagcatccaatttagttttttgtatataaaagggtttctctnaaaaaaa

SEQ ID NO: 135554 - DNA, 362 bp, Arabidopsis thaliana
  unsure (1)..(362): unsure at all n locations
actactaaccagcaaatgggtcttaacgttataacagaactgatcatcgggtacttatacccaggaaagccactagccaatggcgctgtcaagacatacggatacatcagtatgtctcaagccttgtactttgtaggagacttcaagcttggtcactacatgaagattcctccaagatcaatgttcatcgtccagcttgttgcaactgtggttgcatcaactgtctgcttcggaacaacctggtggctcattacatccgtcgagancatatgtaatgtcgatttnctcccggtgggtagtncatggncttttcctngngatgaagtgttctacaatgcatcaatcatatggggagtgattgg

SEQ ID NO: 135555 - DNA, 234 bp, Arabidopsis thaliana
cgcgtatttcctgatggaactatgttgaagaagggagacaaagttatatacgcgatttacgcaatgggtcgtatggaagctatttggggaaaagactgtcttgagtttaggccagagaggtggctaagagacggacggttcatgagtgagtcggtctacaaattcacagcctttaacggtggtccacgcctttgtcttggcaaagattttgcctattatcagatgaaatctacg

SEQ ID NO: 135556 - DNA, 386 bp, Arabidopsis thaliana
  unsure (1)..(386): unsure at all n locations
ttcaaaatccaaaagcacacaagaataagagaccccttggctctcttggttgctatgttggttgtgaatagaattgagctgaagaggtaaaagagatgaagagaagaaggagggatctgaaacaagcggcggagtcagagcaggaggaatgtcagagcattgcccaggtcgtctctctcggagattccgatcaaattcagccgccacccaacaagaaagaagaagaagatatatgtnaatacttactgcagaattttnatcttgatcatgtgatggaaattcttatgagatttcctttaacctccctgacgggggttcaagtncggtctctaagcagttggtcatccctcatttctaggncggtattttngcaacctttttatatt

SEQ ID NO: 135557 - DNA, 424 bp, Arabidopsis thaliana
  unsure (1)..(424): unsure at all n locations
ggaacaatgacggatgcatttctaagcaattgccactccattgagccagttttacaagaatatccgtatcgttattttgcgcactgcttatccagagtttgttgaggaggacttgaggtttacacgtttggacttggattggtggagatgagtgtcttggttggacaaagttttggcgtaatctcaagggtattgggaaattttgtggaaccggaggagagttccaaagtgattgggaactaagtgaggcttagaagcttatgattggttctctgaagtctgcaggttaggtttttcttttgcattctctcctttgaaaggcacagtgtgtcggaggtttcaccatttagtaaacatatactcgttttacgttttttttttttccgtttgttttttggggaaaaaattccttgatattaaaang

SEQ ID NO: 135558 - DNA, 541 bp, Arabidopsis thaliana
cgcgaaggttgggcttcttttgacaatcccatgcctgctgcaaaatctactttcgttattacctcccctggagatttccagttggaactgaaaattgaagagattctacagcctagcacaagcatgcaattgccaccctatccatcaactgtggaccagcatgctttgtcgataccaagtccatggcaggaagatctctcgaatgtcctaaaagatgttgtcgataacccgcagccgtggaatgcctttcccgactctattgaggccaatcctttggacagcagtaggaatattcaccaaccaggtagatggagcaagtacttcgtcatataacactgatcaccagcatttggaatcacaagttttagaggaattaagcaatgatggcacccaaacaaccagaatccctgctggctcttctgcttttggttttccaggaaatattggcatggcaccatcatacttggaagaagcttggcagcatgtaaatgaacaaaagtcagctaaaccatttgatctcccctatgattctgagttcgac

SEQ ID NO: 135559 - DNA, 712 bp, Arabidopsis thaliana
  unsure (1)..(712): unsure at all n locations
ctctgatcggaggaaactatgggctgctaaatactactaacttcacaccaaatccagactattacagtgctctgatctggcgacaacttatgggaagaaaggcattgttcacaaccttttccggaaccaaaaagatacgttcgtacacccattgtgcaagacaatcgaaagggatcacagttttactgatgaaccttgacaatactacagcggttgtagcgaaagtagagttaaataacagtttcagtctgagacatacaaagcgcatgtaagtcttataaaagagcaagttcccaactttttgggggtcccaatggagtaatccaaagagaagagttccatttgacagcaaaggatggaaaccttcacagtcagactatgttactcaacggaaatgctcttcaggttaattcgatgggtgatttacctcctatagagcccatacatataaattcaacagagccaataacaatagctccatattccattgtgtttgtgcatatacggaatgttgttgcacctgcatgtgcttaaggtaactgcatatggaacttaagacagttccttcattcagttatttgattagacaaaaataaagaagggtccctttctcccnnnnnnnnnnnnnnnnnnnnnnnnnnnnnnnnnnnnnnnnnnnnnnnnnnnnnnnnnnnnnnnnnnnnnnnnnnnnnnnnnnnnnnnnnnnnnnnnn

SEQ ID NO: 135560 - DNA, 525 bp, Arabidopsis thaliana
  unsure (1)..(525): unsure at all n locations
aaccaagaaaagtttttattaagcttttgaatttcttctcatatggtctaatctttattgactagttttgtgtttcaagtacacacataaacaacccatgtttcaccacaatcatggcaaaggaaaaaatgaacaaaataggcaaaatccaaaaagaaatgaagaagaaaagctcaaaaggcagagaaaacgcctcaatgaaatgactctgaaggtgcactcatggagtccgcctttgcagctaaaatctgcattttctgtgtgcaaagaactccagaccttcagagaattgagaaaagcataaagaaacaagaaaggagggcaaaaagcacccttctcatctcagttcacaagatacatacatacatacatccatacatccatatatagggagagtttgacggggggctaactcccagtgtagctgtcggggggtttgcccggaccttcttccccaaggggtccttaggtatgggtccanaagtgccncannggnnttcccttcccncgggggggaacctcnct

SEQ ID NO: 135561 - DNA, 444 bp, Arabidopsis thaliana
tttttttttaaataatcatgtttgtaatacataagccaataggctgcagagtcagatctctgaatcaagtattcaatatacaaagccaatcatggttcagtaaactagctacacaaacacttactactacaagggggtaagagaagctctcaaatcgaaggcaataaacaaatcaaagccagagttagcggttttaagctccgcgatgttgcaggaacaatcttcttcttttatcttgagctcataaacacctttgaaatgctgccatgcgactgaaaggtgctgctcatcaatatctatataaatgattatactcttcagtcttcgactcttcattcatatactctctttctctttagaagggcagggaatatggagatggatccaatgaggaacagcactgacaagggcttgaaatcatacaaatcctttactgatctgaga

SEQ ID NO: 135562 - DNA, 529 bp, Arabidopsis thaliana
  unsure (1)..(529): unsure at all n locations
ggtgtagatgtttatttatatctcatgtctagaaacactaaacacgaatatatgtgtatatataacaatgtgttcatgatacatacaaaccataattatcttataatatataatacttgtgtaacaaaacacacatatttgtcctgatggttacatcaagaacataaaattagttacacatgtatatagcaagtaggtccaatttaacaaaaattggttaactgtttttatttttgtaaatgctaaactattgacgtggtttaggagcaggagaaggagaagaggaagaaaagaagagaagagaaaagatgatcggctaggatttgattagccgaatcgggacggatgaaatgcgtcccagaagacaaagtcttgaccggggttttacacaccttgggaattggggggacaaagaccnccaaacctgtgggccccattgcacatgacggggttgccaccttaanccgcagtgngggggtttttgtgagaccanacgcggggnaangcnccgaaaanatnnccccggggg

SEQ ID NO: 135563 - DNA, 483 bp, Arabidopsis thaliana
  unsure (1)..(483): unsure at all n locations
ggatgtttatgttaacgcaaacataataattcattaccaaacacaaaaccatgatgttttacccaaaaactggcttcaagcaacaaaacttattagtagtctccactgaaccaaattattaaaacaaaaaaaaaaaatagagcaagcaagccaaaaatagtctcggaaagagacagcgacaggggcagagagactcaccatccctttgtattgcccctagttctgtcgtctgaactctctccgggacatgataaataagacaagacacagattcatatacgacgctgttctttttgtttttttattccagggattagagacagtaccggtagcccgaggaagaggaggaatgggatggagacaggaatctcccaaatccttccttggttgaaagggagctgttacgggggtataacctccttggaagngaaaggcagcnaatttgaattagcgggnttagccctgctagcnctctgnggggat

SEQ ID NO: 135564 - DNA, 378 bp, Arabidopsis thaliana
  unsure (1)..(378): unsure at all n locations
nnnnnnnnnnnnnnnnnnnnnnaacaaaaatataatactacttagttatgatttatgtatatttctggttgcatttatatatctatgaagcatttcttcaaaccggactcaaaactaaataaccaaaacaacaaagccagataaacccaaagggcacatttcccaaatctctcaatcatcaagatcgaatctagctgatgcatgtttcgccattttaatgagctcagctgcttctttcctcctcctctggtggtccccttgcgctgtcttcaacattttcctttgatcttgcactggaaacgcattcaaatcagataaaaactcatcggaatgaacgatcctctctcgaccagaagagtaagtcgcaccaccaaatga

SEQ ID NO: 135565 - DNA, 514 bp, Arabidopsis thaliana
gttagagtacttaaattatggttttatttgaaagatacactttattctagcttgtaaaaccaaacaaaaactatataggtttttaaagcacatacccagtcatggcaagcggtgaagaaatgatcggagccacaagttctattccaggaagggtagttggaagcgatgagatcaatgtagtttccaagatatttaacaagattattacgactgtgagagtcatgaacgtaaagtttctgttgaagaattcttgaactgaaaggtatgtagaataaatgagctttggtgggatcttttgtcaagaatctatggctactctccattagtttcataaaccatccttctgatgcgtaaaccccttccattattgcctcaggctgatgggaaattggcctatccccttccgagtagacataccctttcagagttggttccattagcccatagccccttttgaagatgggaagtttgggaaaagggcgaaaggacaccttctggccaacggttctgactg

SEQ ID NO: 135566 - DNA, 609 bp, Arabidopsis thaliana
  unsure (1)..(609): unsure at all n locations
aaaagttaataataattaaaaaaattgtgacctttttttcattttgtttacaaaatcacgtcttcagctatactactgtccaaggaattatccctccgatgaatttctgatcgtaatgatccgtttgcagttaactcaccttctgactcctccactatcggaggaggaggaggaagccgtggagacggcgacggagaattcttctgccgctttctgcaatgtctcactttaataacacgagtcaaaacctgaacaatgtccctcatgttaggacgttttctaggtgcacgagagatgcatttgtaagcaaaagctgctacttcattcacttcttggtaaatcatatctccccatcctaatcctggaatctactaatctccttcccatccggacttttttcctctggcattcataagccggcagnttcnanccaattccattaagaccctggtggaggggttcctnccgggcanaaggcccgaaaggcaaacnccggagccanagaancnggtttctnggggaaagnccctggtgaaaagatccggggccnggggngccaaggtcccccggggaagcgnnagttggcacaatttnccngggggggaagna

SEQ ID NO: 135567 - DNA, 542 bp, Arabidopsis thaliana
  unsure (1)..(542): unsure at all n locations
aatcaatgaagtcacatgaaactttttccttgagagaaccggttctggtcataaaatcctgggaaaacaaaagagaaaagaaaagaaaaaaacccaacatttcactctattagctagctgaacaacacagatcaaccactaatccttttacaatgacaaatacacaaatctttactcttctaaaattctgtttacttcaccatcatcttctcaggctctcgaagtgacctctctctctctctctctcaattagttgctaatgtaaccgttgcttcacacgtctcccatttaagtcacaaccatcagcaaataactcctttcgatgccctgatgatgttaaagagtgctcactcagcctagccacatactccaatagctcactttgtacgggacggggcagctttcccttcaggataatcaaacccacccgtttccatcacagctttcagggtttctggcgaagctataaatttggggcgggcggtttcaggtggaaaaaagggngggggggcnccgggattccggcngggcctgngggggga

SEQ ID NO: 135568 - DNA, 476 bp, Arabidopsis thaliana
  unsure (1)..(476): unsure at all n locations
acaaaaacaaattttatttcctcgattgtgatagtcaattcaaaaacataaactaaatactgttttaatgagacgaaacctcacaaaaagatgacgaatggtttgattttacaaaggcgaaaggtagaatatgggttaaagggatatagtaaggagagaagatttcatcaagaggatgtgatcaatcagatgagaccttggcgttgaagatcagagtaagtcttcttgttgtaaatgttaccttcacgatcttcatattcttccttccaagttctgggcctccatttggtcacgcccttggcctctccctgtatcccccttccacaattccttggcggttcctcaatcgaagggatttccgttgaagtcctttgggttggggattcctaggcaacgcattcccgggttggggggcgccattctttaaaaaagggnnccnaaaagcccttttnccccaaaggnaaaggnccccaaaa

SEQ ID NO: 135569 - DNA, 564 bp, Arabidopsis thaliana
  unsure (1)..(564): unsure at all n locations
aaaaaaaggttataattttattggattttgaaggagatgacttcaaacaaacaaaaatgaatcccagtaggtcgtggcattacaaggcatctctactcaatgcaaacaatgtctaatagtcttatctaaagcctgcaactgcaagattctctatatgttgtataaatatatatatcatgacagtcgctctccattacttcgataatggttctttttttcttcgaattctttctatttacactgactaactcctgtattagcttcgttgactaacctgggtcacaagtccttgaagcctctgagctccaaagctagggaacaatcttagccacattaccgaccctgggagcattttggggttcccactgcaccatccaccaggggtaaaactaatctttaaccatnccccggtttaagnaatcccttatcgggcctaattaaggagcctcatcacccctcccggattccctagcaaaggggcccgggcccaatcacggggatgggccctgggggaaaccggggggggccccctggggggttncccaaaaaggnggggncnggtcc

SEQ ID NO: 135570 - DNA, 449 bp, Arabidopsis thaliana
ggtaaaaaaattggatttatggcctttttgataaatgtaagcttaatgcagatagagcggggcacatacaaatgatgatcttctttttaaccaaacccacaaaaaagggtaacaaaacatgtttatacaatgatcatcagaacttcaggatggctttgtgtatgtatgaaaaatttctatccaagctgattcctgagaatacctgcgatgattccctttttcttctcaaaattggggattcaattgatggctatgatgagaaaaccgactgacacatacatgaggaagacggagtatagagcgagtgcttttcttcttgggttaaccgctgagcttataaaagggtaagcagtccatgagctccaggcaagggttacagacacaaccaccatcttcagtatcacattgactttcaacatgcagatcacggctccaacgtctagcggaaa

SEQ ID NO: 135571 - DNA, 815 bp, Arabidopsis thaliana
ctcgtgcgtttattgaatcatatttcattaacgccacattacactcacaagaacaacgagaatacaaacaataaagattacaattctcacaaaacatgaaaactcccatgagttcttctatcacgtttgcactcgtcttctttctcctttctctcaacccaacttcatcattaccgtccaaacgcgaaagctacgttcaaaacgcgtgtagtgttacacgctaccaagacctctgcgctaaaacgctattgccgtttgcatcagtcgccaagaacagtcccagcaaatgggcacgtgccggcgtttccgttgccataaccgacaacaaagacgtccttagacaccttctcaaaacgaggctttcaacgattgggaaacgagaccgaatcgctttgtcggattgtcgcgaacttctccaagactctcttgatagtctccacaagtccttggccgtcctccggacactcagagccagcgagtttcagcagcagatgagtgatcttgctacgtggcttagctcttccctcactgacaaggacacgtgtcttgatgggtttgaaaagacatcgacgaggtcatcatcaacggtcaggatgattcggaagagagtcacgacgtctatgtacttgtccagcaattctctcgcactcctcaacaagctagcggctaatggtttgtaatctcttaaatcataaacttttacaaaagctttaattttccatgaaagtgtaagatcatattattaataaggtggttcatggctgatcactacgataactgtatctctcccattataatggaattatttacaggcg

SEQ ID NO: 135572 - DNA, 991 bp, Arabidopsis thaliana
  unsure (1)..(991): unsure at all n locations
attttcgttnnnnnnnnnnnnnnnnnnnnnnnnnnnnnnnnnnnnnnnnnnnnnnnnnnnnnnnnnnnnnnnnnnnctttttttttttttttaacttttggaaaattccgtcctaacaagtttacatttttgggttttaatacaaatttttaaactttctacaaaaagggtttcatgtactaccaacccttggaacagtatttctgggaattacaagttttcttcttttctcttgaacaagcttgtgttatctatctatgtatataagtatatgtcacatatatatctagatataacatcccatgggggctaatcagtttcagggatggcgatctaacaaagggctccagccttctttatgacactcatcatcatcatcacacagatgttgcttagcaagagtcttatacaccatttcatgaacagaacctccttgaagcagcttctccagctcttgcttactcacaaccatcttcactctcacaacaccattagtcttctccttggtgttgtcacaacaatctggtaatctatcttcttcttgttcttctttttccacctctggatttgcaaacctgactttcttcatcgncttcttcatgtgcttgattgaggtagtctcctggggcaatagatagttgagaccaccacagagaagcttggcttggggatgaagatgacaattgttggtgagagagtcaaagagaaagtagtgaggaaagaattgggtgagaatgtgatgaaccttcataggtcctctgtattcaactactttcccatcatttctcattatctttatcactttcttctccattactaaacagttccccatactttttgtttgtttgttttttcttactttagtttctgctttcttctgtatatgtgtttagagatttttttgtttcttgagttttggacatttgtggttgcatatttatagaactttatgttatgtgaaaaaaaaaaaaaaaaaaaaaaagggcggccg

SEQ ID NO: 135573 - DNA, 937 bp, Arabidopsis thaliana
  unsure (1)..(937): unsure at all n locations
acttcagtcaaaattcaggaagtgccacgattgattgttgctgttgtcgccttctcaggctatgttaccgatgaagagatcgagagacgggagagagaactaaggagagctcttcaaaatgacaagaagttccgagtgagagatggagtatcattttgaagttgcacagtataatccaccattcactctcccgtttatgcgccgcaacgaggtctctctcgaagttgaaaccaaggaggattagccccatcacaggtccatacatacattttcaggaattgctatctaccaagggtctccagccttctttatgacactcatcatcatcatcacacagatgttgcttagcaagagtcttatacaccatttcatgaacagaacctccttggaccagcttctccagctcttgcttacccacacccatcttcactctaaaaaccccaattggcttccccctgggnttngccccaacaatctggtaanccaaccncctcntggnccncctttttcccccccnctgggattngcaaacccnngactttcttcaaccgncttccttcaaggggcctggattggaggtagtccccctggggccaattggattagtaggagacggcccnccaggagaagctttggcttgggggatggaagatgaccaattggttcgtgagagagtccaaagagagagtngtgaggagagaattgggtgaggatgtgatgaaccttcataggtcctctgtattcaactactttcccatcatttctcattatctttatcactttcttctccattactaaacagttccccatactttttgtttgtttgttttttcttactttagtttctgctttcttctgtatatgtgtttagagatttttttgtttcttgagttttggagatttgtggttgcatatttatagaacttaaggttatgtg

SEQ ID NO: 135574 - DNA, 409 bp, Arabidopsis thaliana
gaataaatatattcctcagtattctcaggtttcaatatgacacaaacctgacaactttggttatccaaagaaaataaaattagcatctctcaaatttaaacttggtgctcatggttacaccaatatatacatatacaacaacaactcattatatataaaggtaaataatgacaaacaccaatctccagctacttggatagcctacaacaccattgatactactattactactacattggccttaaaaggggaaagtggattaacctttggggaagtaggaatccattccggatgatattctccggattgggccaaactagctatctgcaactatatgactgatcttctccatctagaagatggatttggtgagctttggccgcggctttatgatgatgctttcataggg

SEQ ID NO: 135575 - DNA, 510 bp, Arabidopsis thaliana
acgcgtccgtgataattgagaatgatgaccgtcatgcttttgttggagcggtggaagataatgaatgttctgttacggccgtggaagaaaataaaacggaagaaagctctgatccgcaagctcacccaaatgattgtgaaggagcaacctggtacggctcatactcacccgcaggaggaccaaaccttaaaccaccaggaggagctgaaagatgataatgagcttgctgaaaaatctgacttggaggttttgaaggaaggcaatggagctgctgatgaagtaaatcttgtagtgattgacgatgtcagtcaaataccgtctgaggaaaaactcgaccgtgtagaggatttacaggttgaagaatcccatgaaaaccatgatggagaaggcgggcaggatgtttgtgcggatcctaatgaaaaaagttgcactgacgttattgaaattgctgaaggcgatatagatatcaaccccattttcaatgagatggacttgaaagttgaagatctc

SEQ ID NO: 135576 - DNA, 446 bp, Arabidopsis thaliana
  unsure (1)..(446): unsure at all n locations
cggccgccctttttttttttttttttttttttaaggaatttaatattttatattttatttttcatttatataaaatataattatgattacataacaagaagatacatacttgccaactaaaaattaagatttgtcgagaaatttcctgaataattatgtcagagatattctccgggtaaaaaaaaaagcaattacatataacccgggatatttttttttaattattatttggataatttatttgacagatacctaaactacgacgtcgtatgtacttgagttggttctgggtccgtttggtctgattcgtgcacaagctcgacgaaggaaggcctgagtgtatctgtccctaaatctcgtccagatgcagcggctctttngcctnttcctnacctntatcatnanccggttcgccgttagctgggtttntttaanccncctttgng

SEQ ID NO: 135577 - DNA, 557 bp, Arabidopsis thaliana
  unsure (1)..(557): unsure at all n locations
gcgtccgcagacgctagacaaaacatagtaccaaacttcttgtcttttgtcttctatctccaccatgggagccaagaagtcaaacaagatcagagagatcgttaagcttcaacagcttctcaagaaatggcgaaaacaagcaattgcatcaaaagcagccaacaacaacaacgaagacaacaatagcagtggcgggggaagcaagagcatcaagtttctgaagaggacactgtcatttacagatgtaacagctgtgcctaaagggtatctagctgtttcggtcgggttagagaagaagcggtacacaataccaaccgagtacctcagccatcaagctttctatgttcttctgcgggtagggcaggaaggaggagttcgggtttcaacaagccggtgtcttttaggggtttccttgtgaagtttctgtttttnngngcatatttanggttaatgnnggggaagaccgaggggtcctggttncggcaataaccannnttgncagggntntnaagttntaattnagncccaggttttttaggcggggttccagnntcctt

SEQ ID NO: 135578 - DNA, 568 bp, Arabidopsis thaliana
  unsure (1)..(568): unsure at all n locations
cggccgccctttctttttttttttttttccaggaacagagatacatcatcacggtttcaatgatctgttggggcatttcactatttagaagtctctccccttactcagaattaagaaaatttaaagcacacaaatccatattcctagagaaaaagtgggaataagcagaatggctcaaattagcacaagaggaggaaaaagaagatgcagaagcaagcaatgaacaaaactatctgcacattgggctgttgtgaggttggtgtgaaggagtcttaggacagtctgatggatgctggtaactcgtcttatcatctgctgctgcattgaacttacattcctgcttagctgttattggcgtcaccaggtacccttcgttcttctcctccattatcttcaatatgctctccaaaacagaacttcacanggatcccccaagacaccggcttgttgaacccgactcttctttgctcacgcgaagacatagaagctnatggcgaggaccngttggatnggaccctctttcaaccgccganagtagaccctnggcagngtaacngnangnaggcct

SEQ ID NO: 135579 - DNA, 483 bp, Arabidopsis thaliana
  unsure (1)..(483): unsure at all n locations
cgcgtccggtcttacttagaggagttgcaagctcagtacttggtagtgttggagagagttgagcagaagaagcgtctgaaaacaaacgggtccagtaacgggaataacaagtctggaggtattgggcgaggcgagcgactcagtgctgcacagagggagagaatgcgtctgctgacgacagcagcctttgatagagggaaaggcgaggatacgtttggttctagagatgaagattggcagctctacaaacttatgagcaaggataatgacgatgatgacgaacaacctgattcagacgaggcagagttggctcgtttatcatctagacttcaggaaattgatccaacatttgtgcaggaaagtaggagggtgatttgagtcagacatcagggggaggtgccacgcggtacgcccctttaacagggggaggcttcaaggtagtgattngtntnggaaaagttcccgttnccnaagancctnttc

SEQ ID NO: 135580 - DNA, 476 bp, Arabidopsis thaliana
attttcgaacctgtgcatggatctgcacctatacactacgggaaggttgcctctggatcttgatatgcatgatactgtatgtgaaaccactcgtttaatatcggttgcagtataattatgtcgacattgcgaattgcaggacacagtgaatcccattgcagctgttctatcagctgcaatgcttttgagatacggattgaaagaagaaaatgcagcaaagagaatagaagaagcagtatcggatgtcttggaccgaggattcagaactcgtgacattcacactcctggacctacgttggtaggttgcaagagaatgggtgaggagatattgaggatcccttgatgctaaagtctctgcttcgacctggaaacttggtttagctgcaaaaactataaacaaaaatatgcagagagtgacattgagaaattcaatgtttgtttctatccgataaattgataagttatatatacatata

SEQ ID NO: 135581 - DNA, 580 bp, Arabidopsis thaliana
  unsure (1)..(580): unsure at all n locations
ggccgcccctttttttttttttttttttatttttagaataatatatttttgtatgatttatagatttttgggtttgtccaaataaattttggtatttttgtcctaaagcatcgttcattgatctagagacagctaaagctaatcaaataagaaactccacaattaatagcaactggaggaatcacaaatagttgtatcgaatttgataatttctaagccaatcttcacctttctcgtcgtaatccatcttagtaaaggcattccccaagaagttcaaattagcagcaaatgcagatgctcctcgccatgcatccagcactggatccatagctctaaccacgttaatgggtgatccgcaaggtcttatcatcctaatcccacattccaaccgctcgttcatccctggaagaaggctacacccgcccgtcattagtatcgagctcgtagcctctcctctaactcttctcgtcggggggagccttcctgattgatgggcagccacccgccaaagcnacttgggcaaaccataagggtgggtggaagggctcctggggaaggacttcaaaccanacnctgngnt

SEQ ID NO: 135582 - DNA, 635 bp, Arabidopsis thaliana
attccatggcatattttggttagccgtctcattgctccccacgttcttaaaggcacacccctatttcagggaaaggtggtcttagtatttccataaacaagatcagaaaatgcttgaaaaacgcgcattaacctcagagaccgatttcgtgaagctgcgattagcgccatgcttaatgagctgagcagcactgtggtctttgaacggcctaaagatgaagagtttgttagaaggtggcagcttgcttgccaaggtgatatagctcatgtggtggttatgccaagtgttacaatcgagaagcttgataatttcctgaaagaccttgtcaaacacagattgatctggcccgagcatggatctcagcctccttgccttgcatcggaggtaggatccaacacctgcatctgtccagctcacaagtgtcggcaccatttctcatttgttggtattgttgttttctagtaagccacatctagtttaaattcctcatcactgtattcctgaacttggtttcaatcatcgtaaaattttggcggccgcgaaataaaaacaaaacgggggatccactagttctagagcggccgccaccgcggtggagctccggcttttgtaaaactaaagtgagggtggtttcc

SEQ ID NO: 135583 - DNA, 543 bp, Arabidopsis thaliana
  unsure (1)..(543): unsure at all n locations
ccacgcgtccgatgccatgtggtgttcagataacaagattggtacatatcaaagtcctctccagtaacgtggagtaccttgcttcaagggatgcaacaatcatgggaagtcgtaacgggcatgctcctttgttcctctggtacaccttaaacaggaaaggttacaaaggattccagaaagaagttcagaaatgcttgagaaacgcgcattacctcaaagaccgacttcgtgaagctgggattagcgccatgcttaatgagcttagcagcactgtggtctttgaacggcctaaagatgaagagtttgttagaaggtggcagcttgcttgccaaggtgatatagctcatgtggtggttatgccaagtgttacaatccggaagcttggtaatttcctgaaagaccctgtcaaacacagatttgttctggtacgggggtggatctcagcctccttgccttgcaatcggaggtagggaccaacaaactgcatcttccgctcacaagtgcgggncnntnttaantttttggnattgtgttttttgtagc

SEQ ID NO: 135584 - DNA, 493 bp, Arabidopsis thaliana
caaatcgtctccttcatttgttgaatatggtatcatcgccagggaaatactcttatcttggtcaaggagaaagcacctcctacagctatataatgtatagatcagggaagatacatcataccgtcattgggccattggaagcggatactgtttattattaccgttgtggtggagaaggacctgagttccatttgaaaacaccaccagctcagttcccgattacttttgcagtggcgggggatcttggacaaaccggttggactaagtcgactctagatcatattgatcaatgcaaatatgctgtgcatctactttccagggggtctatcgtatgcgggctatatgcagcataaagtggggcacgtttgtgggacctagttcagcctctggcaaagtgtaaggccccggatggtgacaccagggaaaccatgggaaagagagtattccttttatagttgatgaatttgtgtctttcaactcgaggtggaagatg

SEQ ID NO: 135585 - DNA, 477 bp, Arabidopsis thaliana
  unsure (1)..(477): unsure at all n locations
gcgtccgagaagttgcagtcaagaagctcttaaccttttccaaaggatcatctcatgacaacggggtagccgcagagattcagacattaggtagaatcagacacagaaacatagtgagattgctcgctttttgttcaaacaaagacgtgaatctccttgtttacgagtatatgcctaatggtagcctcggagaagtcttgcacgggaaagctggagtgtttttgaaatgggaaacacggttgcaaatagcgttggaagcggctaaggggttgtgttatcttcaccatgattgctcgccacttataatccaccgtgatgtgaagtcaaacaacatcttgttgggtcctcagtttgaagctcatgttgcttgattttgggcttgctaaaggtttttgatgcaagacaattggagcttccnnagtgcatgtccncgatccgttgggtcgtncggggtacatcggtcccnnaatnttgntt

SEQ ID NO: 135586 - DNA, 637 bp, Arabidopsis thaliana
cttggagttgtagaaacatacagaaaacgtgttttcgctaaggcacttattaacgaggtcgtcaaatactcttctggtatccctgtgtgccgtggtgtttaccttcacgtgattgcacacaacaatcccgcaatccggttgtacaaaagaatgtctttcagatgtgtaaggaggttacacggattctacttaatcaacggccagcatttcgattcttacttgttcgtctactttatcaacggttctcgctctccttgctcacccttagatcttgcggtgttggttctgaattatatgaggagcggaatcaaatctttcgcatcaaagctgacggtgaaccacgatgagaaaggctcgaaatggcttaaaagcaaagacaacacgcggtgtctcttgcccactcagactaaacgaaaccttgcatcggaaagagtatcatccgggtatgattacgtatagtgtccgtctcccattcatagactttgtaaaatcattcattttaatgtcttccattaagctctggttgtgatcctattgtgtgtgttcgtgtagaataataatgtgataaaaatgtaaatattgtgatgtgatagttgaagacaactctttgggacggagggttcaatccactgttagt

SEQ ID NO: 135587 - DNA, 404 bp, Arabidopsis thaliana
ataacaaaaaaatttgtatattagttaatccaatgaagagtgacgtttttatacaccccaagaggtcccactccaaaaatagacaaaacaaccttatttgaaagccacacaacttattaagtttagttaacttaatgcatatgactcaagggatctaacttattaaactgattccaacactttctcataaccagatcttctactttgagggctaaaacattccgtggcaaaattcattgctttatatatacaaagcccactcgaacgcagcagaaatgtcgtctctctttttaaaggccaatgatcggaagctacggcaaaatttctggaatgtccaaaactcagcttcgtagacaagctgtataccataaggaatcaacaactgcttatcttttgtagtgatg

SEQ ID NO: 135588 - DNA, 463 bp, Arabidopsis thaliana
  unsure (1)..(463): unsure at all n locations
cacgctcatattcaacactttcgcgctctgtcttgtttttaacgaattcaatgcgagggagatggagaagaaaaatgtgttcaaaggccttcacagaaacaggttgttcattggaataatagcgataactattgtgcttcaagtcattatggtggaattcctaaagaagtttgcggatacagtaaggcttaacgggtggcaatggggaacttgcatagcacttgcatccctttcatggccgatcggctttttcacaaaattcatacctgtttctgagacaccattcctcagttactttaaggatccaagatcccttatttaaggggttcaagaaggcccatctcttcaagaaaccttgaggaaggcctaccattagcagatgcagttctctacgggatggctgggtaatttaatggttcagggggcnccagtgtgggccncggncttntaagntnacttccca

SEQ ID NO: 135589 - DNA, 600 bp, Arabidopsis thaliana
cgtccgaagaactcaacctacaatctccggtaagcatcttcttccacaacttccgatgacgcaactgaagaaatcttcgtcatcaacgagaggaagcaaagacgtatggtatctaacagagagtcagcaagaagatcaagaatgagaaagcaaagacacttagatgagcttctctcacaggttgcttggcttcgaagcgagaaccaccagcttttagataagcttaaccaagtctccgacaacaatgatcttgttattcaagagaactcgagtcttaaagaagaaaacttggagcttcgtcaggttatcacatccatgaagaagcttggaggaggcatacatgacaaatattcttctccgtcgtctatggatgaattggatcaagacttttcttctatcacagatgatccaagaactcatcatccatcatgagttgttctgatcgagaaaaacattacttcaaggttcttgcctctaatcctaatctattttctttccttggggaccccttttttaacccgttaactacgggcccaaagtttgggggtttatttgggtttctgttgttttgtcagaagataattatatgaaggatatttg

SEQ ID NO: 135590 - DNA, 578 bp, Arabidopsis thaliana
  unsure (1)..(578): unsure at all n locations
cgcgtccgaactattttattcttaagacggttcacatcttattcatttaaacttgtaattgttttataaattatctatatcaatctcgtccgacagttgacttagttgtaaccaccagaaaagtaagatgataatttatgtttatccatgttcattttcttattttggcggctcatcttctctttctgagtagtttagtgaaacagaagctgacaaacaaaaaatgaaaatgccaggaaacacactagagcagaagactcctagttcaacttctcttgtgttaatgtgcctataaatatcctttgagatattcatagagtatcaggaataaaaaaaaatgtcttctgctactgcggccttataactacggtgtttttctgaggttcagaggacccggcactcggccgcaagttcatcagctttctcttacaaaggacttgttgggaggggcattcggaccttcaaagccgccaaggagcttgggggttggcccattggtttttcccgggggnanaacgggccatcggggggnccaaatncgccggcggttgtttntcagngnccttcggtgggnttnc

SEQ ID NO: 135591 - DNA, 587 bp, Arabidopsis thaliana
  unsure (1)..(587): unsure at all n locations
anaggcctcttagggncncttgggccattgccctcttganccgaccgnccccagtttgtacntngccggttaatncggatcctatgatgtgattggaaatgttcccatgcgttcttgagagctgtccaaatctcaaatcccttgtcttgggtctactatcttccgctgagacggaacaacaatcaagagtctcgtctgtgcctccgtgtttcctatcatcgctagagtttgtagagataagaagcagactctgtagaaagcgttatgtgatgaaagtagcaaggtactttgcaaagaactctgtaatgctgaagaaatttgtatatgttgggagagtttccattcaagaagaagatctacttgcattgctgtggcgatatagcatatgtgaaatagaggttcgtggactgcgaagatgattatgtttatctgtgatgagaatttagattcgattaaaatcataaacatgttcgaggatttggaaaactttggtttgtaatttggacagaactcatggatgatgcttgaggattccaaaactctttcaagtattgtttaatcatctattcaaaataagtcgttgactc

SEQ ID NO: 135592 - DNA, 576 bp, Arabidopsis thaliana
  unsure (1)..(576): unsure at all n locations
acgcgtccggagtcttaaagatgatcagtcggcgagttttgtgataagcaatttgggttcatccgcaaaagcagatatcaaggttagttttaatgtgaacgatatttgggatctacctgtcacgttcgagagaagcaatgttggtaaattactcaccgggctctcaagcataagggacctaactataagtggaacaactttgatgatcatttgtcactacttgaagcacgaaccgatgcctcagttttgtaacatggtgcggttaaatgcgagattctatgattgtgatttggaaatgttgccatgcgttcttgagagctgtccaaatctcaaatcccttgtcttgggtctactatcttccgctgagacggaacaacaatcaagagtctcgtctgtgcctccgtgtttcctatcatcgctagagtttgtaggagataagaagcagactctgtagaaagcgttatgtgatgaaagtagcaaggtactttgcaaagaaccctgtaatgctgaagaaatttgtataggttggganagttccatcnannagaagtctnctgnattncnggggnnnaatcc

SEQ ID NO: 135593 - DNA, 547 bp, Arabidopsis thaliana
  unsure (1)..(547): unsure at all n locations
tgcctccncnacnttggggganttnggcttngggggggnnctttaccnttnggacctcaaacccggcgnttcatcttccaaggcaccccnaccaccttccggccaaaggcaatcngggccccaaatcgnggttcttcattccataacttggcaactggatagccgggaccccaggatactataggccccaaagtgatcancaaaaacaattctcaaaacccaatatcagatctcaagcttaagattgaagatctctcaggacctatctggggtttaaacccaacgggacagaagtatgcttaccagcttcctcaatggcaaaaggctttgagagcaggacaagcttatgattttgtctatgttcaaggtggccctcaagctaaagtctcagttttgagttacaactagtgagaaaacaacactttcttcaatctttttgtttatgcttattatgagtgaaagatgtgaacatagccaaccaagttgagcctaaatatgagaaatgtaaatttgtgacccttggtagagaatgcttttttgtcttcct

SEQ ID NO: 135594 - DNA, 484 bp, Arabidopsis thaliana
acaacattgtcaggaacagctccacttgtttttctattcgctaaactctatggaggaagtttaggatcttatggaggaggatcatataacccttatgaaactacaaaaccagcagcttcatcttacagagcaacaccaacagcatacagcccaaagcaatcaggtgcacaaatcgagtttcttcattccataactagcaactggatagccgggaacacaagatactataggcacagagtgatcatcaaaaacaattctcaaaaaccaatatcagatctcaagcttaagattgaagatctctcaggacctatctggggtttaagacccaacgggacagaagtatacttaccagcttcctcaatggcaaaagactttgagagcaggacaagcttatgattttgtctatgtacaaggtggccctcaagctaaagtctcagttttgagttacaactagtgagaaaacaacactttcttcaatcttttt

SEQ ID NO: 135595 - DNA, 476 bp, Arabidopsis thaliana
  unsure (1)..(476): unsure at all n locations
aactttctttgcttcctctttcaaagcaacacattatattaaatctcaagaaacaaagtaaagaaaaatgaagaacgaatctaccttcattgatgtccctgcagaatccagctcagccatgaaaggcaaagctcctctaatcggtgtagcaagagaccacactactagtggctcaggtggatacaacagaggactcgccatctttgacttcctcctccgtttagctgccattgttgcagctttagctgctgccgccacgatgggaacaagcggcgggactcttcccttcttcacacagttcttacaagttcggagctagctacggacggtctaccaacttttccagttcttttgtgaatttgccatggcccttgttggggggggtaatttcggttctggctttttccaatttccggtggnaaaaatccttttggccttttggcaaccgncccaaggattcnntttggnttggtntt

SEQ ID NO: 135596 - DNA, 556 bp, Arabidopsis thaliana
  unsure (1)..(556): unsure at all n locations
agcggccgccctttttttttttttgggggaaagaagaaacatatacccgctaaattgtttcaaaccggagattcattgcgactttgtgagaaaatgaactagagagtttactacaaagtgtgtccactatgcagttagctacgaaagcgcttacagacttacagtacactgaacttcaactttctgctatcatcatctcaggttatattgctacaccagcagttccagaaacaacgcttcttgtttgttggtgaggctgagttcctcaaaggttaaggcaccgtcttgaatgctgaaagcccgtcgaggatatggtctaaccactctatatgtgccaggtttgactaatccagcagcatctatgaagtcaaaaaggtacttaagcttgtctgatttgagaaagcgacgaccatgacggctgctatcctggcattctaacaagtagagtgatggcacttcattttcaccagacggtcatgggagcgtgccttctccaggtccncctaaaaccctgatcgggatgngncctgggatccagtggtatatggagctccga

SEQ ID NO: 135597 - DNA, 455 bp, Arabidopsis thaliana
ccagaaaagcagattttcaatcacactttcattttcctttttaaaaagattaatacaacacaattcacaaggccatggatgagtaataattacacaatggtgacataaattttacaataatgatgaacacacatataaggttttgattagtgtcttttcagagcgacgccggagatgacaacgaggatggtgaagaatacgacggagacaaaggcagagacaacagctccgctggatttttgacagaaagtctccaaactgttggcaaatggggagccagttcgtgttctggcttaccactgtgtgctagatatgatattgctgccgccgatgatgcagccgccgtgttcaacgccaggaccccagtgtcaagaacgagcaagaggagtcttgtggcggtggcgagagggcgaaggattgtgacgacggagattggaagagacagaacgagatat

SEQ ID NO: 135598 - DNA, 568 bp, Arabidopsis thaliana
  unsure (1)..(568): unsure at all n locations
cttagaagcaagagttgaagaacgagagaaagaaatcgggtcattgataaaggaaaccaacgcacagagggctcataacgtgaagtcacttgaaaagctgttggatgaagagcgtaaggctcatatagctgcaaatcgaagagccgaagctctttctcttgagcttcaagctgcacaggcacatgttgataatcttcagcaagaattagctcaagcaaggttaaaagaaactgcacttgacaacaaaatcagagctgcgagttcctcacatgggaagcggagtagatttgaagatgttgttgatatggacattggagaaggaagtnacagaatcttgagggctaataaaccgagctcgaagcacaagaggagatgatcacgggtcctactgatgaaggcgncggggncctttcaaaaggcatcaaggcaattgccgaggagggtggaggaggaggtgcttcaggagctttcctttgcaggatctaagcattgnctgcccaaggtcggttttggcatttttctttacngggcctcaacagaaggttccttcgtttttagcctttttcca

SEQ ID NO: 135599 - DNA, 996 bp, Arabidopsis thaliana
cttagaagcaagagttgaagaacgagagttttataatcgggtcattgataaaggaaaccaacgcacagagggctcataacgtgaagtcacttgaaaagctgttggatgaagagcgtaaggctcatatagctgcaaatcgaagagccgaagctctttctcttgagcttcaagctgcacaggcacatgttgataatcttcagcaagaattagctcaagcaaggttaaaagaaactgcacttgacaacaaaatcagagctgcgagttcctcacatgggaagcggagtagatttgaagatgttgttgatatggacattggagaaggaagtgacagaatcttgaggactaataaacgagctcgaagcacaagaggagatgatcacggtcctactgatgaaggcgacgaggactttcaaagtcatcaagacaatggcgaggaggaagaagaagaagattacaggaagcttactgtgcagaatctaaagcatgagctgaccaagtacgattgtggacatttgttattgaacagaggccatcaaaacaagaaagagattcttgcgttgtatgaagctcatgttcttcccaagaaagctttagcgagagaggaagagagaaagaaacagagagaagtcacttcttcttagaggacaagactctgtacagagtaaggagataaacatgtttaatctcaaaaggtttcgatctctagagatttagtaagagttggaattagaaaaggctcgtatggtttctctcttttaatcggttttaccggtttacctggtactgcagaaagtaaaccgaattagccatttgtattgaatctgagggtttaggtttttttatgagtgtttttttttgtgtgtttggtatttaatttgtgtggggtttgagtcggtttggtgttttgactttttgatttttagattcaagtctttttcagaattctgttactcgtttgagatcgaccgtttgctaaaaattttactcttcaatcct

SEQ ID NO: 135600 - DNA, 539 bp, Arabidopsis thaliana
  unsure (1)..(539): unsure at all n locations
aggcttggtttggtgggatcggtttacttctcattccttaaagtataaccgtcctcacctcatcgagtttctttcttctgaaaatgtaattgtctccaatcttacgttcttgaatgctcctgcttattcaatctattcaatctactctagccatgtatatattcataagatattggcccattcttctcctaaatctccttatacaatcggtattgtaccagattcttctgattacgtctgcatccaaaactctaccattaacgtggggtatgacgcgatttccctcaaaagcggttgggatgaatatggaattgcctattctcgtcccactgaaaatgttcatataagaaatgtgtaccttcgaggagcttctggttcctctatctcctttggcagtgaaatgtctggtggaatatctgatgtcgtggttgataacgctcatatacactactcgttaacccggcattgcctttagaaccacaaaaggcagaggtggttatatcaaggggacgtattcaacatcggtatnttngnanggc

SEQ ID NO: 135601 - DNA, 564 bp, Arabidopsis thaliana
  unsure (1)..(564): unsure at all n locations
gaaactatctctcctttttattattaatggcttgtggaaaactgctgaaacaaaatttctttgtttacacatgaatgaagaaatgaacctgtacagatttcttatctcagaatatgcaaacaacataaaaataggaaaccagaataaccgaaaggaacatgtatgatctaaagacaatgtggtttacttgaggaaagaatctgaccttctctaactccacaaaatatgaaatgattgatgaattgaatcctatcaaagaatcccaagatatgtttcttgctttttttttcttttttcttttgcagtctgtttcactagactgcagctctaccgtaagcatcagcatctctcttcagctcgggacacggttcaggaatgactgactccgaggacccgtaaacgtaggagcattgccaagaaacagaagaacctgggctcatcggcaaagaaacattcgccaaagccactgggctaaatggggatccttggacccaaanattccccgcaagccaaggnccccccaaaatgtgcnaaccggnggncccaggggggnctccacnnntt

SEQ ID NO: 135602 - DNA, 577 bp, Arabidopsis thaliana
  unsure (1)..(577): unsure at all n locations
tctttttttttttttttaataattccagacctatatttgctaaaacagacgaagcaacaacaatatagggttttaccaaacatagataaagcatgatacatacgcatgaaacgagcatatctgaaacacatgacctattcattgacttgtgatgatgatctctcacaaagaaaaagaaacaaaacaaacaccacgagacacaaagaaaacgctgcaagcaatcaagcgcattacagatggaaaattattaacaaaagggtcactttagaagaaagaacaagtccagaggctgaagcaggatttggatcacttagaagcagtacttgataccccatccaacacacaatggcagctccctattaaagattttcattcacctctcaaacagtggncctagctagaaccncccgngaagatctggcggaaatncggcgaagagcnccggcaaatgncccgttcccccttggggttcccgnttccccaccncccatggctttgggangggnggacccaagnaagccccgggganncccccccnattcangtcaaggggaaaaggncngtaaccgggaatngg

SEQ ID NO: 135603 - DNA, 507 bp, Arabidopsis thaliana
  unsure (1)..(507): unsure at all n locations
gcgggattccgatttcatccgacggacgaagagcttgtcaagttctatctttgccggagatgtgcgtcagaaccgattaacgttccggttatcgcagagattgacttgtacaaattcaatccatgggagcttccagaaatggcgttgtacggtgagaaagaatggtacttcttctcgcatagagaccggaaatacccaaacgggtcgagaccaaaccgggcagctggaaccggttattggaaagcgactggagctgataaaccgatcggaaaaccgaagacgttagggattaagaaagcactcgtcttctacgcaggaaaagctccgaaagggattaaaacgaattggattatgcacgagtatcgtctcgctaatgtcgatcgatctgcttctaccaacaagaagaacaacttaagacttgatgattgggttttgtgtcgggtatacaataagaaaggacaatggggaggttttccggcgnggttanaancnccggaaantngtccg

SEQ ID NO: 135604 - DNA, 311 bp, Arabidopsis thaliana
ataataaaaacttgaaaacattatcttacaatagtaaagcttgtttcaagtaatctctgtaaacaaacaaaaatcccaaaatgtgtgtttttcacaattcggctgcaacaatcaaacactaatgttgtggcggaacaataaatataacgtgaaaacattattctttgatacattttgggacagaaacttcgatgggtctctttagccagtgacatactaatccattttctccggtggcaagttcagaaccgattcggcaacctcttcgaaaggaacgaagacgaatgcagtcatacccctcttgtgtgaga

SEQ ID NO: 135605 - DNA, 426 bp, Arabidopsis thaliana
gtgtacaaattgagtgtgttcatatcaataaccactaaaagcaaacgatgtttgtgtacacaaaaagatgaagagatgggaggaaagagaaggaaccaaaacacacccaactactagaaactagggtgtgtgggtcgcaactacgtgtcagagtcaaaatagacttttgtgtatcatctgcctttgcaccatttatatctgatccacaagccaaactactgattcgggtgtttaggtttgggaaatgtaagatgacagaatcagtcttggtggatttcatcgaaaggcgcagcagcaaacctcacatcttctggccgtgcaaccacaactggttcatctgcaaataacgctttgaggaatgatggagtctttaatggacgacgattagtcattcgcggataaacctcagccagaaagtagtaagcg

SEQ ID NO: 135606 - DNA, 466 bp, Arabidopsis thaliana
gcgtccgaggtagcagaaggagcaaccgctctgtacatggtctcaattgagaggaatccaatacatttcagaccgaggagcacaacaactctctgtagatattgagtacttgagcaatgtgctttcggctctgtccatgccaattccgccagttcttgcaacttttcagacgtgtttggctacaccgagaggtgagctcaaagatgtgatgaaatcagaagctggtaatgaactcgactgccctacagctaatcttgtttgtaagatgcgtcgtatcagtttcgattagtctcaaatctacttgggtttcgataagactttgctaacaaatcggctcgtccattgtcatatttgtattccagcattgtctaatgttttaaggttacggagttttttccggggtttttatatgtttaggaaatagtttgttacttaaataaaatgtactcgtgacaagccgttttag

SEQ ID NO: 135607 - DNA, 776 bp, Arabidopsis thaliana
caaaatcctcttattctacatcaaaccaagatgttataaaagatggaaagaatttctgatcatgctaatgataatcgcatctacgatgaatttgagccactctcaaattggaaaactgaacaaggattcgaagctctcactatttaccttccagggtttaagaaagagcagcttaaggtgcaagtaaccaccacgaggaagctgagagtgatgggagatcgtccagcaggagccaacaaatggatccgtttccgcaaagagtttcctattccgccaaacatcgacgtcgactccgtctctgccaaattcgaaggcgcaaatctcgttgtgaggcttcctagaaccgagccaatgggcaaacaaccttcacctattggtacagccacaaaacctcctccagttcctaaagaaaaccccaaccttcctagcccggcagcgaaagaaaaggtccaaccaccaaaggaaacaagagagaatgaaacggaactagaaaaacaggccgagaagattcaatcaccaaagccagcaagagagaacgaagaagctcttaaccaagattacagaagtaaagtgaatgaatacaaggagaatcttggaggatatgtggcactgatgaagaataacagaacagcacttacggctggtgtggttgttcccgcagctgcggttctgttgctgtctcttggattctatgctggccaaatgtttacttcttaattcttacttacctatttgcatgattctcaaaggaaaataaaatgtactaaaatttgcat

SEQ ID NO: 135608 - DNA, 612 bp, Arabidopsis thaliana
ctggacatccatcccagatctccaccagactcattactctgcctgctcgggtctagtggtaaacgggaaagtccacgtcttgcacaaaggcttgtccacggtgcaggttcttgagagcgttaaactcgggtgggatgtcaaagactatggctggccgcaaggtccaatggtggtcgttgaggacgtgctttacgtgatgagccatgggctggtgttcaagcaagaaggtgacacgtggaagatggttgcatcggcctcagagtttaagcggaggatcggaatggcgatgacgagtttgagtgatgaggttttgatcgtaggaggagtgatcggacctgataggctcaattgggacatcaagcccttgtcagatgtcgacgctttgacagttgggaatgatcgtccggcctggaggagtgtggcgccgatgacaaggtgtcgtgggacgatccttggctgcacgcagttgacaatctgatggatgggaatgtggcttcattatgacgtctttcagttcttttttgttttgtattttcttcctgtttgttaactgttgtgagcaccactgtttttaaatcttctttgagaaatgataataagcgaatagcagct

SEQ ID NO: 135609 - DNA, 514 bp, Arabidopsis thaliana
ctccgcacaacccgaccgggaagatgttcactagggaggagcttgaaaccattgcatctctctgcattgaaaacgatgtgcttgtgttctcggatgaagtatacgataagcttgcgtttgaaatggatcacatttctatagcttctcttcccggtatgtatgaaagaactgtgaccatgaattccctgggaaagactttctctttaaccggatggaagatcggctgggcgattgcgccgcctcatctgacttggggagttcgacaagcacactcttacctcacattcgccacatcaccaccagcacaatgggcagccgttgcagctctcaaggcaccagagtcttacttcaaagagctgaaaagaggttacaatgtgcaaaaagggggactcttggttaaggggtttgaaggcaaggcgggatttacaagtgttcccatcgagcgggacttactttgtggttgctgatcacactccatttggaatggagaacgatgttgctttctgtgagtatc

SEQ ID NO: 135610 - DNA, 520 bp, Arabidopsis thaliana
  unsure (1)..(520): unsure at all n locations
gaaagactcactctcttttctctctctatgaaaaagctttgccggaaaggaaccgttcatccgtcgccaccgccggcgataaagaccgacgaacagtttctatctcttctccccgtagctatcctctctctcgtggcggcgctctcggtggaggatcgtgaagttcttgcttacctcatctcaaactccggcgactcaaatcgtatctctcgtctcaagaaaaacaaagaagataatcatcactctcctctctttctttgtgattgttttagttgttacacgagttactgggtcagatgggacacgtcaccgaggcgccaactcattcacgagatcatcgatgcttacgaagatagtttggagatgaagaaggaaaaagaaagatcgggagaaagcgatcgggaaaagcttctggacgagttaactcgataggaacgagtcgactcaaggagtttgggggagttcggccgagtttccttgtggtgactcggtgaaanatggaaatttcggcggnttaaga

SEQ ID NO: 135611 - DNA, 588 bp, Arabidopsis thaliana
  unsure (1)..(588): unsure at all n locations
attnccngggnctgcccactgtgtccgggggatggttcttgagaacacttatgtcacctgggaataatttactcgctgacccgcatgtccttccagccacacagctcacttctaaggatagttttgctgtgtcaagatatatcagccaaaccaagaagccgattgcacacattactccttcaaggacagatttgggactaaaaccagcgcctgtaatggcttcattttcttcaaaaggtccaagcatagtggctcctcagattctgaagcctgacataactgctcctggtgtgagtgtgatcgctgcctacactggagcagtctcttccaacaaacggacagttttgattcctcgacggcctttctgtttaatgctatttccaaggaaccctctatggcttgtcctcataatctctggcaatttgcgggtcttctcaaaactcggtaatccttcttggggccccgcagcttattccgctcttgccatcatggcttccgcaacaaaaattgggtgaaattcctgggccnttccaaaatgnaccancatgnggaacacntttagttttgggggaggnaaggccaccaatt

SEQ ID NO: 135612 - DNA, 330 bp, Arabidopsis thaliana
  unsure (1)..(330): unsure at all n locations
gtaacangtaccaaacaacnttggtgcangggaacntggagtagacaaaagtgaaatagcactgtggtttactgataaccagctggatctcgagatgggaaaagttgtggtaaaaccagctaaagcaggttcaagcattggtgtcaaggttgcttttggcgtaaatgattcaattaaaaaggctactgaacttattctagagggaattgatgatagagttgttgttgaggtgtttattgaagatgcatatgagttcactgccatcggtcctggatgtgggttctggttctgtttgccatcctgttgctttgatgcctactgaggtgcaac

SEQ ID NO: 135613 - DNA, 543 bp, Arabidopsis thaliana
  unsure (1)..(543): unsure at all n locations
gcatttttgtaggtaaaaacgctgaagaaggataaggagcatcctttttcaacacaaaaatgcgcgtctctctgtaccatccctccccaaagaagatcaagagaaagatagaaagaatcccaaaagattgaaaacaggttctgcaaacaaattccatatatatgtgcatcaaatcagcttgctggatagaagttctgctgctgcatcccttagatcttcgtactgataacatccatcgaagaattctgcaagcttcattagttcttgatcttccatgtcatccataaatggcttaatggggactccattgtctggctgcaacgagtaggagaaaggggttatcgtcaactaggaaaacaattccgagggcattcttnggcacccaaagntaaggctttggnatatcttccattcaatttcttgtgcatgaatcnnggtntagcccnctgtgggntcacacgggtnntngtcaaggnttttccaaaacctntgnaggatattcgggaacccgnntttaaggttccccngntagtttnctgtctc

SEQ ID NO: 135614 - DNA, 459 bp, Arabidopsis thaliana
  unsure (1)..(459): unsure at all n locations
agggattggnctttcttctaatgggcctgatagaaaccaatgggcttggaattggcgttgtccattggaggtgttcccagccgtacactgcccgtcaaactggtccgggtcccggtcccggacagtacaatcctcctccgtatccgccttttccgacagctgcggcaaccaccacatctgatgatgtatcggagaagacggtggaaatggacgtgaccactccgactagcctcaagggcaatataatcgggcttattgatcgagagtatatagacttaggatcatataggcaaggccataagcaacggaaaagcccaacccatataccaagctatatggctccaaccggatctgcttaaggntaaagttcgggnttaagggccnnccggtaaacttcaagggactttggtttatgccggttttggnncttcttggnccaaacggggnnnggttattggt

SEQ ID NO: 135615 - DNA, 820 bp, Arabidopsis thaliana
  unsure (1)..(820): unsure at all n locations
tcgtgttggaggctgatggttatcaaccttatcttatatctccagagaaagggttgagatcgttaataaaaaccgtccttgaagttggctaaagacccagcacgactatgtgttgatgaggttcaccgagtgcttgttgacatagtttcagcttctgcgaatgccacacctggtcttgggagatatcctccttttaagagagaggttgtagctattgcaagtcccgcacttgatggattcaagaatgaagctaagaagatggtagttgcattagttgatatggagcgtgcatttgtaccacctcagcacttcatccgcctcgtacaaagaagaatggaaaggcagcgtcgtgaggaggagctaaaaggtcgttcctctaaaaagggacaagatgcagagcagtctctcttaaacagggctactagtcctcagccagatgggccatcatcaactggtggtagcttaaaatctttgagagacaaattaatgccacaagataaagataaagataaagaaaaagagactccggaggtgtctggtctgaaagacttctggacctnagggagngataacttcagggtacttaattgaaggaaaagtgcnanggcaaattgggtngagtaggccgtttggttttgtcctgaattgnaaaaancttggaaaggtttgggttttccaaaaaaccaaggnggaangaancttcccgngggacttttaaccttttggggggtttcagnttcgagnaattnctnntgttnagggggaaatcaanggcncgaagttggatcnaatggcccgtntaaggcccgccttttttagg

SEQ ID NO: 135616 - DNA, 515 bp, Arabidopsis thaliana
  unsure (1)..(515): unsure at all n locations
tacacaagccctaacgagaccatcctttgctctgactcttaccagagcatgtactctcagatgcgttgtggcttatgtcaacaccaggaggttcttagagtcggcgctgtcttcgcctttggattcatcagagccatcaagtttcttgagaaacactggatcgagttggtccgtgacatcagaaccgggactctaagttccctgatcaccgatccttcagtgcgtgaggcggtcgccaagatccttaaaccgagcccaaagctagctgatttcggtggaatttgagtgcaagatagtcgtcctggcaagggattattactatggctgtggcctaacacaaagtatgtggatgctgattgtgaccgggacaatgtcttcaatacattcccactttgggctacttacagtaatgggtttcctcttggnntgancantgtatnnttcccctgagggttactttngggtgaantnagggcnntttggaaaccaagggggggtttttaaaggttatatgc

SEQ ID NO: 135617 - DNA, 583 bp, Arabidopsis thaliana
  unsure (1)..(583): unsure at all n locations
ggcaactttcatcagattcactgctcctttgttttgcttcttcttcttattctctctctttgctgaccaaaccatgtcccaacctcaacacatggccactttctgcgacgacagattatccgacaacttcacacaaaccagctcatacaaagcaaaccgtgaaaccctactttcttctctccgtgaccgttcctcccttggaacctattccaatgccacaatcggtcttagccccgacacagtctatggcatgtttctctgccgaggagacctcaccaaaacatcatgttcggactgtgtcaaaaccgcaaccctagaaatcactaaaaataataactgcacttccagaaaaactgctctaatattctacgaggagtgtatgggttcgatactccaatggtttccttcttcacgctcgtaggacctggcggcgcccttgggggggtaaaaacttttttggcacttttccaaattcncttttngggnnttccacaaacggttncatnaggnggggacnnttttccannggtaaaggttttgtttttttgngctttnggggggtttccgggaaannattgggggg

SEQ ID NO: 135618 - DNA, 608 bp, Arabidopsis thaliana
  unsure (1)..(608): unsure at all n locations
aacatggcttcaacaaaaataaactctttaacaacaacaatctacaattacaaatccccaagaggatacattaaccacaaatcccaaaaccaaatcaaactaatttcaaattccctaaacccaaaacccaacacaacacagcttcccaacactctctacagtgtcagcttcaagactattggaacaggtaagcttggcatctccagatatcccgatttcgaatactctcctctaggtggctctggtgccggaaccgccaagaaaatcgacggcaaaaacagagcatcaaactctgaattgctctgttttgtttcaatgtggccactctttatattccttctctcactagccaaaccacggaggtttctcgggctttccattgcccaccggtttctaaaaatcggtatctcaccgggggttttttccaagggaccttttnaaccaaggatccggggaaggttggnattgggggttnttnggggnaggtcttttttacgggnggggnggngggggtttncaaggntcccgnngttggtgggnanacttttttacgnggggggatcgntnggggggancagggngggaaggggaacttgccgggggnnttc

SEQ ID NO: 135619 - DNA, 553 bp, Arabidopsis thaliana
  unsure (1)..(553): unsure at all n locations
aagaaatttcgtctccatcatcaaagccaaaatctcaggcagcggacgaggatttcatgtcaacttggcagagaattatccgcctagatgctgtgagagcaaatgacgaatgggtgccctactcaccaactcaagctgctgtttctgagacaaaagcccggggaatagccattcaggttggtctcaatgactatgaccacttggaaccctgccggatatttcacgcagcccgcctggtcgggatccttgaagcctacgcagtctatgatccagaaattggttactgtcaaggaatgagcgacttactatctcctttaaatcgcagtgatggcaagacgacgtcttaggaattctggtgcttttgttggcttcatgagtaaagcacggcataattttcccggttagacgggggttggaatcaaggngggaacntttccaattgggttcgnaaattcctaaaattcaaaggccatttacttttcccngcacnttggggaccttntaggaaaagcnttttttttttntcccnaanggttaaagntttttaannggg

SEQ ID NO: 135620 - DNA, 555 bp, Arabidopsis thaliana
  unsure (1)..(555): unsure at all n locations
gaggctttgcgnccatnnccgntcgnanttgacctcngngcgccgcgcccctgtggactccggcagattgtggagcttgtaacttcattaacagcatcaatttgcttacttatctcggatagtcctgaagtagtgatttccaaagaaaggaaagagcgagtatggtcatcattcacaaagacttcccacttattgaaatctatcaagtatctcttctgcaactgaagcttttgccgaagcatagaaatcaccgagttaatctgatgaacacgtagtggaacgtttcttcctaagcttatgtggaactctctccccaaggcacgctcaaacttctgatcatccttgcatagaatgctgagtggcacatcagcctctaccaaatgaagatgaggaacaactgatgcaaccttctttaaaaaacatacaatctccttctttggcagtggaggtatacaaacaggtacgtaaacgtgcaaagcgtaatttccatcgacatgaggaaagtttcttacacgaactccaggctctgttgagaagaaatccagtgaacctgtg

SEQ ID NO: 135621 - DNA, 516 bp, Arabidopsis thaliana
  unsure (1)..(516): unsure at all n locations
agttaattcggctttttaaagatgtgaaccttttaggaaggaagctgtatgttcttggaatttgagtgttgtgtttactttgaagggtaaattacaacaggagcttctacttgcattgttaagcatttgaattgaagagctatgattggtttcgatagcatcacggctttgcttagctgcctttcattttcaagtgactcttgtgatgtgtgattctgttctgtaaacttctctgtctcatcttccaaagcccctgatacaaccgcaggtctcaccggcctcaccctgcagtggagatggcatgagtacttgagcaagtttgagttgtaaattgtattgccactaaaacttgggagagccattttgattgcaggtcccatccagtttccaactttggtctcgtctgatctaatttggatgttgcagatatcagtagaagcagcactatcaacttcactacctaaccccatnaatcncaggtgggcagngagtccaacaatggccagaccaagctgc

SEQ ID NO: 135622 - DNA, 445 bp, Arabidopsis thaliana
atcaaagaaaaaactttattgatcagaccaaagagagtataaagggcaacttcagccattttaataagttaagccagaaactctgtaacactaaacacaaaagcatcttcagtcttaagaaacgaaacatagttaaagataaaagaagatgtgtcaattggtcgacgtgagctgcctgaggttgtactttgctagctccttgtacttctctaccactccaattaagcacactgtcttaataatttccaccacgatcgtcatctccggattgctcaaatcaacctttgtgaaggggcaggaatagatttggcgatcgtggttattattttcaccctatcaagccctgggttagcacgcgctccatacaacacagcaaattcccggggattttcgggcccaatggggaggtactgccctacaagcggcttgatggctcttgaaattt

SEQ ID NO: 135623 - DNA, 589 bp, Arabidopsis thaliana
  unsure (1)..(589): unsure at all n locations
ccggccgccctttttttttttttttttttttttaaaccaatgcaaataggtttcaacttaagtgatggaaaaactacaaaaaatgtctctgcatcaaaataaaaccatatccaagaaaatccgaatttgtgggccctcctcaaaactatcaactatctaaaaccattttggtaacattgaagcatcacaacctatttgtaggaggtttaactctgtaaatacgaactatccagttggatgttgtgtaagcttcttctaagtgttcaagtttgatatctttgttccctatctccactcctcttgctctatcatacccgggtggcttgccgtattctgtggtcagctcaccggaacctgtaatagcattacttgtacctgtagacagttcagcatcttcggnggatgcacctttgtctacacgggaattcacccattcacaaggnaatcagggtccttganactgggggancccanctcnatcctcaccatccaaaagaacttgtggtaaacctgagnataccagtancccccaaggggccataaangnccancanggccntgtggncggcactcaaangngatggnggna

SEQ ID NO: 135624 - DNA, 573 bp, Arabidopsis thaliana
  unsure (1)..(573): unsure at all n locations
ttggatcctatgaccagagcggccgccctttttttttttttttttctttaagaaaaatatttataaaagaaatcaaattacacggcgatcttagctagtgtcttcaacattacacagtatacgaaacaatacactatatatattagttattaattaatggttacaaggacataacaacatcaaacccaacatacatactgcataaagatggtaatgttaaaaaaaataaaatatgctatttgtcaatatgatcggcatacaattaaaaagattcaaatatttatgtatttgtgtgatagacctaatattaagagaccgttaatttggccatgcaaacggctgattcgatgacgggtgctgggctgggtagtaaaacggggctgccgggatgctgccacttcttaaaaccgggggggttccccgcctctttacccccgggggccccccccccctttaataccgcggggggnttttggggggggcccccccgggggnnaangggggggancccccttcccatcncnccgnggggggtttttaaggggggggnccccnggggaaccanctntttgg

SEQ ID NO: 135625 - DNA, 557 bp, Arabidopsis thaliana
  unsure (1)..(557): unsure at all n locations
gatttgtaacagacgctgcgtgtgagtgatcgattcagtcctacaaagcatagtatgttcactgtggtacattgtacaatgacaatatatatgtgtataatataaagtgtcggtatcaatgactgtcttagtgaaacaaagtaacatttgagatatttgtgcaatcagctgcttctgctatttggattttcattgaacaaataatctcaccgtgaatcgccgccgccattaccggagacaacgagcttcatcagatcaaccgctttcttccttcctttcagactaccattctcagctacatacacgatcccttccatgggctccttcatcagcaccagacgcaaccgccgccggaagcttcagacctcggctggcagctcctccacatctcgccaggtttcaaaagcgcaccaacggggtccctttgatcggagggcccgaaccagtgcaagggtntaaagntccggannacggtagccccgnaaccnccnanccggccnggnatttngatccagggttgggcaaacgnggggggttttaaggtccggccgggtttt

SEQ ID NO: 135626 - DNA, 777 bp, Arabidopsis thaliana
  unsure (1)..(777): unsure at all n locations
annnnnnnnnnnnnnnnnnnnnnnnnnnnnnnnnnnnnnnnnnnnnnnnnnnnnnnnnnnnnnnnnctttttttttttttttagttaaaacaaattttactactttcaactttggggaggttacaataaaagaggatttgataagtttattcctaatagcataacaatgtccccctccagtggaaatcgttgaaaataaaggactttattgatcgaaataaaaaagatagtgggtttcttttgaaatattattaataatggtcgttgcgtgtaaatttggaggcatgtttctgtataatctgccatgcttcagtgacatgcttctcttccgttaacggtgcaccaacagcaaatcgtaaaacgaattttccagatagagccgtgtgagagatgaatatcttgccagtggagttaacagccgcaagcagttcacggttacgttcgttacattggtcttcatcgccgtcaactggcgcaaggcgaaagcaaacgagtgaaaagtaccgagtagtgacaacctcaaaacttggatcttgagctacataatcttcaaaatgcttagcgagattgacatggtctcttataaagtttcttaagttctcggaaccatagagccgtaaaaccatccataacttcagtgatctgaatctccgagagagagaaatttgccaatctttataatttacgaaccgtatcttttttggaaacctgacatttcccggacgcgtgggtcgacccgggaaattcggaccggtacctgcaggcgtaccagctttc

SEQ ID NO: 135627 - DNA, 499 bp, Arabidopsis thaliana
accggacgcccttttttttttttttttttttgtgaaatcatgctccaagcaccaatgacattttctcttcagagttagagaattatgcaggcaaatcaaatgtctgatatatatacaaaggattattaccaaccacttaagggtgttaaagcaagagtaagtgttgataaaaataacttacagatgaaacagctactacttttcttggtcatagcaatgtgagccttgaccataagcagtgtgtcacaattgtttgcatatatacatgcttcaaatcacttgagcagattctccctcaaaggaacttagagcgccgataaccgattcatatacgtctattcctttccatgaatacagtatccctttaggaacccgttatgggtcatgcaataaaataggcgtattggtcattggagagaacccaaaagttggaattcccaaagtgcgaataaagcgtgaatctgtagttgaagccaaaatttcaggctttgcgagtttt

SEQ ID NO: 135628 - DNA, 384 bp, Arabidopsis thaliana
  unsure (1)..(384): unsure at all n locations
aattcttctcactgtgaaaatttgtcaacatataactttctaattgtctccatgactgtttttaaactccagcgtaaaccaagtattttttgccccaaactgcccaagaagggaatgttaattgttagattcataatcaatcacaataccccgaactcgtcgctgtccatgtcctaatacttgtgatgatggttcatatatcaccgatacattctctgggatccgcatctccgccgagtgtccagaaatgcacatcgatcctgacccggcttgttgccagtacacttcccaccattaattccncctgggattctcngnggntttctggtncaggggggnaccnaaaaaattttggcncccaaagggnattccgacnggggnggc

SEQ ID NO: 135629 - DNA, 388 bp, Arabidopsis thaliana
aagaaaactaggctctcataaatttcccaagtatgaacatttgaatgttggcaaattgcacttgtgtcagatgctcattaagaaatctacatcatttgcaaaaaaaaacacaggagaatgtacaactttgtctcacagaagaaacgtaaataaggtatggaagatagacttatgtcgaatcaatttcctcgaagtcgtcgaactcaagaagccttgatgattgccctgctgctttcccttcgcagcatccttaagaggtccccaacactcgatccggattggacttaggggggccttggaatgggaaataaacccctacctaagccccccttagcgcaagattctctctaaacataactgaatctccatgcaccacagctttaagtac

SEQ ID NO: 135630 - DNA, 721 bp, Arabidopsis thaliana
cacccagaaatcatacgtccagttcctaagcggatggctcactaaatgccttcactatgaacccgaggcaaccgatgacggaatcgctcctttctctcctagccagatcggtgcaccgcccatctttatcatttgcaaagattggcaagaagcaatgtgtagaatatctggagagaatgtgaccaatgcaatgcaaggttttgcttcaagcctacacgagctatgggagaagcaagaagaagagcaaagggtaaaagcgcaatctgagcagcgagatgcagagtcagagagaagtgtggtttcgaaaggtcggtcagagagcgggatatcagctttggatgatttgaaagtggatttagattcaatgaggaagaggctagtcgaggagagaggtaagggtaaagaaaccattaagcttgtgaacaacgcgtcttcgagcagcttaaaagctggtttagttcccattttcggggcactgagaaaattcacatcagaagttgtgaaagctcatgaaattgttaggcttcaacatcctcagacctcttcttgagtagagagtgtggacttaccacatttttgcaccgttttgaagttttgttacttgcaaattagacataggtctatatagaaggaaattgttgtatagatgagttcatattcaattattggttggttagtttcccttgtaacccgtttttaaatggtgaagaagaagatatct

SEQ ID NO: 135631 - DNA, 773 bp, Arabidopsis thaliana
gatctcgttgttcgtctcttcttctagatcaatcatggaagctagctcccaatcgcatcttcgcttcctctccctctttttcttcaaccgccgggatctctaatgtctcagagattctcacacttcccgaagtggagaagattctcgccgacgtgaaagctgttaacgtgactgtgattcctacacataatcattgtttctgggctgatttcactgtcatcgccaccggtagatccgattggcacttaagaaacatcgctcaagctttagtttatagggccaagcaaaagcagaaaggagctaaacatgtaatgttaccttctgtgcaagggtacaatagcaagtgggattgtcatagactacggaaagtttgtagtccatgcacttgatgagaaagcccagaggttatttcaatttggaaagcctttggtctgctgaatcctctggtactgatacttcagatcaggatctccaaaacgtttttgtaaaggtccgaccaaagaacaattcgaaaaggaaaccggctaaagtgagttcttgatcctgtccgatggatacaatttctcataaacttctcgagtctagacgagttaagaataggaggattttaaagcctattaagtatttatctccttaatatttttttttggtaagttttatctccttaatatttgtagtcatctatctattttttccctcaaaactttacataaaaaaaaaagaaaaagggcggccgctctagaggatccaagcttacgtacgcgtgcatcaag

SEQ ID NO: 135632 - DNA, 365 bp, Arabidopsis thaliana
gggaagagaatagaaaaccttgtaatggaaaggcaaaaaagaatcgcagagagatcagccatgactgcatctcgtaaagtttctctagacaaaggttcgagcagagctcctttggttcgcgaaagggctacataagtgaagaaaaccgttggagctgcgtcaaatgagatactcaaaacgcttttctttggtcacttcaaaaattcttttacattcatttggtggtgatacaagctcttcttgattttgcttgtgtcacgactatttatttattattttctcaaacgtttttcttttctgaatattaatttgtaatttatttgggtaagacactgaggtttatatatttgtaatttttggtttat

SEQ ID NO: 135633 - DNA, 464 bp, Arabidopsis thaliana
atactctcatatatatttgcatctaatcttgtaagcaaacgtttatcacttgtctacacaacattctttcatttacaataataatatgggtgtaacattagaaggacaaagaaaggaatcaatttgggttttgatgagaagacaaagggctcgaagggcacttgtgaagaagatcatgatccgaccaaggaagagtgtagaagcttctagaagaccttgtcgcgcaatacacagacgagtgaagacgctaaaagagcttgttcccaacaccaaaacatcagcaaggtttagatggactctttagacaaacggcaggttatatcttggcttttggaaatgaaagtggaagttattgcaggcaatggttcacggttttgacccgaaactaacctggtgtttaaaagccttcatatatttttttggatatcttgttggattttacgttctttttagtttttatttgt

SEQ ID NO: 135634 - DNA, 902 bp, Arabidopsis thaliana
  unsure (1)..(902): unsure at all n locations
ggatagtttggctgctttacgaacctgttttcaacaaaggtcgggaaaattcaaagtgagatctgaaagaagagggttcctctgatcgctcacgatttctcctgaattctccattagattttgcagagaaaatgatccgattcatattattgcagaacagacaaggtaagactcggctagccaaatactatgtccctctcgaagaatccgagaaacacaaagtcgaatacgaggttcatagattagtggtgaatcgcgacgccaaattcaccaacttcgttgagtttagaacacacaaggtgatatacaggcgttatgctggattgtttttctctgtgtgcgtggatataaccgacaatgagttggcttacttggagagtatccatttgtttgtggagatattggaccatttcttcagcaatgtttgtgagctagatttggtgtttaatttccacaaggtgtacttgatactcgatgagttcattcttgctggggagctccaagaaacaagcaaaagggcaatcatcgaaaggatgtcagaactcgagaagctacagtgatgacggttaagaatcacattctacttggttaactgcgtacctgccagatgtttcttggcatgttcagagatttgctatactttgttgagttgttagacaatggtgtagcgtttacattgtgaatgaagaatttagagtgattctgctaaagatctctcatccaacattttgtttacctgtgagattttcatttcaactagtgatgtactatttgtttcgtagaactatgataccacacatgctttgagaaaaaaaaaaaaaaaaaaaagnnnnnnnnnnnnnnnnnnnnnnnnnnnnnnnnnnnnnnnnnnnnnnnnnnnnnnnnnnnnnnnnnnnaacgga

SEQ ID NO: 135635 - DNA, 482 bp, Arabidopsis thaliana
ttcatggcggatgagaaacgtgtatctgaagatgaccggtacatggagtttgttttaggaaatggaattttgttgagtgtaggaagattgattgatgcttatctcgctcttaactctgaacttacactctctagctttgttgagttatctgagttagtcccggaatcagctaggccgatacacgacggtctctacaaagccattgacactttcatgaaggaacatcccgaactaacaaaatccgaaaagaagaggctttgtgggttaatggacgtgaggaaacttgacaaatgaagcatcaacgcacgcttgcacagaacgggggactttccacctacggagttggtgggtgcaagtcctcctactttgagcagctccgagcaaatcacagccccgtggcgtctgttgcggcttcgtcacactcgccggttgagaagacggaggagaacaaaggagaagaagcgacgaagaaggtggagctg

SEQ ID NO: 135636 - DNA, 578 bp, Arabidopsis thaliana
  unsure (1)..(578): unsure at all n locations
cactttttcaaccattgataaaccgaaactccttagccagctatcgtccctgcttggtgagcttggactgaatatacaagaggctcatgctttttccactgtagatggtttctctttagatgtctttgtagttgacggttggtctcaggaggaaactgatggcctaagagatgcattgagcaaagaaatactgaagcttaaggatcaacctggttcaaaacagaaatctatttctttctttgagcatgacaaatcaagcaatgagcttatacccgcctgcattgaaatacccacggatggaactgatgagtgggaaatcgacgtgactcagctcaaaattgaaaagaaagtggcatctggttcatatgggggtctgcatagaggcactttttgtcagtccaggaagtggctatcaaatttnctcaagcctgtccgggtaaacaaatgnggttgctctggaggatttttttccaaggaagtttttttaaatggggggaaagnttcgtcacaaaaacgtngttcaaattttttgggnggnattccncaagatnctnccaaaccctcttgtttaggtgncc

SEQ ID NO: 135637 - DNA, 492 bp, Arabidopsis thaliana
  unsure (1)..(492): unsure at all n locations
tcttaaagatggatcgccataaatacgtgtaagtagcttaccttgggtttagggagctctctaaggaagataaagttggaatctatgggagcagcctagtacgagattcttttgatgaacccgactacgctctcatagatactctcttttcactggccgaagcctatttgttcgctcaacttgttgactttaaagataataaccctgaaaaagttcccaaggacgttgattatgctcggatgtataaagatgttcgtgctgctgttgatttgtgccaccgtgacggaactttaaagcagatggtggcaaacgaacctaataggtatatcaattgaggataccacggtagtaccccttatttaaaatgatcagagattctggccgttctacattcttaggtaaccaatagttttttggggcctccaaaatattttattganctttnttttnggggggggcncannacaaggcccgatnnnttcaactttttnt

SEQ ID NO: 135638 - DNA, 653 bp, Arabidopsis thaliana
  unsure (1)..(653): unsure at all n locations
atcggatgaatctcgcagccatgaaggtgtggtttaagatgcgtcctttggaccgtggtgcccatgttgagatcaagtccgtggaggatttcaagttcttaaactcttcctatgcgccggtcttgaggcagcttgagtctgccaagttgcagtaagttttactttgagaatcaagctgagaacgcaactaaagattcacataacctcaagttcaagaaccccaagtatctctcgatgttgaaccatctcagattttacttaccagagatgtatccgaagctgaataagatttttttcttggacgatgatgttgtggtgcagaaagacggtgactggtttatgggaaatcaaacttggactggccaaggtgaatggagccgttgcagacatgtttttggttcctttccatcggtatgggccatacttaaacttctctcatcctttgatcaaagagaactttacccccagtgcctctccttggccctttgggatgaacatattcggtctcaatgcctggagacgcgagaagtgcaccgatcaataccattactggcagaaccctnnatgaagncagnactnctcttggaaattgggacttttanctccgggatttatcacatnctattcaaagncggaatcattgggcaaattca

SEQ ID NO: 135639 - DNA, 774 bp, Arabidopsis thaliana
aagctggtacgcctgcaggtaccggtccggaattcccgggtcgacccacgcgtccggataaatcagaagtatgcttcctccttcactgtcaaaagttcattgaattagtacggattggagcactagaagaggctgtgaaatatggacgaatggaattagccaaattcattggtttaactacattccaagacattttagaggactgctttgctttgctagtgtacgaacgccccgaagaatcgaatgtagggtatttcctagaagagactcaaagggaagtagtggcagacacagtgaatgctgcgattttatctacaaaaccaaagggcaaaaatcaatcgcattctcatctagagacacttctccgacaactaacagcttgctgtctggaactgcggtcgcttaacgatggtcaaggagaagcgttctcgcttaaccgacttcttagaaccaacaattggaagaggacaaaaaagactacttagctgtgtccattctttggaaacaaacttggctttgattgttgacagtggctgggtttgaactgttacaggcagctacaataagcggtcaaaatagatgattgaaacagacgggttggagttgaacctgaccgttggattctttttttctctaaagtttgaagaaccaaaattgtaaaatttagttatttaaatttagcttgccaatgttcatcaaaaaaaaaaaaaaagggcggccgctttagaggatccaagcttacgtacgcgtgcatgcgacgtcagagcttgttct

SEQ ID NO: 135640 - DNA, 430 bp, Arabidopsis thaliana
cgcccttttgatggctgtttggaaggtggctccttcccttgctgctgggtgcactgcgattctcaagccatcagagctggcatcagttacttgtttggagcttgctgatatttgtcgagaagttggtcttcctcctggggtcctcaatgttttgactggtttcggttcggaagctggtgctcctttggcatcacatcctggcgtggacaagattgcatttactggaagtttcgccacaggaagtaaggtcatgacagccgctgctcagttggtgaagcctgtttctatggaaccttggtgggaagagccctctcaattgtgttttgatgacgttgatcttgataaagctgctgaatgggctcttttcggttgcttctggacaaatggtcaaatctgcagtgcaacttcccgccttcttgttcacgaaagc

SEQ ID NO: 135641 - DNA, 452 bp, Arabidopsis thaliana
  unsure (1)..(452): unsure at all n locations
ctcgggagggaagtacctgaaggaaactggtactgtgaaggttgtagacccgttgcacttggatcagctagttcccaaacgcatattatatccgagcaacaaaggggtagtggcttttacagtagaccgtcacctcttgtagtttcagggcaatatcaagatgtgtctttaatagtctccccacgtacaccatttttcaatggagagaacctattttctccaaggattcctaatggtgatgctcaaggttcttctccatccggcttaggggcaaccacattatccagaagaaggacgcttcacagacacatacaaaatattatcaacggtgataggcttattaaatatgggtgctagaactggtgggacatccgagtgatggtttcggggacttcacaaataagggcatggcaggacattcgacccattttngcctttngggggnccagnaa

SEQ ID NO: 135642 - DNA, 380 bp, Arabidopsis thaliana
cctctatttgtgctagttctttttgtgcggtagaaaattttcaattaatcggatttgaaaagtatatagtaaaactgacatttttgtttatctacataaaaagatcaaaatctaaaggaatcgaaaaaaggaaatttacgaaagaagaggaactcaaataatttgatcggaatcttgatcttgatcttgatcttcttcaccacaatcataaacagatctaaccaaaaccaactgatcttccaagtatctctgaagcaaaccagcttcttccggttcatcaaacccgccgcaaccacatccttcttcacatctccggagcctcaaatcatcttcatcggcggtggatttagcaaaccaaggatgacgactacggagcggac

SEQ ID NO: 135643 - DNA, 694 bp, Arabidopsis thaliana
cattgagtcaaaccaaaccaatgggtatatgcagctcgtacgagtcgacacaagtcgcaacggcgaagctgatcttacacgacggaaggatgatggagttcacaagtccggtcaaagttggttacgtgttacaaaagaatccgatgtgtttcatatgtaactccgatgatatggactttgacaacgttgtatccgccattagcgccgacgaggagtttcagcttggtcaactgtacttcgctcttcctttaagttcgcttcatcattctcttaaagccgaggaaatggctgcattggctgttaaagctagctctgctcttatgagaagtggtggttcatgtggccgagataaatgtcggtgtcgtcggaaatgtgtgtctccggtgatcttttctgctcgaagagtggcggcggtgggagctaatggagagacaaggaatgggaaaagacacggtggtggtggtagcggtaggagcaagtatgcggcgaagttgagtaagatagaagaatgaagggtagtttggtgatttagttattattgtagggttaagtttgtaaatatgtagttattatcggagaagtattgttgtgcctaatgcaaattgcgttttgcaacgtgggaaaacttattgaacttggtttactaatcatatgagttgagaaaaaaaaaaaaaaaagggcggccgctctaagg

SEQ ID NO: 135644 - DNA, 438 bp, Arabidopsis thaliana
  unsure (1)..(438): unsure at all n locations
ccatgaggatcatgaagcagcaaatcagcaaactgtgaactcgaaagatgaagaagctgcaggacaatcaatgaagtcagacatatcagcagactattactttccctactcagcaaacgacggaaatgctgccatggaagctggtcgagatgcagagtcgatgagctcgtatctggattcttgctcaatgatgtcaaccatttacaatctttccatttcagacaatgattacccagaagatctcaagacagaactaaacctgatcgagtcacagtttaaccagtccttccaagatctgctgaaactgaaagaggatgcaatagagaacgctaaagcggaaaatggatttcgggaaaaaccaaaaaaaaagggcggnccgtttttnngnggntccnaggtttaggtcggggtncantgnggcggnaanagnnnttcctt

SEQ ID NO: 135645 - DNA, 414 bp, Arabidopsis thaliana
cggacgcgtgggtgggatcgttgccaccggggctgataacattttacaacctgacgcgatgcaatggataggagctggcacgtactagggctgggatatgacccagcgctaaaccaaacagcaatagagaatgcagcggtagtgcattacaatgggaactacaagccatggctgggtttagcattcgccaagtacaaaccgtactggtccaagtacgttgagtacgacaacccttatctccgacggtgcgacatcaatgaatgattgaggagatggtggaggtagtatacatgatgaagcactcaaagggaactaaataagtaaaatttgttttcagtttacccataatacttgggatcagcaggcaattcacacatgacggttaattaaattaggattcttttgtttttcctt

SEQ ID NO: 135646 - DNA, 372 bp, Arabidopsis thaliana
ttttcattatgcacctaaaggaggagccgtatgagatgaaaatctcacatacggttctgaaacggagagttcgttaaagcgaatgacgaccgtaacggatgtcggctcaatctgaaggaaattatgcggaagcattacagaattattatgaagctatgcgactagaaattgacccctatgatcgaagttatatactctataatataggccttatccatacaagtaatggggaacataccaaagctttagaatattattttcgggcattagaacggaacccctttttaccacaagcttttaataatatggctgtgatctgtcattacgtgcgactatctccactttagaaaaaaagaacgaacgctagtcaat

SEQ ID NO: 135647 - DNA, 553 bp, Arabidopsis thaliana
  unsure (1)..(553): unsure at all n locations
aaagaaagttgtatttcagcttcattctagtttcaatagcccgactagagttatcgaggagcctccattcgaggtatcggaatctggttggggagaattcgagattgcaatgacattgcatttccacagtgatgtctgtgataagccattgagtttatatcatcatttaaagctataccctgaagatgaatcaggtcctttgacaatgaagaagcctgtggttgtggaatcttatgacgagattgtctttcctgatccttcagaaagtttttcagctagggttcagaatcatccggctttgacctttccaagattaccctctggttacaacttgcctgctcctatgcaagtccgaagataccgggaaaaaagaaggagaggtgattcgggaaggtccataggtttgggccaatgggtccatggggtttntctgaaggcagatgnggtnttacagtttcaagctgtnngtcaacagggtcaanncatatttcgnacctnggngcaaanaagtttcttgggggccannncagcccgttaaanngggcagccctaa

SEQ ID NO: 135648 - DNA, 557 bp, Arabidopsis thaliana
agctgctccgccagtccgagattgctctcgcagcactcgacaacggcgcttccgacaaggacaagggcttctacgagggcaaggtcgccatcgcgtccttcttcgccaagaacgtcctgcccgagctcaccgcttcacgcgagatcatcgcgaacaccgagaacgacatcatggagatcgacgaagcagcattctgattcgttcctgattcatgaagagtgccggtcccgagaacgtttcggggccggcattttcggttgtcggcactcggtggtgactggtgtcatctgcgctcgaatggtcgggcaacttgatctgcgcggacaagtaaccgacgtcgtcggttgctcgcccggtcgtgccgccgtacccgccagggaaagcgccacgcgcctgcggtccggagaactgactatttcgacggacttgtcgtcgccaccgccgaaggacacgaactgtccgctctgatccgagaacttcatgatcgcggacccgtgctgacctggttcgggtttctcgttcacgtagacctgcaactggaaatcacgtcccggata

SEQ ID NO: 135649 - DNA, 930 bp, Arabidopsis thaliana
  unsure (1)..(930): unsure at all n locations
cannnnnnnnnnnnnnnnnnnnnnnnnnnnnnnnnnnnnnnnnnnnnnnnnnnnnnnnnnnnnnnnnnnnnnnnnnnttctgcatgtaattcgcggccgccatcatcgtcacccaaatcctcctcatcgcagccgttgtttccgcccgtaaaggcgaaaactttgcaaaaaccattgacaaaaaacattttggcctccgtaaggagaaactcactcatttccgtgtctactggcacgacattttaagcggctcaaaccctagttcggtcgtgatcaaccctcctatctccaactcttccttcttcggatcggtcactgtgatcgataaccgattaactacggaggtcgcggtgaattcgactttagtgggacaagcgcaagggatctacgctgctactggtcaacgtgatgcatctgcgcttatggtgatgaactttgcgttcaagacagggaagtataaccggaagttcgatcgcgattcttggcccgaacgctgtgttgaccaaggttagggagatgccggtgattggaggaagtggactcttccggtttgctagaggttatgtcgaggctcggaccatgtggtttgatcaaaagtcaggagatgctactgttgagtacagctgttatgtcttgcattattgatgatagtgatgaattattatgcctctcttttttaatgtttgataaaatactttttgttggattttgtctgcttaaagtgatggatgatttttgggggactatgtcttttaatagattttgatacttcttttttttttgacgtgatttttgtttttgtatttgctacatctcacactaccgtttggtcttaatctaatggccaagcgagtattgaaagaggcaattcctttttaaaatatcttaatggccttaaataaacatcatcggaaaattgttttccttttt

SEQ ID NO: 135650 - DNA, 437 bp, Arabidopsis thaliana
  unsure (1)..(437): unsure at all n locations
gttattacggatgcgattaggcatatgtattcgccggatctgaagagtggttgggggattcatattgtccaggaagagaagttgttggcgaaaaaagatgaacgtgagagtcttgattccgccattgaagagcttttacagattgggatgcatagagaaactgctgcagagtcaatctatagagagaggtgtcttccggtgaatgatggacttagttggtctaagtacatgtcgatttcaggctcaacagaggatgagtatgatatcattaccttgcagtatacggaagatgggttgttatctgtagatgagaaccgagaaggacgtgcagctgcgtttggggatgacatagcaatcgagtgtctaggccactnanttcaaacgggnaatctatgttgggtcaagcccatggttcanntnggnatgnttagangaag

SEQ ID NO: 135651 - DNA, 560 bp, Arabidopsis thaliana
  unsure (1)..(560): unsure at all n locations
gccnaaggattccgccccnctttganccaactgggcgngnaagtanccntgttcacgcctgacncggcacaccnccggtgaagaatgttgcgccncgattaaagaaccggtggagagggacttacatgtctctgtacaatctacaccagtccaggtttgctcgctcagttcaacgtcaccactgagaaagctctcggtcttagccgtcgttgcaacgtcaccactgatctctccgcttgtaccgctaaaggagctccatcgccaaaagcttctttacctcctccagctccagcagggaataccaaaaaagacgccggagctgggaacaagctcgccggttatggagtcaccaccgtgatcttgtctttgatctcatccatcttcttctgaattcctttacccggttttattattattagctcaataaattctcgagatttgtttgcttttggcttaacttatttaatatttaaagaaaaacaaaaagtattttttgttcacatgttatgtattatcattgattcattattgagtcccatgttagtatatttaccggttat

SEQ ID NO: 135652 - DNA, 470 bp, Arabidopsis thaliana
gcagacacctggaggcattgtgagcacagcacgcaccgtttttgtcagcggaggaaccggcggaatcgggtcggcgatcgccttgactctcgccgaacgcggacacgacgtcgccttcacctaccgaaacaacaaggacgccgccgagcagctgagcgagcagattcgcgcgcatggcgtacgcgcccactcgtaccctctcgacctcaccgacgaatcgtcgatcaacgccgccgtcagcgatgcggtcagtgatctgggtgggctgacgaccctcgtccacgctgccggaccgcacgtcccgatgacgcacctctcacgcgtgactccggcgttcttcaccgaacaactgaaccaggaagccgcggcgttcttcacgctcgtccacaccgccctgcctgcgctgcgtgcatcctcgggttcggtggtagcggtgacgaccgcggctacggatcgttttcccgtgcgcg

SEQ ID NO: 135653 - DNA, 501 bp, Arabidopsis thaliana
accccattgaaccattcagcagctcctttcttcaattccgggccagttccaattttccatccgtttgctgaaaccaacacaatgaacactgttgaccaagctcaacctcttgagccattggaacacagttttttgaaggaagcaaatgagaggagatttaacgaaatgcctttaatggaaactccaaggaaaagatgtccacaaactgatagtgatgagaacttctccttgttccactttggtggcccggttgctctgtccacaggaagtaaagcgaatcctgctcgatccaaagatgggattttggaggatttctcgttgcagttctcaggagatcatgtttttggtgatccaaccggcaatagcaagaaggagaaagagaacacagttggtgaagagtacaacttgtttgcgacaagtaacagtttgaggttttctatcctctaaagtttttttatacaatttcttggattgtttggcgtcatggagaacgcagtaaaa

SEQ ID NO: 135654 - DNA, 412 bp, Arabidopsis thaliana
atgaagacaatgttttattggatctcatgtgtttttataccgaagttccaatgatttaaggcagagatcataagacgagaaagagaagaagaagtcttaatctgtagagagatgatgttactcagatgatccagctgctatcatccttcaccattgtttctttcgaccaggtttgttgtacatgttcccacaccaatccctccccttcctttgaggtgaatttgacagttgttgtgcagcatcttcgttcgtccccatcttgctcccatttatcaagctttactatccatgtcccaggagtagtgtctgttgccaggacttgatctgcccaaacgcgaaacttcttcccttgtttgtctccatggtacttgcgcagctcatcgatggtatctcaatgaaatccttcttccct

SEQ ID NO: 135655 - DNA, 483 bp, Arabidopsis thaliana
gaatgcagcaggtggggagtcaaaggcatcaaaaaagaagaaattgaaggataagcagaaggaggtaaaagaatctcaagagcaacaagcaaacaacaatgccgatgctgtagatgaagctgctgggtctgaaccaactgaggaagaatctccaattgacgtcaaggaaaggataaagaagcttgcatccatgaagaagaagaagtcaggcaaagaggtggatgctgcagctaaagctcctgcggaggaggcagctgcaagacgtaagaagctggccgcggcaaagaagaaggagaagaatcactataaccaacagcctgtccggtaaaatcctgaatcaccaccattttgatcttgatggaaatgcaaatatgaacatgtatttcgccgtattgttcatatgagtctctgtcctaataaatcttttgaagggtctggttcttagagttaaagacattgaatcctttgtctagtcttattaca

SEQ ID NO: 135656 - DNA, 681 bp, Arabidopsis thaliana
gtggtccaaaaggtccagcttttggaacaaaagtggctaaatacccagaatgcccacgtcctgagcttatgagagggctgagagaacatacggatgctgggggaatcatattactcctgcaggatgatcaagtgcctggtcttgagttctttaaagatgggaagtgggttcctataccgccatccaagaacaataccatttttgtcaataccggtgatcaactagagatactgagtaatgggaggtacaagagtgttgttcaccgtgtaatgacagtgaagcatggaagtagactgtcgattgctacgttttacaatccggctggtgatgccataatatctccagctccaaagctcttgtatccaagtggctaccgttttcaagactacctaaagctttattcaactaccaagtttggagacaaaggccccagacttgagaccatgaagaaaatgggaaatgcggattcagcctaggatgcatctggaatttgacgcttctgtactcacatcataaaaactttgtcttcttcttgtgtttccttataatttaaataaccagccatgtcagaatcttgctgattcagctatactacttcactcttctttattcaaaaaaaaaaaaaaagggcggccgctctagaggatccaagcttacgtacgcgtgcatgcgacgtcatag

SEQ ID NO: 135657 - DNA, 682 bp, Arabidopsis thaliana
cgaagcgccgcccaccgataccttcggcgaacgtgaagtggcaatcctgcgcctgctggccgggggctacagcaacaaggagatcgcgcgcagcctgttcctggccgagggcacggtgaagaactacgtgtccgccatactcgacaagctgggcacccgcgatcgcacccgtgcagtgctgaaggcgattaccctgcgcatcatctgagtggacgtggcaaggaatgtcagtgaacccgatcctgcatgtggaaatcccggccagtgacctggaccgggccatcacgttctaccagcgatggctgcaggttgcggtggacgaacccatcgtgctgcacgactgccggatggcctatctaccgttttccgatgaggccgccggtgccagcattgcgctggtgcacggcgcggactatctgccttccgagcagggcgcgcgcatctacatcggcgtcgatgacctggatgccagcctcgaccgtgcgctgcaggccggagccgagctgcgcttcggcccggccgatgccggcgattggcgcgtggccgagatccgcgacagcgaaggcaaccgtatcgcattgcaggcgcgcacagcgccgtaacgtcaacgctgcggtgcgcgcatctgtagagtcgagcttgctcgactgattttgacgtcgccgtagatgcatcagtcgag

SEQ ID NO: 135658 - DNA, 691 bp, Arabidopsis thaliana
ttgatttgcttccgtttgccgtaccggtccggaattcccgggtcgacccacgcgtccgggaagaaccgtttcgtgcatctctgagatcggacattgtctcggcggtttcgctgctgaggaaagctgagaggccgttgattgtgtttggtaaaggagctgcgtattcgagagcagaagatgagctgaagaagcttgttgaaattactggaataccctttttaccaactccgatgggtaaaggtttgttaccggacacacacgagttctcggcgactgcggcgaggtctcttgctattgggaaatgtgatgtcgcgttggtggttggagctaggcttaactggcttcttcatttcggagagtcgcctaaatgggataaagatgtaaaatttatattggtggatgtctctgaggaagagattgagctaaggaaacctcatttggggattgttggagatgctaaaactgtgattggattgttgaatagagagatcaaagacgatcctttttgtttagggaatgtttaattcatgggtgtgaacttcacttcgaaagaattggcaatcagtgtaatggtctgagcaaagaattggtagattaccagcctttggcctaaaaaaggatggttgggtctccccctttttccaaatcttttccctaggaaccttttctttattggaagggaattaaatct

SEQ ID NO: 135659 - DNA, 807 bp, Arabidopsis thaliana
  unsure (1)..(807): unsure at all n locations
ctcggaagctctactgtcttcgttcgatgacgcgattgcagacggtgtagacctcatcaccatctctattgggtttcaattcccatccatattcgaagatgacccgatagcgatcggagcttttcacgctatggccaaagggattctcactgtaagtcctgcgggtaacagcggtccaaagcccaccacagtctcgcatgtagcgccatggatctttaccgttgcagccagcaccacgaaccgtgggtttatcaccaaagttgttctcggaaacggcaagacacttgccgggaggtcagtgaatgcttttcgatatgaaaggaaaaaagtaccctctagtgtatggaaaatctgcagcttcatctgcttgtgacgccaaaacggcagcactttgtgcgccagcgtgtctaaacaaaagccgtgtgaagggaaagattttagtgtgtggtggtccgagtggttacaagatagctaaatcagttggagctattgcaatcattgataaatcccctagacccgacgttgcattcactcaccatttacctgcctctggtttaaaagcaaaagactttaagtctctcgtctcttacattgagtcccaagattctccacaagcggctgttctaaaaacggaaacaatcttcaataggacatctcctgttatcgcttccttctcttctcgtggtccaaacaccatcgctgttgatattctcaagccggatataacagcaccagggagtggggatccttgctgcattttcccccttgtgaccgtcgagctgcacngcggtntgagnctttttttta

SEQ ID NO: 135660 - DNA, 676 bp, Arabidopsis thaliana
  unsure (1)..(676): unsure at all n locations
gcaatcattgataaatcccctagacccgacgttgcattcactcaccatttaccngcctctggtttaaaagcaaaagactttaagtctctcgtctcttacatngagtcccaagattctccacaagcggctgttctaaaaacggaaacaatcttcaataggacatctcctgttatcgcttccttctcttctcgtggtccaaacaccatcgctgttgatattctcaagccggatataacagcaccaggagtggagatccttgctgcattttcacctaatggtgaaccgtccgaagatgacaccagacgtgtgaagtactctgttttctctggaacttcaatggcttgtcctcatgttgcaggggtggctgcgtatgtcaagacgttttaccctagatggtctccttccatgattcaatctgccatcatgacaactgctaaggggcgtggcatcgcatcgacccgagtttgcttatggagctggacaatgtcggcccggtgggcccgctttaaatcctgggctttgtctatgaatttggccaaagcttgccacatcggcttttttttgggggatgaacctncanttnggagggcccttaaaaanaantttnggggggttcccgtnaaggtnttccaaggaaacaaaaatnttngcctaggaanctttactntncntnaat

SEQ ID NO: 135661 - DNA, 690 bp, Arabidopsis thaliana
gcgatcacaacaccaagaattggcttcttggatgtctctacttagtcataggaatcgtgttgctatctctatggatattgtttcaagggactttaagcatcaagtatccttgcaaattctcaagcacttgtctcatgtcaattttcgcagcttttcaatgtgctctattgagtctttacaagagtagagaccttaaacattggatcatcgacgatggatttgtgattggggtcataatatatgctggagtgataggacaagcaatgtcgactgtagcagcgacatggggaataaacagattaggagctgttttcgcatcagcaattatgccagtttctctcatatcggctactctattcgatttccttatcttacacactcctttatacctcggaagtgtgattggatcagtagggacaataataggtctctacgtgttcttgtggggtaagaacaaagaaacggaagcagacataactacattgtcttctcggatgaacaacgaagatcaacgagtctaggtcgcccatttaatcaaataatattgttgtcatagaaagattcatatggcttcattgtcgtaaattagtatttactactgaatacatttaccgtaaagaccagtcataaatatttagatttaaattgtgcaagcacactcacgttaaagaccagtcataaatattcaga

SEQ ID NO: 135662 - DNA, 649 bp, Arabidopsis thaliana
agatactgtagcatggacggtgaagcttttgaaatctcattacttgatggagaagaagacagatttggaggtactgtggtgaacttgatggaagtggaatccatgactattggtgattttgattcacagcttgatgtttcacttaaggcttggaaggatcaggggaagaaggggatttggataaagctgcctagtgagctatctagtcttgttgatactgcaattaagaaagggtttacataccaccatgccgagaatgagtatgtgatgcttacattttggcttccagagccacctagcactcttcccttgcaaatgcttctcaatcgtatttgggatccggtgcttttgtcctaaacaaagaacgggggagattgcttgttgggttcaggggaactagtgggtatttcacaagataaaaatgtcttggaaggtcccccccggtactattaaagagggtgagagtatctgggctggagcagttagggaagtgaaagaagaaactgatattgatgcagagtttgtagaagtcttgtctttcatggaaagtcaccaagcagtgtggcaaagaaaaacggatatatttttcgtctgcgagttggaagcaagaacttttgaaatccagaaacaagattctgagatccatgct

SEQ ID NO: 135663 - DNA, 507 bp, Arabidopsis thaliana
  unsure (1)..(507): unsure at all n locations
ctttacacgtccttgcatcgccgatgaagcttgaaaaagcaaatttggtgagctggtgtaggcaactggctcagtcagggaacgttcttgagctggtcgacgagaaattgaaggatgggtataacaaggaagaagcaggattgtncattaacttggctttggcttgtctgcagaaagctccagagttacggcctgatgttagtgaagttgtgagaatcttgagaggggaaatggacatttcctccactgctttcgagttttctccatcgccaccgggaaaagtttacggcagtagatcgaagcggagaagctaaaacagggcaatgcagagtagtagttcgaggtttgatatgatcttttcattttcgaaattgttgggtgtaacttgaaagaggttttagcttttgggaattgtattatgggtgtaattttggcaacccctatatatatttaaacccctatttataaatatttaacctttaaccttaaaaaaaaaaagggngccga

SEQ ID NO: 135664 - DNA, 428 bp, Arabidopsis thaliana
cgctgttaaagctcataattggtcggaatattctcaccggtttttaaaaaggtgtgtcgacgccggaagtctcgaagcttgttacactctaggaatgattcggttttattgtttacaaaacagaggaaacggcgcgtcgttaatggctaaagccgcgattagttctcacgcgccggcgttatattccttagcagtgattcagttcaacggaagcggtggttcaaagaatgataaagatcttagagccggtgtggctttatgcgcgcgtgccgcttttcttggacacgtcgacgcgctacgtgagctaggtcactgtctttcaagatggttatggagttcctcaaaacgtctcttgaaggtaggaggtttttaagttcaagccaaccgctcgggaacctcgccgccgtttttattttccggtattcaaa

SEQ ID NO: 135665 - DNA, 464 bp, Arabidopsis thaliana
  unsure (1)..(464): unsure at all n locations
ccccttattatgatagtagagtctcaccatcgggctcggattcgcttggtgcaggtcgggaaccaattcggctgacacagcctcgtgacttttaaaccttcattggtttgtgagcagggattggatcccgccttgcatcaactgaatcggatcctcgaggtgtaaaaaaactcgtaaatcctatcagatctggaagatttctacgcttctccttctttatattcgttttcttatgcttttaatttttgatataacctagaaaaaggtttttaatatctttgaatctgaaattgtttgttttagaatattgtatatctgntttttaatcccnntttnatatttgaatggncttttagncnnccttttgttttgcccaaatggttgaancttttgcttttgggccttggatttnaaaggccaagtgatngttgncctttgnttcggaaantttagggggtttnnng

SEQ ID NO: 135666 - DNA, 392 bp, Arabidopsis thaliana
  unsure (1)..(392): unsure at all n locations
aactctttgtatttcncccaacctcttatgacccagatgaaaggtctttgggattcctctaggcctagtcccagctcaaggagctgagacagaggaagattacaaatacttccaaggcaaacgtagagcacagatcccggttccttagaatcgagccattcaaggcactcatcttgatcaatatctgatttgtttcccctctctgctttgtctacncctaccttgttgcacaaggaaacaggtccaatggtccatgctttaccagaccttgcctccttgaaagtctttggcatacggaggtttcgagntttttgaaatnagttgnctttaacancnttagngggtnttatccggtttttaccnatancntccaagatntttttccaggcctt

SEQ ID NO: 135667 - DNA, 536 bp, Arabidopsis thaliana
  unsure (1)..(536): unsure at all n locations
ctgagaaggaaggtcactttatgatgtgggatggccccatacggacaaactgaagcatttactaaagtctgtcgcaagcacaatctgtggacttaaaaagaggtgtttggcaagtaaaaatctgtttacgtcttctgttcactttctttcttgctctccacgcatcttgttctatatataagcttacacagatattaaccgaaaacgaaacaaaacttgagaggttcttactaaagttgcatcgtcatggctttcgaaaaaaacaacgaaccttttcctcttcactttgttctcttccctttcatggctcaaggccacatggattcccatgggttgatatngcaaggntccttggctcagcgnagggggnggcttataaacaattgtcacgacgccttcacaatggcagccaagggtccaagaatgnnctaaaancggggccatggngnctgggttngnccatcaaacccaggggaaagccaagttcccanatccagaagnngggnctnttgaaggggtgggnccgggncaagnng

SEQ ID NO: 135668 - DNA, 207 bp, Arabidopsis thaliana
cacgcgttcggatcgcgagcggttcgctcttttttttttttttttgataaaagagtaaagatgatcaaattttctttcacaagtttggaattaaatcaaaaaacctgaatgaaaaataaaatgacatttgtacaatctacactcagtttttattctatgtaacacaaactgtagttctcaatgctgctgctgctgctatctgtatat

SEQ ID NO: 135669 - DNA, 463 bp, Arabidopsis thaliana
  unsure (1)..(463): unsure at all n locations
gatctgaaaacataatccattggctaattgatatttctgatgtacaaaagaggagcatctacctcaacaacaaaccctaaattttctcagtcgatttccgaggaagacgatgatgagaagagagagcgagcgagtcagctttacagagaggattctaaaaaaacatttgaaaaaaaaagagagagaagaaggtttcggttttaaggctgtctcgcttgccggacgacagaccaatgatctgtctccacgtggacaccggattacgccgatcacagtttgagaaatcgggcaagctgggcaggattgacgatgccgggcagttgggccccatctgaccggggaagattagcacccncccaatacctcttcggttcggntcaaattcctcagccggntcaanagnngggncngnntaacctaacnggacccggntngggcccaaccnggtccantgcnncccaaa

SEQ ID NO: 135670 - DNA, 598 bp, Arabidopsis thaliana
tggcgattgatacgatacaaaaaacaaaaaagcttcggtggggagaaattgacgaagaagaaggcgactatgatttccttcttccgcctaagcagatgattagtccggaccaaaacggtgtaaagaaggtgattgagtacaaattcaacgaagaggacaaaaaggtcaaaatcactaccacgacccgtgttcagaagcgagctctcaccaaacaagccgtggagcgacggagctggaataagttcggagacgcagctcatgaagaatccagtagttacctcacaatgcgttcaacagaggatatcatcttggaacgaattagagctcctggtagcaacgcggaaccagtcgacccgtatcaggagatagcatgtctcagttgggcaaaaccgggtgcggtccttcatgggctgcaggttatgccaaaagaaaggtgcccactggacatcaagatgcccacagaaggatctcttatccttaatggacgagcctttaacagcagaaacttctacatcgaccataactggaactggcagggcggcttatgtcccgccaagcatgagagaaggtgcagacagaaaagctggtggttcagaca

SEQ ID NO: 135671 - DNA, 518 bp, Arabidopsis thaliana
ggagacttcatctcattcgatgcctaaacgttgctagtgtagagtggttggagtatttcggaaagcttgagactttacaagaactctgtatcaagaactgcagagccattggggaaggtgatttgatcaagctgaggaatagctggcgaaagctgacaagtctgcagtttgaggtacatgccaattacaggtacatgaaggtttaccaccagttagatgtggaacggtggcccaaacagttggttccctgtgacagtctggtggagctcagcctccgtaactgcatcatagctcctggtagagggctcgctttgtgtgctgagaaattgcaaagaaccctggagaaggcttcatcttggacatgtgtacccggtgtcagcggcctcacgcatcataggcattggttccagaaacgctaggtcaccctaagaagcaatcttcgctcccgtgtccccgtccgatttttctctgcccctctttaacaacatcacgttaagattaaccgatgaaagcctcag

SEQ ID NO: 135672 - DNA, 507 bp, Arabidopsis thaliana
  unsure (1)..(507): unsure at all n locations
aaattaaagagtaacaacattacttcatccatgactgtggatatacaactgctatgacgtcattttaaacttgatcatcactgaggcattagtaatttttctgtcccaaagatcgaacatttacacttacttacacatgagtaaaattgtacataggaagcaaatcatacgatctcaatacatccatgacaaatcttgcttaaacgagacagacgttgcagcaccatgaacacctcttcttgaaacctgaggacaatcttcaacaacaagcaactccaacttgtgagatccaacaagtggtctcattccatcgtctgtcactcccagacattttgataacttccaacacattgagagaggggaccgggctcaccagaatcaacccctcatggctcacttcttggcaatgggcaagctctaggttctcaaggttcggggcggaaatagggccccncccaggggngggnaaacccctgggnaggaagccggccggggttcggnnanggg

SEQ ID NO: 135673 - DNA, 779 bp, Arabidopsis thaliana
  unsure (1)..(779): unsure at all n locations
ccggccccgttgaggtgcgatttcnnnnnnnnnnnnnnnnnnnnnnnnnnnnnnnnnnnnnnnnnnnnnnnnnnnnncatgcggagcggccgccctttttttttttttttaacagagttgccaaaacgtattataaggttttatatatgttacaaacagaataatccagaaacagcagcaacattttgtaatttctctatctatacaaaagttaaagttgccactccagcaaaaggagtaaaagaaggcacaaattctgcaaagaagccaatcttgtcataacttgctagggatcacatcacgggaaagcttggtcggctttacaaacatgtcttgggtctctgcaatgaacttggcaaactgagatcctttcgtttgtttgttattaccatctttgagtaacttaggcagattgggtagagactgctcagtctttggtgatagtgatggcatcaaagcccaaatggatgagagttcttcgctaggttgatcaagtgtttgaaggatcgttgtgttctgcatatcttctgcaaacttgaagattggtgccaagactgcacatgggatgctgaagttgagatgcggtatcaccccccccgctccatgtcttgcgttgctggtaacaagtccaatcatatggccacttgaattgagaacagcaccaccactgccaccaggatgcacagcagctgttgtttcgagcatagcggggaactctgcgacttcttgagaaatggattgcgtattcaatcttctctttgcgtgaactacctttgcta

SEQ ID NO: 135674 - DNA, 550 bp, Arabidopsis thaliana
aacgagagaaaaagatatactatcgatcaatggagaaaaaggttctttacggtttagtaatgctaatgtacttggtgggtagtggctttagtcaaggggaagtgacatggttgagtaacgaagttgaatggcgacttattctgaccacgactcaacttcctatagtggttacggtaacatcctcgttgtgcggtgaccgatgcactatattggatgatcaactggcccgattgtctgaaacctatgtcttccaaactggaaaagaaacagcacgtttagaaagtgatttatcttggggtgcaatcactgacataatcgacaatctttcactcttcgccccgaccccctcggatattgtgcagccggcctccgattccggccccagtcccctctctcggagagtaaatgataggctcaatcttgagtcagtaacttcaaatatttgcctatggatttcctgtttgctgcttccgctatcaaacaatttgcctatattattggattatatggtcatattatgtttaatgtgctaatataacaagtcgatgat

SEQ ID NO: 135675 - DNA, 527 bp, Arabidopsis thaliana
  unsure (1)..(527): unsure at all n locations
aananggggtcccccnaacctgccaaacggcgtcaaccatttacnccccttcgnntacctcccaattttgntttaataaggaattttgagtcttggagtaaaaagatgttggaagggaaagcgaaggtggaagagacagacatgcctgtgaagatgcaaatgcaagcaatgaagattgcttcccaatctctcgatctttttgatgtctttgattctatatcccatcgctgctcacatcaagaaggagttcgatgagagatatggaagtggatggcaatgtgtcgtgggaaccaattttgggtgtttcttcacacattctaaaggaactttcatctattttcatttggggactctcaacttcctcatcttcaaaggcgccactctttagtttcttctaaaccacatccatgtttcatttccttttcttttaacctcaaagtagctttgtctgtgtaggaagaagctgttctttttttctttttctgttaacagatcttgtttccaataaaattgtaagatgttgtatt

SEQ ID NO: 135676 - DNA, 512 bp, Arabidopsis thaliana
ttcaaaaattgtgaccaaaacaaaagttaaagataagaagaacgaagaagaataagcaagattttcttatctagatatctgcaaggtaataatacagttccttaaactcaggaagaaaagagaaaacgacagaggcagaacatgtggagattctctccctaaaacctgtccaaaacgtgacgtacaatgcatttttatcttctccttacgagttatcgtctctatttttgccttaataaagaaattttgagtctttgagtaaaaagatgttggaagggaaagcgaaggtggaagaggcagacatgcctgtgaagatgcaaatgcaagcaattgaagattgcttctcaatcccctcgatccttttttgatgtctttgattctatatccatcgctgctcacatcaagaaggagtccgttgagagttttggaagtgggtggcaatgtgtcgggggaaccaattttgggtgtttcttcacacattctaaaggaactttcatctattttcatttggg

SEQ ID NO: 135677 - DNA, 555 bp, Arabidopsis thaliana
gcgtgattttgcgttttgacttttgatctcgagacaaacaagaaactaaaacagacagtgtttgtatatttcggacaaacaagacgttaaaaagctgccttgtcttacaagaaactagattttgtctcggggtcgatcttatctccaaacagagagaaattaacagagacatgggaggtgcagtgacggaatctgaaactctgcaaaaagaatgggttccagagacaaagttggaggctaagatcatagaagccgtgcaacgcagggcatcgaggggcaccacaatgaaatctttcaacagtattgttctcaagttcccaaagatcgatgatggtcttcgaaactgcaaagccattttccaagaattcgatgaggattcaaacgggtcaatagatcacacggagctaaagaattgtatcaggaagctagagatctcgttcgatgaagaagagattaatgatttgttcaaggcttgcgatattaacgaggatatgggaattacatttacagaattcattgttcttctttgcctcgtctatcttcttaaagacgatt

SEQ ID NO: 135678 - DNA, 615 bp, Arabidopsis thaliana
ccctctaacaatgtggaagcagcggagccatgaaacccaaatactacgtccctcaccctcacttggcgacaatccacctacagtttcggctgaagcaaggtcgtctttctccactggacaatccatgggcaaactgaaatctgatgtaattattgcgaaggagagaagtacctccaatcatggagtttctgccctgacaactgcagaaagctcgagcagcagtacaacaggaggaactttgatgggggtgatgagaggttcttttggaggaactttgggtggagcttcttcttcagctagtgtacaaatgccgccaatattaccttctgcttctccagcttcggtttcagtttctgggagtgggagaagaaggttctctgaaacaccgacttgcagggcctactcatagagaacagcctcagacatcataccgggaccgtgctgcagaaagaagaaacttgtatggctcatcaacatcaagtggaaatgatgttattgattcaagtgaggatttaatggggttgaggaaaggttcatcggatccaacaccatttcctcctggtgtgggtggacgtgggattacaacaagcaccgaaatcagtagtttcgatgtga

SEQ ID NO: 135679 - DNA, 909 bp, Arabidopsis thaliana
  unsure (1)..(909): unsure at all n locations
tgcaagcaatccacgtggagagatttgcatcaggggaaagactttgtcctctggatactacaaacgtgaagatctcactcaagaagtcttcattgatggatggcttcacactggtgatgtcggtgagtggcaaccagatggagccatgaagatcatcgaccgtaagaagaacatctttaaactgtctcaaggagaatacgttgccgttgagaacttggagaacatatacagtcatgtcgccgccattgaatcgatatgggtatatggaaacagctatgagtcttacttagtggctgtggtatgtccaagcaagatccagatcgagcattgggccaaagaacacaaagtttcaggggactttgggtctatctgccgaaaccaaaagactaaagagtttgtccttggagagttcaacagagtagccaaagacaaaaagctgaagggatttgagctgatcaaaggtgttcatttggacacagtcccgttcgacatggaaagagatctcatcactccttcttacaagatgaaaagacctcagcttctcaagtactatcagaaagagattgatgaaatgtataagaaaaacagagaagtgcagctacgagtgtaaagaaaggaagttgttggacaaatctctcaggtttatatgtttctcttatcactctaattcatattgttatatgtctctacgctgtgttaatatcgaagggtttttttctttctttgcttgtaaacaaccaaatcttttattgttcttaacattctcctgttttatgtatttgtattgatattttaataaagttctctgtcccctaaaaaaaaaaaaaaaaaagnnnnnnnnnnnnnnnnnnnnnnnnnnnnnnnnnnnnnnnnnnnnnnnnnnnnnnnnnnnnnnnnnnnaacgaaagt

SEQ ID NO: 135680 - DNA, 550 bp, Arabidopsis thaliana
gtggtaattaaactctccagtcttgttttgaaacaacaacagttacattgtttgttccctaagatgaatcggatgcttatgagcatttgcagaccgttaatagaggtgcttaattatgatttagattcccaactggattccatctctgggtgttcttcttgccaaaagatagaaaacaaccaaacagtttcttcttatgtgatatagtaggccatatactttgtttccagctacgtccagtctgattacttgtgtacaaatgacctaaccaaacaacttccttctttctgaacatgagagtatgaggaaagagtttggagattgcttgcttttccataattcataacatcagtttgtacgtaagtgggccaattactcttgtgtgtatccttggagttgctgtttcatatgtaagtggccaattactcttgtgtgtacccttgggggtttttttatttaccggtacttttgggcacccgttaaattattttgcaaaaaatggaatctggtttttgccccatgcccccataatccatttcgcaattttaat

SEQ ID NO: 135681 - DNA, 484 bp, Arabidopsis thaliana
  unsure (1)..(484): unsure at all n locations
cttaactgaatttatttattattttggatacacttattaccgaaataaaggattgtttatttcttacaactcgtcttattagtgttgcatagcataacaaggtgaaagagaaaacatgttacacaaccgaagatggaaatgcaatgagagggaatttgcggcaaacatcgataccaatggcttcagttagatcaggttgatccccatttggtccagcctctaccctccagtcaaatcggcctacaaggttggccactgtcacctctgccagacccaaagcaagatttatcccggggcatatccttctccctgatccgaatgggatgtagtccagattttttccgtgataatctaaagctgaaccaagggnccncccggttgaatcctcagatccgggcccanncggagggnnccgtnggangncccagcattggtaanccccngnccngggggaaggaaaccctaacttgnaccnccctaaggc

SEQ ID NO: 135682 - DNA, 518 bp, Arabidopsis thaliana
  unsure (1)..(518): unsure at all n locations
gcagttaaacaattaacattggtttcttgcgagtgaagtaacaacagttttaataacttcaaggagactctggctgctgaacgcaaccacaaaacacagaccgcttcttcgtccttttcttcatcgatacgcttctagttctcccatagatatagtctcgaagaagaactttggtatctgaaatcttcgacctaagtcgatgctctctctctccttcaagcttcatcaacagaaactgaatcctctgtatctccgactgtaacctcccaatcttctctggttcctctcctcgcatgttcgaataattctccttcttctatcaatatccttctctgatccggcttttgtgggcagcttccgattgacagnaanagttcnnnaatgggtccccccctcttnaagcggccttgggcgggtaaaaccggntccccaantnggggtttcctcccaagggttggactgggttnaaaacnccaagggggnggagggcccagntnggaaaccgacaagcttcngag

SEQ ID NO: 135683 - DNA, 548 bp, Arabidopsis thaliana
tgctctctctctccttcaagcttcatcaacagaaactgaatcctctgtatctccgactgtaacctcccaatcttctctgttcctctcctcgcatgttcgaatattctccttcttctatcaatatccttctctgattcggcctttggggccagcttccgattgacagtatacagttcctctattggcttcctctccttcttcaagctggtccttggaccgttttataactcgttttctcctacttccgtctttcccttctccactgtttcgactttgcttttcaaatcttctacagtgatctgaagattctccagcttctgtaaatccgaatcaagtctttctagaactcttctcttgtttacttcacggtttggatccatgaatccgtcgaaaatctctactttctcgacaatcagtggctcttcagacaaggctttagtttctgtcttgtgagtcttcactggctttagctcaacaaaaccgagatgatccaactccgaattccctttcttacttacaatctcatacgatgatccatcagacgtttg

SEQ ID NO: 135684 - DNA, 521 bp, Arabidopsis thaliana
  unsure (1)..(521): unsure at all n locations
ataaacgaaaaacataactgtgttcagatctcgaatatacatttccaaaacgtgacaagtttatgtttttttccgtatgtttgcttaataacactcacattattgttctaacagatataaatggttgagaattgtacagagaagaatctacagaccatgaatcatgtattgtcggctgttctttgagcttctgctgttcactgtttgcaattttatcctcctcttctgagaagggtttgaatgaggatagagaaactgattgaaactcttgagctaagcagtactatacctaggagcccatccactatccggaattcttgctcaagcccatgaaccctcttacttagcttaccggatttatccttcagatcctgccattacatccaacaaaccgcagcaactcaaccagacggccgaaaactggggggccgaaggaaaanncctttcttaagaaatccggggcnccaaatcttccaatccnggtnctnggaggncccnncanactggggaaggggcccctt

SEQ ID NO: 135685 - DNA, 487 bp, Arabidopsis thaliana
  unsure (1)..(487): unsure at all n locations
actgggaacaatggtccttcttattagttaagtgggcaacacacagatttgaaagtataactacacatgtaaatcaatctgagggattacgtgttaagtgttctaagggtcacaaaagaaactgcggttttcttacgtcgatgaaattgtaattcaacgtgatgatccatcccaagggagcttcaaaccactaagtttttgattggcaagatgaatgagcaacgagttcttcagaatagcgtatatgatctctgtgcgtataagaagtcttgactatagtttcccacttggtaacacttgtggagttttcttcaacattctttttttggggatgaaacaggtatctcggtgaagggatctttgagcttactgacggcagattactgaaaagccaggacccggaaggcttttgggggggcggcggagcaagtggagatagattccagccctgtgggctttccaaccaanggcttaaaacntggncccc

SEQ ID NO: 135686 - DNA, 455 bp, Arabidopsis thaliana
  unsure (1)..(455): unsure at all n locations
aatctcggttccaatctgtgaaaaagctcgctcttgattataagcaaaagttgggaagtatagctcagtctccagtacacccaagtnttgggaagaagtttaactttggttctgaacaacatgaatcgaagagttctgcaggtacgccatcatctccttacagacaaaatggctgtatgtcaccggatcgctgtgtaggaaacaggtctcctcttcacgctgcgggtttccctgggactcgtaaggaagcagaggttatgagagctaacaggttgaacaagcatatcaggaacataagcaagtctcacggatcactctatccaaaaaagttcaaaacatggcctgtttcaacggggctcctgccatgggagaagccattattatgttggcctccagaggattcttccgacggcccnnccaattgnggnttcgnaggtctaattgtcanggaattt

SEQ ID NO: 135687 - DNA, 423 bp, Arabidopsis thaliana
agcaacgaatctgattatttgattagacagtgaaaggcatcaataatgaacataagataatttttcctattaataatgaaattacaacaacagaagacgacactaaaaggtacaaatacaatgatccgagaaaattacaagtgcaaaagtgatgaacgctctttaatgtgcttcacaatgctctttcaacatagtttgctaaaaacgtcactttcgacatatatcctcaaacatcaatgatgtctttggtaatttcgtcatcacacaaccatataccgagttttctttttgcatatccatgaatatggttagggtgacaaaagatataaaatgaatcctatatggttacgaaaaccaaggttatccagatccaccttccccttttggatatactcgaatacctatatgggattaaagacctat

SEQ ID NO: 135688 - DNA, 473 bp, Arabidopsis thaliana
  unsure (1)..(473): unsure at all n locations
cgaataaaaaaattggtattttagaagaagaaacaaattgtctggtgacaataaatattccataataagaaaacgaaaaaaaaaacagacctaaagaagtaaagatttttgaatcaatctgtaatgtcgaaaatcatctcaattctaagaaatctccaaattttaagtgttcttctgttggtgtttgtagtggagagtatcaatgtgcggcttcactttttttcctatttctacgacttttaacctgtttgaattctttctcgccatcttctgcggagccatttggccttgctgtcatctgcagagccattctcagtcttgctgctatctgcagagccattctgcgtcctgttcgcttccacctttgggtttaccagaagggttgcttccatcataaacaacttccttttccttacacgagctacggnngnagcatgaaggggggntctggnagcngaagncgncngatgnga

SEQ ID NO: 135689 - DNA, 896 bp, Arabidopsis thaliana
tttccgtctgcggtaccggtccggaattcccgggtcgacccacgcgtccggaagcattcaggggaagcgtctggaagtgcaaaagaggacgatatagtctcctgctgcttttgctctagttttgttcctgaagccaaaccaaaacagttagatccttttgacatgtaccaacaattcaagatccatcaaaaggagccttcctcgcgttgttactacgcaacatctgtcgctcctgacggggtcccaccatggtttctgaggaaaaaagagtggacggttgaatactcgaggttccaagactttgaactgagagatgatgcaaaaggactcatcacagagcttcgtactgagcttcctcttcttggtatgagcactgtggttgggaagtggtatgtccctttcatattcgtgaaagaaagagaggtaaaggatcagatcaagaattcgatgtattacagcatgactcttgaacaaagttggaaagagcttttttctgatgagaccgccaaaagcgagaaccgtgatgttgtcgttgatgtagaagtagaaacagaagttgttaagcttgagggacaaatgattgaaagaggtctggaagcaaatgggtttgtctggtttggggttggagacaaaaagatcggtttaggatcagttgttgttgagaggatgaaatgggaagaagagagattcgggtggacaggcaaaggcgacaatgagcgatcaatgacagttaagagattggagaaatcaacagatggtagcctttggaagcattatcattgttatgttctgatagagagctttgtcttgaagagaatggatgagagtttggtcttaacatatgagtttacacatgtagataagctcaaaaccaaatgggattaagcttatcacgc

SEQ ID NO: 135690 - DNA, 534 bp, Arabidopsis thaliana
  unsure (1)..(534): unsure at all n locations
cccccgtccgagaagatgaagaagcttctaagatggaatgtatgtgctttggggatctagctcttgcccacaaaacgtgcactatcaaatggtttacaattaaagggaacataacatgtgatgtgtgtaagcaagaggtgagaaatctcccggttacccttctacgtgtgctggattctcaaaaccggtctagagcagccagggatatcgagatttcacggttcaataatgaatggcaagatattccaattcttgtcattgtaagcatgcttgcatacttctgtttccttgaacagcttctgattatagatatgaaatcttagcgccgttgcaatagctttaccggtctcttgcattatcggtcttcttgcaacaatgntatcaacaacaatggtgnagaggactatgtattgggtcttcggcaccggtcagttcgggttttntggncctttnggtcagctttnttcaagggtttnaggtttatnttanagccggnatgtcattgntngcncntgancggttttggccccctnc

SEQ ID NO: 135691 - DNA, 477 bp, Arabidopsis thaliana
  unsure (1)..(477): unsure at all n locations
atgtaaaagtgatcacaacttcttagaaacaccccatgcaatagcagcagtacagatacagaggaggagcgaattagggtttactcagatcacagtacataatctaaagggagaatgagtcatgcatatttagatccaacgattataagaagacataacgaacagctgaggaactgctaatgctctgtctcaatcaggatgtgcagtttaggaatgcaagtctactaaccttgcattacatatgatcttctagcgagccacatcataagcctggtctgcattcgtactggatttgagcgacaatgatatcactgtgctgttcctggagcagctgcatagccagctgattggagttgctgaattgctcatagccggcctgaggaggtgcagtctggggaataagcgggttggccagaaggngcagcatatgctgatgnggttccccnccatagcaaggnactgngngcatgatcccta

SEQ ID NO: 135692 - DNA, 439 bp, Arabidopsis thaliana
aagatcctttcctctacgctcctctttatcgcaatgtttccatgttcaaaaggagctatgagttgatggagaagatattaaaggtttatgcttacaaagaaggaaataaaccaataatgcatagcccaatactcagagggatttatgcatcagaaggctggtttatgaatattattgaatccaacaacaacaaatttgttacaaaggaccctgcaaaagctcatcttttctatttaccctttagctcccggatgcttgaggtgactctatatgttcaggactctcacagtcaccggaatcttatttaagtatcttaaaagacctatattgggcttccattttctgctaaataccctttttggaatcgaacttacggtgccgatcatttccttgccgcctgccatgattgggctccatcggagacgcggaagcatatggc

SEQ ID NO: 135693 - DNA, 592 bp, Arabidopsis thaliana
  unsure (1)..(592): unsure at all n locations
taagaagtgaaaatcagatcgctggcggagaagcggcgatggtccgtcgtcggagaggctaatgttaccgccgtggaaggattgcgaaacatcttccactgagaaaggaatgctgaaacatgcattgagagtaattagggagagaaactgagaagaaagcgagaattttgttttttgcgtaccttgaatcgacgtctagcaagaaagaaggatatggttcgatgctataccagaaacatcactgcttgccttatgtgttgaagttcatcccatggtgatcgtgttgcctgtaggagacaaaaaaggacagaattatgtattctccatttgctaactgaacaacactctcggcgaagcaccaaacttccagaaggtaaactttacaagtcaagctacgtcataaccaaacataggtggggcctggggntcatttaagntcagnaaggaacaggnaaagccaatttaagntttngcttggaatcttcgaagtcattgttttcatggtnnttnccntaaaagtnaagcgggaaacnttttnggggnattttttnttnngcnttctncttcgaggttntttnccttgatcaccttc

SEQ ID NO: 135694 - DNA, 424 bp, Arabidopsis thaliana
tttttttctgtcaagactgtccaatatttcaaacaaattcagtttcttacgggcaattttttacacaaattttatcaaagagtgttgtgaagaacaataactcaaatatgagtatcacaaatcagtcatcttttacttctttctctttgctgttttggagcctaccctaactttcttgcgcacatacaacaaagagaagccaaactcatcaaacactaaagtaagatgtaaaagatgaaactgaaacagaataagcagttactaaacagccacctcttgagggagatttcgggctgtaaaatggaaactcgaagggaaagaccgtcttgaaccatcctggtaagttcccatacactcctcttgggaacagaatcagaggacttgttgacttcttgtaggatctggaagctcctgagtttccatg

SEQ ID NO: 135695 - DNA, 445 bp, Arabidopsis thaliana
cctgtgaaaccaagaacggctgtagccaatagacttgccactctttgtattctaccgcttctcctggcaggagttcttggtgcgccaagtaaacgcgaagaattaactatcttcttacgacaacttagttgagagcaaaaccaaggaaaaccagtcgaagcacaacaacgaggttttggatgcagttcgcttcctttgcacatttgaggtacaccataacatgatattcggcattttgtgggaaatggtcgttgattccactgcagaactcaaaatcaacgctgctaagttgttgaaggccatcgttccatatatcgacgcaaaagttgcttccgccaatgttttaccagccttgatcactcttggctcggaccagaacctgaatgtgaagtacgcaagcatagatgcatttggatctgtagcacagcatttcaaagtcgacatg

SEQ ID NO: 135696 - DNA, 537 bp, Arabidopsis thaliana
  unsure (1)..(537): unsure at all n locations
gtggtggaaaggtttcgttattcaatatgatgactttcaaagtaatgacaactttcatgccaccgccaccagcttcaactttcttggcatttcatcctcaagataataatattattgcaatcgggatggaggactcgagtatacatatttacaacgtcagggtagatgaggtgaaaacaaagttgaaaggtcaccagaagcacataactggtctagcattctctaccgcgctcaatattcttgtctcttctggtgccgatgctcagctcttcttctggaccgctgactcgtgggagaaaaagaaatcttcagcggtacagctaccacctggcaaagcaccagtaggcggcacacgggtccaattccacaacggccaaatccagttattggtttcacatggggcacagctcgccattttcggtgcttcgaggatgggatgcattcataagtggggtcccccaagggggttttttttggccctaatccttggantttcntttgnaanagccacttgtttcngggnatttnttttggggc

SEQ ID NO: 135697 - DNA, 648 bp, Arabidopsis thaliana
  unsure (1)..(648): unsure at all n locations
gcaagcgaggctaagaaaaaagaattgattctgaaatcctctggttatgttaatgtacaaggntctaataatttagcctctcttttctccaaacgcggcgaaaaaggcgttaatcaggattgtgcactcgtttgggagggatttgggtgccaagaagacatgatcttctgcgggatattcgatggacacggtccatggggtcactatgtagccaaacaagtaagaaactcaatgcctttgtcgcttctttgcaactggcaaaagattcttgctcaggccactctagaacccgagctcgacctcgaaggctctaataaaaaaatctcaagattcgacatatggaagcaatcctatctaaaaacgtgtgcaacggttgatcaagagcttgaacatcaccgcaagatcgattcttactatagcggcacaacagctctaaccattgtgtgacagggtgaagttatttatgttgcaaatgttggccgttcaagggcggtccttagccatggagtcgggttgagggaagtttggttgcggttnagnttaccctnggttttaaaccggattttccncaggtganggngncggttatttgcttcaaaagggcgggtttnnttcntnggtttttnnccgggngncatcgtttttgga

SEQ ID NO: 135698 - DNA, 586 bp, Arabidopsis thaliana
  unsure (1)..(586): unsure at all n locations
atgaggttggtgccgccatataccaaaagccaacttcttatatttgttacaacaaaagacctcaaaatgagccacctctctgcaaggattccgatgatcaaaatgcagcctggaatgttccacttgaggcatgtatgcataaagtgacagaagattcatcaaagcgaggagcagtgtggccaaacatgtggccagagagggttgaaactgcgcctgagtggttggattcgcaggaaggtgtttatggaaaacctgcaccagaagatttcacagcagaccaagagaagtggaaaactattgtctcaaaggcataccttaatgacatgggaatcgattggtctaatgtgagaaacgtgatggacatgagagcagtctatggaggatttcctgctgctttgaaggatttnaagttatgggtgatgaacgtggttcctgtggatgcgccagatacacttcccatcatatatgancgtggtttatttggaatctatcatgactggtgtgaatcattcaacacttatcccagaacttacgaccttctccatgccgatcatcttttgtctaccctgaggaagaggtgcaattt

SEQ ID NO: 135699 - DNA, 538 bp, Arabidopsis thaliana
  unsure (1)..(538): unsure at all n locations
ttgtatacattttgagagctaacggtatgattccagaatttatgtatgcaacttttctcaaagccaaaagatacaaatactactaagaaacaaggtcaaatgaatttgataagcaagccttaaaggcgtgaaagaaccaacttttttactgaactatattcaagtgatgcttttcttttcttttctgacttgtttaagcgattgccgatttgattgtctcagtttcttcaggacgccaccatgacttttcaattgaaagcaagccttcattgtctttggactgcgtcattttaaccttccatttcatagatttcaccattttctcaacttctcctaatggttccatggcatcccttatgatgaaagtcccctgtggcctaagaaccgntcaatctcaggcattancggcaccaaatgnacctctccccaggggagagaaagntggtggnatggggaaggccgnagtccnggggaagngtgaagntcccccagcatgggaggtccaaaaaccnggcnnnttggnggnagggannggggc

SEQ ID NO: 135700 - DNA, 406 bp, Arabidopsis thaliana
acttaagcaaaggtagtagaactaatttacaatttgttgaatgttaattgatatatatatattttttaataatgatacattggcaaaacttacaatgtatataaactatagatgcttatttttttctcccctgaaatacagataggttctgctttctgagctcgtagattctgtaatctctgcgacaggaaacttaaaccttacccacgttgatgatgaatcatcacttgcttttcttttaccaccactggatagacagaaccagaaccagaaccattcctctgacatcattgtcagcttcaacctcctgagataggacaatctctgtgttaaaaactttatcagcttagcgcgatgacatatcagcttcttcgatactagaaattgcagattcgccatcagtttc

SEQ ID NO: 135701 - DNA, 317 bp, Arabidopsis thaliana
aaaataacaatactaccatgtaaacatacgatgtcttaccacaataaatttacagggaagtaagttttcttaagactcaccactgactttggcgacaataactgaagcatagtgagcaatgttagcctcaggggattgtttaagccttgcaatgaccgggaacaactctgatgacttcacaaactgtctgcaaatctggtggttcgaacacattttagccaatgagaagagtgcaatcttgagcggtgactcactcgctgtctctttcttgcttgggttcaaggcaagagtcgagcaatccgcaactagcctcagta

SEQ ID NO: 135702 - DNA, 503 bp, Arabidopsis thaliana
gaacaataaaacagcctttaccttccccaaagtttgaaaccaggggatgattgaagaagaagaagcagaaattaaaagttattataaggagtgaccaaatgcagaagaagaagaagaagaagagtaaatttcaaatctgaggtaatctactcatgatctggttatataccgattgtcctgaatctggaaccgggtcaacctttgggtcccatcccctctcctgcatccattgcttcactcatcccaaccggttgtgtcatatacgggtgaggcaaacccggcattttcccttgaccatacgctaaaccaggcattgaaagattaaccaaaccggtttgtcctaaaccgaaggagaaaccagaaggaggacccaaatgtggctgaaagctaaagggacggctaaaaggagactgattgttagttgtgacttgtctgtcgaatctcccacgtggcggctctgagtgatgaccgttgtggtaatggtgagaaactgcggctgaacc

SEQ ID NO: 135703 - DNA, 863 bp, Arabidopsis thaliana
ctgtaaatgccttttttattcttatttcaagagataattttgttcatgttttgaagttgtcctctctctcactcttcatttcaaaagccaagattaaacctaacttctgtctcacgtctagtttggaacatgggacattggtttcccgtggctacggggccattcgagcttaaacaacatcaggaaccttggacaaagactctcgtatcttctcttcgctgaatgataaatctaccaactcgccttttaaatacttgtcgtaagaagtaaggtcgaaatggccatgtccacacatcgccattagtatcacttttgcttctcccgtctctttacatcggagagcctctcttatggttgcagcaatggcgtgggccggttctggggcgggtaatgaccccttctggtcttgcaaaactcgaatagccccttggaaacactcaatttgggggaatttgaaattcgctcccatgaatccttggttcataaacatgtgagatcaatggtgccaatcccatggtaccttaatccaccggcatggatagggatcaggaatgaagtcatgtcccaaagtatgcatcttcatcaaaggagtcaatccagccgtatcgccaaaatcataagcataaacccctttggtcaaggaaggacaagcagatggctcaaccgctcttataacagggttgattttgcctttgagtttctcccggataaaaggaaaactcaaaccagcaaaatttgatcctccaccagtacaccctatgatcaggtcaggtgtttcaccaaaattctccatttgttgaatgcattcttctccaataattcggacgcgtgggtcgacccgggaattccggaccggtaccgca

SEQ ID NO: 135704 - DNA, 390 bp, Arabidopsis thaliana
  unsure (1)..(390): unsure at all n locations
caatnttnaaaangngtnaaaaatantggttacccattttaacctacanctaaaaaaccgaaagtatccgattatatagttggatggggaatactttattggatcacaaattcaaacatccatctatcttttcatctctctgatgagtggcgactcttaaattgaagaagtgaattagattccctacagcttggccgagaggtaatgaggagtgtcccaatcagtcttgatgtgggttcggctgatctctctcagtgaacggcaaccacttagtgccattgtaagctcaaactcgtctcttagcatttgtagcatcttcctaactcccgcttctccatccgctgcaagcgaggacaagctcggcctcccgaaaaagacacctgaagcgcc

SEQ ID NO: 135705 - DNA, 595 bp, Arabidopsis thaliana
ccgaactattccaatatatatttttcagatcatcccattataaattgggttattatataaaaaatttctggtcataaactttccagaaaaaggaacgttacaaagtttacggaacaaaagaaaacttaaagagcatagtatgcttataaggttcccccggttcaattatctgcgaagaacgatattgggaactgactgcatgggattctagacataaaccagagtaagctttatgaaccgatccattttttgggttaggggttttcaaccttagaccggattggtctgtagataactccatttttatcttcgatttattgtccacaagctccacgacttttctcatcttatttgcaacaccatctagacaataatttataccataccctgtcttaagctcattgatgttgtctttaataggtcggagttggcgaaaatcgaagggtgttcctttaacggcgaggattttcccggttggagtgagattatcgtcgagatgagtataaccggaaccgagaatttgaatttcttcagagaagatatcttcattgttcggacgcgtgggtcgagccgggaactccggaccggtaccgcg

SEQ ID NO: 135706 - DNA, 415 bp, Arabidopsis thaliana
tgatgctgatcaggtcacaggcaatcctgaatcgatccaggttctcaagagagttgcgaaaacagtctcgagctatctaaacgaagaaaacgctctagtgaaagcagagcaagcttgtttcttgcccagcacagaagatggagttcctgtgatcggagagattccaggaatcaagggatgttatgtagggcaccaggggcatagttggtggggggattcttaaatggtccagccactggtgctgcttcggctgaagcttatttgtagaccgggtattgccacaaagtgtcggtcttaagccggttttagtccttcccgggttagcaaacgaagatgaagagtatagtaatagagagcgttcgctgagatatcacatagaagctactctgttctttgaagtctaagcaaacagaat

SEQ ID NO: 135707 - DNA, 409 bp, Arabidopsis thaliana
  unsure (1)..(409): unsure at all n locations
atcaagactgcggatgatgggatccacgtgctcttcaccgaatacatggcgctcccgtcgccccaaaacacgacatctgaaggtgggaaagcagatggactgtcggattttgacacgtacatagtggagacaacggggcagaatctgaaatcagagctggaccagtaccttgatgaaaccctgcttcccagggttcaggagtttgatgttcttgactggtggaaacagaacaagctcaagtacccgaccttgtcaaagatggctagagacatcctttcaatcccggattcagctgcagcctttgactatgtctttgacatggaaccgagggaaatggatgagtacaagacgtcactgagggcccagacattgggggttttattttcgcaagggattgcnttttttaggg

SEQ ID NO: 135708 - DNA, 514 bp, Arabidopsis thaliana
taagaaaggctcaaacactgaagatacaaagctcatgaaaggctcaaagtctgcgccagaagacgggaaccagaaagggaaaagccagaaatcttcgatggtatctgatcatgcaaatgaggatcatggagacgcaaagaaaggaaaggagaagaagaagaagaagaaaggtgttgccggagatgaggttaagcgtgagagtgaatacaagaaaggactaagaccggtcttgtggttaacaccggactttcctcttacgacagacgagcttttaccgctccttgacatattagctaacaaggttaaagccgttaggagactcagagagcttctcacaactaaacttccgctaggcacattccctgtaaagctcgccattcccattatttcctacggttcgagttgttgttactttcaccaaatttgagggacttcaggcagctgaggaggggttctcaacacctccttctagtccgggatttcttgttgcaaagtcgtcttcttcagagaactc

SEQ ID NO: 135709 - DNA, 390 bp, Arabidopsis thaliana
ccacgcgtccgatgatactagctagtactgaatttccacagctgtttggcaatgcagagaagcgcttcttgtatgagattgttgctaatggtcgaaatgggattgatgtggacaagtttgactaccttgtccgtgattctcgagcttgtggactgggatccaattttcaattccaaagactgacagagacgatgagagtcctggacaatgaaatctgcttccgcgccaaggagtatcttagtgtccacaagttatttgcaactcgagctgatcttttatcgaaccgtctacacgcattcgaaagcaaaggcgatagagctgatgatagtagatgccatggtcaaagccaacaatcatttggaaatttcttctatgattaatgacccatct

SEQ ID NO: 135710 - DNA, 567 bp, Arabidopsis thaliana
  unsure (1)..(567): unsure at all n locations
ccacgcgtccgcgcaatcttttcttgtattttccattgcggcaattcctcctaataaagctttcctctttcacgtttctaatctctttaatccggttaaatccaatcccaaatacagattttgattacagaaatctaacattttgctgatttgtgttttagggctctctcgtgttttttatgattttgattccctgtatagattcaatcacttttctcatatctcttgttactgaatttgatccaatcgatcgataaaccaaacctcagaagctatgagagtgcacccaattcccagaaacatcaacaacacattgatccatcatcatcatcataacccgacccgagaacccggaaagaatctccgaccgattaccacatatcttcaaccgtgttctgggggtaccattgaggcagaagcagatgtgcagtggngggggcacgctgttttggtttntgnggggnggtaggntnttnaacgnngtggggaattagggntntttgggtgngtcatccgggtaaccaggtcgtnttgggaaatgggttnttntttgggttctttnngggt

SEQ ID NO: 135711 - DNA, 439 bp, Arabidopsis thaliana
  unsure (1)..(439): unsure at all n locations
ccacgcgtccgggtgaaggatatatctttatgggaagtgatccggctccatcacacggaatgacatgggttcctatgcttcacgattcccgcttggatgcttatcagatgcaagttacaaagatgagctacgggcagggtatgcttagcttagatggggaaaacggaagagtagggaaagtcttatttgacacaggaagttcctatacatacttccctaaccaggcttactcccaattggtcacatcacttcaagaaggttctggtttaggactaacacgcgatgattcagacggaacactgcctatctgctggcgagcccaaactaactttcccgtttaggttccttgtccggatgttaagaaggtcttcaagcccattaccctttcaaatntgggggccaattgggttatnncattccaggaaacttttttgntnaa

SEQ ID NO: 135712 - DNA, 532 bp, Arabidopsis thaliana
  unsure (1)..(532): unsure at all n locations
acatggagtgcaatctttaccagcttatgaaggatcgccctaagcattttgcagaatctgatatccgaaattggtgcttccaggtcttccaaggcctttcttatatgcatcagcgtggatacttccaccgtgatcttaagccagaaaatctattggtctcgaaagatgtcattaagattgctgatcttggcctggcccgggagatcgactcgagtccaccttatacagaatatgtctctacacgctggtatagggcacctgaagtactgctacaatcatatgtatacacgtcaaaagttgatatgtgggcgatgggtgctcattaatggcggagctgttgtctcttcggccctcttcttttccctggagctcagtgaagcggactgagatattcaaaaatctgcaagtggtcataaggcagcccaaccgaagaggccnnggttggntggggncttnanccttgccagcggttatnaattanccaaattccctnaggtttcccggtgtcattntttaaagggtgatnccaaat

SEQ ID NO: 135713 - DNA, 466 bp, Arabidopsis thaliana
  unsure (1)..(466): unsure at all n locations
gcagctgcggttcttctatagtgcccgggaagattttgagctggtgagaagtaaaggaattgcgtcagggaatgacacctcctccacgatatctttctagagtctgctccattatctgtgctcttatgcccatacttacattgtattttggtcatatagatatctcgataacttcagcggcgtttgttgttgcaatggcattgttgttacagagaggaaacccgcgtttttntcagctgagtagtacgatgtttggcctgtttnactgtggatatcttccttgtttctgggttaagctacgttgtggtcttacngctccagtttctaaacaccggaattgggngaagctggcctactatcctcggcggccaagcacattgggcagttgggcttnttgctatattnattnctttcctnnggataattccccanacacggttgctttttnttggggggaagggaattt

SEQ ID NO: 135714 - DNA, 495 bp, Arabidopsis thaliana
  unsure (1)..(495): unsure at all n locations
tcctcttcaaattgaggctaaagaactcaagaagagaaacactctcctccccttaaatcctttacttatatttccttgagataaagcaaaaatcatggccgaagcgtcttagtttagtggggaagcttgagacagaagttgagatcaaagcttcggctggaaagttccatcacatgttcgtcgagagaccacaccatgtatcaaaagcaacttcaggcaaaattcagggatgtgatctacacgaaggcgactagggcaaactcggctctattgtcatctggaactacattattggcaagtaaaccttatattaactaaggaacggtacataaatttcatagttgctaaaggaatggggggacccggaatttggtcctccggttatgtaccatatctccntantttatttttggaaanaaatcctncnggttggntccgttaacccccatnttggggggggaaanttngnccccncgttttnaggttttnangggg

SEQ ID NO: 135715 - DNA, 381 bp, Arabidopsis thaliana
  unsure (1)..(381): unsure at all n locations
cttgattgttgttgcaggtgcgaattaaattttttggtgtgtcagtacgatttttttttggttttccactcagcgttacaagcatgagtgatagtnagagcaatgcaccactgccatacagcatcaaatttgttggcagtaagacaaaacgattgaaatacttgccggctggtgctagtggtacagcaacagcacaatacccaaatggcgacacatatacaggtgaatacaatgtaacacaacaaaaacatggtaaaggtacatacacatggaggttncaggaccagcagtttttgcagccaggtngtggttggttattaccgntgccggnattntttggcggtnnccaaggnngntccnggtcccctgggggnttttttt

SEQ ID NO: 135716 - DNA, 416 bp, Arabidopsis thaliana
  unsure (1)..(416): unsure at all n locations
ggncactgtctccggtaaccgctgaagaacgatggcgactcaggctgctgctgctgcctcattcaagggcaacttaaagaaagctgtggcaggtataaagcgtatcaatctcgacggtcttcgttggcgtgtttttgatgccagaggccaggttcttgggagactagcttcccagatatcaaccgtgcttcatgccaaagataagcctacttattgtcctaaccgcgacgatggcgatatttgcattgttcccaatgctaacgaaatcgggcttcacaggaagaaagctcactgacaaatttctacccgttggcatacttggggtacaatcggncaaccttnaaggancgggagtctttnaaagatncagattggccaaagatncccncagnggttattcgtnaggnctttnttng

SEQ ID NO: 135717 - DNA, 445 bp, Arabidopsis thaliana
  unsure (1)..(445): unsure at all n locations
agcgaggaagctcaggaggaggccaggaggaaggaaagggctcatcaagaagagaaaatacgtcaagtaaaagctcgcgcagaggctcaaatgctagcaaaaatcagagctgaagaagaaaagaaagaagttgagagaaaggcagccagagaagtagctgaaaaagaagtagcagatcgcaaagctgccgaacaaaaacttgcggaacagaaggctgtgatagagagtgttacgggggagttcagctacatccaaatgctcaagctgggggtaattcaaatccgagctgcagaaagtgcttttgattatttgngnacccncaagntttgaaaaagctccnaaggtccttggaaacaaccgggacccnatncggttttaaggccaccggttcaaaatggaaaacttttttgcangtttttttnngnangccntnttttggaggggt

SEQ ID NO: 135718 - DNA, 538 bp, Arabidopsis thaliana
  unsure (1)..(538): unsure at all n locations
ctcattgcgttttaccattggtgtaaggatactggagtggcgagatcttctgagtaccctgaggttcagaggattacgagcaagctgttggagacactagaagagtttgtgagagacagagccaagagggccaaaagtcctgagaggaaagagattgaagctcctcctgctcctgctcctcctgtggaagagccagtggatatgaatgagatcaaagcgcttcctcctcctgagaatcacactcctccacctccacctgcaccagagcctaaaccgcagcaaccacaagtaacagatgatctagttaacttgagagaagatgatgtctctggcgatgaccaaggaaacaagtttgctcttgcgctttttttcttggccctcccgctaataacggaaattgggagnttttctcttctgntaacaacgngcattggtttggaagatccancagnagncttngggaagnnggttgggnctagnattggtngggncactngtatttnggccatnanaagccgaatgggtggtggtttgccgc

SEQ ID NO: 135719 - DNA, 504 bp, Arabidopsis thaliana
  unsure (1)..(504): unsure at all n locations
gaaagcttatttagctgctcgagaagatagtgaccgaagtgctcagaaagctattgctgataaaacttcctctgcactgctagatagggtggagacaatgctccagaaacttgaaaaggaaattgatgatgtcgataacaagatcggcaaccgctggcgactcctggacagagattatgatggtaaggtaagcccagatgaagttgcattggctgcgatgtacctgcaggacacattgggcaaagagggtatccaagagcttatccaaaatctgtctaaagataaagatggcaaaatactggtggaaggcttagtgaaggttagcgagccgagattgaagatgcttgaagcttgangaaccagacgggcctacaaccaagtttttgnnttntttgtttttggggccatttggcgnaancttttttttccaagggtcangtttttgcctcntggtaagnaaaggggggccctccntttcnggggnttttttcntnanaggccttt

SEQ ID NO: 135720 - DNA, 434 bp, Arabidopsis thaliana
  unsure (1)..(434): unsure at all n locations
gatgaagaggttctcactgatgcttgctgggctctctcctacctttcagatggccccaatgataagattcaggctgtgattgaggcaggtgtctgtccacgacttgtggagcttttgggtcatcaatcacctacggttctcattcctgctcttcgaactgttgggaacatcgtaactggtgatgactctcagacacagtttataattgagagtggcgtactaccacacctttataatttgctgaccgcaaaatcacaagggaaaagtataaaaaaagaagcgggttgttgggcctatctcggaatattacctcctggggataaaccttcaggtatcgggggcttttgggttgccgctgggatnaatcccccccccctttgtgcaaccttggtcccaaaacggggggggttccgtattaaanaaggggannctcc

SEQ ID NO: 135721 - DNA, 502 bp, Arabidopsis thaliana
  unsure (1)..(502): unsure at all n locations
gctgcagactacatgatgtctatatgtggcgatgatggcttgagggaaatttcttcccctgggaaatgtggcagtatcttctacctttctcatgacgacagatttgtgataaagacattaaaaagatctgagttgaaggttcttcttaggatgttgcctaggtactatgaacatgtaggagactatgaaaatacgctcataacgaaattttttggagttcacagaataaaactcaagtggggtaaaaaggtacgctttgtggtcatggggaatatgttttgcacagaattgaagnttcatcgtccgctaatgaccctaaagggctcaacacaagggngntatnccaggnaaagnattaaaanttgggggaaaagnccttccatttgaaagatcctttgatnctngccttaatggaatttncatattgggcaaagctnccttncgaggaggntcctnttncaagcaaaattatttttngncctgtcnggtcccttngggatcc

SEQ ID NO: 135722 - DNA, 680 bp, Arabidopsis thaliana
  unsure (1)..(680): unsure at all n locations
caaagatgatagtgctgctctcaattcttcagtgattgtcacagatgatagacgcctgaaggaaatcgtgataactcattttacatcgaaattgcagacattatctgaggaggagcaattaaatttgagaaaggaaattcagtcagatttttccctagatgatgcacattcgcttggtggacaattattcacggatacaccaggacctagttctcctcttaatcaaacagaacttccagcttttgaagaggttgagctttcagacatagcggcatttgaaggaatatccccaggggccagtgggagtcagtctggccacagaacatcatttgtccacaaacactaacccagtagatgttctgacgtgtcaatgagttgtttgaatcggtatcaggaactgctcggcaagttgcaaggntccctgtttcctccattcctgtaccttttggccaaattgttggcccagttgtgaaggctcttgtgacgggtaagcagcaaaagatgcctgtgcttcggaggttcaaaccccaagcaaccaaagctataacctcagaagacaatgaaaaggacgaacaatatcttctcaaggagacagaagaagctggtgaagatgatgagaaggcaatanttgtggctgatgttcaacctcaagggccagcttgggnttcttcttcacaagg

SEQ ID NO: 135723 - DNA, 466 bp, Arabidopsis thaliana
  unsure (1)..(466): unsure at all n locations
agnaggtctttatattcaaancaaagctatgagcactcgaatgaattttctgtacatccaggaacatattcccctcgtgacctaggcatgcgatatctcccgagcggtggaaatggatatcataggcatcaccaaaacaagtcgcatagaatcaatgggatgaggaatacgagtgaacgatgggatgcaggctattctgaatgccccaggtccaatcttgtctgttactccaacggatctcagcgtnctgatgtggaaggaatacggaatagtacagacattgatgagtacanattgcgagattgcagctggtgctnaaaggcgagcatgcgcttttgcgaantcaaagcgggnaagagcagagagttttaggtcaaagagatcttgcgatcccggaagctccagctgntctcatgtntccagggcagttaaagctttttccgagaccttggnaacaacaatgggg

SEQ ID NO: 135724 - DNA, 560 bp, Arabidopsis thaliana
  unsure (1)..(560): unsure at all n locations
gttgaatgagattctggtggagaaactagcgtcagttgaagccacgacgaatccattgatgaagtcatatgctaaggtgactaagaaagccgtgagtncgcaacaactactgaaagaactgtgttcagcgatagaaacacagcaaaagcaagccacaaagagatcagaaaactttttattggaagaagaagacgacttcttgaaaagtatacttgctgaagatgtgacgattcgatctgggaactgggcagacttcagtggagaaatgtcaggattggtgctggatgttgagaggcttgtcttcaaggatctggttaatgaaatcgtgcatgcagagacaagccgtctgcaagcaaagtcaggaaggcgacgaacgctttttgctgaccagtagctaagtctgttgaagaagacaaaatatatccacaagtggtttctctaactctttaactgtgttatgtttcactctggtcctttttttcgtctttgctgattcttatggtcgttcttgggtcttccgttttcttcagcgggtttataatcatatggtgtgttatgta

SEQ ID NO: 135725 - DNA, 689 bp, Arabidopsis thaliana
acaaaaccaaaagaaacaggccgaaagaaacaggccatattatacaaagaaaaaatacaataaaacaaagtgaaagcccaaaagcccaaacagaaaccctttcactgaaaaaacggtgttgtaaacagcacatagaacacgtggcaagagggaaccagatttgatgacacgtgagaagtcgaagaagagagagtttccgatcaccagaatgatgtgacgccggaaagttttaattccgattgaaaccaccggaaaattgctcaacttttgcagcaacaaaactcaatcttcgcccaaaaaatttaaagcgaaatcccaagttagctttgatgagaatgctttctaattgaagcaattctgtaatacttctgcatcttcaaacaataactttataatcttcagaaaaggaatttatcaccaaccgaggcttgcttttattaacctaattcgaatccaataaactagaggatgtctaataaccaaaggcagaacgtcagtcaatcggactgtcttttcttcagatctgaagccaaaaaaaaactcaaagtgcgtgagagccgaccgatctcgctacagaaaccgataacgtcggagttaaaccagccaaacttgttttaaaagccaaaagttgctggaaaggagccaggcaacgacagtgatgaacccaaagatacccaaagaaaagccag

SEQ ID NO: 135726 - DNA, 528 bp, Arabidopsis thaliana
  unsure (1)..(528): unsure at all n locations
gannaccnacaatttgggnaggaaccggaaacaaggactccccaaccccaattttgcaagtttgaacctctttgaagaagccctaatatacctatcctcccttaaccatttcataaaatagctaccacccttttcctactcccattaaaaaaacatggaaatttcaaaccctaaatcaaaacccaaataatattggggttttaattttgaactacattaaagcaccagaattaatgtagttcatattggtccacatctctctccctgaatcaatctgatctacatgaccaccacctcctcctatgttcatcattccaaagctctctccattcatctgccatggaaatccccataagactctgcttggatcacccaagccgctgctcccgttaccaaacgcataagtagcgttctctttttgttggcttgtcccaaacataccttccatgtcagactcaccagagctaccgagttctgaatgaaacccgtcctgtgaagaacacccaaaatgatgtttgcggacgcgtg

SEQ ID NO: 135727 - DNA, 385 bp, Arabidopsis thaliana
  unsure (1)..(385): unsure at all n locations
atgcaaagtctttatcacaattatgaccattggattgtgttttacataaaagagtttgtagaacttccaaaattataaaaaaaaagaatatggttaaataaatggaaacagattcaatattgtagatgactttgtacatcgttacacaaatctatctaacctatctaatcataatagacggtgaatattgattcctggaagctcagtttacgccacgtgtccttgggcgccgaaatcaacacctagacaaaagcctgttgacttgtagtaatccctttttttactcccgggttaacattaaacccaatcagacaccaaaacggggncaaggccccaaancctttncccccccggnggaaanngacccggggaacctgaaccgggg

SEQ ID NO: 135728 - DNA, 545 bp, Arabidopsis thaliana
  unsure (1)..(545): unsure at all n locations
aagctctcgagcttgagaaacttaccgatgaggagatcaaagacgctgtcatgaccactatctcttgcttgacaggcaaggaagttaagaatgataccgcaaagcccttgaccaatggctcattgaatgatgatgatgaagccatgaagattacaaaggtcttgaagagcaaatggggaagtgatcctctgttcagaggctcctattcgtatgtagcggttggatcaagcggggatgacctagacgcaatggctgagccattccaaagattaataagaaggttggtcaggtcaatggtcatgatcaagccaaggttcatgagcttcaagtcatgtttgcaggggaagcaacacataggacccattactccacaactcatggtgcctactatagtggtttaagggaagccattaggcttctcaagcatttcaaatgtaatttttgagggttaatttttaaaatatgtcccgttttttttttttgggggattttttggggggcgtatttgtggtgtttaaggtttttaaatgcttacnccactttgc

SEQ ID NO: 135729 - DNA, 363 bp, Arabidopsis thaliana
gcttaggtacgaggacaaacacaatcagtaactcaaaactgttttatgtgtctatatacataaacatcatattcttcttcaaaacacacacagccaatagtccttgtttatgtggggaccaaagttgtttatgagtctgagggcagaccagaactacagcttcttttgtccgaggaagataatgattcctttgtcatgaatctggaaattatgagtctggcaatgttctcaccagccactgcacttgtctccattgggcttgccgcgttttcaaaagcattcacatagtacaagggatggtcatactactatgcaatggtgcggaaaacttcaggcgcgtggtactttgggtatgcaccccag

SEQ ID NO: 135730 - DNA, 514 bp, Arabidopsis thaliana
  unsure (1)..(514): unsure at all n locations
gagatcacagttcaagtgccagcgaccagtcaagtgtggtcaaatctaacagcacaccatcgactcctctagggggaggcagtcatctgcacacagaatcaagactttcagaaggctcgcctttgatggaacaactctcagagcctagggaagacagagaagctttagaagacagttcccatgaaatggagattccggagactagcaataaaatgagcgatgagttggatcttttgagggaacagaaaaagatattatctgaagaggcggcactgcaattaagttctttaaaacggatgtcagatgaagctgcaaagtcccctcaaaatgaggacgattaattgaggaaattaaaagtactcaatgacggcattaaaagcaaaggattgacccgnttttctacgtttgggngccaggtnatggntttttttatngcatctcattggggcattgggtaaatctgntatnttgcagncatttcctnnctttggggtcaccttattgggatnttttg

SEQ ID NO: 135731 - DNA, 487 bp, Arabidopsis thaliana
agatcatccatggaaacagcgtcgagagtggaactgattgttaaaggcaacttaccggaggttccttctcagggcattcagccgccggaagctcgacctaatctccattactccggcgatgcagcttcgatcccaaccgtcgatctctcgagctccgattccgcgagagaagccatcggcgacgcttgtcgcgactggggagccttccacgtaatcaaccatggtgttccaatccatctccttgatcggatgaggtctttaggtctctctttcttccaagactctcccatggaagagaagctacgttacgcctgcgactctacctccgccgcatctgaaaggttacgggtagccgtatgtttgcttggggcttaagaatgacggcggtttttggattggagagtttactttcgatcatcacacgtttccccccctctcgtcgtaacccttctcattggccgggttaatcctttttgctaaaaaaaaa

SEQ ID NO: 135732 - DNA, 437 bp, Arabidopsis thaliana
  unsure (1)..(437): unsure at all n locations
cttaacgcccacaacgaaaaggaacttctctttttgtttggtgactgaatcggtggaaaacaacacaagtttgttcctttttgtctctccagatcccttggcttccttcttcttcttcatcctcctcgtgagactctgtgttgaaatttctctagggttctaattatcggcgttggtttttcgttcttgagaatttgatttcgtttttagaaataatgggtgattgggctcaacttgctcagtctgtgatcctaggtttgattttctcttaccttctcgctaagctgatctcgatcgtcggcacgtttaaagaagacaatctctctcttcactcgtcacccagaggagtctccaattgggaaattaaacccggaaggagttnacttcgcgacggntnggattccnctttccggtggtttncgtngtnaggcggngtt

SEQ ID NO: 135733 - DNA, 439 bp, Arabidopsis thaliana
  unsure (1)..(439): unsure at all n locations
gagcggccgcccttttttttttttttttttaaaaccatgtcttgtcattacttttattataaaaaccttccacataattcttcttcaaacagaagcatcaatcattgaaaaaacgaccaaaccaaatattaaactaaaaaaaaatatatgtagaaaaatatttttaaaagggtaatcaaagtaatgaaaaattcaacttttacttttcctggatttttttctggttaaggtcctcaccatccaaccctgtttcctcactttggttccttcgaccttagatggtgccacatggcaagaagacgtggacgatcctgaatttgagtttgatgacgtgggaatagatggaccaatacgcttgcgccatctaagcgatgacttggcactattgggcccctcgggaccgggggagtggctcgttaataggaaatnncnggnttct

SEQ ID NO: 135734 - DNA, 382 bp, Arabidopsis thaliana
  unsure (1)..(382): unsure at all n locations
cttagaagcttcatccatttccatattagttataactattaagttagggtcctatgtatttgcaaaaacctcatcaaatctatctgtctctctctctcaagcctcaactcaccacacaccaaaccaaaacaccagaaacaaaaagaaaagcaaactacaaattcctcatttcttcgatcgacaattggtagaatggtcgtaaccactcaaccaattggagacgaaaccgaagacattttttgtgcaaataagaaacacataccactggaagaataaatactcatgggagaattcccaaagctgtttagttcacaggatcatggggccccattgngggggggcctttccncagtttcctnggggnggctggnggannaanngg

SEQ ID NO: 135735 - DNA, 419 bp, Arabidopsis thaliana
  unsure (1)..(419): unsure at all n locations
cgggccaaatgctcttacagtttgcgcttaagcagtttgagatgtgttgtcatcagggagcaacaaatccgtggaaccgggtgctaataagtacgcgaaaacttgggaagagcttaacaagtttaaggcttctggtgatccgtttgatggagatttcttcatgctgcttgagtctgtttacgagcagcaggttatgcttctggagatacttcataagcaaaagaggaagcttgataaaaagcttaagaacataaagtattngaagaaaatctcgnatgtggnttttgtgactgcgtttgtctctgtttttgatcttctctgttgtagcaanccgctntttgctgcacccnccagtttgtgactncccctttnanctgcgttaggggnttcccnttggntcantaggggnantgtgtaac

SEQ ID NO: 135736 - DNA, 591 bp, Arabidopsis thaliana
  unsure (1)..(591): unsure at all n locations
atcatgtatcactcgtggctcggtgtcgaacgttggtttatatatgataacaacagcgatgntggtatacaagaggagattgagttgcttagttcggagaattacaatgtgagtcgacatgtttggccttggatcaagactcaagaagccggtttttcgcattgtgcggttagagcgaaagaagaatgcaattgggttggattcttcgatgtcgacgagttctactacttccctacgcatcgctctcaaggcttaccgagcaaaaacgctttgaagtcgcttgtatcgaactacacttcttgggatttggttggagagatcagaacggactgtcatagctacggtccatccggtctgacctcggttccatcacaaggcgtgaccgtaggttacacttgtagacaagcgaacccccgagagacacaagtcgataatccgccctgagttgctcacaagctcattgctcaatgtaagtacatcattttcagttgaaagaaggagttggggcatatgagtttggtggggagttttccggtagtgaacccttacaagtcccagttttgggccatttcaaagntaaagtttttcata

SEQ ID NO: 135737 - DNA, 439 bp, Arabidopsis thaliana
  unsure (1)..(439): unsure at all n locations
aatatagactatgaattttattgtccaattgagtaatacattatgctgggctaaacagatacagatgtatacaagagctgttacacataacattatataagcgttatgtgacataccacagaacctcttctcaaaaaccaccagtttatgctatgtatctatctctcacaatgggatagcctcaatcaagtttccttgccctgaatctgaacttgaggggaagctaagaatgtgcctcagaacgattgttctcgccaatgtgatatttttgctacacttagtcgcgttatcacccacttcctcgatgctccccggtggaaacatcaaacttctggctgatctcgnggatngaagcctcncaggcactnnttctccttcncctnggggggaaaaaaancctttggancacgggtncanccaaacttcagctantancgga

SEQ ID NO: 135738 - DNA, 485 bp, Arabidopsis thaliana
cggaagtgaagatggatatgtacaaagatgatagctcaccatactgttttttccatccaaaagaagagtatgttggagtttgtcctctctgtttgaacgagaggcttcttgttttagcttcaaaacagagatcatcaagaaccaaacactcttcctcttcaccaatcatcagcctccctaagatattcgccttgagctctctcctcagtcgcctcgatctccgtcaccggaaattccatccctcctccgatcttgacgtctccacaagccaagaaggtacagtatttttatggaatatcactttaattatacacatacccaagatctaattctaatttggtaattttcccctttttttttttgtttccccttggacaaccggggattttcttttttccgggttaagattataaactcctctcccacacaatatgtgtgtgtgggatttaacactattttcaatgatatatatgttcataattttt

SEQ ID NO: 135739 - DNA, 358 bp, Arabidopsis thaliana
  unsure (1)..(358): unsure at all n locations
agaagaatgaatcaaagagtagtattngtgtgaaggatgaattactaatagctaaaattgagctgagactggcttcaagagtgatgtacatgtcgaaacttactactgagaagttacattggtgtcaggagaaacttgaaaagatcagcttcaacggtcggaagattcatatggaaccatatttctcgttgttaccttgttgagccatctctgcgtatagattagatcatagatgttggaacaatatggcttcatcagatccaggaagatgtctttttggtggtgttcatatcttcctgagagcaatagtatatctaatgaatgatatgtggtagcttagcgtttttctttctcctct

SEQ ID NO: 135740 - DNA, 576 bp, Arabidopsis thaliana
  unsure (1)..(576): unsure at all n locations
agattaaatactggatattgcttttagatacgactgggtaagcttctgaaaacaaaggattattgtttaatttcagacaataatttcagatcaacgttaactactttttgttcttttactcttcatctgatcctgactcttcagaactcgattccttgtttactttcttctttgaccctctcttcttatcttcctcgtcctcactgtattcgctttcgtaatcctcctcttcaatctcatcatcctcttcctctaatccttcttctgcattctcaccctccacatcacgggttcttttcaaaacctcgactttcagtgatgtcttttggtcacaaccgatccaagtaatcgcttagggcagaagcaagtcaaggtaataaggaaccttctccagggggcnaagagtcnccccattaccaatctgggcccacttttaaccttctcaanaggttncttaacgggatcaatgggtccctggagggtggcccaaangggccatggtcagaaaaggggtgagcangggaaagccagtcaccaggattacctcggaanacagaaggtgaccgagagnccaag

SEQ ID NO: 135741 - DNA, 506 bp, Arabidopsis thaliana
ataaaattcacaaactatagtcattaatacaaaaagaaatcattgtatttggtagaggggaaacaaaaaaaaaacacgacgatgtaagttggtggaaccacattatcaaaataaaagaaggtggtggaaccaaattgaataaagtccgtccatatcattatccgtcccttaggagcctctaattagtaatattcttatgggtccactgtggcttagaggacttgattaaaaccattcttatttagtgctaactttgtgagggttggaataacgaaccaagctgattcaaaccattccaaaacaaagttgtcacatattttaaaaccaaagtttaccggacagagaaatatgggtgtgtttttctcaaaccaaggctaaatgggatcccattgttaaacccaaaatgttcacaccctacctattctttttggaggcccttttccatgtgtttgctgtctgctagtcaagtttcattagctgattgccttgcatcatattcttggatc

SEQ ID NO: 135742 - DNA, 400 bp, Arabidopsis thaliana
cgcttccctcctctcgaaggtcctgggtcggtcgacagtttagaaatttaagagtgagttggtcacatcaatggctttgtctaccgactaaaccccatagtattacaactcttgtttagtttctcttttaagtccatcgataaatggagcacggaatttttgggtgcaaggttgagactttaaggtattagtgtagtaacatttggaattttcttaacttgcaatgtggcctcacaaatagagccggtcctgagaaatcaggtggccaaacaaaattattttatttttagaagtgtttaagatatattttttttaaagagagttaatgttaaagtttcagaaatttaggaccttgttcaatatggcctgctcgtaaacggcattctcataaaaaaaaaaa

SEQ ID NO: 135743 - DNA, 810 bp, Arabidopsis thaliana
  unsure (1)..(810): unsure at all n locations
gttgactatagaacagctatgacttcggatgccaccccttcgtaagctgggatcctctagagcggccgccctttnttttttttttttttttttttttttttaaaaaaaaaaaaaaattcccatagacatatatatattcagagaatttagacaacgattgtaattttgctattctcaaagggggaaaaaacagagagattcaaaaggaagagatgaaatgttgtcaataatattttcatgaacttttctcttccaatgagatctttaactccaaatcttcatttcctctcttaatcttaagggtcaccttatcacctacactgtactcatccaatatcttcatcaactcggctttgttcttcacaggtttgtcatcaactgcaacaatgatatctccaagcactatattaccagcaaaaccccgggatgtcggatgtaatcctgctttttccgctagactcttacccggtacctgaaggacaagggctccattacgaacattgagttgattagctactggatcaggggctaattctatgttaataccagctcgaaggactttgctgaattgtattaagtgaggaacaatcttttatacttgntgatgaccgaataaccaaatcccaccaccccccaaaatgttccctgttttttgtgaaaaaatgggcccgggtttgaatccccaaaaaaaagattcccctttttttaaaatccaggcccaaaggggccccctccgcgcttttattttccccggggttttaatggggcgccccatatcagagtttttgaaatttttcctcccccccccct

SEQ ID NO: 135744 - DNA, 418 bp, Arabidopsis thaliana
ctctagtcaactcgagatctagactctgtggaagagtgcagattctgctgctgtagctatcacaacaacagatcttgtaagcaagagtgttgcagttgaatcacaggttggtggaatcaaaattcgagttggtggtatggctaaaggctccgggatgatccatcccaatatggcaactatgttaggtgtcatcacaacagatgcactagttgaaagtgatatctggagaaagatggtaaaggttgcagttaaccgaagtttcaaccagatcactgtagatggagacacgagtactaacgacacagtcattgctttagctagcggggctatcctggatcacccttctatatcatctttcgaactgtaaagaagccgcgcaccttcaggcatgcctcgatgcggtgatgcaaggacttgc

SEQ ID NO: 135745 - DNA, 725 bp, Arabidopsis thaliana
aaaaaatagtgtataccatgtttctcggaggcacaatctccactcctccagcttctctccggttaaggtccacattagaacccacaaaacgcagtcacacaagcatcatcacaagcgacgtttccagctgcaatgcaacgaaagccaccaagttactcaatcagcgacgaagatctcgaatccagaggctttcttctccgtcgaacaacagaaggacttaacttagaccagctgaattcagtctttgcagccgtgggattccctcgtcgtgacacggcgaaaatcgaggtggcgttgcagcacacagacgcgttgctttgggtagagtacgagaaaacgcggaggcctgtagcgtttgcgagagccaaccggtgacggagttttcaatgcgatcatatgggatgttgtggttgatcccatcgtttcaaagctgtggacttgggaaggcggtgatggagcggttgattgaggatttacaggtgaaagggatttgtaacattgctctgtattcagagcctcgagttctcgggttttatcgcccgcttgggttcgtctctgacccggatgggatcaaaggaatggtttttatacgcaaacagagaatcaagaaataaaaagtttgaaactttataaattttaatttcgtaaatgcacagattacaatgtctctttaactacactttcttgtgcgagctaagagagtaatgagaagcacttcttcgtct

SEQ ID NO: 135746 - DNA, 554 bp, Arabidopsis thaliana
  unsure (1)..(554): unsure at all n locations
ccactggtcgttcaaacatatataagaaaatattaaacctctgtttttgctggcgatcatggcttacacagacaaagttacgatatcagccgcgggtgcgacaatgatgctgtttctggcggttacgagcgtggatgcacagtcaatgccaccaatgccaaagtttaatcctgtgtgcgcgttggcggatctcccaaacatcggccaactttgctactttaacttggatttgacgccatctgaagagtgctgcattgatctcaaatcgtcgagcacgatacaagtgaattgtctctgtgacaatttcattgcacatccttccaatggcaatatctcgcaagctcgctacggcctggtcaacagcggcctgtgggtgttgccgncaaattcgcattgtaaaggaggggncgccagcggggggttcaacggncaangtttnctgatnaattggtctactttgggtttgnttnaagctgtcntttaattntttcantttgncttccaantntatgaattntaggatncccgnttttttttaagggtttgnttaaggg

SEQ ID NO: 135747 - DNA, 502 bp, Arabidopsis thaliana
cagtaatacgattaatcaggctgtgagaaccagacgtgaaccagcttctgctgcgggtactcaaggttttgagccatggggtttcgagacagaatccttgagagccgctgcaacgtctgcagctgctacttctgcatctggaacacaaagatctatgggctctggaaacagcacttcacagagatatggcaactcagagatgagagaaaaccagaaaacagctcaacctgctggatgggccggcttctaaaactcactcagatgcgcattgctatttcttcctcatgcaacaacaacagcttcatgttgctgccattacagaatcttgaatctttttgtagatgatgatcatcccctgtttttgtgctgctgctaaatataccccacccatatccattatgtttttatgtagagtcttaaactttacacattctctgagctgtggccagatatctcagcttatggattattattggaaaaataaataattcaagattcagac

SEQ ID NO: 135748 - DNA, 499 bp, Arabidopsis thaliana
  unsure (1)..(499): unsure at all n locations
agtaaaaaagtattttctggaccataaaacgaacatgatatactgtatcaagaaccaaaaaacaatgacacaaaaattaacaagtgttggccattgattcgatgagcaacgcatagccctctgggacaggcgactgcagacgcacacactcggctaaagcagggacgtccgatgacacgtccagaaactgagccacaaagagaagcagatgaaaatctgacatcttcttcaccaacggcaagctctttgcccggtccagatgtgtttttagagcccgcatcgttgctcgactgctccggttctctattgggaatattgatgacagaggcccctggtgatccaagatcctgacgagaacgaggaagaaatcgttatctacctccttaagatccttcacaccaacaaccacctncttcttcatcttagagagctttggatcatcgtccggcataatctccgtctcgaaccactcttccttgaacagcctgatgcacatatc

SEQ ID NO: 135749 - DNA, 602 bp, Arabidopsis thaliana
tttttttttttttttttttaacaaaaacagaacgaatattattaaagaaatttcgaacaaggaaacacaaacataacgtcaaaccataaactgatgacgaaaaagacgataagagaaacacagaaacgacatcaaagatccaaacttatcacaacgaaacaaaacgtcacttcctcctaaacatcttggagttacatactacataggaaccaattaatcctcatgatctgtcttatggagaaccaccgcttgaacttggaacaccaccaccactaggtccaccaccgagtccaccagggaaccccattgcaccacccaaaccaccaagcccaccagccccaccaagaagcggcgtcccactcgggagtgggaaagtcatgccagagccaccacttccaccacctggcatccccatgaatccaccaactccggcaacaccgccaattccaccgccgtagatgaagttcttctggtcctcaagaggggcattaaccatatgaggctcatctttggtaggagcagctcctcctcctggagaggcagagtctgagtttgctgtaaagtgcgagcacctgccccgacgcctgggtccatccccggaa

SEQ ID NO: 135750 - DNA, 1048 bp, Arabidopsis thaliana
agcggccgcccttttttttttttttttttgtcaaacctttttttcattcattcaaatagaaacaagtacaaagaaaagagtttaaaaaactcaaaaattacaacaagacaagaagaggcattccccaataccaaagaaagatagatagtgtttaacgatttaaaatccatgaaagcattgaggcaagggcaaagtagcgcattgcaacatgagaggtcacggtaaatcgagagatcatcctcgaagggttcgaagaacgacagattagtcacggtcgaaagacatagtgacgttgataaacgaatcaatgatatgattctcgccggagcaagctgcattacccatagtaacacgataccaatgattcgggagactatggtgctatagtcaggtgagggtggttttaaaatccaaagcaaatgcgggtctctccggtcaaatgcggcaaagacggtgaggcaattggtctgagggagaaagctttagagttattaaaccagcaaatgggcttgggcctttttggatgaattgggccaactgaagagtctaggtccactggggaaaaccctaggatctcttcaggatgccaaaacagagagtggttgcggcagccgtccgagaatggcgaagagatttgcagcacatggatcttctccgatgaatgaaggatcgatgaggacaggctctagccgtggttcgggtaaggggtgaggttccaggggttcacagcctttcctacacaaggaaccagatccgaaaaagggtctgtccaaggagatgcgaggaaagagtgggagaagggaagagcacaatgtctcaacttatcttcttctattggttttgaaaaccaatctgaaaccgacgcagggtgaggaacattgattggaagggtttgaaaaagtttcatcaaaaggaaaacaaaggggaaaagctttaaaagaaagaaaataaaaggggagactagataagagaagcgacggtgagaaaaacaggggtttggatccccggacgcgtgggtcgacccgggaattccggaccggtagggcaa

SEQ ID NO: 135751 - DNA, 411 bp, Arabidopsis thaliana
ggccgccctttttttttttttttttttttttgattagactatttattgttttctatcaatttgtttgcatatctgtactatcacacacattttttcaatctataacacacacacacacacaatgatcaaatgtacacatgactcagagcgtatgtaaatgtacacatgcaaagaaaaagaggcaaagcaactcatatctttttgatctgggaatccagcaaagcacgaccagtatggcagatccggtccctttacctaaacttatcccaccatgattaaccattcaatataagatgcaaacctggcacctgatccaggtaaccgagcactgatatgagtgttcagctgctaagccgattaataactctaacggctttgactggattgggcaaaggcaaatctactcgtact

SEQ ID NO: 135752 - DNA, 568 bp, Arabidopsis thaliana
  unsure (1)..(568): unsure at all n locations
agcggccgcccttttttttttttttacagcttgaggcacttattcattatgatttacaagaagtgtatactatacacacacatacctctgcgaacctaggaagcaatcaaatgaatttcttctttctatataactaacatctctatacataagtaacgtgtgagcttaggtactctattaactgattaaagagaactgggcgtacaataaatagtggttagtggaagacttgaggagcagtgtagaactcagattcgttgaaacctggtctgagatcttcttgatcacacatgaactgtaatgggaagcacacaaggttccctcttgtctccttcagaatctcccacgagtcgctgccgcatggattctagcctctccggtgcaatgcccaaggtcgatcgtagtgtgacccaacttgtccttacaaagagccatattggggcccaatgcagctcttgagcggatatgtccatccggggtgccgagaaacttggccgaaanacnggggtctcctaagnggtgccancccaaagccttgaangngcncctnntngnccccgnnntttga

SEQ ID NO: 135753 - DNA, 371 bp, Arabidopsis thaliana
ttattccattcttaacctctctctacctctctatctctctctcctcataatcgatccgtaaactcgccggaggagcagggagattcaataagacgatggctcagagaacggagaaggaagagaccgagttcaaagttctcgaaaccttgacgacaacaacaacgacgttatgtaccaataactgcggcgttacagcgaatcctgcgacgaacaacatgtgtcagaaatgtttcaacgcatctctcgtctcggcggccgaaggtgttgttgaatcagggttcgatcttgaagagatcggctagatctgtcaatcttcgttcgtcaccagctaaagtcgtgattcgtccaagagagatcgatgcggtgaagat

SEQ ID NO: 135754 - DNA, 497 bp, Arabidopsis thaliana
cccacgcgttcgcccaggaactgttgaagctgctaaattttttagcatggttgtcaaccgtcgtactgtctacattaagattcctgctactgctccatgcattccttccatcagggatgtcattgcagctggaataagtgtcaatgtcacgctcatattctcaatcgccagatatgaagcactgatcgatgcatatttggatggcctcgaggcgtctggacttgatgacctctcaagagttaccagtgttgcttccttctttgtcagtcgggtggatactctcatggacaagatgcttgagcaaattggtacccctgaagccttagatctccgtgggaaggcggctgtggctcaagctgcattagcatacaagctataccagcagaaattctctggcccaagatgggaagctctggtaaagaaaggtgccaagaaacagagacttctctgggcatcaacaagtgtaaagaacccagcttactctgacaccttatatg

SEQ ID NO: 135755 - DNA, 501 bp, Arabidopsis thaliana
  unsure (1)..(501): unsure at all n locations
gttggacttggcgataaagtttctccctctgatattgaggaaggcatgcgtgttggagttgatcggaataaatatcagattcagattcctctacctcccaaaatcgatcctagcgtgaccatgatgactgtcgaagagaaacctgatgtaacttacaatgatgttggtggatgcaaggagcagattgagaagatgcgagaggttgttgaactgccaatgcttcatccagagaaatttgtgaagcttggaatagatcctcccaagggtgttctctgctacggacctcctggtactggtaaaactcttctggctagagctgtggccaacagaaccgatgcttgctttatcaagggttattggaagtgagcttgttcagaagtatgttggtgaaggggctaggatggttcggggacctttttcaattgcccggnccaanaaagctnaattgtttttttncggagtnnnnccnttggnggcnaantttttaangtttngggggna

SEQ ID NO: 135756 - DNA, 409 bp, Arabidopsis thaliana
gaacattctgggtgcaatcgagcggagatgttggcttgttgcttgcgaaataaacggcgcatgaaaggtaaactctcatggaagtcaaagaagagagatttgtctcattcaggaaactgggcaccagaagatgacaatgatgaagggaaaatcgttttctttggaggaagtaactatacctttgatttggatgatttgttagctgcatctgcagaaattttggggaaaggcgctcatgttacaacctacaaagtagctgtgggagacacagccacggtagtagtgaagaggattggagggcggtgggttgttgggaggagagaagtttgagccaccaatttggggttccttggtagaattcaggcctgtttatgttgccgagcttaaagcctactactattccaagatc

SEQ ID NO: 135757 - DNA, 635 bp, Arabidopsis thaliana
gcagtaccgctccggaatttcagggtcgacccacgcgtacgccttgataatccacccaatcgctgtcattctcccatcaatctatctgctttcacaaaccattgtactgagatcgtatctttaaggtaaatttcaaatcggagtcggcgagatcgaaataggaacctggaagtcggagaatttgtgtaaatccggttttttttttttaattctccgatggatagtttaagtgatatcgatggtgatttcgatggaagaaatgaacgaggatcgtcatcggattatcgattgttgggtcggcagattacggttcatcagttcatgggtggtggcaaagctgctgacttgctcttatggaggaggcgacatctttctttgggggttatcattatatcaactgtagcctggcttatattcaagttttccgggttgcctttcttatctggttcttcggatgtcttactcatcgtgatcatgatatcattcgttcatgcccgggtttctgtttttaggaatagacagttgcattcgttgccagagcttgttctatcagaggaaatggtgaatagtgctgcagcttctttccgtataaaactccatcacttgcttgtaatggctcatgatgtcacagttgg

SEQ ID NO: 135758 - DNA, 514 bp, Arabidopsis thaliana
  unsure (1)..(514): unsure at all n locations
ggttttagacttttagtcttaaaactaaagtctcttatcttgtagcccaagtctcagacatgatgaacaacaagccacgaaaaagataaagagggcaggaagataaacagggtagtgttcaagtaacatggacacttagttctcttattgatacagatccttattgatgaagagaaaagctgtgtatttagacattaggaggtggccaaatcttcccgaaaagctcttcaacacgtttcgcttggttcgcataaccttcaacaccggctgataaaagctccactgatgcaggacccatagatgaagccaagcttagctggtcccatttgaccagctctttgttggggaagtgggaatggggttgcagttccgggggtaagtttcccgaacaaaggggtattttccaccccggggatgggggggganctttanngattgnngnccctaatgggggganggaaaatcgcccccggaagntggaaagcctntttntccggaaaagnnccccccttgt

SEQ ID NO: 135759 - DNA, 617 bp, Arabidopsis thaliana
  unsure (1)..(617): unsure at all n locations
agagttcccagtcaagtttcaagtcaaccagatttactggagtttggacaacttcagcagttatttcactttagagacagaggttcctgggagctaccttttctacaagggtggctgatggctcaaagccaagctggtgctaattcagtggctcttcctactggtagtagtggtcacgtcaactcaactccttatatgggttcttcttcagcatctcattcatccacagccagtctagaggctggagtagcgtcattagaaattcctggtggtgttaacttatatggggtttctgcaagaggtgactcccgggaccgaattctacagtcccgcttcgcaggatctggtttagcagaaggtcgttcctctcgtaacactcaacatgaaggagctgatgctcaacctgtggtaaacagaatcccttctgaactggctagttcaattgctgctgcagagttgccttgtactgtcaaactgagagtgtggtcacatgacatcaaagacccatgttcaatactgaagtctgacaaatgtcgattaacaatacatcatgctgttctnatgttcaatactgaagtctgacaaatgtcgattaacaatacatcatgctgttctna

SEQ ID NO: 135760 - DNA, 536 bp, Arabidopsis thaliana
aaaccaaagtatcaaacaataaaagatttttgagaaaaaagagagagagatcatgactactactccagattggatcatgattggaggagacggtcctgagagttataaccaacagtcctcgtatcagagagcattgttggaagcgacaaaggacaagatgaccaaggcgatctcagccaatctcgacctagactttgatttcgaatcgcttcattgtagcggatttcggttgtgcaagtggacctaacacttttgtggcagttcaaaacataatagatgcggtagaagaaaagtaccgtagagaaaccggacaaaacccggcagataacatcgagttccaagtcctcttcaatgatttcagcctcaatgatttcaacactctcttccagacacttccacccggaagaagatacttcagcgctggagttcctggttccttcttcgaacgtgttcttcctaaggagagtttccacatcggagtcatgagttacgcgttccatttcacctccaaaatccccaaagggattatggaccgc

SEQ ID NO: 135761 - DNA, 684 bp, Arabidopsis thaliana
gggtcagaaaccgtttgaagcttttgaaccatcttatggtgcaagtttgtcccatttcgacgatggtcttgctgctaagtatggtggtttcggtggaggctatagaatgccggatcctcctttcctaccggatcagtttccattgagaaatggtcctaacgagatgtttgatttccgaggatattcagaccttgatagagggattggtcaaagagaatatccacagcagtacggtgggcacttggaccccatgttagctcctcctcctcctccaaatctgatggacaatgcattcccattgcaacaacgttatgcgcctcatttcgatcaaatgaattaccagaggatgagctctttcccacctcagcctccattgcaacctagcggacataatctcttaaatcctcatgactttccactgccaccgccaccacctagtgacttcgaaatgagtccaaggggttttgcccctggcccgaacccgaactacccttatatgagtcgatctggcggttggattaatgactagatcagcactcattatccttgtagttgcaacattagtagtttgattgatcttttgtgtctcactctacgaaagtgtaggaagaatagaagaaatctataacttttctctgccactcacatgtgtagctagtgggcctttaagcagtttaataatat

SEQ ID NO: 135762 - DNA, 567 bp, Arabidopsis thaliana
  unsure (1)..(567): unsure at all n locations
tctatagcgggcgcgctcttttttttttttttttgcgagcaagggctcttactatgaaggacaaacaagactttgatgacgacgatcttctttcttcaagacgacgaaacataaatattaaaaaatgacagagagcaaaacccagttccgacacacttatacatcaatgacccacatgtcggaagcagagcatttttcatgtgaactaaagaaagaaggtagttagtaacaactctgatgacataagagagacacacccgaaatttcaatccactcccttgctcttttcgggaagctgactacgtagcttgtagtagtgcatgcttagctattctttgaaagggtaaaatcttcttctccgggttttaccaatcggattttattcctccggtatgcctgttgctcttcttcgacgacgccctgatctggccaagaagcttcttttgggaacnggaaccctgncaggtccanaatggatcncagaccgggancctgagcgagtgnttgacttggccccacgaggtgaaagcaggnccngncncgngaagggggatttgtggccncgaa

SEQ ID NO: 135763 - DNA, 505 bp, Arabidopsis thaliana
aaatgcaaaattttattgcaaaaccgtattagagtattggagttaagtcgaaaacaaaattccattcgtggtataaaaaaaaagaatttgaagtagcaaaaatagaaaacttacatatttgtgtactcctacccggataacaaaaaaaaagtgaacatagaaacggtatcaggcagagttggaagaagaaggaccagaaggaagcaggtcgtagccatcgtgatggtgacgagactcgacaggtacgcatttgaggataacggctacaatcatgctcaatgatcctatcaagattgatagtaaccaatgttgccagctcagaggaacggtgctagcaaatgctccaagaaactccactatgatcacttgaaacactaccgtcacagtcattacccatgtgaacacccagctattgaacattcctttgaacacatttatcttctctatttcccggctattgatctcattgaacacctggcaaaagacgaaggagttgaagatgact

SEQ ID NO: 135764 - DNA, 552 bp, Arabidopsis thaliana
  unsure (1)..(552): unsure at all n locations
aatcaaatgcaacaatttcttccatgctgcaagttccgttgtaggaaaacccaccttcccctctggctgtcttgctgctgttttccatcaatctgtgccacaagaatcgcagtcgtcatctcctgccttggactacttactggtttacactccatcaggtcatgtagttcaatacaaactcattccatctcttggaggagaccaggctgagagcaatacgcggaatggagcaaacttctgggctgacccctgaagagggactgagagtgaaaggtgaacccagttcagtgttgggatgtctgtcgaagagcggattggccagagagggaggagaacatatgcgggcttacttatggtggacgaaaaaatgctgagttaactgttgatacttctgatagtgaagatcaaacaaagcctctggagaaacaccatgtttatcttgccaatgcagaggtgctgataaactccggaagaaaaccaatctggcaaaattcagagatatctttctatccgatgtatccaccagactctgnatggcagaacctgaattcg

SEQ ID NO: 135765 - DNA, 463 bp, Arabidopsis thaliana
gtaagcaaacgtggtatggtttaattctctattttggtgaagaccctgccaagtgcccttttgaacaagtagtgtcgactcttctaaactttgtaagactgttcaatcgtgcacatgaagaaaacggaaaacaactcgaggcagaagctaagaagaatgctgctgaaaaggagaaaccaaaaacaggtggattagatacagaaatcaagaagcccttaaatgaagaagttaaggaggagaaaacaaaaacaagtggattaggtaaaggaatgagtgaccggctaaaggtaagaaccgctccttgaatgaccggctgtaccggttttctatatgggaatggtctaagaccgaacgggctttgagaagaaaaagcacccggtgaagccgtgcgtaaaactggctttagaccatggaacaacagggagtgggatgctaaggacaacaatattttatctctttaacg

SEQ ID NO: 135766 - DNA, 527 bp, Arabidopsis thaliana
  unsure (1)..(527): unsure at all n locations
caaacgaatatagagggaaaatcgagtgacaaaattcatgctggtctcattcttgtattggcgcagctctctgtcttcatcgaacaaaaggtcatcccgagagttactgaggaaatagctgcttccttctctggtggaaattcccaagcctttgagaatggacctgcttttattcctggagaactttgccgggtcttccacgcagccagcgagaaacttctccagcattacatagacacaagaacacagaaggtatcagttttactgagaaaaaggttcaagacacctaactgggttaagcacaaggagccacgagaggttcacatgtatgtcgatatgtttcttcacgagttagaaggaagttggtaaaagaagtgaaacaagttttacctcaagggactttccgtaagcacaaaaggccaggcagcaacggaagtaccactcaacctatnacgggnaattcccccntaattgttagntggccggccaattnncaaggggccgtgnacnttttgggcnattttcaa

SEQ ID NO: 135767 - DNA, 544 bp, Arabidopsis thaliana
  unsure (1)..(544): unsure at all n locations
acggcggaaacccccgntgtcttttcccatctcggggntcaatcgnaaatcncatacacagtccncctttcagatcccaccaaccttgttccccgccatcagagctttcaagagctcccctttcaatgggtttcttatcttcatcactctctacttcgtcgttgtgaggacccctaatttcagcaggtacgtcaggttcaacacgatgcaggcgattgtgcttgatgtgttgttgattttcccggatttgcttgagaggagctttaatcctagagatgggtttggtttagatgtggtgatgagtttggacagcacagtgttcctcttcttgcttgtctctttgatctatggattctcggcttgcttgtttggtctgaccccgaggttgcctcttgttgccgaggctgctgataggcaagtcctttgattcaataatatctttgtatgtaacacatttgctgtgattaaaccttctgtattggatcgctttctgataatcaaaacatacaatgtaactttttgatccaatgaaaaaggtttctgc

SEQ ID NO: 135768 - DNA, 526 bp, Arabidopsis thaliana
aaatggcaataatatctcagttttttgctccattaccatctctcaccggaaccctaaccctaaccggtcgttcttttctccctctaaaccttgatacccaattcccaaaacctagactttccagggacagagccgccacactcgtactccaatccaagggtgatgattccgtcgatgcatcggatcggataatctcagccgtctgttacttctacccattcttcgatgggattcaatacggcaaattcatcatcacacagtaccacccttttaagattctcatccaacctttgtttcccgccatcagagctttcaagaggcttccctttcaatgggtttcttatcttcaatcaactctctacttcgtcggttgtgaggacccctaatttcagcaggtacggcaggttcaacacggtgcaggcggttgtgcttgatggggttgttgattttcccggatttgcttgagaggagctttaatcctagagatgggtttggtttagatgtggtgatgagtttggacagcaca

SEQ ID NO: 135769 - DNA, 486 bp, Arabidopsis thaliana
  unsure (1)..(486): unsure at all n locations
tctgagattaacgaattctttagcattttccagtcattctctaacgtcgtccgtactgttccgaggaagcaaatcgatcggtactattactaagatagcatcaacaatcaggacggtaaaaatggcggcttttgctgggtctgactcagaaacaacgtcgtctacctcgagagttatcgattctcatctccacatttgggcttctcctcaagaggccgagacatatccttattttcctggccaagaacctactttgactggtgatgtcaatttcttgcttaagaacatggaagaggcaagagtagatggagctctcattgtgcaacccataaatcacaagtttgaccattctttagtaacaagtgttctgaagagatacccgtcaaagtttgtcggttgttgccttgctaatccctgcagaagttgcaatngnattncggncctttngannttnttttagggaataacggcctttcggtananccc

SEQ ID NO: 135770 - DNA, 484 bp, Arabidopsis thaliana
atgaagatgatgttagccatctagaggtttatttattcgtggaatcgtctggctctccaaacatgtatgttcatcatcacataattataccagacttcccattgtgtactgcatggcttgattgtcctcttaaaggaggggaaaaagggaattttgtagctattggttcaaaggatacaccgacaatcgagatatgggatcttgacgttagggacgaggtgctaccttgtatacaactaggaggaatagaggagatgatagtgagtaagaaaaagaagagcaagaaacagaaaccgaaattcaaagaaggtagccatactgagtcagtacttggtcttgcttggaacaaggagtttcggaacatacttgctagtgctagtgccgacaaaaaagttaaggtctgggatgtggctacttgggccgtgtaagattccttttggggcatcccacaaagggggttcaaacgggttttttgaaccttttc

SEQ ID NO: 135771 - DNA, 558 bp, Arabidopsis thaliana
  unsure (1)..(558): unsure at all n locations
ctggtttaatgttttagatattttccattaccagattctttacattttcggtgatcttgtatacacagacatttttttcgttaccagattctttacttcactctaatgaaggaaaaacattttttcacacactcttccttgattatgatattggatccaaagtctgaaagttctaatcgtggtttgctaaagcataaaccacggcggttctacacggtgcatagaccatgaaggagcagggtcgttcgtcgtataagccatcataagtgaagtactctgccttgcgatcgagcctattgaatccaccaaagagaggatcgtccgagtccaatacgatcttatattttccaggcttggagcaaccaatgcgggaaatccaagtagctgctggtccagtgaaagtaaaggccaaagcggggttaccnccttcgganacggtacccaanngggtcggccttttggggaaagaatgggggcccgaggnctnaaccggaatccctcaaaagtggatgncgganaatcctgagcccggaccggnaaccgncccanaaaatgggg

SEQ ID NO: 135772 - DNA, 442 bp, Arabidopsis thaliana
  unsure (1)..(442): unsure at all n locations
ttttgcatcatttgagtacagagaatagaaggaagattgcttttgaagagcttgttcgtgttgttaagcctggtggatttgttctcattactgtctgggctgctgaacaggaggatacatcgttgcttacgaaatggacacctttgtctgctaagtatgttgaggaatgggttggtccaggtagtccgatgaatagtcctcgtgtgaggaacaatccgttctttagtcttgagagtatcccagagactgaggtgagtacaaaggagcaaaaggttgagaacagtcagttcatcggtcttgagagcattccagagagcgaggagagtacgngtgancagaaaggtgagagtattattccagaanccaangctngtatagtagncaaaagggtgcgaatctnttnngggggcatttggaggncttnagnagggtcaccaaggtc

SEQ ID NO: 135773 - DNA, 566 bp, Arabidopsis thaliana
  unsure (1)..(566): unsure at all n locations
gtctaaatcatatttctgacattttgtttatcatgtagagaagattctttctttgatttgtgttacacataatacaaaaccccttaaagacaacaaattgcagggattttgagctgccacagaatctcaaactacaaccatgaaaaatgcaataataatttccgattacatatgcaatggagttccaatatcacaaagatttgataagtttgaaaccaaagttcaatcttggtttaaagcttctttctgaagaacaatacaccaattcgacttgtcgaaaaatctatcaacctatcattgcattggcctactccagatgccaaccctttcaaggtcggccttcggctaaaggacatgggtagtatcnggtnggacacaaaagctcccttttcnnaacaccttcctttggaagnccncttggaagtgcagacgccnnntggnccactccctttagcncngggggggaaggggaaaggcnagggggccaagggaccctgggggncccttttncnnggcncccaagggnccccaaaggttcccccccttgggccaaaaaaangctgggg

SEQ ID NO: 135774 - DNA, 423 bp, Arabidopsis thaliana
atccgatctactggatcattgcttcttgcattcttaattggatctgttgcgacgattgttggaacagtggtggcttttatgttggtaccgatgagatcgcttggtccggataactggaaaatagcagctgctcttatggggagttacattggtggatcccttaattttgttgcgatatcggaggctctacagatatctccatctgttatagcagcgggtgtagctgtggataatgtcatatgtgctcttcacttcatggttttgtttgcgttggcctcaaagataccccctgagaccgcctcaagcatcttcccctgatgctgacatggctaaggttgccaagctcgaggccaagaacagagtggtttcaacctcaattgcactatcagtttccttcctgatatgcaaagctgcaattacgtt

SEQ ID NO: 135775 - DNA, 543 bp, Arabidopsis thaliana
  unsure (1)..(543): unsure at all n locations
gagcttgaaacggaagaagctattcaagattctgatcggcaagatattaaaagcgagtttattgcaatggcatcaaccttatctaaagagatggaaatgatggaagcacagttgaaacggtggaaggacactgcacaagatgctctttacctgcgtgaacaagctcaatcgttgagagtttcgttaagtaacaaggcagacgaacagaagggtttggaggataaatgtgctaaacagatggcggaaattaaatctctcaaggctctaattgagaaactactcaaagaaaaactacagctgcaaaatctagcaagcatctgtacgcgtgaatgtaatgatgacaggggactggcagaaatcaaggattcacaacggaaagcccaagctcaggctgaagagctgaaaaacgtttttgatgaacactttcttgaattttagagtnnaagcgggctcatgagnccttagagttcttttccaanaaaggcttttttaccccccaaggcttnaantttcngaattttggggnccccccttanannnttt

SEQ ID NO: 135776 - DNA, 501 bp, Arabidopsis thaliana
  unsure (1)..(501): unsure at all n locations
cgaaagatacgaggagtgaaaatggccatgatgatggtgaatcttctgcttctgctggcaaaactgtaaattatgactctcacgacgagacagattcagtttcaagcgtcaaccctgacaacggcaaggacaaggatcatgggaagtatgacagtggttttggatttggatttgggtttgatgacttcagtattaagcctataaaaactggttcgaccatttcaaatgacttcctccctcctaagttatctatatttcctgattccgtcccaagcccaccggcaaatgcatgcgacgtttcccctacaaaacccttcctttgtttgctgattcagttccgggcacttccagcggcggacaattgcctctttacccagggccagaaatcattttttgaatgacttggtcccgggcaacttctggttntccanggaactttgttttctgagnagnaatccttcttttncggntttttcccgngaaccccttgntttccaggna

SEQ ID NO: 135777 - DNA, 449 bp, Arabidopsis thaliana
cggtgaaagatgacgtcagagtgatcgagggtcctagcaaaggtaaacttggtcctgtaaagcatatctacaaaggagtcttatttatatatgatcgacatcaccttgagcatgctggatttatctgcgctaaatgcacatcatgcattgttgttggtggatcacgttctggtgctaatagaaatggtggtgattcgctttcaaggtatggcaatttcaaggcacctgccccagtaccctcatctccaggaagatttcaacgtggcagaggcggaggatataataactctggagggaggcatgggggtggaagaggacggggagaccgattctttatttgggtactactgttaaaaatccgtcttaggacctttcaaggggtataggggacctgtagtagaagtgaaaggaaattcagtgcgtgtagaacttgagatgaagattgtgac

SEQ ID NO: 135778 - DNA, 474 bp, Arabidopsis thaliana
  unsure (1)..(474): unsure at all n locations
attttcccgataggttagaagattttttatttattaacaaaattagatttaatacatgtcgatatctcatcaatcatatgagttaacaactttgaaaactctactttatatattatatatgtttgtattaaaattataacaatttcttcttcttctttttttattacaaataagaccaaaccaaaataaaaaggaaaaaaagaggaattgtgagctttaaaacaaggcatacttctgggtccagcttcgagccatggcttccatatttggtcttgtcagttttgtatatgtgagcnatcctgggcaccagaggggtcgtcaggggtttgggatctggttagaagagaagccatatagagagaagcacctataatacccaaatggttagtaattggggttacctatgggagctcctggggtaaatnccaancnggataatgggattataggaaaatatggccaatacctaatccc

SEQ ID NO: 135779 - DNA, 379 bp, Arabidopsis thaliana
aaaataaactacctagctactttgtgaaatcccaaaaaattattacacattttgcccttttgtcatatgcgggtaaatgaacgctatcatacgatcttcaacaatcaatgttcatcatttaaaccttccatcgccgcaacatctcgatcatgatctcgttccacgtgtcgacaggaccaggtagacaccaatgcaaacaatcattaggaattctctccggtacaccgttcttgaacgggtccgcgtacatgtacggaccaggatgtccgcctggtctcagtaccgacatagccgccacgtccaacacctttaacctcaccttagccgcagccgccgtatattcctcaatttctattttgcgcatgtccaaggccagacc

SEQ ID NO: 135780 - DNA, 514 bp, Arabidopsis thaliana
cttcgagtccaatgttggagcaacattctgcaaatgtgtaaacagtgttgtggcaactatattagctggatcactaggcattgctgttcattgggtcgccacacaatcaggaaaagctgaggtttttgtgattggatgctctgtttttctctttgccttcgcagctacttactcgcggtttgtgccgtcattcaaagccagattcgactatggagcaatgatctttatcctcacatttagccttgtctcagtaggcggttaccgagtagataagcttgtttgaaattggctcagcaaagaggtatcaactattgcaattagggaccatcctatttgcaattatcatttcctgtccttccttcttgtccggatttgggcaggatctcagcttcaccgtcttattgaacgtaacctcgaaaaacttgctgattcgttagacggctgtgtagcagagtactttaaggagaacgaagtctcaacgaatcgaaatgaagatgaaaacactaacatgaaa

SEQ ID NO: 135781 - DNA, 385 bp, Arabidopsis thaliana
cgagaaacataatgatgagattgctgctcttgagacttgggatattgggaaaccttatgaacaatctgctcaaattgaagtaccaatgcttgctagggtgttccggtactatgctggttgggcagacaagatacatggaatgacaatgccaggagatggtccacaccatgtgcagaccttacatgagcctataggagtcggtggacaaatcatcccatggaacttccctcttctcatgctttcttggaaacttggaccagttttagcttgcggaaacaccgttgatctcaaaactgctgagcaaactcctctatctgctcttgttgttgggaaactacttcatgaggctggacttcctgatggagttgtgaatatagtttctgga

SEQ ID NO: 135782 - DNA, 558 bp, Arabidopsis thaliana
  unsure (1)..(558): unsure at all n locations
atagaaaagatagaggcattacaagataatcacaaaactggagataagattcagatgttttctctgatgataaacaagattcaaagtttctttataaactattgaggaatataagattacaatatacgagtctcacaagataaaagttaacgttcattagaacagtatcacggttgcacaaacttggctaataaggccaggtccagaatcttgacgtcaagattatcatctatcttaacgataccgtcagacccgtcgattccgatcagcttacctgtagacccacgatactgaccgccaactattttgacacgatcggatttcctcggagggaattatctccagttcgcttggggagggccattatagtggcaccttcaccgctggacccgagagacactttacacggtccatccgaaacatctcgggtgacgnccacatcggggtcctctccagccttgggatgcanccaaaaatcgggatgaccaggttcagatccccctatacagggcatgcatcgggcagtccagngcatggtgccccgggaccagaagatga

SEQ ID NO: 135783 - DNA, 576 bp, Arabidopsis thaliana
  unsure (1)..(576): unsure at all n locations
ctctagatacattgtagatcccaatcatgatgtggtttctatcacttgcttttagccttaaaaggggaaaccatgccgaagaaaatttcggatacagaactaagcaaaatcatacactaaaggcttatatatacacatgaaaacttcttcggtttaaaatcttcatgtatgatgagttttcgatgtgtaattgaaagtgatttaggaacttagtggtggttgtttagtgttgttgtctccggttttctttttcgaatcttgttcgaaatctgcaagatttgccagttcatcgactgcttcaacggctggttgaattctagctgcgttttcgattaacaacgaaaccaaagtggcaactggaaggacctcatgtaggctcatggacgtggtcncnctccgctgnctacttggtcncccctcagatggactcctcaggctaatgggtcaatggacaattttnaagtctgagccctgactgnggtcaacaaaccagaaccacctcgggnttcccgggcncacaaccgaanccnaggttganacggccgtcnaagccccganggctgccggcgggcctnt

SEQ ID NO: 135784 - DNA, 522 bp, Arabidopsis thaliana
  unsure (1)..(522): unsure at all n locations
aaacacacaaaaacaaacttcaatgtatgtgaaaaagggttaataagacacttatgatttgtttggggtttaattaagtggcaactgtttatttaccaatgcaaaacttagcaaaaatggaagataaaacctcttcagagacatcttgaccactgatttgagcaagagataaagcagcttctctaagctcgatcgtccagaaatcaatcggaatctcgtcttcgatagcttctctcagcctcactagcgcttctttcgtccgcaccaattgctcgcattgtctctgattcacagtccattgatgtcctccagtggggacacgatcaagaccaagaatctccaatattgcatcttcaagctcgtcaattccttgaccagttacagcagaagtgaagacagccttatggaacttctccctttncccggactccaagtgatcanagtancagggggggcagcaatttgtcacncnggatcaaggttgcnnntgggttacgnaagcngggnttttagccanctgaa

SEQ ID NO: 135785 - DNA, 459 bp, Arabidopsis thaliana
  unsure (1)..(459): unsure at all n locations
aatctcccccttttgttcattataattttgtgtctccctatcaaattttgtatccctagtatagctaccggcattacttttcccgctaaaatcatcccctggacgctcaaacttggcatccctgtcactcttaggaccctgaatctccctcttagtctcaccatacatctctctcccatcattcctagtatagcttccggtattaccttttccgctaaagtcatctactgatctctcaaatttcacatctctgtctcccttaggaccctgaatctccctctttgtctcaccatatatctctctcccatcactcctattttctgctactctcaaccctaatttccctgccatccttagcaccaatctctcggctccatcggcacaaggggggggggcaaatgggggtcctagaagnaaaggtgnggggagcgagggggccggtnngnaagaggnaggggg

SEQ ID NO: 135786 - DNA, 293 bp, Arabidopsis thaliana
gaagaaaaagctgacatggcaaagtggtgaatctagagtgaccaatgtgaatgtgacaaataagcctttagtgaagagattaggatgctcatgagccacaagttataatgttatatattagcttatatcaacatcacttccagttaccaagaaataaatctttttttttttgtgaattgtggagtaatcttgataagttgagtttttcagttgctcactgaaacaatattgccaaaattgtaatttaattctttggggaaattattacatccatgaaatgaatatttactccc

SEQ ID NO: 135787 - DNA, 465 bp, Arabidopsis thaliana
caccattggatatagagtcagttattaacaaaataaccagcatgtttcatagacgtagaaagtgcattagatacagcaaactatgacaagcttcttcaaagcggattgcagatagctattgttggacgtcccaatgtcgggaaatcaagtcttctaaatgcctggagcaaaagtgagagagccattgttacagaagttgctggaactactcgagacgttgtggaagctaatgttacagtccgcggcgtgcctatcacacttcttgacactgctggtatcagagaaaccaatgacattgtcgaaaaaataggagttgaaagatcagaaacagctgctaaggttgctgatgtcataatcatggctgtgagtgctgtcgaaggctggactgaagaagacactgagcttctacgtaagatccaatcagacatgcctatgattctggtgatgaacaaaattgactgtgct

SEQ ID NO: 135788 - DNA, 571 bp, Arabidopsis thaliana
  unsure (1)..(571): unsure at all n locations
attttttttcacatacttctttgtagtgctactttccattatatcaaacactcagcaacctgatggcaacgagacggatattgaaagaattgaaggagttgcaaagagaccctcctgtatcatgcagtgcaggtccaacaggagaagatatgttccactggcaagctactataatgggtccgaatgaaagtccttactccggaggtgttttccttgtcaatattcatttccctcctgattatccttttaaacctcccaaggttgtattcagaaccaaagtgtttcacccaaacatcaacagtaatgggaacatatgtttggacattctcaaagaccaatggagccctgcccttaccatttctaagggtgcttctctctatatggtccccttctaacagatccaaaccctgacgggcctctgggtgccagagtagccccattttcaaaacgggcaaggccaaatttggggcatgggtgaagtgggcccagagatgcctggtttaaggcaaatcccctttttcctttaattgggnggctntgaaaaaagggggngattgttattatcaccttt

SEQ ID NO: 135789 - DNA, 464 bp, Arabidopsis thaliana
  unsure (1)..(464): unsure at all n locations
ggcgaggattcttatgtcagagaaatgtatttgaagggacgaatgtttttcctctatgttcatagctacctacattacgggttactggctgctcgggctgagattttgaaagtttctgaggactctaacaacccctgtatcgcgactggatatgctggtacctacaaatatggaggataagcgtttaaagctgcagcttctccatccggtgcaagtctagatgagtgccggcgagtagctattaacgcactcaaagtcaataattcattgcgtacacacatgaaatgcacttttggtggagtatggaatggtggaggccggtngttgnccagaaaggaaaattnttttgtttgcaanaattttttctttcggatccgagcccncagaaggcttggtttttttttngcccccaacccaaccctttttggctttagggttctgncccnctttgnnctttttngnaa

SEQ ID NO: 135790 - DNA, 491 bp, Arabidopsis thaliana
  unsure (1)..(491): unsure at all n locations
ctattaacagaccgccatcaaagtaaaagcacacacaaagaatatgattactgcggggtgtgttagcagaaatcataatctaagatttcaccccactatcactaaaagggcagagaaacaaaaaacaaaaacaaaaatctagtgtctatgggtcggtagaccgtaggttacagcaaatcacaaactcctttggtctctcatatcactgaggtttctatacaaagatgaaagaccaaaccaacctaaatgagaacaataagcctacactctctttcactgtgttagtcaaagtaccaatgcatctgttgtttggatattacaagccaccatagatatcactgttgttgaagaagccatcttctggagaaaatcatgggtccgtaaccgntatatcttctgaaaaagggagggtggttgtttgaagatgctttaaaactattggatgcggctgggaactcggctcctcctgagatattggaagagagcagttg

SEQ ID NO: 135791 - DNA, 497 bp, Arabidopsis thaliana
  unsure (1)..(497): unsure at all n locations
ttcccgaagagaatccaagcatgttttctctataatgaatgtttggagttacaactagaaatagagaagaaaatcggatgaaactagttcaagatattggcaagttcaccattttcatacattgaggtcaaaatatcacatcctcctacaagttctcctttcacaaatatctgtggaaacgttggccaattgctgtagttcttaagcgtctcccttagcccatgattatactcatcgtcaagaacatcaacagtttcataatcaactccttggctttcaagaatcccaacaactctctgtgagaatccacattgaggagcactccttgatccttttatgaaagctaccactttgctctctttcactaaacggtcaatcagttcccccaaaggaaccgtgagctcaacatggcgacctggagtgagacgggtatcgggttctccncggggtggttgcaangggtgtcctgctatnccggggnatttcagtacttanag

SEQ ID NO: 135792 - DNA, 481 bp, Arabidopsis thaliana
  unsure (1)..(481): unsure at all n locations
nnnnnnnnnnnnnnnnnnnnnnnnnnnnnnnnnnnagacaaaagaataaggcacacacatttatattcaaaaactaagaacataggtcacacaagaaagatgcatacatcacatggcaaaacaaaaaaaaacaaaaaaatataaagcctggagagcagatgccaaatttttaactatataatttggcatttatagcttaagagaaaatacataatgggtgtagataaaacagtgatagtactgtaaaaataaataaaatagtacatttagagagactttacagctagaaaacgaggctctttaggcatgaacttctggtttgcataaacatccatgtaatctccaaacacaaactttggatacttcttctcacttccttcctcttccgccaccgcggctggccctatcgccgccttgtacgacggattgtagaaggaagctatagaccttctgtttccttccgccctcgccaacaacctgt

SEQ ID NO: 135793 - DNA, 424 bp, Arabidopsis thaliana
ccccaacatcgctgttccaacacagcttgacgctctcatagcttactacttcaacacttcttggtcagcggataatcctctatggtctacaacggctacgcagcccaccgatggctctagaccagtaccaccgccgatttcgtcagaacaagtcttcttcacaaacccacttcaacaaaatctgagaacagttccaaacacaaacacaactagtcccatttgttccgtcccaaccgacaagaaaaacggtcttgcgacaacacggaatccaaagaagagatctcgagtctcgagacgagcgcctacgactgttttgaccaccgacacatccaacttcagagccatggttcaagaattcacgggtaatccttcaactcctttcaccggattatcttcatcttttccaagatcacgatttgatctc

SEQ ID NO: 135794 - DNA, 503 bp, Arabidopsis thaliana
  unsure (1)..(503): unsure at all n locations
gcttgatatcgaattcgcggccgcgaaaagcgaaggaagtaatggatctcctagtacaagtccagcagctacacttttcaatgggattaagaagagcacttctaaatggcagctaaaagggaaaaggaattcaaggcagatgagtaaaaaacaagtagaaagaagaaatgcgtacgccgaagaagccaacaacaatgctttacctcattggtctgtctctgatcaaaagccacgcagtcttttcagcgttggcactcaagctatgggaagaaattctgaactgtatgacgtgaagatcgaggtaaaagctaactataaaccccgtaatgttccgctgatttcccttaggagtaaactgaatggtgaagctattgtcgggcatccttcaagtggttgaagtgcttgaaggtggatccatgtggccacattgttgagtaggcataggattgatgatgcgaccaaaaccctcatcaaaaangnatccanggaangganccccattt

SEQ ID NO: 135795 - DNA, 531 bp, Arabidopsis thaliana
  unsure (1)..(531): unsure at all n locations
ggttggcctctgagaaagctgatgttggaccttatggagcttgggaaggtgaaacacctcaagtgtttatgactcccaaactagtgaacaacgagagtgaagctggcacagattcagtgcccttaaaaccagttgaacaggcattgattttggcccagtgccttctaattgaaaggggtagtcggcacgatgcaatgcaaagttgggatatggctccatatattgaggcaattgattctcaaaagtcaacctattttgttctacggtgtttttgtgacttattgcgtgttcgatgggaatcatctcgatatcgtacaagggaacgcgcccgggatatgatggataagcctggttggagctattagcaagagcggtccctgggggtatcaaatcggtcccctttatgctatgcagtgtatcttccctactattccctgctttgagaaaggaatttggggggcttctggtgagttgtgggtatgttggggaagcaatcccaatttttggcacccggaattnggaaanaattga

SEQ ID NO: 135796 - DNA, 558 bp, Arabidopsis thaliana
  unsure (1)..(558): unsure at all n locations
atgcaaaagctaaactgctaaagtttttaataaatctgaagaaaagagtttgataaatctacgaaaatccaaagcctctagagcgttgaccagatagttagagactaaagtcaacgatcaggttcaaaaacacaaaagcaaaaaaaaaaaaaagagagacataaatcgaagggatgagttatgtaagtctagaatttctggatgacgacggcattagctataccagcttgctcgatggtttggtccaattctgtcaattgtttaggagggaaccccatggttagcaactggtactctttggagccaccgggtctaagaagcgtcgataaacccacggtacatctctgacagtgtgggtggttgttgaacctgggagaccaaggcgtgttccgtctgctaatctgagctggatagaggttgtcggtgctgctggttctacaactagcccnccttgatngngctggtgcacgtcnattgggnaantgnaancttnngggntgactttaancanaccgctngnccaagggtctccccaacctganngntttaggttggaat

SEQ ID NO: 135797 - DNA, 514 bp, Arabidopsis thaliana
aaaaaaaacaatctagcaacagaagaagcttcgagaagacgatggcgacggagacgaacgagaatctgataaactccttcatcgagatcacttcttcatcaagagaagaagctaatttcttcctcgaaagtcacacttggaatctagacgctgccgtttcaactttcctcgataacgatgccgccgcagccgccgaaccaaaccctaccggaccaccaccaccttcttctactattgccggtgcacaatctccttctcaatctcactctcccgattacacttccgtctgaaacctcttccctctccttcccggatcacggtcttgcttctccgtcttctcgcgcgttgctcccttacggtctccgatcgagaggcggtgctggagagaataaagaaactgagaatccgtcgggaattcggagttctaggagtcgtcaacacgctgggaatatccgtacattcgccgatctgaaccgttctccggctgatggcgagggcagtgattcggatgaag

SEQ ID NO: 135798 - DNA, 340 bp, Arabidopsis thaliana
ataaaacatttttttcttatcattaatcagcaatctttatttttggggaaagtaaaacaagattatcattgacacttcaacattagagattctacaatccttttcataaaactggtctctatgacaaatcagagcaaatcttggaaatgggctctactcctccttcttcaacacagtctcagcaggagcatcatcactcttatcaacaacggtcttcccaggcgttggggttacatgagcatcttgctcaacattctctgtgggttcagagacagatgcggtttcaggttctgaaccagccactttgacagtaccaaccttagcatacttgctcatgaac

SEQ ID NO: 135799 - DNA, 1274 bp, Arabidopsis thaliana
  unsure (1)..(1274): unsure at all n locations
acgcacaccatagaaatacaccacacaccccccacaacaccagaacccccacacaaccacaaccacaccagccgcagacctcaccccaccacgcaccccccccaacaccccacccctccacacgcacacaaccacatttgtagaagcctcggntcggcaagccacccctccggaattcccgggtcgacccacgcgtccgattagtttgttggcaccgatgaagcaacaacttgtgtaggccttgttatccgcaacagaaaatctggaatgacgtctgttgcacacatggattcgccagagattgtggatttggggataagccagatgttgttattggttttacaggatgacgtagatgccgagttagatgtacatatggttggtggttatgaagatgtcgacataaaagtttgtctctagattttctatttctcagtcgacttagttctaagctgtagagaggtctttagctgaatgtcttgaccgttatgtgcagaatgctgatggtgttggtgactatgccaaaccagagggttattcatttccgttgtgttgcaaattagtagaaactttgcagaagagaagagaaaactttcacattcaaaccctctttattcttgggcacaataccaagttggattcacaagcaaacacgtgccccatttttaatggatgcctggtgaataccagcaccggtgcaatcttgccagccagtttcaacagaacatctagatgtccggatgagatcgttagaagaattcgagtttcatcatcgtttgaagattctagctggaagggaaagttacttgacacatatgacacaaaaactgatagattcatcatcgcaccatgccgctggacaatgcgcttgattgaatatgtttggggacttaatcagcttactgatgaaggaatcctcactaactgttccacctcancttctgctgaaggtccagactttcgtaaacagtttaaggagggttagtcatttttggaagntttccactnggtccattatcttggnccacaaacagggcataggggaaattttgcaattcccctttcctttttgtggggntttagggatttgggggtntttcctgaaatatcccnggatggggcaaaacattncccagggggganccncgggtgtttttaaaaccttnggtgggncctggnaaantctgcttttcaccaacaccntggcatttnccgaantnggtnaaancgggtgggncannattgggttttanngcaagccnctgttttttggc

SEQ ID NO: 135800 - DNA, 511 bp, Arabidopsis thaliana
attttttaattgcatgagaattagtttgttggcaccgatgaagcaacaacttgtgtaggccttgttatccgcaacagaaaatctggaatgacgtctgttgcacacatggattcgccagagattgtggatttggggataagccagatgttgttattggttttacaggatgacgtagatgccgagttagatgtacatatggttggtggttatgaagatgtcgacataaaaaatgctgatggtgttggtgactatgccaaaccagagggttattcatttccgttgtgttgcaaattagtaggaacttttgcagaaggggaggggaaactttcacattcaaaccctctttattcttggggcacaatacccaggttggtttcccaagcaaacacgggccccatttttaatggatgcctggtgaataccagcaccggtgcaatcttgccagccagtttcaacagaacatctagatgtccggatgagatcgttagaagaattcgagtttcatcatcgg

SEQ ID NO: 135801 - DNA, 675 bp, Arabidopsis thaliana
tatcacgtcgcatgcacgcgtacgtaagcttggatcctctagagcggccgccctttttttttttttttaaaaagataatccccattacattatatcacaaattaggtcgaaaaaagaataactagcagagctttacaaattacaaaccataaggcaaagaagagtgcccacaacacaaattaagttgtagaaaagaaatccacatccatcatcatcattatcatcctaatgtaataataactcgatataaaaaataagaaatattaaaagagagaagaaaaagaaaacactaccataaaccaccaaccaaaggaatcatcatcagtagagagcgaaaaggccaccaaccaagaacacatttcagatttcatgaaaaatattaatgaagccgaagtggagcagtgaaattttcgtctaccaaccgtggaagaagaaggaaaagaaagacttccactactactgcatcagacaggaattgcatctacgttcgatgaatcttcgcatctcaatacaattccttcaagacttgcagggaatgtgcacttactccattgccaaccagctgctaatggttctgtcgtcgggactatcattaacacgttatcgtttctctgaaccactccaatcacacttactgtgcttccttctttgatatacccttctttaagccgcatt

SEQ ID NO: 135802 - DNA, 410 bp, Arabidopsis thaliana
  unsure (1)..(410): unsure at all n locations
ggaaatgataaattctaaatttctaaaacagagataaaacattacagagggagttggggaagaacaagaaggttcattcatgtatgtacactttgaacaatgcgacttaaggcttcattgttgtaagaaaaaaaggacaatcatatgctgaaacatttgcgtgtcaagcggcagataacgctcctagtacacccttatctaccgtagttaagcgacctcagattgtaatgatcaaggacacgaccaaaaattacgccctgccatggtccccacaaattggcagctacaacacgaacctttttatttccaaggaaggggcatngggngccggggcagggaaaaatgggcggtatcggggnacnggttttaaaaggtcaccngtttgccnaaggnnngccacccngnntttc

SEQ ID NO: 135803 - DNA, 507 bp, Arabidopsis thaliana
cactaatggagcatcatgtcaaaacttgccatggttcagtttcagttgtagtatatggagatcaagagaaaccagcattgatcacttatccagatgtagcactaaactatatgtcttgtttccaaggattgtttctatgccctgaagcagtgtccttactgctccataatttctgcatctaccatattagtcctccaggacatgaggtttgcagaattgattgtcttgaaacaattcattattctcctttggaatctccccttgcggtttgctcacggttgtgttgggccccatcgtttccacaagagtttttgcagttggggggctgccccagtttgctccaatgatccgtcaccttctgttgaagacctcgcggaccagattcttgaagtattgaacttctttagcctcgaggcagtaatgtgcatgggaatcacagctggtgcctacatcctttccttgtttgctattaaacataaagaacgagttttgggtttgattcttata

SEQ ID NO: 135804 - DNA, 512 bp, Arabidopsis thaliana
aatattttttgtaatatactcaatggcattctccaaagataagacgtcgaggtactcagaacacgtggatgcttacagagccgcctgtggacaccacccagacctcaaatcctttgattctaagattcagcagcgaacctccaatctgatagactcgctcaccgttgaagccaagactgggtcggtgtccccacacgcggtacacaaggaggtcattgagcacctagttgaagtaagcaaatcggtagcagacgtcattactgaatgcggagaagaagtgtgggagaacggaactctacaatctctggtcaaggactattttaacagtaccattggagacttttgaaggttttcggagactgttaacgcaattgcgtccattgaagcaaaaagggggccaacggttacatttaaagcggccgtggcaccagttttaaaaaaggcctcggatgaaaaggccgtttggtgttaaaaggaaggggtatgagaaaaccttggaggagctgatgaag

SEQ ID NO: 135805 - DNA, 615 bp, Arabidopsis thaliana
gtcggcgtaccaaacggctcgtgacgcgaacattagagtccgaggagtgctcataaccaacccatcgaacccatgaggggggacggtccaaaagaaggttctagaagatctccttgacttctgcgtacgcaagaatattcacttggtctcagacgagatctactccggctccgtcttccatgcctccgagttcacaagcgttgccgagatcgtagaaaacatagatgacgtgtcagtaaaggaacgagttcacatcgtctacagtctctccaaggatcttggtcttcctggtttccgcgtgggaactatatactcgtacaacgataatgttgttcggacagcgagaaggatggcgagcttcacgcttgtctcgtctcagacacaacatatgctggcttctatgttgtcggatgaggagtttacggagaagtacattaggataaaccgggaaagacttagaagacggtacgataaccattgtggaacgggcttaagaacggcagggattgaagtggtttgaaagggaccccagggctacttttgtttggatgaattttgggggtcctgccccaaaaggaaaccaaagccggcgagctacatctttgggatgtgatc

SEQ ID NO: 135806 - DNA, 401 bp, Arabidopsis thaliana
tttttaaaaaattcgtttataacaataaatattacaaatcaaccttgatgaacatgaaattaacttgctttgtccaagcaagaaaacaaacaataatatctagaaaagagaaacaaatcaaaacccattttacatcaatgggtttaaattaattatcttctctttcctaaaaaattaattacccctcccccatatatttaaccaccaaaaaaacggatttactttactttttttttttaacatttcaaaacctccttcgtcggcccatgaactcatgtattcttcttcaacgcaatctccaaagtgttctcactcatgttaggcaaaacaaaccctaaaccatccgacctccgagcagtggcacgaagatcccggagatatattcaggttcagctccttta

SEQ ID NO: 135807 - DNA, 516 bp, Arabidopsis thaliana
catgttaactaagttttgctttcttcatctgtatttcttgtctctctgccgtgcctagctccaccggacgtttcccggctgcttctgctccgccaccggaaccttctcctccagcgccggccgatgattctccgacaggtttatcatttccgcaactaccctttttcgatgagaatagttgggatttagcgttcatgtcatcggaatcagcgttgactacttcgtcaagaagctcttgtgctgccttcaagtacttggagctaacaagattagctataccgtttgttacccccgatcctgtagagccagacccgacccggatatcttctccatgtccggacccgaatccgacgtgaataggctggtgtttgttgatgatggttgctgcttgcttgctgctgttgagaacgggaggggtaaagaggggccttgctgcgcgcggggcgtctcacacgcggcttgctggtgagtgggatccacttggtggctaccgtagagactgtactgcacgcgcgg

SEQ ID NO: 135808 - DNA, 363 bp, Arabidopsis thaliana
agcacaattatacaaattttttataacataaagataaggatacaaagatatgcaggagagaactagtgtctcaattttttaagttttggttaaacgtaaagttggaccctaatactgaaacatacattcatcttattttcataatatatattcctcggtttgtgaatatgtgaataatttatacaaaacaaagaaagtaaacgtcaatctgtattcttgactttgaccaaaatcctaccaaaccctaattaataatacttggaaaaccatgggtgcacccttacggctttacatgggatttattatccttacatggttatggtttggatgcgtggatatggttacatataatggacctatata

SEQ ID NO: 135809 - DNA, 469 bp, Arabidopsis thaliana
ctaagttctagatcgccatttccacgtcgtactaagcttctctttcgccatccgttttaggcaacgaagacgaagatcatgaaagggcttacgaggcttctcaattctctttcgcgacatacagcttccgtaacttgttctccatcttcttcttctcttctgatatcacgtcgctctctgtttatctcggcggcgacacactttccggtgaatttctcggagtcgataacaactaatgcttctcgtaactgttcgagatcttcttcatttcccttcaattggatcgagcaaaggaggacaatgtttatccaaacacaatcaacaccaaaccccttcttctctaatgtttagtcctggtaaaccagttatggagattggaagtgctgacttccctaattctcgctctgctatgagttcacctttagctaaagccattttcgccattgatggtgtagttcgagttttctat

SEQ ID NO: 135810 - DNA, 409 bp, Arabidopsis thaliana
aagccaaattgataacttagtaatttaaccccttataatcttcaaccaaataaacatctttttgttttttcagctaacaaagaacaccgactctcacagatcactacattacaagtttccaaatcatttatgtgatcttacatctactgagaaagctgccaatctcttttctcaagcggctaaaacataattacaaatgctagagccgtcgccgccgtttcccaaccctttgattcggggatgaaccggtataaggagttgaagaagttatgtccggaacaaacacagagtggtggtgaaaatgcttaggccagtttagaccagacgctgtaggtggagactgaatctgtggaaccgcccatgatgtctcacctccaagcaggtattgttatcttctccatcttcttct

SEQ ID NO: 135811 - DNA, 475 bp, Arabidopsis thaliana
  unsure (1)..(475): unsure at all n locations
gggactattgctaagggaggcaatcccatttgtcgagcaaaatgctttcctgtgggcaaagtgatggacatgatgctgcctgagtttctagattgcacggcaagaactggtttagacatgctggctaagcattactaccaatcatctaaagcatgggtggttttctttgttcctggaagtgatgctgatatcgtgttttatgatgagtttatgcattatctggaggagaagcaacgggcagctgtttctaaattggatgacacaacaacgttgtttctggtgcctccatctgatttctccgagaaagtacttaaagttcctgggaaactaagcatctctggagttattctacgtttagaaatgtggtggttctggctccggtgggcctgttcaacagcaaggtgagagaaaggtacagattctaacttatatggtganatcatattcagaagctagtgggggttcngatgtggat

SEQ ID NO: 135812 - DNA, 473 bp, Arabidopsis thaliana
ccaaagagaaaacgtatgagttgcttaaaccataaacctcaagctcaaaattttatcaaccttataaagtttcgttttctcgagattttgaatcttttcagctaaaaaagatcacagctttttgcgttttctggatgagtttcagataagagaagatgaagattcagtgtaacgtttgtgaggcggcggaagcgacggttctatgttgcgccgacgaggctgctctttgttgggcttgcgatgagaaaattcacgccgctaataaactcgccggaaaacatcagagagtccctctctctgcctctgcctctttccatacccaaatgtgacatttgtcaggaagcatctgggattcttcttttggctgcaagattagaggctttgctatgtagggaatgtgttgatttttgcaatccacactgtgaatcctcatgtttcagctcaccagagatttcttctcactggaatcaaag

SEQ ID NO: 135813 - DNA, 461 bp, Arabidopsis thaliana
  unsure (1)..(461): unsure at all n locations
cagagaagatccaaccatacttcagttctactgtcacaatttgagaagaagaagcgtgagatctgatcactagaactaggaagaaagagcttagactacagaaagaggacttacagagatggataaaatgaatcaggctattgagaagatgaagatgttggttggtatggaggttgaagacgagcaacaagctgctgatgaagaaagctcgctctcattcatggaagatcttaatcgcaattgcgctttaactaccaaacagagattttatggctttgcaatttgcttgtcagcaggtttgacctgtacacttttgtcgatgcttgttttctttaaatccggtcaaagttttggcatcacattcactcctgggaaattttgatggcacttcgggggcccagcatttccttttaggcccacagcggcaggttacttttaaggtttttncccccncctggttt

SEQ ID NO: 135814 - DNA, 438 bp, Arabidopsis thaliana
ccaattcgcggccgcaacaaaatctattttcttaggcggcgacttttcacaacatatggattcatcaaagagttaaaaagaccaaaagaaaaaaaggactaaaaacagtttgcttcattcactctcaacatctctatcagtctttctacctagtgtaccatttcaccagacaaacaaaaaattgggcattgatcatcttctttcagacaaacaactccattgtcttcaaagttccaaaaatatgtcctgtctactggttggattatcccaaactctttgacaaccatccatccattgggtttctctatcaaccagggtttgagggtttttacggaaaggtggacccacggattaaaaacagggtggtttgaaggtcagattgcgaagttctttcgatcatgactgttaccctctaactgatactcatttaaccgacgt

SEQ ID NO: 135815 - DNA, 574 bp, Arabidopsis thaliana
  unsure (1)..(574): unsure at all n locations
gtggtgcagattcgatgttagatataaggttaaagaagaacaggcttcaaataccagtgttaagattggatgggttcattatctcaatcttgctcaattgcgtcgcctttgaacaattttacgcaaagagtaccaaccacataacaagctatgtggttttcatgggatgccttctaaacggcaaggaagatgccacattcttaagtcgtcgccggatcatagagaactactttggcagcgagaaggaggtatcaaagttcttcaaaactatatgtaaagatgtagtgtttgacatacatgcaagttatttacggaatgtgtttgtggaattaaccggggaccacctcaaaatggtactcaatatgtcggaggttttttacctgtcacccaggaatttttttggnattgnngttttnggcccaattttatcggttcctaaaaaccnttntntttccttnggaccnggaccagaaaaccngatttttgaaccgccctccgggaagcaaacattcttgggnttttttngggaccattnggtttangnggntttttntttttcanaacacctttnttc

SEQ ID NO: 135816 - DNA, 673 bp, Arabidopsis thaliana
tgactatgactgcgcgcgcacgcgtgcgtgagctcggatcctctagagcggccgccctttttttttttttttttttttttttggcttattttatagaagcccttctctatactaatctttagcaaccaccagagtaggattaaattacaatttcattttcatatagtagaagaagcagaagcatgattataaacaagatttgacacacacacatatatatatatacgaagatacgataattaaggcaaagttggagagagtgaaggattagtgaccttaagctctccacagccactaatgaaaaccggtcttcaagggtctattccacaaagatctcgcggtttgagctctctcggctccaagaaactccgcaaaaccggtaaactggttaatattctccgacggcttatacgtcggaatcgaagaaatactcgtcactacatctaatccttcaagaacagttccgaatacaatgttaccgccatcgagctgcggagacgggccaagacccgtagtgattaagaattcaacatttctattatcaggatcgaggctaatattcatcatcattcatcattctctcggataaaaccaaggagaatcccaaccccgggaaaccctggtttttgggggaaattggaaataaaatttatgtgggaggccaacccccccc

SEQ ID NO: 135817 - DNA, 835 bp, Arabidopsis thaliana
ccaatgtttatggtgtcatggtaagcaatgctcaagaagagttgttggagtggtatgctgaaaatgcgaaagacaatgcaaatataatccatgcgagtgagaggtgtgcgggtgggattacacaagccattggtcactttaagcttggtccaaatctttctccaagagatgtttctgacttcttggagtgcaaggcggataatgtgaacccgggtcatgaggttgtgaagtttttcttgttctacgagagatggagacgaggtgaagttgagaactgtacgacatacacatcaagtctcaaagcttcatggtcatccttcctggtgtctttgttcatccatcctggtgctgaaaagtctctcagagacaccattgatgagcttggcaagtactatggagacaaaaaagggaagaagtttcgtgtttggactgaccaggtcttggcaacagacacaactcccggggcctggggtgtgaagcctgattaatgggagcagactggggatgagaggaaatgttgcacaacaactgtcaaattcacctcaaaggaaggagaagggtttgtgtgggaacatgtgcagcaaatatggtcggaggaaacagagattaaggatgatagcaactggatcatctgaatcttttttttttgttaattcccttcattacaaagaaaaataagccaaactatatactggaagacttttaaataaaagtaatttaaaaaaaaaagaatactgtggactatattccttatataaaaatatagtcctgaaactttcatatatctgtttttagtgtttttcataaatattgcttaaattttatgtaagttttc

SEQ ID NO: 135818 - DNA, 538 bp, Arabidopsis thaliana
  unsure (1)..(538): unsure at all n locations
cagccacttaacatgttcgaacgaatcatcgaagaagcaagaggaaaacaaatcgtcatgtttcttgattatgacggtactctttctccgatcgtggatgatccagacagagctttcatgactagcaagatgagaagaacagtgaaaaaaatggctaagtgttttccaacttccatagttactggtagatgcatcgacaaggtttatagctttgtgaagctagcagaactgtattatgctggaagccatgggatggatattaaaggcccaactaaaggtttctcaagatacaataaggataaaccatccgttctttaccaaccagccggcggctttcttcccatgatccgttgagggtttttaaaccaattagtggggaaaaccaaatcttcaacccgggggccaaagtgggggacaacaagttcttgctttcttggcaacttccgttntttttcgggnagnanttgggcgnctggntnaaaaatncggncggngggaaancctttccgcgntgaactttttagggcgaaggttttnt

SEQ ID NO: 135819 - DNA, 536 bp, Arabidopsis thaliana
  unsure (1)..(536): unsure at all n locations
gcacagaatacccttgcaccggaatgttaaacgagaagagtgatatctatagcttcggaatactaatcatggagataatcactggaagaaacccggttgattatagtcggcctcaaggagagacaaatctagtggattggcttaaatcaatggtgggaaaccgaagatcagaagaagttgttgatccgaaaatacccgaaccaccatcctcaaaggctcttaaacgagtgttgcttgtagctttgcgttgtgtggatcctgatgcgaacaagagacctaaaatgggtcatatcatacatatgcttgaagccgaagatctactctatcgcgatgaacgccgaacaacaagggaccatggaagccgcgagagacaagaggcagctgtggttgctgccggtagtgaaagtggtgagagcggttcacggcatcatcagcaaaagcaaagatgaaaaaagagagtcacttgggttaagtgatttccacacgaccattatatttcattttttttccngcanttattgnnccttncananntc

SEQ ID NO: 135820 - DNA, 487 bp, Arabidopsis thaliana
  unsure (1)..(487): unsure at all n locations
cagaagttcctccctcgtcttactctttcaagatagagtcttataactcgttccttaaaatcccctacttgggattcgaatctcgtccctttgcagctggtggatacaactgggtacttaaggtacaccctaacgggctcacgtgggatggtacttcaggatacgtttcgctttacgtactcttacacgaatcgacccccatcactgcagatcaagtcgtttacgcggatctaaggtttttacatcttcaataacaacgggaagaagtacctttacccgtccaagatacccaacgtatgggaatttcactgcaccccaaaagggcttttggggattccctaaggtcaatgtctgcaggtccaattcggaggcctgcggaacgggtaccatctacgataatcactgtgaggttggggttgatgtgcccgttgcttttactaccaaatatgattcttntttgnnctgggaatcgtacccatttnanttg

SEQ ID NO: 135821 - DNA, 504 bp, Arabidopsis thaliana
aagaatgggagagattgtaagaagagttcagagattaaccttcaagcttgtgtgaatgaagctgctgaaacctttatctgttcaaaggcagaagagaaggggaaagatcggtctaagcagttcatggaggcgttagatattctaagttcgaacaaagaattgttcattacactcttacaagatcctcattcattttcggcgaaaaaaagcttagacttggagggatctaaggtaaaagaaccgcgtgataaatctccatcaatggctgatgatttggttagcattgttctcttgaagcctagattatcaagctcgggtttgattgataaagtgtactctgagattcaaacatctttggccaagaaagttgaaaccttgttgtttgggtcctaccaaggccagcaatcacggcagacaacaaaccccgatggtagcagtagaggtagagaaatcgaggctgctgcttttaaacaagtgatgttttaccagtacagttggtcatag

SEQ ID NO: 135822 - DNA, 855 bp, Arabidopsis thaliana
  unsure (1)..(855): unsure at all n locations
cnnnnnnnnnnnnnnnnnnnnnnnnnnnnnnnnnnnnnnnnnnnnnnnnnnnnnnnnnnnnnnnnctttttttttttttttttttgattatccctaatctctccctataatattaaaaagttagaagtacaaaaaacaaacattatttctcaagttaaaattacaaattcaagattctaaaactttgtaaataaccacgaagcaaggtaatatagctctcgggttataaaccacaagctcctcatgattcgaataaactccagcattgaccgccaccgagtcaaacgtaccaccactcgaagaaactccaaccaccgagttatcctccaccgttgacttcttctccgctgtagccgaagcatccgccgccggtaaatcaactcgcttaactctcccagcgatcacacggcacacaagcatcactctcctcgcatcatcgctacacctcagcaaatcatcagctcttccgctgctcgccgtcgtcctcacaccggcgtttgcgacgttggctcctccgccaccagattttccttggaaaccgtggcgaatcacggtgcagacgccacaaacagggaggttagagcagagagaagaagagccacgagctccgagtgaacaagtgagagtggtgcagtgaaaacgtaagagctcgttgccgtcggcggcacaacgagcatcttttctggttgcttgaagtgcacgcgccttcactgcgtctcggcaatcctcaaaccgttggatcgtacgttgagtgttgtggacttttaatatccgttcgatctganagatgggactgtcttttttaagccagcttgatttgaatatgatctnccactatgtttcgacccgaatcct

SEQ ID NO: 135823 - DNA, 421 bp, Arabidopsis thaliana
atccaaagctttttgagagcattattgccagatccctctacgcttacaaggctgctttgtctgccaagatggcgagggagcttggccaggtcgaaaagcgttttgaagtcatcatcacttcctgggaaactggctgattgctcatcaacagatcctgaagtatctggtatgtattggccatcatgaggatgtcgtttgtttaattgattaaagctaaacatgacagaagtatctgaccttcttattgtatattccaagtgagaagttaaaaggggaaatctaggctttaattatgtggctacaaccggttacaaccggtaaggccattagccatgctaattccgtcatgtagtgacatccctttgcaatctctgcacaaatttttatagttgtacgagattctgctggtggcagtgcgaaa

SEQ ID NO: 135824 - DNA, 542 bp, Arabidopsis thaliana
  unsure (1)..(542): unsure at all n locations
ttcttttttttttttcatcaacagcttcaatagtcagacgacattgatattagtatcttatattttcttgtacataatgcaaaacattttaatctctatataaagaagaatagagattgaaccagcatcagaacattatcataattaacaagcatcgccatataatatatatattttttttttccaaattttatatgcaaattaaaattatacttttgactgatgattaaaccacttgaaacaaaaatcgagaatacaaaagcagatacttattattgtttcatgcggtgatgctcatggagtgatctgatctccttgctcttcccccaacatctcggactgttggttggaatcgtatggattcctgaagttggacttcttctcattgtacgggggggcttgaagtggnagacggaccgtggggccgaccgggggatccggacggggacngcaggnggnaacagcttncccaaggggggccgataaactnggggaacagggcaaacggtccggggaatggtancggcccaatccnaacggct

SEQ ID NO: 135825 - DNA, 625 bp, Arabidopsis thaliana
attggaaatgctaaatcgtatttatcgtagcttaagttgttacagcaatcatcatacttagaagggtaccctacttagaacaagaataaaaacagacaagttcaatgggggaaacaagagaagaagattgggaagatttgtggttggatcaccacaaaccatagacagcgtttgaacaagtctccttgaaccatttgaagcttttcttcatagatcctttcactctcccttcaacaccatacacattataagaagccactctcttcttcctctgaatctctgcctcacacaaacccttaaatcctttcttcttcaccttattgcttctcttcgatttattgttggagtcgtctctcacaattgttggattctggtatgcattataagttgatgtactgtaagatctcatcatcactggtggctgctggtttgttggttctgattctgatttttctccatgactgaagcaatggtacttgttggtgatgctgctacttctggtctcttctctgcatgacttagatctgaacatcttcacttgcaaacaaacctcaaaaaaagattgctctgctttttataggaagaaaaaggagatagttgcttttgggttttatctccaacctct

SEQ ID NO: 135826 - DNA, 438 bp, Arabidopsis thaliana
  unsure (1)..(438): unsure at all n locations
attaaaaattgatagtctttttatagaaaatatttaatgttgttgaaataggtggtactcgaaacgtaagaaaaaatgatgaggtgaggaaaagcgttggaaagaaactttgggggtgagaatttttggtatagaagagacgtacattatggaagtagagagactaagtgtcagctatttgagaatccacctatagctatctcaaaactaactccacacctaaacttgcatcatctcaacatcttcctcctacctactctttaactcttggtttctcttacttgggtccagtctttccactattggaacttccaagacaccaanagtcgcgttgtaagctgtctatttactccattgacgagagcaagtgcncgggtacngtttttttacggcatacncaccncatggattcaccatgnatcaaagcccacggggaac

SEQ ID NO: 135827 - DNA, 429 bp, Arabidopsis thaliana
atggtgaaaacataacatatttccatcgatctatatacatggatattgattggcacatacacaactatacataacttatgagaaatatcttattctacgaggaagagacgacagaagaagaagagagacgagagatttgatccatgaggaagagcatgcgatcgtgatagtcacgtgcctgttctaaagactcgacctccagctccgccagctgcgagcagagttgctcttccgcctcctccgccacaaccgttcgctgccacaacttaatcatttctgtcttcatctccgccacttctctcgagagctctatgttcctcctccttagctcatccatctcttccgccgccaccgtcacgcatcctcctcggttcgccattaaatttaagattctttgtgtaaaaggatttgattgtggttctaactttg

SEQ ID NO: 135828 - DNA, 427 bp, Arabidopsis thaliana
cacgaagtcttgcaaaagtgattggaacagcattaactgtgggtggtgcaatggctatgacgttggacaaaggtccagccattgagctctttaagactgctcatagctctttacacggcggctcctcgggcacctcctccgagaccactgatcagaattgggttcccgagaactctaggcgggtcatgggtagtatcaccacttgggcaggtttcttcattctacaatccgtgcacgttgaaaaaatatccggctgagctttcgctagtgatgtggatttgtgccatgggaacggtcttaaacaccatcgcttcgctcataatggtgcgcgacgtaagcccatggaaagtcggtatggactcggggcacacttgcggatgattactccggagtggtttgttcgggtatggcgtattacatacaaagc

SEQ ID NO: 135829 - DNA, 432 bp, Arabidopsis thaliana
ggggcagaaaaacgacacagcgtgtttactaatcaatgccaaaatattttacatatgaaacaaagaaaagagagaaaagcttcttaaatcttaatccgagtcactaaggtaaagttctcatgagagtagggtaacgagggaaacgaattcaagggtaactcttccctttgatctcgtgttgatgacgaaatgctccgggtattttctcagcagcatcagcaaaccgtaccatggtttaccttttgcttcagggatagcccagtcttcttgtgataggtatcttcttactcgactgtgatgccatacgtttccatactcctttaatatcaccgaatgaagtttttccataggcatccactctcccggaccacacaaatcggaaagcacagtggcaacagacgatacaacatctttttcctccagctgcaaaaa

SEQ ID NO: 135830 - DNA, 507 bp, Arabidopsis thaliana
cgacataaaatatccaataagtgacctctacaaactcatgtggttttccagttataaaaaaacaacacaaaaccacatgatcacttctttttcttacatctccacataagggaaaaatataaaaagctccaaacaatgaaacaaattcaaagaaacgagaaacccccaaaaaaacaatataaaggtagactgagggactgaagaagaatctctcgtaaataaaaaaaacccgacagagagaaagagatgatggacacgaccgtagcttttccacaagttccgtcgaaacttgaagagttactaaaaagagagatatacaattttacaggagacaaaagggatcggtggtgtccacacaaagaagatgaagattgtcggggatggaatattatttattatttatgattaccgggtaggttaaagctgtaattgaccagggccttttcttgaagttcttgatggaggtctattgttgtctgcaactgatgatgatgtcgaagaaggtgg

SEQ ID NO: 135831 - DNA, 630 bp, Arabidopsis thaliana
aaaaaattacattttgtgtatgaatattggaagagttaacttggtttaaggaaccaagatccaatctctaatttggtctaatcaaatagcaaaaacacatttgctctcaaatacaaaagtctaatctaaacagttggaacaaatgtgccaatataaccaactccagcaacaaaaaatgcacaagactgtaaaaacagataaacataaaagtatgatcctccatatgcgaaatcgtaacatccgcagaagaatatatataatccaacaacgagttctctccagttgagtctttgtccaaatctggtataaagcttagttgtagctttacctattaacttagacttgagagtgtcacctaatttttcagtaacaacccattcgttaacccgtcctgcctctagtaacccgatgaatgtcgcttttgtgcgatgcatcgacattacattctcgaataagatccaaaagacaagaagatggagtgatcgaggtgtagcgattgcgttaaggatagtgattgtagtaggaaaataaacagttgcccatttaggaacttggagctcagggaatagcacagttgttggtaatatcagacagtagaagacaaatgtgaagatgtgtactacaatcttc

SEQ ID NO: 135832 - DNA, 468 bp, Arabidopsis thaliana
aagtattgtaggaagagaaagataagagctaaggcggcgccacgctggaagcttacttcttttaagagggaagatggagtttctgatgacacatcagaagatcattcttataagcagcaatggagggcttccgggaatgaggaagagtcttattttgagacagggaacacagcttctggtgattcatcaaatcaaatgtctgatccgcacaagggaattatcagacataaaggttataaagaatttgagtcagatgatgaggtttcagaccggtcacttggggaagagtatactgtacgggcatgtgcagcttcagagagctcaatggagaatggctctcagcattcaattgtatgacccatccatgacgaatggtgatgatatcgacaggcagcctagggggattccaaggagccaacagacaagagtttttaggaatacagtttcatatgagtcagaagataatgg

SEQ ID NO: 135833 - DNA, 384 bp, Arabidopsis thaliana
agcacacaagatctttaatatggaagacgaaaacaccacaatcatcttggcgtcactctctgctctttctccttcacacctcacgaatctgactcactccattctctctatctcccaccaccatcgccgccgcctcggtgcagtcctctcctctccgaccctgttctccctcactctccggcacctcctctctctatctcttcctgacaaaactcaccctcatcgccaaccatcttctctccctcctccattcctctttctcatccaccgtaaacaccacttcctcctacgccgtcaccatgaagcttccggggacctagcacgcggaggtccttctcctctttctctgcgaaacccaccagcttcatccagatgttctagaag

SEQ ID NO: 135834 - DNA, 609 bp, Arabidopsis thaliana
  unsure (1)..(609): unsure at all n locations
ggggtagaaagaagaattttcacatatttctgaaggaaaaacgaacaattcacacaggatgattcacagattaatgaagctgagtttgtcgaagcttaaagaattcaacaaatacagataacaaagctttggtagaatcaaatgacccagaaccaagcaatgacagatccagaggccaacccaacaaccaagaacatcacagtgacgattcctgcagtctccgagtgtctcagtggaaccgattttggagccagaatcatcaagacgcttgtcaagtacccggttggtaagtcccaataagcatgtcagtatagttacaggaatctcagtcctgagaaacatcgggaccgtgcaagcaaccccagaagagagggtaaaacaagaggcctagcaatgggacccccaacagcggttttctcatcctcccagcatgaatacagccggccggccctttccaacccaggccaacacattgtacgctgcaataagcaggataggggaccatcctgtaagaagctctgatgacatccccgaatgtcccggatttcgaatgnccntnttagggnanccgacctgggttnanttcgccggtccnnggggncccccgga

SEQ ID NO: 135835 - DNA, 460 bp, Arabidopsis thaliana
aggccacacctgttgtgggaaaaagcaaaagaacaacgaatcttgtggtgaagcaggtgaaaacggagtttccaagaaaagtcctgttaactatggaaggatgatatcttttgggaaagaagtagcagaggctgcgccatctgagattaataatattgattttcgaggtgctgccaaaggtcagagtatcccaaatcacacctgtcgtgacgtgtggacagagcaccatgacatgggaattgctgggatcaaagctatcgctgagtataaggtctacactgctggtgaagctatagatctactacattatgttgctcctaagattgatggcgcgtggtgccgctcatttctctttatggaattcctgattgttttggatgacacccaagtttccaagttccccaaatacttggccaaatcccgttagggacaaaattaccgaatgctcctgagatggaaa

SEQ ID NO: 135836 - DNA, 616 bp, Arabidopsis thaliana
  unsure (1)..(616): unsure at all n locations
gagggaattggcctttgctattgctatgaaacacctctggcttggacaggggctatacagactcatggtcacagttgttatcaacgaataataagcctccacgtgtaacttaacctaaaggtccctagttcagtaaacatggaaagtgaacaagcgagcgacaacatcggcgccgcaaaaaaagtggaatgattactcttcctctgcgagacgacgatgaggaaaacgacacatacgaagctaaaatgctcctcataggcgagaatggtctcgacggtgagagtttacctcctactcctctgcgggaccgtgcactggagctccagaagtacaacagccagctccatcgagtcaacgagtcgtgattcgggagctgacctcacaaggtctctcctttcagctctggccagggggcttctactttcgtcacgttgcttgataactaccggacgtgaccctagcaagagtccactcaccgcaaattcttgtnggtgaaaaaccatcgccgttgaaaaaaccggcncggntttggaccggctcgtcggtcgtngggataacctntggaaggacgnggggttccaacggntagaannnantnaagcgggaaacgggaatt

SEQ ID NO: 135837 - DNA, 443 bp, Arabidopsis thaliana
gagagttgacctcctactcctctgcgtgaccgtgcactggagctccagaagtacaacatcagctccatcgagtcaacagtcgtgattcgtgagctgacgtcacaaggtctctcctttcagctctggccaagcggcttcctactttcgtcacgttgcttgataactaccgtacgtgaccctagcaagagtccactcaccgccacactcttgtcgctgaaaaaaccatcgccgttgaacatactcgagctcggatctggaaccggcctcgtcgggatcgctgcggcaatcactctctctgctaacgtcacggtgacggatctcccacacgtcttagataatctcaacttcatcgccgaagcaaacgctgaaattgttgagagattcggcgggaaagtcaacgtggcaccactacgatgggcagaagctgatgacgtcgaggttct

SEQ ID NO: 135838 - DNA, 453 bp, Arabidopsis thaliana
gtgcggcctatgatgaagcctctgttttacagaagcttccagctccacttcagcctgttgaatcgagcggaaaccgtatccccctcgggcagagaaagctttcgtgtgatgatgagtgtgcgaagctggagcgtaagcgggttcttcaagatgcatttgatataactcccccaaatctggaggcattacatttcagcgagaattctgctatgacagagattatttcagacctttataggcgtgatccaaagtgggtactggctgttgaagagcgctgcaagttcttggtacttgggaaagcaagaggaagcacaaagtgcccttaaggtcccatatcttctgcccgatgcagaagggttaaaccgagacacgggttcggacttatagctgatgcaggtttggaaacttgcgtgttacgcaacccacgggttgggagccaaaacggtttacagt

SEQ ID NO: 135839 - DNA, 549 bp, Arabidopsis thaliana
  unsure (1)..(549): unsure at all n locations
gagcggccgccctttttttttttttttttttttttgtaaaatgtcaagacaatcgttttattcttgtttttcccgtttgcttaatggataatatggaaaaatgataatatatagaagtacaaactttaaagaaggaaaaaaaataagaaattaaaaagcagtgcagaatgaagcttctgattctcctacacaatcatcaaaaacttgtttttgaactttcaatcttcccccatttcaccaaagtcttgagaaacttcttcacctcggaagggtctctaagagagtaaaatgcattgctttcttttggtacagacgataccaatattccaaatcctctggttcccttccctcagtaccttgaatcgcatccttcatcggtcttggcatctccgatgaagattgggaggaactcatccgttcgttgcttaatcccaaagactctaacagaaactctactgctttccctgggccatcggttaaagggcgaaccgctaaanctttctaccgnggnttaacngnaaacgngggnntggttcagggggcnagaac

SEQ ID NO: 135840 - DNA, 432 bp, Arabidopsis thaliana
agacttataagtatatgttctctattatacttgatccaatcatctggaagtccaagaacaattcttgaatcaatggaacaaaacaatacatgtaacatgatgagtatgggggtctattctaagctacaagccacatgaagaatgttggccaaacagtgagtgcaatcgaagccaaagagtaagtccagagcataatcactgagcattcactctccccagttccaaataactgagtaattgtacctagattcatggctggtgggacagcatattgaagaagaagaacgaattggtataagggctctgatgtaactaaatccaacttatatgctcctcttacgagtaaaacaccgctcataggcagtaaaacgtaacgcgcaaccaagactccgataatactggacattttcattcctgaactcctcaaacctt

SEQ ID NO: 135841 - DNA, 532 bp, Arabidopsis thaliana
tgagatcccaattacaatttcgcaaggctttttgcaatttccatctgtcgctcaccggaggaattagaacgtgctccgaatctcttctcttccccaaatagattccgatcgattacgcaaccaaattctcggcgtttgaatttttttttccggagaacaggtggtttcttcttctccaggaagatttttgattctcctgtcggatgatttctcagtgaaaatcatggaatcggtatcatcacgcggcggagaccccgtcgtaaaacccgtcgatggaggtcttggcatttcccagattgctgtctatttcgctttcggattcttcttcttgaggcttgtcctcgatagatacgtctttcaaaggatagctctttggcttttgagtactggttctgctccgattaaattgaatgatgctgctactcgggcaaaaatcgtcaaatgcaaagagtccttgtggaaattgttgtattatgctgcttgtgactttttcgttctacaagtcatttatcacgagccgtgggctagagat

SEQ ID NO: 135842 - DNA, 596 bp, Arabidopsis thaliana
  unsure (1)..(596): unsure at all n locations
gaaagaaaaattgatatatctgttaagtctgaaaaatgagaagaattcgatcttagtgtttggagttataaaagagtaatgactcagcaaaatcgaaatcaatgtcttggcttcgtttatttcatctggacgattcctgagctgataagcttttggattttgttcatgatcattgggttctgcatgtgcttttgtgctgctgctggattctcctggagatcagacagtacctgtctcattacaggatctgtgagaatgttctgaatttctgggtcttgcattcccttagcctgtctttctttcaaattcctcaggagtaaggtcgccacgggtttgccttggtttaacctggttggtacacatcttttaaacaccatccaagaagtncctgggtaattaaggancatggtccggagacccctccngggaacgttcccaatngaattggccaaaacccctcaatgnagaaannggnnnggaccctttccaaccggaacccctttaanaanggtggggncnggcccgaaanaatccccnggaactttaaacccccggggattncccccagttnaggggaaangancccggnggnaaag

SEQ ID NO: 135843 - DNA, 762 bp, Arabidopsis thaliana
  unsure (1)..(762): unsure at all n locations
nnnnnnnnnnnnnnnnnnnnnnnnnnnnnnnnnnnnnnnctgctttagggaagatggctaaagtctcgaaagactatgaacctgtgcttcagacttaccagaaagctcttacggagcatcgtaaccctgaaacattgaagagactgaatgaggcagagagagcaaagaaagagttggagcagcaagagtactatgatcctaatatcggtgatgaggagcgtgagaaaggtaatgacttttttaaggagcaaaagtatcctgatgctgtgagacattacactgaagcgatcaagaggaatccaaaagacccgagagcatatagcaaccgggctgcatgttacactaaactgggggcaatgccccgaggattaaaagatgcagagaaatgtatcgagctcgatccaacattcttaaagggatacagtagaaaaggtgcagtccagctcttcatgaaggagtatgacaatgcaatggaaacgtaccagaagggtctcgaacatgatcctaataaccaggaaacttcttgatggtggtaaaaagatgtgtaccacagataaaccatggaaacccggggggacctttactcctgagggaatttgaaagaaacgacagggttaatgggaattgcaagaaccccaaaaaatttaaaaaaattccttccccagattccctggaaatgggagaccaagggtcctgggtcttggaacctctccaggggaggaaatccccacgccagcaagggtcaaaaaaaatgtcccccat

SEQ ID NO: 135844 - DNA, 465 bp, Arabidopsis thaliana
agcggccgccctttttttttttttttttttttttttgagcttccaaaacacaagctttaagtatgactgtatgagtaatcaaaaaagatactaagactttgaaagcttcatacataacaaacagagacaacaatagaagaacccctttttacttgaacaaatgggcaagatcagggtcatctaaatctacatcaagcgatccatttaaccgcataaactcgatgtagctatctggaggagtgatcgcacgagtgttgttcttcggtttgaatccatgaactctctggagatctcttgcgagccaacgcagaaaaactttgtccaatggaggtacaatcttcaaatggatctcttcccgttcttctttcaccgttgtagctttgtttcccatcttgcaaaacccgatctttacctttttcaatcagagagacaaaacattagaaaccgaaagtgagtcgaagaatc

SEQ ID NO: 135845 - DNA, 602 bp, Arabidopsis thaliana
  unsure (1)..(602): unsure at all n locations
atcattactaaaacattttcatttctgtttttttagaaacatagattcggttattatcgtaagaaatctaatacaactgtgaactactacataaactgaattgttcaaaagaaaacatcgaaataatatacagaacaaaaagggaaaacaacaagagctgtgaaccacaaaggaattaaaccgggttttgactctccttattggaaccggaactaaaccgggatttcaatcctccttatcagaaccgtaatacctcttaaacgctctgggtagataaaccggaatcaaaacaccaaagagattaaacgaccaaatccctaaattagccgccgccaaaactttcccggcatacatccgccgcgcagaaaccgtccccgtcacatcctccctcgggaactcactcataatccactccaacaagggtcaaaaccctcctggcgttgtaaacaatcgggacaagaatcctcgccgggagcaggagaagccaaacatgggcgctaatcctttccataaaaattttgcctcggtntaaaggaacagtgggggtgaagttggggtnaaacnggtttttttnatcctcaangttcctnnggagnggggng

SEQ ID NO: 135846 - DNA, 557 bp, Arabidopsis thaliana
  unsure (1)..(557): unsure at all n locations
aatcaagttggtgggtcttattaaatgatagaaattccacggttgaagaaacagttaagaaagagaaaagcattctaactcattgagccaagagaaaaaaaaaaaaacagcttagagagggttctccagctacggttgctatatattccaaagctttgatccatctctgcttcactatccaggttttcccttcacatgttttcttgaaagtacttccgaagtctccccgctgtttccgtacatcggacggatcaaatttgtaaaaaatagtcatcacaacttgccccgaagcttctttgcacttcaagatttccaccaactcatctaagcaccagcacgaagaagcgtacttctctgaaagcaccacaatcgagactctagattctctaatcgctggtatgagctcaggtccgatcgtatggcctctctccgatccctggatcctgaacggggggtcccttggnttngagggattgggaaagctgggaancnctanggaatctggccatggaaccgaaagaatggaccctgaagcagngggngnaagccaaggnnag

SEQ ID NO: 135847 - DNA, 612 bp, Arabidopsis thaliana
  unsure (1)..(612): unsure at all n locations
tanccccnccaancccctaaaaaccccccggnggggaaanattaagtttgtttaaacaanttgaannaatnntttggganaaccnctgcttaantagcctnattgagccaagggaaaaaaaaaaaaaaccannttagagagtgttcccccagctacgggttgctaaaatattccaaaagctttgatccatctctgcttcactatccaggttttcccttcacatgttttcttgaaagtacttccgaagtctccccgctgtttccgtacatcggacggatcaactttgtaaaaaatagtcatcacaacttgccccgaagcttctttgcacttcaagatttccaccaactcatctaagcaccagcacgaagaagcgtacttctctgaaagcaccacaatcgagactctagattctctaatcgcttgtatgagctcaggtccgatcgtatggcctctctcgatctcttgatccttgaacggagtgatccctttgctttcgaagtgattgtgtaaatgactgagaaatccactacggacatctggtccatggaaactcgaaaagacatggtatctcttgaagtcagacggtgatgaaaaagccataagagatagagt

SEQ ID NO: 135848 - DNA, 551 bp, Arabidopsis thaliana
  unsure (1)..(551): unsure at all n locations
tcttcctctccttccataagaagaagcagaagaaagattagatgaagcggcttaacgaactcaggagcttctcgcacgcagtcaatgaccagaagaagaaggcaccaaagcaagaatcaagcaagaaagttttcccatcaagactcacaatgtcttggctaggtcaaggaaagggtaataacaacaacacgcaggaagtccctcaagaacatgatgcacgtagagacagcacaagcgcattcattccttgattttcaaacctgaccctcgaggtcaaaaactattcgatttcaacttgattatgtggatatttcaatctgcagttattgacattgagagcctacacaaagatatctatttaagcgatactctctaacgcaagatcaatcgtttgtttgcattgtgaaagttaaacgagattgattcattatttgcatatgattttggtaatggggttaaataatattgggtcatcttcaaattaccggttnantttnaaaaaaananntanaaaaaaaantggggggcccnttggggcccggttggccgtc

SEQ ID NO: 135849 - DNA, 546 bp, Arabidopsis thaliana
  unsure (1)..(546): unsure at all n locations
agtaacaaacccaccctacactgcttctgtttgctgctcaagaaaattgtcactgccaagattctagatttggatttgttttcaagagctgtgaaagtttataccaaaaatggtaatgctttgacggattccttgctgaaatctgtcttaaagtccttgagaagcgtggatagggttgaacagagcaatgagctgttgaaagaaatgaagagaggaggctatgttcctagtggtgatatgcagagcatgattgcatcaagtcttagccgtaagggaaagaaagaggaagctgatgaatttgtagactttatggaagcatccggaaataatctagatgacaaggcaattggcgtctcttgttgaaggggattgtgattccggggatcttgatgaagcttagtgtgttccggaaaatggttggaaccgagggggnccccnaatgctgatnatccatttnagaagttggtcttncttnttcaccagntcangtaggggcggtncaagttttggtcccaggccggaaaccactgaccncccttgcggngc

SEQ ID NO: 135850 - DNA, 382 bp, Arabidopsis thaliana
  unsure (1)..(382): unsure at all n locations
atcagccattaccttggcctcacacagaacattcagtcgagtatggaactcgtgagatcagcggacgagaagtatcatttctcggatttcactaaatccgcggttcttgtcacgggcacagctgctgtagccgcagccaccattacagggaaagtggctgcagctgcagcgactagtgtggtcaacagtcgttactttgctaatggggctttatggttctcagatgctttgggccgggctgcaaaagcagcggcccatatcggtggaggaggaagcaattgatgtaaaaagtctttgggcttccttggaaaccataaataaatgatatgtgaggttttnnnnnnnnnnnnnnnnnnnnnnnnnnnnnnnnnnnnnnnnnnnn

SEQ ID NO: 135851 - DNA, 427 bp, Arabidopsis thaliana
  unsure (1)..(427): unsure at all n locations
gaagcattcaagaatccattatgagctcatctgattccgttaataacggcgttaactcacggatgtacttccgtaacccgagtttcagcaacgttatcttaaacgataactggagcgacttgccgttaagtgtcgacgattctcaagacatggctatttacaacactctccgtgatgccgttagctccggctggacaccctccgttcctcccgttacctctccggcggaggaaaataagcctccggcgacgaaggcgagtggctcacacgcgccgaggcagaaggggatgcagtacagaggagtgaggaggaggccgtggggggaaattcgcggcggtgatttagggatcccaaagaagaacggngctagggttttgctccgggncttnncgnaaacgccgnangaacgngnnngttgngtangacc

SEQ ID NO: 135852 - DNA, 538 bp, Arabidopsis thaliana
  unsure (1)..(538): unsure at all n locations
gccaatttcaaagcttgaatttgactttgagagaaagaagttagttaaagatgatgtcagagaattaatttaccgagagatattggaatatcatcctcagatgttggaggaataccttcgtggtggtgatcagcttagctttatgtacccaagtggggtagaccgatttaaaaggcaatttgctcatcttgaagaaaatcaaggtaaaccaggagcagcaggaggaggaagaagtactgcacttcacagacatcatgcttccttgccaagagagagagttcctgctccaaatggtgaaacttgcagaagaaagcagtgatgttgagagaagagcagcagctgctgtgggcttcaaccttggaatccgtggaagcagacaatggaggaggttacagtgctcgtaacctccattgaagagtgcaagcatcagcggttcttaatgcattggtgtccatataaactagccaaagnggttccttnntttggnggaggtattnaccanttnnggttcctgtaagtgcttcnttcnanttttttc

SEQ ID NO: 135853 - DNA, 412 bp, Arabidopsis thaliana
agcagacaatggaggaggttacagtgctcgtaacctcctccgaagagtgcaagcatcagcggttctaaatgcattggtgtccaatctaaaactgacaaagaggataccatagctgaggaagaagataatgaaacagttgcagagcttactgataaagttgcttctcttcacaattcttaaaaatgatttagttattttttttcttttcttttcttttttcacgaaagttttctggtgaaaagaaattggtttctccattcatccacatctatcttcgtggttgggtttgatttgttgtatttaatagttttgggggtttgatgaaactttaaataaaaacatcgatctccatgtaatttttttgtttctctcttttctttaaacactcatattttgaaattatttatatact

SEQ ID NO: 135854 - DNA, 583 bp, Arabidopsis thaliana
  unsure (1)..(583): unsure at all n locations
cgtttttttatatgggtagttaagcaatagaggattttcttgatttaactccacagccttcatttattctccaggaagcacttcctgatatattggagaaaacacctaaagagttcttcgagaagaagatcaaagccatgagacgcaacgtcgagctttcatgtgagaggctcaaggatattccttgtctcttttgtcccaagaaacccgaatcttgttcttatttatggttgaagcttgacacatcaatgttgaataatatcaaaaatgattttgatttccgcacgaagctagttagtgaggagagtcttatccttataaccagggagtcggctcctagggagcaggagaatttggggtgagggatatccgatagggaaccggcgcaatccaggtgggaccaaggaaatatttggacagacctaaaaagggttccaatgaccggcaatggccatcccccaggggagccatcaaaccccagggccatgccattaccagatcgnggccctgcacgggtgaagagccctgccagcccntttattggggagcctatttcggncatcgaaagctggntgnaaaggng

SEQ ID NO: 135855 - DNA, 515 bp, Arabidopsis thaliana
tgaagcttgacacatcaatgttgaataatatcaaaaatgattttaatttctgcacgaagctagttagtgaggagagtcttatccttataccaggagtggctctaggggcagagaattgggtgaggatatcgataggaaccgacgaatcagtggtacaagaaatatttgacagactaaaaggtttctatgatcgtcatgccatctccaaggaagctatcaaactcagtggccatgccattaaccagatcgtcgtctctgtcaactgattgtagtagtcctatgccacaagtccacattataatttgtgcgtaattccttaattatcaggaacacaatcaagaaaaatagcattggataatgaaataaagatgtgtgaaaaataaaaggttatttgttttcattattatactcattttcaacatagtttttgatacattgtctatataaaattgggccaagtggaccaaaaggaaggtccaatttagggggggttcttccaaaagtcctcttattcc

SEQ ID NO: 135856 - DNA, 395 bp, Arabidopsis thaliana
gaaaggattagtagatttgaatcggcagtccgtccagatccaaaagaggctgcattccttaaatcccttggttgggatgagaatgatagcgacgaatacacccacacaatggaggagatgagagattggtgcaagaggttcaagccatcactgctgcagaagctgcctatcatataagaggcacctgagggcatagctcccgactcgtgatcagattttgttcggggttttcagatggaagatagtttttcattctcttttcttttctttattctctttggatttttttttttttcttttggttacttcggcgctggctagaaggtggaaaggctttagttgcagtaagagtattgatctgcttcttcttcagaggtgcaacaaaatgaaaaatg

SEQ ID NO: 135857 - DNA, 552 bp, Arabidopsis thaliana
cacgcaggggggaggggccgttccagggcagacgatcaacgtcgaggacggcgatgccgttgcgcgtcgaatgccggcacggggatggagagcgacttcgcttcgttccactctcggtcggcctcagtgatccagcgaatcaaccccatccaggcgggattgcccaccttgcgcatgcgtagcttgatgaagcgataggcggcgccgtcgatgttgagcggcgccggggactggatgccggagttgttggtggtgttgatcggccgcagcatgccgtcggcgatagtcggggcgccgtacacacccgtccagccttccagtcctgcgttgaaatgccagatgccggcagagtcgaactgcgtgccgctgcctgcggcgacctcggccagagagcgtgccatcgaatccaggccgttctggactttcgtgtggaccgcgctgatgtcagcggtgcgctcgtttttttcgttcagcacgctctgaatacgggcgcgctcttcgttggccaggtttaaaaccagatcctctgcacgcttggccacttcgcccact

SEQ ID NO: 135858 - DNA, 519 bp, Arabidopsis thaliana
  unsure (1)..(519): unsure at all n locations
tcagggnccgggccggaanttcccgggtggcccactgggtccgggttattggaaacggaaatctaccgtcacggtgataaggattgtaccttatagcgcagtccagttgtttgcatatgaaacatacaagaaactcttcagggggaaagacggtcaattgtcagtcctcggaaggctcggtgctggtgcttgtcctggcatgacgtctactctgattacataccctttagatgtgctgagattgaggttagctgttgaaccaggttatcgaaccatgtcccaggttgccttgaacatgctgcgggaggaaggagttgcatcattctacaacgggtctaggtccttcgctttttaaagtatagctcctttacattcgccatcaaactttctgcgtctttgatctgggtaaaagaaatctctgccagagaaggttcaacccaagacacaatcatctttgttaacagcagtagtagctgctgctattgctaccggtacttgctatccattggataccattag

SEQ ID NO: 135859 - DNA, 437 bp, Arabidopsis thaliana
ttctgtttccaaaatggctcgttttatggctgcattagcattggcatacatgtttgatggaaggatggatgaatacgcgatgatagggacttcattggaaagtacatctaaaagtgttaccttaaatggtgctagaacaatgggctcttgatcaaattcaaagccttcattaaaactttcatgggaccaccaaatctcctcacctggggctttatcatcggctccatcctatgttagcacaagtctcgggagagagctcggatccccagaaggctgggccactttgacgatgcagtggttccgaaattggaagatttgttacaatgttgcgaaacccttgtcttgtactcagagcttgtgcagcttttgcacttcttcagtttacaatacctgaaagccgtcacgcaatgcatcacgcaagcttgatgcagaatgct

SEQ ID NO: 135860 - DNA, 529 bp, Arabidopsis thaliana
  unsure (1)..(529): unsure at all n locations
acgagactgcatatgagaactaccataggatctttgtccctgaaggtaagccattgaagtgtgaatcaagagagccattgagagttaacacaatgttccagcacattcagaagatgctctctagtgaaaccgctgtgattgctgaaaccggtgattcttggttcaattgccaaaaactaaagctgccaaaaggatgtgggtacgagtttcagatgcagtatggatcgattgggtggtctgttggtgcaactctaggatacgcacaggcatcaccagagaagcgagtgttggcattcatcggtgatgggagtttccaagtcacggttcaggacatatcaacaatgctgcgtaatggacagaagacgatcatcttcttgattaacaatggtggctacaccattgaaggtggggttcatgccggtcctttaacgnnntaagacctggactncactggctcgttncggcattcataccggtnaggaattctggcttaaaggtnggtcgaggggggtngtgngcggttcggnac

SEQ ID NO: 135861 - DNA, 443 bp, Arabidopsis thaliana
tttttgaaactgcaaaaggagctttactttattccatgataaagcgtacatggaaagagatactaataagtttgaaacatgattaaacccaacggtcgaaaaatcaacacttatcagaaaatgtcactaaattggtaagaagcattgaagattctgtgttgcttcttctactgaggattgggaggacggctgttagcagcagagacgcgtgagccccactcaagcaactctttgctcgtatcatccttgtgaagaatcacttctatgaaacatagacaatctttcttctccgtcgtcgctgtcgtaatcgcctccactaactcctcttcgtatctcacctttgcagtccagcaattgccttcaccgttatgaatgggcgtcaacgagaccagtgtagttccagttcttaatcacgttataaggaccgtcatgaatctctactt

SEQ ID NO: 135862 - DNA, 536 bp, Arabidopsis thaliana
  unsure (1)..(536): unsure at all n locations
tgtcaacgntgnctgattncaaaccttnaaggttcgggcnttcgtaccaggtttggccccgccattagatttccggggaagggtttttaccccggccttaaatggaacgaggatccttctctccaaaagcttgtcatcggaggagaagtttgcatgtggggtgaaacagctgatacatccgttgtccttcagaccatttggcctcgtgctgcagcagctgcagaacggatgtggagcaccagagaggccgtgtcaaaggggaacataacgttaaccgcattgccacgtctacactacttcagatgtctactgaataaccgtggcgttccagcggctccagtggataacttttacgcacgaagaccccccttgggacctggctcttgctatgctcagtgatccaaaacgtttcttctcattgtactatatgtaatgtctcgtctgaaatctggttgtcacgttgctttttctgttctaaattgtgtgcttctcaatttactcaaatcatgacaacatctgaaattacgatctaaaac

SEQ ID NO: 135863 - DNA, 365 bp, Arabidopsis thaliana
  unsure (1)..(365): unsure at all n locations
gaaaaaaagtagaggctcatcattcaatcaatatgaagatgagttgttatgttgtgtatatttagaaatatcacaagatccaattggtagtaataaccaatctgggaaaaaataagtaaaagctaccacgaaaaaaactggaaggttgggaaatcaaaagcttcagatctttatagagtaggatggtagcattacatatgttgttagaaatctaaagagctgcatcacccaagtggagaatatgcatccatgtaattttattatcattgtgttgcttgattttgtattaaatttttaatataatagtttgttgtgtaatatttgtttttaattctaaccttatacttttanngtaaaanacnnng

SEQ ID NO: 135864 - DNA, 408 bp, Arabidopsis thaliana
cgaacttcaagttcaaagagcttaggggggaagactaagggatcgagttctaaagccagcagctccgattcaagccattggccttgtgaatattgcacttacgtaaatccaaggtcgaccaccatttgccaaatgtgtgaacatggccggtgaaatgccagaaactggcattaaagactgtaatagtaatgcttcgtcgcttttggtcataattatgatcaagtgtcgtgtaactttgtatgtttctcgtattagaataaacgggtccaataaattggattagattggccattattattgatttgccaatggccaaaaagtgaaaacatgagaggtgagttatatataagcccttccaaaataatttgtaaaactcctgtaaggttttttctaatcttttgtccggac

SEQ ID NO: 135865 - DNA, 375 bp, Arabidopsis thaliana
agcggggtggcggcgtcatcgccgcaggaggagggggggagagcaggaagatacatgtcggggtctcggacgacccggtgggtggcgcaaagcgtcaagcgaaccggtgttacagggagttactaagttttcgttaattttagtactcgccagttcgctattccacgatttgtcggagaaatgtcggggtcgtggctggaacagttcgtcgcgcccaatcggacaattccgtctcacttggtcggtgattctttcagaatcaataggttgcgtttcgctctatttcgttcatccgcggcccgttgaacggtcacgcacgtccagtttgaccccgacgcacggcctgccgaccataagctgttaattcgcgacatc

SEQ ID NO: 135866 - DNA, 497 bp, Arabidopsis thaliana
  unsure (1)..(497): unsure at all n locations
ccctaagcatttcccagattggnttganatgccaggttctctaatcctncnactggtagtttctccacacttccttgctcaccatatacgtggaaccnggataggcactgtaatcagcctttnnattggatgtaaccttcttcaagaacatattcgagcatcgggtggattcaggaactcattcacacagccccgtggagtatcaaacactttagggatcatccttcttttggtctaccctgtctgggctctaatcgtccgtgtcatgtaatccacattcctctttcatcgacaagttgtttcttgctcggctgctccaataaactgcgtgaaacatcgagcagagcaagtctctatggtgttcctttcttctgattatgttgcatacccaaatactacctcaagctcaatcaatggtctatgtattaaaaaatctcaagttttcaaactattttggttggcttctnttaaggaaaaagntcntttatttggnttgg

SEQ ID NO: 135867 - DNA, 685 bp, Arabidopsis thaliana
cggcccttagctgtcgctgcagttcgcagtaccggtccggaattcccgggtcgacccacgcgtccgggcaacgtggccatcagcgctctgcagatcaccttccctgcggccggtgcgtcaggcagtggtggcgggagcatcggcggtggcggtggaagtggtggatccagaaacccggcattcgaggaagtaccgctatgagctatgtgaagaaggatggtgttcccgtcgaccctggtcagaccgtggtcgagctggataccggtgatctggttgcggtggtctgcactcggacactgcagggcgggcagatcctgttccgcgggttggcccgcgccatcaccgaggccggtgtgccgctgatcagcggtgatggcaatgccatcgaacgcgagttccagcacagcgaccccagaccggccaagggccgacgacgtcgcccgggatgtgctgctggcgcttctcggggagcagccgcagctggttgcgtggtcggaccaggtgctgctggacgtgagcatccgccaggcgcttgccctggccaacattgataccggggccgtcgacgcctcggccgttctgtaggagaaaagatggcgacgattgatggccggcagatcattccggcggcagaccttccgcagcggtcagctggcgtgcttgacgctatggtgggagtggttcg

SEQ ID NO: 135868 - DNA, 792 bp, Arabidopsis thaliana
  unsure (1)..(792): unsure at all n locations
tccgtctgcagtaccggtccggaattcccgggtcgacccacgcgtccggtcacatacatcgcgcgtggaaatgttgcgctatcagtgttgatgacagcagctagcactgtttcagctgtgattatgacaccgcttcttacggcgaagcttgccaagcagtatatcacagttgatgctcttggattactaatgtcaacactacaggtggttcttctcccagtgttggctggtgcatttcttaaccaatactttaaaaagctggtgaaattcgtctctcctgtgatgcctccaattgcggttggaacagttgcaatcctgtgtgggtatgctatcggtcagaacgcatctgcaatactcatgtctgggaaacaagtagtcttggcttcatgccttcttcacatctctggatttctctttgggtatctgttttcaagaatactcggaattgatgtggcatcatcgagaactatctctatcgaagttggcatgcagaactcggtgcttggagttgttcttgcgacacagcattttgggaatccactcactgcagtaccgtgcgctgtttctagcgtctgtcactcaatcctcggtagcggcttggctggaaattttggagacgcagtgcccccaaaacaagctttgaaggcttaaaagaaaggcaaagggaaaggtcatgaaggncncancttgtggtaactcaatttcaaccatcntttcaaggnccctttaggtaaaggttnttgnaccaaatngaccccaaacngggtnatggctttttaaaaggttttngga

SEQ ID NO: 135869 - DNA, 667 bp, Arabidopsis thaliana
ctggccgtctgcagtaccggtccggaattcccgggtcgacccacgcgtccgcaacaacagacgaagcaacatctttgatccattctctcttgacgtatgggatccattcaaggaactaacatcatcatcactttctcgtgagaactcagcgatcgtgaacgcacgtgtggactggagagagacgcctgaggcccacgtgtttaaagctgacttgcctggattgaagaaggaggaagttaaagttgagattgaggaggatagtgttttgaagatcagtggagagagacacgtggagaaagaagataagaatgacacgtggcaccgtgtggagagatcgagtggacagtttacgaggaggtttaggttgccggagaatgtgaagatggatcaggttaaggctgcgatggagaatggtgtgttgactgttacggtgcctaaaggctgagactaagaaggctgatgttaagtctattcagatctctggttgagtaatgggttcgagttttatcatcggagttccttgtgtttttgtcatggttatggttcatgttttacttgagtgtgtgagtactctatctaaattataataatctccgattgagctatgaattatgatgtatcggatacatttgatcctaatgaagtatggaataaataataattatta

SEQ ID NO: 135870 - DNA, 660 bp, Arabidopsis thaliana
cgcagtaccggtccggaattcccgggtcgacccacgcgtccgaaaaaaccacaaattggtaaatatttccggagaattctttcgattcatgcctaaccttgtcgtattggatttatcatggaatagtagtctcactggattaccaaagaaaatatcagagttagtctccttgcgatatcttgacttgtcgtatacaaacatcgaaaggttgcctgttggtttacaagagttgaaacaactaatacatctgaatttggagtccatgaagagtttggagagtattgctggggtatctaagttgttgagtttgaagacactgagactacaaaagtccaaaaaggctctagatgtgaactcagcgaaggagctacaactcttagaacatatagaagttctaaccatagatatcttttcaagtttggttttggaacatttgttatgctctcagagattggcgaaatctattcaatatgtagagcttatagaggttgaggaagaatctttcaaaatattaacttttccaagcatgtgtaatatccgtcgaattggcatatggaagtgtggaatgaaggagataaaagtcgagatgagaacatcatcatgcttctctagcctctccaaagtcgttataggacaatgtgatggtctaaaggagttgac

SEQ ID NO: 135871 - DNA, 750 bp, Arabidopsis thaliana
  unsure (1)..(750): unsure at all n locations
taatcacgacccactatagggaaagctggtacgcctgcaggtaccggtccggaattcccgggtcgacccacgcgtccgggaacaatgtggtggaagcagttcaagccataatactcttccagaaggagttgttagttctttgatgaatggtgaaatggcattgccgcatactgataagtttcctttgccgtcgcctctttcgtgtcctggaggatgtcaggaggctttctactgcagtgaatcatgcgcaccggcagattgggagagttctcattccttactttgtactggtgagaggtctgaatcaatatctagagaggcgcttggagagtttattaaacatgctaatgataccaatgatatttttctcctggctgcgaaggcaatcgcctttaccattctaaggtacaggaaactgaaagcagaacatgtggacaaaaaagcgaaacagagtgagccaaagcaagtccgcttctcttggaagcatggaaaccagtatcgattgggtacaaaagaagggtggtgggactgcattgcattgccagatgcatggtgatcctactgatgaaggggccctcagggtccaaataaagaaccttccgtgtccggctttggggcccctgaagatagccatatttgccaaagaatgtgaagccctggtcccccccgaaatccatggggaacccccggattttnnccggaaacccanccttggggngcncccccgntngggnaattcctngaaanngg

SEQ ID NO: 135872 - DNA, 668 bp, Arabidopsis thaliana
gccgttcgcagtaccggtccggaattcccgggtcgacccacgcgtccgaagaataaaagcactcaaaagtcaaagcgcgcgcgcgctcacacacacaaaaaacaatccagagctaattgattcatcaatggcgatgtcgggaacatacgtgacggatgtgcctcttaagggatcggcggagaaacactataagaggtggaggagcgagaaccacctcgtccctgaagctatcggccacctcatccaaagtgtcaccgtccatgacggcgattgggactctcacggcaccatcaaaatctggaactacactcgtgatgggaaagaggaagtattgaaggagaggatagagatggacgacgagaatatggcggtgacgatcaatggactcgatggtcacgtcatggaggtcctcaaggtttatgtcacgacgttacatttcatccccgagtccaaagatggctgcgtctgcaaaattactatggtctgggagaaacgcaccgaagactccccagagcccatcgaattcatgaagttcgtggaacagatgattgctcacatggacgaccacatcctccaaaaccaggaatgatggatcgatgcttaatcatcatcacatcctccttttatttatcttaattaatgtgtgtccatctcgtacatgatattac

SEQ ID NO: 135873 - DNA, 664 bp, Arabidopsis thaliana
  unsure (1)..(664): unsure at all n locations
tccggaccggaattccagggtcgaaccacccgtccgaagatacttacagagaaccacaccaatcaccgtacaacgtggctcagccacttcaggcacctataggaacaaaagcagcacaacaacaacaacctcctcctcctcagccttttacctctggtcctccaccaccgcaatacaccgcagtaccaccgccacgacaagtagtaggattaccagatacatcagcgtatactcaggtgacttacactggaggaatggggaaacaagtttattacacggaggctccaccgccgcagtaccatggagttggcttacctgtaactggtatgagtgaattgagaactggaccggacgggaagcttgttggctatgaacatggcacctaaagttttcatctcagagttcagattcggctgtttgatttgattgaggtatttcatatggttgaatcaggttattgttaatctattacaccaaatttcatcatcttttgatatatatatatatatataggggggttaaggcccctttggtgcctgataaataatgtttttttcttanaaaaaaaaaaaaaaaaaaaaaaaaaaaaaaaaaaaaaaaaaaaaaaaaaaaaagggcggccgctctagaggatccaagcttacgtacgcgtgcatgcgacgtc

SEQ ID NO: 135874 - DNA, 630 bp, Arabidopsis thaliana
acgcctgcaggtaccggtccggaattcccgggtcgacccacgcgtccgggaagatcattacggcagctgaaattctagaagttatgggtgctcctctgtcaggatcagatttacgagcgtatgtgatgtcaggtggtggcataacatttaagaaattcaagccaacaattaggagcaagcgctgctttcttctattccccgttcagggttctgagcaaaagggccttgttagcgttgaagttaagaagaagaaaggccagtatgacatgaagcttttggcggtagatattccaatggcatctggtcccgaccaacggttatttctgattggcgatgaagaagagtacagaattggtggtggtttaatctctgtgttaagagaccctgttgtgaaagcaatggcagcaactaaggagttcgataatcttgatagaatcgaagaggaagaagacgctgaaagagaacttcaagaagctgaaagaaagcatcgtgaagagatcgagaaactcgagaaggaggctcataactcgtatttcttccccagaaatattttcttcttcggtggatataagacaacaccctgaatcttttccaaacccagtttttttttgttttgctaacttcgagaat

SEQ ID NO: 135875 - DNA, 585 bp, Arabidopsis thaliana
  unsure (1)..(585): unsure at all n locations
gtacgcctgcaggtaccggtccggaattcccgggtcgacccacgcgtccggcgggtccttctcggccttcaggctggccacctgctgcacgccgctggcggcggtccagtggaaccagttctggccgacacgccagatcacgccattgtcggcagcgaagttcacgttgcccgcgcgctcgttgctgcgggtcagctgggtcagcgcgccgctgcgcaggtcgcgcacgaacacatcgccattgcggacgaaggcgctgcggctgcggctgcggtcgtaggccggctcggccacgtcgagggtgccgcgctggtcatcggccacctgcgcggccacaccgccggccaccggctggcggaaggtatcgcgcaccgggctgccgctgcgcttgagctggtactccacctgctggctgttccacgaccaccaggccttcttcgaaccggcggaccgatccagtccggggtcggccatgcgcctgttcgatggtgatcgcgtcggccggaattccaaccggtncggcaananggcgaaagaagangaaaggganattggaaattggngaggacantannaaacggaaag

SEQ ID NO: 135876 - DNA, 629 bp, Arabidopsis thaliana
ctggtacgcctgcaggtaccggtccggaattcccgggtcgacccacgcgtccggcgtcaagacaagttggatccagtgaacaggggaaggtccaaggatgtatatccggggtaagggcttttgctcaagttgtggctccatttgtatatagtccattgacagctctatttctctccgaaaatgcaccattctatttccctggattcagcattctatgcatcgccatctctttgatgatcggattccttcagagtcttctgataaaagatcatccttctttgcccttagtgaacataacaatcaacaacccttcaaaagcggaagcttgacaagaaatatatcaagaagcaaatgtaactgtaatattgtacaaatttgcttcaaattaaaagttcatttaaaacgaatacatagctagaagctgtaaaaataacttagttttcttacaaagattgtcattgcaaatgaataaaatcacttgtatcccataaaagacagatgggcgtaatagcgaaaaggcccggaaacgaaaaacctttcccaacgggggcggcccgctttaaaggatccaagcttacgtacgcgggcatgcgaagtaatagcttttgtatagggggacctaaattaaa

SEQ ID NO: 135877 - DNA, 628 bp, Arabidopsis thaliana
tacgcctgcaggtaccggtccggaattcccgggtcgacccacgcgtccgcttttagttgtgtgtttacctaatttaagtgttctcttatctctataacttagattgtgttgtggagactttagcatatttgggcttggagtttgtttctcactggcacaagaatgatttatcatttggtagtcttgtgagatgatcaattactcgcttagcttagttttcacaatcatacgaattagcttaagaagctctgcaaaatgtgcactcatctattctttagagctcaagttgaatgctttatgtggtctcttgtatctctgtacattttgttgtgctgaacaaaggtttgacggcagttagtgcatgtgtaagtaggcatatttttgtcagctgcatacgtaggttctagctacaaattggaattgtatgtgtttgaaaacgtaaaatcaattataaatgtttttgaaaatcatctatacaagcatggttatttggttcttgtttccttattttttcgggtaagggccacggataattggttagacattggttataataatgtgggttttggtatctggaatttctcgtcaaaatgatgtactgtatcattaaatgaatatcacttattga

SEQ ID NO: 135878 - DNA, 655 bp, Arabidopsis thaliana
  unsure (1)..(655): unsure at all n locations
ctacgactcactatancaaagctggtgcgcgtgccggtaccggtccggaattcccgggtcgacccacgcgtccgggcatgaggccgtcacgggacatcgcgaagaggacgcgggtctggccgagcatcatgaccatgacaactgttgtgaggccggccaggccaccgaagttgatggcggtttgtgcccaaccgattccgttggcctcgaatgcggttgcgagggtggcgctggaatcgccgacgagaggactgccgtccttgagttcggtgtacttgaccatgccggtgaggacgagtgtgacggcaacgtagagaacggtgacgatggcgagcgagccgaagattccgcgcggcaacgacttctgcgggttcttggtttcctcggccgtggtggcgacgacgtcgaagccgatgaaggcaaagaacacgaggctggctgctgcgagcaatccgtaagcgccgtagctacttccgcctgcaccggtcagccaggagaacaagggctgatggatcccgcttgcagagctcccggttccttcggacggcgggatgaacggggagttgtcccccttcttgatgtagaaggcacccacgactatgacgagcagaactactgcgatcttgatcgcggtgatgattgcggagactcgcga

SEQ ID NO: 135879 - DNA, 657 bp, Arabidopsis thaliana
  unsure (1)..(657): unsure at all n locations
aatacgactcactatannnaaagctggtacgcctgcaggtaccggtccggaattcccggggtagttccgtatcggaaccatttcagcatgatctgcatccacatcccttatattggacattggaaagtttccaaacgatgtcaagcttgtggcacggaaactgatgataatctcttaaattgtacggtttgtgatgattacgcattatgcatgaagtgtgccactttaccaagaaaggtaaaacataggtgtgatgatcattttctgtcactatgtcaaggtgtgggaaacgcaagcggcaacttgtggtgtgatatttgtgagaccaagacagatccaaatgtatgttactatacatgtgaagaatgtgggcttagtctccatcttaattgtgttcttggtgatttttattatgttaaggtaattcctgatcagccgaaagtatttgccaacaatggggttactcgacttttctgcggcgtttgtgaagttcgttgcaagtttcccttcatcatgtggggagctgtaggagactttactggctacgtttgttcgattaactgtgtattcccaaaagcggataaataatagggtagccatgaaagtattatacaaatttgtgaaggcattcgatatgtttccaagatgctgcaagaa

SEQ ID NO: 135880 - DNA, 565 bp, Arabidopsis thaliana
  unsure (1)..(565): unsure at all n locations
gctggtacgcctgcaggtaccggtccggaattcccgggtcgacccacgcgtccgaacagtttcaacagcagcagcaaaggtcaaaattaatgcagttgcctcaacatcagcagcagcaactacttgcacaacaacaacaacagctcaggcaatcttctatgcagggattgggtcaaagtcagataccagcacttcatgatatgcatgggcaagctcagcaaaagtttcagacgtcacatgggcaacatcaaatgccatattcccagccaatgggcgcgcaccaacaattccaagctagacagctctcaggtggacatattcagcatagcatgtctcaaggacagctcaatccagcgatgaaccgtcacttaaaccagttttcaggtggagccaatagtgcattgtttacttctgcacaaggctccccaaaggtggccaaatggatacccaaacatgtcatctatggcaattttagacactttgttnctaggaatgccagcaaattttgggaagttttcgggggtacccaattccccccaaaaaagaaaggcccaattttcggttc

SEQ ID NO: 135881 - DNA, 628 bp, Arabidopsis thaliana
acgcctgcaggtaccggtccggaattcccgggtcgacccacgcgtccgattgcgttcagatattaatgagtggcgttgtggattctgcaaaaaggctttttatgaagagaagtatctcgataagcatttcgattcgcgccattacaatttacttaatgcgagtcatggtaaatgtctgtcggatctttgtggagcgttgcattgtgatcttgttgtagacacagctcggcttaagtccaagtgtaatcctgcagctgctgcaaaaaaccggcacttatgtgagagtttggctaatagttgttttccggtaaataaaggttcatcagccaaccgtcttcacgatttcttcttgcgtcagttctgcgatgcacatacatgttcaggaggatcaaagcccttatctcaaaaaccaaagaagaggagtatagtgtacattattttctccatcatcgttttggtagtgcttcttctctattacagctttgtctatttgttccgaagaggattaaagagaagatctcaagatttgaagcgtattagacacaatggtctgaagaagaaacccttctaaccatatcaagctttagctttaatggcggctgagagagagtacatttttttttttttg

SEQ ID NO: 135882 - DNA, 293 bp, Arabidopsis thaliana
  unsure (1)..(293): unsure at all n locations
acgcgttcgggagcccgaaacattagtggggaaggatctttggtgcttaagttgttggaccactaaaatttcgctcctatgggataaaaatcagttagcatgttgtggaaaaaagagtacgaacaagctttagtgctctattattttgtatatgcatacatgcatacatatgtatccttaaaacctgacgaggacccagctctattttgtagttttaagttaatgtcgatgctatgacaccaccccggtttattttgtggttgnanaaanggaaaaatgttcaacgtgnaana

SEQ ID NO: 135883 - DNA, 799 bp, Arabidopsis thaliana
  unsure (1)..(799): unsure at all n locations
gtcgaatgtggagaagcatgaaaatgtagcagaggatttgaatgcagaaaaggaaagcttagtcgtgaaggaaaatgttgtagatgaagaagaggcgggtaaaggaccgctgaaactagtaacaagtcaacaggaggttcttcatggcttcagaaggcttcgtggactcagctggttagcgacaaaaatacttcttcattcagtataactcaactcttcccagatttaacttcagacaagggcgaagcagctggagtgatcaacaatgtaggaaaccagttctccaactctaaccagactgcaagtgcaatgaaacaaacagattacgcatctagcagcggtggttttgtggctgcgggagtccctgtggatagtacccctgtgagaagtttagatgagaatcggcagcgtctgaatggtaagaatgtgagtgaaggagctaaattgggtgcgaagaagaagataattaagagaaaggttgggtcgggggatacttgcacatttatgagaagctcgacttctttgaaagagtgggcaaaggctaagaaggcattgagtgagcccaggcgaaagaaaaatagcgaagaatgggttaatactatcagaggctcttcaaattatgtatccctccacagtttttgtgcttcacacaatacaatgttttttttaattcaaggttttaaggtacacttctataaaaagcatttctcattaaaaaaaaaaaaaaagggcggccgctctagaggatccaagcttacgtacgcgtgcatgcgacgtcatagctggtgtaaannnnaac

SEQ ID NO: 135884 - DNA, 730 bp, Arabidopsis thaliana
ccgggctgcttactcatcctcagattcactcgaccataattcaatgcagagccagcagttctatgactctggtctactcaactcaactcctaaagtttcaagcatcagtgtagccaagacagaaacttcttccatagatgcttccataagaagcagctcgtcgagagatgcagaccggtcagaggaaatgtcggtaagcaatgcgagtgatgttgacaacgaatgggtggagcaagatgagcctggcgtttatatcaccattaaagttttaccaggtgggaaaagagagcttcgaagagtcagattcagccgagagagattcggggagatgcacgcgagattatggtgggaagagaacagggcaaggatacatgaacaatacttgtgatcataaatctaagaggttttgttttttcctcattctctcggtatacagtctttttttccagctcaagtaaattcttccacaggtactcattgtgcctcccagaaatctcaaaatatcaattgtgggatatgttttaaggaggtttcttattttcttccttcaaaaaaatttgagaaagcttggaaaagataagatgttgtctcctttgctcaatatgtgtatccttaattagttctttaaaaaaatacgttcttcaaaaaaaaaaaaaaaaaaaaaaaagggcggccgctctagaggatccaagcttacgtacgcgtgcatgcgacgtcatagctcgtctaa

SEQ ID NO: 135885 - DNA, 392 bp, Arabidopsis thaliana
  unsure (1)..(392): unsure at all n locations
gataaccaatggatcgacgcggagtataccacttccgggatcatcgtcatcatcggcgatcaattcttgagaatgagcaatgggaagtataagagtgtggagcatagggcgaagatggataaggagaagacgagaatctcgtggccggtttttgtggaatctagccttgatcaagtcttcggacctttgccggagctaattaccggtgatgagaacgttcccaagtttaagccttatgtctacacagactacaaatttcgtatgcttaagaagcttcttctcgactgagaaaatctcataataacccataaacagaaaaggagatcatcgaataaaaaaaaatatttgtttgggtttgcctccggcttnantnaataagttttanccnattt

SEQ ID NO: 135886 - DNA, 901 bp, Arabidopsis thaliana
  unsure (1)..(901): unsure at all n locations
taatttctctcatctctctattagaaaaattattagcaattatgttgtccactgcaccggccttttcattctccgaaccgggtttggttaatcaattctcgggtttccaaaccgggttcactccttgggaatgggattgctctgatctctttttcgtggaccaaatgtctcttgaaccggccatccctagtccttgttatggtgaatccgacactggttccgtcaaaattaattccggttctcatgacatgaaaaccggttctgacgaatcttgtgccggtttcgtcaaaattaatcctcgttgtgacgacgccgacatatcaaacgatctaccgtgctctcaagcagatgaaccggactcggacgacacaaaacaattgacagccatcacaagtttcggttcgggagagaataaccataaccggaaaaaaatgatccaaccggagatgaccgacgagcggaagaggaaaaggatggagtcaaaccgggaatcagcgaaacggtcaagaatgggtaaacaaagtcacattgataacttacgagagcaagtaaaccggttggatttagaaaaccgtgagctcgggaaccgactccggttagttttacaccagcttcaacgagtgaattccgacaataaccggctcgtgacagaacaagagatactccggctaaaattgtcggaaatgcgtcggattttgatcattagacaacttcaacaacagcaacaatgggaactacataaccggagaatgatcatgactgaacaaaaccaccctcatcttcaatgatagatcaaaatatttnnnnnnnnnnnnnnnnnnnnnnnnnnnnnnnnnnnnnnnnnnnnnnnnnnnnnnnnnnnnnnnnnnnnnnnnnnnnnnnnnnnnnnnnnnnnnnnnnn

SEQ ID NO: 135887 - DNA, 522 bp, Arabidopsis thaliana
  unsure (1)..(522): unsure at all n locations
tatctttcaagatcttgttgattggagattctggtgttggtaaaagcagcttgcttctcagcttcatttccagctctgtcgaagatcttgctcccaccattggtgttgactttaagatcaaacagatgaaagtaagagggaaaaggctgaaacttacaatctgggacacagctggacaagaaaagttcagaacattgacaagttcttatttcagaggctcccaaggaatcattctcgtttatgatgtcacgaaaagagagacatttttgaacttggcagatatttgggctaaagagattgagctatattcgactaaccatgactgcattaagatgctcgttggcaacaaagttgataggagaaccagaaagggaggttacccgggaagaaggaatggccctagcgaaagacctcaattgtttggtccatgaatgtggcgcaagaacccgagaaaacgtgaccggttgcctcgaagagctagctttgaagatatggggcctacctttggaaaggaccccctnt

SEQ ID NO: 135888 - DNA, 850 bp, Arabidopsis thaliana
  unsure (1)..(850): unsure at all n locations
gcaagatgttgttgatcagttctttcaacctgttaaaccttctttggggcaaatagttagacagaagcttagtgaaggaaggaaggtaacatgccgtcttcttggagtaattcttgaggaaacaagtccagaagaactccaaaaacaagccacagtgaggtcatctgttttggaagttctactagagattacaaagtatagtgatttgtatcttatggaaagagttcttgacgatgaaagcgaggccaaagttttacaggctttagagaatgcaggagtttttacatctggtggtttagtcaaagataaggtgctcttttgtagtacagagataggaagaacttcctttgtcagacagctagaacctgactggcatattgatacaaacccggaaatcagcacacaactagctaggttcatcaaatatcagcttcatgtcgctacggtgaaacccgagcgaacagctccaaatgtgttcacctcgcagtcaatagaacagttctttggaagtgtttaatatcaacaaaaaaagagaggtgaaagatattacgttgtcctgacttaagcatcgttgatccagtgtctcttaggctgaaacttgaaacttgtttttcatttttctttgattgtgtctaaattaaagtttgatatacatttggagttagatattactgcgagtgcctctgtgaaagtatccaagtttgtaatttttgtattagcaacttagcaaaattctttaagaaataaacaaatgtccgttgtttagtccaaaaaaaaaaaaaaaaaaaaaaannaagggcggccgctctagaggatccaagcttacgtacgcgtgcatgcgacgtcagag

SEQ ID NO: 135889 - DNA, 579 bp, Arabidopsis thaliana
  unsure (1)..(579): unsure at all n locations
gtgtggagtttgactacgactccgatgacgagtacttgtacggagactgatcgccgcctcgcggaaccgaggcttgggttggatggatcggggccggatagaggagtgcagtgggtgcttatgggagcccctggagcatggaggcacgtcttcgccgagaggctctccaaactgcttgaagttcctcacatttccatggggtcccttgtccgtcaagaactcaaccctagatcttctctctacaaggagattgcaagtgctgtaaatgaacgaaagctggttccaaagagtgttgtgtttgcgttgctatcaaagaggctcgaagaaggctatgcaaagaggggaaactggtttcattcttcatggcattcctcgcactcgttttcaagccgaaactcttggatcaaatcgctcaaattgaccttgtcggcaatctcaaaggctctgaagaccactgggaaaccggaatgnccncaaatgnaacagtctngctcagnaggngtccnccgggncnatgnaaacnacctgttgnataangncgggggaaantccgggcaacnnaagggggananannaaag

SEQ ID NO: 135890 - DNA, 468 bp, Arabidopsis thaliana
  unsure (1)..(468): unsure at all n locations
annggggccccccttttttnatntatnatntnnttttctaggttaatttaggaattttctgaaaaaaagaagtggctctcatgacaagtagtctaaattcagtagaacataagagttatttcatcacagtactaagaggaagaagagaagttgctctgcaattccttgatgcctttggaatcaagaaaagaagttttgcccttgagaaaatcagagtaccaatgagcagagagtctaggagatctcttgcgatgtggatcactgaaatttacagagtacaatccataaccataatcgtaccgccctataagctcgaataaatccataaatgaccatacaaaatagcctctagtgtctgatccattccttatggatttgagcacaccaccaatgtaagcattcatgtattccaccctatggggatccctggggggcggcccaccgggggatctggttggaanancggac

SEQ ID NO: 135891 - DNA, 564 bp, Arabidopsis thaliana
  unsure (1)..(564): unsure at all n locations
gttattcaccagaatccgagttttattttttcttggatgtacaaagaggagagaaaaacaatgggctgcaaatcaaatgatgacggaaccaatttctcatgagagcaaacgcttcctcagcgtctcgatcatcttcgggtgtctcgggccggtgaacattgccgtgtcctcttccttcatacacaacaacctttgaaccttcaccaatcttctcctcaatttcatacaaacccttcacttcacaaagcgggtctctatctccagcaataaacaagactggcactttcacatctcccgccaccgccgagtctattctcgtaccgtagaacgagacaccggtgctaaagtaaccgctctcatccgtgggctaacacgtcaaccacacgtccaccgccaaaacagaaccccatcaatcctagcttcttggggattccagcggtgnaaatcctcaaccatccattttggaaggaagaagggcctggctgaaaggtaggggcatgccnctttccatccncgaatcgganttggcggtttcggcatggttnccgaaaagcnggaaaagng

SEQ ID NO: 135892 - DNA, 358 bp, Arabidopsis thaliana
  unsure (1)..(358): unsure at all n locations
gtgtcccggaatccggacgatccaccgagctcgaagctcaaaaatcttggcgtctctgtcgcgtctcccgagttgcgggcggtcacctgccgcttcactctacaccaagccccgactactttctgcttcttcttcttccccgtcgccgcttcctctagcctatcctctacaaaaccctaagaagctatgtagaaagattgagagagtaatgcgcagagcggggttttcacaggacgcaccactcgtaacagcaattggtgcgtgtatcctaagttcatttgtttttccggtggcggaaacgagtcaacgatnaggangaagaagangnaaaactcagcgntttntttcanaagntntg

SEQ ID NO: 135893 - DNA, 591 bp, Arabidopsis thaliana
  unsure (1)..(591): unsure at all n locations
gcggccgccccctttttttttttttttaaaattcggattttgtggcaattacattttctatgctaatagctaaagtctgttacaaatattcatttattctctttgtgtcttttgcgaattattcttaattttcatcgtcactgttttttcccttgaaatgtttcttaaaatggattcttttcttagatgaaaaatcgtcatcagatgtgtttctgaagaatgcaagtgtctcaacatccccatttgcgatgcttgcttcaagctgaacatgaataatgcccaagacaatgcttgtaattggtaaccagctctcttctggagaaatagacagatttgaactcaaataaggaacaagataaacaagagcataaacagcataacgagattttccagtgtcaagccaagcaaacacccaactcagccaattgaagtaaggtatgaagctgatgattcccatggcggccaatctcatatctggtgacccaatcgctgaggttcctcctcctccttccccaccgtggcncggttcgcaccgggaaaacaatgaccngggtcncgnccatggggacggngggngccgggaaaccgcna

SEQ ID NO: 135894 - DNA, 743 bp, Arabidopsis thaliana
cctctctgggctctctccttctgtatctctctaaggggaacaacgttttcatcaccttctgttttatcgtcaccggcgatcattcaagactcgatctccggtaatcagaacattttcattcgccgacatggcgatgaccatcgaagtactggctggacttgctttcatgttttcatctagtatcctcctacagatcctggcatgcgcgatatatggtcactggtggccaatgctatcagcactcatgtatgtagtggtgcctatgccttgtatgttctttggaggaggctcaacccaattccttattagtcgggacggtggagggtggatagacgcagcgaaggttcttgaccggagcatcgacccgtgggaagccttgctatccccaatcatcttaaggcacgcacagatgatcgagacaggtgcaatgctcatagagttcacatcattcttcatattcatttgcactgtcatgtgttttcaccgggctagtctcgatgatgactggtaacgtagatgttgctgctcgtgaattactaattggattcgtatgagaaagagagtgtgaagaaaagatgaggttactatgagtggttaagaaagttgtgttcttctccctctttttgtaaagctttgtatcactcaatgtttgtaaaaagttttattcatcactgtgaatcttttcctgaaactaagtgccaaaatattttgtttcgcatgtttaggaaaaagtttaattcatc

SEQ ID NO: 135895 - DNA, 518 bp, Arabidopsis thaliana
aaaataaaaatgaatttaaataatggagatccatctttccattcatcttcctcttccgattcatttggtttgatgaatggttggtagatgacaatgcagcaatggggagggaaaatcaaattgcggtcaatttattagtttacaacaatcggcttattcaccaactcactcgaaatagcaatcacgtaagtcatcgaggctctattcttggtcacgcagtaatacaccctgataaagaaactgctcatcataatttgttcaatgattattttttctgataatcttttgtatggtgaaagagagttccatcgtcggttctgaatgtcacaaaggttatttcttcatattgttgatgttgttaaacaaccttgacaactactttaatcaactttggcagtttctcggtcgtagtggatctcccacaattattcttgaagctattgcttattacgatctatggatatgacatgcctattttggtatgccaatcaacagtaaaaacatcaatgttttgaagg

SEQ ID NO: 135896 - DNA, 596 bp, Arabidopsis thaliana
  unsure (1)..(596): unsure at all n locations
acccancntatcgcccttgggaactgtccctgcaggtccgccggatcccggncgaccacggtccgcctcaaggctttcccttcgtctcccacttctcacttcacactgtgagtctgcgactatctccaagaccaagcttcatactttatttttgcaaattccgtttctaaacgtgtgatcagtatggatgaggaggcatctcggacagcaagagagtcactagagcttgtgtttcgcatgtcaaacatcttgggcacgggtttggaccggcatactttgtcagttctcatagctctttgtgatcttggtgttaaccctgaagctctagctactgttgtgaaagagcttcgtcgcgagtctatccccgattctgtcacaaccacaccatctatacactgatcaggtatgcaatggattatacaagtattgtggttggtatgtgaatcttgttactactttttttgtatcatttaaacaaaatttgtatggatgaattataacttcttttatttgtatgaaccgttatttgaaagccaaagtagcagaatgcaaaaaaaagtatataaaaaaaaaaaaaaaaaaaaagggcggccgct

SEQ ID NO: 135897 - DNA, 852 bp, Arabidopsis thaliana
gttaaaagctccaaagagaacgaaagaaaattaacctggttcaaacccaaaagaagatcacaattaaagtaattggggaaacccccccccaagatttgtaatttaatttctaaaagaaatatccaattggcttaaaccacatttggtttcgggtaaaggaaccccacaattcctttttaatttttttctttaaaaagaaaaggtatatcccttccccgaaaatacctctaatctaattgtttcccaccaagtaaaggcttttttatttagaaaaggattccgaagtggaagggagaaaaaaactttacaatttttaaaagctttttccaccaaaccaaatcaggtgtctattcaaatctcccaagcatacgtatttgatctcaaggtattcgtccataccatacttggatccttcccttccaagaccagactgcttcactcccccgaatggagccacctctgttgatataagtccttcgttcaccccaacaagtccatattcaagtgcttcaaatacacgccaagatctttgaacactgtttgtgaatatataagcagcaagtcctgcaattgtgtcattagcaattctgatagcgtcctcctcggttttgaaccgaataaggggagctacaggtccaaaaatctcctcgttaaacatgatcatgttatccgaaacatcgcggataacagtaggctcatagaaagtcatccctagactgtgccttttgccaccaataatgatttttgctcccttagaaacagcatcttgtacaaatgtctctacaaaaaacaatgctgcatcatttataagtggaccctgggttgtcccatccctcggacgggtgggtcgaa

SEQ ID NO: 135898 - DNA, 511 bp, Arabidopsis thaliana
  unsure (1)..(511): unsure at all n locations
gctaacaattggtcgtagaccaaatctttttttctctagaagtatcctccgaatccttattatgttccacagtaagcttttattagaaggatacgagtggaggagaaaaacttacaatttctaaagcttttcaaacaaaccaaatcagtgtctattcatatctcccaagcatacgtatttgatctcaaggtattcgtccataccatacttggatccttcccttccaagaccagactgcttcactcccccgaatggagccacctctgttgatatgagtccttcgttcacccctacaagtccatattcaagtgcttcaaatacacgccaagatctttggacactgtttgtgaatatataagcagcaagtcctgcaattgnggncattagcaattctgatagngncccctcggtttgaaccgaataangggngcacagggccaaaatcnccccctaagaatgncatgtatccgnaaatcggggnanagagggcaagaagcacccagnnggcttg

SEQ ID NO: 135899 - DNA, 615 bp, Arabidopsis thaliana
agtattaggcaactcacttattcttaaattcacttagttaatatacatagtcaaaagtaccattaacaaaaacaaacctacattttcacccatttctttgataattattactcattgcacatactcatgatacatctcatccatttattatgtattgacccctctctaatccgacttgatttctggagttctgatagattccgggtacagagtactacgtacaccaggaatgtccatgatcctcttggggagtgcagtatcctcggacataccagttccagtcatgtacagtaaccgacaaccccactcaatcaactccggacatagcactttccaaaggtacgtcaccttaaaccatgatggctctgtcacgtatctttgtttccggcacacaccgttcactatcgacttggcacatcctgatgctgacgctaccggaaatggtcctacttgaacatctctcatgtcttggaagactattaaggcgccttcaccagagaagtacttgccttgtgtgagctccgactcgatataaccaggtgtgacgattgtaatgtgtacatcgccaccaagctcaattctcatcgtctcaaagaagctcaacaaagctgcttg

SEQ ID NO: 135900 - DNA, 420 bp, Arabidopsis thaliana
  unsure (1)..(420): unsure at all n locations
ggangtacatagaagcatcctnaaccgcgaacaagagtacaaacatcgaaggaaaagttataagatgtttctcctncttgcagattatcaataaagactcggggttgagctgcccacaactgacagagagcgctcaaagcctcagcgaattaacttacgtaagacaagaaatcaagagtcctctcaacgggatccgatttgcacatacgcttcttgaatcctcagagatttcagctagccaaaggcagtttctggagacttagtgatgcttgtgaggaagcaaatcacggcaataatcgaaagcaccgggcttgtaaaagccatttgagggaaggcaagttgctattggcaacagaagagtttccgacttgaaaacatcttggacacaatcattagccaagtgatgattatattgagaga

SEQ ID NO: 135901 - DNA, 703 bp, Arabidopsis thaliana
agaacagctatgacgtcgcatgcacgcgtacgtaagcttggatcctctagagcggccgccctttttttttttttttgataaccagtttttcacacaaaaccggttttttctgtattaaaaacatccaaaagtccataagtctattaatgaagataaatagttagaaccttctaagttttgtcgagaattttaatcttgagctagttaattattattggggtttagaccaatgcaatgctgctttctccgcctggtggtttacgaacaccgccggagtagtcacgagactgagccttcgcatcagcaaataggtcattgccacttatctccttcaacttcgccgtgcttagaagcctttcacccgtggcggaagagggagacgaaacattgcttttgaacacgttgttacccgacaaatctgtaaacttattatccgcaatcttcttggacgtctttagttccccatcgggtttggtatctgatactcccaagaagaagttgtctttattagccaaagcactaacagtgggaccaattttgatctcaggtggaggagcaaagatgttatgagcacttacttccttacacttagcatctgataattgtttgtcaagcttagcaggagaatggaactccaatgaaccactaagctcacgttgcttagcaactaatggcaccggtgatggctttttgggagaaacaa

SEQ ID NO: 135902 - DNA, 631 bp, Arabidopsis thaliana
  unsure (1)..(631): unsure at all n locations
cantgtgcggtgccccccctgcatctcatactcctggagccacagtccccacatggttttaccggacccacttccacccacacccccagtgttccccgggccagtccccatcatcccatggtgagttattgcctggtgccaggacccaggagtttccggagaggaaggattgcattacatggcacgtggcccatatggtacagacggaatgatgccgagacagtggcaaatgacgaacatggacttgtcgttgccagcaatgaggagcaatggaatggaagatggaacatcatcagcagctaattaccatcacagttactttggtttggacgcttcgaatccaagttttacgtctggtattaatggctacaccgagttcaggccatcgaatggtcattgatcagcaaatggagagaggggatttgtaatgtttttattttttttaaaaaggaaaaaaaatcatgaatatacaatttgtgtaaagagagttgtcttcttgtcatcctctacgtttcaaatggtttttttttttttaaatatagtataagatagttttcgcatagaaaaactcttccctgaaagtccctgaatagtttttataagtgaattatactcctctttatctttaatc

SEQ ID NO: 135903 - DNA, 464 bp, Arabidopsis thaliana
tgaatatcacacatggagtcccccgaatcaatgaaatcattttttcttccaaaaatataagcacgcctgtcatctctgcagaacttgagaaccccctggaattgactagtgcacgatgggtgaaaggacgcattgagaaaactactttaggacaggttgctgagagtatcgaggtgctaatgacttcaacatcagcgtcagtgaggatgattcttgacaataaaataatcgaggaggcatgtttatctataaccccctggtcggtaaaaaattccatcctaaagacccccagaatcaaactcaacggtaatggtattagggttttagataccgggtttggatattactcccgtggtggataaaagtagggctcatttcaatctccacaatctgaagaatgtgctgccaaatattatagtgaatgggatcaaaacagttgagcgagttgttgtcgcagaggatat

SEQ ID NO: 135904 - DNA, 500 bp, Arabidopsis thaliana
  unsure (1)..(500): unsure at all n locations
gacaaatctttgttttcttactttcggttttctgttactacttgtgaatttcaatgagagaccagggttcaaaagataaatattgtctaaaacagtgatcagaacagaaagaagaaaataaactcagggcaaacaatctttcccctgtgtagacaaaaaagaaaattcgagtttgaatctaaactatgcttgctgcagtatcctatacggggctatcgaaattggcagattgtcaccaggcctttgcttagcctccagtatgcaaattgggtggttgaattatagaacccccagaatttgggtgcatctgcactgatcttgcgttgcttgtcatctatatatatccggcatgtgaacccttgtttctggtcttttcaagagatgatgggatcagggccccaattcacctggggggaaacancgggcccttnangggctttnagaaccccggntccgaggtcctnggggggccccaacannaatctggnancccccccggg

SEQ ID NO: 135905 - DNA, 769 bp, Arabidopsis thaliana
agagacatgaagagcactctcaatagagaagagaaggaagcatgaagctagctctgcagcttcaaggtctcattaatggaggtctctaactcttgttcttcattttcttcatcctctgtcgacagtactaaaccttctccttctgaatctcctgttaatctctcccttagtctcacatttccttctacttctccacaaagagaagcaagacaagattggccaccgataaagtctagattaagagatacactaaagggtcgtcgtcttcttcgtcgtggtgatgacacttctctctttgttaaggtttatatggaaggtgttcccattggaaggaaaactcgacctttgcgtattctcaggctacgggagccttttaggaaatctctcttccacatgttcgatacttcaatcatctgcggtaatcgagatcgaaaccatcatgttttgacatatgaagacaaggatggagattggatgatggtccgagatattccatgggatatgtttcttgaaaccgtgagaagactaaagatcacgagaccggagaggtattaaaacttggatcggtcaaggctgtgattgcgcagttacaagacgtgtaagatttaggcattgatgaagagacttgaggcgggacggagctattgctgcatattgcaacaaaggccttgaagaagttggagaattgattgatgcatatatttatttatatgacacctttcagtgtgttttttcttataaataaatcgagaagaccaagtcttctctt

SEQ ID NO: 135906 - DNA, 424 bp, Arabidopsis thaliana
acaaaggatccaactaacaaacaacaaatcagtgtttttgttttttacaacagtctctcttaaaatctctcaaagtttccatctttcataagtaagaaatcaaatttacggacaaagatatgagttatttgggagtcggagttagtcccggaaacgtcaccgaaactagtaccaaaatgaagctgattgatcggaaagtgagagtcacggagttgactctgagggtgtttgggtttgtgtcctttctctcgtctctgcgattctcattgctacagatgttcaagtgagagagattttcatgattcagaagaaagccaaattcaccgacatgaaggcgcttgtgcttttggtggtcgccaatggcatagccgcgggttattctttggttcaggcggctcgttgcgtggtgggtttgatgaaagga

SEQ ID NO: 135907 - DNA, 405 bp, Arabidopsis thaliana
gcgtccgatcttaaaagggactctttttggtggttggaagcctaaatctgatcttccttcactcattgacaagtacatgaacaaggagattatgatcgatgaatttattagccgcataacctgtcatttgatgaaatcaacaaagcttttgttcttatgagagaaggaaaatgtttgcgttgtgttcttcacatgccaaagtaatgtctcggaaaacacatgtcacagattcaagaaagattaacgagagctctgtatattctacagctgagttgttgtataaaacaaaagtgatggttttctatagagttatgagacttttttttttcttttggtttgttgtgaagtgatcgttcatacattataaagatggattctcacatgatgaatccagcgagttcctag

SEQ ID NO: 135908 - DNA, 464 bp, Arabidopsis thaliana
  unsure (1)..(464): unsure at all n locations
cagagaaataacatattaagattacgttctcttcttggagccagcagatttacatggtacactaccacgaaagaggttcactgttttagggaacaaacatagagagaataacaaaactaaaaagaagttaataaagagttctttgcttcttcaacaagcaactaaaaccaaaacacactaacttcaagactcctattattactactacttcttctgctgctgctgctgcttcatcattaagattccttgtgccacactctttcaattcccatcatcttgatggattttcaagtaaagggtttcctccaccatcccctgaacttccctcctctggccttaacggccaacaccaanttccaatttcgggttcccangggcaaaatcttggaaccacagcctntccctgaagggtanggngnncagggtttctcntntccgggggtngngntttttccaaggggntt

SEQ ID NO: 135909 - DNA, 406 bp, Arabidopsis thaliana
  unsure (1)..(406): unsure at all n locations
ggctcccttaacacatgaagagaggaccatatcaatggcctattgttcgacacatcttagttaaagaatcaagctttcggacacatctgggttatccttagggtcatcgtcgcttaggttccatccaatatattgacgagagaatgtattaatgcttaaaaagattaatatcttcagcagaaccgtttttaaccattgtgtgagtttctcttccctgggaacactttgaacttagcttcatcggattttgttgagctcccttgcacaatgttctttggatcatcaactttcgcngnttcctttgcagctgaattgccggttgaaccaaagacgngctttcccgaaattggccntgggggnagggccggaaaantcncaangggctttccccatcccaggngggttt

SEQ ID NO: 135910 - DNA, 494 bp, Arabidopsis thaliana
  unsure (1)..(494): unsure at all n locations
atagagattgtgtgaaacattacaagaagagaaaaaaaacattacaagaagaaaaaagtggagtcagtgactcctacaaacgaggaaataatggaaagtggagaagatagcttcctcgacgagaggaagaccgtcgtctcttatttttgaaaactcaaacacttaaaagaaaaactgaaataattaaacggacaccaagaaaaccatgagacaaaattgtctccggttttggaccctgcgtctgtttgatgttctgcgccttggtgcttcgattccatcaaacatcgataaagtttatttttcccagaaccaggggatctttttgccaaaccgngataacncggcccctnccgatcaattttgccaaaatttggcccaatcatcaccaacngntttggaaacccccggtaaatnccccangnccccnganggggnntccaaaatggttcggggccccccattggncccnccccgnggggccctccaggggttca

SEQ ID NO: 135911 - DNA, 380 bp, Arabidopsis thaliana
  unsure (1)..(380): unsure at all n locations
cgagtggaaacttttaaacaagagagggagagagtgaaatggcgacgtcgggaacatacgtgacggaggtaccgttaaaaggaacagcagagaaacacttccagaggtggaggaacgagaaccatctcttccctgacgctgttggccaccacatccaaggtgtttcttttcacgacggcgaatgggacactcacggaagcatcaagatttggaactacacattgggagatggaaagcaagaggaattcaaggagaggagagagatggacgatgaggattaacacaaatgaaggtttctaggcctttaaggtcacgtgatggngcagctcaaggtgtatnnnatccgttttccattttttttcccaagttttnntnaggtt

SEQ ID NO: 135912 - DNA, 418 bp, Arabidopsis thaliana
aaggctgaaaaggccaatttttaatttaaaaaaccttacaaattttataaatacaccctttttctggaaggaaaaattatacacataaataccaaaattcaatgcatcaaatcaatgtaagagacacacaaacaacattcttatgttctgtcttctgtgcgtttctcaactttggttaagatcacgcgatgtttgacctagccatcttgagaataagaatcttgcaagtggactaaagtttgcattagaactaaattctttgctagcttgctttcttttgttctctgcatcattgttcattgtcttagcgaacacacggatcgccatgtcttgcacttctttctctgacgcttcctttgtacttcccaactgttcgatcagtttggcaataaaagcttcagaagaaccaggcttttcg

SEQ ID NO: 135913 - DNA, 509 bp, Arabidopsis thaliana
aaacaacttttccaatttttcagttccgatctgctgccattgacttggtagatcttcaagcttcaaaactctataatcggatcttttattccttgtggagatatggatggagatggttctagctttgagcagtgttaccgttgttatcctgtcacattcattgacaaggcacatcttgagaagggtgacaaaagtaaattactactctcttcccttagtctctatagatagtttctttatgatatatatctctgagaagacttgtgatctctgcagttatcatgcctccttccgctctcgatcgtcttgcttctttgcatattgaatacccaatggctggtttcaactgagtaatgtttctgttgagaagacctcacattgtggtgtactagaattcactgcagacgaaggcctagtttacttgccatattggatgatgcaaaacatgtctcttgacgagggagacgttatgcaagttaagaatatcagcttggtaaaagggacttaca

SEQ ID NO: 135914 - DNA, 616 bp, Arabidopsis thaliana
  unsure (1)..(616): unsure at all n locations
agaggctataataaatctgactgataaagggaactgtccatatgagagtgacttctcagttctcaatagtcttttaagatttatgtcatagttaagagaaaaaaagaggatccatgattgtaagaagggagaaactaattaagtcaccggtttcttcagaaattaagaaaaattaaggacaaaaaaaagggagcaatggagatcaactagaagaaactctgtctctcttggaccttgatctggtacatttgctactctctgcaacgattatagtctcaggtgttttttcttcttcttccggttcgagaccaagggacaccctagaagaataaactcctttcaacagcactggtctcccacaaagggtagccacatctgtcctaaacttcagagagctcatgcccgcgctaattctcttccacatctggagcccacttcaccagatatcncgggggtaacnccggttcctgnaagcattaacngccttnaaacgtcgggggnccagctgaagaatggccaancgcaaggcttccaaanaatgggggggcccccaggggnaaccanagctttaagccgngaagggttncgggaanttangggccccccngggaaccng

SEQ ID NO: 135915 - DNA, 565 bp, Arabidopsis thaliana
  unsure (1)..(565): unsure at all n locations
gaatcctatagccaagcaaaatcttgttgaaatcaagacaaattgcttataattgtattctccttaatgcagaacagtaatccatttcagtttacatagcaagaggagtgtcacataaaatttggacaatactaactttcgaaatagatccactaatgttggagcagagcttcgttacaatattttttaaagttgacagcctcgtcggtcaggaagtcacacagtcgctcagccatgcgtcccacttcccatcttggactccatgggtactcagtgaggagattcgatttcactggcacactcgattggtttaaatgctggacaactttgcagcatcagagttggttgctgcntcgggaattgagttgaaaagaagaaatggaccatgaaagtaaattgtccagaggcattaagggatgtagccttacggcaaaaggaagntcggctccaagaggcctnccngattaagccttaatgcnccataaacnccccctaaaccattggggacagntcatgggcnggccccagggtctccantggggggatcnncagncaccgcntcnng

SEQ ID NO: 135916 - DNA, 572 bp, Arabidopsis thaliana
  unsure (1)..(572): unsure at all n locations
aaagannggatcttttcatgttacttttagggttgttttctatgaatgtttctcccaaatctcaagttactaaagttgattatggaaagtggaataaaccggagaacctaagatcctttcacaaagagatagtcataaaagaacctacggttacctggttttaaattatatctcataaccaggaaacttagaatctaccggcgacacatgatcgaacccgaggcatgctgggccagctaggccccggaatagcgaataatcatgttctgtttcttggcttgtcatattcacgagctctatcgcatcacggcacaagtaactcgcaaacgcttttgctctctcttcatatacaacatctcccgggtaagcgataaaggggataagaaagcgtaggcattaccagcaactccatcagntaacctacctttcttcaccaagcaatnttccaaacaattncccggttaaaggggggttcnggggaaacccttcctnggggaaccnnggnggntttgccaagaatgggcaccggggggnccagggccttggggagttncccggntccccgggngggt

SEQ ID NO: 135917 - DNA, 451 bp, Arabidopsis thaliana
ttctaacaaggatacactaggggggctttttagagcgagtcgcggtttaatttgctatactcaatcatacacatgacaagaagtcatattcgactccaaaacactaaccaaccttcttcttgcttctcagagctttcatggggtagccgcagtccatatgagtctctggctttgtgtcttctaacaaggatacactacttaggctttcaagatcgggttgcgctttaagttgttatactcaatcatacacatgacatcatgtcatattcgactccaaaacactaaccaaccttcttcttgcttctcaaagctttcatggtgtagccaaagtccatatgagtctttggctttgtgtcttctaacaaggataaactacttaggcttacaagatcgggttgcggtttaagttcttacactcaatcatacacatgacatcaagtcatattcgact

SEQ ID NO: 135918 - DNA, 760 bp, Arabidopsis thaliana
  unsure (1)..(760): unsure at all n locations
nnnnnnnnnnnnnnnnnnnnnnnnnnnnnnnnnnnnnnnnnnnnnnnnnnnnnnnnnnnnnnnnnnnnnncttttttttttttttttttacacaaaacgattttcacataatcaatcgagttgctttgttacaaatattagcacagagccaaacattgttaggaccattggtcctatacactttaatgatcaacacaaattgttttacttttacatcatacactaagctacaaaagaagaggctgtaaagcaaacgacgtctgtttccgttgttgttggtctgttgatttcattgttgtagtagcagctgtggcggttgttatgtggtcatggaggattaagagtttcagtgtggctgattcacgcagccaagttgctaccaccggaaccgcttgatgtgaaccgtcccatgttgcattttgacaggtggaatggtgcatccattcccctcaaaagagctccaaccgctcggcttagtgctccgtctccaaccactttgctgggtttccccccagccaagttcaatatagttaagactataagggggctcctgacccttcaatagaccaggggaccctttattttctaagaaagcccccaccggggaagcaattgggaacggggcctttttttcagggaaggacaattgacgggggggcgcggttcccccccttcgctggaaattcaagcccccccccccgggagtctttcccccaaaacctctgtcccataaagaggacttttccccttcctaaggggg

SEQ ID NO: 135919 - DNA, 706 bp, Arabidopsis thaliana
  unsure (1)..(706): unsure at all n locations
gatttccgggtcgacccacgcgtccgtgagtttttcggcgatgggagacgagcagctggcgattgtgatggccgatcgtgaaagagatcgagaactttgattcgcttcgctgattccggcaacaaagacgatgtttgttcattaagggtttggcatcgaagaagttcatgaaaggctgattactggcagctctagcgcgatttttaaatcagatcatcccgccatgacctcacaagcttgtctcttcagaatcagctcaaagcagacaggaaagaggccgttaaagatttggtgcaagctgcgactctgtgatcacaactccacaccaagtatcctcttacatcgcactcgtcgctcctgcactcgtagtttctttgaatagccaatgaagagtaaagttcaattatgtgtgtcgtgtttagtaatttgacttgaaaaaagagtttgctagggtctcttgtgaacaagttgttatgtctgcaattcgtgagttttggttaattttggatttgtacttcttgcaatggctgccctcaaaccattgattaatgtattatataggtgggtgtggttaatgatcctctttagtttattcgattaaaanaaaaacaaacccaataattgaattcaatcctacacatcaggcgattttccgctcagctataattactcaaaaaacccaaatgggggggggggggcgttttta

SEQ ID NO: 135920 - DNA, 571 bp, Arabidopsis thaliana
  unsure (1)..(571): unsure at all n locations
tctattctttctttttttctttcgtactgagacaaggaaaagctcataaattcgatacatccaacattcaaagcacatgacacgaactttgaggcgtaagctggcacaagttaacatcaaacctagacatatagattttatttcaacaaactgattatttatacaatacttttatttcattctataaggagggataccacatatttcaggttcaaggctcatgatcgacttgctacctctaatccgtttccatcaggatcaaagaagaaaacttgcttgacttttccatcaggaagagacttctgaaaagtttctatccctttctccttgagagaatggacggaagagtccgaatttggggcagaggaacagatatggtgacccattggggagatggctaaggtccttaaccgctgggggagcancggtaagggccttctgggaanattgttgangggtcccccggnaaaatgnattgnaaagccccgggaagttnnccncccccgtngggccccaanangggtttgggncccggnnccaaancccttntaaaagggggggggggganccc

SEQ ID NO: 135921 - DNA, 375 bp, Arabidopsis thaliana
atagggagaaactggatggtggaattatttaagtaagaaacacatgttgaaacaattgtcttggaatcatacgaggatccttgtctacaactgttacaataaaattgaaacagaaaagagcggaaactacattatcggttctacaaccacaaatcatcatcatcttcttcattcttattcgctagtggctgatatgaaggcacttccaggttgacggttagccaatggaccatggtttgttagaaacttagcattgacaccatcaggcacaatcctcttcatcgctctcagcttcgtgtactcagcacggttgaatttagtgaatccccatttcctgctaacaatgatcttttgacgaccagggaacttaaactt

SEQ ID NO: 135922 - DNA, 801 bp, Arabidopsis thaliana
  unsure (1)..(801): unsure at all n locations
gcgccccggttgggttgcaattcgttnnnnnnnnnnnnnnnnnnnnnnnnnnnnnnnnnnnnnnnnnnnnnnnnnnnnnnnnnnnnnnnnnnncttttttttttttttttatttcaggggaaaatattgatttcttgataagtttaaaataatgttttatgagagaaacgaattctattaacagtacaagttatatagtgatttctactatgatctgacaacacctgtattcgcagcgacatacaaatactagaacttcttaccgttcttgaggtttctgacagccatcacaagttgttgtctttctccttctacctctgcaaatctcaggcttatctctgaatatctctcttccatttctttcaactctctctccattgaactgtttttgttcttacaatacgccaattcgtctgatagctttgatagattctcctctttgtgtccgttttcttgtgaccttgcttccatccttgcatctaggattttagtcatttcttcttcttttctccgaatatcgactttcaggtttgatacttgttttctcagatcatcattctccattttttcttgaacgaagctgttatgtaattaactgtactgtaggcttagaccttctacttctgtcttcaaattcctgagccttgcctctttatcatcatttgacgaacttaggagagttaactttttctgcgctgtttggctacttctttagccaaagaaaggtttctctcaaattcaactctttctttcctccactcttgtattatcttctgagtttcagtagctggtgcactcgat

SEQ ID NO: 135923 - DNA, 696 bp, Arabidopsis thaliana
tttgtttttttttttttatatcagacctttttctttaccattttagcaaaatgttgaatctatgtacaaaagataaactataaggagtctctaaaggaggaaaagagtcatgaggcgaagtcaagaaaatagaagacacagagaggtatccaaaggtaatgcagaagagataaaatgtgagcctactagatgaactgttcctgtgccttcgtcttttacttttatgcttgatgagcagttgtattcagtccacccaatgagctgattttcgagatcgtagagaacaagcttgtttgaaagcaccaaatctcccaaaagtgtcatgtttctcctatctctggattgcattgcgctattttgccaaccaatgcaccacattccttcatgagggaacagatagtcatgaggataaaccctgaggaaaaccgagttctcgaaatggaaagtgacattcggaaacccctcatcaactctgccagagtactgaaagcatttataatctttatccactatgtgaacttttagagcaggctcctgcgaggttatcttcttcaccaatggttcatagattatctctggaagataggccaaggttgtaccactgtcaattatcgctccttttctatctccaggttgaaataaatcggctgggatagttagaaactcctgaccaacttgaactgctgtcatatagac

SEQ ID NO: 135924 - DNA, 456 bp, Arabidopsis thaliana
catcaattcatctttactcatagcctgaatcctcttagttcccttggattgtctagtaacgactccaccgggagaaaatcctctctcttcttctggtgacagtttctttcctgtaagacaactcgcctcaccatcaaatttgccacggtctccagagcacagatcatcaatcgcttcagcagccacttgtgtatcattccctaaaactgccgcttcacgaacttcatctaactctttgccaagattctttttagcaccctggatattctttcggctcctagtcacactatgcttcaacagtttggaatcagaacgagcccatcttttatccactgcaactggcatcagttctcttttctgttctctaggcaagctagaaaattcccgtcttttacttgcaacgccaaagaattcatcttttcttctacgatagatatcaccccctccttcatcctc

SEQ ID NO: 135925 - DNA, 488 bp, Arabidopsis thaliana
  unsure (1)..(488): unsure at all n locations
atagcaacttttatgtatttgaaattcgngtaccaccttatgnactcacacaccactctacataaccaccaccaccaccaccacatgtttcagatgaagaagagtcattgacatagaagaacatagagcatagttctcaggtgccaaaagacaaatccctatacccatatctaaagagttttaaagacaggtgaaaaacgtagaacatgcgaggaaaacaatgatgaagagtgaaaacaaaccgacacaggccgagaaaagccacacatcctttcttcatgacctgcaaaacatgctagacgaacgagcaagccccatagtcagaccaccaccttgaacactagcttcaaacttgattgtgttcctttcataaggctttctgcaaccaggacaacggccatctccatcgcatatcgncttgtggcagaaaaggnaagccggaatccncaaggncatggncagaattgagcnggaaaggcaagactccg

SEQ ID NO: 135926 - DNA, 567 bp, Arabidopsis thaliana
  unsure (1)..(567): unsure at all n locations
gtttcttgacaatagtatatagctaaccttataaggagaacacaaaagtatacaaattgctaagtgtatgtgaatattttctctgttgagttgcagaaactaattgacattcatacataatggaattgctcattgatttctccatcaagctatgatcaattcgcaacgtcacatgcctcttaaccttaagaaccgccaaataccgatgctaggaaatcagtggagagcccaggcttgctttgagatgtctcattttcaattgatttcttctgtctaaactgggaaaatccgccctaggtggaaagactggtgctgcttcagcattgctacccgattcttcttggaatctttcggttccttttccattcgggcatctaactcggtcatgggcacgagacttcncnaatttangatagataaaggccttccccccccttgcagcagaaaggaccatattaattccggtcccggatngacttttgangngnttcctccagaaganaccccctnaaatnggcaagaattgggnccaanccaagaancgggntncttnccccggtgncccat

SEQ ID NO: 135927 - DNA, 400 bp, Arabidopsis thaliana
gacatactcaacatgaactttattactcagttgtacaaaaaccaacggctttaatacggaataatgaactgatgatccaaataagagttattgctttctcaaatggtttaatatctatttttggttaaaacctgtaatgagtactaaaaactgacgatggtttatctttgcatgcgtcatcttcacttgtattttgtttcttactttgtctgtctccttcatcggatggttgtggtcttttctggtttctcccaacctccgtttcaagcaagagacgacctttgttagacagtacttgatcagattcgaatttttcttccggaatttttccaacaatcatcgcgggctgccacgatctcaagaaccctataaaccctttaagcgaaagtttatgcggaat

SEQ ID NO: 135928 - DNA, 610 bp, Arabidopsis thaliana
  unsure (1)..(610): unsure at all n locations
aagaaacatcgaaacagaaaaattaaagaatatttcaagaaagtaagaaacaatgaataattttagtattttatataataatgctttatgtcgtacaaatcaactacaaaaatcaaaataaaactatataaaaactttgtgggataaaacaatttctctctctttgcttttgatatgttttttactcgctgtccctaaggctttcactggtgagccaaagtttcttctggacaatgaaaacgacattgttctcaccatcttcactgtcttggtcgagttctgaacttgtatttaccttctctgatgccacagtctcccaatgcaaagcctgcaaatacttcttgattgactcaacaacactctgcttatctctgatgataacgaatcccgtaggtctaagaatccgatccatctcgattagtagatcctctgcactgcatcctttgcttttaatgtctgnaaatatagnccacgngtgcaacagatcgtatgttcgaggntatgtagggnaagcctcacancagttatggtttngttccgntttaaaccacggtcgngntccagttttagggttttgggncccntnngggggngncaaagntnttaaccc

SEQ ID NO: 135929 - DNA, 369 bp, Arabidopsis thaliana
ttttagttcaaaaaggactcaattacatcacaaattgtcccttaaataaacaatgtttcgataggtcgcaatgttgaaagagatcttttcgagggtttactctattgtgtgagaacttgatccttgccactgaccggagtaaccacaccgagtatcacgaaaccgccaagaataagggttagaacgcccattgtgttgactaacattgcctctggggaataccgagttatcacttgattcacttgcaggaacgtcaccttctcaagtatccctgtggttgcagtcaccaacgccaatgcatatatgggaaatccctaaggaacacatgccatggcttcaaactggctctgctggttcttgaaccacccg

SEQ ID NO: 135930 - DNA, 741 bp, Arabidopsis thaliana
caactcgaattaccctcactaaagggaacaaaagcttgcatgcctgcagctcaacggcctctccgtcgccaaggacgtcggcaaggcgttcggcctcctcgcggggctggcgtccgaccgcgtccccacctggctcctcctcgccgtcggctccctcgagggcctcctcggctacggcgcgcagtggatggtcgtgtccggggccgtcgcgccgctcccgtactggcagatgtgcgtctccctctgtctcggcgggaacagcaccacatggatgaacaccgccgtgctcgtcacctgcatccgcaacttccgccggagtaggggccccgtctccggcctgctcaagggctacgtcggcctcaccaccgccatcttcaccgacacctgctccgcgctcttcgccgacgacccggcctcgttcctcgtcatgctcgccgtcgtgccggccgccgtctgcgcgctcgccatggtgttcctccgcgagggcgccgccgctgcggacgacgacgacgacgggcgctgcttcgccgcgatcaactcgctcgccgtggcaatcgcgctgtacctcctcgccgcggacctcacggggctcggcaggcgggggcggggtcgtcttcgtcgccgtgctcctggtgctcctcgcgtcccccgctggcgtgccggcgatcctggcgtggaaatcgtgggcggagaccccgcaggccgcgaacgcccacctgcaagaggcgaactcctttgctg

SEQ ID NO: 135931 - DNA, 757 bp, Arabidopsis thaliana
gcaactcgaaattaccctcactaaagggaacaaaagcttgcatgcctgcagcggcgacgcgggcctcggcgcagcgggatctcccaccctccgccctccgtcgccgcctcgccggccgacccaggcggcgcagcgcacacgatcggtcacaaacaagaacgaccaaggcgcgcccctcaagcggcgtcgtcagtcctcgtcctcgtcccccccgagaccccgagcgcggaggaaaaagtcaacccggctccatccacgagaagagatggggtcgttcaaggggcacgtgctcccgggcacgctgttcctggcggtggggctgtggcgggtgtggtcgtcggcggcgcggcacgccgcggacccgtcgtcgttccgggtgcgcgcgtggtgccccgcgccggcgcccgggccggcgcggctgctggagctctacgtcgtggcgggcggcgcgctggcggacatgtgcgtggaggtgctctactccacgcacctccggatattcgccggcggcgagcgtcaacccggcgcacctcaacgacctcgagcacggcggcatgctgctcatgttcttcctcttcggcgcgctcgctctcgcgtcccagctctggcccacgtctgtctggctggctgtcctgttctgtcttctgtgtgcacgcgcgcgctcgttgcctagctcctctgacggtctctgtctgacctagccctctccgtcgatccagccaaaccttggatcggtcgtcgtttctcaagcttttta

SEQ ID NO: 135932 - DNA, 750 bp, Arabidopsis thaliana
tcaccaagccgaaattaaccctcactaaagggaacaaaagcttgcatgcctgcagctaagctagattttctctcttccctcttcaacaagctccgaccttgtgaagctccagcgcatgcacggctcgccggtggcctagcatgtgtccaccctcccagccgctggcctgctggcagccgtgggagtccaagaagttcttgctgaggtccctcgtcacggacccacctgcgcgctcccgcggcggctgcggtggcgtcggtatcctctggagcgacgaccacgccgtcgcgaggccgtggtccgatggcgacccgcacgccagctgctgctccctgtcgtcctcggcgatggtgtccaggctcctcggccccttccttcgtcgcatgaccgacaccacctgcggcggcgccacctccgtcgtgaacctcgccgccacctgcgcctgcgccttcgccatgcatcgaggagttgataaacacacacacacacacacacagtaagagacggtatctctactcgctctagttatgtgcatgtacggggccgtggtcccgaccgtgacccccacggcgccagcatctccctggcggcctcggcgatggtgctcacgctcctcggcgccttcctccgccgcatgaccgacaccacctgcggcggcggcgcctccatcatgaacctcgcccccacctgcgcctgcgccttcgccatgatcgaggaaatgacgaacacacacacacacagctcgctcta

SEQ ID NO: 135933 - DNA, 749 bp, Arabidopsis thaliana
aagccgaaattaccctcactaaagggaacaaaagcttgcatgcctgcagtgagtagtgaaatgacacctgttctcatttgtaaagctgggccaaatgctcccactaaatccttgacactcgtcaattgccaagaaccagccgagagttttatgggacacaaggcacctcgagttccaccaaaagggagcgataatcatatcaaattgccgaatggcaggcatcgtagcctaaattaaggccccaacacacaagcatccaaaaggcaaagaaaggtcgagagttcatgagcttaccatccagatagcactgcaccgcgatgggcaggtgtcggtcagttcttgcccttctccttcatgtctgcgtgctggaaaccgttccagagctggaacgcggcgaactggccctcggccgtggtgggcgtggtggccgccgcagcggcagaccgcgagccgagctgaacatgaatggtatgttgggagcgtccagtggagtagacagcctctggagctgttggtggtggtggtggtggtggccggagatgtgcggctgcgaattggactgaagggtccccctactgttaacacccaaaagaccccgaggacatgggagaagttgaggttggtattctccggcgggagccgacagccggcatcgcgtggacgggcatgaagtggtcctgcaagaacgagaagtgcgtcatatcggcgtgcggctcgccgccgccagaggcgacagtgacgggaccgtt

SEQ ID NO: 135934 - DNA, 1407 bp, Arabidopsis thaliana
aactcgaaattaaccctcactaaagggaacaaaagcttgcatgcctgcagcttagctagttcatcgtcatgctcatgcgtataaaaaaaatatcaccttggctactaatggtattctagctatcagaaggaagaagaagaaggcgggggctgatagatagatggatgccaagacccggtacgtactagggcccggaggtcccctaccaatcgttggctccaattcattttcatgtggcctgtgggtgtggtgtgtgggcaacagtggttgatgaatgcgtatgcacgcacaccaccgcccgggtgatggagttggctggctggcgcgcgtgaccgtttgcgacggacggacggacgggttgggatgtgatgtgagagcttgctgcatgtgaaggggccggggatcggaggaggaggaagaggagccgcgtgcagtgcaattgaagccctctctccgctttcctttgcggccagctgcgcgaattggctcccagcgccgcaaacttggttggagtttggagctgttgccttgccttctcttcttctgctagctctgctctctcctgtgggtggatcttttccagccagccacagccagccgccacttgtgtgctgtgcctgtgcgcacgtacaggtacaggtacaggctgaggatcggatcggctgccgtcaaatcgctctggatccattggtggtggtggtggtggtggtggcctggtgggcagggccagcgtgtctgccattggcgcgaggagatcggtcgatgcacacgccgtcgtgtctgtttctggttcgcgtccaatcggccggggcgccgctggtgctggtggccgctgctactgctgctgctacaggtcagtgacactgatttttcccccatctcatccctcgttccagcgaaaaggtcacactgattttttcccctccttcttcttcttattaaatatataatatttttcgggaactttttagaccagagaccagagaagcggcagccggcccggcccaaacaaacaccgaaacaaggcaaaaaaacaaaagagaggctattatttattcctaacctatcctacgacgcttccaactacggtggtaggttacgtacgggccggcggcccgcccgcgtagccgccgggaaaaccgcgtattgggccgccatcttctcacgactcacgggcacttgggccctcctttcttggtcttccagttgttgtagcaggggcaggtctccttgttgccgtaggtgccaggcggcacgcacaggcacttggcgcagcacttgttgcagaagaagaggcacggcttcttgtggtgcgtcttggagcaccgccgccggcactccccgccgcactctgcaggtcgactctagaggatccccgggtaccgagcgtcgaattcgccctatagg

SEQ ID NO: 135935 - DNA, 791 bp, Arabidopsis thaliana
tacactatagcccagcttgacgtcgcatgcacgcgtacgtaagcttggatcctctagagcggccgcccttttttttttttttttttttacagaaaaaaactaacatttctaatataatgtcactataaatttgagaaatatattgtgtaattacaattattttcagatttattatactttgcaaattattatcgcaatcggaatttatttaaaaataaaataaaagcgtcccaaccttacttaaatatgatgaccagtcttcaacataatcaaatcaaattctcttgcaatccctctacaaagtgatcaacgtaaccagtcaataatccaggactaactaaaatctccttcaatttggtgtgggttactcctcactaacttcccaatgtcactggcctttatccatcacaggatttggatagcattgctccaagggccccccttgggaaaccatcctggtttttccctcggcacttctacagggaccctcgaattccccgggcatcaatcttgtggaggggacctggtccccttaaaatggggtcaaaaccatttggcaatcactccccaaagacccccatattggtccgggcccacaatggttcacaaagcaacctaattgaggatgacccaatatcaaaggttgttgaacccattctccccaaacaacaccacgatcttttacccgctcctcgaaccccttttggtaaccccttctttggacccgttgaatgaatccttttggggggcttttaccgctaaaagaaaaagggtaaaaccctggttagctt

SEQ ID NO: 135936 - DNA, 708 bp, Arabidopsis thaliana
  unsure (1)..(708): unsure at all n locations
nnnnnnnnnnnnnnnnnnnnnnnnnnnnnnnnnnnnnnnnnnnnnnnnnnnnnnnnnnnnnnnnnnnnnnnnnnnnnnnnnnnnnnnnnnnggagaaacccaaaaaagggttaatagataaatgcgtagagcacaaggaacacatagataataagtgcagaaggaacaagtacaacaagaggaacaatagctgcaagtgcatgaaagcttctcttacattccaaaggtccaagtttaatctgaacaagatccactaacgccattgtcaagaacccacatcccaaaaccgacgcaacacacgaagcaacaatcccaaccctttaaagctgccaagtttcacacgcccctctcccgcgtttcaacacacgcgcctcctcctctaaacagttcccgcttgttggtgctgctgttgtcctataggcttgcttgagagacattacctttagcttggggaaggggaattaactgggggagtaaaatgggcttgaaaataacctttccgctaatgcgggaccttttgcaaaaatacatacgcggagatggtggttcttggaggctgatgaggaaaccgggaaagtgatggttccacttttggttaggccgaagaaaagaacaaggcgaaaaaagtgaatttaacgttttaccgatgccccgtttattaaccccgagaaccctgggaattaaattgttaaatatggggaaagggga

SEQ ID NO: 135937 - DNA, 846 bp, Arabidopsis thaliana
ggccgtctgccgtaccggtccggaattcccgggtcgacccacgcgtccgcaaagcacaaagggttcttggtgttcaaatttgaggagttcaattgcacagtggagtactacagatctccatttttggttcctcaaagcagaccaccgattggatcacctggaaaggtcaagacaagtttgaaactggacactatggattggacttcaagcaaatggagagatgctgacgttttagtgctcaatactggacactggtggaacgaggggaaaactactagaacgggatgttactttcaagaaggagaagaagtaaaattgaagatgaatgtagatgatgcttataagcgagctctgaataccgttgtgaaatggatacataccgagctcgattcaaacaaaactcaagtcttctttcgcactttcgcccccgtgcatttcaggggaggagattggaaaacaggaggaacatgtcatatggagacattaccacagattggaacctcattggcttcatcagagacctgggaacagttaaagatcctcagagatgtgttgtcacataactcaaacagatcagaaactgttaaagtgaaactgttgaacataacggcaatggctgcttaaagaaaagatggtcacccatcactctactattttggtccggatggtccctgcaccgcttcattcgcaagactgtagccactggtgccttcccggtggtcctgacaacgtggaacaagctctttttatgcattattttatgaaaacaagaaagcttctttcttttttctaaaaaaagtttaaagaagccgaaccagtacacagaaaatgtttacaatggtcgtg

SEQ ID NO: 135938 - DNA, 840 bp, Arabidopsis thaliana
tgcggtaccggtccggaattcccgggtcgacccacgcgtccgaccccatcggccagagaaaatgagcaatttgggatctcgatcttctaccgacaaagagcttatcagcttctcaagatctttgttgcagctattggctcggactagttgactaagattttgaagtcgatttttgtgtatattgtgtaagataagcaaatgtcttcttctacgaaaggatctgttaagaagagttcgattaaacatagttgcaacttagctgaggttaagaggaagctttcaaagatcagtgatcatcattcacatgtagagtatgcttatgccttccagagggacaatagagaaagagtagatactaggttgagtcaaatcctcagtagggatgcgttgatatcagccgttgatttgttgtgggatcgctcgggttttgtttcactgaaagaagggaattttgattatgtatatagggatgaagttagttcacagtctcaattgtcatcgactccacagtctagggttagattattgggagtggctgaaaagatgtacagtttcgatccggataaccgaaaaagtttgttgaatcagactgatggagctaagtctgtattgtggttcttgcaaagggattgggttttcccgtcgaagctagatgggaagaccgttgtttatcttggatgggagggaggtagtaatttccaaggttcttacctgaatattcattgaaacaaaggggcctggagaatggtggaaggaaaccaacccatttttttgaaacgacctggggtttccttttaattccacggggaggccacgttcccgggctgtaaactttgtttt

SEQ ID NO: 135939 - DNA, 767 bp, Arabidopsis thaliana
cccctttgaaatgcgctggccgtttgcagtaccggtccggaattcccgggtcgacccacgcgtccgagaactaggctgggatgcgattccagagctgcttactaaatgtccacatttggaaaccctcgtcttggaggggcttttccacttagccacagatgtgtgtggtgatgtgtgtccctgcaggaggaacatggagcaggcaatctcttacctagtaaaatctcctgttactcacctagagatatacgaaggagttgttgggaaaaagagaggagaagttactgaggatgcagcccgatttggtgagcaagtacggtggtttttgatgagaatgctacatctccaacaagtgaaaactatatgggcaaccagaaggtagcgttaccgctcttttcggccatttgccactgaactttcggagacttgaagggaaagctttcccaaatgttcagatatctgtactccaagcttaaacaaaggcgtgttgtacagtaattgtgaccaaagttgaaagtcttttgcgtgcctataatgaattaaccttattgctctgaaaatgcatcttgttcttaagggaatgtaattaaagggaatttttcccaaaaaaaaaaaaaaaggggcgggccgttttaggaggatcccaagcttttccgtaccgccggggccttggccaacctgtcaataagctttttttcttgtttaagggtgcaaccctttacaatatccaaattttctacctttgtgctctcgctcggtgtttttta

SEQ ID NO: 135940 - DNA, 947 bp, Arabidopsis thaliana
  unsure (1)..(947): unsure at all n locations
acacaacacacccccctatcacatctccccctcacaccgtacccggcatccccaccaacccacgacaccacaccaacgagtacacaactcacccccccccccaggcggagcaanaatgatggccgtcccatgtaccgtccggaatcccgggtcgacccacgcgtccgtttggattagcttgatatcgaattctcggccgcgaatggtgtaacgactgccccgctgtctccgattttttctttttgaaattgaattctccgtgaagatgcggagtaccaacggctagacggtaagaccccgtgcaccttcactatagcttcgcagtgacaaccttgatcgaatgtgtaggatacgtgggaggtcgtgacatagaaggaccaatcctgaaagaccactctttcgtctaagggtgcctaaccgccgcaccgagaattcggggggaggcgggacactgcgaggcgggtagtttatctggggcggatgcctcctaaagagtaaccgaggtgtgcgacaggtaggctcaagctaagattttgctcgtgagcgcaatggtataagcctggctgactgtgacaccgactggtctaacagagannnnnnnnnnnnnnnnnnnnnnnnnnnnnnnnnnnnnnnnnnnnnnnnnnnnnnnnnnnnnnnnnnnnnnnnnnnnnnnnnnnnnnnnnnnnnnnnnnnnnnnnnnnnnnnnnnnnnnnnnnnnnnnnnnnnnnnnnnnnnnnnnattctgcggttggaagaatggtccacaggggtttgggttgttccgctcgatttcaagatggttaccttgaagtttggggcttttttcaaccgctacggggaggaccagggtnttgggtttccctatatctttacccggtcgtggttggtttcagaagggggaataaaactttgccatagtggagctccaaaaccccttttattctcta

SEQ ID NO: 135941 - DNA, 832 bp, Arabidopsis thaliana
tggctttccgttgcagtaccggaccggaattcccgggtcgacccacgcgtccggcggatgaagatcttgttcatcgtaagatcttcgttcacgggcttggatgggatactaaagctgattcacttatcgacgcttttaaacagtacggagagattgaagattgcaaatgtgtggttgataaggtatctgggcaatctaaaggttatggctttatcctctttaagtcaaggtctggtgctcgtaacgctcttaagcagcctcagaagaagattggaactcgtatgactgcgtgccagctggcgtctataggacctgttcaggggaaccctgttgtggctcctgctcagcatttcaatcctgagaatgttcagaggaagatttatgtcagtaacgttagtgcagacattgatccgcagaagttgctggagtttttctcaaggtttggggagatagaagaaggtcctttggggcttgatcaagctactgggagacctaaaggtttcgctttgtttgtctatagatccctagaaagtgccaagaaggcattggaggagccacacaagacttttgaaggccatgtcttgcattgccacaaagcaaatgatgggccaaaaccggttaagcaacatcaacataaccataactctcacaatcaaaattcccgttcccaaaggaacgaccacaatggttatggtgcccctgcaggccatggacatttcatagctggtaataacccagctgtgcaggcgtttaatccggtcattgggcaggccctcacaggtttggttggcatcttaaggtgcttgggttgggtttaaacccaacctttggg

SEQ ID NO: 135942 - DNA, 804 bp, Arabidopsis thaliana
tttgcggtaccggtccggaattcccgggtcgacccacgcgtccgggaagacattatgcctgagattctcgatggtcacaatgtggctgacttcattgatccagacattttgcagaggcttgcagagttggaacgtgaagaagggataagggaggctggggttgaagaagctgatatggagatggatattgaaaagctttcggatgagcagctgaagcagctttctgagattagaaagaagaaagctatactcattaaaaaccacaggctcaagaagaccgttgcacagaaccgatcaactgttccaagaaagtttgataaggacaagaagtacacaacaaagagaatgggtagggagttatcagctatgggacttgatccgtcttctgcaatggaccgtgcaagaagcaagtctagagggaggaagagggatcgatcagaagatgcgggtaatgatgctatggacgttgatgatgagcaacagtcgaacaagaagcagcgtgtgagatcaaagtctagagctatgtcgatatcaagatctcagtcgaggcctcctgcacatgaagttgtgcctggggaaggattcaaagactctacttagaagttatcggccctttagattaggcaataaatcttcacaaaaaggagagaccatgaaatggcaccgttgttgggtgaaagccttgaccagagtttaattcccaaaccgcctttagaacccggaaaaccatttttggttttttccagggccaagagaagaaaggcgataaaggggaaaaaataccccggaaccaggggtccgttt

SEQ ID NO: 135943 - DNA, 873 bp, Arabidopsis thaliana
atggccctttgcggtaccggtccggaatttccgggtcgacccacgcgtccgccaagttacagtccaacatcaccaagctacggtcctacgtctccaagctacaaccctcagtctgctaaatatagcccatctatagcttactctcctagcaatgcaagactatcaccagctagcccctacagtcctacatctcccaactacagcccgacatctccatcatactcacccacatctccatcttattcaccttcaagtccaacatacagtcccagcagcccatacagctcaggagcaagcccagactacagcccaagcgcaggctactcgccaacacttcccggttattcaccgtcatcaacgggtcagtataccccacatgagggcgataaaaaggacaagactggaaaaaaagatgccagtaaggatgataaaggcaacccttgaaagagagtgagaattggcaatccatgttttaggtcatgatttaagagacagtgaaagctgagaaaaggaagggaccgtttcaaagtgatcttctgtggataactttgggaacaaggttttcttaatagatccttttttcgtgagttgtatattattccaaactgatccataaatgcattcaatcctcatccgccaaaaagaaaatagtataaacatagaaaaaccgaaacctattaaaactttgggcctttttcgtatgggttaagctcttgggctttttggctggggtggctcctattttcaagaaaaggaaaacatggggaaaaccgggcgtcattttggttaattcccatggaaaggggaattctctttattggttatcttggcctggttggcctttcaatttggaaggtaggaattacgcaaatc

SEQ ID NO: 135944 - DNA, 811 bp, Arabidopsis thaliana
agtaccggaccggcattcccggttcgacccacgcgtccgaaaagagaaaagagatagcctttggtcaatgatcaaagacaatatagggattgatctcacaaaagtctgtcttcctgtttacttcaacgagccactttcttctttacagaaatggtttgaggatttggaatattcgcaccttcttgaccgagcatttgaatatggcaaaaggggaaatagcctcatgaggatacttaatgtagctgcttttgctgtatctgggtatgcatcaactgaaggaagaatttgcaaaccttttaatccattgttaggtgaaacatacgaggcagactatccagacaaaggccttcgatttttttcagaagaggtcagtcatcatcctatggttgtcgcatgccattgtgatggcaccggatggaaattctggggagacagcaatcttatgagcaaattctggggacgatctattcagcttgatcctgatggtgtattgactctgcaatttgacgatggagaaatccttcagtggagcaaggtgactaccatcaatatacaatctcatacttgggaaactatactgtgatcactatcggactatgcgttttgagggtagagcacaatactcatgtaaacttaaattcaagggagcggtgcctcataaaccgaaatcctcatcagggtcatgggtttagttcaaaacaagaaggggaaagaacagtggccaccttttgtttgggcaaatggggatggagaacccttccaccttttgtggaccggggcgacctggtcccttggaaaaaaagggaaaatt

SEQ ID NO: 135945 - DNA, 843 bp, Arabidopsis thaliana
ccgtctgcagtaccggtccggaattcccgggtcgacccacgcgtccgcctggataggtgcatctattgatgttaatttgggtatgcaaacttcatttagttaatgggtatgagtaagagaaaaaagttaatttgggtatgcaaaacccattcatttaaactcatttagggaaaaaagttaaatggggctaaatgggttacccaaactaaactcatttattaaaaagttattttcaccgttactacttatttcaatttttctttcatcaactggcaaagtggactgggccaatcacattttagccatttgagctgaacttgaccaaaatacccttcaacacaactgcaactgtgactattcatgttcagttgatttgttttactggttacgcttttattttaaaaatttataataaaatcaaaactttttgctgcagaacaaatgtttcaaactaaaacccagatttgtgttcatgtataattgaaatcgaaaaaaatgaaagtaaattccggtgagaaagcaaatgttctttcgaaagaattgacttaaccaatggattattaaacaaaacttaaactctttagctttttgaatttataatatgttaaatgtacaatatttagatgtattaagcattcaaaacgtaaatctaaaaaaaataagatttttgagataatgttacaagctggtgaaaaaattagggtacagaggttggagaccaatggtaaaattacaattattcccctttattaaattttcttatgggggacggaatttattaatttaacagggggaccgtcccttgtagaacatgttaaatattggttagaattaatggtttat

SEQ ID NO: 135946 - DNA, 801 bp, Arabidopsis thaliana
  unsure (1)..(801): unsure at all n locations
ccggttctggaatcccgggtcgacccacgcgtancgaaacgatacaacattatccggggaatcactcgaggaatgttgtatcttcatcaagactcacggctcacgatcatacatcgtgacctcaaagccagcaacattctcctagatgcagatgtgaacccaaaaattgctgattttggaatggcgagaatttttgggatcgatcaaagtggagctaatacaaaaaaaatagctgggacacgcggttacatgcctccagaatatgtgaggcaaggtcagttctcaacaagatcagatgtttatagtttcggagtcttagttcttgagattatatgtggtcgaaataacagattcatccaccagtcagacactacagttgagaatttggtcacatacgcttggaggttgtggagaaacgattcaccattagaactcgtggatccaaccatttcggagaattgtgaaaccgaagaagtgacaagatgcctccacattgcgttgctgtgtggtcaacacaatcccacagatcgccccagcttggcgacaatcaacatgatgctcataaacaattcgtatgttttacctgatcctcaacaacccggaattttttttcccataattagcaacccagaaccagatggcctcgactctttgaacaggtgccatccacaaactatcaatgatggcacccttaccgaatttggaacctcgggtgaaaggtggttttttccggggaagacatttgttcccatctggaaaggaacaatggttttcttaaggaattctttttattcaattccc

SEQ ID NO: 135947 - DNA, 810 bp, Arabidopsis thaliana
  unsure (1)..(810): unsure at all n locations
caaggaaaaaccaagccttatgggccccatttatttaccgccccaaaggctttttaaattacggacctccacttatatagggaaaaagctgtggttccggcccttgcaggggtccccggtcccggatattccccgggttcgaccccacggcgtccgggcaacaaaaaaaaaccgtcccttaatgacaactcatgctttgcactcaagctttaagctagctaaacctatctcgcgcactactagaattcaaaataaaactctataaatagaaaccctcatgagatctcttctttcctcatatacactcatacacaccacgtgaacaatctatctctctttctattgcttttctatatatacagaaactaattaattgtatctgtaatggctaagttaagcttcactttctgcttcttgttgtttcttctgttatcctcaatcgccgctggaagccgccctcttgagggggctcgggtcggggtgaaggtgaaaggcctaagcccttctatcgaggctacgagtccgactgtagaggatgatcaagctgcgggtagccatgggaaatctccagagcggttaagcccaggaggacccgacccacaacatcactagttattttgtgtttttcaatttcttcgagatgtttattacttatcaataatttggttgcaacgaagctgtttttcttttttgtaataaatttgcgaatttacgtttgtcataataaaaaaaaaaaaaaaaaaagnnnnnnnnnnnnnnnnnnnnnnnnnnnnnnnnnnnnnnnnnnnnnnnnnnnnnnnnnnnnnnnng

SEQ ID NO: 135948 - DNA, 881 bp, Arabidopsis thaliana
aaacgcaagcttgcatgcctgcagctgcgtgaggcccatgagcgtcttgagcgcgtgcgagtagttggagaaggtgtagttgttgccggagatgcactgcacccacaccgccgtcaccagccccagccaccgcccccagcgcgtccccgccattagggcctttccttgcttgcttcgagttcaatcaaggtggcgcgcgtttggtcgcttggtgcttggccgtgtgtcccgaggaggaggaggaggaggtacggaagggccggtggaggcgcgtcgctttccggtgcgtcgggcgggactcgagcattcgttcggtctggtcggccgtaggagcagggccggtggttttatcagcggctgagagagggagggtacggcttttcttggagtaatttattggtttttagaaagagtatacaagcgattattatatgattttgatggtttttgaattgttatggaaggaagtgtcatggttttgagttttgatgtttttttgtttgagcccttgaccctaggctgctggtaccatcaccggaagcgaagcgtgcaggctagttcccgtccgtgtccgtcaagcatcggcaagcccgctcccaaacatctgcatgagtagcctacctacgcaaaagcaacacgcacgtctccatctgccctactgcggcctgcctgtcaacagcagcctaaattaataaacaataataataatatactgaaaccaaaacacacacggttcattgtgcggcacgaaaatggtttgctttagttcgtcagaaacccgtaagcatctcccaaaggtaatcgggttcaggacgtgccgccaagcatgtccaatcaaaccttttccctgcaggtcgactctagagatccccgggtaccga

SEQ ID NO: 135949 - DNA, 771 bp, Arabidopsis thaliana
gcaagcttgcatgcctgcagcagtgagcagccgcagctggtgccgcacttgcaggtgttgcagtcgcagccgccgccctcggtggccgcctcgaagccgccggcgctggccttggtggtcggcgcggcgaggaccgtggtcttgacgctgctggtggcggcggtctccacgtcagggtacataccgcagctgcatgcatatgaccggatggatcactcatataatcacatgtacacgttcagacgccgcacacacaccaacaccatcatgcgtcgtctacatactcgagcgtctctactcaattaacacgatgtgagattatctattattacccgttgcatccgctgccgcaggagcagctggagccgcacccgcacttgccgccgcagcaagacgacatgatcacaggcgaagggaggaggtgtggttcttgcttgtgctgctgccttgttgcttttgcttgtgatgagaggatggcagggtggggagaggggtataaataggcgggggtgacgaatcggagtggagtgaacggcgcacggcagccggtggccggaaagaatggatgcgggcgggcgagccagggaccaccccccacggcccgacctgctctgctttgggagcaggaatacggatagagtagagagacacgagcctctctttccctgatctttttggtttttttttggaggcagagccagaggtaggaccgtaggagcaagggggaaaagagaatcttgctgcaggtcgactctagaggatccccgggac

SEQ ID NO: 135950 - DNA, 1188 bp, Arabidopsis thaliana
cagcttgcatgcctgcagagctgtgcagacaagtgttgacagttccacgggttgcctctgaagctctcctctctctccgtccgctgaccgagaccacctgacatccgaggcttccatcccagcagtagtgacgcgtgacgagcagtgaacccgcaccaacatcacgtcacgttgaaagcagcagtcagtttgggggactagtcggacgccagtgcagcaagcaaaccacagggaagtgttcctacttccaacgtctatatgctgctgctcgcttcatcagacctgcgaactggttggcagttggcacaacggtcgtcggattacggattgcgcgtgtcccatggccatggccatgccaaatgctgcgtcgcttcccctggccctgtccatgccactcgtcgtactcgtagccctcgcagcggcaaaaggaccacacggtttccgcagctctatcagcatcccaacgaagggaactcccaggaactttcgccaacccgtgcggcggcaaaatcagctgccagcctgccacctctacgcgcgggcgcggcgcccgctcccgctcccgctgggacgccacgccaaggcacaccaccaccaccctacaaatacgccccgctccgaacactggaacgaccacatagaccaccacgacacccttccccacaccagcagtcgagctgagcacgacacaaagccggctggggccgcctcgccatggcgatccggatgaccaacaacgtgatcggcgcgctgaacctggtgacactcctgctctcggtccccatcctcgtctcgggaatctggctgcggtcgcgcgccgacggcaccgagtgcgaccacctcctgtccaccccaggcctactgcgctgggcgcggtgctcatggcctatgctgtcgcgggcctcgccggcgcctgcttccgcgccacctggctgctatggctctacctcctcgccatgctcgtgttcatgcggtgcgctgctctgcttcaccgtcttcgccttcgccgtcaccaacaggggcgccggtgaggccgtgtcgagggcaggctacagggagtaccgcctcggggactactccacctggctgcggcgccacgtcgaaagccgcaaggactgggcccggatccggagctgccgtcgcctacgcgcacgtctgcaggtcgactctagaggatccccgggtaca

SEQ ID NO: 135951 - DNA, 944 bp, Arabidopsis thaliana
gcaacttgcatgcctgcagaactgaaacgtgtggaattcgttcatttttatggttgcatttggggttttgattgtttaataaatctggtgcccatggccctcacatcatgatttactgaaatatttccttgtggtgcagctcggttctcaccagatgacaagtactctcgccagcgatacctgttgaagaagagatttggacttctgccaacgcagaatccaggaccgaagtactgaagcttcaagtcaactgtccaacctgcgatgttctttttgtgtcaatgcttgttggttggaatgtaccatcttcgttctcgaatatttgtggtccgttagttcaattttgaactaaaccgcgacaaataaaaaagagcggagggagtagaatataggtatttctgagaactgaaatcaaacactggtaggcactactatgtcatcctgcatcacattctgtcactacatgtaatgctatttttttttggactgttgacatgctttattagttactgcttattcaccatgttcttgtttcctgtgataaaatatggcaacggaaattggtaaggtttccgtctatgcaacgagatcctcttacccgttgcccacgggtgtgttcacgggtgcatctattggttgatgaaaatcaatttggaaatgggaaggaccttcacctttatgggcgttgcatttattggaacgtgtaaacagacaaaatggtggagctaagacccatttatgtaaaaatcacaagcacagtgcacattggttcattgccctcgggatctgtatgctcaggatgtgccagtttttacctataaatgttaaacggtaaatgaccactcatttgtccatttggcgtttacttggtgtaaataagttcggctgcacggtcaagctgcgcccggctgcaactgcaggtcgactctacaggatcccgggac

SEQ ID NO: 135952 - DNA, 869 bp, Arabidopsis thaliana
ccaagcttgcatgcctgcagtactgctgttctgacggttcagcttactgcacattagcatatcacgactgttaagactaattgctatcccaatgggctatattcatgataagacttagtgagctgcactttgtgcccattctattgatcatatgatttgttgttggcatctttcatgaagcaatacattggttcatatgactgagcaaaatggcaagatgttacattgtatattaggatggactataaaatatatgtcactcctgctgctcttttggttcagctgcctgcacatgtgcacattacgttgaaaccacatttttggtaaagcaatacatcataccaactgtatgaccgagcaacatgcctgaatgttacataccatgcataatggccgtcttttgggatatgtccttcagtcattgcattttggaacctctagtagttacttcaattgtgaccttaatccttggtttgcttaacaactaactgtcctagccatatatcttgtcacaagcactgtgtgccattcaatttttttattgccattcaatttttttgatttgccaaataattcttacgtacctaaatgctctattggtattaggtgtcaactcaccacatggacattgatagagctgttatgcagacaacagcttaccatattgggaaacaaatagagagcctaagcctataccctgcaagatgatcatattaatagcagataaccatgtgtcatgtgtgcttgtattagcatctttgccatcgtgttatatcagtttgggtgtccgtggcctaggtcatattaatctgtgaaaataattacaatctgttaagctgcaggtcgactctagagatccccggtaccga

SEQ ID NO: 135953 - DNA, 753 bp, Arabidopsis thaliana
agcttgcatgcctgcagtgataaaattcaaagtacagaagtacactgattctctacactatcttatggtttgttggtttcaagctgctaacacacactatctaatgcaaatggtagttacagcatgacacgacaatctaatttaaatgcacagagtgatgatatttcaggcatattgttgggttttgctttgatgggttattttgattaggatggaaaattagggcagtgtttggaagggcttctgctcccagattatcaatccagagcagctggagctggagctcattccaagcactgatctttttcccactttcttttgattatcattacaggaatagctctaagtatgatgatcagtagcacagtaatagtttgataggaatatatgctgtgctcactgagctttcgtgctcacatgagcactttaaatccggtatatcatgatcaatccaacgaggccgacaatgtttcacttatcccctcccacctcagctctgatggcataggaggtaagtgaaattggattgctcacggatacagaacatttaaagtggtaatatgaagcccgggagctccatgagctcataatatgtttcctagtttgatcgtagatgcctccttgttgtactaaaaggttttatgaaacttgattacctacagggttgcagttatatgatttcaaaatctttatctttgcaattgtagtctaggtgatgtggagaaactatgattaaagtctgtacgaaatcgt

SEQ ID NO: 135954 - DNA, 880 bp, Arabidopsis thaliana
tgcatgtctgcagtactacggtcggcagtggcaggttagcgaatcgatccctaccacagcgtgcacacctccccggcgccgtcgaggttccacaggctgccccacgtggcgccgtcctcctcgctggacccgtactcgtcgctggccgtggagccgcagcagctgccggtgccggcctgtccgccggcgccgtggagcacgaggaggtcgtcgcagcaggacatggggcacaagaagcaatccatggcgtcgtgcatgaccaggtcggccccggcttcggtggctaccgacgtcgtcgtcggcggcgccgcgcacgcgtcaccggtcgcgctgccgcagtcgttgtcgccggacgccgccgtggcgccggtgatgcagccacgcgccgcggcgctggtccccgccctcgtcgaggtgcaggtgctgccgcccaagagactgctgctgcatcatcatttcccggcgctgcttgaggaaccgggctctcgcgcgctcaacgttcttggacggcttgcccttcttgaagtgcgtccgccagtagttcttgatctcgttgtccgtcctgccggggaggctgcgagcgatcgtcgaccacctgcttatgcacgtcgtacgacgtacagtacagtactataatgagtaataaaactacacatcagatgccaaattaagaactttatttagtgcatcaggttcgttcgatcaaatttgtttgctttcatgataaataaaagctgggtaatttactatatatacctgttcccccacaaagcatggagctggactatgacgctctcctcttggggtgtgatcttacaccgtttcagatctggtctcaggtagtgtcctaccgcagcttgcatgtcgaggtttagagggg

SEQ ID NO: 135955 - DNA, 1055 bp, Arabidopsis thaliana
gcaagcttgcatgcctgcagtaaactagatatctgctcatagagctgatccataaaccttaaaaaagcttcaccgctgagatctcgggcttcctcctcaacatgtttacggagcgcggcaccaataacatcctagggccaatcaaaaaacacaattacatataggtacagaatacataaacaaaaaagagaatagagtgtacagatcagcatgaagtatttgttgacgccttgatggaacaaaagaatcatgccaaataacaaatagttcagaggtttagcaatccagaaaacttaaacctggaaataaacccttaacgtaacaaggttattgaaggagcgttacaatcaacatataacgcatatataccaccaaagcggaaggacgttaccagtgcagataaaccccatgccttgcccccacagttactagttactactgtgacatagagatagaatcagcaggagcaacaacagcaagtaatccagccagtactgattatgaagatcagaacagaaaccgcgcacatccatccaccaccggcggcactagcttcatggcctactgagcaacaaagaactattgctaatgcgcacactaatttatccaagcaaattagcatagcattccccaacaaacccaaaatagagcaaaaccctagccccaaatctagctgttgagtcaagctctaatcgagacgcaaaagtaaaggactcaggaatctgggagaggaggaaagagatgcacgtaccgctccagacgagatgtaagccgcgatgttaaatgtgtggtccttagcaatcaaatctgcgtacaagatggaatctctattattttcagcgaaaccaagggattccgtgagcgcatccgagggaggaaggtgggcgtacctttaggcttctttccgatctccgggaagtgcggcgagggtttcatggcgatgttggcggctgcaaggccggcgcgccggatagaggcgggggcaggggaactgacaagggtttaactacgcgaacgcgcactgcaggtcgactctagaggatccccgggtaccg

SEQ ID NO: 135956 - DNA, 897 bp, Arabidopsis thaliana
ggacattcacttgctgtttgcggggatgattctggtgaccttatcggcgttcctgccgacggacacggtgctcggcggctcctcggtgttcggcgcgcacacggtagcgttcgtggggctttacctcgtcgcgatcgggagcggcggggtgcggtcgtcgctgctcccgttcggcgcggagcagttcgatgacgacaatgcggcggatcgcgagaacaagctgtccttcttcagctggttctacctctgcgtcgactttggcccgatcgtctccggcctgttcatcgtgtggatccaggagaacatcagctggggcctcggctttggcatctctaccgcctgcatcgcgctggccttgggcgcattcgtgctcgccacgcccatgtacaagcgctcgacgcccaccgccggcaaggtatgagtcggctctagctagcgtgcgcagtccaataccgcgcgcactgacgagtgacgtgacgactgacgagttctcgttgcttggcaaggcgtccgtcatctccgactccgagacgggcttggaagcgatatcggaggaggcgggctcgtcgcagaagctccgcgccgcgacgaaggcagaggagttcaagacactgctggggcttctgcccatctgggcgaccagcatcatcgtctcctcggcgtacacgcagatgaacaccaccttcatccagcaaggcagcgccatgaacgtgtccgtcctgtcggtgcaggtgccaccggcatcgatgggctcgttccaggtggtctgcgtcctcatatgggtgctgctgtacggccacgtgatcgtgccggcgctgaggggatgcgggttctcgttcggcggcgacggcgaaccgtctcagctgcaggtcgactctacaggatcccgggacgaga

SEQ ID NO: 135957 - DNA, 988 bp, Arabidopsis thaliana
gcaagcttgcatgcctgcaggcaggtggagaccagcgacgggcggacggtgagtcctctcccccgtcttgttcgattcctccggggttctcagacctgcattcccctccgggagaagaggactggttcggacgcgttcgttacggtcccgggggttttattaatctgcttctggttcttcggttttgtctaccggccgctcgtgagtttctcgatcgattcttcgggtgcgacgtagttgtttcttcgatttttattttttgtttctggatttttcttttctgtgagggttttaatctctgttgttgctcttttttttcccccaactagggacatatactgatcatgttagtttttgttttctggtttttctccccagtgcttcatgaggagtgtgccgtgagacaactctgcgagtcaagaacaactggtgaggcaaaggtgagaatgggatgatgattgattaatcactaaggcctgacttgcccttttgttttgcttggattctctgagtgatgactgcccatatgaattgcttcctactcctctcatgctttgttcactgaattaatatatgttgcttacaagcgaagaaatctattattaaaacaaaaatagagaagatgctgcgagttcattaaaccctatcagtccgtctgttgattgcgtagtatcgattgctgctgcttgtgaaatgatttcctatccataagggaaaaaatgattcatttaattctgttttgatacggtcaagatcttgttctgaaactgatagcatgagttaacttgtctccagaattgtggatgttcaaactagtagtggtaaataagtcaaactttaccaagttagtagaaatttaaaggcgatgccacatgtctaagttattgactccaaattaatgcagcgaagaaagccgagaggggagaccagatggcaactgattcctcagctctgcaggtcgactctagaggatccccgggtaccgaca

SEQ ID NO: 135958 - DNA, 796 bp, Arabidopsis thaliana
caagcttgcatgcctgcagatccagagcacaggtgctgttgatctgatcttgaggtgtcaaacgcaaatcctctcgtgtacctccttggcttgccttgtgtcattgtgtgtgtgtgtaatgagtgcaacttttggccaaagctggggcggagtggcccaaagtgtcttccctgcccccaagttttttcgtcgagagattctctcttccatgatggtgttgtgacgacgcagtagctaacccggggtgccggggctaatggtaatggctggctgcttgcttggtgactactggtttgtggggggtgaaaatggcgttggcgtggaatgaagggcatcgatctctcgtggaaatttggcctcccaagttgccagaaaactgtggcgtgaccgtcgacagatcattttcaggccgccctgtgatagaatagatcgcagagagtcaaacgagacttgactgtgttgggacagtgcagcacagcactccagcgagagttctgaatgcagacggcaactcgcgtgtttgcagagaggggatggagagccgtggcatcattctggcgaaggaaccgcacgagcaaaaaggatgtgatgctcgaaagcgaatttgacctctccctgccccgtgccttgctcttgcaccatccaatgcatgccaagaaaaccctaaagcttcatcatgcaatgcaatgcaagcacccggcccaagaaatcaataatgcatgcatggccatttctgcttttggcgtgtatatttatttaccctgcaggtcgactctagagatccccgggtaccgac

SEQ ID NO: 135959 - DNA, 830 bp, Arabidopsis thaliana
  unsure (1)..(830): unsure at all n locations
nnnnnnnnnnnnnnnnnnnnnnnnnnnnnnnnnnnnnnnnnnnnnnnnnnnnnnnnnnnnnnnnnnnnnnnnnnnnnnnnnnngcaagcttgcatgcctgcagtggcgagaatgttgtcaatgcaagcccaattcatgtgtcttctctgactcacgcttaggttgtttcaaaaaatttagggttaatttattagtagtctgttgtgaatttagaattttttaggaaacgttttttacatcagcccctaatattaagttttggggaacaattttatagcagtcttttggagtcgctctaaacatgttaattacaattgagccctcctcagacacaacaagatcatctacaattaattcacctgcaattcacttgcatttggatcactgacttataggcccgatctagaataagggccctttggtagggctccggttcctctaaaaatagggttcctctaaaaacagtttcagcactgactcccctggctctttggtttctctaaaaaatcagaaccactttaaaattcatttggtaaaacagttttcttgtgtttattttaaaagatgtgtgagtaaaatgtaggaggatccgttagaagccatattttttgtgctctttcttttttggagggctttcgataaaaagctattttttatgatcgtttgatagagcttgaagatgagccagcgttagagccgttcaaagaggcattgccaaaagggctctcactctaaataccagtggcctgcaggtcgactctagagatccccgggtaccgacnnnnnnnnnnnnnnnnnnnnnnnnnnnnnnnnnnnnnnnnnnnnnnnnn

SEQ ID NO: 135960 - DNA, 823 bp, Arabidopsis thaliana
  unsure (1)..(823): unsure at all n locations
tcgggctcgtatgcggtgtgcaattgtaaccgaataccaatttcccacagaaaccagttatgaccatgattacgccaagctggcatgcctgcagggttatgctagttagattttgcagagaaaagttcaattcactcggtttccctgagttattgttacacttgtagttacttaattatttgactttaggttatataatgttgtggcctcacaggccctcactacatcatgagtcctgtatcttatttcattttggtaataaacttgtaataatatcccatgatttggcattttgacttcatttagctgaaccaactgtaacctaacttatgaccccctgtgttaatgtcttaatgaagcttctgtagccaagggtgggttgagggaggcttttgcagatccagggttaggttatgttgatattccaaatgcacagataagaaaggtaaattttgatggccagaatgttaggcatcattttcatattagatgataacagcctgagaatgtattgaccttctgttgtcttcaggttactgcaaatcgcttgctagcatcgaaacagaccattcctcattactacttcacagtagatgcacgtgttgacaaacttgtccagtatgtttctaacctaatttgtgatctacagagccctttttgttggcgaacagtactgattactttattacttctagctatgatttccttgtgtcactctaatcaacaggttgcgaggtgaactgaacccactgcaggtcgactctagaggatcccggagtacgagctcgaattcactgggcgtcgtannnnnnnnnnnnnnnnn

SEQ ID NO: 135961 - DNA, 797 bp, Arabidopsis thaliana
caagcttgcatgcctgcagctcaggaagcagcaaaatgaagtggcagtcatgcattggacccagggcgggagaggagaggacaaacccagatccgccgcaccgcacatcaactgaccaccgtgtctaatgtgtccatacggtggtggtccgttcgtggaacgaacctgtgtgagagagagagagagagacgtctgagccgacaacaggagctgggccagtcaagagccggagtgcctgagactagccagctcctaacgcgacaggcgcagatgcagatcatgcacacctgctcccctccccttggactgtttgtccccctataccagctccatgtagttggtggttgaagcagggcacatgctgacatgccccgtgaccgtgccgttgtatcacaataatgccaaggagatggtaccttagcgtaaaccttctccagtcagcaattagtgttcgttcgttcacagactcgccatcgttattgattgcatgcatatttggtttgctcaactctgctctgacggctttctttttcccttcagctgatgcgctggtcaacactggtctggcgaagctgggctacgagtatgttaacataggtgcggactgtgtgtgaactcaccaaccttatttcgtgtgtgtgacgccgcagtagttcatagcctagtgcttatcttgaaggcttattatccatatatatcttctttcagatgattgctgggcggagtctgacagggactaccaggtaaagcggatcaagtttgcctgcaggtcgactctagagatccccgggtaccga

SEQ ID NO: 135962 - DNA, 1091 bp, Arabidopsis thaliana
atggcctttgcctgcctgcaggctttcgacctctgcgaggctctaggtgaacgacgacaactgcaagatcgccaagaacgcggtcgacttggcccggacgctcgagaaagcgtagaattggattgggctgtcccccccaaaacatgagatgagattcgccatgggttttgattcagcacctgctcgattggtcgggtgttggcctcattgtacagaggtagcaacagcaaaggtgaaccttttatcttcttctcttactccgtttcatttccatgttgtagctgcaccgaaaggaggacaaaaaaaacagtagaatttagcttatgttcatatggttagaaccagagagagagagaaaggagtatggttcctgaacttgtcagttagaactgctttccatgtttcagagagtgaccagaccatcatccagtctgagatgttgttcacaatggttcatctgatgatgtagtgaaagtgagaccaaatgatctggagtggctcacgatcaaaagtaggatcgccagtcgtttttttctctcccccttgcttcactgtgctctacagttttacattgagaattggattgtgtgtgtagcgcctatcacctccttatggctcgtgataagaaatcaaaactcctgcctgctcagaaagtcttttgcgcttgatagttgatgcctagtacctcatcatcagatatttgctctgctaggtttgacatttggtgcaatcaaagctcagtgattgtgcccaagttttccacggttggaactaaaaacaaaacctttaggatgggcgcgtattatatagccagcagagatccgcgtaggaccctcaggatctccctgcatcatcctagagtcttaattactcggtagatcgcggcaactgtcactgcttgttcaaatttggaatggacaaaactttcagcgtgagagtgctcttctgatggaaacatatcatgccgataaggctatctccagcagcttaccgtgcagtctacggtgcacgaccatacgcttgacctgtttgacatagcctgataaagagaggaggttctgcaggtcgactctagagatccccgggtaccg

SEQ ID NO: 135963 - DNA, 763 bp, Arabidopsis thaliana
gcaagcttgcatgcctgcagcaaccggcgacagtgagctcatcactttgtcctgcgccaaggtggcggcgacaactccaaatgtgccgccatggcttcagggctaccaagttcaagatacgaccagactggcgagccgcagcaccagttttcaggtacactacattcctgggctcaaaccgctcaatccagcaaaaacaagtttaaacaacttagcaagaggggctatattaagataattaaagacacctcatacatgcttaaccaacttagcaaattaacaataattcagccatttcttcctaagtaagatgcatgtctgaaagatcctttattgttgataccccacctcctgtcttcagattttgcacagttcaaacttcaaaatactccatatagcaatacttttgtttctaaaactaccaattttcttccgcgcagatgcaagattgggaccccaactctaatggagcagcttaccacacgtcggagatcacactgagcttctccccacaggctactaactctccagacgcttcttcaatctccggctcctttgcccccagcttgatgatgagctccgaaccatggcaattcaagctgatgcaaccgtgcccaaactatggacgtggcgatccatttgccaggtcctctgatcgtcaacaactgcttccaaggccgactagtccagaaaaatcttactccgtgtccaactcatccgaagtgcccctgcaggtcgactctagagatccccgggtaccgac

SEQ ID NO: 135964 - DNA, 1092 bp, Arabidopsis thaliana
cgaacttgcatgctgcagtccctttcagtaataaaaagtctctttctcctgctggacaggaccagcaagtgcttaagatgaccacaacagctctagataactgccttcttgtgcctaatctcgatgatttgatgcctaaggtactaatgtgcttatcatattattctttcctattgttccctttagcaagtcttcaattaggtgtgcactttcttttgtgcaaacagtttgatattttctctggtttgtttgtgtattaaggttccaaggtactttcattattttttatctaccattttaatttgcactcaccgtgtgttgtgctggaatcatgaaacgtgcacaccaccatttttgacaaacacttatctcttgatttaaacatgtgcacacttaccatatatcttttgctgtcatttgggggtttgcctgatctttcgttgtcatgcttaataactaccaactgttttcaatccagcatgagcaaattgaataccatcaagctgatgattacccagccacttatgatcctcatatagcatcagattctcctgaggagattaatcaccacctaggggatgtcagtgaaaccctttgtattctacctgatgtattagaatcgccagcgaactccaacaaagatgaccagcaaagtccaatgtctgttcttgaatcttccatggacggagaagatgtttactctggggattttgagaagatcagtgcagatctccaaggcaagtgatcgaattcttctgtacgaacctgtcttccttctcattcttacgcaagtttgatttattgtatacattgcagagctcagattgcaacttgggcttctgaagagggagactacagacactagagatggcagcgagctttctatattgagtgatgacgagacagcacgtcgatcacttcctgagacgggggaatcccatgcttttaggaatacggaagaaagggacttctcctacgtgttcgatatgcttgttgctctgggcattcacgcggccaacgaggatgacctccttgacaactgctacttactggagtgctctgcaggtcgactctagagatccccggtaccga

SEQ ID NO: 135965 - DNA, 811 bp, Arabidopsis thaliana
gcaagcttgcatgcctgcaggtggggcccacgtctacactaattgtggaaagtacacttgggcacttggcatcgcggccgaggtccccgaaaaagagccatgctgggccctaatccggacgtgatattttctcgcgattttgtcacgttagcggccagctacatcctgacgatcctgtcacccgctcgatcggcgggcgctggagcccgcgcatctagctaactttgtgcaagtttcacgggatctctagctttgtcggcggcacatgagcagctccaagcacgccgcgggcgccgtagcgggcaaggccgcgcgcgcctgcgacagctgcctgcggcggcgcgcgcggtggtactgcgctgccgacgacgccttcctgtgccagggctgcgacgcctcggtgcactccgcgaacccgctcgccaggcggcacgagcgccttcgcttgcgcctgcgcccgacggacccgcactcgacgacgctcgaggccggcgtggcgacaacgacgtggaagaagcgccagcagcaggtcgcgccggcgtggtccaagcgcaaggcgcgcactcggaggccgcacgtcaagagcgtcggggagctcctgtcgaggaagctcgtcgtcgtgcctgaggtgtcccccatcgaatcgtcggaggagcggaaggccgaggaagaggaggaagaggaggaggggcagctgctgtactgcgtgccgacctttgaccgcgccctggcgagctctgctcgccaccgctccggtcgatgacccgacggcctcatcctgctgcaggtcgactctagaggatccccggtc

SEQ ID NO: 135966 - DNA, 944 bp, Arabidopsis thaliana
atccgtttgcatgcctgcaggccttcttcctcgccgccaagggcgtgtggggcgtccgcctcctggcgcgctccgtccacccgccgctccccgttgtgcgcgccgagcgaggcgcgcgctgcgacccgcggttcatggaggaccccccggcccaccgggccgggacccctgccccggcccagcgtgaagttgatgatggcgccagggttccacgtctacctgcccggtccgggcgtggtgaaatgcagggtcgtctgcttctacaccagcagtaacgcccgcacagacggccacagagatgccgggagcagcgccaacggcagcgtggggttggggagtagctgtagtgacattaatggcagtgctacagatgtggttgatagctgtagggcagtgaagtagggtaaaatgttgcccttgcacaggtagaaagaacacggggattttacttgttcgctaaaaaaacatgatgatctgcgtttaggcatttactgcttctgcttgtgtgaatatgggtgaattattaatcacgaacattttctgttaattttttattatgtaaagtttgagtaccacatatcagtttctttgtttggccgaagctgcggcatgagaatcatgacatgaccaaccttggaagctcgaaactttcccatcgcagatcccaatggaatagattgattggaccctccaactatcttaaccgtcagacacgtgtcttcggccttttggctgtccaattttctttagccacgctagtctatttcttctcttcttaataaccggttttaccgaaaaacttggcatataagaaattgttgtgtgcataacttatacagaggtagcagtagaatttatttttttataaaaatacaataaatcctatgagttctgcaggtcgactctacaggattcccgggctacggagctcggccacccccacc

SEQ ID NO: 135967 - DNA, 902 bp, Arabidopsis thaliana
gcaagtttgcatgcctgcagtgtccgcacctgcgccgccaccgtcgccttccacgtcatcaacttccgcaccgatgtcgagttcgtgctcttctccggcggcttccggacgccgtgcgtccgcaagcggtccggcgcgctccggttcgccaaccccgccagcccgctctacggccacctctccagcaccgactccacggccacatcggtgagcaggcccaccgtttcttcgtccatttctccggtgattttctgccaaactgtatctgagcgctggaagcaatggttgtcgccagatgaggcttacctgggtgagcggcgaccggaggcagcagcaggttcagtacggagcaggcaagtccgctacttctcaagtggcaacgttcacgcagaatgatatgtgcagtaagttgtggtctcgtccgtttatcacagagagcagacgttactgagggaaacgtgatagtgtttgattctggaattgcttcgaccaacttatctccatgcaggtagccccttgttgccaagccctgccaaggatttcgggtggcatgaccctggctacatccacacggccgtcatgaccgggctccagccttctcagtcctacacctaccgttacggaaggtaaagtccttttgtgactaagatcctcacaaactaaacaactgatcagcaatgcttcagaattagaaaatgccatggatgttcgtaaagtttctaactttaaaatgtcagccagttctgtagtaacattctggcaaccaaaggagagatgcatgtttcatctgttcacgcagcttttgggtttgtgcttgtgcagtgattccgtgggctggagtgacacaaacacattcaaaatgccaccagctgcaggtcgactctacaggatctcgggctacg

SEQ ID NO: 135968 - DNA, 936 bp, Arabidopsis thaliana
tcccgtttgcatgcctgcagtacaagtcagctacagaaatttgcacactactatggcggtatggtcatcctgcattgctttctgaagcactgggaaaaacagatttgataagggaacaaatgaagggatatacatgaaaaaaatgagttgcagatatttctgttccacttccgtatttatatgattcggttgtttacattcagaagaagaaatgctttgagcaagattttttttcactcgcccttgtacgattctgtggtttctttgtttcagaaaacatgttaaataagataacacttttactgatgagcaggttgctgaacgacaaggcaagtacctggcaagcctgctcaaccatgtcatgaaagctggaggagggcatgcaaactctgagactgaagcagatctgggtcgtccaccctttgtgtacaagcatctaggcagcatggcaactgttggaagatacaaagctctagtcgatctgaggcaaagcaaggtcagttattggttgatgttctctgtttgcaagctttgacagagtttagtagatagtcatgggtttactaaaaaattatttctcaatcggcaggagtcaagagggatatctcttgcaggatttgtgagctggttcatctggcgctcggcatatttaactcgtgttgttagctggaggaataggttctatgtggctatcaattggctgaccactctcttatttggccgggacataagcagaatctagagtgtcttggtacacgtacgaacaagcgtataagtcgatgtagagttacacgccacggtcacttgcttgccacacccccctccgggggtccactcctaccactgtccctattagctgtgaatgtaattcacaggtgaattatgaataaatctgaggatactgcaggtcgactctagagatccccgggtaccgac

SEQ ID NO: 135969 - DNA, 783 bp, Arabidopsis thaliana
ggaaacagctatgcccatgattacgccaagcttgcatgcctgcagtttcgtccgtggatgttgctgtagataggccgctgttgtgtgggatggtcgtggtctgctctatatatcagcggttagacgtaactggactgggagttggctgttggcatatgacctgcttctgttgtccctttccatgccctcgttttccagctctagcacttgatgcgagaaacattctcatgcataattgagatcagttagcagatgacttggaatgccaattaaggtcaaaccatcgcaccgtcagtgcctgttgtattgtatttgtatccgtccctggagctcaaggtcaactcccagcgtgctaataatcggccaaagcctaagcatggtttcaattcccagcgtgtgttatctcctcgaaactaacaccgtcaaactctagaacgtactagatagtgtgtggccctcaaggtcaaccaagccacaccttactagaatcttgtgacgacagcgagaacgaaccaattgtgcaagtgcctttttttcttcttcttcttctgtttcgtttctttgaatagattcttcaggcaacaccaccagccatgaccaaccgcttcgatgccactgatgaatgataataatcacagattcacagatacatagtacttcacttgcacaacatgatgtgttctagaggttaaggatggtgctaagaaagtcaaagcttttctatgaggaagaaaaaaaagaagtcaaactgcaggtcgactctagaggatccccgggtaccga

SEQ ID NO: 135970 - DNA, 796 bp, Arabidopsis thaliana
gcaagctatgcatgcctgcagaatcttttctatttatctgtaaacatagtgaataacacaggcaacttgtatggtacagatgtctgaataaaggaaggatgaaggaaaattgattgactatgttccttgttgattccttctgactaatgaatacaatgtttccatttttttagtcctgagctagacaaaatcagctaggtatggccttgctgttctctttgggagataaattcgtcgcctctagcatttggcacaagaaaagtttgttttacactttgcttcattaaccaagccactgcttcagccttttgggatctaagaggtctgttaaatattcttcttctcttgctcgtccatttcttttacctacaggctgcatctccgcatatatacatgccatcatgagatgctcccaaacctatactgacgcacaacgatcgacagaaagccattcaggctgctctatctgagccagttactgagagacgaggacatcattttgatgcttctgcttgatggatgcttcgttgacaacatcttatcgtggcatgatcggaaggaatggcacatactgcccaaagttggatgctagatgtctggacgaggaacatggaactccagcgggaaatgcctttggagtgaagcttggtggtcaattggccatgatcatgaagtatctcccagctggaacgcacacctttttcttaatttaataaaaagaaagaagggataagtaaaaatactggaatgcacaagactccgctgcaggtcgactctagaggatccccgggtaccg

SEQ ID NO: 135971 - DNA, 784 bp, Arabidopsis thaliana
accaagcttgcatgcctgcagcaggaccctgcccgccgggatcagcggcgcgccgcacgacaacaacatcatgctctggaacgccgtcatattcgtggtagcccgccccctcccctcccccctcccccgatttcgttaccccacaaacgcccccccctggagtccgttaatcccgttcctgttctagggtttgattgagggactccggatctcggggagggagacgggatctcagctattccttttgttcttactcttgtgttcgttgtgctgatgagaggttcgtgtggtttcgcaggccggatgatacgccgtgggacggtggtgagattcccagctctcagctctgagcctctgaccccttctcttatctgttgctcatttggtgcttgctgtgtggtcgttacttgcttgaaggtagtttgattcggaattgtgcaggtggaaccgtagaaattcatggggcgttaagatatttgggtgccacaggaaccgagactcgtctggtacctcgtggctgttttagcttgttcctgtcggttaatctttcatgtccaatcttgggggagcattctgttatgcaattctttagctatccgttggaagttgtcttttggagcatgtcttcagagctgtaggttcgagctgaaattctgtaatggctttagtctcagttaaatcagaaatcgacaaatttagcatggcggtaagaataacgcccactaggctgcaggtcgactctagaggatccccgggtaccgaactcgaaattcactggccgtcg

SEQ ID NO: 135972 - DNA, 821 bp, Arabidopsis thaliana
  unsure (1)..(821): unsure at all n locations
cnnnnnnnnnnnnnnnnnnnnnnnnnnnnnnnnnnnnnnnnnnnnnnnnnnnnnnnnnnnnnnnnnnnnnnnnnnnnnnnnnnnnnnnnnnnnnnnnnnnnncaagcttggagggcacaactcctagccccaggccggttttacaagacggcaacgggcaaggagatgcaagctttccacggctgctgcaaagcccagtcgggacagatattccatacccccagtgagaggacggataggaaagaccgatcgatcgatcttgtggctgaagcaactcgtcgtggccgctgatctcgcgaacgtgtgcagattctggaagtaagtgcgtgcgtgcggtcagagttccgggcaagatcgagcaggcaactgatcgatgcttcccaaaggttttctttcatcgggaaccatgaacaacagctaccctgggctatgatggctattggctactccgatccaatacgaccactcatcgttcatcactgcatgctcacgctcgcccgacgcgcgagagattaaaggaaggaagaaaggtggccggcctgggccttgctttattatcaccaaaaggccacaggacgtattgcggaaaggcatgcagctagctagtgcctgcgggcagctgctgactgagataagagagacccggccgatctggggctgtcagctttatttgcccggccctttatctgcagtcgaattcagggattcccggggtaccgagggtccgaatttcacgaggccggtccgtttttaggaaaggtccgtggaccttggtggagaaaacgcgctttgggccggttttatgtcccaaaacctgttgt

SEQ ID NO: 135973 - DNA, 750 bp, Arabidopsis thaliana
ttggggatccgtcgacctgcagccaagcttttgctggcttataaaacagagcccaaagtataagtccaaacgtcaggacattttttttaaatggagcattcaattccgtgtcaaagattgcaattgtgcataatcctgtactaacaagggcaggtgaaagaatatgtagatgggtggtcagaacagcgtgatggaaagttattttcttgttctttgcaaaggtgaacaactcacgtaaagatagatactagccaaagatcctcacaagaatagcaaaatcaaccatatgccaggcagaaccctcatccttgggcttgcagttgcagaacatatgccaagcagcatcttgtgttttttgtcatttaatgtcagaccctctccaaatgcagtgctttctgtatttgtgtatctcctccagcatggttgaatggactttcaaagtgcaaagttagaaagttggcaggggtgagagaaacgaattagctctctggagccatcctggctgggatataaaggaaacactataaaaggcctctgttcactaatggcagtaatttttcaatctttctgtattgaataaggatatgtcactgaacattgggtttgttaaacaagctatggttttcttattttgaaattattctaaggctgcttttaatactagttatttgcttgggcttggtcctccttggttattgaactcagtccatgtttaattatctgcaaacatgggttggggaatatccaggt

SEQ ID NO: 135974 - DNA, 1351 bp, Arabidopsis thaliana
caagcttgcatgcctgcagcttccagttgtagatgtgggagtccaccagccttcacatgttacagagaagctgctgatgatgcaaatagcagagctagttcccaaacatcacggaaggacaaataagcacgaggcagcgtccaattcgttacccggtgggaggtcaaagaacacgaaaggcgggaaaaagaaaaagtgatggtagtgccattttgtgtgttctttttttttttctttctattcttttcgccctcgtgctaagcttctgtggaagttgtctttctgaggcctgaaaatcattgcgacttttggcgagattctggttcatttgaaaatttatgtacccatctttcctgttatcttaaaattcggaaggatgcagctgcttaggtacatcatttgaccaatataatagagctggttttgtatcttcgtggtggttggattaaatctggtacttgatctgtttttgtttactcgtatgcaatgatgattcactgtatcttaattaccttgcacaacaacttttaaaattcccttggtccccgcccagtattaatctcccaacatttaggtgttgcgtatagatatatagtactcagcagtgcacacaccacattgttactttacgcatcgaatcatgatggtgtgttttattcatatatataacaatcagggagtcgatacatacaagccagtcgaactgacaatcaggcagtcgataggtagatgtatgtagcctgcggcagcaggcgtgccggtgccggccgcgatcggtcagcactcaggcggcggtgacggcgatcttcatgccggactggcagtggccggggatgctgcagctcctgaaaccacagccacgagtgagtagtgcccatagagcggatcacagaaaaggtgagcacaaccgaaggggcaccactcgctcgctcacctttggtcccaggaagagcccatacgggacgccctcaaacttgtccatgtggtgtatctgctcgcgacgtcaccgagcaggtagatggccggcacggcgttgacgatggcgaacacgtcgttgagctcgaatgggccctcgcgcggccggtggtgccactcgtgcatgtgccacagggaggcgtgcaatagcgcctggtgcgcctacgcgcccagaactccatcccgacctgcacggacgcgcccagggaagtcagcccagtttcacgtcaggaaaggaaaaaaagttggagatagagctgagctgccaaggaccgccgcgtaccgccgcgccgacgaagagcgcaaacgtgccgaacatctcgctcaccgggaccgcgccgccctgcaggtcgactctagaggatccccgggcacg

SEQ ID NO: 135975 - DNA, 1210 bp, Arabidopsis thaliana
caagcttgcatgcctgcagctgtcgacttgtccgcaaagactgggggtgggaatcttggcaggactcgcttgttcgggctcgccggccgccgtatgcgtatcagccattcagcctagcctaaaaaggctgttccggcttgctgatcctgctcgtggtcgcttgattgatccacggttccaactctctctgcgcgccaccgccttccatccacctgggcgagaagtactgatggcgcctctgcggagccactaactgcgctgtctgtgtcgcgttgtagcgcccatgattcttctcggatcctatagcaggacatgtcggcggcaccggcaccactaggagaggagacgagctcggagtggaacgccgaaagagtaaaaaaaacatggcaagtaggacacggtagcagtacctgcactgccgcatgtgcgtcgccctaccccggccccgtccatgattgatcttgatcgggagccgcggtgtagtacaagtcatcaacgaaacgagcgtctgcgcacacgacaagtaccgctggtattgctagtacgttgatccttccttcgatcgatgtgcctctgcctccgccctccatcataccgtcaggtgggccagtacagtgctgtgctctgtccatggatttgtgtacactccgcgccgatgcgctaacccgtcgtcatctcatcatcagagcagaggggaagggaaggaagagacgagtggaccgacggtgttggttgccgagtacgtgacccgtcgccgtcgaccgagggacggaggagcatgtaccgtaccacttactacagcagctcatactcatgtgcgtgcgctcacggcagaaagcagaggtggaacgccgagacaagatccgggaaatgagtgcgcagtacgcactacaaagccggccgggtgttccgttccgtctccggcaggcgcagtgcatgcaccagagccagacggcagagatacttggcctggccatcgccgtaccctcctcctccccctttggccccgcccccgcgtccccttctggctggctctggctcctgcccaaagctcgcaggccagcgccaccaccaccaccttttcgtttcgtcgccccgcccccacgctcgggaagtcggaagaacagtgtcccccctcacctgtcgactgtcgtggctggcgtcgcctggccgttgctgcaggtcgactctagaggatccccgggtaccg

SEQ ID NO: 135976 - DNA, 850 bp, Arabidopsis thaliana
  unsure (1)..(850): unsure at all n locations
gttccccggcctcggttaatgttggtgtggcaatttgttaaaggggaaaaccacattttcaccacagggaaccaacctattgccattgatttcgccccaaggcttgcatgcctgcaacaaatgtgttgtgcccaatggtcccccctccaagctgttctacaaggcctccaccaaggggaacgataagttactagtgcaaaagttgctcaagagaatgaataaccaggggattgtcccgaacaaaaagttcttcctggacgctttggaagcatttggcacctctcacaggaaacccaggacatcgccaggcataaactctgcaagcaagccaagtacagattctgctggtgattcagaaacagctacttctgacaaaccagaggtaagcgtttggcatgtacctgctacataaggctgttggtttgagcaagctcgtcgaattacctgacatcaggaagaacacatttgatctgcaccagaaaccgttaatacagtgtacttggagctacaggagttcctctactcccaacaggacgctcctttcttaacggaagaatgctaaaacctttcgtgtttcggcaaaatctgcttgtacatgtactctgttatcaaacgtaggtattttgtttctagtcattattgggcatcacaaaaattctggctctctgtactcgtcgattgttattacatgcctgttccttcaatccttctgtggtatctatttattgagcatctcccgatacataaaactgggaactggaatgacatgcatgctgcaggtcgactctacaggatccccgggcacggagctcgaattcactggccgtcgttttannnnnnnnnnnnnnnn

SEQ ID NO: 135977 - DNA, 752 bp, Arabidopsis thaliana
caagcttgcatgcctgcagtcaggagtctaaggggcagatccttcggcttaatttgatgtgtgcctcttcactaagcttgtcgttaagggtttgagttcttccccaagtgacatcatcacaataaggaaatgcagcatcagagacacgctagtagtttatgcaaaccaacagaagatgtctatgtcttcttcttttttacaaaatttgcagtgaataatgtaacctctgctctagccttgatcctcctaacgacgtttagctttactcttggggccaattccctatatgtcactggaattttgtttggtatcttatttgtatcgcgaacgtcatgatccccactcggatgctttttcatgttatcgttagtggcatagaaggattagggtatataattctcttactctttatgtcactgtaatttagtctcatatcttatttatcatagcaaatgttttattcccttttatgccacttggatctaatttcttagaacagattagaacatacaattttttaatccttctatgtcactggcgacaacataaaaagataataaattgcatccggatggcacagaagggcttagtatatttacaatgacaaaataaggtattagacaaaattacaatgacatacatacatacaattttctcttagtcttattatttgatggcctgagaagattatctgaatcaaaacagattttcccatttctcctcttcctctcttctgtcttcatcagtgcagg

SEQ ID NO: 135978 - DNA, 708 bp, Arabidopsis thaliana
gcaagcttgcatgcctgcagctagctccaaagcagcaggcgcaccgcgacacccccggtggccgcccgagcgcattgcatggagcgtccgcgcaatgtctctctgccgccccgcgttccgagcagagtttccccgctaatatccagcgagaccgcctgttcctgagcagctgattcgtcgtttgggttgcccactgccggggccatggatcagcagcggaggagcagcatcaggttgtacgggtccaacgcctcgtcccggtcggggtccttcgacttcgaacacgaccaggacaaggaacgcgctgaccagcccagcgacggcgaccgccgggaggtcgtcgtgaagatcgacgccgagccgcactcgccggtctccctccacgccgccggaggcatgtccgggcacagctccgcggtcagcacgccccgggcccgcggcgcgggtgagcatgctcgcggcgtctgcgtccggctcgagcgcgtcgacctccagcgctgggggcgatgcgccccgctcccgcgagtcgttcagtttcaagaaccccaccccccagtcttcggcccgccgcggggagtccagcgaagatcccccgagccgcctcattggcagcttctccggaacaggcggccgtggcgggagtgtccacgacccgattcgagtgacgaataaagcgcagccgcaatttcagctcagactgcttttcaa

SEQ ID NO: 135979 - DNA, 802 bp, Arabidopsis thaliana
ttatgtgtgctgaaattgtgaggggttagaaattttcgaatggaaacagctatgaccatgattacgccaaccttgcatgcctgtagcgcgaagcggcgcaggggaccacgtgggtttcatagagccaacgcgactccaggttatgggatccggcgtgggctgtggtagtaggaggagcctgctcagatcgtgctttcgccgccaggcacagtgatccggccggaatagtcagactcaagaggctactcgggcgacgcacgacggccagtaccagcgccaatggcacgggcgcacggcacgtcggtcgcggcacggcacgcaccacaccctatagataggtagctgtagctcttgttgacctcttcctctcgaatgatgattctctcgttctattctagactgctgcgtgcgtggcctctgtgcggtgcgctggtgtcctggcgcagatgacacacgagacgagggacgggcgcagcgctgtgtgcgtgcgtgcgtgcatgccgtgagcctgctgactgacgccgttgatgccatgctggaactgaagcctccctttattgtgcgcccaaagcccacaaggcccacatctgcgcgacgacgctgatcgacgcccggaatccaatgccacaagccctacccccacccacagtgcgtgcgtgacccgctgcccactggccagtggcagtgggatatggatggacagcctgcaggtcgactctgagaggatcccgggtaccgagctcgaatcacttggccgtcgtttacaacgtcgtgactggaaaaaccctgccgtaaccaacta

SEQ ID NO: 135980 - DNA, 1032 bp, Arabidopsis thaliana
caagcttgcatgcctgcagcagctgcttcacctggagcttcagcagaagaaggacgtggagcagctggacttggatttacttcttcatctgctcctccaatcacaatcagcatcgtcggctcaagaccaacggaaggacgacgaaggcatggataaattaccagaatgggacgacaaggtcatcgcaaaaatagccaggaagctcaagaagcacatggaagccaccggtgaagaagaagccaaggagcttaataaagagcagcaaacgggaacagaagaagaacaggaaggaaacagacaagtcgcgaggcagcagcagcacatagccccaatttgtctccctgaagatcaatataaacagatcctgctagaagtgttcccaaaggccggcagcagcgagcagcagagggacaggccggcggtgaagcaggaggctacagaggcgacggcgctgactacagtagggaatcatgcagtaacaacaagtgaacttggtccgaacggaaaagctgttttcgagactacagttgatcagaagatggccaagatcaagcagaagctgaaagagcggctgaagagctacgcgctagcgaccaagatcaaggaacacttgaactatgtctgccccctgatcatcctcatagtcaatgagaagatggacggatccacatggaccgagaccagaaacgccttgagtctgctagcctgtggcaccgatgcaatcatcgtcactaccacgaggagcgcccagtgggctaaggaatactgttacccacagtgggagcctatcgagtattccctcgccggccgctactatagtaccgtgctccagcttgcaaggtaccagaaggacgaagacggcgataagctcaggacgattcataagatcttggaggagtgtgagccggatgaactgtgcatgaaaatcttcactcgtgctctgtacgctaaccccagcaggagcaacgaagagctaacgaagctgcatacctaccctgcaggtcgactctagaggatccccgggtaccgact

SEQ ID NO: 135981 - DNA, 748 bp, Arabidopsis thaliana
aacgcaagcttgcatgcctgcagggaaacaagctgtctaggggtcatacctccgagcctcggccattgtgccgctctgttgcacatcgacctctccagcaacagcttgactggggtgatatcagaggagatcgccggcatcgtgacactgaacctgtcgcgcaatcagcttgggggcatgctgccggctggcctcagcagcatgcagcatgtgcaagagatcgacctgtcctggaataacttcaacggtgagatcttggccaacatcggaaactgcattgagttgacagtgctcgacctctcacacaactcgcttgccggcaacctcccttcgacactcagccagctgaagaacctggaaagcctcaatgtcgcgaacaacaacctcagtggtgagatccccattagcctggccaattgcgacaggctgaaatatctcaatctgtcatacaacgacttcagcggcggcgtccccaccaccggccctttcgtgaatttcagctgtctctcctacctcggcaaccgtcgcctctctggtcctgtgctcaggcgttgcggaggtcgccaccgctcgtggtaccagtcccggaagttcgtagtcatcttgtgtgtctgctcggcggctctggcgttcgcgctgacgatcctctgcactgtcagcgtccgcaagatccgcgagcgggtcgcggcaatgcgggaggacatgttcagtggccgccgcggcggcggctcgtcgccagtgatgaagt

SEQ ID NO: 135982 - DNA, 823 bp, Arabidopsis thaliana
gaaatttggaagggggaataccattttttccccaggggaacagcttatggcccatttttttacgccaaggcttggcatgccctgcagctaccgctggtaaattttactaagaacgagacagggagagatttcccgtgtcgctgcggtagagttagaatatatgtgattcgtgtgtctgagggtagattcgtcttttggcattcccaaattttcacatgcgtacgggatgtttctggatgggtgcccggcgagggaattttcgattggtatcgttaagctccaaagccgtgatggattggtccatacggaatgaatcgctcgcaatgtgcgggattcttggccgtatctccggaggtgtcatgtacttatgcgtttcaagcgtctttttactactgtacagtagtacttcctgggttcctgtcgctacgagaaataagctggtcaaactatttaaaattcaattaaatttataaaaagtatattaatacatttattgtaaatacaaatttatgaataaatctaataatagtaattatatctttaaatatgaatacacgacgctgctagctgcacacgacggcgacgcgcatctatttccgttcctacggatatgatcctatcccatgcgtccatgccagcgacttcaactagccgaaccgatggacgacacgacaggcaagcgggcaaaaacgtggcatggacggatggctccccctctgatcatccgctctggtcatctgcatgacggcatggcagcagcaggctgcagctgcaggtcgactctacaggatctccgggcacgaggctcgaatcactggccgtg

SEQ ID NO: 135983 - DNA, 789 bp, Arabidopsis thaliana
atcagcaagcttgcatgcctgcaggtgcttgcccagcatctggtccatcgtttatagtagctagtagctactaccaccaccaaccagtacgttcttgagaattaatgtacgcgtgtgcgaagatcgatcgagctgagcggatgtggatgcgatgtgggattggatatatatataaatatgatcatcacggtggtggtggtggtggcccttatatatagcgcgcgggaggcaacgcgcgtgatggcccgcggccgggtcgcaaacaaagtcacttcaagagaggccagctacaatgttaagctcatgatttgatatccatgattgggcttgggccggcgcatgcaataatggcggccggctcgtcctggcagagcgctgtgagcgtgcagttgcccgcggacgcctcgtggctgttgcttcgaagcgtttacatctaaccgctgtttattataaggactgtaactgccagggtgactgatagtgaagcgtttacagcagtggaaaactggaaatcactgggcatgcaatgcatgcatcaccgaactggagcttctagctagctagggaacgaatgagagcttttggtcgcagtcgcgcagctggtccgatcgatccggtccattctggtctggtacggggtccaagcgtcgcacagcctggacttggactattcctccagactcctgagacgagtgggaggaagctggccggccggccagcaacagtggcgagatggatctcagctcgatctctgacgacgactgcaggtcgactctacaggatcacggg

SEQ ID NO: 135984 - DNA, 784 bp, Arabidopsis thaliana
cacctatgcccatgattcgccaagcttgcatgcctgcaggtttatgttaagagtacgctttttcctcattccccatctgcgtgcctcaagtaagcccttgattgatcagttgtttgtgttgtgtattggattttctctctcgaaaacgctgtttattggactttccttatagtcatggtacttaaggttctaatgctgtatagtcatggtgtctgagaaagtaagaaatctttggaatttccttatctaactattttcatgtgacttacttgaactaggcttcataagtggaaccaagtgatattgaattatacaaatttggttccatgaatgatgggttacccagcagatcctaatcaaacttgatgacatgtttgctcagcaatacaacttttagacttctaaaaagtagtaatatactccctcggattccggattgtaagtcattctggcttttctagatgcatatatatatatatcttttgctatgtacctagacataagttatgtttagattcattgtaaaatctgtgtctaagagagccaaaacgacttccaatttggaacgaagggagtactgttatactatttaattttcacaacagatattgacaacatggcccctaacttatgttcctatttcatgtttgcaaaataggtggaaatctcgatcgggagctattcttacagaactaaagagctttgatgctgacttcatgtgcatacaggttgtcttatataaagttctgcaggtcgactctacaggatccccgggcacgggtag

SEQ ID NO: 135985 - DNA, 787 bp, Arabidopsis thaliana
  unsure (1)..(787): unsure at all n locations
nnnnnnnnnnnnnnnnnnnnnnnnnnnnnnnnnnnnnnnnnnnnnnnnnnnnnnnnnnnnnnnntcaacttgcatgcctgcaggttattattgcctcctgttggcttcagcattcggagcctcgacagtagaatcctccatggatggcatcatgctaccctcaggaactcttctggctgcttcagctatacgtagaatagtttgaataactggtcatggagcttactgtttcggctatgtttaaagacagagagggaacgagaggtatacatgggattctgtggtcaagggagatcaaactcagccagtcagtgccacaacaggtctgaggacagtagtagtcactactccctcggtgtttgtgtcagagagaaaaagagagagagagagaggtgagtgtgagagagatggggggtggggccgtcgggtggggggatggtgattagtgtatagatgaggccacgatagattgtatcctgtgccatatggccacaatgtttaatggctggaagtatgctgtgctagtgagatcaaaatcattcccgttcagctgtcatcggaaagctcaccaaccatgtgccatgctgaacttttcagaggatcaacaggcgtggggctgtgcgtggagatgttggattctgattccagcttctgaccatgcctcacagtagcagtacttgaaaacaaaaggcattgattggtcccttcagaagatgccccccccccccaaggtactgcaggtcgacctagagatcccggtacgactcgaatcacagcgtcgtttaca

SEQ ID NO: 135986 - DNA, 865 bp, Arabidopsis thaliana
caacttgcatgcctgcagcagcagatttccgcgacactcacacacatcagttcctgatatgcctgccccctttacttttttcacaattactgcatgcatcaggagccaggattaaaagttgcctcaaagaagaagatccctctgcgccgctgcatgttgagcgagcctaccgtagcgacgagcgcggatatgaattggtgttgtgttcctagggccaaccagagagaagagaacccttactccaacagcatcggcggtaaggaaaaaaaaaatgtattatattatttgcctacaagttttgtacttgcaattgcatgctacaatatgcatattgcatttcttcaggcatctactccgagaagaacataaggctcttctcctatgccgagttaagatctgctaccgacaacttcaaccgcaccaacaaagtgggacgaggcggattcgggacagtttataaggtgccagccaaactcgatcatatctattatattgacggcccgcgcgtcacatggatcatctcttgtttgttggcgtcacagggaaccatccgaagcgggcgagaggtcgcggtgaaggtcctctccgccgagtccaggcagggcatcagggagttcctgacggagatcgacgtcatcagcaacgtcaagcaccccaacctcgtcgaactcatcggctgctgcgtcgagggaagcaaccggattctggtgtatgagtacctcaagaacagcagccttgaccgtgcgctgctgggtacgagccaccactagctgtttacccaaacccatacccatacccatacatacctacatacctgatccatcagttgcggcgttctgcaggtcgactctagaggatccccggg

SEQ ID NO: 135987 - DNA, 947 bp, Arabidopsis thaliana
caacttgcatgcctgcagtccgctcgctcggctcagacatttcatcagtgcagtgcaagagtgcattgcattctgtggtggactggtggtgcggcaaggcaaggcaaggcagagtgaagaggccttctccttctcccttgcattgcatcctgcatccctccctcccacggcgtgaatacgggcggcaggcacgctttcggtctcttcgctttcggcaaagcggcgaggacagccccagctcctgatgtagtgtaaaagacttaaagagcgcccggccaaggaagcggaacagtcggagcgtacgaagaaaaagatgaggaaaaacacaagccaaagccatggaatggatgctcgtcgtcgcctcatcatacagccgaggaaaaagtaatgatcacgccgtgtcggtccaaacgttttttttctactagcagtctagcacccaggaatcagaactcgctgtcctatcatcattcatcagtaaaaaaaaacaagcactaaatcattgcagtgctgtttcctgggcatgcattgggggcggggcaatgcaaagggcgacgtcgtccgcgtcaaagcaacaaaaaaagggttcgctacaatactaatactacttgaaacctcgctaaagcagcagaggtgttaagaaaagaagagaatctaatcccaagaaagcagagaagcatcacacaatctcctgcttttgtatttgttttcgctgccaacgtaaagagtaaagactaaagagagcgatagtgtgtgtgtgcgcctgtgagaggaaatctctgccggagtggactgccatgctctctctcccccgccgtgtccagctcagcctttggagacaccacctgtccgttgctccaggcgcctcttcctgtgccaccccccgtgcagctctgctcttcggctgcggctgcagctgcaggtcgactctagaggatccccgggta

SEQ ID NO: 135988 - DNA, 969 bp, Arabidopsis thaliana
caacttgcatgcctgcagagaagcggaggcctgtcgatttgattgaactttccaagtgagtactctgcactctttccagtgtcgtctcaggttgttcttgagttctgaaccgggtttctgacgggttttgttttcgagctcgagttccgcgacactgctctaacatgtgttggaggattttggccttggtcccgtgcgcgtgcgtttcgctgcacgtagtcaacggaccaaagtggtcaggttttatcatcaagctttgcgtagggttttctcttttctacgctctctgtttcaccatccaatatttatgttcatattttttttaaaaaaaaacagcacagaacgatctagttcttcttctggtcatctgtttattacggtatcctgctcaaataaatttgtttccggtatatgaatttagaccaaaagctccacctgattgatacacagggctaagcgtggtcatttcttatatcaaccattcgctttaagcgctttactttaaccattttttttactttaacaaaaaaaagatcattaaatagcgtgtatgcaaacgtgatcaatcatttcgcaacacaggtaggattccgttggatcatattgtaccacctcgggccagagcgaacccaccggtctgtacgtcctcgttcctggctcgcgtgctacgatactcaaagtagatcagagatgcgcagttgttgtacgcttggatgccccaaatgccatgcttttttttccaagtcgtacatgaccgtctgctgtgccggacggcggaacagcaggcaccccagagatgcgcagttgttgtacgcttcgtcgcacgccgtttggcagtagcctgctagtttgggatgcgtcaccacggcccaagacatcattgtgtcttacctgctgttactaaacgccaacgtttttttttatgtatatattcctggtcctgcaggtcgactctagaggatccccggt

SEQ ID NO: 135989 - DNA, 921 bp, Arabidopsis thaliana
agcttgcatgcctgcagcataaatgtatggtgcatggtaatgccggcctacgtgtaccacaccacactctctgcgttaatatcgttctaataactctgagtctgactctgatgaagtcaacttcttccggtacgcgcgcgcgggggcggaatatatacgatggtgcatcatcaatcataattcataacgcagatgcatcgagttatatagctaggttaggcggcatgcatgtgtatagaaaatatacaatggtgcaatgcatcacaatgccatacgtgtcaagactcatgaacaatctaataataattattttattccccgcctaacgtgaggcttcagggataagcaggtaaaaagccccaattctagtaaatgatgccccccggccgtctaccaaacacgacatctttcaagctaaggggcgtggtggatgcatgaactcgttcgcttgtcctttcccttctaataacttattagacctggcatcagttacatcttcctagctttgagtcgggactaaaacaactcgaggacggaaactgtgctacgccagagctggtccaacctaccagtcccaatcccaactagtaaatgttgttgcggttgattgagatagaatttagtttacgttccactgtaataacatatatgtggaatgatgcggatttgactatatccaaataatactttagtgctaacatgtcttattattcgcaaaaaaaggcacaccaaattaacccatataaatgtttcttgcgcgttggaaacacacgtcccaatttacgctcggacatgcatgggacgaataatgggtgatgcctgcacaatgcatggtagtagtatctccggcgcgccgtccagccctcgagattccgtgatcgccaccctgcaggtcgactctacaggatcacgggcacagac

SEQ ID NO: 135990 - DNA, 1397 bp, Arabidopsis thaliana
cgtcgacctgcagtcaagctttcagcagtaacacagagggaaacagagagagcagagcatagctattctatttgctttgcaatatgaaatgtcaaacaaatcatatttatcaatgaaaactgtagttacgaaggttatgatgtgaaggaggttagcttatcagttaaaacatcttttcctattgtagagccatcatctccgatatcaatgcctgaactatcttctatttcaaggcacactcgacataattttcatgaagtcttccatctgagacaaggaatttactctgacatgcctatttctaaagttttggagataatgaaatccaccaacttggatgtaagtggaatataatgattctttctgaaatgtgcgtgagataatgtcagcccaaattctgatctttttattctttgcatcatgtggaaccaattttacagaatgcccctactcagtcacttttgagttttgtgaatgccatccttgatcggatcattgaaaataagaatggagaaattccttatgtaggctactgaaaagcaatacagttagttatttcttttcatacatgagaactttggtacattttgttttatacttctttcatccccttggataaaaagatagcattctttgcacagaatatcgcttgcttgttgagaaaggtaataatggagattgaacgccgcatttctactcaagcagaacacataagaaatgtaaggaatgctattttttatacttatttttcaaattattcttgttgtaactcttacttgtatggcagcaaaatagccttatcagagcacgtgaagagaaatataaatcaaggataagagtactagaggcacttgcaagtgggacaggtggacaaatgcaaataaactcaagtgcggcaaatggaaaaataaatgtaagttctagttttcatttgaaacctattaagatgagttttgttagactcttttatgcataaatctcctgcactttcgagaaaaacaaaaccttctaacattaataacggatatccttttcttatattattttcagattgctgaagatcatgtgctccagatgatggtttgtttcttttccaaaaaaaatacctctttgtattactatgttctgcatatatttaaatcaagttcttgctactgtttgctctagaattgttgattgacttagttctgtagaagatcttgtaagcaaataagcattgataattcagtttaaaaggaccacaagaattgttcattaatttatgcgtcctttgtgtgaatgattgggttttcttacttcacttccattcttcagatagacaatttttttactacactttcattcttcagataaacaaaagcaaaattggagaaagaagattagttgatagagatatg

SEQ ID NO: 135991 - DNA, 1237 bp, Arabidopsis thaliana
tggggatccgtcgacctgcagccaagctttgctttgttgttggtaagagtggtcattttaacttttgtatgtttttgtatgtgttggatgtgtggggttgagactttcgaattacatacaggaagctaggtcttcatgcactattactgaaagataaagggatcttaaaaccctggatgcagcttcttagtttacatgaatagatgaatcattgagcctgcttaaagtaccgtctgatactgcagctgttggtttttccccatcagattgtcatacttgtgtctcagcagattcaggttcagagtatgtagaggtagataccgtgtttggagtactctccttccgataactgagaccaaatttgtatttcgttcattctgatgtttaggctggctaacagtggcaaatgtgttgcgtactcaggtaagggaaacaagacctgcggttgctgtctcgctgaacattaccaaatggcatacgagcatgacaggaagacatagtagacaagcacaaggcaagctgcaaccatgatttgcagattcagcgggacggtcttcatggcttccatgttcggaggagcctcctttgccgcagctgctgaagagcaggaaaggaagaactctgccgcgatagcttcgctgctgtctccttggaggtcactgttgtaagctggtttgccggacacacttttgtagagcccgcactgcgtccatggaaacggaacaggtcagtggcgaggcctgaatcatgatgaacaatgatgcaagtgatggcaatgtgcccatggcttccaaattcagtagtcggtttattgtttgcaggcctggagtacggacacatttttgctggccttcgttttagccgtgcaggatgttttcagttttcctaattgattttcgagtttgatggctagatgcatttattacctgtagctggtcacccacggtgacgacgagggcgccgtcaaggggcgagaacctggaccagcctcgccgcgagaagacgtggaacgccgacgcgccggggcagagatggagggcgagagcgcgggagcaccgcgagctccgtaccagcatccgcaggacgtcgtcttggctgatcggaccggacgcgcacgcgctgccgccgccgcgtcggtgcttgcggatacagagaagcgagccgttcgcttcagctttagccagcggttcagctgctgcacatactggcgtgctgcaaggcgtgcaggagcttggtt

SEQ ID NO: 135992 - DNA, 1328 bp, Arabidopsis thaliana
cgtcacctgcgccagcttttatttaaaaaatataaggtcccaaaatttagggtgaagcacgaaggacaaacatctaccagtaaattgtgctcctagtcatctattcttgtacttgactatgtttggcttataaaaaacacttgtggtaactaaaggcatgggtagttaaccactaagactcacctttgccacataaaactcctagtcactctagcatcattcactaagaaccattcccactaagtaaagggtctcatcattcctcacacaccaagtcatcgttgttacagattatcagtgtttgatgatcgataaccttactataggattccaagggtaaagttagctggtatcaacgaaaaatcaaattcaatggcaatggcaagacatcgatttagatatgttcaagttgctggatagtgtaataccctacgtcctatatgttggattgccatatgtcgaattattgaatatgatctattacaaggggagtaccactacctctatatagtcctgagtataggtgcatgattctagtcctatctgtgtatgatagagtagttctaattctattataatgattgtccttcctatagctgactaacttagtttgcttgtcatggaattcacaccacttttttgtcttcctagcatttttgtgtgtcgatcacacaactttttgtcatggaattcacaccacaatgaggaacccttaggatcttggtccatcaagccctcgaagctcttcttggttgaactttgaagtcttcttaaacctccatgttatctctatgtagaatcaagaagtatttgagtacctgctagagtgaagccatgaagtgctctttaaatcttcttcaaaaggtgtgcactttgatgcaaagcgtaccaactaggtgtagcctccaagcctcagtgtttatcaccaagagcttgagggtcaattctataatcttctaactttaatgtgtctattattcaaaagtttttaaatgtatccactaaggacatatgtctcatgccatcgagcctaaaaaccgagtacccgaatatacaaaatcgattattggggtcttatacatccttagacattttgtagagtaccaccccatggcaatgatcaaataacatttgtcattgagtggtttgccacatgtgaatcacttataaatggtggtgaaaaaactttaatcctatccactatgacagagtaccacctgttgagcttatacacacatagtggtaactacaccccaaaacttagtcatatggccttaaaattaataatatacgcaatcctcgagcccctcgacatagtcaggaataag

SEQ ID NO: 135993 - DNA, 1281 bp, Arabidopsis thaliana
gggatcgtcgacctgcagccaagcttatgatagaggcatagagctctcatccaccacaaaagtaagcaacatccatttgaagactcatacaaacattatccatatccaagtcatattccaaatatggtcaagccaattcatgattccttatatcattcattttagcctggcaccctcaatattcatttcaatgtttgttcataataacattgtccttctttattcttccaacttgatcaatatcaatgcatagtgattttctaagtctttgtccataaagcaaaccaatatcaagactatcttatattcattatatattgtatactttatcatttaacctttgcctataatttatttgcctacccattcctaactcattcttcaatacttgatcaataacaatccactataaatctcttcttgttcatgcaaagcaaactactatttgaggccacaccatgctcatttctctttatctatttttggcttattaaaaccattgaaggtatgacatgagttttatatcatcattagcaccgaaacctacttagggattcatcaaactcattattttgttatttagccatcaaaacacgctagaagatcatgatgaactgatgaacttttagtgctaaactatgtatattttatcttgcattaatcattaatgtcttatctctagcttccttctcccaccaaaaccacacctcgttccttttacattaggcgagactcctataaccattagactgtctccaacaactttctcattctatcttctatcatatcttgtattctaaacttcactatatgaacaatgcagtatacaatacaaaacatgttttatataactatatgcacgatctgctgaagacatccttaggatatcagacctttcacgagaattccagcatgtgatgagtgctaaggtggtgcaattagggatggcaacagggaattccctgtcgggttgtacctccccatctccatcaccgagagaaaaaatttctccatggaaatcccccgaatggttgcgggggacatttctttcccatcaccattactgcgggataaatccccatcggggatccccatccccgcgtaaattatactcaagacatactttctttgttattaatggaaaacattgtcatttatacacattgtgagatgtaaaaaatattatgtgtacatcaaaatgaacatatttgtcaacaagtgatctcttgacaatgtcattgtttatttttatcattaactattataaaacaccatctagat

SEQ ID NO: 135994 - DNA, 1036 bp, Arabidopsis thaliana
ccggggatcgtcgacctgcagccaagcttaaaatgacctattttgaagagtgtcatcttagagtgacccattttatcaaatttctctaccttttgacatcaaacctttctaaatttactctcaattagggctagtttggaaacctagttatttcaaataatttttatttccaaaaaatagttattttatcttggaaaaataaaaatcacttgataaaaagaggttatcaaactagcccctcaaatggggcaaaaaggcaatgttctttgaccaccgagcaaaccccagcctccgttactctccttcctcttggctcgcctcggctcccgtcgtccccttccttgagatctctaggatacgagcgcattcgcatcgcttcgcctccgccgcggcctggggagatggcgggtttgggaaaggcgatgtacgcggtgggattctggatccgggagaccggtcaggccctcgatcgcctcggctgccgcctgcagggcaagtacttcttccacgagcagagtaagtgacgccatccctctggcacaccccgagatcaccctcccttgtccatcgattagcggagcactacgggcgtagaggggatttcgtctgccctgagcggccgaaaggagtgagcgaatggggattgcttgatacggttagtagcggttagggaaaggaaggataggctggttcgctcgagactgtacgcagagttttgtgtagttatcttattgccctatgatttgagctgaattggacctgctctttcatgcatgttttctctgatgttgcacagtggctgtctggctgatcgcattaaatgcacagaattgataagattgatagattgagtaggtcaacaatatctgtatgcattgtggttattttgtttttgggtagcattgggttttaccaggtggtgcaaattttgtatgactagagttcccgatatgtccaattgctgtgttgatcatttcaatgatggtattaagttgagtatctatagtactatcccgtgtttctctgaacagcagtg

SEQ ID NO: 135995 - DNA, 744 bp, Arabidopsis thaliana
attggcatccgcgacctgcattcaagctttgattcctccaggtactcactttttgcctgggcaaaagaaaaactgttcagtgtttttttttatatgccataaaacacaatatctcacccatgggtgaaatttcactgtcaccagatatgttcaagggagcatatataagaatactaatccaataagatgtatcagtgtaaaataatctttaagtaaggcatcatggtagcaactgatagcaaatccctgtcatgtactgtaggcatactattcaacctttttcttttcacgcacgaaggaaatactgcagtgtcttcgatgcttattcagattaggtagttttagtgcgtagcaaccatgaacaaacagtacaaactttctactagatttagatctttaaaagaatcataagcatatatcattcgccaacaaggggtgatgcactgaagcaggataggtttaaggtcttgaggatacctctggaaactgttcataggccaatgattgtggatgtccgaggcgaaaccaaagctcctcagccaagtgtggcgcgaagggtgaaagcagcagaacaaaggattcaataacagattttggctgggtttcccactgtaaaagaaaataagagtcacatcctgttcttgcgtaaaccatggaatatacgaccttagctagttagcttcctctatgtataaatgcatgtcattttggacatggcaagatccaatagagccaatgttgact

SEQ ID NO: 135996 - DNA, 1431 bp, Arabidopsis thaliana
cggggatcgtcgacctgcagccaagcttacaaatacaaagcagaatcacttgttaaggagtaccttcttgcagattcgtatgtttcatacactgctgtacttggtgggatcctgatgtgcaagatggtaccatctgcctcctcttatatgttaacaccttgacattttatgatcaagactgccttcaaatcaaattaatatatgctctgtctcatgtttgtgtttaaatgagagctaagcatcactataagtttaatagttctttttttagaagaaaattgctataggtaaatataggactatggaggagattagaaataaacaaaacttatagatggaaggaaattagatcatcggtgtatctgagattggttcaaagttgaaattatttgtgattttgactatgattgtagatgccaattactgttgtaaaatagtttcaacagtttgcttggacttgtaacattagcttttattatgaattgtttagatttagctgaattcatggtaagttaatattaatgaacacctttgaagataagtttgttttgtgtttacataaattaacatgaatgaatcttattagagcatctccaagagattagtcaaatggcttgtcaagctaaattttagttaatcaaaagcaaaataactttccaacagattaaccatctgactcgcctagctatccggctctccaaattgactccctcaccagccaaacttggctagccactctgactggccaatttgttgatagataggttgttggattgagactctacatttagagtatagtctttatgaaaaagtaattagagggtcaaatagagagcctaaaattacagagtcccttgcagatgctcttaggtaccccattttaactaaactgtttgacataatggtagctaaaactttcttcttgagtacacagcctatcattgcattaagaagaaaggtgaggacaaaaaatatatttgtgactcattttttagtctctgttagttcatttattagacccagtatcacttagtattttttggatgaatcagctgacttcaggttgccttagaaaattagctggattgaatcactaagcgtttctgaagaagtgcttgaagtatcggtaacttggacaacgtttggtgtagttgtccataacaaaatagcaagtgtgctgtgatataatttggtaacaacacacagacaataattttgtttgtgttactgtgctagccttaaaactgttgcatggatttgttgtgattaattcatacgtaccaggagtccagaactttagttagctctgttttgaaataagttctcccaaggctaactttatgttttgttttctcaggcttatgacataacaagcataatcagctcattgtactacaagggcttatggttgcacttacaaaaaccggaaag

SEQ ID NO: 135997 - DNA, 742 bp, Arabidopsis thaliana
tggggatccgtcgacctgcagccaagcttataaagatcgtagttcaatgtgaaaaattacattacaaaaaagaccttgtgacctactctaaagatgaaatgtatacagcgctgcttgttacttgttgctttgtttgcgccaactataaaatgctaaattatgtcacaattcattttctttgcgtgatttggttggaataagcaactagctcctggctatgtgttggatgtgcacattcctagttgtcacagagacctagaaagtacacttctagttgtcacaaagacctagaaactacactcgcatttactccctccatcgtaaattaaaatttgttttactttttattagattcatacaatgattaatgtatgtgttctatatatgtatctaggttcataatcattcatatgaatctagacataaaaatttagagctaaaacgactactattttagaacggatagagtatatttaaaaggtagaccttatttatacttgtcttttcgacttgggataaccctttttcccatttcacaacggaattgaggacttagtttggtttgaggtccgatgacaagacgatgagtcgatgacagcctttgagttgcatggaaacacgaacaaatatgcatggtactcacgtaccacgtaaacatgcttactggcttttgcagatggatccagatgaagtgtattcaagtattcagtgcagatgcaaaaggtaggcaagaaaccataac

SEQ ID NO: 135998 - DNA, 739 bp, Arabidopsis thaliana
gtacataagacccttttctcccaaccaaccatgcaccaaagggtacctcactggatactgcaaagaaacgaattagcatgacaagttagacttgaaaataaccacataagaatattattaaggaacaatccaatacattaagtcgattcaaaaccatggagatgcatctacttgttatatcatccttaatgaaattcaataaataacaacaacggcacttaatcccgagcaagttggggtagcaaaccaccaacaaaaagatagaaaagaaaaggaggtgtattagcagtagatagatgtatacaggaaattggcacaaaggatgctccaacagataaattctctgaaccatatcttacacccatgaccccatagtcttctgaatgcaccctgcaaaaaaaacacaaacataacttaacggaataaaatatagttaacattggtccagaaaaaaagattcaacaatcaacattaaagtttctggaaagctatataacagcactttgcattttttggaaacagaaacaagatatatggcctcacacctacctagtacctacctgttccccattagcaaaggtaatgttccaaaggcaccaatacgatacttaggatgatatgcacataatctcagctgcaacaagcttcaaaaaaggaggtgcgcaaattgttattgacgtgtttttcatacacaaaaatgctgagaaaaactattatagcccatcgaaccaaaaagtgc

SEQ ID NO: 135999 - DNA, 754 bp, Arabidopsis thaliana
aagcttgaggctgcagaattaccatgccgcaaactgatttttatgtagacagtaatgtgtttatggatatggttgacacttaaataaaaagctgggctgcgtgcacatgccatttacaatagagatttgccttgcgcgggaaattgtattccatttacagtagagtcttgccttgaacaacaatgttcgatgtggtgggataactgacttgatcctacaactaccatagtagctaatctccccgttgctcgtatgactagtaacacacttgaggagcacagataaacatattgctgctactctggatatacgggtatgcgtacttcttgttgtgcttttcttctactatgctgtgtgcctagtgataataatttatgatcctctactcacacgttatcttgcttggtatggtaaatatgctagtgcatagtgtaattaaaaatggttgttttacgagaataatatattgatttccgttttaatgcatgcactttcatttaaaattgagttgagtagaacttgaagtaatctataaaaaatgctgtacctctagaacaattggcacaaggtcctggactgttttttgtatggttcttatattgaatagcacaaaaaaatttaaatccaagatattaaaatctggtgaatttgatagtttataaatgaagccatcttgcacaccagcttcaaaatttggagcatcaggttttatatgcgaaggtgcgtgttatctcgctggacgtagataggcttc

SEQ ID NO: 136000 - DNA, 758 bp, Arabidopsis thaliana
aagcttgaggctgcagcgacgatggatcaaccgatgcgctgctcgatctgtctgtcttgtagcgtcttgtgtttcagggactgcacgggagcactagctatatatacatatactctctctctctctctctctctctctcatatttcatgaccggtgtggttttttgatcttctgtgacaggctctcagctacccctacatgggccacggcaatgggacctccattcaaaatgtatgtctgcatgcatttctctctctctctctctctctctctctctctctctgaaaaacacgcacaggcacatacacacgatcgctcgctgtggaaagaatcttaggtccgaggttaacagtatgcctatccacgtgcaaccgtattgtgaaattgctagccggggtagactttgacgcactttgtatgtagggagcacacaattaattaatagcgccttagcaaagcctttagctagcaaaggtggcccggaaatatactttgtcaaagggtactctaaagaagccttttaccaattagcagcaggcatcagtacgtacgtagaacactgatcctttggctaacctttgatctgtccaaaaggactagttggatcttttaggctattcaaacaaacgatggtttcttctagttttcacttcaaataaacagtaaacataaataggttctgccaggttctgttaattaccccgagaaattaataccggtctgttcaagtattgactccacgcatgcatgtagtaaga

SEQ ID NO: 136001 - DNA, 756 bp, Arabidopsis thaliana
gacttcgctggcctgagggcgtacgcgctctacctcaagaggatccttgaggccggcgagccatcatcgccggcggtgtcgtcgccgctgccgcagcctcttcctcctccggagctcgtgttcggcgtcggggacgacgatgacagtcgcggcgacgaggacaccgcgccggagaacgacgagtccgctgccagctcgcggagcgagctaacgtgacaatgtaagagaacaccccgttcttctcgctcactccggtcccattgtcaagtacatgacgagattctttttggtcacctgttgtagccgatgtgggcagagacggaggagcagccgggcgatctttacccgcggcggcagggcagcatgaaaggcaggagggacctcttgaggccgccgagcctgtacccgcagcgcgtgccgccgcacctcatagttcagcagcagcagcagcaatcgctgccggtgggcagagggagcccagcgtcaaggctccgagcggagcactcacggtcgcggtcgccggccgcgccatcagacgacagcatggaggattcttcctccgagctctgtgcggccaaagaggtacgtgctctctgactggcgtccatcatttggttcatcacaacaccttcattagtcatactctctccaatcaaaaaaaaaattcgtttttagtatttcagtggattcataagttgatgtatttgatcagggcttcttttacttattagaagctcagggctctaaatacatata

SEQ ID NO: 136002 - DNA, 753 bp, Arabidopsis thaliana
tcacaagctgggtgcagaggtattggtcttttctgattcttgcttctctttctccctcgaattctttctcttctataatacatactgcgcaggtgtctttcttctccgtctttttttcttaccaaatctgagatgatactttcaccgtcatccgtccattctcaccgtgcaatctcaactttacacttcttgacagaaaggtcctctgctaaaaattcaacgaagcatctgctctcctctcctctccgctgttcttgctatatatcgatcgcgattccattactacgatacataataataacaaaaagaaagaacctttccgcgtgtttggttgctgctcctgagcaggcaggtgcttctcccctcgcgagtatgtgggtgtccacaccacacgcctatcctcctttttttccgcttcttctctgttttcttccctcttaatatatccatcaaatcactgtgttagcgtgttatgttcttgcaccccccactgttcacatgccctgctttccccccgatccgtgtaccctgttgcggggcctgcggatttatcgtattcccgcgtcctatctctttttcttgttggaaacagagctgccagtctttgcagattgtcgatagagaacaagcctagattaagtgacacacccgcttgctccatctggggtcaaacagaggcttttgtgtggtgcaagcaagatcctggacaggagacgtcattgtttactgttttttttctcctccattgacagt

SEQ ID NO: 136003 - DNA, 757 bp, Arabidopsis thaliana
aacttgaggctgcagaagttagaacttacatgtacatcttctagaggtgaaatcgacagctgcttatagtctatggtatgattgtgggcccccggtgccaaaaaaaatataaggatccaggagatttgcaatatcccaagtacataatcatattaagctactaccaacctacctgctcactgaagccacgttatctagaagcattgactaccaaccagtcgtaaaacagaacctaaagacaagttggtggatgtctctagctaataagtggaatggaaacatggaggctaaacacgtacctaaaaaaagaatacattgtttttaactaaactaagttaagcgcaaaaaatatatatatatcaaactacaaatttcaattaacgtcagatcaaacaaggttggggacctagagggcacctaaacacttaatcctggatgcatatatgatatatcaagactcaaccattatacaatttacagtattatgaaatttaggtgctaaagtacgactatgtaacactagctaaactgtgaatactactaaaacaaccgctcgtgagagaattcaataggcatacatcacagcaaaaacgcaccttactggcaaagatgcctttctttactttcttcttcttcttctttttactttgagatcataaaagagaaatacagaacccggccaggctgtataatgcagtcaattcggtaaatgggacatcaagcttcactggccctagtttgctgctgacaagccagc

SEQ ID NO: 136004 - DNA, 749 bp, Arabidopsis thaliana
gtgggtgcagtgatggtggtggagacggggtcggcgagggagaggcgtgggggtcggaggagttggggttggagcatcgtgcgaactcgggcgatggatgggtgaagggaaggctgtgagcctgtgacttgcaatcgtctaggcgttttcccggtgaccaatgcggtgcggacgctcgggcagagggagacaggtggatgatgctttcaaactaatttggatccgcaggaccacgagaattttatagcgtcaaactaattttctgcaaattcgtgaaatcttttgccaaacggggctgcatctggcattggtctggccgtctgggccatcgaacccatcaaacagacgattttgcctcgttgatgatccaggaaagcaggggtgaacagaagggggaaaaataaataaaagagcagcaactgtacatatctgcaggctatctccaacagagcgtgtataaaacttttttgcattataaatcacattgtttatatagtagagtttgaaatagggtaactaggaagcctatgaagcgcaaaacattaaaaattgatgtgaaaaattcaatgatgagcaatacagttacaaaatgtatgtagtcgttttggggcacatgaaatatgaaaacagctttctgtgtttcaatttgctaacagaaatgtgaaaacaacaattggaagtaagaaaaaaacccgtcctgtctattatgccgatggtgtaagggggaatgctgccctttgccctttgtg

SEQ ID NO: 136005 - DNA, 758 bp, Arabidopsis thaliana
gaaattcaattgccttagcactgaacaaaacaaacagtaacaatcgggctgtcaggcgatgcggacggatgggatggcactggacggccaggatggacccattattggcgcagagcgcaggcctgctggaaattaccagccagggccctgccgcacggtgcatacggcaacaataatatgctcgggacccacctggcagcggcaggggtcccagtgaaaactgaaaaggcctcatagtatgtatgtatacatagagtcatagagagagggggtaaaattaagggagggaacgaggacagagagaggaattaaaagcaccgcctgtcgttgctagccatgacacaggccacatgaagcacccaaggagccagccagttaaagcttccttccaaactcctatttggccgcaccagttctttttttttttacaccaccgaccgcgcgcctagcctccctttcaccatcgccacgtacttgatttgtttccgtcagttttaatttctcgtagccgacgaatggcaagcagtgttaaagcttagcggtccgttcctgtagttacagtgatcaattgcaaatgcggcacggaaactaactagccacccggaggaaatgacgtagtatgtggttattactactactctactagcatattgatatactgtatacattaatgggtatgtacagtgacgcacaaattaaaaggagcagcagttagtagttggaggccaggacacataaacgcgcaccaccaccaccac

SEQ ID NO: 136006 - DNA, 757 bp, Arabidopsis thaliana
ccgcttggcctgttgacgttcaagaagaagaaccagaagccgctcttcgaggcgctgctcaaggtcaaagaaggtgcctccatttccctccgctccttatgttttttttccacctgaagataataaaattagacaatgatatagataaaaaaagatggcggatatttttttataaaataaaatagaatagttttacgaggataaagctcgtatgcactgagccttgttgactactatacgaacaccggagactgattgtcctctctctgtagaagagaaccagaacgaaaccgggtgattggctatttaaaaatgcatcttataaggaaaaaaaacatgtgtgatttgacagcagaaatacgtaactttttttgttttctatagtcatcctctactccgggttttttcagataatttagagtggattttagaagggttcttggagatgctctcagtcttatttttccttttctctacgattccggaaaagatacagatgtctacggcacaaacaaccttacctctttgtctctgtgtgcgatgcagagctgatgcttctggggttcatctccctgctgctgacggtgttccaggggatgatccagaagacatgcatccccgaagactggacgttcgacatgctgccgtgcaagaagccggacgaggccgccaccaccgccaaggcgagtttcgtcgatgtcgggactacccttggcaggattggtaggcggttgctggccgaaagagttgatggggt

SEQ ID NO: 136007 - DNA, 754 bp, Arabidopsis thaliana
gacaacttggactgcagtgttgcttcctccatccatctcctctcctgctgctaaggccctgtttggtttggctaactaaaatctagttaattttagtccctaaagaagcaaacatgatgactaaagtggaacgactaaactttacttcttggtgactacaagggactagagtaggatttttgtcttatttgtcctctccactttctttttggaacaaacatttactaattaataggggtaatacaaccattattcgcatcaattaattctctttagtccgatttagtcaccggaaccaaacgagatactttagtctagtgactaaatgaaccaaacagagcataagcatgttcgtttggatttaattcgtatcggtttctacagagtttttgtcgattgcagccgcaatattccaaacagctagttttaatttgaaacgaacaaccctcaggctctctccaaccattccccatatatatcttcttttatctatactttttaatatattttactgttttttcttaaaaggttccatcccatacgctctctccatataatacaactcatttatttaatatgtatttatcattttttttgaaatgttttaaaaaaaactagacaatatttatatgccctagtaaacattattatcaagttacgtgacttaaacagaattaatattagtgtgattgaaaacaaggagagcataatgctctccttagggcttgttcggtttgatttcaatccatatggg

SEQ ID NO: 136008 - DNA, 756 bp, Arabidopsis thaliana
aagctgggtgcagagatgttgtaatctatccttattaagcatgtgcagtgactacttatactgatagacaaatttaaagatatgcagttgtttacatcacaaaacataataaacatccaccatgaaagcgtagctaacatccaccatgttaataatacctctaatagtagagtacaccctccatcctaaaaggacctatgtaatgatactaaatatactataaagttcaatgtgttagacggagagagcagacccgttaacaagaacatctgaagggtaaggacccaagagcaccagtggtaagagtagaatgcgcattcttcgttagtatcattccggaacagaatcagtttgtcaatgacgagcgtgatacaaaataaaacccgagtaatagaacgactaagcacaaacagaagacaagagagattaaacacacataaaaagcctttttttaataaagaatacttcaaatttttcgaaaaaagaacatctcaaaggaaaagaccatcgcgaactatttggtgtagtgtttttggggaacccgcgcggccatcatcgcgcgcgctccgaccgcgggcagtcgtcatcgctcgtcgccggcagcgaccgcgggcgcaagcgccgcctctttccgacgaaccgcgccaccaacccaccaacccttgcaggccggcgggggcaacgcgggcacggggaggcgaactccggccgccgcggtgctgccggacggcgcgctcggataagatcaagtagtgt

SEQ ID NO: 136009 - DNA, 1067 bp, Arabidopsis thaliana
agtctagtgcgctcgcacagctatgtatagctgctgatgtacagttaggacaagtcgcacgagtgtgtcatccagtgtgtcgcgtatcagtcattcatctactcgtgcagacagtgctagcgcatcgtgcctatgtgatacgtgtcagacagaccattgcagcgtgctgtaccactcctccatagcgatgagtatttcagtactgtagctctgccagcgtgactcaagcgcgcggtgtgattatccgtcgagagcagacgtagactacgcatgtaccatcgagcctagtgccacacctacacccgtcaacaaccttacagtgacactcatagaatactcaagcttgcatgcctgcaggtatggcaatggtgcttccatatttacaacatctggcgtctctgccaggaaatttcaaacagacattgaagctggccaggtatagtatcagtcgttttcaaaggctgctgatatcagattgcatatgctactcgaaaagaaaagaaaagaaaagataagataagaaagaaatggttccattctgaatttggtaaaactaggaaccagaagaaatgaggtgactcatgcagcatgcattattattattcataacgtttttacggttccatttgcaggtgggcatcaacgtgccgattccagtccccctgccgttcttctccttcacgggcagcaaagcttcattcgcaggagatttgaatttctacggtacacccttctcatcctaacaccgcctgatccttcccaaacagttcgtgagtgactaacacgatggcatgggatgggatgtcaggcaaggctggcgtgcagttcttcacccagatcaagacgatcacgcagcagtggaaggagtcgccggtgcagcgggtctcgctctacatgcccacctcgcagaagtgaaacgtcaaggcgctcacgccactctccaaaacttcactcctttccactcctctgggcatagacccacgcctgggccacaagagaagggtaattggtaggcatggcgacactccatgcatggccatgatactagtgtgtgctcgctttgctct

SEQ ID NO: 136010 - DNA, 761 bp, Arabidopsis thaliana
atatgcccatgattaggctaagctttttaggtgacactatagaatactcaagcttgcatgcctgcagccagcgaagccgtgcacggacgagtagaaggccggccgggtctcaccttgcttgcagttgcagtcggctcgtgccgtagtgccgtcagccgagccacgggcaccgcagctgcgagtagaatatgcagagggcggcgaggcaagtgtatagtaactgtgcgtgtgtgtgtgtggcgcgtcgaagtcaaagcacggtgcgggcgggcgggcgggtactctttgtccctcgcggccgggaagctctcccgtgggcgtaggtgaccgcggccggcaagcaactgccaacggatatcccacggccgctcccgctcgcaggggtgttggccggccgcgccgccgtcgcctataaatggcgagcgagagaccacgcaaaggtcatgccattccgtggtcccgaacgacgccctcgctcgtgcactctctggtctctttctcttcgcctgaccctgagcacagcgccacagacacaacaacctcggactcgggagtacgtgtagctaggcccggtactgtgctgcacgccatggtccattgctagctactagagctctgttgctctgtactgtagctagtacccctgtcgtcgtcattgcctagagacacgtacgcagtcgcgttgctgatggtttgctttgcctgcaggtcgactctagaggatccccgggtaccgagctcgaattcggcctatactgagt

SEQ ID NO: 136011 - DNA, 784 bp, Arabidopsis thaliana
tatctagccctcggacgcgtggcgattggcactctctcctcttggtggggttgacgaatgtctccttccctggcgtctctctgcatccaatccctcaaaattcagcttctagaaagcgatcatccaattccagatttatacgagcttccatcggagttacttgatggcattgtcgctcacttgcctgctcttgctttgcagaagtttcagaccaacatgccgtttcattgcttggatagttatgaatctggagatgattgctgcttgattactgggagaaaacgtgcaagagatgatgtacttggtagctcttggaagttgctgtttaagctgcggtggcctgaattttgttgacccgtgtgggaatcaccagctgatttggcaacagccttttactgggaaaagcatctccaaaattgtgttgattgaagcagctgaggtagctcctgcgtccggcaatttagtggtcgggtttgccccatgaatggatctggtcacatattgggatgcatttgccatgaagagcacatcatgacttgttaaaattgtgtctgcagggaactatcttttcatttcccaactttcggaccatatcttaagggtctgaggcttctgaatgtcctttgcgttacaaaaacttttgaggtattggtggacaagttaattggcgaagtttggggttcttacctttggatccaggatcccgaggaaggccttggttggagcccccttggtggcaaagcctttttgggatttcataaagccccgagaaaaaccatttaaa

SEQ ID NO: 136012 - DNA, 1041 bp, Arabidopsis thaliana
  unsure (1)..(1041): unsure at all n locations
cccccgggccgccggtttcgataagctggatatcgaattcgcggccgcctcgcaatctcaacgagaaagccaagaacacatcgcaaaagaccaaaccagacttacaacgaagcagctactcttctctctactgcttatcccaacatcttctcctcaaacttgtcctctaagcaaaaaactcactcttcatcaaactctcacttctacgggccattgcttagtgacaacgacgacgcttctgatttgcttcttccttatgaatcaatcgaagaacctgattttctgtttcatccaacgattcaaacgaaaacagagtttttctcagaccagaaggaagttaactccgggtggagattgctacggtggtgaaatcgaaaagttttgatttctccgacgaattcggatgctgaatcgattctcgatgaggatattgaaggagggatcgatagtataatgggggctgtggtggaatcgatttcaaatccggggatttattgaatctggggtcccgggaatgatcaatcgcggtggaagaagttcttctaatcggattggtaaactagaacagatgatgatgatcaattcatggaatcgaagctctaacggattcaatttcccgttagggcttggattacgaagtgctctcagagaaaacgacgacacanaattgtggaagaatcataccgttgatttcgaacagatctcgccgcgaattcaaactgtcaaaaccgaaactgcaatctccaccgttgatgaggagaaatccgacggtaagaaggtggtaatctctggagagaagagtaataagaagaagaagaagaagaaaatnacggcgacgacgacattnattacggaatcgaaaagcttggaagatacggaggagacgagtttgaagagaacaggtccgttgttgaagcttgattacgacggcgttttggaagcttggtctgataaaacgtcgccgtttcccgacgagattcagggatcggaagctgtcgatgtcaatnctagnttagctcanattgatttttttcggagaca

SEQ ID NO: 136013 - DNA, 806 bp, Arabidopsis thaliana
  unsure (1)..(806): unsure at all n locations
ccccccccccaggtcgccggtatcgataagctggatatcgaattcgcggccgcgcttgagtatatgtttctctatcaaaacaagctctccggtcagatcccaccgtccatcttctccctccaaaacctaatttctctcgactttagcgataactcgctctcgggagagatccctggctcgtggctcagatgcaaagcttggagattctccatctcttctctaataacttaacaggaaaaattccagaaggagtaacttctttgccacgtctaaaagttcttcagctttggtcaaacagattttccggtggaattccggcaaatcttgggaaacataacaatctcactgttcttgatctttctaccaacaatctcaccggaaaactccctgacactctttgtgattctggccatctcactaagctcatcctcttctctaactctctagacagccaaatcccaccgagtttgggcatgtgtcagagcttagaacgcgtgaggcttcaaaacaatggcttttcaggcaagttacctcgaggtttcaccaagttgcaactcgttaactttttggacttatccaacaacaacctccaaggtaacatcaacacatgggacatgccacaacttgagatgttagacctcagtgtgaacaaattcttcggtgaattaccggatttttctagaagcaaaagactcaagaagctcgatttatcacggaacanaatctctggagtggttccacaaaggctcatgacgtttccggaaataatggatttggatttaagtgagaacgaaatcactggagtg

SEQ ID NO: 136014 - DNA, 778 bp, Arabidopsis thaliana
gcctccaggtcgacggtatcgataagctagatatcgaattcgcggccgcgggaacttttgcatctgctctatcgctgtggggatgataattgagattgtcgttatgtatcccattcaacaccgtgcatatcgtcctggaattgataaccttcttgtgcttctcattggcggtatcccaattgccatgcctacagttctctctgcgaccatggccattggctcgcataggttatctcagcagggagcaataaccaagaggatgacagcgattgagggaaatggctggcatggatgtgctttgcagcgacaagaccggaactttaacattgaataaacttactgttgacaaaaatcttatcgaggtttttcacgcaaaggagtggatgcggatacaagtagttctaatggcaagctcaagcctctaggactgggaaaccaaggttgccattgatgctgctatagttgggttgcttgctgcccctaaagaggcacgggctggtgttcgagagggtcactttcttccattcaatccccctgccaagggcgcggctcttacatatattgacagtgatggtaaaatgcatagggtcagcaaaggtgcacctgagcaaatgctaaatcttgcacacaatagagcacagattgagcggagagtacatgctgtaatagacaagttcgctgaacggggttttgcgaacctctcgcccggggcttaccaagaaagtttcccggaagggaacaaaagaaaagtggctgggaggccccttggggcaaattt

SEQ ID NO: 136015 - DNA, 774 bp, Arabidopsis thaliana
  unsure (1)..(774): unsure at all n locations
acttggccctccctcgaggtcgacggtatcgataagcttgatttcgaattcgcggccgcggtaataaagcaggaaaagagaggaaggtggaggataaggtcgttgttatggacaaagaggtcattgcttccgagattgttgatggaggaggaagcaaaaaaagaaggggcaacggttactaggactatcaagctggtacatggagatgatataaggtgggcacaattgccgttggattctactgttagacttgtgagagatgtaatcagggatcgctttcctgctcttaggggtttcctcattaaatatagggatacagaaggtgacttggtaaccattaccacaactgatgagctgagggctagctgcttctactcatgataaaccttggctcccttaggattatattatagcagaacgttaaccctgaccaagaacccaacctatgatggcatgagcaatactgaatcacctgacaaggtttccaagagattaagtagccttgcggacattggtagtgttggggaacccgggggatctgacaaagcatctgggtgctttgagaactggattttccagtttgcgcaattgtttaagaaccatgttgggtttgattctgattcgtacgtggaccttcatgaccttgggatgaagctgtatacggaagcaatggaggatgctgtcactggtgaagatgcgcangaactctttcaaatcgcttgctgattaagttcccaaagaaaatggggggccaactagccttttgtttgaaac

SEQ ID NO: 136016 - DNA, 802 bp, Arabidopsis thaliana
cttggccccccctcgggtcgacggtatcgataagcttgatatcgaattcgcggccgcatttaagaaaaaaagattacaaatggacaagaaacaagaaattaatgatttcggtgattattaaactatagtattacaaacaaatttatcaacattaacttatagcgaccgacaaaagaaacttaacttttagcgatgctccagagtttttgaccgggtttgttgacaagtgtgtgagtgcttaaggttgggagctaagtagtctttcggcctcgtcgtttgcttcagcctgtattttccatttctcttcaaggttttcaagttccatgatctgctctatctgttgagcaatgttttcagtattgttcactgcctcggctgcaagaacatcactgtccatttccacctcaatctcaatcattgaagatattctagcataactatcgatcagatcaatctttccctttatggagttctctagactttctcgtaccttctttactcttgttcttcgagtacggtaagctggctctcccactgctaaaattttgttctcgagctggcacattcgagccaacatccacacctctttctcaactgcttctttttgatctctaatgcgacgctggagcacatcatattgagataaaagttgctgcttgataccaaccacatctactgttcgttcaaggagcttatttaacttaggaaagacaaaagaaattacggttgcttcctttcccttgtgatgtaaccagtaccaacctggaaggaacttgaggcaaaactggggatcaataacccc

SEQ ID NO: 136017 - DNA, 761 bp, Arabidopsis thaliana
  unsure (1)..(761): unsure at all n locations
actnnnnnnnnnnnnnnnnnnnnnnnnnnnnnnnnnnnnnnnnnnnnnnnnnnnnnnnnnnnnnnncttttttttttttttttgaattaagatagtttaagtatgcatattcaatcgacaagcttgtatatgggaattttggcgacaaaacataagatcccaaacgtatctacttgaatttgcacacaactggtttcacaaatccaaaaacttaacagaatattgggggaaaaacactgttagcaacctgggggggagcggccaccgctacacttttgccctgtacagagaatatcccctcagggttccataggccgagttgtaccctctgctacccatcttagtaatactctgagagcttccttaactttgcaagttgcaactcaaccttgcagagattgcctctggcaacattgtgattcctttcctgaaagaaccaactgtttgggccctttggctttgacagaagcggcctcagtttcccattccacaacacaaacctgggaatgggaaacaatatctactccgctgaggatcagtcaatccgccgtcacggtaatacctcctccgccttcgagtttagaagatcgacgattgatcaaccggaaacaacagagattagtagaatcataagcaagtaaccgaggacggagaagaattatgagagaaatggctgcgacaccgccggacggagaagagacatttgatatttccggacgcgtgggtcgaccccggaattccggaccggtacctgcaggcgt

SEQ ID NO: 136018 - DNA, 913 bp, Arabidopsis thaliana
  unsure (1)..(913): unsure at all n locations
tatgactttcgcatgcacgcgtacgtaagcttggatcctctagagcggccgcccttttttttttttttaaattttttaactggattataaaatatttttggatagaaaataaatatattttttttttatagaaaatattcatctcgtagcaatgctaaatctccaaatataaaaaaagagtagtagaacggaatgctttctctctcttctctctcctcatctttcagagagagcaaagcagcttcaatttttttgaccgacaatgactggctttatcagcggtgtttggtcggcttctcctccggcatcgctggcttccttagaagcgttgactggctcagcttccggcatcgaccgactacttttagcggtggtggctggcttatctcccgagagcaagatattctctttcttgtttcgtcgggcttttttctggcgtcttttgccggctttctctccggtttcttgaccggatttagatttgttctgttttttttcttctgcgtgtatacattgcaaaaacgtcccgtattatatgatacaaagccctttctagtgcatcaatggtaaccttatagccaaccgatggcatcaccggttttgggatcaaaccaattagtccgggcaatagcatagccacgagccatccgggacattccccggccgccaacaattggcattttctcggattgggttcatcgcggaagttcttccccatcaagcttatggtgctgtccttgtaaggaccgtcctcgaaaaagaagctcatggccattatnaaacctacttcttctttacatnaagaaccgtaaaggccttgcgcccgtccaacgagtttggattttggatcagcggtctcggtgagagcgtcgtcgaccatgaanacagcgccgaacagcgtcggggatttttc

SEQ ID NO: 136019 - DNA, 853 bp, Arabidopsis thaliana
ggtacccgaccggaatttccgggtcgacccacgcgtccggaagagaacaagtgcttccgcgttgtgatcgttattccgctactccctggatttcagggaggtattgatgactttggagcagccacggttcgagcactgatgcattggcaataccgtacgatctctagaggaggaacttcgattcttgacaaccttaacgctttgctcggtcccaagacgcaagattacatctctttctatggtttgagatcgtacggacggctgtttgaggacggtccaattgccactagccagatttacgtgcatagcaagttaatgattgttgatgaccggatcgcagtgatcggatcttctaatataaacgataggagcttactaggttcacgagactctgagatcggtgttgtgattgaagacaaagaattcgtggaatcttcgatgaacggaatgaagtggatggctgggaagttctcttacagtcttagatgttccttgtgggcagagcatctcggtcttcacgccggagagatgccaaagatcgaagaatccattcaaagatgcaacctacaaagacttggtggatggcaactagctaagaaagaacacccgatattttccgaacccaagtcttttttcgttgcatttcctgaaatgaaaacatattaccccctcaaagaaacttggaatttgaaaaacaccaaataattgggcttctttttgtaaaaaaacaaagtttgggggttcaacaactttactgaatccgaaccctttgggtcatttggccaccccgggaaaaagggcttaaaaattcaatttgccgggcaaacccgatcttcgtggggggagaaatttc

SEQ ID NO: 136020 - DNA, 785 bp, Arabidopsis thaliana
accggaattcccgggtcgacccacgcgtccgggcgagcctcttcttaagaaggattgtcttgaagaaggaggtgttgatatcgattttgaccgcagacaactaagttcatccgatgagtctaactctgattggtataggtctgatgatgcaatcatgaaaccattatcccagtttggagatgatgatttcgttgttggtagctgggagaccaaagagatcataagccgtgatgggctgatgaaactcacggctcgagtatttctcgcatcaattgatcagagaagcgagagacctcctggggaaagcgcctgcacagctctagttccagtgttggcccattggttaggttccaccagggacataatcccaacaaggtcagagtttgacagtcttatcagagaaggatcatccgagtggagaaatatgtgtgaaaacgaggaataccgggaacggtttccagacaaacatttcgatctcgagacggttcttcaggcaaaagtcagacccatctgtgtagtccctgaaagatcattcatcgggtttttccattcagagaaatcagaggaagaagaaggaaaagagaatgcttgtctagattttctcaaaggtggaaaggtcctttgacaggatttgggaagaacttattgaaacaagaaacccgaaagaggccgggaacgccgaaccttgtggatccttacatttggtaaagctgggaaaaggaaccaattttctttttgtgccttccctttggggaaacccacggatggcgtttatattaccattc

SEQ ID NO: 136021 - DNA, 819 bp, Arabidopsis thaliana
taccggccccgaaattccgggtccgcccacccgtccgaaagaataatgaataattttgattcagtaaggacaagagttctcactatttgtcaatccaaaagtgcagataacctagacgagatggaagaaactgatgacgaaaaggatgataggtcctatggttccttaatgatagagagattaactggaactcgagacggtcggatagatcacatgctccaggagaaacctttgccatccgtatctacaagcaataggagctcatacgaactattggagagatcaagatactgctcttttcataattaaacacttgtatcgcgagttaccagacggaccaaactcgcccacggaatccaccgaaggagatgatagtccaaaagactcaagtagacctcatagctggatagacagaagagaggctgattatgatgatgaagagctttctttaacattctccgacaaacaaatcgctagaagcttctctgcagaagccaagaaatatttgaagaagccttaagactttgaccataggtttatatcgtatatccggtgaaagctccctgattttggttttggttcctgtgcagaagtaacatctagtgtagaaaatgtgaaaaagtaaaactccgacatgggtttgccacattggcaccataatttttacattttattaagccaaaaccatgaaaagcttaaaaaaaaaaaaaaaaaaaggcccggccggcttttagaaggaaccccaagctttacctaaccccgcttgccttgccgaacacccaattaaccttcttttctatttggggggccacccctaaa

SEQ ID NO: 136022 - DNA, 769 bp, Arabidopsis thaliana
  unsure (1)..(769): unsure at all n locations
gtaccggnccggaattcccggtcgacccacgcgtccggtcatgtacttaaaaaaagaagtcaaaggggcattccgagaatcgatctcgggacctcttgcacccaaagcgagaatcataccactagaccaaatgctgtatttgaatgcccccactgaagcattgtgttgttgtgtaatcctgtggaaaagagaattcatgcttcactccgttattacaggaaattaagtcatgggggcttgtttaccttttgagggttctattcgtgatgaagctggcaacatgcattgaagctaagctgcagaagggaggtgtacggtcatcgcctcatcgggcatgtaagcaaaggttaaatttgttgtgtgcgaatcaacagagagagagaaaagggcacatcaaatagatgggcagagtatcctgtggacgagctagaggcggtcctagacaaggcagcattgggacaacaacaaaacggggattatagcaatggtgaacaaagcttacctggaggaggttgaaagaaggaggacaatgcttgatctggttttggagagtttttgggaagggagagggtactccgccgcttcttgaccatttgatgctagtggcaggggatcagactttctacgaacggtggctttttaggaggcttcccttgtacaagaagggatcccatggggtttgactttggaaggaaaaaaaggttttttattgtcaaaaagaattttcatttggacaataaagttgggccggagagacctttaacttggg

SEQ ID NO: 136023 - DNA, 779 bp, Arabidopsis thaliana
tgcagtaccgctccggaattcccgggtcgacccacgcgtccgcaccaaatttggagactgtgattgagcatgagcgtcagaagttgttgaacaaagtcgacgaaatcgaggatttcagattcgaggatctcgaaatggagacggagaaagataaggaaaggatgatgacgccgacgacgagaatgtcttattcatcttcgtcgtctccgtctccatcttcggcttcatcatctcgctgcgctcctctctcgctgccaaggcaattcgagcatcttctgcgcatagagactcttctctttcttctgcttactcgtctccttcttctgctcctgttcccactcctcccaaggaggtgaataaggcttatgagtatacttctatgaagagtttgaatgaaccaaaacggggcttttgggggaagtttagctagtaaagctaaaggcttttttgtgatgaggatgatcccaaatcaagttgccctcaaagtcccaagaggatggagcaaggcatacccttttgcgacaacttcaaggaactaagggaagctgggcaagactggtacggaaaagccaggatcctttattacagagaagattagatgcgatcacttcatcggtgaaataacattggtggcaccaattggtactgttgttgaggagggttttaccggttgtggagaatcgtactgcaggcattatttaagaaacccctaaaaagaataaaaaaaaagccagtcttacaaggacccacagaatcctggaaatcaagctgatttggag

SEQ ID NO: 136024 - DNA, 770 bp, Arabidopsis thaliana
gtaccggccccgaatttccgggtgcgcccaacccgtccgttaaactcttttttttttcgtttttgggatttgccaacttcgatttctttggttgggatttgtttatacgtttccttcgatttcgctcgagcttcgatctgaaaagcttcgagcttttagacaaatccatggattctccgccagtttctgctcgattcgatatattcgagatttatcgtagattctgtgctattcgatcaggacaacaattgtgtaataagaaaccctgtgatggcgaagaatctcaaagatttaacttgtctaaagaagcaataactcagctcttatatctagtagagaataagtttcaagctaggaactcgatttttgatgaattgtttaagttgatgtcacggctagacttaatggtggactttacggagtttacttgcttttacgattttgttttctttatgtgccgcgagaatgggcaaaagaatataactataagtagagctattaccgcatggaaacttgttttggctgggagatttaggttacttaaccgctggtgtgactttatcgagaaaaatcaacggccacaatatttcagaagatacttggcaaacaggtcttggcggtttagccggtgtgttccatgagaaatctaggaagggatatgactcctgaagggtgccatggccctgtcccaattagatggactttgcccgagccatttggacaagtttttttacggaccgaaataagggacactttgcttttgttttgga

SEQ ID NO: 136025 - DNA, 592 bp, Arabidopsis thaliana
cacccgtccgcagcctgatgctatggcggatgccttagctgaaatcataagccgtttagaagattctggtgataaaataactgaagcactcagatctctgtgttggagacataacagtgttcaagcagaggaagtgaagctgattgggatagattccctaggttttgacctcaggcttcgcgcaccagcaaagattgagtcatggcgatttgcattctcgacaagggcaacatcagaagaaaacgcagagggacaaataaggaaactattattccccgcaaaacggtcccagtcggcacaaccaataaccaaaatgaacaagtcccagggaatgttgacgctgtagtaattttctgtgaagctgtagaaaaaagttccatgaaccaaaatccaaacagagcacatggatattgtttctgggaacataatattgaaccaattttcttgcggggttctttagacaaatcgaatttatgtatttatgttggaccttctttcagccctaatattgttgtacatattagggatttattttcctaaaaccgcgcctgtgtccacatatatttgtgcgggggtcttacatacaataata

SEQ ID NO: 136026 - DNA, 596 bp, Arabidopsis thaliana
gctgtaccggaccggaatttccggtgcgacccacgcgtacgcacatagacaatggagtgtctgctaacaaaacccaaacccgttttcctctgttcaccatcgttatctccaagaactttgagcacagcaacaccgtcattcgaattatcaccagaatttcattcacccatcaccaaaagcttgctcctttcaagcctcctagcctcgctgttgcattctctgaaaagggtttgaagagagatgtcaccacagctgctgcagcgacggagggagattacagaaggataatgttatctgatgtgttggggaacaagacggaaaaagttgttcggtgggagagagaatgggaaagctatggcctttggggctgttgctggcgacctgtctatgcatttgcttagtctttatggctccgattcaattgaatgggagagctgcttccgctgctgctgggctttatatcgatacaggtgttctggagattactctggctttccatacgagtctttctcatacagcacttgagctacctaaatggcttgagtactagttagctcatcgtggagctcacgctcttcacggaaacccaattgatt

SEQ ID NO: 136027 - DNA, 597 bp, Arabidopsis thaliana
gcagtaccggtccggaattcccgggtcgacccacgcgtccgagtaggcgaaagtgggtttttccaacgcttgtcggattcagtttagatgagggcgcaaaaccattagatggtgccagtcgaatgaagctgacaggcctgtcaccttattggtttgatgtatcttctggaaccgctgttcacaataccgttgacatgcactcactgcttcttctaactggacctaacggtggcggtaaatcgagtttgctcagatcaatatgcgcagctgctctacttggaatttccggtttaatggttccagctgaatcagctcgtattcctcactttgattccatcatgcttcacataaaatcatatgacagccctgtagaccgggaaaagttcttttccaggtagaaatgttcggaaatacggtcttttgcaagccaggcttcttcgagaagccttgggcctttagatgagatatgccgagggacagagacagcaaaaggcacctgtatcgctggctgtgtggtagagagtcttgacacaagtggttggatgggtattgtatctactcatctgcatggaatcttcagtttaccttttacagcga

SEQ ID NO: 136028 - DNA, 704 bp, Arabidopsis thaliana
tcccgggaacgacccacgcgtccgatcttaagagagagagagagagatggagataccgaaattcttggcggtgctagcgttagtgatgttgcagtttacgtccgccggagttgcactcttcacgaaagctgctttcatggaaggtctcaatcccaccgtcttcgttgtttaccgtcaagccatcgccactctcttcatctgccccatctctttcatttccgcttggaggaaagaaaacaaaccttctctgggagtaagaggcttttggtgggtggctttgacggctgttattggtgtgactgttaatcagaacgcttatttcaaagggattgaccttgtcttcttcaatccatggcttgtgccatgacctaatccttatttcctgcccgtcaaccttccattatcctccatcaattgttggggttcgagaggtatcaaagaggtgaacgtatcgaaaaggtgtttgcaaaagtaattggggcccgtgtctgtgtgggaggagccatgggaatgacttttctcagaggtacaaaattgctgaatgcctttcttaaccaagacaacacagcttgggtactcgggctgcttatttccttctttttaagcacatttggctggggcctctttggggggaacctttgaagtttccctattgggcctttttaacttggccccggacccactttggtaacacctttgctggg

SEQ ID NO: 136029 - DNA, 728 bp, Arabidopsis thaliana
acaccgacccagaattcacggaacgacccacgcgtccgatggcttctactatgcgactttgtagtatcagtgggatatcaaggttgttgagtttaagacggttgagtctgcgagggtctaaagttcatggagatgctagcgtattgaagaagctgcagcaattggagaatctacaagatctacgcataactgtatccgcggagttagttagtttggatcaaaggttggcgaagttaatctcttttctgggtattgaggggtttcttcaaaagccattcgatttatcattcctggcgagtatggagaatcttaatgggctatcgctggataatagttatttctcggagattaatataaagtgcagagaaagcgagacggactcgtcttatttacacattaatccgaaaattccatgctttaccaacctctcaggtctggttataagtaagtgccatagcatgaaggatccgacttggatattgctagctacaaaacttgtctacctatacattggcgactcaagagaagtgggagaaaaaataaacaaagagaaaggcaccaaacctacaagtattacaccaatttctgaaactagaaaggttgtattttgaaagaaattgcccaaaacctgggagaagttactacaaggagggccctctaccccttatccgctttttagatggaccaatgggaagggtgcaaaacctgccccaaaaaactgaaaaaaa

SEQ ID NO: 136030 - DNA, 510 bp, Arabidopsis thaliana
  unsure (1)..(510): unsure at all n locations
tgcacacactcaacaacatatcccataacaaaaaaaagctattaaaaaaaaagagaagcagccatggaagaaggtaagcaagaagcttcaatgccactagttccaattgacagcttctcttacagttggttagttaactttccttctttagaagctaccattgatgatcatcatcaaacattcgaagattcatcttcttcttcttccttcattgagatggatccaagattgcctccttctagaagattcttcatcaaaacatctcatgaaagtagctttcaagttcggtaacttcggcctctttctccgacggaggatcactcctttaggtcacggccgccgggctctttccgggacgggctacggttatgccttatcggttaaagaccacgtncgngggtaccgtggnaggatcttnngccgttgggtacaaacaacctcggggnagggttttttncaaggngggcttttaanngaaagcctttttcntnntttttttanggnagnttt

SEQ ID NO: 136031 - DNA, 833 bp, Arabidopsis thaliana
  unsure (1)..(833): unsure at all n locations
nnnnnnnnnnnnnnnnnnnnnnnnnnnnnnnnnnnnnnnnnnnnnnnnnnnnnnnnnnnnnnnnnnnnnnnnnnnnnnnnnnnnnnnnnnnnnnnnnnnnnggaataatggatcttcttcttctctctccagtcaaaaagaactttgcacaaatgaatttaatcaaatcaatagttacaacaacgaagaaaatgtacaattttccattctttgcattacatatgttgcagtcttggttgtttcattgggggtgaactatctttgtcctttaacggtttagggctatctccatcttttgttttgttccaaagagagctgatgaattgggctgccccgcttctagagagagtacactcttgtaaaattcatacgaagtaaagaatatggctccttgcgacatgtacatcactagtctggggatcaagcctctgtatagtcctctcagaccttcttgcctgcgtattgattgaagagtttgatagacactaggatgttggttcctagatccgggaatctgagtttgtaatcttgtttttactacatcaaatggggttgtgaagaaagcaccancagatcccgctagtcctccacaggtgagcttgttggagcaaatatcaaaatattcatcccagttatctccctatttcaaaaaaaaaaaaaaaaaatacggattggcttaagaaaaaattttgaaggtgcacaatttattttatggggaatggaagccctaaaaaagaaaaacccccccttgttttgttaaaagttttggggggggtttgagcccactatttcaccccccccgagggggcctctgggggggaaggggaaaaaaa

SEQ ID NO: 136032 - DNA, 705 bp, Arabidopsis thaliana
  unsure (1)..(705): unsure at all n locations
nnnnnnnnnnnnnnnnnnnnnnnnnnnnnnnnnnnnnnnnnnnnnnnnnnnnnnnnnnnnnnnnnnnnnnnnnnnnnnnnnnnnnnnnnnnactagtaatcatatttattattgactcatgtatgcgatacataaagaggaattggtttgcgtgagaaacaactacacaagtacatttctaaatctctctaacttcaaaaatcaaaacatattgaaacaaaaggaataaacatgttataaccaatacatagaccgaacaaaaaaggaaacgatacagagaacccaaagaaagtctcattttcagctttattaagagcttttactgataagcaacaatggcttctaaaggaatggaggaagtatcacccatcttcttgggatactttggctttccatcttttccatcaaatatctttctcagacggctgtgctttccaagagcccaattagtcatgattagagcagcaacagcgagggaaacatatcctgcaatggtctgagtagcggtggttgaatcctacccattggggaacctcggtagtgtaaatggcccatgtaacaatgttgaaggggaaaccgcgtggacttggggcacctccaaccccacttgggggcccttaaatttctttaacaattatgtgacagtaaaaaggttttgcgaatttgggcaaaacccaaaaccccaaacccccgaaaacccaaatt

SEQ ID NO: 136033 - DNA, 802 bp, Arabidopsis thaliana
  unsure (1)..(802): unsure at all n locations
nnnnnnnnnnnnnnnnnnnnnnnnnnnnnnnnnnnnnnnnnnnnnnnnnnnnnnnnnnnnnnnnnnnctttttttttttttttctagaagtttccctaatttattaaaatcccaaagcaaattataatgcaagaacaacacaaacaaagtagcacacatataaatacattacaggaaagtagataaaagtaggtgaacatatatcaagacactaacgagttttgtttccgcgattttaaggttctccattagcacgcatcgttacgttcaatttattgaacttgagaacgtgagaagaaatctgcgtcgcttacacatcacattgtagtgttatatcctttaaccgacaagattgatcgtatgatcccccggattcaacgagatcacaacacgatcacaccacgtcggggatgccacgatttgaggaattggttggaaactaagagctagatattcataggatgcattgagaaccatatgcgcggaagatgattgccactaaccaccaagtatcccggaaaattgaacgatatggcctttaaccacaaactatcccggaaaattgaacgaaatgcaacctacaccgggaactgcattaagtggaaagacaatggtctcgagtgcaaagagaggtcccctctgcatcctgagccctgatgtttcgttgatagaaaaaagaatactttgcaaccccatcctttttttgttgtaaaaaaacaatgggtcttaaaaatctttgaaccggattggggtaaaatcgatgaatttaacaactttctaccccaaagtcattattttaccc

SEQ ID NO: 136034 - DNA, 661 bp, Arabidopsis thaliana
gaaacccgagctccaccgcggtggcggccgctctagaactagtggatcccccgggctgtattaattcgcggccgcactactccatcgacttgtaatttcactttcttagggttcttcttcatcggatcatcggccgtatctgaaaccggagatggccggcgttgattccggcaagcttatcggctctgagattcatggattccatactttacaagatctagatatacaaacaatgttagatgaagcatacagtaggtggctccgtcctaatgagatccatgctcttctctgtaaccataaattcttcaccatcaacgtcaagcctgtgaacttacccaaaagtggtacgattgtgttgtttgatcgtaagatgttgaggaactttagaaaggatggtcataactggaaaaagaaaaaggatggaaagacaattaaggaagcctccatgaacatctaaaagttggtaatgagggcaaggattcatgtttattatgcccacggtgaggatacccctacatttgtgcgaaggtgttactggttattggataagtctcaggagcacatagttcttgtccactattgcgagacacatgaggttcatgcagctcccagcacacctgggaacttgtactcaagttcgatcactgaccacttatcttct

SEQ ID NO: 136035 - DNA, 804 bp, Arabidopsis thaliana
cgttacccatatacgagctatgacgtcgcatgcacgcgtacgtaagcttggatcctctagagcggccgccctttttttttttttttttttttttcaataattttcatatatagtagagattatatgaacaggccctatcactattaccaaagtaaccaaaaccaaataaaacaaaagacaaaaataattcacatttaggtgatctcatcgcgggccggacacttcctgagacgctatgtaagacgcagactgcctagagccgccactattagagctctctcgccggtggaagaccatagtttcactctccccattttgtccttcaaccatggaagactccgcaaacctcagcccataaaacctcaagaagttcaacgactccatcctcgggttccccaacggtatacttccttcgaacatacccactaccgctgccattgttggcctcaatgctggctcctcgtggacgcaacacaaagctatccgaaccaacttctcagcctcttggctcgttacccgaccctctagcctcggatcagcgagctccatatacctcccttgttcatgcatatccaaagcgtacaatgggaaatacaccaaaccagtactagtggtcgtagtcgacgagtggttctgattattatcctccgtcacactgttgctccgagatcgaaaagaacagtttttcctaccactcactagttctaacaaaaccattccatagctgtacacatcagctttctcggagatcgctgcgtttgttatccacggacgcgtgggtcgaaccggaaattccggaccggt

SEQ ID NO: 136036 - DNA, 580 bp, Arabidopsis thaliana
  unsure (1)..(580): unsure at all n locations
tgacgtcgcatgcacgcgtacgtaagcttggatcctctagagcggccgcccttttttttttttttttcttgaatatcattcacttatcatcttatttattggcaattaatgttaagtggaactaatatacaaagacgcaacataggcttttatactgtaaattaaacaactacactatattctgaaaaacaaatcattcactttgataaaaatattcagcactgagagagattatatcaaaccccaaactgatgtaattcacaacaaggcctctcctcctgtctccctcataagccattttcgtgcatttgttgcctctcttctgctttcncctctcacnccagttctttgagaaagtcaatgttgtccacaaataccgatttccaaccatcaggatccagacacgcggtgatcttcgtgctaatanctggtaagggaccaggctcctcgtgatttttccccaaagagtttatagctcngcagtttggacacatcatcgggcctatgggatctgggataagattccttacanatcagggcccaagtantgcagcnagggaggaatatctccggcaaaccc

SEQ ID NO: 136037 - DNA, 625 bp, Arabidopsis thaliana
  unsure (1)..(625): unsure at all n locations
ccccttaaacattttgtatccctttttacttttattccatgtttaattgtcacatggggnaaatatgtgtaccaatgaaacaaacttgtcattttgtagaatgcagnagaaacaaaaaaggataaactaaaaatctgtctttactaaagagtccctaattctccacaggaaagattcagatcagcggaatttagtcctgtggtgtgctcaaaaacggttgtccatgttctcgactatgctttgcagtcctgacttatacgaaggatatagcaatttcactcctagtttatccttcatgcgttcgttgcagactcgtttctcgcctctcaatgaactttcctcccgagattcatacagaaatggaaatggttttgtggtgatattccccggccaacgtttctcgatcaactccaaggcatattcaaacacctcttctcttgctgccggatcatcatcaacaatattgtagatctcccctgatgctggcttttcagtggaagctttaagaacttggcatatacctcaacatgaatcncgacgggaattacggggggnctccctttgacctcagnaacgccngnntaaaaggacaatgactcgcaggcaaaaacccagcgggattggt

SEQ ID NO: 136038 - DNA, 545 bp, Arabidopsis thaliana
  unsure (1)..(545): unsure at all n locations
tgacgtcgcatgcacgcgtacgtaagcttggatcctctagagcggccgccctttntttttttttttttttttttaatttaaatcacttcgtttagctctgcattccacgccaattacaactcgttttgttacaaaccttaccatttgacctgcgttatctacaccctacttctaatgtaaacgacaaaatgagcccggtgtgtgcgaatacaaaacaaagaggggatttggaaaagactgtaaaatcatgaacatgttactcataataagatcttgaaacgggaatcatgctaagtagctttaatcgtcttcgtccatggggtccactggtttcttctgatccccatcaacttcatggcttctttctggatcaggatccgacgagacgtgatccccttggtaatcattcatatcagaaccccctggatccagaatcggaaaagggatggggtttncctnccaggtcancaccggggcaganaaanncnggcntgngccgaagggancaggtttacctccctgaaaggnncccangggcggaaaaa

SEQ ID NO: 136039 - DNA, 523 bp, Arabidopsis thaliana
  unsure (1)..(523): unsure at all n locations
tgacgtcgcatgcacgcgtacgtaagctaggatcctctagagcggccgccctttttttttttttttgaaataagatttgcgtccatatcgaaactcgaattaacagtagctacacacacaaaataatggacgaagtttttttcagataaaccggttaagaaactcatcaacactagtgtacttgacttcagggtaaagctcggaagcctcaactccaaaagaaggatctatagtgaaggaggtaaagtcactcttcacaaaggnttgtatggatcagacccaccaaaaaatccattggaggcttactctcttggatggttttgaggagttcttcctctgaaacataagtcttttcgagagtctnaccgatcttttcctcccacaaaccaaccatatcgttctgcganacaatgtaatgggcgggtgaatgtagagaacttgtaagtgtcncggnnatcaacagcttcaaggaaatgcaacgngctctcagggtgaaaggnttgatggccagtncaagatgaat

SEQ ID NO: 136040 - DNA, 471 bp, Arabidopsis thaliana
  unsure (1)..(471): unsure at all n locations
gcagttgtaagctcgcgtgcacgcgtccgtaagcttggatcctctagagcggccgccctttttttttttttttataattttttagctttgattcgctaaaaaatagagaatatctcagccaattcttgaattaatctctgtaaataattttgtacatatactctattcttttgtcacaaatggaaagtgaacattaaagggggaaatagagaactatatattaaaaaaaagttaccggctcgacttgaagatcatcagagccgagccgaatagagctgatgggggcaaaacttctgagnatagctaaaacggagcttagagcataagctcagtcttacacgtgctctccttctgacacgtgccaaacacgcngatccttctcttcttaacaggtaccacntgatacgcacgtgacaccggttcgagccttaaagttaggcaagcttatctcgnnggagcccttcanagccg

SEQ ID NO: 136041 - DNA, 389 bp, Arabidopsis thaliana
  unsure (1)..(389): unsure at all n locations
tgacgtcgcatgcacgcgtacgtaagcttggatcctctagagcggccgcccttttttttttttttttttcattagattaagcattctttaactatgttcattaataacctctgtcacacattatatataaacctatgaaagatgtttgtttgtgtgccactaaataacttagttccagatgtgagcatcgcaaaggatcacaaccttcttgagcaatgtcagtgattttgaacaccgggcgtcggaaaatttccccagcttcccaattgggatggnaagaacactctgtgaccaaatcaatttaccggcggattccaccnggttactaacggaaccnggaacnngganagcnccggnnggggaactttggcangntancccaaaaaggt

SEQ ID NO: 136042 - DNA, 515 bp, Arabidopsis thaliana
  unsure (1)..(515): unsure at all n locations
agcatgacgtcgcatgcacgcgtacgtaagcttggatcctctagagcggccgccctttttttttttttttttttttttacaagctaacccttgattaaactaaactaatcgagacagaagtctagttgatacttgataaggcaacaaaaacatcggttgaggttacgtaccaaaagcagtaaattaccggttaatgtatcttaaaaaaacggttaaggagctaagcaatgattgatagtttcagagagacatgagagcaaaccacgtcttcaacgttaacctctcttttcatcttcctttggccttcttttaaaagctccgtttgcaagatcctcctncttcctgcngaagctcaaggaccctctcctcnganancggtttcncggcaatcancccttaancaattttnaacccctnggtttctggccggatcccaaagaaacccgggccaagggcccggttcttnaaatggnggggtccccccaggggnnaannaggnaacccttgggggggca

SEQ ID NO: 136043 - DNA, 833 bp, Arabidopsis thaliana
  unsure (1)..(833): unsure at all n locations
ttgcccnnnnnnnnnnnnnnnnnnnnnnnnnnnnnnnnnnnnnnnnnnnnnnnnnnnnnnnnnnnnnnnnacttcgnngacacatctataacaaaaaaaaaatcggccgcaaagtttacgataccgaaagagataaaacaaatagcataaaagcgacccccatcctcatgccactttggaaggtcacaacgacctaagtaccaccaatccttgcttcgccctcagctgtcgtcatcgatgcctcgtcctcaaactctggaaaggccacgaggtcatcatcaagaagatcggtaatctcaagagcatcgaccacttcgcgccaattgtttttgtcaaccttaagctcgcacatagtctcccttaggattgcggtaccgtttttgatcaatttcttcaagagtttccgagaacctacggcttgggattgcatgaaaagagattcgtctgcaacacgtttgtcaagcatatgcttttttagccgatcgatccttggtttataaaatagaacatcatttttaaagcggctccatttggaacgagcagtacgaagagcattggtaagggaaccttcttaaacttggattggcttagccttgactaaaaattattccgaatttttttgagaaattttccaaagaagctttttttggaagtttcaaaagttacccccaaaaacccaaatttggcttggcaaaaaaaaaatattcccgcgggggcctttttccggattttttctttggaaaaacgcgggccaaaccgtgtatttttcttttcccttttaaaaatttttttttttgtacccttgtgtttacctttccgaagaaaaaaaaatt

SEQ ID NO: 136044 - DNA, 792 bp, Arabidopsis thaliana
  unsure (1)..(792): unsure at all n locations
nnnnnnnnnnnnnnnnnnnnnnnnnnnnnnnnnnnnnnnnnnnnnnnnnnnnnnnnnnnnnnnnnnnnnnnnnnnnnnnnnnnnnnnncggccgcgaacatcaagaggagaaacccttttactccatcatcttcaccaagccatgacgcttgcaacgagcttcgcagagagaagcaagtgctaatgatggagatagtgagtctaagacagcagcaacaaacaacgaaaagctacatcaaagctatggaacagaggatagaaggaacagagaggaaacagagacaaatgatgtcgtttctggctagagcaatgcagagtccttcgtttttccatcagttgttgaaacaaagagataaaaaaattaaggagcttgaggataatgagtcagcaaagaggaaaagaggttcttcttcgatgtcggaattggaagttttggctttggagatgcaagggcatggaaaacagaggaatatgttggaagaagaggatcatcaactgggggtagagagagagttggatgatggtttctgcgaagagttgcttagtgatgagagtttggcttccacctcctaactagatggaattcttttttggttttgtttttaggttcttctaactttcaagctcatttttcttctgtcaccaaaaaaaaaaactttttcttgtttggtttaaattaaatttggcaggaaatttttgtttttcaaagtaactcagtagctaggtaagttggtaaaaacaaaaaaaggcgggcccggcgaaaatttcggatatttcaaaggcctttaatct

SEQ ID NO: 136045 - DNA, 797 bp, Arabidopsis thaliana
  unsure (1)..(797): unsure at all n locations
tcctnnnnnnnnnnnnnnnnnnnnnnnnnnnnnnnnnnnnnnnnnnnnnnnnnnnnnnnnnnnnnnnnnnnnnnnnnnnnnnnnnncggccgcgcattttacaggtacacttagaagacttatgaagaagacggcacattgaactcaacaacaatggtatcatcaacataatcacgaatcttctcactccgccacttcatctgctcatccacaccctcaatttcacccaaacccctaaattacgaaatcgatccaattgagaaatcttttagatcccccccggagaaaagttttctccaacagtaatctgatcaatcccttcaaatttctccttcatcacttccataatctccaatttcgcttcttccatgacattctctttcaatttaagaagcgtgattttaccaattgaaccaagaggcggtgctagggcttccggagcttgttcggcgatccaatcaacggccatgatatcttcgcgaatcgattctgattccttgacaacacgaacgtgatcgggatgtatagcgtaagcgttgagatcttctttggatctgtaacggctatgaaggacgtgagtgaagtcggaggcggtggtcgtgataaggcggtggattgaaccgcagtagaggtgaagcacttggtcgagattgactagttcgttgattccggtgaccatggagttgatcttgccggagtcaacggcggcgtcggtgagcggccgggaattcgatatcaagcttatcgataccggcgaacttggaggggggggcccggtaccccaattcgccctatag

SEQ ID NO: 136046 - DNA, 1014 bp, Arabidopsis thaliana
  unsure (1)..(1014): unsure at all n locations
gaggcccccttctcgagtcgactgtatcgataagcttgatatcgaattcgcggccgccaagaaccggagacgttcctccgctttatatgctttacgccgtcatagttcacttggatactctcaacgcatctttctcgggtcactacatttcgtatgtcaaagatttgagagggaattggtacagaatcgatgattcagagattcatccagtgccaatgactcaagttatgtcagaaggagcttacatgttgttctacatgagatcgtatccacgtcctcaaagaggagagcacaatggaaaagctccggttcaccattcgcaaccaagaaacgagatgaaggnacagaggaaacctgttaaccgcttcaaaccgagagcgggtcacaagaacacagagtcatcatcaagcgagatgggctctcttaacaagctcagacgaggcttcttttcaccacaggatcaaccagggggaccctttcagcaccatgggctccacagatgtttcccacgccggagcctcttcttcccctttcggccatcttcaacaacggtttccacaaccgtagggccatcgcccacacaacactgtcgcttgcagaatgttctcaggtcccaaacccgaaacccggtatttccgtggagcaagaaacaaatcacaacaacacggtcggtgctggacgcaacaccatcactatatcctattccagcaccgtatccgccccatgattattacgatcagagtatgtatgtaaattacgagactaacccagaatttaacaatggtcaggatcaggatagaacttacagttactggtagtaagtagaagagactagagaggattctgtttttgaacctccctgatttttattaaatatgtttagagatctctttagggatacttaactcgagtgccctgagattttttgcggccgaattttgtctttagtcatctgtttctttggtatcaaaaaaaaaaaaaaaaaagnnnnnnnnnnnnnnnnnnnnnnggtag

SEQ ID NO: 136047 - DNA, 656 bp, Arabidopsis thaliana
  unsure (1)..(656): unsure at all n locations
ttgggtaccgggccccccctcgaggtcgacggtatcaaaagcctggatatcgaattcgcggccgcctccatcttagtgttagcctctcttcttctaatcagttcatctcttgcttcggctactatatcagatgcttttggtagtggcgcggtagctccggcaccgcagagcaaagatggaccggcgttagagaaatggtgtggacagaaatgtgaagggagatgcaaagaagcggggatgaaagatcggtgtttgaagtattgtgggatatgttgcaaagactgtcagtgtgttccttcaggcacttatgggaataagcatgaatgtgcttgctatcgtgacaagctcagtagcaaaggcactcctaaatgtccttgattctatttctttccaaccaaaaatttaaataaatggataaggggggtccagtaaactaattttaaaactataaatgggtcttttgtttatgatttttttttttttttcattcccatttttacgaatttggcttgggctttttgaagtaagtttttaaatattgaaaagggctaaaattttggggaaatcgatccggccggnattcnntgnccccgggggggcccccaggcntaaagggccnncccgggggngccccannttgnnnnnnnnaaccgtag

SEQ ID NO: 136048 - DNA, 726 bp, Arabidopsis thaliana
  unsure (1)..(726): unsure at all n locations
gcccccctggagggagatgcttgcaatcgactgcactggcgccctgggccgaatgagagtgacgcattggcaatgcagaaaacagacttatctctattcttctttgaaaagctcgcgaccgatgacaatccttctgatctcgcttgtccctgcaccgatttcatatagctttgcatctcttagaaggcgtcctgttgcatattcgtttatgtatccatttccgcctaaacattgtatcgcctgcaacatcaaaccaaatcttttagtcttaaaggaaaggtaactaggtgatcaatatgtgtagttatgatcccttcggaggtttgctttgctggtaaccattagaaagacaagagacaacgctttaaaactgggtttcggggtttgatctagccttttatgagctaagtgtcaccagtaaccttttaagtatgaagggcaaaataaggggacttgacctggaaagcgcacctgcggttgctctctcggccgcacaaagaataggtccggcgcagtccctttgggccacctttcccattggcacaggccctcgcaacaggggaaacgtatcgcccttgaagattgtaatgcggggcacatatcagcacctttaccccgaaattcaaccgaattgttttagcggccgaatnnnnnnnnnnnnnnnnnnnnnnnnnnnnnnnnnnnnnnnnnnnnnnnnnnnnnnnnnnnnnnnnnnnnnnnnggtag

SEQ ID NO: 136049 - DNA, 677 bp, Arabidopsis thaliana
  unsure (1)..(677): unsure at all n locations
ccccccatttgaannccatttaataggccactcggcacccccctcgaggtcgactgtatcgataagcttgatatcgaattcgcggccgccaaatattcgcaattgagtctgcaaaaggatgcaaagtcacgaggattcactttctggggtaaaggaccagagaatgctggtcaatacagttctcatccacatgaaactgtgttcttccaagaaagaggtgaatatgacagctattatggccgcttcttcttaaattggtactcacaattgctaattggtcatgctgagaatgttctgtctcttgcaaatctcgcatttgaggagacgaagattattgtcaagataccggcaatatactggtcatacaagacagctagtcatgctgctgaattaactgcaggatactacaacccttcaaaccgtgatgggtactccccttggtttccgaaactctgaagaaatattccggtgactgtgaagtttgtgtgccctggggcacaaatggctcccaaatggcgcatgaaggaagcattagctgntncagaangggttaaggtggcagggnggncancnagccttggggtaaagggnttccaaaccggnggnggaaaatcnggtaccttgttcnccaaanatggtggntngggtaancggaaaggaaccagaacccccgnngt

SEQ ID NO: 136050 - DNA, 659 bp, Arabidopsis thaliana
  unsure (1)..(659): unsure at all n locations
accgggccccccctcgaggtcgcgggtatcgataagcttgatatcgaattcgcggccgcctcgggctcagtaaatggaaagttgaactacttgccgcactacaagtgggtgctacagaggtccaatctatgattctgaagggtggtggcatgatcacattcgccaaagtttatcagttgttggctaagaaactatctggaaaagtattccttgaagctgccaactaccagattaggaaagagatgctaaaaaagggtgggcagtttgctgccattaacttggaatctcgagcagctctgttagcagcgaagcatggatttgcaggggctgcatccagatacattggcttaaaaacagcgatgcaattacttggccccatgatgtgggggacattactggctgacttagtgattcagatgctcgagactgactacgctagaatcctaaggagcaatttacgcattttgcacagattcgggtcaccaggacatacaggctaccttgtaaatggagtaacagttggttttccccatcccagggtccctacgaactatgtcggtaagcggccggaatgcnnnnnnnnnnnnnnnnnnnnnnnnnnnnnnnnnnnnnnnnnnnnnnnnnnnnnnnnnnnnnnnnnnnnnnnnnnnnnnnnnnnt

SEQ ID NO: 136051 - DNA, 552 bp, Arabidopsis thaliana
  unsure (1)..(552): unsure at all n locations
cccccctcgaggtcgactgtatcgataagcttgatatcgaattcgcggccgcaaaaatttcatttggaaaaaaaaaattgattaaaaagaagaagaacaatcaaaaagagaagaaacaagacggatagaaattgcagaaacttgggatagcttcctatttgctcaaataataagaggttctctcttagtaactcaatcaattcttagaaaatatattatattacctttattgataataattaaaaacagtgtccgtatgttattatttcaatttcccgagtggtcccaggatttaaaggattggaaacgtgaaatgcatgttaaatgtacttataatggggntcaactatccgnaacagaatttccaagaaactggttaacggntggtattcagntnaaaatcccatttcccttttancttaaaccctgggcataaanctaaatttccaagnatccccaggagggncggccnaaaaaaaccaaaggccangggggaaaaatgggttttgggtccctaacnggttgggggntngnanccgngcnccggttngg

SEQ ID NO: 136052 - DNA, 415 bp, Arabidopsis thaliana
  unsure (1)..(415): unsure at all n locations
gctctataagcttgatatcgaattcgcggccgcgtgcgttttaaaacacatgtgtttaagtttcgaggcaattaggagataaagacgaacgagatttgcaagcaagaaaccaagacatgagataaaatgatattaacgactgttctattgttgttctgagaccgaggccagattaccgtgaggcgctgctttggttccggctttccaacaacctttgccaaaccatttttccacaatgcacaagagtcaagagatgccacaaggtaaagaagagggaccccggtcacacaancttcccgatgcaaattcanccaattgtcannattccaacangtaaaggtgtatgactggaaccgcgggccgggaattccctgnanccccnggggggtncacttaaattnttggancgggnccc

SEQ ID NO: 136053 - DNA, 664 bp, Arabidopsis thaliana
  unsure (1)..(664): unsure at all n locations
ttctatacgactcactatnnnaaagctggtacgcctgcaggtaccggtccggaattcccgggtcgacccacgcgtccggggcatcgaatcgctgaccgacgcacaggcgcagatcctggtcggccatgaccgcgaaagccacggccgcgacctgttcgccgcgatcgagaagggcgacttcccgaagtggaagctgttcatccaggtcatgccggagctggacgcggaaacctaccgcgtgcatccgttcgacctgaccaaggtgtggccgaagagcgactacccgctgatcgaagtggggccagttcgaactgaaccgcaacccggtcaactgggtaccaggacgtggagcagtcggcgttcgcaccgagcaaccctggtcccgggcatcggcccgtccgccagacaagatgcttgcaggcacgcctgttcccctattccgatgcgcagcgctaccgcctgggcgtgaaccaccaccagattccggtgaatgcagcgcgctgcccggtgcacagcaaccaccgcgatggtgcgatgcgcgtggacggcaactacggcggcctgccgcactacgagccgaacagctacggccagtggcaggagcagccgcagtaccgcgagccgccgatgaagatccggggcgacgccgacttctggaatttcc

SEQ ID NO: 136054 - DNA, 672 bp, Arabidopsis thaliana
  unsure (1)..(672): unsure at all n locations
attgcccgtccggaccggaattcccgggtcgacccacgcgtccgagctcttgagattcatgcagtaccaaccaaaacagcgactgccttttacgagaaagaactgggtgtgcttctaacacctccatcagggaaaaatcagatgcaggagtggaaagggttacaatctcaccggttacttcaaatcgaaatcaacgatgcaaaaagaccggctagtgatgtggcaatatcagggttaggatggatttcaattgaaccaatccgcaaaacacgaggaactgaaccgagagatctcaatgaagcagagcatgagatacatatttgtgtcagtgtgccaaaaccagttgaagtttttcttcgaccaacattgccaattggtacttcaggtactgaatggtatcagtatcgtgagttaaccgataaggaagaagaagtaagacccaaatggtacttttgaatttttttttgtttagatgcaaaaatatcggcttagtatcacaaaccagagttatatgtaacaaaatagtaaattgtttgtaatgaaatctacttaagtnnnnnnnnnnnnnnnnnnnnnnnnnnnnnnnnnnnnnnnnnnnnnnnnnnnnnnnnnnnnnnnnnnnnnnnnnnnnnnnnnnnnnnnnnnnnnnnnnnnnnnnnnnnnnnnnnnnnn

SEQ ID NO: 136055 - DNA, 651 bp, Arabidopsis thaliana
tcccggtccaacccacccgtccgggtttcgttgatgatagcctcaaaactggtttgaaagatcagcctgttgctgttaaggctttgaaacgagaaggtggacaaggccatagagagtggctggctgaagttataatccttggtcagttgaagcatccacatctggtaaatttggtcggatactgctgtgaggatgatgagaggcttctagtatacgagtacatggaacgaggcaatctggaagaccatttatttcaaaagtatggtggagccttgccttggttaacaagagtgaagattcttctaggtgctgcgaaaggccttgagttccttcacaaccaagagaaacctgtcatatacagggattttaaggccttccaacatcctcttgagcttcggacttcagctctaagcttttcagatttcggcttagccacaagatggttcagaggaagaaggctcaaacctttaccaaaagtgtaatgggcacagaaggatatgcagctccagaatacatctcagcaggtaatctgacgacaatgagtgacgtgttcagttttggggtggtgcttttggagatgctaacagctagaaaggcagtggagaagtaccgggcacagagagggaggaacctagtggaatgggcaagact

SEQ ID NO: 136056 - DNA, 676 bp, Arabidopsis thaliana
  unsure (1)..(676): unsure at all n locations
ctggccgtccgcagtaccggtccggaattcccgggtcgacccacgcgtccgggagaatctcctcctcgacgagaagctcgatttgaagatctctgatttcggactcagcgctcttaccgatcagatccgacccgacggcctcctccacacactctgtggtacgccggcgtacgtggcgcctgaggttttggcgaagaaagggtacgacggtgctaaaatcgacatatggtcatgtggaatcatactgttcgtcctcaacgccggttatctccctttcaacgaccataatctcatggttatgtaccggaaaatctacaagggagaatttcgcattcccaagtggacctcaccggatctccggcgactgctgactcggcttttaagacacgaatccgcagacggggatcactatcgaagggattcatccacggtccatgggtttcaaacagggctacgacgatcggatgtctaaattttcccatctaggggactccgttatgaaactcccggcggacgagaccgacagcgagatgggagcaaggaggatgaacgcattcgacatcatctcaagatctccagggttcaatctctccggtcttttcggagacgccagaaagtacgaccgagtggaacggttcgtgtcggcgtggacggcgganaaggtggtggagaggct

SEQ ID NO: 136057 - DNA, 637 bp, Arabidopsis thaliana
cggaattccagggtcgacccacgcgtccggatatttcgaagggaagagagcaaccgaagctgagattttggataaatttggaaacagaggttcggttttaaagccaggattcatacatgggactcgtcaggtcggtagcataaagctgccacttagtctcattggagctcctctcgaaatggttttgaagctgttgccaaaagaggtgacgaaaattcctgtgatcgggccacttttaatacctccggtcaatgtcaaatccgttgcagcaacagcggtaaaagctgcagttgatcccgagtttgcttctggagtcatcgatgtgtaccggattcttcaacatggtcactgaaaacaacacctgtcttaacaaagttctcctcaatacggttttaaatgtcaaattcaaatgtaaccaataaccatcgtctctggtcttctgctaccaaataaactatgactttcgcatattacaaaaaaaaaaaaaaaaaaaaaaaaaaaaaaaaaaaaaaaaaaaaaaaaaaaaaaaaaaaaaaaaaaaaaaaaaaaaaaaaagggggcggccgctctaaaggatccaagcttacgtacgcgtgcatgcaacgtcatagctctttttatagggcacctaaattca

SEQ ID NO: 136058 - DNA, 630 bp, Arabidopsis thaliana
  unsure (1)..(630): unsure at all n locations
gtcatcctgaatttatccagctttttgtcaaggctcttggcggtaaaataactaaagcaaataaaaggatcttgtttctttgtggggattatatggaagactatgaagtcaaagtgcctttccagtcccttcaagctttgggatgtcaagttgatgcggtttgtccagagaagaaggctggtgatcgctgcccaactgcaatccatgactttnagggtgaccaaacttacagtgagaaaccaggccacacttttgctttaactactaactttgatgacctagtttcctcgagttatgatgctctggtcattcccggggggcagagcaccagaatatctggccttgaacgaacatgtcccttaacataggttaaaggggttcatggattcctgaggaaccagttgcggctattttgccacgggcaaacagatcttagctccttctggtgtcctcaagggaagggaaatgcactgcttatncagccgtgaaactgaacgtggtactttggagggngggancttgggtagaaccanatnccattggcaaggggtttaattncgggnattttgnaactngngcaanttgcctgggaanccnggggttttttttaaannaaaggtttttttggga

SEQ ID NO: 136059 - DNA, 701 bp, Arabidopsis thaliana
  unsure (1)..(701): unsure at all n locations
nnnnnnnnnnnnnnnnnnnnnnnnnnnnnnnnnnnnnnnnnnnnnnnnnnnnnnnnnnnnnnnnnnnnnnnnnnnnnnnnnnnnnnnnnnnnnagaaggaagaaatataacgctttaatcgttttcgtttgtgacaaataaagcgttttatttgctctgccctttcacatgataaggaagatgtatataactctttattcctttttgtttgtgatttctaaatacaatttagctctaaaaagtaagaaaatagtcgtgaatgtgtttacttatctcgtcaggcctttcctcgtggataaaatgaccgacgcctttaattaccacaacttcgtccaacaacgggacatggctcttaaaccggccatcgtggatgtacttcttgctaccgggaatgtgatatgtcagatcttgggcgccggattatggacttaaccgggactttcactttagcgtttgatagtgaccccatcagctcccatgttcgggccatattccgggagtagtttactgggccagtgaagccattcttctcatactttgacacataatatttgacatctgaatcagttagccaagagggaagtgaaacagagtcatcatagcgttttcctttaggtagaagaataggaccagggttacgatatgttaagaactctaagagacatcgttccgtgccaaccttagcaaattccgactctatt

SEQ ID NO: 136060 - DNA, 770 bp, Arabidopsis thaliana
  unsure (1)..(770): unsure at all n locations
ntnnnnnnnnnnnnnnnnnnnnnnnnnnnnnnnnnnnnnnnnnnnnnnnnnnnnnnnnnnnnnnnnnnncttttttttttttttttttttaacttatcaaattctctcaagaatcaataataaaatgttaatccaacaaatctacaaaaatttgcaagtgtttaaaaatataaaacatctaaccagacttcaatcctcgacctatctactatgtcaaatagacatgatacaaaaatagaaagtccccgttgatgactgcttctgacaccaccaatgcttccattgccgctcacgctatcggcattaccaccgctactgctaccaacgtgtcataccagctgctactatcaccgtttccacttgcatgaattttcttgtgatggccgtaatagtggtggcagcaacggttaaaaggatggcttaacatgttcgtagcagaagcggcggtgattttggctgtcgctgaaaaaaatgatagcacaactggtaacatatgttgtatttattgaggtagaagtacgaacctttatcctcacaatcagaaagttaagactaagcgttgttttacatttagccttaaacaattgaacgaaatagacatttttggctacatggaacgatacagtttctggtaaattacatttatgcttataatctacgtttacttatgcgtattatctacttttaattcatggagaaagcacttgntactgaaatcactttctactttctaaaatattctaatagaaccgttcactattaataatata

SEQ ID NO: 136061 - DNA, 723 bp, Arabidopsis thaliana
  unsure (1)..(723): unsure at all n locations
gaagggaaaaagttggattgacattacnnnnnnnnnnnnnnnnnnnnnnnnnnnnnnnnnnnnnnnnnnnnnnnnnnnnnnnnnnnnnnnncttttttttttttttttcgaagttgcaacgaaaataattcacagtttttgttcttgttcatacaacaaattacaaaattgcaatagaaaagagctcaaaaaccaaacaagaaattatttcaagaaacaaaagatccttctcatgagggatgatgattataatttagtaagctctggagttagatttgctgcaaaccttcctgatctctccgacgcgatcttcaccagtgagaacaccaacgttgaccagcttagccatcgacacagcaaactgctgtctgaatatctgaggtgattgctctgcgaaagtctttacaagcggagcagtccttggggtccttaacaagctcctgatcagtcgacaaaactcccatatgcttctgaagattaatgtagtactgattatcgaacactgcgggggttacagcgtcgagatcgacggtctcagaggcccagcgacacctgcgttgcaagtaatcagcgtattttgtgtcaatcgaaggatctgaaccactggttgcgttgtagttgtaaagcctcgactggatggtgccacaggaggcttttccgatggtgtgggccccggataggacaactaggtcgaggacgttgagaccgtatgactgaaacgtt

SEQ ID NO: 136062 - DNA, 831 bp, Arabidopsis thaliana
  unsure (1)..(831): unsure at all n locations
gaatttcgttacnnnnnnnnnnnnnnnnnnnnnnnnnnnnnnnnnnnnnnnnnnnnnnnnnnnnnnnnnnnnnnnnctttttttttttttttttaacttaaaccggtattttattgcatataaccattttgtgtgcacagtacacaatacacagtattggtattggcaattagtcaattacattacacacaaggaaaaacagaagcacactcatgataggattgactccattattcttcttaggtgtcaaagcggaagctgactccattattcttcgtgaaatcatgtgacgtgtgatccaccacatttgtgttgctgagttctaagttgtagaaatccatgatggagctgccactaaacaagggtccagcatgccatgtaccacggtgcagtttcacaaactttggtcccgagaacctgaagacgcgaatctcttccacctcaggtggaatgtacaagtgaccagactttgcttttactgtatctactctccttccatcatcatcatcttcaataagagatggcttagccactcccatataccaaatatcacctcctattgatcctagacactgtgtcacctttgcgtgatgcgtgatcttgaaaaaccctaagggtgtttctttcagcctaagtatatagagccgtgggattcctttagagagatccaattgagcgtcgttgggaccgtaaccggccccatcacgagaggcttcgatgacttgaccatactctgcgaaggtctcaggtgtagcttcgattggtatcagattcacttccaccggagatttcgccatcgttgcggacgggtgggtcgacccgaaaattccg

SEQ ID NO: 136063 - DNA, 1127 bp, Arabidopsis thaliana
  unsure (1)..(1127): unsure at all n locations
ggaaaagggttgaatttcgttacctcnnnnnnnnnnnnnnnnnnnnnnnnnnnnnnnnnnnnnnnnnnnnnnnnnnnnnnnnnnnnnctttttttttttttttgcttctaaaagaatctttttctatataatggaaactctcaatagagataaaattttgttcatttgacaggttttgtaattgtttcttctttctaaatcctactttgtagtgaccttgacattagtccggtctaggataacgttgaggatcttcccaggcacatagattcgcttcttgattgattgtccatctagatatttcctgagtttgtcgtcctgtgaagctagaacaaaagcatcatcttcagagcatccttcttcaacctctatggtgcctcttgtcttgccgtttatctgaactggaagaacaatagttgtgtcctttaagtaatccgggtttgccttagggaagctttcataggccagagaatttggatggcctaaccgcgaccaaagctcttcagccatgtgaggcgcgtaaggtgagagccaaagaacaaaaggctcaatgattcctctaggttgattattccacttatatgccgcattaacaaactccatcatccctgaaattccccggttgaaatcgtgtactctcgatttcctcttgtcacctttgcaatgcatttatgaagagttccgagttgttcaagggttggttcgtcatcagttactaaggttccatctttgaaagaaccatcagactgaggcaaaccaatgactagtctccaaagttcttgccaagaaacgatgcacaccttcaatcccactcgtgttccaagtttttgagcccctaaatggtcccatgaacatctcatacaaacgtagagaatctgcaccatactctaatacaacatcatcaggatttacgacatttcctctacttttgctcattttataaacgcgtggaatcagacgaatgctaggatcctccttcagaacaaaatgatctccggacttgataactttttcttccgggactgtcacttgttgatgttcatttaaccgttcttcagtatctgcagatacataatttccttcttgatctttccaagccggacgcgtgggtcgaaccggaaattccg

SEQ ID NO: 136064 - DNA, 735 bp, Arabidopsis thaliana
  unsure (1)..(735): unsure at all n locations
nnnnnnnnnnnnnnnnnnnnnnnnnnnnnnnnnnnnnnnnnnnnnnnnnnnnnnnnnnnnnnnnnnnnnnnnnnnnnnnnnnnnnnnnnnnnnnnnnnnnnnnnncgaataacaacagatcaattaaaacactacaaccactatggttttaaggtttaaaatgtaatgactacatctcgttgaagagagtaaaagaatcaagaaaaagttttatttaaaagctcaagtagaagaaccgcagctgaatccttagctttcttaacactcggcattggctcgccaatacactcatcggtccatcctctatcgctcgtattaactcttaccccaaacgtaaatctctttgcatgagccggtcctccttctttcacacatctgtaagaaggcattggccatttctccctcaaacaaataccattcaacgtttgtcgcgtaggcggctgatgcccattcttcttgttcccattcttattctcgccttgatcctctcccgcattaccgttgttgatatgcttctcctttgattctgctatttctttctctttcaaagctgcaagtgcgttcctcgcagctagcttttgaaccattttcttttgcgggttttgcgctactccaacttgaacaccgtcgatgaaaacttccccagtcgctgtgttaccactcctactcgctttgtattctaacccttttgcttgttgctggcaccgctctttgtacttttgccccggatgcatt

SEQ ID NO: 136065 - DNA, 734 bp, Arabidopsis thaliana
tcttttagaacaacctgacgtcgtattgcccgcgtccgtaagcttggatcctctagagcggccgccctttttttttttttttattgaaaagaatatagaactcgatcaagtcatgaactgatacatagttaatcctaatattccttacgtgtctattgggcaactctgaaattcttgaccgtacaacatctattaaaggcaaaaaaagccctcgagactctattcatgtttcaatctttacagccatggaacaatgtcgcttgggaacagggctctattgatcttgctttcacacagtaaggctcatgggcagtcccattctcagctttgttcaacacccatggcttcaaccctccaaggccatgaggcaacctccacgagtgaggaccataaacctgtgaccaccagcgcatcagaacaactcagaaggtatatctcagcccatgctctcttactttccatgttcctcgggggtttttggtagtccttgtagctcggcttgtgaacgcggattatctctcccatcactgttgggttttcccaatatacgtccctgatactcttaaaataccctggagaagaagatgggataaacactgcctttgattttcggttcagaacttggcttgaagggagatttctttgtttgtcaacttcaggaagcagcttatgtctagttccacaagctaaaatctgatctatcaaatgctggaactgttcatttccagactcag

SEQ ID NO: 136066 - DNA, 770 bp, Arabidopsis thaliana
  unsure (1)..(770): unsure at all n locations
tgacttcgtttggccgccttccgtacgctgggttcctttaaagcggccgcccttcctttttttttttttttttttttttttttncaaaaaaaaaaaggctctgattcaaaggtccatatgagccttctggggggtcccctcgccaaaatatgactaatgaaaaaacttccgactctcgtcagtttacaaatcagatgataaacactcgagtaacatgaaggttatgttacaaatatccaatgaactggagagttgaatcaacttgaagcaagagcgtttagcttcttttcatatagttttgcccgtcgaagagcatctaatgcctcagcttgtttccctgcacgtttgaaggtcacagcttttaccttccctgctttgatccgtccccccaattgactccccccttgattaattagtattcctattactccccttcactgggtttggttttgccgcagcttgtgttgtgcctgttttacttaccggtggaggattcacgggattgtctaatccaatagctttgagggcagacaggagttgaggatcgagaaaatcttccaccgctacatcgtccaccggttctggtttagaggatgttgaatcttccaattgagcttcaagagttttggcgatttcaaactcagcttcagcttcctgcattttaccttccctccgaagcttcatggcttgacgtttgtgacttagtgactcttgctgcagcttaaaacggtcacgacctgacattgcctttggagctgaacttgaaggac

SEQ ID NO: 136067 - DNA, 685 bp, Arabidopsis thaliana
tacactatcgaacagctatgacgtggcatgcacgcgtacgtaagcttggatcctctagagcggccgcccttttttttttttttttttttttttttttttttgggcccaaagatatacaagagatttcataattggtgtttggtgtatttggacaaagaaatacaagagacaagtgtaaaagatataacagagcaaaaaccaaaacaatctgcagatacatattaagaatccataaggaaagagatacacagagcataaagcttggatcaatggaagagctcttgagcaaaggcaaaattgttatctcgagagatgttatatctcgtagttgcaagtaaagccagaaggtgagaaataagcagagtgcacaactctagaatgatttacagtagtcaatgttttcgtttttttttttgctcccatgctctcaagtctcaaaggcaagcagttccatctgtggaacttgtagccagccatgacatggggattttgccagttgaagtctatagagttaatcatgggtccatgtaactcccaatacattgaacattccataatccccaccaaaaatttggctccctacttagttcacatatattgagatttaatcaaatgaatcataatcgaaacatagatcctaatattagtgggaggaaaacaaaaaacataaaaccccaatcaaaat

SEQ ID NO: 136068 - DNA, 749 bp, Arabidopsis thaliana
agctattacgtcgcatgcacgcgtacgtaagcttggatcctctagagcggccgcccttttttttttttttttttttttggtcctttttttgaagagagcaagagaataataaatcaaagctttaagattataacaagtttttttagcagtaacagaagtgaaatgttaagagccaattttgagctgtttgcaaacagataatcctaaaatcactgaaccaaggaccgagaaggctccttgccttgaacgccaaaactcgccccccctcaggggccccctaatttcaatccaaaacccttctcgaacctgttgggtgaaggccgtcaagagagcccattattaccgatcacaaacaatcagctttgcttctttttcggaatccaaacggcatcttgagccatcactctggttcttgcatcttcctcactcaatccatctctctccatcagtctcttaagttgtgtctcttgactaacccacacaaccacaataggtttagtccatttatccatcttcacttcgaacaacaaagggatatcgacaactatcactttagctccactcgcccattggttcagaatttcccagaagataccacttgatatgtatggagccatcagcttgtttagaagttgacgcttggaatcagacgagaccacaatctgaccgagttttggccgatccacttctccactaggaagcagaatctcctcaccaaaagctgcaacgactcttttccatccaccgct

SEQ ID NO: 136069 - DNA, 742 bp, Arabidopsis thaliana
  unsure (1)..(742): unsure at all n locations
tctatcaaccagctattacgtcgcatgcacgcgtacgtaagcttggatcctctagagcggccgcccttttttttttttttttttttttncgtctatataactttattattttaattaaatacatgatgggacccacttgtatacacttctaacgacaagttttacgttaatcctacgctaattgtgtaattaatctcttgcgcaatcaaagcttcatcttcctttacaagttacacagttagggctccgatggtaatctcaccacatctgtttcccaacagtgagaatttcaacatctttcatcgccataccaattgttcttctcctttggtcctgtaggaccttcctcgccggataattccaccggaagttttctaagcactgtgggcaagcgaaacccctaaccgtcctcgggaaatcgattcacccaatctctctatctcctctcttggaatcgtacacaaccttgggtccccattctctccaaggtactgcaaccacggcgggtctggccaacacactgtttccgctgagatactccgctgcaatgatcccgtaccgggagcccgaatctaccaagggttcactacgcgcaggggtatttcttatcccaatcccaagcattgtcgatccctgtaagtaagtcccagccctaggaaagcttgcgtgaccatgttttgaaaagtaaaacaacggctttgttgcttcccggaaatgatttcaagggtcgtatgctttcgat

SEQ ID NO: 136070 - DNA, 1016 bp, Arabidopsis thaliana
  unsure (1)..(1016): unsure at all n locations
nnnnnnnnnnnnnnnnnnnnnnnnnnnnnnnnnnnnnnnnnnnnnnnnnnnnnnnnnnnnnnnnctttttttttttttttttctctgaaatatttcttctttttattcttccatatgcaaagataatttaaaggaagaagtaacagctgtacacaaatctaaaggagagaatatgaacacacagacttgtaaaacttaagaagtattggccatggagtcgatgagcaactcatatccctcagggacatgagactgtagacggacgcattcagccaacgcagggacgtcggatgatacgtctagaaactgagccacaaagagaagcagatgaaaatcagagatcctcttcacgaatgggaggctccttgctcgctccatatggcgttttcaaagcccgcattgttgtttgagtgttcctgttctctatcgggaaggtacacgacaacggtcccggatgatccaagattttgaccgggaacaagggaggaatcattatcgacttctttaacacccttgactccaacaacaacctcttttttcaacttggagagcttgggatcatcctcaggtccaatctcagtctcgaaccatgcttgcttaaacaacctaacgcacatatcactcatctgaaacggctcaaagtgaacatcagcaccaccatcctcattggatctcaagcttctacaacagcagtgacccactccttcaaattcgctctcagcgtgaagctgagccgcaagcaacacctcaacgttagacagagtgtactccttcttgtcctgagtcacagtctggttgaatataaacccaactctcctcatncctaaccctaaaggaatagcatcaacacgtttctcttccttagagtctctcattagaattagattatcctccatnccttgctgcggtggntcgtagattaaattcacctcaacctgaccatccttagagacgttnccgtacatgaatccaccgcgtttgacagngaaggcaagcgactcgttgacgaaatgctg

SEQ ID NO: 136071 - DNA, 727 bp, Arabidopsis thaliana
ccacgtcgcatgcacgcgtacgtaagcttggatcctgtagagcggccgcccttcatttttttttttttttttttttgtatttcaaagaaaaaactggcattacagggacacagccttctttaggaaaaaaattggcattacatactgcattaccctggggttttttttttggtttccttcccttaaactatgtaacaaagagattatttaactttctagaagattgcccctaccacaagctctgttatgaggtcatctgtcagcattacctcaatctctctacctatgattgcaatggcatcttctaaactcagccactgcaactccttctcctccacatcatatttgcttggtttctcgtcttttcttgggaccaaatctcgcagagtctcttgtatcttgttggcatcccatttcgggcatacctttggggatttaacccaagggggtggatcccacaaatgcggaccccggggtccaccccggaattccggaccgggacctgcagggggacccactttcccttaagggagacgcattaaaacctggcggaaacaagggcataactgtttcctgggtgaaaaagttatccccttccaatttccccaccaacaaaccaaaacccgaaaacattaaaagggggaaaaacccctggggcggggccctaaagggagagggaggcctcaaccctccccacattttattatggtggggtgggggggccctc

SEQ ID NO: 136072 - DNA, 678 bp, Arabidopsis thaliana
ctatgacgtcgcatgcacgcgtacgtaagcttggatcctctagagcggccgccctttttttttttttttgttgttggatatcacatatccatccatattagtaaaaaccaatctatacatctgtggtttttttaaagaattgacaagtttttgtttctgttttttggtaatgaaatcgaacaaattcaaagaattgtgaagttaataactcccaaaacacttactgcttctgtacatgttcatccttctggatgtccccatgagaagtattgttcatgttggccgtatcttgattaagcagattagagaatccatttccaatcgatttccaccagctcgaccgctctgaggtagtttgatcccactgggcattactggtgcttgaggacagttcgatagatgtggctgactcggtctgcagcccagagaatctcacagctcctagtagctttccgggaagctctgctccgggctgactctcaatggggaccgcaagatcaactggcaaggtagtaacgtagccaaatgcgagatgaacaatggccctagcggccattgaggacccaataccgacatcaatctccacaaagtttttccctgaaacatatttgcaagagagtgcacgtccaatcacacagatcgcttgctctccaacagcttttttaacaatccaagggc

SEQ ID NO: 136073 - DNA, 637 bp, Arabidopsis thaliana
atagacgagctatgacgtcgcatgcacgcgtacgtaagcttggatcctctagagcggccgcccttttttttttttttttaactttaaattatttaatatttattattataaaatgcaaagagttcttgattaagactctccaatagacttgctcacagtgacaagtaaacatatttaaccgccagtaattctacatatccacaaaagaatcatacagattaggcttataaagttaatcaaagctttataaaattacaccttccatgcatgtagatgtaccagcaacgattcctgcgttctcccaggagtttctctggcaaggaccagagccctgacaacttctgtttttacctcaccaagacactcattactttccttctgaataccctctctctggcattacagtgtgagttgtgtcggcctcaatgctcatgtcagcttgagttaacagttccgtgctcatttttgcaagcttctgtaatgcactggtcgcagcttcaacttcaaggttagctgcctcaagctgaagcatctctatggccagatcacccattgttttttccccgactctctcttgtgccaaggcatatagcactttcaaatcttcactgtcattgatcgtttctcggacgcgtgg

SEQ ID NO: 136074 - DNA, 776 bp, Arabidopsis thaliana
  unsure (1)..(776): unsure at all n locations
accatagacgagctatgacgtcgcatgcacgcgtacgtaagcttggatcctctagagcggccgcccttttttttttttttttgtgtaactaaaaagtagttatgttcaaattttcttacaatgcattactcgctcacaataaacccagatccatctgttttactggctaatatacaataaacaaaatccaattatgcaatcctaagagagaagtgaaaacactctcgacaaattacagaaaaagtttcagaagacgaaaacaattttgcttcagcagttgatgccacacttggaagtgtcaggtcctttggtcttgagcacaaaaggatcaattcttacccaaagcctagagaagatagatgccaataacactgaccaaatcaccacaatggttggtgttctgttctgtctacccatcagacctttgaggaatgggtcgagattaacaatgacccaaaaggagaacaagagtttaccacatagaggtccccaagactgatatccattgttaatggcatctgagatgcctgcaacaacgccaacaatgtttatgattaagacagttgctggagggatcagcagtgttgtccatttgaatgcgtaaagttctccaaagtcatcatcatctgttgcctttgatgtgacggtgaagtttgcgtcaatgcctgctaagattttgaggagaccttggacaaccgcaaagngatgagctgagattcctccaatgaccnagaattgctcgtttctccaccattcctcaatgctaactccgctcc

SEQ ID NO: 136075 - DNA, 727 bp, Arabidopsis thaliana
catgcacgcgtacgtaagcttggatcctctagagcggccgccctttttttttttttttaatctaataggggggacatatagattgaagaaacctatgcaaaagatagactataattgacaaggaacctatacacatattcaagaaaacaaaacctagatacagtagttactaattaacaataatatttaccaaaaataaaactcttaggctccggatacagtttggtcggaacaataagaaaatactacatgcacaatctcaaccgtggttgggtaattccacgttatgacgacaaagcggacaagtgttccgattactcaaccaattcgagatacactctttatggtaataatgccgacaaggaagctctgagagcctctcattagcagcaagctcctctctacatatagcacaaaccactaaacctgtctccatcatttcctcagccgtaaaactccaccaccggaagttcctcccctgcgttaagccaccgcgtacaagaggatgaattaccgagaactagaccaaagatttcatcgtaagatccaaacgtgttgactccatgattgctccgtgaatccaagtagtggaggtaacggaggtattcgtcgccaattgatgtagtgtctgcttcgaaatcttcttcggtcggagtttggtctggttcggtgaggtttagaggaagatgaaactcctcagccattgattttttttttcctttggtgt

SEQ ID NO: 136076 - DNA, 553 bp, Arabidopsis thaliana
  unsure (1)..(553): unsure at all n locations
tcaggtttctgggttcatgaaaactagtcaagtagagcgattacatataatacgcacaaacaaacaagaagagaagaagaaagctccctgtacaagaaatacaaagctccacgagaagaagaaaccaaaacaaaagacttctttttctgggaaactgttaaaaacccatcatcacaatgaaaaccctcagattctctgtttcttccttcttcttcaacctattcgtcatcttcatcaagttgaacaatctgagcccgtctctgagcagctttccttctgatgaagaagccccatctcatggctgctttgatctttagccatcctacaacagccttgcccgagtttggacgggcttcttcgnaatcagccattgacgtctgaccaaaggaatggggcccaaactatcttctcccaggtgcaagggggttggtgggnacaccattcatggtaanagctcacagtggtgcaaacggcggctcgggattgggagtcaggccaaacttccccggaaaaccccaacccnggggcgggnttgcacctggangaanccgga

SEQ ID NO: 136077 - DNA, 884 bp, Arabidopsis thaliana
  unsure (1)..(884): unsure at all n locations
actcgacgtcgatgcacgcgtacgtaagcttggatcctctagagcggccgccctttttttttttttttttttttatcgtcaaatttgcgaatctggcttcagattctttatatgacattgttattagtgttgagagagtggcacattctttataaacaagatttcagaagttcccttgtcttaatcgaagaattagtttcctcggtctctactatgtgtatacatgatgtgcttggatctcaggtttaaaccatggggagttttctagagtaaacaacgtacataggatctgaacgccctggatttggagatatatcaacggcctgaggagcttcaaatcctccggcgtagtggaaagtatgatccaacaatgagagcatgatctgcgtcgccagttgatgtccataatcgagatggctttagtaaagaagcaacgggtccgagaagcccattagagcgagcccccggggctaaaggattctggtcaattcccttgaacaccttcaagcggctttggaaagataacccacacttacccacattggttataacttgggaaagaattgccttcaaaaggcagatttgaattgagatttaagtcttggactatgtactcggtgagaaccggattccgcttaagctcttcttcattcatacccattccaactattcgttcttgcctataccccggtggataatgactgacccaactgctacacatatcgagtatgctnactcctggagtatcgctntgaggnaaaaccttggagtaatactttgtcaatgcagctatagntggatcatcaatgtgtgttacaaaccttggagcttcgtagaatgttgaancagacgactcatcgtatctctggaaatcttcttctttg

SEQ ID NO: 136078 - DNA, 787 bp, Arabidopsis thaliana
  unsure (1)..(787): unsure at all n locations
cccccccccggttggnnnnnnnnnnnnnnnnnnnnnnnnnnnnnnnnnnnnnnnnnnnnnnnnnnnnnnnnnnnnnnnnnnnnnnnnnnnnnnnnncttttttttttttttttttatgacaatatagtaaagagatgatttttatgtttatacataaccaagaaagaatacagtttcttttcttttgtcaatgataagtctaccatttaagtgttaaaactattttatataattaacagtacaaagaacaaagacacctacaataccaagctatatatatgtatagttgttagaccccaatctcttaccatatcactgactttgcttcccatgttagaggtaatgaagaagggtaaaagctatttccttgtgccaagtatggccagagcgtaagacggggaaagaaaagtccaactgggttccttggacctgggatcacctttttccggcgaccgttctcattcggcccaccacgtccgatcgaattttctctatcatctcttcattggtgctatcaaacttgaattctttgttagagcctgtagaaaacgatcttagcttctgactctgttcgctctctgtttctcccgacgttttacaacagtttggtcttaaatgttcgccgcttgctttttcatgtgaaccggaacggtttagcttgcttgcaagacaccgtgcaacgtcttcaccagtcaactcgaaagaaactctgtgaggtacccccgagagcttcatcattatgccttgacgacccgtggtccgaattggctaaagangcaacctcagg

SEQ ID NO: 136079 - DNA, 723 bp, Arabidopsis thaliana
cactatacacgactatgacgtcgcatgcacgcgtacgtaagcttggatcctctagagcggccgcccttttttttttttttttttatgcacaaataaaagatcttttggcttaagagttaaaacaccaactgtgtttgcggttggaggatacaaagaaatgatggttctctgtatcaaaccctcatctatggaagtctttttttccatagacaacattctcaaacagtaagttacaaatacagaatcgatggcactttcatcgcgaggtattgtgtttccaccaccaagacttgttttacgtatacatgtagtcatcctatagcttctggataaaggaaagaacgagcatcttgtattgtacagagaagagtttgtgtatccacaaaatagcttcatgaacgggcgctgacgactgggaaaggagtcgatgaaactttcctttaggagaagtgataccttatcgttgttggattgcacatttgttatggtgtgtgactgcagattagagcaaagagaatcaaggtacgaccttaggacatccatgaagccttttgcagcatccacctgcacatcagtacattcatacactggtcttttctttgctaggtagctttctccgacgagctttgagtgataaggacttaacgcattatataagtctcgatactgaagcagctggggcatacttggtgacttaacctggttctttagaatatccacgac

SEQ ID NO: 136080 - DNA, 669 bp, Arabidopsis thaliana
ctatgacgtcgcatgcacgcgtacgtaagcttggatcctctagagcggccgccctttttttttttttttttaaataaagctttatatcattgataagagattttgggttcaagaaaaacattgaaagtaacacatacacaaataataaggctttttaaagaaatataaattgagtcttataacattacacaacagacccactctattgggcccaataaaactagggcctctatagagtaacgcaaagaggaggaggaagaggaagcacagttttattttgaaagatacacaagtagaggggagccatggcatcaccatcctctgggaggtcctcctgaggactgcccactcaatctgtcgaggagggtgttgaagtcgatggggttggccactctcttccatccgctggaataacagccatgacatggtctcctctgaaacccatgctcactagcttctctatcaggtcaccgtattttgatctcaacacaggtggagcaccaatgttacctgcacctgcctggtgcggctggggagggatcccacctccttgtggaccttgcaagtaaagggcttgctgcttctgctgctgcggctgaagtggtgggtattgcattcccccacctttatacatgggattggcatacccctgaaggaggaagaagtccc

SEQ ID NO: 136081 - DNA, 706 bp, Arabidopsis thaliana
  unsure (1)..(706): unsure at all n locations
gtaattccgttnnnnnnnnnnnnnnnnnnnnnnnnnnnnnnnnnnnnnnnnnnnnnnnnnnnnnnnnnnnnnnnnnnnctttttttttttttttttttttttttttacccgagaaaaggtaactgcattatccatgaaagtgtagcatcagtttgagtacaaaagagaatacaaactcataaagaaaacagtcaagacctgacgttcatgggagttgagctcttctaagactagtgggttatgcttaggaatcatgagatggatttggcacgagcatttgggatcctcccttttgactccgagaaacattcatgaaaccataaccccgagagacccaggaggagaattgtatttgaaaatggaccccaagagaggcatgccaatagagacatgatactcccaacatactgtggatctctaatgactccaaatgggaactctgtaacccatggtatgttcttcccgaatcgaacaccgtaataagtcccagcttcacctaacaattggtataccctgaagttgagaaactggccaaaggccatgagaggccagaagtagagcggagacggccaggagagagaagcaacggagaagagagaaaggagttgagcagccttgagcacgtgagaaacacgtgccattaccgtcgatgggtctctttctcggccgcagagattgacccatgactgaggattcgtccacacgt

SEQ ID NO: 136082 - DNA, 684 bp, Arabidopsis thaliana
gtagagctatgacgtcgcatgcacgcgtacgtaagcttggatcctctagagcggccgcccttttttttttttttttttaggttcaaaaactgcctctgatttttattttatttttaccattacttacgaatttagttgggttactagttttacagttaacagtttaaactctaatctctcgcgcgtataaagtgaaacgccgatgcaaaaacaaaaaccttacatcccaaaacacctacgaatcttctgggccaagtccaactctttcaccagagaattcaacatcagtccccgttgtaacaatctccggctcccttggaaattcgctttctgggcttaactccttgaacgcgtcgaccacggtctgcaaccgagcaaacgaactcaatgaggagagacgcgaacgtcgcgagaggcaatgcactcgcgctttcataaggccttggtggccccaccaacggggaagccccgttagccgtctccagatgcggcggaagtacaagccgtgcaggccatgacacctgttttgagaaagtaggtctatggttcaacgcttcacggtgattcttctcgccccagcttggtggtatctctagaactgcctcgcttagggatttgaaggcgtagattggaggcgcgtggttttctggtggatctgaatcttcgagggagagcagttcttgt

SEQ ID NO: 136083 - DNA, 716 bp, Arabidopsis thaliana
cggaattcccgggtcgacccacgcgtccgcaaagctctctttcttctctctcgagatttgctaacttgtcatttgcggatgttgagaatctgaactctgttccggcgtcggaagacacagagtatggatttaaacggccggagatgtacagcacaaacatagccaattccataacttcctacgctcgtcatgtttttgttctttacaaaactcctgaagcttggctctctcacgtcgaagaagaaggtttacctcaacgtttcgctacgttgcttaaagatcgcaaatctgatcttcttgttcagacgaagctcaatgtatgtgaaggtggtggatctgacggtgatgttttgatttttcccgatatgatcagatacaagggggttaaggatacggatgtggaaggtttctttgaagatgttcttgtgaatgggtagccatggagttctgggatacaagaagggatatctgggacatttgtatttgtgtgtactcatgctagtcgtgacaagagatgtggtgtttgtgggccagtgatcttagagagggttaagcaagagattggttctcgagggctgtcgggcccgattacactgaaacgttgttctcatgttggacagcacaagtatgctggtaatttgatcatcttctgtcctgattcagctggaaagattactggcaattggtatggctatgtaacacctgatgatgtacct

SEQ ID NO: 136084 - DNA, 713 bp, Arabidopsis thaliana
aatttccgggtcgacccacgcgtccgtattcaaatagtctgggtcaattgcaagctagggaagtgttctttcccaacttcccggtttctgacacccagtatcagcttatgtctttggatgagcgacttcttctggaactacagagcattggtgtgtttcctgaggcaatgcctgatctggctgaagaaactatgagcactgatgttatggagttgaaggaaggcatttatcaggagatcctacaacaagaagaaaaagctggagaagcttatcattaccatccagaaggggaaagatgttgagaaaaggaaaattgagcatcttgctatggaccaacttgtggaaacagcccacaagaaaagaatggcatgccgtggaagtaaagcagctaaagtcaacaaggttacaagacaagtggcgctggggttcattaggcggacagttgctaggtgtcgtaagttcgaagaaactgggtttagctgtttttctgatcccgcacttcaagatatcttgtttagttctcccagcaacgatgcaaaatcatcagaaaatggcggctctggaacagccagtaacccgctcaatgaaccttctaatcatcacgctgaggccaacggttcaggtgcagtgtctagtacaaagaggagagaagcattgatagaagatggtatcggatgcgcttcctccaaagtcacaacgagcaaaggagtgca

SEQ ID NO: 136085 - DNA, 684 bp, Arabidopsis thaliana
  unsure (1)..(684): unsure at all n locations
ttccgttnnnnnnnnnnnnnnnnnnnnnnnnnnnnnnnnnnnnnnnnnnnnnnnnnnnnnnnnnnnnnnnnnnnnctttttttttttttttgttgtgttgtagttttaacattccaaaaaccaaatctatgtttgaagaaatataaatcatctctcactaaagagttttttagaagaaaagcaaaaaaataggactataccattctcactctctggtggtatagtggattatattacacatgtgcggccgagtatatggaccccgccaattttggaacattaaatcctaccaatacctggaataaaggtggacccaaaatcccaatatgggtggactccaggagttgcaggcaggaaccggggatgcaatcagattcagatgtatgcaagcgagcttctgtcaaaatctggttgtggcctgcctcgtgttggagtcagcggtctctggatattcagctcctgcatccaagcgtcgtctccagaatgttctggagagttctctggagataagatgggaggtggaagaggatgaattaacttgggaacaatcaccaatcctctgccaaccaccaatatagctcctgcattgttcgcacttccgcagtaatttgtggcggagaaaagcgtaatcaactgtccctgtgcaaatctttctaatccatccatcacacattcatgggccct

SEQ ID NO: 136086 - DNA, 962 bp, Arabidopsis thaliana
  unsure (1)..(962): unsure at all n locations
tcnnnnnnnnnnnnnnnnnnnnnnnnnnnnnnnnnnnnnnnnnnnnnnnnnnnnnnnnnnnnnnnnnnctttttttttttttttttttttcactgaatatgaaattttaaagcaagaactttggtctgcagctgctcttaaaacgaacatacaacacaaacttgtaagaaatctcgactaactacacttacgtctttgcttatctgactctgaataaaatggaaactgaatattttagcaaaacagtggtgtgaaaaacctttaaacccaaagatgctcctccatcgtgctgaaaaccatgcctatctaactaacggtaagagtcacacaactgcataggcaaaatgatataccaaagggaacaatgtatcaggttcttaataatctaccgtcataagttgtatcacaggttccttgtcttcaagctgtgctttttctgctgccttttcagtttcctctacaacaaaagccttgagcgattcaacgtctttttttcctttatatttcggaacttcttccccattggaaaatagcataaatggtggatacgagtgaatttcaactttggtgcaaacagctctgctagtaccacagtctacttcaccaaacctcaatttcatcgtctccctccattgcttttcccaagtcttcccacaaattccccagtttcttgcagtgtttacaccaaggaacanaaaactttacgaaccacgnagtatccttctcctttatcttgtcagaaaaggtttctggtgtcagtgtaatgacttccgctttaactaattcaatcggtataaaaaggagaagtataatcatgggagcaacaagccgagcacctagcgtcatcgtagcaaaaccccaaattttgatacttcaccagtcctgttaacttttcttccaaatttgcaacttctgcaacaccaattccgagagcagaagaaagagaggaatgtcaaagcatg

SEQ ID NO: 136087 - DNA, 687 bp, Arabidopsis thaliana
  unsure (1)..(687): unsure at all n locations
nnnnnnnnnnnnnnnnnnnnnnnnnnnnnnnnnnnnnnnnnnnnnnnnnnnnnnnnnnnnnnnnnnnnnnnnnnnnnnnnnnnnnnnnnnnnnnnnnnnnnaagacaaaaagacaactgaaaacatgcctgaatatacaagtaatgacacagttttgatcccataaaaaaaagacattggaatgctaaggaagcttggtgaaaagatcctgaagctgagtgtggctcaccacaacaccaagtttctgtgaaattgctgctgtcactgtttcgggatccaagcttgacaatgtatccgcaccgctcatggcaatgtactcgctcaaattgtgcaagattccatcttgggcaacaatgggttcataggggggaggttcgagcagtccaacttccatcaggttctttcatgtgtcttctatcggaagcgaaatgcttaaagaacagaggagcatgaacaatgcggaagaacctctggtactctgcgaaaagctgaaaagatggctggatagtttcagtcacatatgaggctaagggtgaagggaaaggcaaagtcgaatcaagatcccacaccaaaggctcagaatcactttctttcttcctctggacacagatgacatgataatcccacaggacaaccccatcagctctgggactagctttctgatgccaaagtggaacctgcttcttc

SEQ ID NO: 136088 - DNA, 724 bp, Arabidopsis thaliana
gaattcccgggtcgacccacgcgtccgcccgacagtgtctttcttgagaaattttggaaactctgtgcagaaatgtttaacacttcagatgagaccgatgaggaggatgaaaataaggaatacattgaagagacaaacagagatgtttcagtcattgctgcctgcaagttggttgctagtgatgtggttccaaaggattatctaggaccagagatcatatcgcatcttggtatgcatggacctggtgtaacaggcatcataaagaatcttattacattcttaaggaaaaaagaagatgacatctctaatatctatctcgaatccttgaaacgggcctatcacccggtattcaagtgaacttttctagtggccgtgaagcaatcccagaggtagataaaattgtccttgaagcagtcggcgggagcttgcaggtgggctctcaggaatgtatatcggggctgcgcgcaacaaatacagattggagatattgagtgtggtgaaggaaggtgttgagtttgcttttagggacgccccaaagcaactgttgtttctggaagttgctatccttccatttgcaaccagactctcagtgtctgacatcattgacattaagaacgacgttcaggggcgtatagtgcatgttaatacagacgaagatcccagtggatggcgttcttgcttcaccttcttggaaaccttggaggagaaatgcttgaaaaacgaa

SEQ ID NO: 136089 - DNA, 762 bp, Arabidopsis thaliana
  unsure (1)..(762): unsure at all n locations
gtaactacgttgagctatgacgtcgcatgcacgcgtacgtaagcttggatcctctagagcggccgcccttttttttttttttttttatcaatttcttttaagttccacgcgaatgaaatagtgcttttcaatatttcattacatttggcgagagagaacattacaatgaaattgcagtgtcaaagtaaatcttctgtacatgtttcaatcaaaacctttttctttctttcttccttctctttgagagcaaacatcataaatccacaaaacaatcaaactcacccaaaagacttccacgatttgactcagcacacagtacttatgttcaattctattgattcgatctcgtgaggcagggcaaagcaacaagccagatgatgtttcatggtcctttttgggctgtgccctttgatgtaatcttagacttgagtgctaagctacttatatcgtcgtctccttcaagatcactgaaagaaacatcatcctcattcactgtaaacattggagcccaagaattagcagaatcttcttcttctggccaatcatcatcatcatcatcaacaacatctttagatgtttggctaaggcttgcactatttttgtcgttcttctggattggtttttcctcaataacagctttatcgatgaactgagcgttttcagacccgtgtttaaaatcgcgatacataatcgaaggnggtttaaaagnatatattcttggagaaanaaactcaggaggagcatggttgtagtaattagaag

SEQ ID NO: 136090 - DNA, 687 bp, Arabidopsis thaliana
  unsure (1)..(687): unsure at all n locations
nnnnnnnnnnnnnnnnntgacgtcgcatgcacgcgtacgtaagcttggatcctctagagcggccgccctttnttttttttttttttttttttttaactacaaacataaatagttttggcattacatcacaacacatagcaaatagattaatatgaaattatagattatatagtttcttaaacttaccaagattcaaggcaatgcattataatgattaagatcagtccaagcttgaattccattgttccattcacttcctcctcctcctgtattagcattattactaatcactccttcattatcactgttattaccaaaatacccactcctgtctgattatctcctttcttcgtcggcgacgacggcgatgatgagtttacgatctcaagattccgataaagaataggttgtggcctctcgacgacaacagtttcttccttagaattaccaaaaagcatcgccatcctctgttgctgaagcctccagtgtaaatcttggtttaaacaactcaaagtctctatagaagaagctaagtttccgtcgcttgctccggcggttgtgaaccccgtcggtgaatggttgttgttgaaatctccaaaacccattagggataaacccgacccgacatcaacgggtgtgttttcttggcccgaggacatccggacgcgtgggtcgacccgggaatta

SEQ ID NO: 136091 - DNA, 823 bp, Arabidopsis thaliana
  unsure (1)..(823): unsure at all n locations
nnnnnnnnnnnnnnnnnnnnnnnnnnnnnnnnnnnnnnnnnnnnnnnnnnnnnnnnnnnnnnnnnnnnnnnnnnnnnnnnnnnnnnnnnnnaattaaaatagtgtattttattttcttaaaacataaaccatacatgataatacaaatccatataaactctggagaaagatttgcttatgataatgttcctttggagagttgcgttgttcatgttgctttgtggaagacgcaagtaatgttccaggtcattagggctgcagttattctccttttgtcggcggttgtaaacctcgttggtctaacgttcttactcggtccacatatgtactgttgtttaggtgccgtgaacatgaagtttgccggcatccgagcagtcttaaccgagttaccagcgctaccaacagataactggaatgcactttctgaaccaggttttaagaacacccccttttgcagcaaattacccgatctgctgattgaaaggaagtcccgggaagcaaatcgacaactgttggcttacgaacgcaggactgcgggatatttcctttgaacatggaacaacctccttgccctgtcgtttttgcacccaacatgttccagatcacttctttcttggtccctctccagctcattttccatcctggaatcgaacgttgcttctggtaattgtaggctgtaaccactgcaacgtagccatcaggcgtccagttcaanagatcccatttgactgtgatgtttccatagttgctggtgagagcttctgtagaaatgagacaggnaanagaaaccaagagcaggacaatcatcgtggagaagagagac

SEQ ID NO: 136092 - DNA, 717 bp, Arabidopsis thaliana
attcccgggtcgacccacgcgtccgcatcttcttcaggctcatctttcatctctattccatcccttacatcttctctaggagcgcatttggtatgaaatgtagactcagaacacctcttacaagaatatcccccacaactccaatccattttcttacgacaaacaccacatactgaatcaataataccaagaagagaagtgcgagaaatgcgatgatcatggcggttgatattgatgacccatggaaatccagagcaattgttatggggagtgaaattgcattgaagacagacatatgggcttcgatctccatggaggccgcaagtgggtgcaagtaaaagtgatcaacttttggcataaggggcttagctccatgggtttggggggtgttttggccgtgaagatttagtggtggtggaagagaaacacatcgcaaatccaaagtaaagttacaagcggaacagtgattaaacatttcgtcagagatctttttcccacatgaactacgattcccatcagtataagccggtggttgaccagtgatgagttttattgtgtgtaaggagtgggaagggtggtatacctcagctccatacttttcgcaatccacatggaatgccaaatcgcattcatgcgatttgtgcggatatccactgcctacctttccacaagttaagcacgtgaaagagcttctcaccatctctagccttgggtttg

SEQ ID NO: 136093 - DNA, 663 bp, Arabidopsis thaliana
atgacgacccatgcacgcgtacgtaagcttggatcctctagagcggccgcccttttttttttttttttttaaaccattttaattctctttagctccatccttcattcaaaactccggaaaacaactaaataaacaagaagggcaccgtttacaaagaggtattaaacggctgcgtattttgcttaattatctctgaatccaaaaataaataaaagcacaattacaataaccaaaaaaatctttccaatgtttttttttgtttctctgatcttgatgaaaaagtttcaaagaagacaaacttcttgatcttcagcgataaccatacgactaagaggactaggtccaagcttcttcttcctcctcatctgatttctcttcctcacaatctccatttgatctctctttctattctcccattaatcgcttcttcttccgccaccacgaatctccctcatcaccgcgttttccctcaacgacttccctctaaatatcctcctccctgaatccacactcatcctcgccggcgccaccgccactgccgtctccataggaagaggcttcgacggaggatagcttgaacttcttctcggcgggacgtgaatccgaaaaacgttctcgtatggaccaatcggagcgcagaggcaaaccctaatgaaagaattc

SEQ ID NO: 136094 - DNA, 688 bp, Arabidopsis thaliana
acactacagttgagctatgacgtcgcatgcacgcgtacgtaagcttggatcctctagagcggccgccctttttttttttttttttttttcaaaactaatattttatcatttacaacaaaccaaagaacaaataaaacctgtgttgttcatacaaatatctgcaacttgaggatgaggtttatttcctcatgagctcatttagtgatgtgtataagatgtcaattctatcaacatgaaaagaacaatctgactcctaaaaagccatcagctatctgttagctacaacaagcaatcagcagcacccgccgctcgtcctggtggttctccttgatgcggtagacacgcctaataacgaaatttccaatatcacacaaaaccttaaagacttttcctcccaaatgaaacacggcagcaagtctaatctctgcacccacttgtatgatcctttccataaaagtctcatactcacaggcagagagagcttgaaaactaaaagattctctcagaaaacggcaagcaacttgattacatgatcttattacgtagagccttaagtcggggttttgacttgaggagtgattactcacttgtcctaatccactcaaagagattccatggcttttgccatttccatttgaattgaacaatccactggtgatgacttatcttccacctccaaagtctccca

SEQ ID NO: 136095 - DNA, 909 bp, Arabidopsis thaliana
  unsure (1)..(909): unsure at all n locations
nnnnnnnnnnnnnnnnnnnnnnnnnnnnnnnnnnnnnnnnnnnnnnnnnnnnnnnnnnnnnnnnnnnnnnctttttttttttttttttttccaagttatcttgtttttattacaaagtgctaaactttttttcacagaaagctaataattaagcttatcaatcaatcaattaagctttttgtagacaaaactgctaacatgaacccaagatcaaatagttgacaaatgataaagaagcttttgctacattacatgaaatgacatgagatgattttgcttgtgacaaacaagtctctatcaaacattttttctttcggttggttcactagtctcttcacaatctctttctttgtcttgtttcaatagggtttcaatagggtttcaatagggtcccttgacttggttaccatggctgaatcattccattcatcaggagaaatccaaaaatggaagccccaaacgaaactattcatttaacacccaactttctccttggacccaaatttaccctttgatggagtttaatagcctaataagggtaatacatgactcaaggacgggaggcacaaaaataagctatgaggtttgcaactttttcgattaagacttcttctcaaagaccaacttgaagcggttgatcgttcccgacattatccccctcgcggagtccattttgttccccactttgtcaagcaagnggttatgattcttaacttcttcatgtatgtctccagtcactctcttgagaaacgaaactctgtcctgaagattttccaaagcttcatnattatnacgttcgtcatgagcatacgaagaagaagctntcaagcgaccttcttcaagtccatcaaggccatcaaagagagacgttctcgaagcacgattctcccttcgaaagttcatttgatt

SEQ ID NO: 136096 - DNA, 657 bp, Arabidopsis thaliana
  unsure (1)..(657): unsure at all n locations
nnnnnnnnnnnnnnnnnnnnnnnnnnnnnnnnnnnnnnnnnnnnnnnnnnnnnnnnnnnnnnnnnnnnnnnnnnnnnnnnnnnnnnnnnnnnnnnnnnnnnnnnnnnnnnnnnnnnnnnnnnnnnnggcaacccatctttttatatcattggattatgtttaacagtaacaatatgtttcccaaatacctgttttattggaatatgtttccaaaaaacaaaaaaaaaactttccaagttctgcaaagaaattgaaggtagagagagacccaaaagggaagagttgctgagttttgcatcaggagctttgggaaaaaaataaaacgacttctttttacctttctaaatgtagaaggccatatacttgggggttgcactgaacttttgataacctttaacaactttgttcactgcgtccaaaaagtccttttcagtcacagactttctcctagctccgattgcatacattccggcttctatgcatacacttctgatatcagctccggttgagtttgggcagaggccagcaaggagttcaaaccggatgtctctttcacaactcattgttcgggtgtgaatcttgaagatctgtgttccggacgcgtgggtcgacccgggaattccggaccggtacctgcaggcgtaccaactttcccta

SEQ ID NO: 136097 - DNA, 709 bp, Arabidopsis thaliana
  unsure (1)..(709): unsure at all n locations
actatngacgagctatgacgtcgcatgcacgcttgcgtaatctaggatcctctacagcggccgcccttttttttttttttttttttaattggaattgtcacttactttgtatttgccaatacaaatagagttgtgagagaacccaaacttttcctttgttattgtcacaagtaccagaaatcagacaagcctctgtaaatatccattcataattactgttaccacatatacactttaacatgtaaaagaagaagaaaaatgatggtggatgatcttaattagctggctggagaatgaaactttgagaagctttttgattttggtaaattagggttttacctgatgttttctggtgttggagatgatagagcagacttgtctatatcaccatggctacttgaggaagagtgtgacttgagatacgacaatgccacttctagcatcacttccacttctttcttgtactcgtcaattgcccctgctttaatcttcgattgcatcaaacaccatttcttgaaatgtacaccgactcttatatctataacagatgaagtctcgtctttagcttccaagcgccatcgacagtggacctcaaagtaagaaccaaaaggaacatcatgtggctgttgcactgtttcaaaaaccagcactttcttatctggtgatagaacaacatgctgccattccgtcacagcagtgtctggtggac

SEQ ID NO: 136098 - DNA, 695 bp, Arabidopsis thaliana
  unsure (1)..(695): unsure at all n locations
cactantgacagagctatgacgtcgcatgcacgcttgcatccgtctagaatgctctacagcggccgcccttnttttttttttttttttttaaaaggatgctcgtcctttgtttaataattgacagaagaatttgatggatacaaatttaaagaattcggaatctgcttctgtccaaggtgattattcattcacatttaaattgaaaaagattttacatgctacatgctacatgctaccaacgtaggatttatttacagaatcattttttcaccttctcttgccatcacaaagaatcaaagaacccttgttcttcctccacacattgaatcccccaaacctcctcttccagcgagctttctcttgttcaagacttgagatcaacatatacctacagactagagattccgggttttccgatagagaacttgttttgactacgtcccttaggaggaactgtccgcgagaggaataaggtaccccttgaatctttcctgctggaacgctccatatcttgattcatcactatgctggactggctccaacttccacacttcaactctaccccaaggtcccggacgcgcggaatnggatttccctnccggtttgtgaagagggntcncagggngcaaaattcncaaccaaaggcaatngaaannnannnnnnnnnnnnnnnnnnnnnnnnnnnnnnnnnnnn

SEQ ID NO: 136099 - DNA, 664 bp, Arabidopsis thaliana
gacactatcgactaactatgacgtcgcatgcacgcgtacgtaagcttggatcctctagagcggccgccctttttttttttttttttatctcaaaccaaaatacaaataacaaaatcgcaaagctaaccagcctgaaatgtagggaatcaccattcagttactaaaatacaaaatagttatccatgggagcatacaaaatatttgacagcgacttggtggaagtatccatcaaattcgaaacaaacttggtgattgatgattattacatgaacagcacccagcataagagggacttaactgcaaaatttacatgtggctcaaagcctccgaaaatcaactaatttaacgaccaaaagattgaccttaaacgaaaagttcatcactacctttcaagtaattaaagaacaaggactacacatgtgctagagcatcttggtattgcaacgagttctgtagggaaggcacactttgccttcttcgggtaggtaaaccattgagccttaactcccccaggaccgggtgaattcggtaggaaatatcttactagctccatttgtccttcataccttgggatagaacgtttcaattccacaaacttgagcgacgataccacaacaccaagggcacttgttgaagcccatccacattttgggtttcttggctt

SEQ ID NO: 136100 - DNA, 622 bp, Arabidopsis thaliana
acactatacgttaagctatgacgtcgcatgcacgcgtacgtaagcttggatcctctagagcggccgcccttttttttttttttttttttttaggggtcaacatcaacttttatttaccaaatgattacatccaattgaaggtaaataacattctcctctatcaaattggaccaaaatgcaatggtttgatctaatatcaaactgaaacactatcggatccagcgctacctgatcgaggaaccattgcatttttaaaccacaatgagatacataatactccacaaatgagaatattatcatctcttagaccacctacacagactctaagcgacacgagaacaactactaaaacggaagagaccaaaacctagtctgaagtacaaagtaaatccatactactagtccctattgatcagaatgtaatccatggccccaatagcattaccgcccggaggcgcatccatcagaaaggccccaaatccccggctttcgttggcccggtcttaaacccaaaagcgggccatatatccgactgacccgaccaatgatacaaaggcaaaccagccgggcgagagcttttttccagctaacccatgaacatcaggctactaatcgattaaag

SEQ ID NO: 136101 - DNA, 753 bp, Arabidopsis thaliana
  unsure (1)..(753): unsure at all n locations
tgnnnnnnnnnnnnnnnnnnnnnnnnnnnnnnnnnnnnnnnnnnnnnnnnnnnnnnnacaagatgtctctcatgtcttcttttgttgctttcttacttccaacagaattaagcattgatgtataaatcattcaaagacggtttaatcaaacatatattagaccttaaaacattatgtgacttggaagacagagcccaactgtggtaaataaagaggacatctctgagatcaacttcttcaagttttagatagagaggtcagcgagatcaaatgttctttccaccgctttgcaccaagacgccactttcttcttcctgattccttcttccatagcgggtctgaaaactttggagttcttcgccttctctcccgactcgaatatgtctgcttccttccagaatcccacagctaatccagctgcataggctgctcctaatgctgttgtctctatgtccactggcctcaccaccggacttcccatcagatcagcctgaatctgcatcagaaggttgttagctgtggcaccaccatcaactctgagcaagaactcccctttcccgttattaagggaacccttttcacctgcatctttgttcatggagtcaaggacctcntttacctggaaacacatgctctccagcacagcccgagcaatgtgagacttgttggtgaaccttggggatttccaatgcccaccaccacggggcggttttttcttccacccagggagccaacccaagccggttgaaacgc

SEQ ID NO: 136102 - DNA, 740 bp, Arabidopsis thaliana
  unsure (1)..(740): unsure at all n locations
nnnnnnnnnnnnnnnnnnnnnnnnnnnnnnnnnnnnnnnnnnnnnnnnnnnnnnnnnnnnnnnnnnnnnctttttttttttttttctcataagtggaaaatcttattaacgttaaccaaccatacatgggctaaaaaaccaaaagcccaacatacactgagattacaagaacatttgaagtcctaaatgagtccaagaacattgcttaaagatgaagaactgatattgtggctccaaccaatcttacgtgtcaacagctgaaaacaacacagcacacgtttggatgagtaatctaaaagcatttccgacatcttcctttgccgtctgagattgattccggtgagaaaaatcaacattgataatgaaagcaagtttgattcttctgggtttcaccttaaacaaaccaatcgaacttccagataaaaacttagcagctaagggcaatattaatatgcaacgaaaacttcttcttttcttcaacttaagatgcaaatctctaaattgattcctgcaaatctcaaactcaaaagatcgaattggataataaagatctttaagcgaaaaatcacctaaaccattatcaccaacataagatctatgagattattgaaagaaaaacaaaacaacgttggatacaaaccaaatccggccaacgacgctcatggaaacaacgctgccgggcaagagccaatcaacactactaaaaaagccagagatgctagaaattagaccccgataaa

SEQ ID NO: 136103 - DNA, 749 bp, Arabidopsis thaliana
  unsure (1)..(749): unsure at all n locations
nnnnnnnnnnnnnnnnnnnnnnnnnnnnnnnnnnnnnnnnnnnnnnnnnnnnnnnnnnnnnnnnnnnnnnnnnnnnnnnnnnnnnnnnnnnnnnnnnnnnnnnnnnaaaaaagatgggttagctttgaaagcaaaagatccgtcaaaaatacaagggcctcatagttaacctgtagtaatgaagagaggcatctcaaaatgcaacgaaaaagtgaaataccccttcctacccctcgccaaaatcttgaatatctcatttaagttctttcttcgacggttcttcactccgaatcgctttccatgctccccattgccttcaatcctctgggtctcttcttggaagccttcttctctcttacttcatatctctctttgcacagatctggataaccaagctcctggactcaccagaaggcaatgtcctccggaccaattgggctcgttttttaggtctttgaggaagcttgcaccctttcatagccaaaaaatcttcttccttctttttattggacaaagctatatacaactttggccacacatgcttttttgtttttttcacaggttccttaataattttccccctttcatttattcccatggaaccctttgggggataatacctattctccttctggggcgaagccataaacgatctccgcacattgactagagaaataggggtcttgttagggccggttaaaaaggttcaaaagggtgagccttctcttaaaaagagacccccccgaaaa

SEQ ID NO: 136104 - DNA, 491 bp, Arabidopsis thaliana
  unsure (1)..(491): unsure at all n locations
gacatttgatggataaatttaagtacacaatgtgtctgtaagacaagaaaataataataattggacatttctgtaaaggcacaagcctctgcgcacttgagcggcacttaagaagaaaaaaagagacttcaatgaagattttctctatacaaaaagtttctactcggaatttactctgagacatctcttccaaatagggtgctgattgccttcccgggatcgctttgtttaataagagattcgccgactaaaactgctttgacaccggcttcttgaacaaaggcgatatcttcgggagtgaataacccagattctccaaccacaaggatgtctcctttgacggatcagttcgccacgctctccctcaagtagcttctttgtggataccaagatctaccccaaatggtttcaagggttacgggttattgatggcaatgagcttcgactccttcaattggaaagaacacgatccatcttccctttcgncangg

SEQ ID NO: 136105 - DNA, 718 bp, Arabidopsis thaliana
  unsure (1)..(718): unsure at all n locations
nnnnnnnnnnnnnnnnnnnnnnnnnnnnnnnnnnnnnnnnnnnnnnnnnnnnnnnnnnnnnnnnnnnnncttttttttttttttttttttaacatagcaacactcgactgtccatctcacattggtaacactaatcaatataaacattacaaaacccgtaacgccatcacaaattcgaaaagaaaaaaaaagtataacactaccacactttatactgatcatttttaacaaaatagaaaaaaacaaacaagattttgttcgctcgtggtgatattgttatggtaaagaaaaaaaactcatctacatgatatttgcaaaacacctagcggcaatgtaaattcctaatctcccttaatcccaaaaattcatgtgcactacatgtaacgaataataatcaataacctttttctgcttttgttttcttgattcttcaatggacaatccagggttttttcctggacctccatagtaaaaatagttaccccacacacgattcgtcccacctcttatatcataacaattgggatggtctgcgagaatctttagattcgaagcgggtataagagtgttgtcccagtcaacaatttggagattccggaaataagatgctttaccaaaaccttcaccggcaaaatgtccactacccatttgagtcgtagtgtgtgaacccgccgggtcgttgttcacaatctcgcccccgaatggaccatgcctccat

SEQ ID NO: 136106 - DNA, 805 bp, Arabidopsis thaliana
ttcgtgacactatcgatgagctattgacgtcgcattgcacccgtccgtaagctggaatcctttaaagcggccgcccttttttttttttttttttggggataaataatcctttacagaaccagaagtttttccttacttacacggacgagtaaatacaatccatcgttacactgcggtttctgccttatggaagattatcaaacgtataaaagtgttgcgcctaccatttgacatcaagtgttaaagcttcttgaggaacaagtaatgatggaaactttgagaatgacatgttagacatcaaactgctccatgcttctgaatccacttcaatgaaaggcactacttttctcagcctcactgctttcaacttatctccttcgattttcgccgttacttcaaaccaaacccgttcgatcttgggttttgctctcgatgctacttttttacttatcacactatcattattgccaatacttctctagatctttaactgaaaccggaccattcctgaagcctttagttaagttgttacaaaactaagctgcatgccgtggttccattccctaaagagttacaaaaacttttttccaatctttgggggattctttaaaacccacgaaattaatcttttgaggaaaaccccatccgcttatcctcggtaactttaggaaagccttcttatacatttaaccattttttttcctcagatcaatataaaaaacgagactatgcttctataaaattctagagaatacgactcacgatactacatccttttagtaattgttgggactgtgtctcctta

SEQ ID NO: 136107 - DNA, 605 bp, Arabidopsis thaliana
  unsure (1)..(605): unsure at all n locations
agactatcgttgagctatgacgtcgcatgcacgcgtacgtaagcttggatcctctagagcggccgccctttttttttttttttttttgcaaaagaatatattcggattttttgaaaaattagttgaaagagttggagattatgtcgacatgtattatacatatggaggtaacctgtgaaagagagagggtgctctaaactgatcgaagttccaaaaccttatttatttttcacatctcaggcgaaaactcaacactcaccttaaataatcagctgtttccttgaggaggaccggtcatggttcccatcagtttatcatccggtttgggagtagaagatgcctttggcgtttgtggtcctccacttccttttgggccaagtaacctccggcctgaaggtgctctcgctaatgatgaaatggccactgctgctacagttgccacacgaatccctttatgcacgtctacatactcatctggttcactcacaatctcctcctgcaagagtcctctacacatctctaacgggagaaccattangcncancccatcnccngaggatggganccngctgcggccggagacgtgcaaactgcgtnggaagant

SEQ ID NO: 136108 - DNA, 745 bp, Arabidopsis thaliana
  unsure (1)..(745): unsure at all n locations
nnnnnnnnnnnnnnnnnnnnnnnnnnnnnnnnnnnnnnnnnnnnnnnnnnnnnnnnnnnnnnnnnnnnnnnnnnnnnnnnnnnnnnnnnnnnnagctaaaacttcagtttcataataggcataatgagttatatattcaaaagtataaaatttatatcattgcaacttaaacacgaaaaaccaaagacggtctttagagtccagaagtgaagggtatgccggtgcgtgggagccatgctgtaccagcgataaactttccaacagtgaaagcagatgcatcggaagctctacccaacacatgaaaccctttccaactgacacgccacctcgtgggatgaagctggtccagtattcttatattctgcatagaagagagtgtccagaccaaacaccgaaccttcaatccacggagaccacccgacttggactcacaacattatccaaatacgtctgaagaaccacgggttcgtgagaacttcatccaagggccggcccatgtacgtcttaacggtaccggccactgggtttagatcaggagccggtaggattcttggggtatgggtagggacccctgtgtgctgaaacggatcagcacgaccttgtgcgggaattacattggcttgacctttgagtggccgcgagggaagatgagacagttttggaaaacagcagccgcgttaccgaatatgaaatcgacggttccatagatgtaacactcacgggaaaaactggcgttgagaatgga

SEQ ID NO: 136109 - DNA, 792 bp, Arabidopsis thaliana
  unsure (1)..(792): unsure at all n locations
gcccccggccggtggtttggcttccggtcactatagaagagctatgacttcgcattgcacccgtccgtaagctgggatcctctaaagcggccgcccttttttttttttttttttacaagaaaaactagttgtatagagatttttttgggttcatcccaagatgggctaaaaactgtaaaaacggatactaggaattgtatacaccacaaaattacgtataagaaagtctaaacaaaagtaaggtaaaaaaaaccaacacagtagtaatccaaaaatccaaaatctaaaagaaatagcctctatacgcttgggctgggcctataacccgttgaagatccggattcatgaagtccgggttcgggtcctaaattggatctccctcttttcacagagttcatcttctccaatttgagtccggctctgaatcttgcgatgaaatcatcggctttggtatctacgtcggggctcggacagaacatactcccggcggcctccttacttccagctgattgagctacatccggatcatcaggttcgtcggagcttatgctgatgtcactagccatcctgacgtaatctccacgcttcacgaatttccaagccggcattttaaacggcggaggaggaggcggcggcgggatcggcattagtggtgattcgcttcctgtgcctacgtattgagttactttagctggcggatttggtttggatgtccgtgattccaccggagctttttcgagcttccaggttgatgcgcgtgattcatatctccgttcangtggtggtgggaga

SEQ ID NO: 136110 - DNA, 827 bp, Arabidopsis thaliana
  unsure (1)..(827): unsure at all n locations
agctctgacgtcgcatgcacgcgtacgtaagcttggatcctctagagcggccgcccttttttttttttttttttttttttttaaagggaaaaagactattttaaaccaaagaaaaaactacaaggttcgatcttattttctttgccgcccacgcaaaataatcagaagccatatagcctatagagaggcatacaaccaaacaaaaagtcgaaaggggggccataactcaacgaacactcattttttcttgttgcctcttctcctttgaattcttcatgattcaaattctaacgactcacaaaaacatatctgagagtgaatcgccaaaaggcaggttatgtgaagaatataaagttaccggaaaaggaagaaaatcatcccatttttcactttccgggaaggaggccggcgaaataagcttatcaaaggcatccaagacccccgagttgtgatgcctaggaaacttgaaaagcactatcaagtatgaccctagaacccagaagcaaagagcaagtcgaacgttacactcgccacctggtatatattaaggctagcctttgttgagtcgtaaaaggtgaaacttccatctaaagattcatgttgaacactcacttcagcagtataatcctctagttccttcttcagagccatgattaatggttcgttctttgagagaaacggtgctacccgaggtgtttgtgacaaaagaaccaaccatgatctcacatagaatggatttacagccaaactactgtcatcagcaaaaatcttaatttcttttccttggtgaccatagatatgtttcgnnaagtttcagccaccaactt

SEQ ID NO: 136111 - DNA, 766 bp, Arabidopsis thaliana
  unsure (1)..(766): unsure at all n locations
gtgtacactatagaagagctatgacgtcgcttgccaccccgtacgtaagctgggatcctctagaagcggccgcccttttttttttttttttttttcgataaaaaggatttggctttactttttcaacggataggctgggttgaacgtggaatttgccgggttcattgggccttcgctatatgacaatgacctgacgatttagtggctttcatggtcctcgtgctctggctcctcctttatgatcggagtttcctcaaacaagtgcatgtccactggtgtgcttaacacccactccatggttgccgcctgctctgggaatatgacctcctcgccctctaccttgcctaccaagacgccctggtggtccatgcgcacagttggctcaacaacaggaacattggctgtgttcctagccgagcaaatgagccggatggaggagtgatacacgctagcctgttgcttatagccagctgcaaatttgttggaaaatacacgagtgacacgagatagcatgatggagcgtgacaatgtagagaggatagcgggaacgcacacacgtgcacgagcaaatacacgggaacggtgaattgtcagaataattggctacaactgttgcgtggctggcgcgcaagcgttgtgtggattgagcggacgcatggnnnnnnnnnnnnnnnnnnnnnnnnnnnnnnnnnnnnnnnnnnnnnnnnnnnnnnnnnnnnnnnnnnnnnnnnnnnnnnnnnnnnnnnnnnnnnnnnnnnnnnnnnnn

SEQ ID NO: 136112 - DNA, 781 bp, Arabidopsis thaliana
  unsure (1)..(781): unsure at all n locations
nnnnnnnnnnnnnnnnnnnnnnnnnnnnnnnnnnnnnnnnnnnnnnnnnnnnnnnnnnnnnnnnnnnnnnnnnnnnnnnnnnnnnnnnnnggggattacaatgtgtttctttacacaacaaccaaaccaaataagaacaaattacaaataagaattcctttacaagaaaatatacaaactttaaatcaatatttaataacaaacaaaattaagagtattaatcgaatatctttgtgtatgtattgtctttaaaactatgagtatacgacccgaacaaaatccagttctaccatgggacaggtgacgatgtgggtgacgttaagtctaagaaacttttccagcaagaatcacttgtttcatcatcaagaaacttctcccagtcctctagggaatctgaaccggatgagtgttgagctgtactggggtgggtccaactgggtgtcccggggagagaccgataccggaccagtagatggggtttctagtagttgatcaccatagtcacacggcattaataccgggtctgatttgaatattgaaccttggtggggctacgggctaaccccgagttatattagcatttgaacctctgttttaaagataatttgtactccccgaaccaagattaacgcacgggttttgactttcgcagaggacgtccttacaaaacagtttttatatctaaaggagcgggaactctgataaatcgtcgggaagcgcgagaagcttcaaaagttaaaattggatggttccgcattgcgtagtatatctgatacctaca

SEQ ID NO: 136113 - DNA, 848 bp, Arabidopsis thaliana
  unsure (1)..(848): unsure at all n locations
agatcatgcctgcctacttgaggacgctattaaacttggacaaagataatgaaaggtcttnatgggctctctatctcaaggcccatataagccctagaattaggttgttttttttagcgagtggaaacaactatcaaaataacattaacaaaacacacacacacatacacattctagtacaccattctactctcaaatgtctttttgtcttctttcaggggtttcatagagccttttcttcctaaaccaactcaaacactgaaaattacacatctttttcatttttttattcatcatggggaagctggaacttgatgatctgcagcaccagaaactggagatgaagcagcttcctctttcgaaatggcaacgtagtttgtaggagcagccggcctgttgagagtctcccttctccctgcttcttttgcagaagacctgcttccattctggttggcattcaaagataaacgccggttatgtgttccattggctcctccgttgttagctcggggccccaccgttttcttagcactgaccggccttgcagggcttggcctggggctaaaggcagattcttgctctacatgtggctgttcttgaaccttcttttgttccctcagcctccgtttctccttttctcgttcttgcctaagcataccggactcgtctagcattagctggcagaggaacaccatcgtaggcaaaggacatgctggggttttttttccaaagcccggggtcttgggcaaataaatggtgttcaaaccatgggcagggaaatttttggttaacccaaaaattccgagatctttttttcaaaattcttttttgggaaaaatcaaaagggg

SEQ ID NO: 136114 - DNA, 767 bp, Arabidopsis thaliana
atagaccagctatgactgcgcatgcacgcgtacgtaagcttggatcctctagagcggccgcccttttttttttttttttttctttctaattaattggattgataagtacatattacaactatactaatttagtaattttacattacacatccaacgccaagactcattcatcaactaaactcctatttgacaactgcaattcctccttaaccggactactatcttccttgctatgatgaacctgaaccggtttatacgtataaatcttggcgcaccatagataatacacaagattaacagcttgtaacacagtaatcaaccagtaaaaatactcaagcctccctcggttcaaattgttatccggtaaccaattgctcccatccggtttagcactgaatttatgaaccaaagtcaccacgcaaagtgctcacataggtttccgatcgaaatcgccatccaaaaaagcgccgttgccgtgctcctcatactctccggggccggatcggaggaggactctaaatgcccgtgggacatgaaagcttcagcggctccatggggaccatattggggaaccaaccaaagaaacgggattggaacaatcgtgtgaggtttatcgaggagaccgtgctcaatcgcgacgctctttcgctttacttcgacgaatccggcaactaacgtggcgattatcgagattacgaatccgattcccatacgggggaggaacgtgatgcccttttcgagaccggtgaatttgcgagcgactttga

SEQ ID NO: 136115 - DNA, 739 bp, Arabidopsis thaliana
  unsure (1)..(739): unsure at all n locations
tnnnnnnnnnnnnnnnnnnnnnnnnnnnnnnnnnnnnnnnnnnnnnnnnnnnnnnnnnnnnnnnnnnnnnnnnnnnnnngcggccgcatccacacgtggctgcagacggtttcacatacgaagcagaggctataagagcgtggctggatagtgagcatgatacttcaccaatgaccaatgtcaagctttctcacaccagcctaatagctaaccatgctcttcgttctgcgattcaagagtggcttcaacatcatttgtgaaaataaaatccttcaaaccctcaatccctgttctcttatgaaaaaacgtttttgccttttctgcgggaggcaacagagtaagtgagtaagattagtgttttcagtcttccttatacatatacatacgatctaatcatggatagcagcatatttgtttactttttcaagcatagtgtaagtcctccatatcagtcatatatgaaaaggagaagcctggtgagattggttggtgggtatgtatatatatatatatatatatatatatatgttctgtatgaaaaaaaaagttatatgcttattcggtttgtgtgagaagaactgccactattttgttcttccattatgttcggctcttttaagaacaaagattagcctctaattattggacatgatctcactgatgatgcctttgcttagctaaaaataggatgagtcttacatttttagtcaagactatcgtgtaaaacttgttttcctca

SEQ ID NO: 136116 - DNA, 768 bp, Arabidopsis thaliana
cgaaccgggccccccctcgaggttgacggtatcgatatgcttgatatcgaattcgcggccgctgtttttttttttttttttattttttatttttttttttttctaagggattcaactgttagcaagtaaaagatccatatctttatcgtagtgctccattatttaatgaaaagggttttgcctattaaactactttctcttactgtttatttgtacctagctaccaaccattagagaggaacttggatcacttcatgggctctggggatcatatgccggttgcaaatccaggcgatggacccatcgtctctgtatctaactcgccagaggccaaatttttctgcaatatccctcccggttgagcaagatctgttccctcaagtaatcgatgagccactgttgagctgccctttgtgctggttcctgaatacctctatctctgccccgggtcctacccaatgcagcagccacccctatggccactgcagatccggccgttccacgcatgacagttgtgttggttaagaagctatactatggctcaagtcaagtataatttgtcccattccagctggcccaaattgctccttattcctttatgcaaaaaataacccaactttcaatgaagattttgttcatttttttgggaaccccaaacgccctttcccaaaagttgtggggtggtcccttatccaggccatttatcggggtgaaaaaaaccccaaatctgtaatctccttttttaccgaacatgttgcctattttttc

SEQ ID NO: 136117 - DNA, 932 bp, Arabidopsis thaliana
  unsure (1)..(932): unsure at all n locations
atgacgtcgcatgcacgcgtacgtaagcttggatcctctagagcggccgccctttttttttttttttttttttttcgaagatagacgctaaaattgaggataacacacattatagacaaaaaagtaaagcaaatcacatgtcaacgtccaaagcattggaaccagagacagtatgtgtggttgtcgacccgacacataatccccaacctcttactgaccggaaagaaaaataactacctgatccaccgacaattttaactcctggcaacattcaagcagcggacggtgcggtcacgtagttgagccggccagcttcagtaagagcggtgatgaacggcttcagattcacgagatcgacctctgtgtccacaacggtaacaggtttcttgtaatccaaggattcgccgccgtaaatgtcccaccattttttcactaacatttttatatcttccctctccatgttcgcttctttccctgtgtatctccacggcttcgaacccgctgcacagtagtgacccacccttcgacttttcccaagcctctacattttccgggctgcacgccaataacatcgcaaggaccgagattgtacactaaaggaatcggctttgtaagattttcttaaagtacatgttcaaaaaatcctgttcagcgaaaggagtcggaggagtgattttaagtgttcgtagtagaacctcgtaagtctcgaggttaggctcgtacaagaacattccggcgttgaagtaaagagccggtggctctccaantccgcttttggccactggactttgtcggggcattgttggcaatatctgatcttgtattgcggcgtgtgactccatgttttctcacagaaacaatccatcaccgcgtacaaatagccatctggtaggtcaaacaagtgatcgatgttttcgtaaacttgaatgtct

SEQ ID NO: 136118 - DNA, 670 bp, Arabidopsis thaliana
ctatcacgtcgcatgcacgcgtacgtaagcttggatcctctagagcggccgccctttttttttttttttttttttttaatcccaaaagatagtaatacaaataaaaaggcatggaccttgttaaacaaagtacgctacgaatacatcacaatacaaatcatgaataatgatcatgatggtaaccatgttcatcatcctgatggtatatcaaagcctatacacttgaaaacacaagtgttcaacgactataatattatttggcttcttctcatcttctttcttgtgaacggatcagatttttctaaagtaatgcaatctctcaattcaaatggccaaaaacgtaagacaacgaagtgagaccaaaaacagagactctaagagtaaaagaaacactctttgacacttcagctatcgatatacaaaacatcatctttcgacaagttcattttcccattcttcctccgcccgctccttcgagctccatctgattctcccctctttctcaagacaaaagagaggtataaatatgcagcttcccattcatcagctgataatgtgctctgatcattgctaccatcacccaaagcaccaagccttctcatgagttcgacaaactctggctttttcatatactcatggacaaactcgtgggagttcttcacaaatacca

SEQ ID NO: 136119 - DNA, 695 bp, Arabidopsis thaliana
agctatcacgtcgcatgcacgcgtacgtaagcttggatcctctagagcggccgcccttttttttttttttttttttttcccgcgcattcaaacactttatgcattagaacttctaatttagaagtataaaacacattgtctgaacaaaatccgtgagtatgcagagaacactagcatacacagtttactgcgaacaaattgcttattggaagtttccgttgcaagaaaaagacattgtagaccaaaggcaatcttcccttgaagcgcaacattgtcttttgttattcatcttattctgtttcgtccaatagccccccttgaaagtagattcaaatgttcatagatctgatcagtagatcagcgtttgtctttgactttattatcagctctgcgttgggtcggtcattataatccacccgccatttagcaacatctgggggtttaccagttgagatatgccggttttcaacacgttgcattgctgtatcgagattcacatcgatgaaccatttctcatcaaacatatctgagatgtctttccaagacccttcttctaacaagatgtaggttccttctacaattaccactttatgctggaggctaacaaagatatcatcttcaactggatccccaactccatgatcaaatgatggcacataaactgagccctcgtttttacagcttccggcacgccg

SEQ ID NO: 136120 - DNA, 682 bp, Arabidopsis thaliana
atgaccagctatcacgtcgcatgcacgcgtacgtaagcttggatcctctagagcggccgccctttgttttttttttttttttttttttactcatcaaggaaaattgtattccaacatcacgtttacagaaacaaatacattttgtttgacaatagcttattctgattaaataacatttaaactgaactatttacaacggaaactagaagaatacaaaaacagcgcggggggtgtgaaatcaccgctttcgcgttgccgtgtttctttctgaataaaaacgttgatcagctgccacgtcatcaccaacgacttttcaaaacgagttccactcaaaaaaatcagacaagacaactaaagtactatttcttctactttccccctggggacttaaaacactatataactgggcccccacatggtattacacttggccatccgccgtggcatacatcctccaccaacccaacaaatccggtcttttaccagatgcgaaacgcgttatcccacccaaaccgggtaccaccggtttctcgacgtcaaataccgatttttcaacagcctcccgaggaagtcggttcctgatgtcctgtgtgtttatcggagacgtgtgagtctcaccccctgacacgtctttgacagcggctttgatcctgaaaataactttgaaactcgccataaaccc

SEQ ID NO: 136121 - DNA, 682 bp, Arabidopsis thaliana
  unsure (1)..(682): unsure at all n locations
nnnnnnnnnnnnnnnnnnnnnnnnnnnnnnnnnnnnnnnnnnnnnnnnnnnnnnnnnnnnnnnnnnnncttttttttttttttttttttaaatcaaacccaaaactgaatgtgatccatgctactatctaaattgtctgaacatatgatctcaaagtcacttggattgtacaattctcccatctcaaattatctcaaactgaatgcaggaactaaacattcttcctctatacaatcttcttcccctattctatccccgtccttgatgcccagatgatagctacaactaccgcttagacgctcgtctacttgtatttctggtcctgcacaacggttgatccctttcaggtggagctttttcgacatagggagcaatcaaggtctccaattttacccaccacagagcaatcgcagaagttgtttgaggcatcggaggggaagcactctatgatttcccccatcaaagtctgcccttgatcactacagtggccatagccattctgcatggatggccccaacacagtcgacaatcactggcgtaatttcagacacagaggagcttcgccgaagtcttttcacccatagcctatgagctgactttctccatgcaccaatcaaagcttcttcgggcagagatgaactaaatggcatatactgcagattttaatgattgcaactgacaa

SEQ ID NO: 136122 - DNA, 685 bp, Arabidopsis thaliana
  unsure (1)..(685): unsure at all n locations
nnnnnnnnnnnnnnnnnnnnnnnnnnnnnnnnnnnnnnnnnnnnnnnnnnnnnnnnnnnnnnnnnnnnnnnnnnnnnnnnnnnnnnnnnnnnnaacacaagtcaaaatgggaacaaaagctctcacctttacaataaaataatagagaataactctcaagataacaataataatgaagaaaaaggaccagagcattaacagcgaaggggaaaacacagaatctaatccattccaaagatcctgtacaagaagagaacaaggtcccaaacttttcagacttggcaaaaccgaagggtacatctcatcgggaggcttccagtctcggacaggttaagcagacagagagcacctgaaagaatgttcaaaagaaatcgggtgtttatataaggagcttagcctgaagattcaatttctttcccatgggcttctgaaaggttcctcttcaatcttctcaaccaaatatcggaatctaatgggataagggggcccccatagactgtcaacatagtccgagaatgctttcaaaacggttgagatatcgccgagcttctgctgaatcaatcttttggaccaagaggtctctctccattgaagagctccttcaactgaatccaattcagggaagtctccagaacagaaataaagcatgtatatcaagctctctgcatctgaggcagcacagagt

SEQ ID NO: 136123 - DNA, 692 bp, Arabidopsis thaliana
  unsure (1)..(692): unsure at all n locations
aggttcgannnnnnnnnnnnnnnnnnnnnnnnnnnnnnnnnnnnnnnnnnnnnnnnnnnnnnnnnnnnnnnnnnnnnnnnnncttttttttttttttttttttaggaaaaacgttaaactcataacaataactctaagctattatcattcaaattaatacattacatatgatatatcaaaccacattctctcatgtttcactttataaccaataaatcaaatattagcagcagaagaagaagaagcttcctctaacttcattctgcgccgagtttgcatcggtaggaatctgatctttgtctctaacagtcatcaatgagcaagttcccggcgattctggtggcaagaccgtgttttccgacgagaaaacacgtttaatggccggaggaacaagctcagttggatgagattgtggagaggcaacgtagaagcatttgaataatccctgtgaagtttggtcgatcgtttggaccctctttccagcaagatgttacaaccatggcgaaatccttgggtaaaccgtctgcgcttggcctcacgtccttgaatgcagcagcgtaagcggcttggagatttgacatgccttcaaaaggtaatttgttgtggataagctcccacaagacaatggcgaagctgtatgcatctaccttatggttatagtgttttttctcaccatgcctcaacgtgaccgt

SEQ ID NO: 136124 - DNA, 671 bp, Arabidopsis thaliana
ctatcacgtcgcatgcacgcgtacgtaagcttggatcctctagagcggccgccctttttttttttttttttattcaaatcgattcgtttagtatgaagtatgggaaatgagttaaaaagtcattaatctcaaccttaataaaacaagtatagacacattccccaaaaggcaaaaatgggaggctaaaatgttatcattatgatgatctctcaaagagacctttgacataaaccatgcctttctcattaagctgaagctctttcctcatttcttcgacctgaacatcatctccttgaaccacaatctcatccaatctcccttttgatcccaccatcatcttcacttttatctcctctttccctcgacgcccttttccagtaatacactcctgcgaggggactaaggggaatgatgaggaaccaattgggttccaaaatcaggaactgtaatgggtaagacaggaccaacacttgctaggcttatacatggacaaaacgtaagcagagcagcttgtcctctacttggaaccatctttccttcaaatgtgattgtttctccacgatcagtgatattgaaattcttccttgtgaagaaagatagaatctctccagctacttgctttggctccttcttgacgtcattaacaacaaacgtctttctcactatctttc

SEQ ID NO: 136125 - DNA, 775 bp, Arabidopsis thaliana
  unsure (1)..(775): unsure at all n locations
ccgtnnnnnnnnnnnnnctatgacgtcgcatgcacgcgtacgtaagcttggatcctctagagcggccgccctttttttttttttttttttttttaatgttgggagataacattaaaatgtgacttctcatgttatgtagtattttctaaagtaagacagtttcctacttccgtggaaagtggcttcgagttcttggcataatttgaggaaatcttggtaattttctgtcagggaacatggaggaggtagctggagaagaagtaggtaatggtggattaatgattggtcttggtttgatttctttgatctcaactacaacgcaatccgatgtcagaaacgtttgagccactgatgaagcgtgttccaagcaacatctcacaaccttggttggatcaattataccagccaacatcagatcttcatattgattctttgcagcattgtaaccgtacatggtgtttttgttcgataagaccttttctatgacgatattgccatttgtgtctgcgtttttggctataagtcttatggggtagctcaatgctttcttgaagatttcagctccaatcttctgttctgtgttggcaagggtctctttgattctgtccacttttgtagccagtcgcaagagggcgcaaccaccaccaactacaatcccttcttcaattgctgacttagttgcattcagggcatccttcaaccttttacctgtttatcccttcaactcaactttgtgttagtgcacctacctggattattgcaatttccaccagac

SEQ ID NO: 136126 - DNA, 729 bp, Arabidopsis thaliana
  unsure (1)..(729): unsure at all n locations
nnnnnnnnnnnnnnnnnnnnnnnnnnnnnnnnnnnnnnnnnnnnnnnnnnnnnnnnnnnnnnnnnnnctttttttttttttttgagttaaaactggaccatgtccattgacagacatgatttcatcttgtatatgccaaattgagatttggttcctggtaccgtacaattatactagtgtctctccttgtaactggttcgttcttataacattaaagtagagtgataatggtaaaaatggtgtctctgaaactcgaattgtattttgtatcgttgcatggtaagcgacaagtgacctatcttctccgcttcgattctttacgcatttctgcaaagtaattctcaagattctgcttctcccacagccttttctgcaccagatcttccttcctatattcatctagattagcccatgcgtcggcaggcacactaagtgatcttcgggttaggtatgatgcgtcttcccatgaataaggagctttcttgaccttatatctccacacccaactgctgtaccatactagaagcttaatgatagtgtatggtaggagaatgaatctaacaccgagaagttcccagaccgatggtttttcaactccttttatttgtaaataaagttcgttgcttaactctttctggaggttctggtcaatttggtttgaacccttttttttggtacttactccacctgggcgttcaattctaaagccttgagcttattttttgtagc

SEQ ID NO: 136127 - DNA, 614 bp, Arabidopsis thaliana
agctatgacgtcgcatgcacgcgtacgtaagcttggatcctctagagcggccgccctttttttttttttttttttttcaaagaggcaaaaagattttatttgcatatgtattacaacactttaccatcatctatatactacttttagttcatattataacttttgagctttacaaatgctacaaacagagtgttaagagttcagagatactcaacagggaaaccaacgacgggttttatctcagaggccagggaccgtagctcactcacttcattgtctgtcagactccaacctatcgctccagcaaactctttggcttgttctgcgttcttggctcctggggaaggggtatcacggttccccttgtggccaccaaccacgttcaatgccgaactggggtggggagttttgccggaagtttccacccaattgggtttgattctattcaacagggggttgaagctttgttcaagaactcacgccgtattaaatgcgaaccccgagggaccctgagggggtgggggttctttttggggggtggttttttaaccccaagtttaggaggccacccctttggaagccggaattgggggggggaaaatttattggcccaa

SEQ ID NO: 136128 - DNA, 806 bp, Arabidopsis thaliana
  unsure (1)..(806): unsure at all n locations
nnnnnnnnnnnnnnnnnnnnnnnnnnnnnnnnnnnnnnnnnnnnnnnnnnnnnnnnnnnnnnnnnnnnnctttttttttttttttttatttaaaaggacatattgaaattagttttggataaagttttatttcgttacatagatgttcatagttgacaacatcggaatcgataagtattttaaagtagtaaaagatacgtgaagccatgcatgaacaaacttctgtagcttaggaagatatcattggagagaaatatactcccctagcgtcaaaagacccaccatctcttccatggaaccccctggtaacattccctttaggctccaacacaaatttgggcccaatggccaaatccaaatgtctgagagatccccccttttgccgtttttgaaagtcaaatgccgtaaggacccaaaataggttcccctcactgatatggccggtatgtaccctccacagatgtcatatattcattcggaaagtccacagccaactcctgcggtcctccattcttcatcccgtgataacgtgtcaccacttggccatcttggtcataggcaatggtcatactccttatatgagtttcaggaaaagtaacatacacctttcttacaccgtcgaaattaggaccatcatcccaatattcccctccgggtatgcccccctggggttctgatttggtaggagcagtctttacatatgcaccaagagatccggantacgccaagcagatccatggaagccaacgatgacttttccatcgactccaagtgaaaacttagtacccttttgatatccaataaat

SEQ ID NO: 136129 - DNA, 599 bp, Arabidopsis thaliana
gagctctgacgtcgcttgcacgcgtacgtaagcttggatcctctagagcggccgcccttttttttttttttttttttttttaacccaaagattcaataagcataacaataatcgatcatcccaaacaaatatgtctttagaaagtagagatctcaacttctcaactttatccccattataaaaaaggtctccttgaaaacatgcattccttaaacaaagtcttccactagtagcatgttgttctctagatagatagatatttcttgcttaatcgatggataggcgtggaacacaaaagtccacaagcagcacagatggccctacgcccgccaaataaaacatcctgctcaaagccactttgacaactacaaacttcttcttgtaccataccttcactattgccatggactttccttggatcttctctgttccaactactatcccatctctaagtccaacgtagcgcgcatactcacctgacgaggcacagtaaattgcctaacaccggacgcgtgggtcgaccccggaattccggaccgggacctggcagcgtaccagcttttccctatagggaggtcgtatttaaaagcttggcggta

SEQ ID NO: 136130 - DNA, 688 bp, Arabidopsis thaliana
  unsure (1)..(688): unsure at all n locations
attacaagatgatgattttctatttttatgatcgggcataagcgtacaattaatcatcatgagacatatatatatatatatatatatatgnncaacaacaacaacaacaacaacaacaacaacaacaacaacaacaacaagccacaccttaagataagatgaaatgaagaccgagatttatttataatcagcagcatgagataatatctagtttaaaaagagccaaaacaatatcatccaaacccctaaaacaccgggatggagattgggttggtgatgatngatgaaggggatgatggcccaagggggtattaaggtncccgggaaatccaggggggtttccccggacgcggtcaatcccctgggaccattaccctaaaccccctcaacgntgacaaggggancgtgattggccctttttgagcaaaaccaaactcttcttcagcttccttcaagagttgtccaaacaaaggatgattaaagtacataacgggaatcacaaatctctcttgctcttctccttgtcctaccttcactgccaaacacccttttggtaccttttcatgatcatgctcatgatgatggagacgtgggatgtggaagctccagtggctcatgactttgtctccgttacccatgggccgataatattagtatagataatatatactatggtttagttagtttg

SEQ ID NO: 136131 - DNA, 810 bp, Arabidopsis thaliana
ttcgttacactctagacagagctatgacttcgcatgcacgcgtacgtaagcttggatcctctagagcggccgccctttttttttttttttttttttttttttaaaacgaaaaaaaaagttctctattcatgtgtacatttaggaaggaacacattgcataaattacataaacaaaaaggaactaatatacacgttaaaaataaaccttaaaaaaatgaaaatcaagaagatcgaaacatttggtcgaggatgatggtaagtgccatggccacacgaggttccatctccgattcaacgataagcttatagacatttttgccaaaggcaactcctccgatcaccgtttctttcctcttgatctccgccgttttcttcttgttcctcctctcatccaatattttgcagcttctttgaccgtaagatccttctatttcgaacaacaccgtcttctttgcgctaacccacgccaagcttttccggataagatattatgctaacgttctttctcgccgggaatattggatctctctttgtttctccatcgcataccatccagcaatcttcaagactcaacttcttgcggcaaatggaaaggaggggaaagccggaagcatccctaaggaccatgtttgtctctaggacaattcatgtagtttgcaactttaaagacaagctctccaatgcgcgtgtaaaaccgtaatcccctccaatttgaagaaaaagggactttttttcacaccggtaaaaaaacactggctggtttttgttattaaaacaaaaccttttttttcgaaatggtgctttggggaa

SEQ ID NO: 136132 - DNA, 963 bp, Arabidopsis thaliana
  unsure (1)..(963): unsure at all n locations
cacgacgtcgcatgcacgcgtacgtaagcttggatcctctagagcggccgcccttttttttttttttttttaaacaaaaaaagtttattgcaatatagtttttacgtgattcacaaatattaacaaacacctttcacaagattcacatgaaactaccaaaacattacaaaataatacaaagttttactcagaagaaaagctttattgagaagaagcacaaagaccacccctttttttttgctgttctgtaattatgagttttgttttaacccactgatccttcaagcttgatgctcataagctggttaacttcagctccaaactcatcaggtaacttgttgaaaacatctctgcagaaaccagagatcattgccgctaatgctctctcgtgatcgattcctctctgctggaaatagaatagctgatcttctccaatcttagaggtactcgcttcgtgctctactttcgccgatggattctttacctggatgtaaggataggtatttgcagctgctttgtctccgataagcattgagtcgcaagtcgaagtatttttagcaccctcagctttggactgcacctgaacaagaccacggtaacaatttctcgaatgcccggccgaaattccctttgaaatgattctacttttgggattctttcctttgtgaatcatcttagtccctgtatcagcttgctgataggtattagtcaatgccacggagtaaaactcgccaacagaatcatcgccttctaaaaccacgctcgggtacttccaagttatcgcagaccctgtctcaacctgagtccacgagatcttggaacgatccccagctgcaaagaccacgctttgtgaaaaaattataaatcccacctttaccttgttcatccccagcataccaattctgcaccgtgagtacttaatctcagtccttcccacaatagagctcaaccacagcanatgag

SEQ ID NO: 136133 - DNA, 775 bp, Arabidopsis thaliana
  unsure (1)..(775): unsure at all n locations
tnnnnnnnnnnnnnnnnnnnnnnnnnnnnnnnnnnnnnnnnnnnnnnnnnnnnnnnnnnnnnnnnnnncttttttttttttttttttaacaaatatttaagacattaatcaagtaattaaatggaggacaaattgtgtgttacaatcttcaagaatatacaacttcaggaggatcttttagacaaacttataagtaataacaggtaaaactaccaagaaggggggcctatcctcaaatttacattactcgatacaaatgcaaaagtaagaacagacagaagaagaccagagtattacttgatgtcgcgaagctgccagaagcttctaagattgatctacatagacgctgattcgatcttctcgataacttccagccgcgttttccttttccaacctttcatggtggctactaaattcaccagtccaacgacctgtgcttttggatattccggatgagcccttgcccagtgaacatattccgtctctggcagatagtacgccttgataaatgtttcgactatctgtaactttggcttcacttttgttggcacaaagtgctgtaacccatttattagaacctgaagatctaatgacatgagaacacgtccttcatcagtacatctttttattcgagataagccttcaaccagcatctccgcaaatatttcaactccatattcaagtaggaggttttggacctcctgtggaatgcctccatgagcaagccttgttttgtagtgtttgaattccccgagcatnaaatcaacatnaccca

SEQ ID NO: 136134 - DNA, 802 bp, Arabidopsis thaliana
  unsure (1)..(802): unsure at all n locations
nnnnnnnnnnnnnnnnnnnnnnnnnnnnnnnnnnnnnnnnnnnnnnnnnnnnnnnnnnnncttttttttttttttttgtaaagataaaaacttgaagaacagagcatttgttggctggaaaaaaacagagaggtttaaattaagaaaagtcgtaaacattgttctcctcccctgccctcaaatctcacagatattatgactgcgggtttatctgccggagtgtaactcatgtaactcccacgatggaattttccggctaagaaactcggaaataacgttggcctccaatatcttcaaggcttcttcattcggcaccgacctcggtgtcttgtactgactcacagaagagcctctagacagaaagaagttcatgagctcgtcaaaagcgccaggcttaacaaccttaaatctcaagggggccccaatgatcttatcattcttccggcctttttctgtatacagcatcgagaagactccctcaacagtgaagcaagcattcttccataacatcgcggttaggttcaaacttggcgtccttgactttgctcccgagttcccaatagagtacatagtgtcctggaaacgaggacgaatctacacggctagtgaaatccatgagcatcaggtcatgtggctcaagcaggagctttgcgtttgtcacctgccttgaggaggtcgtcttcgtaggtcttgtccatgtcgatgttcagaacaactttctggcttcccacgaaaaaaaaatgtggcgcattgttgtagaaaccagtcgctcttaaaacgtcccccacacggtacctatata

SEQ ID NO: 136135 - DNA, 744 bp, Arabidopsis thaliana
tgacttcgcatgcacgcgtacgtaagcttggatcctctagagcggccgcccttttttttttttttttttttttttttttttttctttttttttttgtaaaaaacatgtttaacactctttacttctgtgtggccttaaatttggcaaaaaccacaaaaaatttgacctttcaagacacaagaatttggctccgtgagaaatagactcgaggacaatgaagtaagccgagaagtgttaccaattaataccacatgtgcattttgtttagagagatagcttccaatcttcctccagcatacactgctttgatccccaagctcttcctctatcccgtagcaactggttatacttcatagtacgttctcctctgcaaggagcaccagctttaatcacacctgttgcgagacccacagataagtcagagatgaaagagtcctctgtttctccacatctatgagatgtcaccacaccccactgggcatcccttgccattttcactacttcaatggcttctgttactgtaccaatctgattcaccttgagaagaagagctttacaagaagactcctgtttggcacccctcaactcgttttgaattccgacccgtgggtcgacccggaaatttcggaccggtacctgcaggcgtacccacttttccctattgtgagtccttattaagaacttggcgttaaatctgggtcataacctgttttcctgtgtgaaaattgttttcccccttcccca

SEQ ID NO: 136136 - DNA, 962 bp, Arabidopsis thaliana
  unsure (1)..(962): unsure at all n locations
atttcnnnnnnnnnnnnnnnnnnnnnnnnnnnnnnnnnnnnnnnnnnnnnnnnnnnnnnnnnnnnnnnnnnnnnnctttttttttttttttgtccaaaaaatataattcagatttggtatttagattctatgcattacaacgtggaaacgagatacgtaaatacccacatacaaagatacattatattgttgtagcttgaacatcatcatcaaatctaatcgggtaaataaacatcggatttgaagtgaggaagaagatatgaaaagaagagctataaagaaacgaaatttggctaacgattgaacgcaaccgaaagagcaacaccaaggacaagccatgctccaatgaagtatcccaaaatcctcgttggtcctacatcttccggttcctgaggaggtggctcttccctggatggttccatgatgtcaacctcaaatggccacacgtaccgttctgctttttcgcttcttgctagactccaatcgtacattcttctctcttccacggtcgacaatatcgtatatgactctttgataagatccatcttggtcttgagttgttcttcatctagtccttgttccttcaactctttaactctttctttgtaaccaattgtaacctgatcataagaacaatttctgaaaatcccaagccgtccataatgatcaacatctgtaattggaaggccacgtagcgcgcgttcgacgttgagagcggatattaaagatggagactctttcggtgcttcatcaacggcggtgctagatccacttcggtttctgcctccgccgatacttcgctggagttcctagccngcgaananataatccgcttcgtgttgatagttggcttccatgggaaagagnacgtgcttggtacgtgatggaggantgattcaccgggaatgtggactaaagatngttgagttatcgtcgataaggaanccatagctccaaggttt

SEQ ID NO: 136137 - DNA, 780 bp, Arabidopsis thaliana
  unsure (1)..(780): unsure at all n locations
ctacgacgtcgcatgcacgcgtacgtaagcttggatcctctagagcggccgctcgcgatctagaactagtctttttttttttaagttaaagaagacatgttcataaacatggaaaggtcttaaagcaaaattgtttatttatacaaggaacaaattatactcaagtccaatgctttggactgataaatctataaacaattcaacatctttcaatgctaatcaatacccaaaatgcttctactatttagtatttacatataacaaatcttgactctcacatagcggagtccgacccaccagaatcactccaagctctgtccgacatgaaattcggagggcaaaaccgggaatttcaccgcattccgctgcgaagaaggcgatatcggactaccaaccttcctcctctggcatatttcccaataatcatctaagcaacctttatcaaccatcggcaagaaaatcctctaaccggttaacaaccaatggaagtggattccttcccctttgtaacagctcctggcttgataataatccgttgtacgtttcacaagctccatcactttcctctcttcacctttcgctattttcacctcttcctctaccgaatcaaaaaaacgtcatcatcggttttcacaaaaccttccctttcttgttcccttctttcacaatttcttccaaattcaaacggttttttccgcaatttcttttccggcctactaaaacccgcncaagggaggcaaggaaaaccaatggtttgggcaaaaccaaaaccccggtttt

SEQ ID NO: 136138 - DNA, 626 bp, Arabidopsis thaliana
ttcgggttagacccacgcgtccgtgcgtacaaaaaaacacagctcttgttgttattgcttatgccgtgttgggagatcccgattcttgggaagatcctgatgagtttaggccagagaggtttctagcttcttcaggaggaaaaggagaggagagagagcaagaacttaagtacattccttttggcagcggaagaagaggatgtcctggagtaaatctaggttatatattcgtaggaaccgcagtaggaatgatggtgcattgcttcgactggagaaccaatggtgataaggtcaacatggaagagactgctgctggaattaccttctacatggctcatcctcttaggtgtactcctgtgtctcgaatgcaactgcagatatcgcagttcgtgagttcatgaattgtgattagctaacaaagaagcttcgcattttatgttgccatggctaaggtttttccggcctagttggctacttttggggttttgtgaaaccctataaccagttgggtattgtccctctgtagaggtgtggaccgggtccatatttgatgactttcaattgaactaaataacgaatggcggtcgctgtagatgatgcactctttctttcgcacgcatgcgatg

SEQ ID NO: 136139 - DNA, 770 bp, Arabidopsis thaliana
actatcgaacagctattacgtcgcatgcacgcgtacgtaagcttggatcctctagagcggccgctccggacgcgtgggttggttactaaatttactagaaactactaattctcgttgtaaatgaataataacaatcacacactagtaacctgaaatgtaaataaattaccaaattattccattattgtgacttaccataactctcgtacttccgggtgttcataaactcggtcaagtatgaagaattaaagcctttgatctttttgtactctttccaccacttcatgaaactgctttcctctaagaatatctccggcgaaacctcacgttttgtgattatctcccacacgtatccctcaaactccacgagttttctagtcaatacctctctcacatcgtctctcatccccacagttgtattcaactgattaattacaatcaacgaatcctcaacttcagcccaaaaacaagaatcaaacgtcaaaagatcactcaaatctctctttttgcatctttccttttctattaatatcgattccattccaaaccatttctcaagcataacatagtggtgagaccttcccgtagttcgatactctttccgaccctcgaggtaatattcagcaatatcgagtggttcgatcatccgtctgtaattgttccccgagaatagaaaccgtctcttgagaatcgatgcatcgctctgcggcctcctctctacttcttcaactactgatttccaaaaacggtttaagctctcggacgcgtgg

SEQ ID NO: 136140 - DNA, 935 bp, Arabidopsis thaliana
  unsure (1)..(935): unsure at all n locations
cactatagaacagctatgtacgtcgcatgcacgcgtacgtaagcttggatcctctagagcggccgcccttttttttttttttttttttatgtgtacttattttgctataattagaagaatttgtcacttcacaaaacacgagagtgtataggctttttatttccaatctaatttacaatgacatgactctataacaacattaataatacagtggcgtatacaaagcacaaataatttgatttacagtagaaagaaattagaaagtgaaagtggttcattgccaaaaggcccaaaacattcggatgtttcttggagatcccaaaacagattcaagaaattccaatggttttaccaagaagccagagaacaagagacaattcaggtccgaagattgtatggagagtacctctatcaagtgtaaaccccataccactgtgattcctgcgctgcttattccccgaaataactccactagagcttgccggttttgggaatgacatggtactgaaagcataaacaggaatgatgtcattattgtctagatcatcttcttcatcaccatactcggcactgtctgattctgtcaacgtaacaacatcatggacattgttgttatcattgttgtttctagcaaccaaagttggagtctctactgtctgatcaaaggattctactgtctgatccaaggattctaacgtggcgcatacatgccatttcgcagctaaacatgtaacagcctgagccttgtgtgtgatctttgatgcacttcgtaatagtatcagaagtgcagtaactgaatgtcatagaacaaagagcgagttctccagctctgtagatattgacttcagtgtaggctttggtagtaataagcagagnagnaaactgacttccagtaactagaatcaataancatagaatgaaagnacgatatctat

SEQ ID NO: 136141 - DNA, 679 bp, Arabidopsis thaliana
  unsure (1)..(679): unsure at all n locations
actatcaaccatcatttacgttgcatgcacccgtacgctagcttgcatcctatcagagcggccgccctttttttttttttttcttcagaggtaccagaacggtgctgtggtcttaccataataaaggtgctacctttacatctttattccatagaagaaatttttgagagctttaagatagaatgttatcatcatcactaagaaacaacctttggtgtctcgtgtacataatcaaaacccaacttgcggaaaatacgattaagggccataaatccatctcggtaataggacgccagcgatttatcttaggaattgacccaatcgaatatgacgtcttcctcactcgctaacttgccggaatcttgacacccaaaatacgtctgggatatcgtcgggggaagcccgcacgagttggaatcacttccggcgatgtacatgggtcgattacttcccccgattccggagatttgttatcatccgacgattcgggctcacgactagggccccgaatgggcttagaatcggaatctgctttatccgcggcggcgattgggtttatataacggctgacgtcgaaattggtaacggcgttgagtccaccgtactctattgccgacatgtcnnangcgattgctgcttcttcttgcgtggctgcacgtgcacagggttttaaatgtta

SEQ ID NO: 136142 - DNA, 554 bp, Arabidopsis thaliana
tgcacgcctacctaagcttggatcctctagagcggccgccctttttttttttttttttttttttttagttatctgaagggggttgtgttcttatcataataaagttgctacctttacatctttattccatagaagaaatttttgagagctttaagatagaatgttatcatcatcactaagaaataatatttgatgtattgcgtagataatcaaaacaaaacttgtagaacatacgattaaggtccatcgtcaacctctgtaaaggccagcatttatcttagaatgggacacaatcgaatgtgaggtgtttctcactcgctgacttctcgggagcatgtggacccccaaactacgggtggatatcgggggggaagctccggcgagttggaatcacttccggcgatgtagatggttcgattacttcctctgatttcggagatttgttatcatccgacgattcgggctcgcgactagggcttcgaatgggcttagaatcggaatcggctttatccgcggcggcgttagggtttagataacggctgacgtcgaaattg

SEQ ID NO: 136143 - DNA, 790 bp, Arabidopsis thaliana
ctttttaaaggtttcaaaacctggagctccaccgtggtggcggccgctctagaactagtggatcccccgttttgcattatttcgcggccgcctggaataaaaagaagaagaaatgggtgttcttgatcatgtctctgaaatgtttgactgctctcatggtcacaagattaaaaagcgcaaacagttgcagacggtggagattaaagtgaaaatggactgcgaaggttgcgagcggaaagtgcggcgttctgtcgaaggcatgaagggtgtgtcttctgtgacgttggagcccaaagcccataaagtcactgtagtcggctacgtcgatcccaacaaggtggtggctcgaatgtctcacaggaccggcaagaaagtcgagctctggccatatgtgccctacgacgtggtcgctcatccttacgctgccggtgtctacgacaagaaggcaccctccggttatgtccgaagagtcgacgaccccggagtgtcgcagctggctcgtgctagctccaccgaggtccgctacaccactgcatttagcgacgagaaccccgcggcttgtgtggtcatgtgatgtcatatggactactactgtttcaatttgttatggcttaatttaatggcttgtttggtacattaattacccttacgggaggtttcttggcttgggttttaattccttgggcctgtattcccttacactttttttgattggcgggcccgcaaaatttcgtttttaaagcttttttggattccccgtcgaacccttgaaggggggggcccccggatc

SEQ ID NO: 136144 - DNA, 1011 bp, Arabidopsis thaliana
caagctatgcatgcctgcagttggggggtgccgcctgctgaattcacacgagttactgttggtgtctggtagaataatcaccgctagaccgagtggctgatcgactggcccgtgccaattcccgcgttggtgcaggtgccagtcgaccagcgtcgacaagcagcaggagcggccgcccaagccgaagcagcggaacctgctcgacaacgccagcaacctgctgaccaacttcctcagcggtggcaacctcggggccatgcccgtcgctgagggcgcggtcaccgacctcttcggcaagcccctcttcttctcgctttacgactggttcctcgaggtgaatgcgcgtcccctttctgaaccctgcaacactgacatgttatcataggttcgatatcctttgttctccacttatggctatgtagtaaaattcgattagacacagcccctgcaacactgacgtgttatgatgtcttaattcacagcatggctctgtctacaagcttgcttttggacccaaatcgttcgttgttgtctctgaccctatcgttgctagacacatcctccgggagaacgctttctattatgataaggtatgctgtctcgcatgtgtcggatatggattgttgaaaactcgttagaggaaaaggattgttcgttgaaaaaactatggaatatacaaggaattggaccatgaccaccttacacacatgatggccacattttgcatatattattacgtcagtggagagttgacttccctgataaataataattggtgtagtttggcgggtttctttcttacatggtattttttttacttgaaatcagggagttctcgctgaaattttaaaacccataatggggaagggtcttatacccgctgaccttgatacctggaagcaaaggagaaaaggttagaaaggttggatatccaatcatattttctgtgttttttttagtttggactgaccacaatactgcaggtcgactctagaggatcccgggtacgag

SEQ ID NO: 136145 - DNA, 842 bp, Arabidopsis thaliana
  unsure (1)..(842): unsure at all n locations
ggataccaatttcgcccaggaaccaagctatgcccatgattacgccaaggcttgcatgcctgcagccacccgggcagcgtccagtgcgacatctttctcaaggaacgccggccgttcgccgtggcgtcgtgcagcatatgcaaggagtcctacgccaccaaggctcacgcgctgacggagcccatcgacgtctacagcgagtggatcgactcatgcagggaagccaacgagggtgtcgtcgcccccagccgcacctcgacggcgaggccaagaggaggaggaagactcaagacgacggctcgtgaccgttcttgcaaacctattgcaaacattgcggttgctgtttcttgtggcgtttctatgcataggtcgtagttttttttccgttttgctggagcccagaattgtattgtgatttctgacaggcagcggcgtctgaaactccgaattgtcctgtggttgaagcaatgcttgaacgatgtatcacagttaatgtttgttacatagaatagttgaataaacgtagatattgtagatgtaaattctgatgagcccattcttacgccctaataagggtgaggattggagaaaattgcagaaggaatttatagtttatttctctttcatctcctaatccccttgtcagccaaatcaaccctaaagtttaatggctaaattctagatcatggcatccaaatggagcatatatatggtatcttctttgggcggtaggccgcaggtcgacctataggatacaggggnnnnnnnnnnnnnnnnnnnnnnnnnnnnnnnnnnnnnnnnnnnnnnnnnnnnnnnnnnnnnnnnnntnnnnnnnnnnngcg

SEQ ID NO: 136146 - DNA, 1291 bp, Arabidopsis thaliana
acgccagcttgctgcctgcagctactacacaagtggaccacatgcgtaagcccagcacgacctttagcggaaaaaggcacgtttttttttctaatgcaaacttattaatcctttgggtgcttccaagttgaaagattaagtaacctgaagtcctgaaccctctgttggagtgcaatcaagccgcgcacccaaaaagtctgtgacgaccagcaaggagatctcaaaatgcgcactgttactgatcagacacaactggagcacgacaacaagaatgcttggagcttctgcctgatgggtacagtctacgttcaagtggaagcagcatccagcgtgtcccctggttttcctggagctgcctcgcggatgatcctgagggactcggcgaagtcgtccaggagctgacgggcatccggaaactgcgcttcgtccaccgacaggactagcttcacggagtttatgtagctctggtagtgcacagtcagggcctgcatgatccagagaccaccacacgcacgacacacggttacaaccagccacccccgcatgttcttcggattcaggtcaggtgcactgaatgaacgcttacatgtgggtgcccgtaggtgctgggcgcgatgtagacgatggggttgccgcagaacagcacctgctcagtcggcccgaccatgctggagaaggacagggtggtgtgcgtgaacatgccgtagcagagcgcagcagctgcctgcaccaaactctgtctgtcaggggtgcgcgcgcggccgcgcgcggtgatcaccggtgaatcaatagcgccgggtcgatcgagataggaaaggaaacccagcgcacgcaccttgatgccgaagagtctgagaaccatgtccccgctccagaaggtgaaggccgactccatggagctcttcttcctgcgcgtcaccttggccgccgtacggacgtactccgtggggtcgtcgtgcttggccaggtggaaggggatcagcatgtagcccagcttgtttccccacctcgcggcgccgttgttgtcgctgccggactccatcatgcttgccagtgcctaccggttgttatggctagctgtgagcaacagcaagaagagggataatcttccccgcagctggcatcctgtgtgatcaaacaggtcacgtggcagagaagctctccgtggtatgccgggcgtcgcccgtctgttgacgagaccagccgcccgcaccgtgaggctctgtacggtcgctctcacctgcaggtcgactctagaggatcccgggtaccgagccgatatcttttttcc

SEQ ID NO: 136147 - DNA, 817 bp, Arabidopsis thaliana
acgcccgcttgcatgcctgcagcaagagtagagtgttgtggacttgtggttactaatcatgctaataagatttgcaaggtactttgaaatgtttattgctattatttgttcatttcaacaggtagctgcctgcctatgtatcatccatttaataacaaagttgtcaaccggtgatactgggagcttgtctttctcattcatgaagaaaattcagatcatatcaacaaaagtaaggcatctatgagattttgatgttggtttgttggcatcaccttgtttacactgtcttgcttctgtttgttttctagaaaagtacttcacctccaattttttttggtgtcagttgtatggaaaaattagactaggacatggtaaaaatatctgcgagtgtaaaagaaggggtgaggcctctattggagaatgccatttcgattgggatgcccactatatcacaccacatcaccaaagtagtccctttcaagttctggtaggttagagatcaaaacttgatgagagtggtacaaaccaaaagaagatagtaatattgtaaaactaacaaataatagtgtgaggcggacggtgtggtatcgagcttggagacctgccttagggtctaggggagcatgctgatgctggagtgacaccgaaggaaggccgcaagagcggaccccactgcggcggcatctgccatagtgtctgccttggatgcaaggcttgtgaggctgctgtgtcatgcactcatgctgtcctggccaggtggcagatcaggtagcaccttgctgcaggtcgactctagaggatcccgggtaccgagcga

SEQ ID NO: 136148 - DNA, 861 bp, Arabidopsis thaliana
  unsure (1)..(861): unsure at all n locations
nnnnnnnnnnnnnnnnnnnnnnnnnnnnnnnnnnnnccaatttcacacaggaaacagctatgaccatgattacgccaagcttgcatgcctgcagtacatcatccactccatccataaaatcttttgttatcttgtaaacaagggtgaaaatgaactccggctgttcagaccatttgacaaaatgatattccatccttgaagcaatagggtgaactaattcatcaatcgcccaaagcccattgtcgaagcaagcggtcctagtgaaatacttcaaatctgccagggcaggagtcacttttgctgtctgacacaggcgcgattcacggttcccctgcacatgttggagagcacacagtgcttggaagctttgagagtatctcgctttatttccctcattcatcaagactagaggattcggaatttgggggtacttatccttctctgtgtctggtgaagacaatgaaggtggccatcccagtgatgctagtagagcccgataatccgtgagtgcttgaggcctcagaatggaaagagttttgtccactctagaatcaacagccatgacaaggttggcccactgtggcctactagtgctgatccgtactaattctcgctcaatatccttcacagcgtcaacagcatggagcagcttcccttgcttccattcagtttcctgcatttgacagttgcaaactaactgctgagccacacatatcagcatgacatttgatcagctgcatctgcaggtcgactctagaggatccccgggtaccgagatcgannnnnnnnnnnnnnnnnnnnnnnnnnnnnnnnnnnnnnnnnnnnnnnnnnnnnnnnnnnnnnnnnnnnnnnnnnnnnntt

SEQ ID NO: 136149 - DNA, 804 bp, Arabidopsis thaliana
acgcaagcttgcatgcctgcagatgggcgtcggcctgccgtctgacttgtactacgcagacagttcgcaggcggcggcggcggcggcggctatgacgacgacgtcgtcgtatgcagcaccagatggccaagtccgaccaccagtgggcggcactgcagtcgtcgctgcacagcatgctgggttcagtcatccagacagaggctgatgaacaggtaatttatttatttaccatatatacgcatgcatgcatgcaaacggtacttgtgttggaagaatttggcatgcatatcgaagtaccaaacatggcatgtttccttgggttattatgcatagaaaataaattaaaaaaaaacatggcatcaggcttcttcctggattggccaaatggtcacagtgccatgccatgcatgcaaacggtagaagctagccagaggaaagacgatgcatccgtacgtatatcttgttgtttgtgtgaagctatagctcggccttgatgcttctagttggaatctgcgcagagagccctgcatgcgatgatatttttgggtcctcgttaccatcggaacgtgcgtacgtgacaatagcgcagtccaaaaccaccgtgttgcttctcatgaacacgtgtcgtttacgtacgcgacggcgacggcgacggcaattggcgttgagtagtacaatttgagtatttcagttatatttttttgcgaattattattttgtgatcaagtttagagttcttgtgaaaattttctgatgcgcaggcagttattaacgtactccactcatgatgcatgcaggagcagg

SEQ ID NO: 136150 - DNA, 1054 bp, Arabidopsis thaliana
acacccgcttgatgcctgcagccaccaggtcctctacggtggaggagaagaatggaggatgctgccaaacggtaggtttttgccggcttctacagttctacttattcaggaaacctacttgttacaaaagctcctgatattttaagccgttccatgaaactatctaggtcactgcgcagtgcgcacgtatttctttgatcgcttaactgcgagctctgctgctatacggctagacagatgcatcagtgccctactttcaggaagcagtgctagactgcgcagtgctcacccatccactgaaccagtgttccctcagatccctgatttaacacaacccaccctcacattgcctatgcttcaggcaaagaaataagcatagagaatggagcaaccagctccagctattccgctcacagcactccacatagcgatcgcgaactctagcctcagctccctggcattcatttcaaatgaaggaaattggaattgttgtgtttagtactcatcaatttttgatgattgaagctccacaacttgaatatgataacaacttatggtgaagataattgagttccaattcaaccacatgctaaaaactgtgaagcagcccttaacagataaccatagttttggtttcagtctgaatgttcattgaatggtgagagtcttttcttagtctgaagtatggccttctggcatcggtggagaaattttgtatgctaaacttgcatgtatatcatggttcttagtgacagatgccggttacaatctgttattcaaatcttcattagagaacgtgagttgtaccaaattctactatttacctatatgacattaacaagtggtgcttagatagccatattctagttttgactatgcttctacgacccaagcatacggtcctgcaagctcctgtacactcgctcacctgattttgacttcactgacccgtatgcaaactgttttggaccaggttgagatgggactccgcttcacaagacagtctccacggtttctctgcaggtcgactctagaggatcccgggaccgagatg

SEQ ID NO: 136151 - DNA, 1203 bp, Arabidopsis thaliana
ttgcatgcctgcaggtcatgcatgtgcctgcgacgacggacgaaggcacgggcgggcgacagcttggcgaatagcgaggcaagagataaacttcgcatgcagtgcagtgctttacccgaaatggcttggtaatgtgatactgtcgtttcgggtgtccagcgttggctggaaccatgcagctttgctttgctttgctttgcttgcaccaaatctgagtaacgttcgggtcccatctccagcgttggtccaggtactctaagcgttagtttgggactccaaaaccgaagaggattggaaagaccaaaatctcctacttatttaaaattaaacaaggagaagattttaactcctccaattcccttcaattttgtggctcttaaactagctataactacggtagcactagggtagggaacttgccaaatccagacgtgcgaagagaggcattgagctctcgccagccacagcaagccaatgtcatgccaacgctcaacatgcgcccgttacacaaacacaaagctgcacccgcgcgcgcaggccaagctctctagtacccactcccagtataagtagtggtagtaatacttcacccagaggctcagagcacggcaacatggtgcaatgaagttgggagaaggacggctctgtctgtaccagacaacatttgcttgtctttaacctccaagccttcattttctgatctccatgccatttacaccagcactgtcggatcggattccacgtaggactagccacaggtgacgtcgacatctggttctacgtatcggcgtcgaagctgcattctatacggtgtcagaactcagtacccagcttgcagctgcactactaggtgaggcagttgttttcttttccattttctttttttttcaaatggtcacaggtagcagtagaacaccatttatttccttctctatgataccatacctactctgatactcgacctccaaggtagttgagattagtcgtagcttagtcatgacatttcactatgtaccgaattgttaagcctcctcctcttctacaccaggcggaatcaccagagccggtccaggtagtagtccctggtgacctcgtcgctcagctccgagccctccacctccacgcggctggcctccgagctcttgaggctgaagctgtccggcgcctgcaggtcgactctagaggatcccgggtaccgagtga

SEQ ID NO: 136152 - DNA, 1409 bp, Arabidopsis thaliana
taagcaagctatgcatgcctgcagaaattaaccgacctagccgaagttctcgatcgagttttgcccaaagtttgtccacaataatcccacggctccacctctacccactgcaccaaataaaatcaagagataaacacagcaagttgagtttgaaaaacgttgggcaaacgaccagagatacgaatatacatacatacgatagggagagaagaaaaaaaattagccaaataacaaaaaaaaaaaacagagttggtgatgtgatgtatcgttccatgtttgcaagactggaaagaaattgacgaacctcccttcccttatcgtcgtggtccttcaatagaatagcagcacgtcgatcgacgaaccttattcctgggcctctctggctataaatacagcccttcttcccctccccacagcagtcacacgaagacagcaagctaaacactcgtactctgtcgtctccttcccgactcccgagcccacagatccttttgccaatggcacatcctgctagtgctagccatgcccgcctgaccaccaccatcctcttcatgtcgcttctgctggtcttggctactgcttcactgggatgcccatgctcatacacctgtgagaacgagctgaactggcgcgtgtatctgaagcaagttgtcggtactggaccaagtcacaaccaggaggtaattttcagacctcagcacgctaatctgttcggccagaccgtcgttcaggactggacgttggtagacgcgcctgctccaggccgaaaggtggtgggacacgcgcaaggcgtgcatgtcttgtctgatctagccaacgtgcgctggttcgtctccctcaacatggtgttccaaggtgacaggttagcattttcgcttcctgccctccgtccctcccatctgttcatggtgcgtcggtcgataacaacccgtgcttgttgtgcgataggttcagcggatccacgctccaggtgatgggagttcttccaccggagggggagtgggctgtcgtgggagggacaggagagttggctctggcacgcggcacgatcaagcacagaatagctggaagcgcacccgagaccaacttccggcagctggatatccacgccttctacgcgaacggctcagccacctgcgtaggtacatctcttcgctcctgttccaaacttccagcggtctagggctaggctttgcttgctgttgatttcgtagtgcagacttgaggatcggagtagtaaacaaagtctgtcaaagcatgaagaacacaacttcacttcacagtcttgtctctctctctctctctctttttaaacctttaattaactgatcgatctaaggagccattatcttggtttcattttctatccacaggttctgctgcaggtcgactctagaggatccccgggt

SEQ ID NO: 136153 - DNA, 803 bp, Arabidopsis thaliana
ccatttggcaatccgtcgtctctgcacccagcttcaggtttgtcaattttattgccaatgactagtaacggaatcccggtcaaagatggcttgctcaagaggtcatggagttccccctttgcaatggccatgttttctcgatctgccgcgtcaacaacatacctgcagaaacaaaacaatttaaacatctgacactagaagttctcattccttattgattttctatcagctacgaccttcagattaagaaaatcatgcagcaagtttcaatgcagctaggtttaaaataaaaaacctgtggaagtaaatcagaataaaaaaactgtacagccggcacaacttccagctcattgtttcagaaaaaataacagaaacgcagaaacaggtaaaaatgattcatcattacctacataaaagaaaaaatgtaaagaattgaaagaaataaacagtgcaccaccaccatgatacacgaaaaggcaaaataaaaaaggtcaacaaataaacaagatcatcagtatttatatattgcaacggcaaattaacagagcataaaaatatgatcaacacatgacataactaagatacaaattggcataaaggaagataactcttatcttgaccacaaagacaactaaaatataacccaatgggagagaagtaggctatgaggaccctaaagatagcgcttagaaaaggtggatagttgagaaataatttgtacataaaattgataaatcggactatagcatgatctagacagccgtacccaaataatagacatgtatgcaagaaaccctcactaa

SEQ ID NO: 136154 - DNA, 796 bp, Arabidopsis thaliana
attacgccaagcgttggtgcaggtcgacggtgagctggctagctagctgattctgctgcctggtcctcctgctcatgctggttcggttctgacgcggcaagtgtacgtacgtgcgtgcgacggtggtgtggtgtccggttcaggccgtggaggccaaggcgctgaacaaggaggcgctgcaggcggaggtcgggctcccggtggaccggaacatcccgctggtggcgttcatcggcaggctggaagagcagaagggccccgacgtcatggcggccgccatcccgcagctcatggagatggtggaggacgtgcagatcgttctgctggtacgtgtgcgccggccgccacccggctactacatgcgtgtatcgttctactggaacatacgtgtgagcaacgcgatggataatgctgcagggcacgggcaagaagaagttcgagcgcatgctcatgagcgccgaggagaagttcccaggcaaggtgcgcgccgtggtcaagttcaacgcggcgctggcgcaccacatcatggccggcgccgacgtgctcgccgtcaccagccgcttcgagccctgcggcctcatccagctgcaggggatgcgatacggaacggtacgagagagaaaaaaaacatcctgaatcctgacgagagggacagagacagattgattatgaatgcttcatcgatttgaattgattgatcgatgtctcccgctgcgactcttgcagccctgcgcctgcgcgtccaccggtggactcgtcgacggattcccgggaattcactgggcgtcgttttaca

SEQ ID NO: 136155 - DNA, 950 bp, Arabidopsis thaliana
gcaacttgcatgcctgcaggtaagagacaagctagtgatccagtacggacagacaagcacacaactacacaagcatcgtcctgtcctcacttacagtcttcgtggaggtacgtcagcccacgcgccgctccgatcgcaatcctcatccgcttcggccaatccatcacgggcagcccttttcctgcgcgcggatcaagatcaacaacatatcatatcatatccaacatccatgcatgcatacgcatgcgcgcgccaagaaaagaactcaccgtgcaggtgatgctccagcgtcttgttggccacgaactcgtagacgaggagtcggtggttctcggtgacgcagtagccgacgagcgtgacgaggtggcggtggtggatgcggctgatgatgtccacctcggcgcggaactccttctccccctgcccgctgcccagcttgagctgcttcaccgccacgcgccgcccgtcgcccagcgcgcccatgtacaccttcccgaacccgccctcgccgatcacgttcgccgccgagaacccgcccgtgatgcccgccagctcgtcgtacgtgaaccacgacttgttggcccccgacaggtcgtacgagctcgacgtcccgctcggcgacggcgacggcgccggcccgttcgacggctggtacacgtccgccgacaccacgcccgcggctgcgccacactgacgttccggcaccacgatgctgtgcctgcgcgacggtgccgctcccgcttcctcccccggttgccctgcttgccggttgcgcacgcgattatcagcagcgacgccagtgccaggaccagcccggcaacggagatcccgatgaccaccgcctcgttcttcatgttgctgttgctgcccgacccacccccacccgcggggggcccaggcggggacctccacatgccgcctgcaggtcgactctagagatccccggtccg

SEQ ID NO: 136156 - DNA, 1283 bp, Arabidopsis thaliana
tgcagcagagaacaagacggcatcgccgcctccaaaaggcggagaaccgactgtgaaccgtcaatcagctaaagttcatgttgaggttgcccaggttgtgcgcgcgcggaagatgggagacgatgtcagggatgtggcagaagtggcgatggagaggaagagacctggtgcatcacttccctcttttgctttccttgttagttgaatgtggtgttctgaatttctgatctcctttttatccttgtaataggagcgggaagttaactatgataagtcgcgatcactcattccatcatccaaattttcaaagatcatatattgttgtgatagacaccatgctaagggaaaaaatcagcaatctagtacagtagacaattccgattccaaattctgatggttaatatcagatgtgaaaattcaagaggttatccattcctaggatcagggaggataaaagttttattccacaaggcagatagggctgcaaaaatgctattcgttgagcaggtactgtggcgaaaggtaaccaaaaagggcatcattggtaccacatggaactatagttgagagaaagggatgatacaacagaagatgacaaataaaaaaaataggacgcataaagggaaatggcaatcccaacaaaccatcttcacaaggcaatgataactgccctcgctttccagatggtgaatctattagagttggtgccctgccaataagatgaaagtacagtaagccctttgtgaaataccaataccatttaacaaaagtttatcatgggaagtacagataaagaatgcttacttggttttctaacagctcgatgctcatttgattaaattcagaccagtacctgacctgggataagaaaacaatgcacagaagacaacttgacggtcgcctgacaagcaaggggatgctaacagctcgaccaccccaaattaagtataccagtatacaatttgggcagtgttattcaaatctgagtctgactccagattttcatccatgctatgtgccctaaactctatgaagttgcacacacaactctgaatagtgcattcaaatggacagaactgaattctagtaaacgacaccaatctgtgcatagctaccgcatatttgggtttctctctttaatttttgctagttttgcatttatgagcttatctaatatggggggctcaagagggattgggtcaagacatctctcatgggcagcattgttcacctgcaggtcgactctagaggatcccgggacggctttcacttttttccatggt

SEQ ID NO: 136157 - DNA, 1079 bp, Arabidopsis thaliana
acacccgcttgatgcctgcagaccgtggcgtggtgcggggccgcttggatccgttgctgtttgcgccgtgcggtgtggaatcgaactgtttagatctaagtcccgctagatgccgtggcggtggaatctcggttgatctgtgtgtctgagcgcctgtgtagctcttgtggctgtaacatacatctgctgatttggctctcgacggcttaggccgcgggagcttagatggcggagcaccagctgctccctaatcaggttggttctcgtgtggatctgttgacttgactgtaggttgcagacttgcagtaggacgctggcactgccattgaccaggagctgcacaacaggggcaaagctaggttatttttaggaggtgcagataggggtggtaatgacctctagattttgcactataaaatgtaatgatcggatcgaattgggatcagcctctattcctattcatttttgaactaaaaataattaagggccctaacttattgtgaagaaacatttggatcttgatccactaccacggtgtaccacccctaggtgtagatgcacccccaaaaatacaagttctatatatttagttaaaatttcaccatgtatgcatccctataaaaaatattatgcacattcaattttgttctagctttgcaactgagtaccgagtactagcataggaattttgttctagaatatgtatcggtagtatactctgctagtactcactaggtgtctcccgagaaatgagaaatgtgtttcttgttttgacacttggcactattggtcgagagtcaagactatgagctgaactgctgaaatgtctaatgttagcagtttctgcactggttcaattgcagcctgatttagaaatgctggggacagctggctgtgccatgcaaaataaaatgtgttagtaggtactttgaagggaaactcaaactttgtatttccagttaaccatgatttaacttgtggtcacaggcgaacgcgagatcgggtgtcgctgtgaacgatgagtgcatgctgaagtttggcgagctgcaggtcgactctagaggatcccgggacgagtg

SEQ ID NO: 136158 - DNA, 1079 bp, Arabidopsis thaliana
tcgcaacttgcatgcctgcagctctatcgctcgcaagaagattaatagcactacagcagagaacacactcgaatttctttggacagaccaaaacgggtggtctgccgccttttgtttttttttcttttattcagactcgcggcgtgatccggatcccacgttctcacgccacccacactctagtcaagccgggcgcactccgcacgttgcgcggcggcgatcgcgtcgtatggcgtggctcaggacaggcctcggctcgcgcccttattgactcaatagacggaaaacaaaaactcccgccaagacaaacgagcagagagtggaagtatctaacaatctccccctacttctactctcctgatcatgtgatttacataactcctatcaatctacggatcttctggagctgcatcttcccaagtgccttggtgagtgcatcagccagttgataagcaatcctgatctgctctagctcgatgtcgccacactccacacactctctggtgaaattgaacttgatgtcaatgtgcttactgcgttcatgatggactagattcttcgcgagagcgattgccgccatgttgtccatccgaatcgtcgttggctgagcaggaaaacctagcacctctttcttccaacaaactatgtagccacatcacctaagcagctgctacaacgctcgccatgtacttcgcctcacaggatgatttagccacagccttctggctttgtgactgccatgagaccggggctccttccgtggaagaaaatggcaccagtagtgctacgacgatcgtcgacgtccccggccaagtcattgtccgggtactcgactagctttagactcccttctccccacttgtactgtagtccgtaatctgctgtcaccgtgacatagcgtaggagatgttttagtgcagcttgatggtcggtctttggacactccatgaaccggctcaagaagcctacaccgaatgtgagataagaccttatgtgtaagagataacgaagtccaccgattattcttctgtactaggttggatcgcctgcaggtcgactctagaggatccccggtccgc

SEQ ID NO: 136159 - DNA, 921 bp, Arabidopsis thaliana
gcaagctatgcatgcctgcagcgtattgctcactcgtggtcgtggaatacatcgaaatcacagctggtccactctaggtttacgaaagcactgtgtacaattaagcatttgcagaggtgttcaaactttgcgaatgaagctacacacttggagcacacaccaagtaactggaccaagtcatacaagtctaccagcattcttcctcgatggttctgtcagggcgtcaggaagaggtagtacaatagaaaacggcaaatataaaatgactccagtcatcatgcatcctacatgacctacaaatacacgaccatcttccgccaaaagtttcaaatctcttgctactccgctttctagctacacccttccttataaaatacgcaagagtgcagctgcgcagccgccgtcgcgcagccagccatggccatcaaagatgagccgcagccgctgcacatcctcttcttcccgttcctcgcgccggggcacctcatcccgatcgccgacatggccgcgctcttcgctgcccgaggcgtcaggtgcaccatcctcaccacaccggtgaacgcccaactcatccgctcggcggtagaccgcgccaacgacgcctcccgcggcaccgagggcgccctggccatcgacatcgcggtcgtgccttttcccgacgtcggcctgccccccggcgtcgagtgcgccccggcgcttaacaccatggacgaccgcgaaaagttcttccacggggcccagttactccgcgagccgttgcgacggttcttggcaggagaacgccggacgctgcgtgaccgacagtttcttcgactggtccgccgacgccgccgcggagcacggcgtcccgcggatagcgttcctcggcagcagcttgttctcgcgggcctgcaggtcgactctagaggatccccgggtacc

SEQ ID NO: 136160 - DNA, 1308 bp, Arabidopsis thaliana
gcaagctatgcatgcctgcagacctgggactcccttactcaaagccgaaagaccaggagaaggcgaggtgctggatcagttccctgaagcaatggcttagtaactcccagctggcggttggagaggtgtctgacatcgggaccatctgaagcggcctctttctggagtgttggttcgtggcctagagtctggaagggagtgtgtgcgcctgtgtgtgctggtggtcgttttcctttggttttttgcaactctctagtgtgtctgttcagagtggtcggttcttgttatcctggcctgtatcgttggatcttttatatgctttcttaaaagcagagtaataaaatgttccttcaaaaaaatgcagttatcctatactaccttgaatggagcaagttcttcatccagtgccaatgtttcttttgtctgcaagagggggaacatttcaaggagaggagacatgttcttttctgctttatatatccttccagaagctaaatatattgcagtattattgttaaaacccattccacgcagcattaatccaacctaagcagcacaagtacaagcatgtaaaggttcagaatcgtcatatttgcttgaagataaaattcatgaagcttctttccaagcagaaacaccatcttttaaatacagacatacctccaaaggagtcagtggacatttcccattcatccttattgctccaggccttattacacgtcctggccttgtaaatttccctctccaacctttttccctagctgcatccagttccttcttctcattgtcaccaccatcaaagacacaacaagagaaggctaccatatcctgaaaaaggaatggttagtgattgataattctccagtctactcaccatggacataccatcagacaacaaaaacgaacagaaaagtaaacttgggtgtttcctgtacacccttggaatatttaattgtttcaggaacaaatggggatagaaaaccaacctcttcaaagcggagatgcactgctacatatttcccattattttcagcacttttttctctcatccgagaaattaaagtgttagatatagtagtgattggtttagaaaattttagggcttcaaaatttgctagacatcgtagacgttgaacagctggaggagcatcaaatgacagccggtttgcaaaaggtgatatccttatgagtctgaaatttagaggcaagtttaaagttcacataagcaaataataactagtacttggggatatgacaaaatagcagatagcttcaaaactgcaggtcgactctagaggatcccgggac

SEQ ID NO: 136161 - DNA, 1053 bp, Arabidopsis thaliana
gcaacttgcatgcctgcagctggtgttgcagcagagggtttagtgcctaaagaaacaaaagtacatgcagagaaagttgccaatctctcagtaatgttggctgagaatgcagttgttctgctgatgcttgtggaagatcatttgaggtcacgcagtcaacaatttttcatggcctgtttagctgatagtgctgcctcacctgcttcaatggcttcatcagctgtcagtaggtcaaattcattgagtagaactggcagtgagcatttggaagctggggactcgagacagtctttgtcaagtgatgctggtggtcttccagttgatgtatgtatatctagaatgtcctttcaatgtttcatcatgttacatcattacatgtcaaacttctttctatgttcttgagtatcggtgaatttgctggtgtcatctaaatgtttttagtttgtaagaagcactatagtattgttagggaatatataatatagaagattgaagtccaacttctaggaacaacttatcatgaagcaataaacaatactatttgtttaaccttgtaatcagtaaggcccttagccattacgggaaccaagcatgaacttctgaagaggctgcattatgaccgaacaccctgcttgtagcttgtaggttcttaattaacaggaatgtctgtagctagtaggttatcttatgatatgttaacactcctcatgttgaggctctctcaggccttagatgtggaataagagtgagcaacaattattttatttaattgtgctaatcaggattctaactcgagacttctggctttgataccatattgagttaaatgcgccaaccagcttaacccaaaagcttaagctgatggagagagattgacaattcagttgtattctaacagcatcactggtttttttgttgtttatatcttttttctgtgttgcccattgactactctgtttcactgagttttggaactcaacaagcataaatgtaatccaaaagaatactgtgtttactgcaggtcgactctagaggatcccgggaccggtacga

SEQ ID NO: 136162 - DNA, 863 bp, Arabidopsis thaliana
caacttgcatgcctgcagtagcaatctcctaatcaagccactaactctgccctaatcgccgccaaatgcctgctgcaccagcggcagcggcgcacaccttgcactgcaatgctagctacctcatcatgcgaccgattccatccttactgggggctcgctgcgccacgtccggcgtcgccgccgttcgccccgcggtggcgctgggccatctcccgcgtctgcccctcgtcctgctgctggacgccgccgctggcgttgagcgcggcgagcatgccgatgttggcgtccattgtcgtcccggcggggaagttgttggcgcttcttgttgacatgaactggagcggcgcctgcaccgtgctcccgccgccgccgaacgcccacgtgggctgcatccagaaggcgccagcgccggcgctgttgggcgccacggcccacattgcggtggctggcgtgacgcgggccttgtgttcctcggcgtcgccgccgtcgggatgatgctggcgcgccgcggggtccttgaacaggtcgtcgtcgccctccctgtagcgcttcctcatgaactccccggcgccgggatcttgcggcgcctgctgctgcggaggcggtgggaggagctgctgctgctgctgctggtgtgggtgatggtggttccagccgagcatggcggcgacctcgtgctgcggcggcgggaggtggtggaaggcgacggcgcgggaggcggaggacgggtgggacgcgccggcggcggagcggagggagacggcgagcgaggagaagttcgccgggatggtcccggtgccggtggcggcgacgatggcgggctcggcctgctgcaggtcgactctagaggatccccggtccgc

SEQ ID NO: 136163 - DNA, 851 bp, Arabidopsis thaliana
gcccgcttgcatgcctgcagtgtgatgtttgagaacacgccgccctctgggactcgtccatgaagttcattgaaagagagattcaggcttgtgaggtagctgagattggcgagggactctggaatcgtgccagacagggagttgtacgagagatccaacgttttcatgctacttagcttgttgccaagtgcacttggtacccgatcctggagcaggttcttcgatagattcaggtaggtcagtgtactgagcgctcccagcgaaggtggtattttgccgtggagttggttggaagaaaggtccataaacgttatcgccttcagaatttcagtaccttccggcgggaacgagccacgcagggcgttgcgagacaggtcaagacccacaatgttctcgagaccccatagccccgggggtatcactgaggtgaggtggttgtttgatagctctaacacctgtaggttgctcaggttcccgatgctatctggtatggggccatggagctcgttgttggccaggcccaagccaaacagctctgtcagttccccgatgcgtgcggggatagttccagacaacctgttgctagacaggtcaaggcctctgaggttcctcagttccgtgatggattgcgggatttccccgtttaatcggttgttgcggagatcaacgaacgagacgctgctcggcatgtttgggatgtgtccggttatttggttctcaaacgcccggaagatctggagagaggagaggttggccagcgtagagtttgggaagctaccggcgaaggaattgctgttcatgacgatgtatttgaggctcctgcaggtcgactctagaggatccccggtacc

SEQ ID NO: 136164 - DNA, 826 bp, Arabidopsis thaliana
  unsure (1)..(826): unsure at all n locations
aagnnnnnnnnnnnnnnnnnnnnnnnnnnnnnnnnnnnnnnnnnnnnnnnnnnnnnnnnnnnnnnnnnnnnnnnnnnnnnnnnnnnnnnnnnnnnnngcacgagtggtatacagagagatcgaagaaagagagagagagacctatacagagatggcctccggcggtggctccaagcagctgaaggctagtcttctcatggtggtagcagctctgctcctcctcatctgcacctgcactaccagggggcaagcggcaaggccggagccaggatccgagggccacacgccacagcagctgcgcgctgatgtatccatctccgtcgttgctggtcatgagaagaagagtggctcatcagtggccgtggtggaaatgcgtcgagaagatccggatcaggcggcgagagaatgtgaggacgacgacggagacgacgaacaggagtgcctgatgaggaggacgttgctcgctcacaccgactacatctacacccaggggaagcacaactagctagtcactgctcactagcctgtgctgctggctcatgctcatgtcatgtcgaggaaacaagttcaagggacaaaaacaaaacaaaaaagctcgcatggttcacgagctagcctagccaacctgaagttctacagtgccgtacgtcaactgtgtggattggttttaaaatatattaccctaagtctttttctttctgcagttctgctagctgtggattattttcatatatatatatatacctcgctaattaccccctgtgatttcccatcggctttctcgagggggggcccggtacccaattcgccctatagtagtcgtata

SEQ ID NO: 136165 - DNA, 970 bp, Arabidopsis thaliana
aagcagcatcctgcagccaacggatcggaaccaaggcaatgtgtgcaagaatctataactcccttgccaacttcgaggcagttcgtttatatactccattccccccttccattattggacagatagatagagaagaatgattgaatgaaggccgagattcttctgtgtacttgcatgaatcctttgcccgtacgtacttcattcctccccggccggcccaagcggatagaagaaaaaagctacgcaaggagctgcgtgtgcgcgcgcgcggaggacaaaaggacgcgatcacgtacgtgccgttacggccggccggccggcgccatagccgttaccatctccatacataacgctcaagtacgtacgcgcgctgaccgtaccgatgccttctctgaacagctccatacccatccatgggcatcgatcccttgccaatcggggtcaccggccggtcaaagcatgccggccggcgggccgctaattttaatttcgccgtcgtcgtgcatgcagcacatgcttgctgctgacccccaatggtttgttcgggtacacttctccatcaacataagtgcagcatgacaacagtagtggccttctacatgtgtccgatttgcagcctcagctcttgctctttgtccatcagcataagtgaatcatggcaataatgggccttttacaattacatgtgtcccatttgcaacctttcgtgtctttcggccgggctagctgatgctgaacggcgtgtggtttctctccttcaacatgaccaatgaacagaacagagataagcagctagctagtagctagctaccctcgctcgaagtgacgtcctacttcctgcaacaagagctgccctctgcccacacaaggatgcgtgtgacgagaggaatccccatggctgttgagagagccaacagcaagttgcatggctgcaagcctgcaggtcgactctagaggatccccggtaccg

SEQ ID NO: 136166 - DNA, 1380 bp, Arabidopsis thaliana
  unsure (1)..(1380): unsure at all n locations
nnnnnnnnnnnnnnnnnnnnnnnnnnnnnnnnnnnnnnnnnnnnnnnnnnnnnnnnnnnnnnnnnnnnnnnnnnnnnnnnnnnnnnnnnnnnnnnngcacgagtcaacttgcgtgccagaagttctgtctacttgtgctgatcagtcataccttggaatattactgaattgttgcctttgttgctcactggcttcaatacttcatacaccactaaatgagacatctgcaagattctttgcagcctcagttgttgttgctctagaagaacttcatcagaagtccattatctatagaggtgtttcggcagacattcttatgctcgacagatcaggacatctgcagctggtggattttaggtttgcaaagaagttggaaggtcaaaggacatacacaatatgtgggatcgctgactctctggcaccagagattgttcttggtaggggtcatggatttcctgctgactggtgggcacttggagttttgatctatttcatgcttcagtcagacatgccattcgggtcctggagggagagcgagctggaacctattacaaaaattgccaaaggccaccttgttatgccagtgtctttcagtgcagaagttgttgaccttataaccaagctactcgtggtcgacgaaaacgcgcgccttggaaccagtggtgctgaagctgtgaagaaacacccctggtttgatggcactgattgggagcgaatagcatctgggacttgtgcagcacctgaagaaatcactgagcgcatcaactactgtatagaaactcttaatgaggacttatccgcatctccttccgtgccgattgaagacccagatgatctccctgctccagagtggatccaggattggtgatctcaatagttgcatgactgtccaatgatgaattgttctagttgaggaaaacgtctctagtttttccccgagcattctcatatcaaatggaagaaggtatacataagagttgatcgaactgacaagttgtacataccaaagattattccttctgtgatcatagatcagaatttgagatgccaagcaacagagactttggtctatgtttgctgcatagttcctggtaagaaggatctggatagtttgttggtgatccatgtaattatatatccaatttgggccctcccttgctgtttcggaaatggatactggtcgggaggaaggtcaataattatcgttgtgaatacggacatttctttcatctgcccctgtcaatcgatttgtacaagatcaagttttccaaatataattatgaaggttccccaacccaaaaaaaaaaaaaaaaaaaaaaaaaaaaaaaaaaaaaaaaaactcgagggggggcccggtccccatcgccccctagtgtgcgc

SEQ ID NO: 136167 - DNA, 1063 bp, Arabidopsis thaliana
gcaacttgcatgcctgcagtatttgatttaggtggctctttgacatcttccttgggtgtagttttctgcaaccaaggtacggtggcctccacgcctggaggaagatccaaatcatcaaatttatcagcaaggtgctggttaaagtcagcttcatcgaagtcataatcatcttcgtcgtagccatcaaaatcatcatcacaatcatcctccatatagtaatcctcttcttcttggacttgttggggttctggttctgatatttgcagagaactacttgagctggaaccagcttgatcgctggaagaaccctgtaaaacagtaggctagccagtaattataccaatcaaagcattaaaagaatgcacgaaaaggacaggcaaagtccttctgttccgcgatccagaaccctatgtttaattagtcgtgtggacgctggactgattggcagttagtagtagtataaaaatatgaatagaacaaatgcatctttatcataaaggccaaaacaactgccgcaatgcttatcgcaatcctttgcaggatgaaataaaatcgaagggaagccatctcctgacagcgttcaccgatccgctagattaatcgaagaaacgaaatcaggtcaattatgaccggcattgcatcaatcaacccaagaaagacccccgatcgtaccatattcgctaccaactcatccccagcgaacacctcggcactcgaattgacgcgtccaaatcccaaaccctagtgccctaagaaacccctggccgccgaaaacccccaatcccggcggcaacccgaaccctaaacgacacgcgaatccgcccgagaccggaatcgcgcgaggatttcgaagggtggccgagaaggcgacgaatcgaccggctccggaagggtaatggggaacggaaagcgagacgagcgggagaggaggtgacctggcaccgctggcgcttctgctgctgcgcggctccacacgacacggcgcccgtcgcctgccacgacgaggagctcccctgctgcaaggacctgcaggtcgactctagaggatcccgggtaccgagtc

SEQ ID NO: 136168 - DNA, 1039 bp, Arabidopsis thaliana
  unsure (1)..(1039): unsure at all n locations
tagtaannnnnnnnnnnnnnnnnnnnnnnnnnnnnnnnnnnnnnnnnnnnnnnnnnnnnnnnnnnnnnnnnnnnnnnnnnnnnnnnnnnnnnnnnnnnnngccccaggaaggtttggctggtggactcaaagggtttgattgttgactctcgtaaaggctcccttcagccattcaagaaaccttgggcgcatgagcacgagcccttgaaaaccttgtatgatgctgttcagtccatcaaacctacagttctgatcgggacatctggagttggaagaacattcacaaaagaaatcattgaggccatgtcttccttcaacgagaggcctatcatcttttcactgtcaaacccaacctcgcattctgaatgcactgctgaacaagcatatacatggagtcagggccgttcaatctttgccagtggcagtccatttgcccccgtggagtacgaaggaaagacttttgtgcctgggcagtcgaacaatgcctacattttccctggactcggcctcggtcttgtgatctctggagccgtccgtgtccacgaggacatgcttctcgccgcctcgaaagcgctagctgatcaggccacacaggacaacttcgagaagggctccatcttcccacccttcaccagcatcagaaagatctctgcgcacatcgctgcagccgtggctgcaaaagcctacgagctcggtctggcgacccgtctgcctccccccagcgacctggtgaaatatgcagagaactgcatgtacactcccgtctaccgcaactaccggtagtgctgcggggatcaattttgcagtaataaaaaatctatcaacgcggatggtactctgttgtttatagtccctgctgctaaccacccttgttgctggtgctgctggagaggcattgtacctgtccatgcatatatgatatatatatgttgtaacgttgtgaaagcaaacaatcttgggtaccaatgtttgttattcaaaaaaaaaaaaaaaaaaaactcgagggggggcccggtcccaatcgccctatagtgagcgt

SEQ ID NO: 136169 - DNA, 885 bp, Arabidopsis thaliana
caagctatgcatgcctgcagtgataaaattattcagtgcaacagatataaatcattgaattgatgcaaaacagagcattattttctacaaaatatacaacagtgcttttattaagcaggcagaatgagcaaatgaagtgtagacagattggtcctatagtgttgattcatggcatacaaacgaatactaatactaaatgcgttattcacaatgccatggaatatgactaatactccctttttttgacagataaaggtctacacggattctaaattatgagcgtgttgactttatacacaggaaatgtgaatatatggtaccaaatcccccaggtcccagccattctctttatacgataatacgtaacaactttgcgagttccactaatcatcaactcagcaaacaaacatcaaatattaagcccgtggacagtaagaaccccgggatcatcaaaagcatatacccgatttcgtgtggacctagtcgaaatttgcgccggactaaaagaaagtaccctatgggctgcaacaatcaacgcagtagaagcgtacgaaggaggttaatcaaaaaggcgaacttacttctgcccatggcgacggcagctgagggaggcagtcggtgtcggcggaggcggcgaaacgaggaaggggtgcgtctagggcttggagggaagagagggacactttatatagagagtgcggacgcggaatggagccgtaccgccgtgggttttgtgcgtcacggcatgcgactggcagatgctagggcttggggaggaatgggacgaaaaaacacacaggagcccaataaaattggcgactcctttctctcaaggccagagaacacaactcctgcaggtcgactctagaggatccccgggtaccg

SEQ ID NO: 136170 - DNA, 1041 bp, Arabidopsis thaliana
gcaacttgcatgcctgcagcatttgatgtgatttcctgttgaactaatatttggacccatcgcaaactaaattcaagaaaccagcaccagcggggcaaattggaccagctaattaatcgcagacagattgtttgggctaatttgagagccacaaaaccgaagaagagttagggctaatttggaaactcaaatccccttcgggattgaaggagattggagaggaaattagtccatttccacctcaatctcctccaatcctgaaggggattagaggttcccaaagtagcccattaggggctaaaatatctttgttagggctagtatggtaatcccattttttcaaggggctaaaatatctttttaccaagggaaattatttcattttcccttgagaaaatagagtttccaaactaactcttattcaattttgaaaaaaagaaaattttagcactcccaatctcctctggtattttagctctcaaactcgtcaatacaggataacgatcacagacaaatctgaatatctggttgccacgaaaactacaagagagaaactcagaggggtgcaagcgcaatccacttgggcttgctcgtatcgtatcgtacgcaggtagcattttatttttgtttttccttggcagacaacagacagatcaagcatgcttgcatttactcccagtcgaactcagtcccgagaatcccaaatcagagaatggtttttgatttaggacaagaactcatcaccgtccagctcaaaaaaaacaaggccaattcagctcaagaaccgaaggtcgatctgggggctgggccgctgacatccacgtatctcgtcagaaagcacattcttttgcgcccgggcataattgatattagcgatgatggataaatagaggtaacattgggtgtgaactgtgaaggagctgaaccatctatccatcatcacaaatgtagtatattacagcaaatctaggggggttacacttgtttcttcccgctatatcctcactctgcaggtcgactctagagatccccggtaccgac

SEQ ID NO: 136171 - DNA, 851 bp, Arabidopsis thaliana
  unsure (1)..(851): unsure at all n locations
nnnnnnnnnnnnnnnnnnnnnnnnnnnnnnnnnnnnnnnnnnnnacacaggaaacagctatgaccatgattacgccaagcttgcatgcctgcagtgctcctgcacctcctcgatgtcgtactgggtcagcatggacgacgcgtttcccatggctccccttccttccttccttcgccctacgatccaacagtagttgccgccgaagagcgcggcggtgaacttggctggcgtggatgggaagaagggaaagggacgcgagggcacgggacgacacagacgacgccacgccacggccgcatattctcatgccaaaattcccggttgccggagacaccgagcctctgcctgccagtgccaggtgccaccgcgggctcatttattggctgacgtgtcgtgggcctcacgggtttctttactactgggctgggttgtgttggtcccaaaagaaaataaatatacgcgggcctgctgctgcccttgccgtattttccttcttcgttgggaaattggtcacccaaattgggtgtagatctagagacagatgagtaaaaactaaccgcaagtaattatagtcaccccgggagcaataataattatgtcatcatgtaatcctcaccggacaagacatcttgccaatccggattccggagcaccatcgcattcgcagaccaccaaagtctgctttgcgtccatcaaaatgcctgataaccagttagcaaatccacactaattaattagtcacatctaggtagctgcaggtcgactctagaggatcccgggaccgagtnnnnnnnnnnnnnnnnnnnnnnnnnnnnnnnnnnnnnnnnnnnnnnnnnnnnnnnnnnnnncta

SEQ ID NO: 136172 - DNA, 1116 bp, Arabidopsis thaliana
tagcaagcttgcatgcctgcagatatattatctaatacatatatacatgtttagtccttaaacctgccactttctggcaattggtcatggtctatctgggcattgaagtactgagtcaaggagaataactatgaaccgtcaaaaaaacatgttcacaggttagagagaatccaccaaagcatatactaaaaagtgaagaatattaattgcatgagcttaagaaaatactacttcagatgagaagtataccatttttccaacacctggtgatcccacaaatattattttgtctactgatgatacaagagcttggcctgtttccgcaaaactaaaaaccaacaaaaaacagagtccaggtaagaaatgtgcagctagcctgtaaactaataagaatttagaaagctgcactcatacccagttattatgtgcaccagattctcaggtgcaccaacagctgaaagagctgcttgtataatacgaaaataaaagcagcccgaccaagtcgcatgttctgagacctataaaaggtaattttaccattcagaataatcatgaataatgtctaatgcacatcagaaaaattagatattttagaggccacaaaaatgtctaagagcagcacaaaggcatatataacatataaatacatttaacttagaaaaacaagaaaataagttaatgacacaattgtatgcagtgttgccatgctacattctttctcggacaatgcaggaggaagggagagaattctactagcattcagtataaataaaggatcaatccaataaaagctcagtagagaattgttctgcatttatttgacaagggtgctttctatgagccaacatatgctcaatatgaaatttactaatttctagaagatcatactaggttaacccaacaaaagtataattgaagataggatacagaacataaactatagctctcagcttcaatggtggcacataatacatgagatatcaagattgctgaataacaaaaaaatgatctatgggtccacgtctccacgatgtgtacatgaaaatggttggttaaagaacaaattttaaaaaaaacttgacctgcaggtcgactctagaggatccccggtaccga

SEQ ID NO: 136173 - DNA, 788 bp, Arabidopsis thaliana
gcaagctatgcatgcctgcagagccctgtgtgagactagcagaacattctttccaagctgcatgacccatcatttcatggggcagtggtagggcagtagcgcaactttccgacaaaccaatatttcctgtgtctctaaatttcacacttgcatgtagttgtagattatgcttaccatgaccaggtaacttcagagcaagatcaagaatctcttctgttctttgaagacaaagcttcatacggtcaccagatgacaatgaagtatgtattgtcccatgggaagaatcataaagctgctgcatggaacgatcatgaggtatggactgagaaatgtattgttgctgttgctcctgctgcctgagctgtagcatgttgttcaatagagaggattgaggttcagggactccaggaatcaggggttgcaagtgtagctctgatagcagatactgttgttggttgatgtttaactgaggatcatgatatattccaccgagaaacttttctggctgtgtgatttgagagttcaaacaagctaaagttggttgattctgtgttaaaacgtaatgctgttgagcatcaatacttatttgctgagaattatgcagattttggtgcacatttagtatctcttgagtaacatctataccacacataccagcatgcagatttccagagtcagcattatttgaccgaagtgacaatccagaagtagcagtcggtgcttgtcctttttctgcaggtcgactctagaggatccccgggtacgagctcgaattcactggccgtcgt

SEQ ID NO: 136174 - DNA, 888 bp, Arabidopsis thaliana
tagcaacttgcatgcctgcagcagtgcacgcgcccgccccatcaaaggccggccggacacagaacagcacgccgtgtgtgcatatgtcagtgtcatattcatagtactagctaactagccatcatcagcggcgtgcgatcaacgcgcgctgcatcgcattgcatgcatgtgccacgcacgcacggccgccgcaatggtgaaacgccgctgtcatctgatcacacacacaacacaaaaccatactacagcgctcgctactgcacacacgcgctgccctgcctcggaccctcaatcggagtgcagagaacgaccggtgagcagtagctgactgagagagtagcggcacctttttcatggagccgagctgcacgacgccctccctgacagcgatcagggcgatggtctgcacaagtgcagagcaaagcggagaatgtgagcgagagggggggaaaaaaagaaaaaagaaaagccgacgcaggcaggcaggccaattggccatggcatggcagagtcagctagctggccatgtcttggcatcgcagcagagaggtaggccacacagcccacagctagctagcgctagctgcttgcctgctgatcaaaaggggccggattgcgatttgtcgaaggccttaaaagttgtgcaccctaggatgcccgcagcttggaacttgcgccctccccacgttcctcgggatgctttgcgaaagaacacagggccatattgtggcattggctttcacacaggagatttagtgggctttgaggtaaaacgacggttgcagttttagatttgtgtaaaaagataagacagagatgcgaggaacatactttagcagagtctgcagggcgactctagaggatcccgggacggtttcaactttatcc

SEQ ID NO: 136175 - DNA, 816 bp, Arabidopsis thaliana
atagcaacttgcatgcctgcagcgtatgatcacggtttgtgaccagccatgacagcacttcaaatatagagtatttctgtatgaccaaagtataaaacaacttaccaacttctctcgtcagtcatcactgcaattaaatttatctatgaaagatgtgctgtaggtttgatgcctacttcttctttacatgtttttaccgttctcatattagatgactatttcttattcttataccttttcgccccccttatttttttccccagaaaacatgtgccatatgcttgaccacaatgaagcctggtcagggccacgctctattcacagcagagtgctcgcacaccttccacttccactgcatttcggcaaacgttaagcatgggagcagcagctgcccggtatgccgtatcaaatggaaggagctcccgttccgaggtcccttgcctgctgaattgccccaaggaaatgcgaggatcaatccagttcatgggtaccaaaatgggggccatatgagcataccgcggccacttcctcgcgcacgctcttttggccggcttcatcatctggccacgctgctgcctgacgctgaccctggcactttcaacgacgacgaacccttggatttgtcgtgcgaagaggctaaggctaacggcactcagcagggctgtttgagaacggtagagataaaagcatatccagagttcacccaagtgcctgaaaatacatcagaaagaaacttcactgttctagttcacctcaagggcaccgcctgctcagcaccttctgcaggtcgactctagaggatccccgggtaccgag

SEQ ID NO: 136176 - DNA, 1074 bp, Arabidopsis thaliana
gcaagctatgcatgcctgcagtaccagtacgtcgccatgcatatagcagagaggctagggaaggaatctgggtcgtcgtgctttgagagatctgctttcgcaactccaatgcagcctagtagctaaccacctctctctctctctctcttcgcctggccgtggccggggttgtgtagtgtgtgtagggtagctaggaataaagcgagcgagctggcccaaggcctatctatgcgaaagacgacgatatcactcacatcaaaggaagagaaagagacacggggcccacgccgacccctatatatatccacgtacgtacagtagacacggatcacacacaatgatggcgagacggcatcagcatcagcagcagaggatgtgttgttggaacggacagacagcgtgctaactgacgtacgtacgtacgaacgaaagctgtaggctggctggaagtttgttgctcagctcagctcagctcgttcgttcgcttcactctgaccaacaaagcatggaaaatggcatgagatcgacacctcaccaacacacgcgcaaataaaaccagtccaaaataaagggagcagcagcagtgcatggccggccggagagcaagcctacgtactccggcagctgagctattatattgggtatatattattgcagcatgcagagcacgcacggaggccgatgcatacatacatacatactgcgcttgatggccgtatacttgctcatcgatcgaccgatatatctcgctctttcgttcatgcatgtgctcgtcaatctctgaatctgagaggcagggcgatctggtccagtccaagtcaatggtaaaagcaggccagcagttgggaagcttcaatcttcaagttctgcatgtcttcacgccatgtgacagcacagcagcctcatacgtacctgtgcccgcgccagagagaggccggtgtctttgcgagcgtggtcgccgtccggtgccagaaacccagagaaactaactgctagctactactggccggcagcaagcgtagtggtaacctctaggcgcctgcaggtcgactctagaggatcccgggtacgagt

SEQ ID NO: 136177 - DNA, 654 bp, Arabidopsis thaliana
tccacggtatcgataagctagatatcaaatccccggccgcttcaggtttggatctggatgttcttcttcaaagggcccaggcttgcaaagttcagagtagcatgtggtccaaaattggccgactcaaacgctcttttatgcctaagcttaaaggaaacagtaattatgggtcaggagctacaccagggctcatgtcttgtattgctggaaggctcttgtgtgatacagatctgtgttctcgtgacttgttgaaggaggtcagttattctttaacggacctctcaaagacacagctgaaccgggacaggaaagagatagcgcctaatgatattcccaaaaatgtttcagtcatccaaaacacttgtgggaacttattgaatgtggtgagacggatgcatggttatccatggagctcatgtttcatctaagtgttcttcctctcactcttccagcttactcaacataagtggcaatctttgggggaaaacacttcaaggggccccggcacagaggatcgaatactacttactacatacattccactcgaaaaagttcattctccctgacaaaatttcacaacgtatgaaggaaataaagtcatcaaaaagaagaatggattatgctccagaagaccgcaatgtagatgaattggat

SEQ ID NO: 136178 - DNA, 666 bp, Arabidopsis thaliana
ccccccaggtcgactgtatcgataagctagatatcgaattcgcggccgccttctatctttccctaaactgctgttgcaggaataaaggattgtcacttctacttcatgtttccagagaagggccagaccaccacctcctgggctatgcgggggaacaaggtgatgtgcagaaaaattcatccagtttaaagaggtataatagttactcgtggagtaggttgacttgaggaagggttggaggctccaggttggaggagaagcttttgctttgttttcgtggttctgctagggccagcagattcttgtatgtgagcttcattcttctcaggagcaacacagctttgtagtctgatcagccggatgacctttgtaaggtctttggtacctgagagagatttatccttggtgtttggaagatcctcaagaggcaagcgcctttcagtttgggggtgcacaacttaacatattgtcagagtgccgtctctaagccctcccatgatttggtcattagtagggatgggaggaggaggtggtggagttaccttataagaactctggtgactttcctgcgggagacgtcttgtgcccgaagtttctgagctatcatttcttggtctgactcttggaggagctgtatcccttccttgaggagtctgataagaatct

SEQ ID NO: 136179 - DNA, 738 bp, Arabidopsis thaliana
atggaattgccgatgccatttgccggtccgcaatttccggttcgacccacgcgtccgcccgtggcaacgaatgaacgggttaaaggctccttaaaggtcacaagagcgtttggtgctggtttccttaagcagcctaaatggaacaatgcacttcttgagatgttccaaattgattacgttgggaagtctccatacatcaactgcttaccgtctctctaccaccacagattagggtccaaggaccggtttctaatactatcatcggatggtctctaccaatacttcacaaacgaagaagctgtttcagaggttgagctcttcatcacattacaacctgaaggggatccagctcaacaccttgtgcaagagcttttttttagagctggctaagaaagctggtatggttttccatgaatttgcttagggttaccccaaggtgaccgaaggcgggtttcacggatgatgtttcaatactagcgatctctttagaaggaacaatgtggaaatcttgtgtatagaaaacaatccctatgagcatacacacaagaacaaattggtgtgttcatggagacagagatcgatctctcatcaactctgaatcatgtactatgttgatataaacaggagataaaaaaagttttggcaactacttagatgtccaattgtgtcattaattacaagtcaaaggttggttctttgaaatgtgaagttttcttccacctagggaaaacaaccgtt

SEQ ID NO: 136180 - DNA, 726 bp, Arabidopsis thaliana
ccgggtcgacccacccgtccgaaaacagagtgttcctgaaattcctaaaataaaagacttccactttccagcaacatggatgcttgatgttagttcacagtcggtagaaattgaacttggtgtcgatttcgcaaaaatctaccatgactctgctctttacaagcgaaactcagagcttgtgaaacagttgagccagccagattcaggatcaagtgatatacagtttaagagaacctttgcacaaagctggtggggacaattcaaatctattctatggaaaatgaacttgtcttattggagaagcccttcttataacctaatgcgtatgatgcacactttagtctcttctttgatcttcggcgcacttttctgggaacaaggccaaaatcttggtactcaaccagagtatgtccacagtatttggagcgatctacgggttgggacccttcttagggataaacaattgggcatcagctcttcaatatttcggaccagggggaaatgttttgtcccgggaaagattcccaggggtgtactcagcgcctgcttttgcattgggtcaagtggtccctgagataccctattttttcatacaagctgccgagtttgggatcgtaacatatccaaaggaacggttttatccttcagcctacaaaagactttggggcactcttacttatgttttgctcacttactccctttcaactaccctggcgaggttcctcg

SEQ ID NO: 136181 - DNA, 724 bp, Arabidopsis thaliana
tccgggtcgacccacgcgtccggggtttggaaaagtatataaaggtacattatcgacgtctaacttggacatcgcggtgaagaaagtttctcatgattcaagacaaggaatgagagagtttgtggcagagatcgcgaccattgggcgtctcagacatcctaatctagttcggcttcttggctactgtaggcgcaaaggagaactctatttggtttacgactgtatgccaaaaggcagtcttgataagtttctctaccaccaaccagaacagagtcttgattggtcacaaagattcaagatcatcaaagatgttgcttctggtctctgctatttacaccaccagtgggttcaagtcaattattcacaggggcattaagccagcaaacgttcctttctttgatgattctttgaacggcaaagctcggtgatttttgggctcgcaaactctctgtgaacacggggttgatccctcaaacctctaacgtggctggtacgtttggatacatctcaccagagctttcaagaacagggaaggcaagcacaagttctgatgtattcccgtttggaatactaatgttagagattacttgcgggcgaagacccgtcttgccacgagcattttcgccgagcgagatggttcttacggattgggtgcctagattgttgtggaagaagacctattgccagtggttgatgacagggttaagcctggatgattagtacc

SEQ ID NO: 136182 - DNA, 745 bp, Arabidopsis thaliana
atttccggtaagacccacgcgtccgcagagacgacgagagaaacaatggcggagtctgcgatccgaaccatcgtcgaatcaattcactcatcgccgacgcaagccgtcgtgtatctctccggcggtgcctctcagtctttaggttggttaatgtcagttcctggagcttcgaacacacttctcgaagccgtggttccgtattccatgatctctatggttcaattactcggcagggttccgaaccaacactgtagccaatcaatggcgaatgaaatgggctttgttagcttataatcgtgctcttaagctttctaagccaggatgtgcggttcttggtgttggttttactggaacgttagcaacctttctcgttcccaaagcgtggggattccatagggttcttttttttgtcggttaaaagggcttccaacccggatattgggaaacttcagttactctaacaaagggaaaacgaagccgagaggaagaagataaagtggcaagctctgtactgattcaggctatggctaaggcatgccaagtttctgagacacttgactctggcttgactgattctgaggtgcttaatgagtctgtaatccagtttagtgaagaagaagaactagaacagcttatagatggacaaatatgctctaagatctatccatattctaaagcagaatcatacgggtcggataaagatagaaagattatactgcctggttcctttaaccccattacatga

SEQ ID NO: 136183 - DNA, 736 bp, Arabidopsis thaliana
ccgaatttccgtttcgacccacgcgtccggaggaaaacagcgatgtgtttgaagatggggagatggaggatggtgaactagagggtgatttgagttcgtaccgagttttatctagcaaaacgttagctgatgttgttgaggctttgattggtgtttattacgtcgaagggggtaagattgcagctaatcatttgatgaaatggattgggattcacgtggaggatgatcctgatgaagtcgatggaacattgaaaaatgttaatgttccagagagtgtgctcaagagcatcgactttgttggtcttgagagagctcttaaatatgagtttaaagagaaaggtcttcttgttgaagctataacacatgcttcaaagaccatcttcaagggggtttcgtgttaccacagattggaatttgttttggtgccgcggtcttggttcctctcatccacaagacatctatttttcacatacacaagccttcctcctggtcggttaacagatcttcgagctgcagcggttaacaacgagaattttgctcgcgttgcggttaaacataaactccacttgtaccttcgtcacggttcaagcgccctcgaaaaacagattcgggaatttgtgaaggaggttcaaaccgagtcatcgaaaccggtgtttaactcttttggtttgggagactgcaaagcaccaaaagttcttggagacattgttgaatctattgcaggtgctatttttct

SEQ ID NO: 136184 - DNA, 588 bp, Arabidopsis thaliana
agctatgacgtcgcatgcacgcgtacgtaagcttggatcctctagagcggccgccctttttttttttttttagactataaatgttatcttctatgtaagtaattacacagctgggttctaaatatcttctacatctaattaatgacctcaaaaattgttacatatatgtgatccttgtgaattggatctaatgaagctgaaaagtgacggtgataaatgtatctacagggcaagggatggtcaagccgcccattggatgatcaaacccaaactcttgttcagatttactcaacaaagcttgaaatgaaggctggttcaaatatgagactggcactatgtatcttttcatctggctttctccaacgtacactgcaagaaacccttttggtgtcgaagctgccattgatcgaccttgaaagatcttctttgcgcccataagacctcggaacactcccatttttttgttctgctctgatggatcctggaaaaagattcagcttaaaaagtctcctttagcttattagattagcggacccgtgggtcgaccccggaaatttctgaccggtacctgcaggcgtaccagctttc

SEQ ID NO: 136185 - DNA, 612 bp, Arabidopsis thaliana
tagacgagctatgacgtcgcatgcacgcgtacgtaagcttggatcctctagagcggccgccctttttttttttttttttttattagaaataaaataaatgagtaaaaaagaataggaatagctcaaatttttatatatattccgtcagaaaaagagcaaaatatgacaagagatttatcttgagccgtctttttaagtttgacagtgttgagtctgtcttcttggggctcaagtcattgctctggttgagaaataaatgaattagctgttttctttttttcagagagagagaggtaaaaatgtgaagattgtacaaattgggaaatgagagagagatcaagaagaaataggttcctttggtgttgcttgttgtgatttcaggagcagtcgttgttgcttcgccttctgcagctggtacttgttgtggtactgcttcagattcggtggaagaagatagtactccttggagaggaggggcaaaagaggaattggatgggtaaacgaggaaagaaggagaagaaaaccgttgatgatgatgttgttgaggattatatggttgaggaagatgatgatggtgttggtatggtactctaggagcttgaaaagaatagc

SEQ ID NO: 136186 - DNA, 602 bp, Arabidopsis thaliana
tgacgtcgcatgcacgcgtacgtaagcttggatcctctagagcggccgccctttttttttttttttttttttttggttggggcaaatattaattaattaacgcaaaaatatatacaaaattctatcctccaataaaggagaatccaaaatccaaagagctgtaataatgtcccaaactcaaaagcttctctggtggaaattttctcaccgtaagtgggagaaaaacaaataaaaaggagaaaaccctggcttctatcatcggccttcgtgaagatcttctgagaaaacaagttggtcgtgtaatacttttcctgatcaaaagcgcttagaccagaataaggaccagaagagaacatagaagaggttacttctgactcgaacgtagctgatgattgtctccggttaggacgagctttatttgaagtgtttaaaaccgggtcttgatactcaaccacccgttgaaccattttaagtgactgaaccacttcgcccatcgttggtctctggctagcttcaggtgcaacacaagctgcagcgattgtgcatactcttatgaaatcttctttcgggtattttcctttcagtcttgaatcgactagttc

SEQ ID NO: 136187 - DNA, 610 bp, Arabidopsis thaliana
ctatgacgtcgcatgcacgcgtacgtaagcttggatcctctagagcggccgcccttttttttttttttttttaagtagcacgaaaccaatcaatgatttgggtaatgtaatacaaaatggacgaattgatcagttaacgagagttacggacaaagaataaagtcggcaagaaaaaaaatacaagtatgaaacacgttgtaacatcactgatgttcactggaagacaacaaaaaacaaatatggtgaagacatggcaaaacaaagacaagtcttctcaaattcaataagacaagaacactcgtgggccactcacttcgagagacacatcacgaaaagtgataaattcacactggtttctttgaccaccaagaataaatttaagaaaaatccaaaaaatttaggaaaagttgggatactttgcgacgcgcctagacaagaacacggtgcacccatccttgggcgatatagtagggcagtacacgatctcatcacaaccgtctgatcgaagcctcttgaaatccaacaacgacgagaacattgcaatgaagagtacgaggtggttcaacgcgtaacgctggcctacgcattggtgaggcccccatccaaaagc

SEQ ID NO: 136188 - DNA, 406 bp, Arabidopsis thaliana
  unsure (1)..(406): unsure at all n locations
aaaaaaacgtaatcgtagcctatttctggtacgcttctttgcatgaaagacaaataaatacgacagatagatttgaattgtcagaaagaatccagagaaagctattaacgttcctgagattttggacaagtactacaccatctacagaccacaacaacgagcacacggaggtgatttaaggttagtctcttcattattcacaggcaattctggtttcaaaactgctcaggcagatagcaaacgcttgaaacgcagaaatcggatatccataatccatggtaaacatgtccttcccaactttcccaaactgggagtatgatcctctcagatgtctgccctgctttcacagtcacttaactgccacaagctgnaaagttctttaaccgaaggccactgtggactcgga

SEQ ID NO: 136189 - DNA, 611 bp, Arabidopsis thaliana
cctaacttggcatgcacgcgtccgtaagcttggatcctctagagcggccgcccttttttttttttttttttttggatcgcaaagacatcttttatggtatatatcacaaaaaacaaaaacaacaagaaacactcatatgactcagactctacaaacatcatcgtatagcgtttacagatctcacgcgactgcaagctttacattaacagcggctacaaaggcagcccaagccaaacacggctttaccagattaccagcgaccggacttatctcattaaaggccttgtagcatccgaatcaacgcagccgatttgacccaaccacaccgcaagccccgctactcccggacccgacgcggaacgtaaccggatcccaaaccaaacagagcaaaaactgagctaagtaaagatacagagcattgggcttcttgtggaagccaccgtcaacccatacaagccacgcagccaagcccatcagaccactagaagcgagacacgttgtgtgtaggagccacagaggtgggatccacgacgaggacttagctcgattcccgtatccgtcgcttgtgccgaggaaatacgtagcgaagagcgtcacgagcacaggagccg

SEQ ID NO: 136190 - DNA, 816 bp, Arabidopsis thaliana
  unsure (1)..(816): unsure at all n locations
nnnnnnnnnnnnnnnnnnnnnnnnnnnnnnnnnnnnnnnnnnnnnnnnnnnnnnnnnnnnnnnnnnnnnnctttttttttttttttttcatataaaaatacacatactgacgaattatttgtacacccattaaagtgtgacattaatcacattacaagcatgaaccaacacacacacacgtgtaaataaatagaataaaatgaaactggaaattaaatcttgagttgaaatgggtaagaaggccaatccttgagatcttcttcttgcctccttaccttaaaatcatcatcatctacaacactctcatccaaataatcactatacttcaacaaaaacgctaacacaagaacaatccactctaagcaaaacatcaatacacacaaaccaccagcgagtttaagtatcactgcaccgtcttcttcccgaacatcaagttttccaaggaaccttaagaaatcccccttgttcccccgtgaatatcaagaacagagaccgccccttgaaaaaatgccccttgagggactgtgcctaccatgtgtgaaccgtataatctaccgctcgcggtgccggatgtggtcgagccgaagatcgagcagccggataccgcggtagcgattgtgagagtgtagaggaagataagggagagaccggagagagatgggaagagacggagggagattgtgaggaagatgcaacttgaggctgagcctaagaggatgtagttgcagagaaggaagatgttgtgtgtgttgcctttcgatttcganattcccattttctcgaattcaagaagagaactttggtttttttttgggg

SEQ ID NO: 136191 - DNA, 766 bp, Arabidopsis thaliana
ctatgacttcgcatgcacgcgtacgtaagcttggatcctctagagcggccgccctcgccctttttttttttttttttatcgaattttggatctaaatgtcaataaccaatggttgttatatacaaacccaaatctgagactatagaaagatgaaaaaccaacttaaaacacataaatattatatacaaagtggacataaatagatgaaatttgtttgaaagaaattgctatgtgcataacaagaaacagagagaatgtaatgttcaccgaggaagaggagcataagggacaagatttggatcagaagtaacgagaggcaacttgtcaatgtatatcaacaacctcttcagattctccttgtaaatcgctggtaaatctgcaatctcggcgctacaagtgtatatccatagatcaccagaattcactcttttcaagctgcctcgacagaacgggcacgactgtgaccgtgcacgccagtttctgtagcagtttatacacatggagtgattgcacgtaggaagaacaactttgtttcgaatctccaagcagattccacactcttcttccctctccaaatagatctccgacatctttcctttatctgttctggcctttttacggtattctttgtcacatatttccctttggtttcctttctttttacattgggtgatcccctccattgaaaatttgccattaggcgtaagggaaaaccaaaccccaattcattggaaaatttcttgtgggattacttagagttttttgg

SEQ ID NO: 136192 - DNA, 795 bp, Arabidopsis thaliana
agaagagcatgacgtcgcatgcacgcgtacgtaagcttggatcctctagagcggccgccctttcttttttttttttttttttatttggaagccataatttgaaatgtactacataatctggtccacatcttcaaaccaaagccaaccaaaaaaaaaatcctcagctacaacaacaacatcgttttatagtctatggtttcagaaacatttcctgtgaaccactgatggtccagtctcgtcataatctgctttagtaacgtgctgattctgcggaaacaccactttagctagtatggctcctccaacccaagccgaatacatccccaaattctccggcatatattctggcggtttcaccagtgttggcctaatggcagatgagcacaagtttgcttctttctggaatctactttcgaatcctgtcatggaggttgtaccaccacaaagtacagtgttctccaagagctgcctatggttctcagatgacactgtggagataatccggacaagctgctcaacgattccatgctcctccagtcccagtattgatggctgaaacagaacttctccaaccgagtatttctcttgcccgatgcttatcacctgtccatcaggaagagtatgctgctcgatttcacagttttggggttttttttgtaaagccaattttcgtgccctcgggcaccaagtttggccaataactgggtttccctttggaggttttttttcaaaacatttcagtaacaattggcttggagaaatttccatttccaaaccggggttttggggtttttt

SEQ ID NO: 136193 - DNA, 755 bp, Arabidopsis thaliana
accgtgacttggttccccgcgcccgtccacgggattcctatacagcggacgcccttcgtggtcgtcttacttttttttcatgacgagattgaacacaggcgatagcgtttttatgataagctttggagctggttctaagtgtaatagctgcgtttgggaagttgcgacagatcttactggtggtgaatcaaatggaaatgtgtggaatcattgcatcgatgattatccaccaaaaatcgattctgaatccttattttggagaagtttggcttggattcaaagatgaagatccctgacaactttcaaggctcccctgaccggctttacatgtgcaaaacggtttactggcacataaagacggcataaccgcaagacgcagaaaaccacccccggtgatacaatattctctctttcttaatttcttcacttcttgcctttcgttaaaatttttacgtctttttgtttaaatgcattgacctggagatatgactgttaaagaaactttaattagttttttatttagtctgattttttttcgtcgctataatctgctaaaaacctactttgaaataagggttctaagggacatgcacttgcaatactatgagaattacttggttgccatcatattggaatgctgccttttttttctcttgttaaacgtggcattcatttataatattgtattgcagtcgttccactttttcccttctattgtttgtaccttgctttcgccccaaccaaataccatttcc

SEQ ID NO: 136194 - DNA, 729 bp, Arabidopsis thaliana
  unsure (1)..(729): unsure at all n locations
nnnnnnnnnnnnnnnnnnnnnnnnnnnnnnnnnnnnnnnnnnnnnnnnnnnnnnnnnnnnnnnnnnnnngcggccgcattgtatcgcgtgaaaaattggttttccttgatggaacttctataccgaaaacaaggcttcagaaaaagaaaaatgatgaacaagttccggaagggtgggtgcaatgtgataagtgtgaagcatggcagcatataatttgtgctttgttcaacagccgaagaaatcatggagaatccaccaagtacacttgccctagttgctatatacaagaggtggaacaaagagaaagaagaccattaccactaagtgctgttccgggggcaacaagtttaccagttacttctcttagcaagcatctagaggagcggttattcaaaaagttgaaggaggaaagccaagtgagggctagacttcaagggaaaccttatgaggaggtcccaggagctgaatcacttactgtcagagttgtggcttcggttgataaagttttggaagtaaaggaccgtttccttgagcttttccgggaagaaaattatccatctgaattcccttataagtccaaggccatttttttgttttaaaagattgaaaatgtggaagtatgcttgtttggtatgttcgttcaggaatttgggacagactctggacctcccaatgagcggngggtatacctttcttatctggactctgttaagtattttagacctttcc

SEQ ID NO: 136195 - DNA, 728 bp, Arabidopsis thaliana
gccgaattgtgtatcgagccccccctcgaggtcgacggtatcgataagcttgatatcgaattcgcggccgccatttttttggtcagccaagtgctgtgtggacggtgaaaaagaatgtgagcgatgagtttgatgcatacatcgttgtctcttttaccaatgctactcttgttctttcgattggtgaacaagttgaagaagttaatgacagtgggtttcttgatactaccccatccctggctgtctctctgatcggcgatgattctctcatgcaagtccatcccaatggtatccgccacataagggaagatggacgcattaacgaatggagaactcctggcaagaggtcaattgttaaagttgggtataatccggcttcaagtggtcattgcattgagcgggggagagcttatatacttttgaggcagatatgactgtgccagctgaatggaggtggagaagcattgaaatgtctggtgcatgtggcttgcctggacaattgcccctgttcctgaaggaaggaaaaaggcctccctttcttcctgtggggccttatgataatactgtgcgcattctatctctggatcctgacgactgtttgcagattctcagcgtgcaaagtgtctctttagctccggagtctctgctattcctcgaagttcacgcatccattggtggagatgatggtgctgaacacccggcaaaatttctttcttaattcttgggtg

SEQ ID NO: 136196 - DNA, 749 bp, Arabidopsis thaliana
  unsure (1)..(749): unsure at all n locations
actttcgttnnnnnnnnnnnnnnnnnnnnnnnnnnnnnnnnnnnnnnnnnnnnnnnnnnnnnnnnnnnnnnnnnnnctttttttttttttttttcctcaaagaatgaaatgttgatgttccgtgttactgtcataagctatgatatttaaaacttacaagaggtgtacatgctagctttttttggcttgggaccgtatctacgcggttgaagaaggaaaaaaaacaaaaaaaaaaaagtcttggatcagtacttgacgacatggtggcgtaaccatagttcatacatgatcatgtgaaatgcgtcgaatttgactggaggtgagttccattgaaaatgcttctgcacctgcacaacaacaaacccaatcagcttcttggtatacaatactgggataagatgggtggaaattctcctttaccttgaccaagttggttatgccaccggaaccaacctctgagtgacggtatgtccttgggggtctgccttaagggtataggcatcttgcccccggggtacaaccgcaaattttcgccaatccaggatgtcgttgaaagggaggccgtagtagtctgataatatgacaggaatacatccgtaatggatcgagtccgttatgcgagcgctgtttacttgagaaccaccagggcatatgcagaatttagtccggtagaatctcttttgatacaccaaatgccctgtagctttgttaattctgttgtttgaaatatcaagctctgtgtcgttttc

SEQ ID NO: 136197 - DNA, 815 bp, Arabidopsis thaliana
  unsure (1)..(815): unsure at all n locations
nnnnnnnnnnnnnnnnnnnnnnnnnnnnnnnnnnnnnnnnnnnnnnnnnnnnnnnnnnnnnnnnnnnnnnnnnnnnnnnnnnnnnnnnnnnggaaaatcaacttttcttttttaatatgccaaccatttacatctaatacattgcattgatttctttcttctcttctatcaccatttttcctaccacaaccagactctttaacactactaacaaagaaaaataaataaagtcatagaacctaaaaagactcttttcttcttcttcttctcctacagtacctacccactcactctcaccctctgttcagcatctcacaaatacactaaacaacccctaaatctaaaagggatttaattacggactcttcctcctgcttaaactaagcaccccctttctatctacctattacattttttctttctaactacatctgcttcctaagtttatcatcgaaaggaaaaacaaatcctttccttcagttttccccttcattcctccctttacaccctcagctaaacgttcctagtacttcaggacagaatcaacggttaaattcccaaatgattttaacattgggcttcttttgcttccacaaatggcgattgaacactatctgcattagaatcactacctgatgaactcccacctgaccctgaatcactagacgaggaactaccaccactagaactggaactgcctgaagaactagaaccactactagcagcagctgcaactgcngtaccatntctttcgatctctanagatggataatcttcgattggtatgtcctctccaatgtcaacatcctcttccc

SEQ ID NO: 136198 - DNA, 811 bp, Arabidopsis thaliana
ccctgggcagtaccggccgaattccgggagaccccccgtccgattttttctccgacgttgcttaatcctcgaattctccggcgattggtggctgcgtctcctccaaccttcttactccgaccgatgacagcagcttctctcacctcaccagctcctccttaagccaacatttcgtcaagctaacttccaccacttacggtcttctcaatctcgactcttcttcaccttctcctccgtctccttcctcctcctcctccgccaaatccgttatcacgccaatgactccgcctgagagattcactatcaacggtaaggaggcggcgatgatgatggttaagtctgagccgacgacggaggttattaacttctgggagctaatgtcaggtttagacggcgatacttgtcgattctctccgattccggtgaaatgtaatggattttccggcggattaaagaaagagaactccgatcctaatttgaaaaaccctaacgattacgaggttttgaaaccgctagatccgaaactagcggaggaatctgagaggttatgtgacggcggagagaatcgcgtcgcgatttatacgacgtcgttgcgcggagttcgacggacctttgaggcgtgtaacgcccgagaaagctgccaatggaaagttttggggtaatcggcttgtggaagagaacatgctgtcccctgggaatacgagggaatttaaaacaaagcaggtcacttcccaattcctaaatggggccggggaggaaattcccacccggaccggcccgacgatttaggccctcctcctccggggtcttc

SEQ ID NO: 136199 - DNA, 660 bp, Arabidopsis thaliana
  unsure (1)..(660): unsure at all n locations
tgtcattccgttnnnnnnnnnnnnnnnnnnnnnnnnnnnnnnnnnnnnnnnnnnnnnnnnnnnnnnnnnnnnnnnnnnnctttttttttttttttacataacgcagttcttgatgcatctacattaataaagatctctcttacgaatggttttgaagagttaaattaatccatttattttgtggtaagaaagattaaaaaatgcaaagaaaaaagctacattgattgaaactacagtaaaatctgcgtatgatcgatcagagaattaaagcctttatcttgttggagatctcgtagacaggcatttgccgcacgacacgagcttaagtaacgtatgtggtcttgcccttcttgttctcaccttcaacctcgtggccctgcgacgtgtgccccttgaggatttccagcataacaagcttcttgatcttgggtcaaggctccgattttcttggtccagcttctcggcgatagacacggccttgcgtttagaccaaccgttctggagtgagcatccgtcagcttgctgaatcacatgagccaacgagaccttacctctcacaatgctttggctctggttctgactctggcttgcttcccaatggttgcttctaactcgggctacgcagaggaaccaactggctctgtcctctcctctttctga

SEQ ID NO: 136200 - DNA, 643 bp, Arabidopsis thaliana
agcttgacgtcgcatgcacgcgtacgtaagcttggatcctctagagcggccgcccttttttttttttttttgtctccatgattaagaaccattaagaattcgaaaataatcacacaacattaaaaaatgtttaactcacatgaaatatcaacataataaacaatggactaattaatataaataatgatgtcgtaactcttaactacttttttgtctgaccatcgattagatatcggaataaaccccattcttaagagtgctccatcgatgcaaaacgtgaccaagaccatcatagaaaacgacgcgtagttcagcttcggatgtgtaaaccgacatggaatccttgtccatcatagtaaaacctccatctccttgtgggggcccaatccattccacatctcctttccacggccttggggcgcacctccacttggtcataaatggtattcccactggttgatgcggcttaggggccccaagcaatgatcatgcccgtttatatagagatccacttcattagcctcgaggataggtaaaagttgtttctcaagctctatggtatttccgtggtgacctgcacttttgatcgtgtgatggcctaccactattttccatttagccattgattcttgcaatgccacat

SEQ ID NO: 136201 - DNA, 639 bp, Arabidopsis thaliana
  unsure (1)..(639): unsure at all n locations
atgacggcacgcgcacgcatgcttggatcctctagagcggccgccctttnttttttttttttttttttaaagacaaagagtgattgcttttaaagagtaatggcacaagtaccaaatttatccacatgaatcacaaaatacacaaaccaagcccttagtagatttcctctagatgtcaatcttctctgtataaaagactgaaaactttatattcaaaaggcatctcaaaaacagagagagtgaagaacacttttgcacagcgagattaaaaaaaaacccataagatacctctaacataagcggtttctttcatacgcaacgaaggaaacatatagactgtaggtgaggctcacagagaacgcatcaaaacccgtctttacctctaatatttatagcacgagggaagtgttaacaacacaaagcatgtggcttcatttgtcagaatgaccccttctggccttacggcgagtatgttgatgaggctgtcggatagggcttcttcgtctttgtgcagaagagcgaacagaggaatttgtacactatgaagatgggtaaggccaacaaagcagaggctgcaaaccaaatgaactctttggtggcaaaaggttccaacagctcatggctcttcagtttacttta

SEQ ID NO: 136202 - DNA, 649 bp, Arabidopsis thaliana
  unsure (1)..(649): unsure at all n locations
ctgacgtcgcatgcacgcgtacgtaagcttggatcctctagagcggccgcccttttttttttttttttttaaaatgaattgaaataaataaatagtcgatgtggatttaaaattgttttaaaatacataaaccaatataaactttccaaaatgactacactgatgaaagctaataataagtcgatacaggttatactaagcaacactatcagagagaaaatctgtgctgtcttgttgcttcttcctcctacgagcatcaacaagcttactagaatgtgttccaagcacttcggtgatggcttttggcaaccagaagccaggccgctcaagatatggtgcgcggtcaataaccaatggttctctcaaggttacatcaatcccctgataagtccacaatgctagtggtgctgcacctttgaggccaagggataaccagccaagaccagccactgaaatgtctatgcttttcacgtcccagctatttcccgacacctggatctccttctcttcccatgttcccaattcagacgctctgttctctccaattggtggctgaaggcgtaaaccggaatggccctggaatatttcttcggcatcctctgtttttcctagatgcaatgaaccattggtgccaatganngatngtttt

SEQ ID NO: 136203 - DNA, 835 bp, Arabidopsis thaliana
  unsure (1)..(835): unsure at all n locations
nnnnnnnnnnnnnnnnnnnnnnnnnnnnnnnnnnnnnnnnnnnnnnnnnnnnnnnnnnnnnnnaagaagaaaaggagagagcatccatatcaaataaagctaaaaacttgtaatagttataacaaaaagggatcactctgtataataataaaagctcaaaaacacaccaaaaggaccaggcaatttcattcccatcaacaacaaaaaaaaagataaatgaaaacgaagagtaatatataccaaactatataactcgattcaatttcattcttgtttttttgttttgttgattaggaaatcgattaagctacagaagaacattcccttgcaaagtgaccttccttaccacacttgtagcacgcattatcattacctcccccgccgtcgtctctctggtcacaatcacgagccaagggaccagaaccaccacactggtaacacccacaagaaggctgtctcttagccccacaatctcttgcaatgtgaccaactcccaccgcatgaataaccaagttccactaccaccaccaccgcttctgacgtttccggcagcaaccttctgagtacaatccctagcaaagtgaccaacatcaccacaagtgtagcaaccatcgtttccacctttgaccgctccacgttggtctccgtttccaactgatttctgagnacaatccctagccacgtgaccaacatcaccgcaagtgtngcaaccatngttnacacctttggtggctccacgttggtcaccgtttccaggtgaagnacaatncctagcgaagtgaccngtatcaccanaattgtnacaaccttctcctcctctagatctacgttcacc

SEQ ID NO: 136204 - DNA, 858 bp, Arabidopsis thaliana
  unsure (1)..(858): unsure at all n locations
ccgggtcccacccacgcgtccggaccaagttgagacaattttgtattcgggaccgattttgtttctccgacctcaatgatggctcttaagtcccttcatgatcacccaaaagctcttcaagaactaagagctgagcatttggcattcagggaaagaaaacgacaagacgaaccactcggtcttgaggacgtgaagtcaatgaagttcactcgagctgtgatttatgagacatcaagattggcaacgatcgttaatggggtcctaaggaaaactactcgtgacttggaaatcaacggttatttaatcccaaaaggatggagaatttatgtatacacgagggaaattaattacgatgcaaatctttatgaagacccattgatctttaatccatggaaatggattaagaagagcttggagtcacaaaactcatgctttgcgtttggaggtgggacaaggctttggccctggtaaggaacttagggattggtcgaaatcttgaggcctttcttcaattacttttgtttacgaaaaaaccagaatggggaaggaaaattgggaaggggggattgaaatttaatggggtgggttttccccaaaaaggttttttttgggcaaccccaaaaaaggggctctttccatttttgttaaaggaaattttcaaccccccttaaccttaaaatttttggtgaaacctctctttttttaaactcttagggattgggatctctatgggattttttttatgtcccccccccccttgaggggttttcccccaaaaagaaccctttttattgtgaagggaaaacctcccgcggaacgggatttttttttttaaaaagaggcnttttcccttttttt

SEQ ID NO: 136205 - DNA, 860 bp, Arabidopsis thaliana
attgacgtcctctgcagtaccggtcctggaattcccgggtcgacccacgcgtccggaccaagttgtgacgattttgtattcgggttacgaaactgtctctacgacctcaatgatggctcttaagtaccttcatgatcacccaaaagctcttcaagaactaagagctgagcatttggcattcagggaaagaaaacgacaagacgaaccactcggtcttgagcgacgtgaagtcaatgaagttcactcgagctgtgatttatgagacatcaagattggcaacgatcgttaatggggtcctaaggaaaactactcgtgacttggaaatcaacggttatttaatcccaaaaggatggagaatttatgtatacacgagggaaattaattacgatgcaaatctttatgaagacccattgatctttaatccatggagatggatgaagaagagcttggagtcacaaaactcatgctttgtgtttggaggtgggacaaggctttgtcctggtaaggaactagggattgtcgagatctcgagctttctccattactttgttacgagatacagatgggaggaaataggaggggatgaattaatggtgtttccgagagtttttgcaccaaaaggcttccatcttaggatttcaccctactaatttctaactttttaaataaaataatatagattttatgcacgcagaggatacagaagacgtttatgaagaaacaagagaagataattataaattttttttttttttgacacatatttttgttctcatttaagagtcttctggtcatatgtacataaccataagcagcataatcttattatatatctatttctgtataactctatttgaact

SEQ ID NO: 136206 - DNA, 763 bp, Arabidopsis thaliana
  unsure (1)..(763): unsure at all n locations
ttggccgtctgttgtaccggtccggaattcccggttcgacccacgcgtccgcttcgggagcttggacaacttgaacaagaccttgtttttggtgatgctggaatgaaggatgtgattaaatatttgagtactcaagaggaggcaagccgtgaaggtaagttacgcctgttgatgatcctcgcaacaatttaccctgaaaagtttgaaggtgaaaaaggtcaaaatctaatgaagttggccaaactctcatctgatgacatgaccgctgtaaataatatgagcttacttggttcagccgtcgatgctaaaaagattaccccgggaggtttcccttttgaaatttgaccttcacaagaaaaaacgagctgtcaggaaagagcgccaagaggaagcagcatggcagttatctcgtttttaccccatgattgaggaactcatcgaaaaacttagcaaaggagaattgccaaaagaggatttcccatgtatgaacgacccaagcccaagtttccacggatcaacctcactttcatcagcagcaagtagtagtcaaggtcaagctgctcagtccatgagatcaagacgcacaccaacatgggctaaacctcgaggttcagatgatggatattcaagtgattcggtattgagacatgcgtcaagcgatttcaggaagatgggacagcgaatatttgtgttcatcgtcggtggagcgactagatcagagttaaaagtatgccacanactatccacaaaactcaaaagagag

SEQ ID NO: 136207 - DNA, 771 bp, Arabidopsis thaliana
tggccgtctgttgtaccggtccggaattcccgggtcgacccacgcgtccgagttactacagaagcgaaatgttgccattgttgaaacgtcacatggtgttaaagttcacgcttacggactcacggcttgctaacaatggcctgccaccatctatccaacgactgagatgtcgtgctaattaccaggcactgctatacacaaaggagattgaggacctagggaagattttggttaaccggttaagaaacaacactgagccgtatatcgctctgcatttgagatatgagaaggacatgcttgcctttacaggatgcaaccacaatcttacaactgaggaagcagaagagctgaggaatcatgaggtacagtgtcaaacatttggagggggaaggggattgtttagcccgagagagccgggttcaaaggcggatgtccaatgtctccgcgggaagcagctttttttcttaaagccatgggatatccgtcctccacgactgtatatatagttgctggtgaaatctatggaagcgagagtatggatgctttccgtgcagagtacccaaatgtcttctctcattcaacccttgcgactgaagaagagttagagcctttcagtcaataccagaatcgccttgctgcgttggactacattgtggcccttgaaagtgatgtttttgtgtatacatatgatggtaatatggctaaggcggtacaagggcacagaaagttttgaaggtttaggaagttcataaatccagacaggctgaattt

SEQ ID NO: 136208 - DNA, 794 bp, Arabidopsis thaliana
ccgtccgcggtaccggtccggaattcccgggtcgacccacgcgtccgtatgtttgcccaaattgaagaaatcataatatccgttagactggcatttttgaactgctttctggattttcctgcgcacttggagcaaattggtgctgatctttcccaaagcacctccagacaagataattggaaaaacggatattctgatgagcatcaggaagaaccatcagccaacacctacggaagtgtaattgatcctcacaggcggttgttgatggtcttaagtaatataggttactgcaaagatgaacttgcttcagagctttacaacaagttcaaatatacatggttacagtctagaggcaaaaatgaaggcagtaggtgatctttcaaggtctaataatggctttcctcctgggctcgggagagcaagggtcctcgagcattacacttttgctaaggcaaatttgtccaggacagcggccacaaattactttccttggcctctggtattccaatgggggccagccccccaggggaaaggcatccgggatcctgctgttgggcggctgcacactcttgtagctgtccatgcagaggtctttgctggtgctaaacccctcctggacaagattcttggcgtgctgatcgaaggtctaatcgacacttttctgagtgttgtggaagaaaacagatcaagtgacctaagatcaattgatgcaaatggtttctgccaactgatgtttgagcttgaatattttgaaacagtactgtattcatattttacaagcgctgcaaccgagt

SEQ ID NO: 136209 - DNA, 810 bp, Arabidopsis thaliana
tgccgtaccggtccggaattcccgggtcgacccacgcgtccggggagagaccaagattgaaggcagaagagtggaagctcataagacggttaggataaccggtgttgttgttgagatcggttcgtttcggttgttggatacgaaggatttggataaggatttgagattagggtttttggaattgagaagtgttgctgaggttagaggaaggattaaggttttgggaagaaagagatggaaagttagtgtgatgagttgtaccatgagactaaatttaaccggtcggtttattcaaaatttgttatgtgaatagtagtgagtgaatgatcggttttatgatccggtttaagaagatttatttgtttgttgttgtttttttgggtgttttgtgtttttgcggtattgtaattgtaatggtctttgtctataaagggaacatcaatattgtagaaaaagtacaaaattgattagtctcaaaaaaaaaaaaaaaaaaaaaaaaaaaaaaacaaaccaaaacaaaaaaaaaaaaatatatataactaaactctaattctaataaaaataaaacggggggggcctttttaggggtcccaggtttacttcccggtgttggggaagtaaaactttttttatagggccccctaattcaaattacctgggccgtgtttttacaacctttgtgaatgggaaaacaccctggcggttcccccaaattttaattcgcttttggaaaaacaaattccccctttttttccccaggtttggcgtgataataaagccagagagaaggcgcccccccccccggttttc

SEQ ID NO: 136210 - DNA, 782 bp, Arabidopsis thaliana
tgcagtaccggtccggaattcccgggtcgacccacgcgtccgcttgagggtcggcaatcgggcggcgggcgcatgcgtcgcttctcccccgccagattcaaatctttcttccaccatcgtcactcattgcttctcctccggtcgtaagtatttggaaccttgaagacttaaaaataacaactttttatagtgggcgctgtccaatatattggagagcttgacagtgtaataagatatatactctacaagcgttatacccgaagactgggtctataaatcaatgtcagaaggtgaaatggccatcattaaaccagagatgatgaaatcctatatatggcttgaaactgctgatggctcaatccaacaaagtggaacaagcaggttgcaatgttctgtcccatgatatgtcaaggagtaattcagaagggtgttggggcttctaagaacttcgcaatatctcttccccagcgggtcaatcccagccatgttaagcctgatttttggttcctgcagatttcatcaagtacctggacgttcaaataaggaacgtaaagtttatgatgaaaaattcatccggatggatacaaagaggctctgtgagttgacctcagccgctgacagtttgcagttgaagccgttggttgatcttactagtcgtgcccttgcacgaattattgagggaataacccctgaggagatacgcgaaatatttcatttgcctgatgaccttactgaggaggagaaattagagcctctaaagaacacaatggatgatccacggc

SEQ ID NO: 136211 - DNA, 793 bp, Arabidopsis thaliana
cgccgtaccggtccggaattcccgggtcgacccacgcgtccgctctcaacgttgccagtgaagttcgccgtcgccggagctcatggattgaccaccgccgtttacacactatcaaaatcctaattcgaaattcttccaccacgcttctccttttcaaaatcgtaacaattttactccatcgctccggcggcgattcgcgagctctccgcttcatggccctgaagaaggaattgcgccgtgatgagaaattggatttataaagagaataacaaatgcaaagtttcctgggggagctgaacacttgtacttggatctcaaagctttgttcgctcttagacggtggtgtgttcgtcggaggggtcgaagcaatctttcccttggggacaacgcgaaacgctcttggacatggaaatgttacatctgaaccccatattgtgcttctgctgcaatgtcatcttcaactcttctcctaccttcagaagctattagtaagccacaactgtcccgaggttcaagtatgttcagcattttagacccccaaagtcgtcaaaaatgtctcacccttccagatctatccatgagatgagcttctcgaatgagttgctgtttgtgaaacgttattgacagccatttggcttagggaacatatgtagaaagaagagttggtgtttagtttatgagtttgaacacttaaaactttttaaaggctacacattgacaaggatgaagaaaggctcaaaatttggacacaaaggatgtaaggcctgaagcttaattaaaccttttttggagc

SEQ ID NO: 136212 - DNA, 648 bp, Arabidopsis thaliana
tcgtctgcggtaccggtccggaattcccgggtcgacccacgcgtccgcttcacttcaacacacacacccaatttacagactaagcctctcttcaaatctccgctgcccacttcttcccagtcttcgtgttggttttgtaattcgctacccaaaacgcaattcccgaagctgagactcagtaatggatcaagtcacgggcttcgtatacaagctctcttacgtaacgagacgccaagtgaaggtgaagataataatgggtttggtttttttcctggggatatcttctctttatcacaggaaaagctcgggagtaatagcaatggtgaaacttctcatagtgtaatcgatgtggaggcatctcttgcacatcctcaaggtggtggaggaaatcgagctgggctttttagaactccaatatctggcggtggtcaaactgctacatcagctcatgctttacctcggcctgctttagctgtgcggaacttggtggaacaggctaggcttgctcatctgtgcacagtgatgtccagaatgcaccaccgcacggaagggtacccattgggctcattggtagattttgcacctgatcggatggggcatccaatatttgtgttttcaccgctggccatacacacacgaaatctcttg

SEQ ID NO: 136213 - DNA, 863 bp, Arabidopsis thaliana
  unsure (1)..(863): unsure at all n locations
cgtccctgtaccggtccggaattcccgggtcgacccacgcgtccgcaacaaacaacagtgaaagataaattcagcataacaaaacaaaatggagtcacggaagattaacctaatggcgacagcaatagctttaatagtggcggctatggtggtggcagctgctgatgataagacgaaagacaaggaggagtgtacggagcagctggtcggtatggccacgtgtcttccttacgtgcaaggacaagcaaaatctccgacgccagactgttgctccggtctcaaacaagttcttaattcaaacaagaagtgtctttgtgtgatcattcaagacaggaatgatcctgatttgggtctccagatcaacgtctctctagctctcgcacttccttctgtttgtcacgccgctgctgacgtcactaaatgccctgctttgcttcacttggatccgaattctccagatgcccaagtcttctaccagctagctaaaggtttaaacaaaaccggcccagcctctgctcccactggctcgtcccctggacctataagcatttctccgacttcaggatccgatgatggtaacaacagtggtcgaacgacctctgtgccaggcaggaaccacgctcaaagcttctataaacaatggctggggctcgaagttgtgcttccatttcttcgtaattttttatattttcatcctcgtatagataaataatgatggcgcaaactgaaaagcatgtgatgttgattagtgaaattgcggtgacgctgatttttgcagctcctgttttgaatggtggagttaattctagttcgagaactcttcntgatatcttgtgtgacgcaatacgagctacagtttttct

SEQ ID NO: 136214 - DNA, 672 bp, Arabidopsis thaliana
cccctttgattgacctgtccgtctgcagtaccggtccggaattcccgggtcgacccacgcgtccgacgtcacgaatcgtgtcccacttgaaacccttggcatataaatgaaagaacttcttattattacttcccccaggtcgagagcattcacttaaaaccctaaattgtgacgaccgcaccggcattgcagacaacgttcgtgtcatcaaccgacttgctgaaacattcttattataggggatcgccatcatccgaacaatgtgatctcttcctaaaaacaagatatgttcttactgcgtatggtgccgacgccgtcggagatgtctctcctgacagagcaatttacttaatcgggggagccatcgatcgcgctctccgacggagctgcatgtcccgatcctcttgaaacgcaaagacacttgtccggaatgtgacggaacaagatttgagaggaaaggacgagtgactgtggtagccaccaccgaacggaaggatctgcctcagatcgtgcgtgctaactgctctggactgatgaagcttaacctgatcgatggacactaggtcttgttcatatatatgtcaaaagctgcatgtgtcgttcctgttggttatctacaatatacctctgcaaaagtagatagcttggaatgatcaatggttgcttggagat

SEQ ID NO: 136215 - DNA, 648 bp, Arabidopsis thaliana
gccgtctgcggtaccggtccggaattcccgggtcgacccacgcgtccggagacatgaaagtagacttcctcttttgcatggttcaaatgaaaagaaaaacaacggagacctagattttctgatggctgaatttgcagaggtctctggacgtggaaaggaaaatggaagtcttgatactacgactagatatcccagtaaaacaatgacaaagaaggttctggctattgaaggagttgcttcaacatctgggattgcatctcagacagcatctggagtactgtcaggttcgggtgttctaaacgctagacctggaagtgccacatcatctggtttacttgcccatatggtctctacgctgagtgcagatgtttgcaagggaatacttggagaaagttgctgacctgcttcttgaatttcctcgagctggtacggcagtaaagtcctttttgtgcagccaaagctttctcagtcgtctttttcagatgttcaaccgtgtagaacctcctattctgttaaagatactggagtgcacaaatcatttatcaactgatccaaattgcttggagaatctgcagcgtgcagatgcaattaagcatttgatccccaaccttgagcttaaggatgggcatcttgtttatcagatccatc

SEQ ID NO: 136216 - DNA, 650 bp, Arabidopsis thaliana
ctgcggtaccggtccggaattcccgggtcgacccacgcgtccgctctccttcgtagattcgtgtattgtacagatttgtagagaacgagagagagaggagaacaaaatggtaggcgaagaggagacgaagaagagagtagtcactgaatcgctaggatggttaacggaatcttcgattatgccaaagaagcatcgcgccatcgaaggtgttggtccttcctcaatcatggagcttaaagctcagctctataagtctcaggaggaagctaaacagacaaaggattttacgggatccgatgctcaataccatcgcgccaaagaaaggattgccgccaaagattctttcgccgcgaaaaactccggcgtcggaaagtcgcaatttaaaggacaagcttgagcacaaagctgtaaaagttggagcagttagttatgccgcattggagaaaaaggctcagttgtatgataaacttgctagaggagagctttctgatgaagaaggtgaagagaagtactgtgttgacttctttaggaaaggaattcaacatgaagatccaaaaccatcaagcacttacaacagttccatttcagcaccacctgaagatttcaagcaagatggtgaagatgatggttcgctttttagcaccaaattg

SEQ ID NO: 136217 - DNA, 647 bp, Arabidopsis thaliana
ttcctgtaccggtccggaattcccgggtcgacccacgcgtccgagatgtttacgaagctatttcggtgtaggacttacttaattttctttagttcacgcgtaattccttaggcattggctctgtgagttaaggttttgaatatgttagaagttggatccgaggtaaagactgctgtgtgctttagttcatcacattattcagcattaagggtcagattttcaattatgcatcgcgtcattagaaagtgaaaagattttatactttatgattttgttaagcttcaatatacttgttttgtatcaaaatgttcaaatctctttgtcgtctggtatctgtttcagattatactctgaagttcttagttatatacttaatatatgtagcggtttgggcttactctggtatggtattgatttggttaaatacagtttatggggcttcagatagcaggagcgtctctaaatctcctgtgccaaaaagaaccctcgccgtattgccttgctcgtcctgtcgaattaacaaacgttgcatcgagaatggacatctacaatctgctactaacaaaacttcctttgtgtgctgagcaagttcttcaggccataggagaaataatcctgatttctcaagaaacaataagcatggttta

SEQ ID NO: 136218 - DNA, 643 bp, Arabidopsis thaliana
ccctgtaccggtccggaattcccgggtcgacccacgcgtccgagcgtggagttaactatgaggaagaagatgtttctattccccatatttatgtctctcctatgaatggggtcctcgctgtctcacactcgcctatcgatgttaacccggaagagtttgatagctatctgaactctcttgataacttgatgcagcaacctccagaagaggttgggcgagactcgtctgttcttgttagtgtaagctctccaatgagagaatacgaatgggctgaagcccgaatgaagatctcatctctcctggagaaggattttactactttgttcctctccaaggacgcagcagagatagcagcattagcaactaaactaaggaaagatccaaaccttactgctgaagagatagttaggttgaagctgatggaagagattccgaccttcagcgaagtgttccaagagaacaaaggggtgattgaagaagcagataggttcttctctgctctggaactcaacaaagccaaggtagcatcgcttaaatacgaatacagcgacctgaaggaaaaactaggaagtatccaaatggaagtagacacaaactctgagacaatccgtcaaatcgatgaccaaatcgctcaacttcaagc

SEQ ID NO: 136219 - DNA, 643 bp, Arabidopsis thaliana
cgcagtaccggtccggaattcccgggtcgacccacgcgtccgtggacaaatacataatagtcctcctggaggtgggagtgccgagtttaatcctacgttgcttggatcatttggaattaaaagatttagtaaggcccgttgcttttcttgccaaaatggtgggtcgtccacgtcttgctgtagatctcgtgagcaaaggtctgttagatcctaatagaatgaaaaaattactcaaccaatcaagtccaagagaagtcatacttgatattttgatgatcatatctgatctatcgaggatggataaggctttttataaatacatcggcgaggcttctgttttacagcctttgaaagaatatcttacccatgtgggtccaaatatacgtgcaaaagcttgtagtgctcttggcaatatgtgcaggcacaatgggtatttctacagcgctcttgcgggacatcaaatcatcgggctcctcattgatcgatgcgctgatccggacaaacgaacacagaaattcgcttgttttgctattggaaatgcggcttaccataacgacacgctgtatgaagagctaagaagatctataacgcagctagcaaacgttttgaccacggctgaagaagacaagacaaaagcaaacgc

SEQ ID NO: 136220 - DNA, 667 bp, Arabidopsis thaliana
ccgcgcccccccttgatttgcctttccgtttgcggtaccggtccggaattcccgggtcgacccacgcgtccgctctctctcgctcgctctctccatcttcatctctcttgctgaaaaatggcgaactcgagaactgtcttaatcttgtgcggtgactacatggaagactacgaggtgatggttccgttccaagctttacaagctttcggaatcaccgtccacaccgtctgccccggaaagaaagctggtgactcttgccccaccgccgttcacgatttttgtggccaccagacatattttgagtcacgaggtcacaatttcacgctcaatgcaacgtttgatgaagttgaccttagcaagtatgatggattggttataccaggaggacgtgctccagaatacctggccttgactgcatctgttgttgagctggttaaagagttctcaagatctggcaagcccattgcctctatttgccatgggcagttgatattggcagctgcagacacagtcaatggtcgaaaatgtacagcttatgcaactgttggaccttcccttgttgctgcaggtgccaagtgggtcgaaccgataactccggatgtctgtgttgttgatggtagtttgattactgcagctacatatgagggtcatcctgaatttatccaga

SEQ ID NO: 136221 - DNA, 1116 bp, Arabidopsis thaliana
  unsure (1)..(1116): unsure at all n locations
nnnnnnnnnnnnnnnnnnnnnnnnnnnnnnnnnnnnnnnnnnnnnnnnnnnnnnnnnnnnnnnnnnnnnnnnnnnnnnnnnnnnnnnnnnnnnnnnnnnnnngagcaatgaaaacattgattaatggtttcacatttcaatacactcaatgaaacagggcaccaacccctatgaccgcagatggaatcaaaaacataaaatgcccttgcagttgcccgccatttcgtcataaatacttttccattaagtcattttggcaagtcctttttaaacattacgaggagcggttttggaatcgacctgcgatttataatttgaccgggaaaacagagttactgaaaaacagtttaacgtttttagttttagtaacaagtaaaaaacaactccacaaccaaatcctaaggcggcactcgagccagttttcgacacagcggcgcagaccaccatgatgaaggaatcttctttggagttcatgtctttggaagccattgccagttcgattcccgcgaatagcaacagaacccctaaaattccaatcggaaactgactcagaatccttacaaaggagtttccaaacaccagacccacaatcagtttcccgattccgagaaaaataacggataatccactccttgccccaaaccgatactgaccagctaacccaccagcaccgtgacagacgggcatagcgccaaaccagcaccctattaagttcatcaccccaacgctgatggagactgtagtcgcagagagttccttgtcaaacaagtcaattggataattttccaaactgcgatcactgagttcagtacagagagtggaatctgaggaatcgccgccctcagaaacccgattttccaatcatcccaactgattctcagaatgtggaacttcgagggaccgaatttaaggtctttgaaaatggatggatcacgtatgaaacagagcactaacccgagtgcgaacacgatcagcgcagatggaatcgaagacagaagacgcagtctcctccggcgagactggctttcgttgctggaagtctcggcgagatctccatcttcagcttctctgtcgttgccagagccggtgganaaaatgatnaagagcagagcagct

SEQ ID NO: 136222 - DNA, 724 bp, Arabidopsis thaliana
gtgacactatatatagagctatgacgccccctgccctcagcttggaatcctctagagcggccgccctttttttttttttttttttttttttttaaaagttaaacttcttttttaatgaaaattaatcgcacttgtatcatcatgtacaatgctaaaagtaatgattgaggatcttaacaaaagaaattgaattttctaacaaatctagacaattgaagcaagtgggtttagtggagccctagactcaaccaatggggttggcttgggtctagaatcatcttaactacatcttctacaaatgaatcaaaacaagaatagcaaccaccctttcatcaggctactaccactactgctaactgctggctgctgccaggtgtcatatgatggtgagtacacctcactggtggcggaacaagatggacttcactgctctcgtgttcaagcccacaacctgccagtatagtgtgtattgagcacgtggaaatttcgtcgaaagtggtttgacctaagtcgttttgactggacaagtttttgagatgggctttaactctttcttgcagacgttctcctgccatggaagacattgtgtttggcatgtggctgtgtagactttgatgattactaaccaagggatcaccctgagccagtccatgatggaatcctaaatcgatcggtcgctcaccaaagaaatgtttttattagacacaacgcccgaaatgctttt

SEQ ID NO: 136223 - DNA, 685 bp, Arabidopsis thaliana
cacgcgatcctaatagatgagagtgatgactcagagagctacagcgatctttctctttgtcttgataaagccaaggagcttcttgctctcatcaaactacccacgggatggttgccattgaaggatatgacggaagttgggtacaacaaaacaaaagggtttgtgtggatgaggctgagaagcaagattgagcatacattccgtgagataggtcgcagagttttatatgacacggagataactgcgtttgttgaggaccgccgtatgaggagacttaccggagtcaaaagcaaagagctcatgatctgggttcctgtgaatgatatcttcatcaaagagaaagatcctgagaagatcacctttgctaataccaccggcctgtcaccaacatttaaagtttcagcatttcaatgtgaaggttgataaataaaaagaaaagaggagtaaccacacttccttgatgaaagcaaccaataaagaacagaagttggtccatactcaataagagatagtttaattaaatattaaggacacccctttcttacaatgaattgcttatggatcatcacagtaaaaaaacaggctctgcaattgatgccttgatgtataacagggagtttccaatccacatatttgtaatcaaaaaaaaaaaaaaagggcggcccctttacaggatccaagctta

SEQ ID NO: 136224 - DNA, 742 bp, Arabidopsis thaliana
cgcgtccgaacttctgtacatacttttcgaataacttcagttgctgcgattttgcttttcctccctttaagaacaacaatggtttatatattaaaagggaacgtaaccagcaccaccagacgcaaatgttacaccggttaagagatcttctggtttcaaatttggatttcgatatgccgtttacaggcttgagaagttttcagagtgttcacaaaacacaaatgcaactaaaagtgtgtgtttagttgttatctattggggaaattctcgaaatataatcaaaattacatctgagaaagcaacgtgaaatttacctctaaaatcagtcgcaactttgccgttgcaaaaatcttccggttaggaattccacccgtcaaaaatcgattggccgtaaggagggataatttgcattcttggccaaccgttggcataatggtcgtcatttattcccggcatcaacgatttggatctccggaccactattttcgcccggagtcgttcggttgggcggctgcttcacccaaagcgttggtggacgtcttacataacaacacgagaaagaaaacacacccaaaacgggctttgaagaaaaaagaagtaacgggatggaatatttataacttgtttcgttttaatgggtaactcttttggtttccttttggaaagcttttttgggaatgattggaggtaaaattattttttttttgtttgaaggcttgggaatccgaccattgttgaaaac

SEQ ID NO: 136225 - DNA, 717 bp, Arabidopsis thaliana
cgggtcgacccacgccgtccggacgattcaacttgagtacaccgatgcaaaagagagtctcctccatgctgctaggaaagcacctgttgcatctttgggattcagaatccagtgcaacaagtgggctatcatagttcggctgttgttgggtgaaatacctgaacgatctatcttcactcagaaaggaatggagaagactcttaggccatattttgagctgaccaacgctgtgagaattggtgacttggagctgttcgggaaaatccaagagaaagtttgccaaaacatttgcggaagacaggactcacaacctcatagtcagactccggcacaacgtgattccagaacaggacttgcgcaacattcagcattttccctactccagaattctcctctaccaggattgttgctccaaaaagcttggagacctggacctcagccgaacccagtggctgatgcagaaagcatcgtcgctaaagccattagagatggagcaatcgacgcaaccatcgaccacaagaacggttgtatggtctccaaggaaacaggagacatctactccactaatgaaccacagactgcgtttaactcgaggattgccttctgtttgaatatgcacaatgaagcggttagagcactgaggttcccgccaaacacgcacagggagaaagagagcgaggagaaaagaagggagatgaaacagcaagaagaggagct

SEQ ID NO: 136226 - DNA, 640 bp, Arabidopsis thaliana
acgccccacgcgtccgttgagtttatgtttgatctgacagtgagactgcaactcgtgttctctgcactcgctaaagactatgaactgccgtttcgggtggggaggttcttcagatgggtcaaatgggtgggcatttgataaaacaacaacacaatggcaaaaagtggtaaatatgtcagatgagagatccctcttttccttttctttttcccgccgtctctgttattttgaattagtagtctctcaattttataacacggtggaagctttttcttgggtcacaagtatggcaatcggagagcttttggttattgaaacagagaatatggaagtcatgttgttgtaagttatatagattatgatcaaatgcttttgtaactagagttattcttttttctcactatctatcttattccttgtttgttaaagaaaacaaaacagggattaaccctttacaaaaaatgagcgctatggtaccacattttattaaaacatgtgggagttgcgtggggaaacaaaacacgacagtggggcgcgccttatttaaataaaataacaaaaccttgttctcattccactcttttcgaataggatacaaccccttgaacctttggttccaatatttactgccctcgccccc

SEQ ID NO: 136227 - DNA, 796 bp, Arabidopsis thaliana
  unsure (1)..(796): unsure at all n locations
nnnnnnnnnnnnnnnnnnnnnnnnnnnnnnnnnnnnnnnnnnnnnnnnnnnnnnnnnnnnnnnnnnnnnncttttttttttttttttttaaacaaaatctcagcgttgcattaatcaaagacagtgcccaaataattggtacactaactgttagttttgtcgttttacactaactgttatataagtctccttataaaaagataacatggagaagtgttgttttggttctcagtgtttgagccagtagtttcttagctgagccatatgcaacaatatctcgtcccgaccttgattcgtcacactgctggtcataatccatggcggtgttgtctcaaagaacccttggatcaagtcttggaactcctttatgttcgcctccggtttcttccctccatttttcttcttctttctcttgtcgcattttgtgaatatcaaagtcattgggacctggttttgaccaagccagcttgcatacccgagatcgattggcctttacaggaatgctggcatcaactagtaaaaacaccgagaccaatgttgatcgatttagaaaataagtctttggtgaatctggttccagtcttgtttgagttcatgcggtgctgatgcatacccgtaaccaggcaaatctaccaagtaccacttgtcgttgatccggaaatgattaatgcattgcgtctttccaggtttcttagaagtcaaggcaaggcgtttcctcctcaccaacgaattgagaagcgatgatttcccaacattggatctcccaacaagcgcaaactccggcaacccatcgctc

SEQ ID NO: 136228 - DNA, 480 bp, Arabidopsis thaliana
  unsure (1)..(480): unsure at all n locations
acaacaaagttttgataggttttccgaattctttaaactccttaaatttttaatacatctcaatcaaactccacttatactaaaaataatccatattgcatttttaaaaattctaaaagaagaatcacatgataacttgataagcacttttaaatgatagatgtccacgtagaggaataagacaaaaagacaaaataaagaaaaaggacgaaatctaaaagagggaaaataagtaacaagtcccagaaaagggagtatgatctttctcggnccggatcctcggaactccctcgaaggctcgaaccctccccttggttttttaccncgatataggaagtccggttcccgggacccttatccccctcccacacttccccttttccaccgggcagggggcaatcagctagggcgaaaangggcctaacagggggttgccccgggttctaaggcaaccgttcccaagcttgttcccgggantgt

SEQ ID NO: 136229 - DNA, 725 bp, Arabidopsis thaliana
  unsure (1)..(725): unsure at all n locations
nnnnnnnnnnnnnnnnnnnnnnnnnnnnnnnnnnnnnnnnnnnnnnnnnnnnnnnnnnnnnnnnnnnnnnctttttttttttttttttttttgagtttgtaaggagatggataaattaaattagatgataagatgataaatttaagcccattacatacacaaacatacaatataggaaaggtgagtggggagaagagaaaaaaaagggtatgcaaagattctgattccttaccatatgggccaacacagtccgagtctgacaatatggtcttaaagacggaagaagtaaggatttgtcataatttagagtagttgttccgccatggacaacctccttcgaatgcattttccaggacgtcttccattctctttgccaatatcacctccagactggaaagtacagcggcgggtacttcaactaagtctttcgagttcctttgcggtaggaatcactcttttgataccataccggtgtgcagccaatatcttatctttgcatgccaccaacaggcagaacgagacctctgagtgtcatctctccggtcatggctgtgtctgctctaactcgtttctgactgaacaacgaaaccaaagctgtcaccaaagtcactcccgcagaaggcccgtctttcggcactgcaccagcaggaaagtgaatgtggatgtctcgtccatcaagaacattcatatcccctgcaagtgccagcttaaaatccgacgcacga

SEQ ID NO: 136230 - DNA, 726 bp, Arabidopsis thaliana
  unsure (1)..(726): unsure at all n locations
nnnnnnnnnnnnnnnnnnnnnnnnnnnnnnnnnnnnnnnnnnnnnnnnnnnnnnnnnnnnnnnnnnnnnnnnnnnnnnnnnnnnnnnnacacaaaactgtaatcgcatactgtgcacacaacaaacacacttaatacacaagtatatctcaaaagagttctctcagctgcgtaaaatctctaaatacaaaagcagccgggggagagattattcgtcatcatcaattatataatcatcggttttcaccagaaaacacactagtttcagccatccaacagattcctcaagctacagaaagcttcaggcgaaagactaaaacaccttctcttctccaatggcaccaccggcttgtcccctctgtccattgtcatgaaacataccaccaccgcagttaaattatcaaatgagttccgccccagagcctccatcactagctctcgcgcacatcttgttggatcgttgtgccggtttaagccacgcctaacaatgctaaccgcttcttggctcgtcaaggcatcccaaatcccatcgcacccgaatcacaagaaactcatcggcttcaggttagagttatctgcttgatttctggttccgagatcagtggagattgagagccgtgtggcagttttaaatcccagtcgcccagagctcgggttacagctaggacttcatttaggtaaccgtcattagtgatgaaaccgccggattcctccactcttcttctct

SEQ ID NO: 136231 - DNA, 760 bp, Arabidopsis thaliana
  unsure (1)..(760): unsure at all n locations
gaaaaaagaaaaaaacttgaggtgcnnnnnnnnnnnnnnnnnnnnnnnnnnnnnnnnnnnnnnnnnnnnnnnnnnnnnnnnnnnnnnnnnnnnnnnnnnnnnctttttttttttttttgaacagaaggacagaatatttaaaaaactaaaaagaagatctaagcattgttctttttcctgtaaaatttacacaacttttttttaccccacaaataaacgaattgtatagataagccaaaaaaaactagacctaaaatgccagttcatccactagaacaagaaacagaatttgagccatagctaatagcttgcaagctcgaatgagtcatatttgtcatccatctccttggaactccgtttgattcaccagccagattatatgcataagatctccacttgtttccaaccatctttacgaggactctataaacccctaaccttcgcgctttctgtgccctctcgaagaacaatgagactagagaaagtcgaaaagctattaccaacaaaaacatccgctcttaaacacaccgcgtaatctatagccgattgtatcaaatatgaatacttcccatatatctcctctttaaccccaagcttcttcttctcaaatggtattaaaccgtctctccaaccacttaaaaccgatgaatcttcttctttttcttctaagagagtatctgctactgcaaggtaaagaactgttggagtctttaaacctgaaatgttccctactctgtccaaaatctctcggacgcgtggg

SEQ ID NO: 136232 - DNA, 743 bp, Arabidopsis thaliana
cgtcgcatgcacgcgtccgtaagcttggatcctctagagcggccgccctttttttttttttttttttttcaaatttaacaatatttcaaagttattgccatcgcattgttacacacaagaacaacgcagtttattgaagaagcaatttaaaccaaaggtaaccagttaacaggaatcacgcgcaatcatgagacaaaaacaacaaaaggcaaagctaaaatctccaaatcaagaactgggaatatgtagacttgatggcaaagggtttttggttcgagaaacaggagtgcacttaagaggctgagccatggacaacgcagttgtttcagcagcctcattcatgtttactttctctccttcaattctccaatcaaagcactgcaccattaccccaatcacgattcctagaggagatataagctagattttgatccaggacagcctctcctttccgcggagaaaggaatggatttcaagacttcctctcttacctcgtcctcttgctctgatcttgaagatgctataaccctctcaagtttaaactcctcaggatccttccagaaattaggatctttcattatagcataagtattaacaacaagtaatgttttatccggtatgtaaaaccctttgagattacaccttttttgaaaaatccttaccgagatagaccccggggggatgcaatttttagcctttttttgacttaccgattgcaagtaaggggaggttggtaaaataat

SEQ ID NO: 136233 - DNA, 759 bp, Arabidopsis thaliana
  unsure (1)..(759): unsure at all n locations
ctatcttgacgttgtatgcacgcgtgcgcgcgtacgtaagcttggatcctctagagcggccgccctttttttttttttttttttttttncaacagaaacgagattacagatttattttaacggtaaaaaattacaaatatgattggctggaatttacgatacataaacatgaaacatctacgtagaattcaacaaagcaacaaaggaacattcttttgtggcatcactcgatcacttttcttaaattaagaaagacagaggattttgcatctttatcaaggatgagaagggaaaggaggccattttccgaacttagggtgtggaatgtatttaggtgggaaggggggaaacttgggaagggggggacatgggttccttggaatcaccaccactggcggcttgaagattggtttgtagataggacccggggccttgaaaatcggcctgtgaagtggaggaaatgtcttctttgggatcaccactggaggcttgtatataggcacgggtggcttgtaaatgggcttgggtatctttggtggacacggtttcttggggataaccactggtggcttgtagataggcactggaggcttgaaaatgggaaccggcggcttgtaaaagggttaatgaccaaaatttggtggacaccgggtttttattggatcaccaccggtggttttgtaaaatggggggaccaagctttccttgatctttagggaaactcccgaccccgttgggttaaaccccagaaaaatttcc

SEQ ID NO: 136234 - DNA, 721 bp, Arabidopsis thaliana
  unsure (1)..(721): unsure at all n locations
nnnnnnnnnnnnnnnnnnnnnnnnnnnnnnnnnnnnnnnnnnnnnnnnnnnnnnnnnnnnnnnnnnncttttttttttttttttaagttgaggaacacaaaattataataaaattgaagacttgttgttaatgtcacacacaaacacacacaattctattttatgaaaacagagtaaaagaaaacagaatagattagagatcttcttcatcgaagtctatacgaattttaagtctccataaatttccctatactcaacaaatgctcaatccctaagtcaggacttgggaagagtatatgctcataagactctaatccccctgaatctccacaactcctcctttcctccgttgtcaccggccacatcgtcagcctggaccattagctgtcgtcgtttgaggctgctttcggttttggaccgagctcgccgggtttggaaaccaatggtagacatttggctccggggatctgtccatgttcagacagctccgtcgcgatctctctaatcccccggcgattcggggttccacttccttcgtcgtaaatgctctcaagtatctgaagctgtgttgaagtcggagtccaccgatgcctagtcgatatcctatgagaacttgacgatgcccccatcggatcaaagtatccgccaaccattggcctcactcctgatgagagtggatggtaagaagagagggagttgtggaggaggaccagttggtcac

SEQ ID NO: 136235 - DNA, 825 bp, Arabidopsis thaliana
  unsure (1)..(825): unsure at all n locations
tgggttgcaattcnnnnnnnnnnnnnnnnnnnnnnnnnnnnnnnnnnnnnnnnnnnnnnnnnnnnnnnnnnnnnnnnnnnnnnctttttttttttttttttggatcataagaacataacttttttactgcgatgaagaatcataatattcgacaaaaaagcataacagagatctcgagttcgagttctatctctgatatagacctaaatcccaaagcataagcattgacatctggttaaccaaaacaaactaccaacgttcatatgatgaaggtctgcctccaggacggctaggacggtcataaggacctggtctgcttctgtagggtcttccctcatcgcgtatcggtcccatatctccatatctgtcacttgtatcccttgcgtatctgtccctgtcatagcttctctctctcccgcgataattccatcctcaagattgatgttcagggcatcccatacctatcactccacaaaaacgggtctcctgggtggtccgtatctctcaaatggatagtgatcacgaggctcatacttgtctccactgtcgaagcggtccctgtagctatatcgtcccccatcttggtcacggcgtccatccatgtagcggtcaaactcacgctcccgctcccgctccctctccagatcacgatctccatagcgatctcggtgtccatctatgtctccaatacgagagcgcatcgcaaggggaactctgaaccgttctcgatcgtcaccagttgatgggcaatntcgagcccaatgaccagggcgtctgcatttaaagcactcatcctcggttcccttccctcgagatgaatagcct

SEQ ID NO: 136236 - DNA, 732 bp, Arabidopsis thaliana
  unsure (1)..(732): unsure at all n locations
atttcnnnnnnnnnnnnnnnnnnnnnnnnnnnnnnnnnnnnnnnnnnnnnnnnnnnnnnnnnnnnnnnnnnnnnnctttttttttttttttttttgctcaaccatatgatttcattaatatataatagtgaataacagttctatcatataaataaataatttataatccaccacatgacaacagatgggttttcccattttatttaactataaacagtattttgctctcacagatccacaaggacaagcatattcaaggatgttttagttcttaaagaaaagataaagagagaccagacgcatagtggtaacttggtctacaagttagagtggccaagccggagaaggacacggtgccacgaagtgttgaagaactcctcttaggttccacaccgactccacattttccggttgaacattcgccgccgaatcaaccgctttggcgatgacctctgtagtctgtgaaacatcaatggtggcttcaaacaacacccatggcccatttgtcactggagctgtgttctgagatgtacggctttcctggttcctgcgttctagaagcttccacccagtttttgcctccatccagggatatgtccactctttctatcccgcgtccacctcctgaaaccgcatatcctttgatacttacctttccaggcttcaccatttgcacatcctccacagagcagattgcactctgaacagggaaatccatttgcggtctcctag

SEQ ID NO: 136237 - DNA, 771 bp, Arabidopsis thaliana
tcactactagggcgaattcgagctcggtacccggggatcctctagagtcgacctgcaggccgcagccccccctcaattagtacttagtggcagtcaactggatcaatcaaattgatcccatcttttccctagaaatagaataaagacaagaatggcccttaaaattgcggaggtgcttctgaattccaacgcttccacagagccgccggcgccgcgtgcgttgctaagctaacccaccctctccgccacggctgacctgctcaaccgcttgctctcgtggatcttggcgtacaccctcttcgtccggacgcagagcaggacgtcgaggccgaacccgacgacgcaggcgagcgccatgatcaggaagacgaggcggtagcagtgtgcgccgacgcaggtgttgccgccgccgggcaccgcggtggcttccgcgtcgtagaggaggcccgccagcaggcccgagaagacgaaggagccgagcggcaggttgaggatgaggacgttgtagacgagaccgtagtacttgaggcccaacagctccgacgccgtgggcacggtgaccgccagccgcacgccgtagcaggtgccgacgaccaccgagccgatgaagagcgagcctggcatcgccacccccatcaccatgtatccgacgggcatcagggcctccggggctgcgttccacagcgggcggggaattcctcgtgtcctgggcgctatatttggcaacattttccttctctgggtttggaggtatatgagtccattccatac

SEQ ID NO: 136238 - DNA, 779 bp, Arabidopsis thaliana
cccatagggcgaattcgagctcggtacccgcgggatcctctagagtcgacctgcagcgtgccctacagtgcacggcaccgcagcacacacatctcacacgcggatagcgccagacgagagcgcggccacatggcccgcatgaacggagaacgacgcgcgccggcgcccgtgcgctccgatcgcctaccgtcgataggccaagcgttccctgagcggatcatggccacacgcggacggcggatcgcccggagccccgcaccaaagcacaccggccacgtcccgcggcggtcggcgcccgtcggcgtcgctcgttaaaccaaaaacgcgccattagcctgacggcagcgacggacaccgacgagcccgcgccgcgacgcccgccggattaactccgccgttgaacgctccgccgcgttgcgcatggaggcatgctttgtttgcttccgaacgccgccgagagcgaggcataggcgcatgtgcatgtgcgtgcctgcctgccgccagaagtagccttgcccgcgcgcgcaacggcggctggcccgtataacgtgacgttcgcttgggattttgcaggcaggctgttagcgtcgtgacgtgcaagcgaactgggttcgcacagctgtgcgatcctgcgtcccacaggcgacggcgctgtccacgtctcgccaccgtatggtccacggcgtcgcaccgtgcgcgtttgcaggtgctgggtgctggctcagtataaaatgcaagcttgcattcgcaactgttagccgacacgctcgggattcaac

SEQ ID NO: 136239 - DNA, 770 bp, Arabidopsis thaliana
atagggcgaattcgagctcggtaccccggcatcctctagagtcgacctgcaggaccccctcggctacgaccagcccagcagggccatctgcgtggctcatcagggccgccgccgaccccatcgccaagctcccctcgctcgacaccgccgcaggctgccccgcgcacccggcctccgccaaggaccacgccccgcctgctggtgacaacgacgaccaccaccaccagcagcagctcacgaggtccggatgcagcagcacgtccgagaccagcaagggctccgtcctctccctctcccgctccgagagccgggtcaaggcgcgggaccgcgcacggggagcggagcgccggttgccagggacaaggacaaggaccccgccgctgactccaggcgcgccgcggctacaagctcagcgcaggcgggcatccttcaccgagctgctcacggggatggctgcggccagcagcgccgcccccgccgaacacaagcaccaccagcagtcgttggtgtccctggcagccgccgtccgtctccgccaccaccgactacatcgggttcgcgcagccccggaagggcgggggacacgccatggcgcagcacttttgcctgccccgctccccacctcggcaacattgcgtccatcgccatggccccggcgcagcactaccaccacttggccagcggtgccgtcactgtcgcctctggcgcggggcgagcccgacgcgcgatatgacgcacttctcgttcttgagagggagtttattcccgtg

SEQ ID NO: 136240 - DNA, 784 bp, Arabidopsis thaliana
tcgtctcctacccgtgatcctgtagagtcgacctgcagcgcaggcatgcgaagcagaccatcggcggcgccgttacgttttcctgactgcattcactagggagggcatactgcgcgataaggccatgggcgagggacccacgacgaaaccactcccactccggggttgcgcttgcgggtggggagaggagccgtgccgtgccgtcgaaaagactccggccggccagccaggccgttggggggcggcggcacttagttgacacggcaccggcaggcaccatcgctcgctaataaaccgggtgtgcctggcagcgagcgccagaaaaagctggcgcgctcgggttgtgagtgcgatccctgcaaggccattgacaacgctggagcagcgaccaaatcagctcacaggatcctggaaagcatcagaaccaccctcgacacgatctgagttcaccaccggcagcggcagcggcagcggcaccgacagaaccatctgcggtggccacgcacaaagccgggcggtgagacccagtgcacacatcaggcagcattaccggcatcgacaccggaaccgagagtcataaaccagagatgcgacacatactacagccttcaggaaagcaagcacgtagtcacaccatcgactcaagggctccacttgggaccaaattacatataagtatatttactggatcgcgcaatagtattgacggtaacattgggaatccacatctattgtcacaacacacggcggcttgttttgcatacaaatcttggcaataaattac

SEQ ID NO: 136241 - DNA, 783 bp, Arabidopsis thaliana
tcggtaccggggatctctagagtcgacctgcacggacgataatcacgtgcatgaatactgaacaactaagtagcagaaccatgttagagtagctcaagctcatttgaacacttacaagcttatctttcatggcaaacattattgcgcttgcatgttcagctgcattgcccacaataggaagcaaaataacactgataaaagccaccggtaggttcaatgaatcagatgctccctgacaacaatagatcaaaacagtgaccagttacatcatcgcagaggtatcagatgacctgtaatactactgatgtacatcatggtaataataataactagtaagtaattacatttttcctagagatagctgcttttaaccatttccaaatttaacatgaacattttccctggcagtgcttcagtatcaccaaaatataattgtctgtcaactttagaaagctacctttaacgaatttcacttttacagattaataaaagctgacttttgtatcctttcttgttggattagagaagaatacctcaatggcgttaactagggactcaggaagaaaagccacccagaatggtaacaccggcagccatggtactggcccccacatgccaatctcagcttcttcatcttcttccgggctatcctcgctaggcgcctcctccacacatatttccgaatttggggaaaacatgtattgcaccattccatactaaaatagtgcagtattgcaagaaactttttatcacaaggacgtggttcgccaaaggcatttctgc

SEQ ID NO: 136242 - DNA, 787 bp, Arabidopsis thaliana
tttctcacgtatggatgcacccctatattagtgtatatcattgctttaagaacttctaatttaaatgaattagtattatatctaaaaggaaactaatcaagctattgaaatatataaacttggcatcttggcgatgaagaaaccatccttcgaagttcgaaccacagcactgctattgttactattcatgtgagtactttgcatgtgcagtacgccctggccataacacgggtgtgttataacttccaagtacacaataagagaaaagcaggcccatcttataacattcaggttgatgtgcggtagtaaggatacaaggtgtcatcccacaacttattcagcctgccattttagttattttatacctatcagatccaatagtagaggtgggtagttctatgcttatttaccagtttccatgtgaaaaggtatgcccatgcctaggtgggattgacataaatagaattatcattacatacagatgtagtcataatgcagaacatgatttgttcagtgaccattttcattttttttgtactgttgtgatggactaattgtggttgatgactggctgatgtattatttggtattctcgttcatatagggcacggaggaaattcaggaaacaagatttaacactgcaatatctgcaatgatggagtttctgaatgctgcatacaaggtgaaaccaaacttatcttaatttctctagcaatattaggatttataaatattggattttgaccagggtagtaaaaattatatcctcatcatcaaggacttccag

SEQ ID NO: 136243 - DNA, 783 bp, Arabidopsis thaliana
tccccgccatcctctagagtcgacctgcagaactcctgtggatcggtgagccgagggcgctatggggatattcttcagcaaggcggaaccgccgccgcccatggtgctggtgccgccgctcttcgactaccctcccatcgctgcccgcaccaggttcgccgcttcccctctctcctccattcggacccttctgttttgtgacctgtgaggcagggaagccaattggttggtagcctcagtgtgcacgaatcgccgtacgctctgcataactgttagactagacggttgaatcgtcgtgattaatcatgcttgtcaagcaatcgcgattgatcgctcgcgtgttgtgaaatggaactgtggattggtgaaatgcgccagatcgctgacaccagttggcagtactgttgctcgtctcaattctggtagcttgctttttcttggagcacgcacatctctggcagatgccttttcctgcatagttcataagggtataaagttagttttagtccactggaaggatgaaacatcactacattgcacttagggtggcatttatgtcagccttggttcttcattgcaccagtattgaacatgcaggatggcggtgccagcatatgagctaatgtttgggaaagtctccctgcagaatctgtttgaggactactttgatcaagctgggaatatgacctcaagggtcatgttgaagccgcttgaagaccctcacgttgatttgattgctactgtatcctgtcaaacattacttggcattcctgctacggctcc

SEQ ID NO: 136244 - DNA, 776 bp, Arabidopsis thaliana
ggtgtcgtctccccgcgatcctctagatcgacctgcaggctgccgtgctccagtgttgttattatggttcagcaactgctcaaggaaccagagacgcaaaagacgtatacgaatgaaaagtgggttttaagcaagcagagggctgggtatatatatatatatatatatatatatatattctttgcatcacaagaaatcatgtgcacccacagccacagggggcacgggtctctaggtttacctggccggggtattgatctggtaggagccctgcatggttcctttctccagttgtgggtccctatacaaataaaatgaaaaaggaaaggcactgtgtcacatgcgtgtgcgcgagaataaaagccacagtactggccggcccatggttgtctgaatgtatgctagctagctcacctactacggccgtgcaagctgaaacaaagttgtatatgttaacacagttttacgttgtagattgcaatgtccgcggagtaaaatttcaaataggcaggaggtgacatatggagttgctagacatggccatatatcgatgcagttttaatttactgcttctttccttcctgttaactgacctctctccaggatctatcactaactttgtattctccttcgttgtgagtaaaaatggtgcatgtggactacgtgcccttgaattcctttaaaaaggagtttatcctgggtcgatactataaaaccgatgccaagactaaggatctcgtatttttgtcccggttgtatggaagccccgggactaa

SEQ ID NO: 136245 - DNA, 783 bp, Arabidopsis thaliana
ccccgcgatcctctagagtcgacctgcagcgggtcgacggcggcggcgtcgcagcgtactgggaagctgccggtatatgtacgtgttagctagtgaaatcgccttgggatcatcgtcagaagatctagcagctgtggcggcgccttgcttacctcgctggctccggtgacagctggccagcgtcggcgcgtgggcgtggctgcttggaggacagtggcgacgccgcgatcttttcctacgagacaaggcagacggcattggtaactcaaatcacacactggccggcaggaagcatgctgtgcaagcgcaaccgcacaccgccagcttgggcttggcattggtttggtcgagtagctagctttccgttcttctccacccatgcacgttcctagcattgaccaattcagaacacacatgccatgcgaacctctagtcaaaaacctagttattaatcacgtttaactttgcatgatcttcgatatgtgtttttttaccattaatttttttatatgtgacatattcttaaactccctcaaatgcaaggtattttcaagtacttttggacaaaggactttgcatatattttgcatgcctatataaactaaataatggatgggtgatagacagataatgctatttgcatgcctatattttgcatatatccttaagttgtactcaaatcatgcaatgagatgctacatgttctgaaatttaaatatttgatgtttaaacaagttcagatggagatacatcttgtaccaaagttatagtgctcaacaagac

SEQ ID NO: 136246 - DNA, 777 bp, Arabidopsis thaliana
gggatcctctagagtcgacctgcagcctggcagccagaatggactagcgatagattctcaaacagctgatcttgacgaaaaaaaatgacggatcgagacactggacattcggtcgccgtcggagtaaacctgatcatctagatggtagacttttggtggaagacaccgttctttctctctctgaactctgaagactcgtgacctgccgtgcgacgtcctgataccaactgcggcagtgtaccaggtcgacggggagatctgttttgctccgtaaatacgcactgatgcggttgccactggactgccgtggcgtctatgccagtgcgtttgaagtcttctttttcatctttctctctttttggttttttttaccgcacctttctctcattttttaccgcacctttctctcattttagtgagagtagttcctttcctttcctagacccaagcagacctgtgggccgtggccttgctcgagaccaacagcaaatttcggctgtgtctttgtatgtcctaacaagcccatagtggaagaccggcccggtccacgaaacccgttctctcctctccttgttaacgatcccatagaaacacgccgtcgtgcgtcattgcttacacgatagtgaccacgcacgccgcgggccggcaaaccgtaccgtcgccggaagattcgtactgcttgctgcgtttcgactttggattggacccgtccccttgcgaccaaccgaaccgcctccaatcgtctctctgaatcatgcctctcgcactgtggcgctg

SEQ ID NO: 136247 - DNA, 776 bp, Arabidopsis thaliana
ggggatctctagagtcgacctgcagtgtcacattcagaattgcatttaactaaagttgaactatcaatatgttgctccacatgaatacaatctaacttgatcacctgttcatggaaaattacttattgtacatatttgtgccatcgctttccctaactagactttctctatgttttaatatcgagatgtacaacaaatacacatggattggagtggaaattgaattaatcccacacccctacacgcacacgcattcctttcttatgcatatttgatcggatgagattattttgtttttgaaataaggcgtaatggatgtaagaaaatgcctcgatatttatataattgttttataaaaacagagagggtgagttatgaattcccagttgtccttttcaccttagcagttaatatcgtgatttagttatactatgagtgatcttaacattttcaattctttcttgtcctttctactattgaaaacaaatagatggacaataaacaagaagctgagaagactgaagcactactcctgagagtatttgattatgcatggaacaagcttcagaatggtgcttgtcgccggcaagaaatactgcataagttagaactgcgagcagccaaccataggtctctacttagcagagtaagtgacatgaaacaaaaaatatttgggcagaaagcaggtataaatattaaagggaaggtgggccagcttacacctcgcctagcaaaataaaaatatgctcccaagggttccgacaattcgtcggttc

SEQ ID NO: 136248 - DNA, 785 bp, Arabidopsis thaliana
cccccgcgatcctctagagtcgacctgcagtctgcaccccatcggccgaatccaaaaaagaatgtgaaacaaaagatcgaaagcagaagaagggtttcatgcgcgtgcacatttttcgtacttcttcttcttcgtcgtctttctaactcccttgatgggggtctcttcgttttcattcctttttcccgtaccaaacggaatggcgaataaaagcaggcagtggttggagaggagactcttgaacagatcacggccgtgtggtattttagtgtggcgaaattgcagcgtgagaagattgtgcaatggacgcaggagcagataactaatagtgcctttatcctcttgaattctgctagtacttgtctctgcacctgctagaccttgctacctaggaactgcatgctgtcatcagaagttgattgtacatacatacatacatacaaagagaattgaaaatataagattatatatagtaagaaagagtcatgtctcttagttttgttatagttaagtatgtttgaatgaactagacctaataattagctggctaaataattggtagtaaaattagctagctaaataatgggtagtaaaattagctagctaactattattccctctgtacccttgggtctcttgattttgttatatctaacttttataagttaattgttagctctagtgcattcaaacaggatcttagagctacaacatccagtcttgatagtattattctctgttactaaaatgcttgggactatgctccctaatctcagtagagctgt

SEQ ID NO: 136249 - DNA, 764 bp, Arabidopsis thaliana
cgcgatcctctagagtcgacctgcagcctagttctgttctcaccctcatgcgtatgtatttctacgcgcgattcaatgatgcaggtccaggatgtcctagaggcggcgaaggtgcttgaatggctcaaggagaactgcacggtcgagtatatcaggcgatgagtcccacgatgctgggtcaaggaaggctgctcctctgagcagcgagaaagatggtggctggtgtggcggtaggcagttttgcgagtggccttggtccttgccaatgtcaaacagcatgtgcttgtgaccagcatgttttcggtgtggctaacaaacatttggaactttagttataaatgggcacaagtgcttgtgaccagcatgttttcggtagagatgatcacattgcattagggcctgtttgtttgggattataatctctcaacattatataatccaacatattataatttgaactttataaattcatactgtatccgcttggccgatcttgcgtaaggataatcatggaaattaaaaacgctatacgaagtgcataaatataaatcaccaatcggtgtatactataaactaaatttgaggaactagtcttgcacttaaataggataaactaaaataaaataaaataaagcctgagaagcctacgaatcgccaaccatgttattatcagaaataagtaaagtcgtagctaaacggagccacgacagcgggcccgcaggcgctggcgctcagcggaggacttctggaacctggcgcgggcg

SEQ ID NO: 136250 - DNA, 664 bp, Arabidopsis thaliana
ctcgtgcctttgatgatatggtatttagtgagcatcaaatgagcaagataaaaaagagtgaggaaatatcaatagagagggagaaagagattcaacaggttgttgaatccgtaagcgagcttgctcagatcatgaaggatctgtcagcgcttgtgatagaccagggtacaatagttgacggattgactataatccccggaacgttgctagtacaagtccggcgatggtctcaaacacctccaaaaggcggaacgtaacacagagacaaggaggtatggtgatgtgtgcgtctgttcttgtcattcctctgcttcatcatgctggtactcttaatcctcaaggagattcctgttgtgacacaaggagatccctcatttttttaattcttttgaaacgcgaacaccacaatttttgcggttgcggagtgttctgtcccacaaaatgtcctgaagagaaaaacgaactgtgttgtctatctctgctcagtggcttttactgcagcctctttctgctttcttttttatttcttatggcgtttacatagggaaacattatcacttttgtattgagtgtgtgtaagttggcttcttacgagtttataatggatttatttactgtcaagaatatattaaccatgattttaagaatctgtggagaagagatc

SEQ ID NO: 136251 - DNA, 481 bp, Arabidopsis thaliana
  unsure (1)..(481): unsure at all n locations
gtcaaagaatgggactttcattgagagtgagacgtcgtggaggaagtgttagcaagaaagagatcattccggtgacaagttgctcggaggaagtggagataaccataccatcgcagtttcaatgtccgatatcttacgagctaatgaaggatccggtgattattgcctcggggatcacttacgaccgcgaaaacatcgagaagtggttcgagtccgggtaccaaacttgtcccgttacaaacacggttttgacaagtttggaacagattccgaaccatacgattcgaaggatgattcaaggttggtgcgggtcgtcactaggcggggggattgaaccgaatcccgacggcacgtgtacccggttacgggtcatcaagtctccgagatttttgagaggttatcccctttttcggggcgtggagactttaggccgggttcaatggggattggttcggaggtttagcggtttgggaaannganc

SEQ ID NO: 136252 - DNA, 486 bp, Arabidopsis thaliana
ttaaatcttatctactttctatttctttttaatcaaaattaccgttcttaactatggcgaagtggtttttcactatcttcttggtttttgccctagcctcagctttagcttgtggcgcaagaaacgtcccagtaggcctctctgaccaaaagaactacctcggatatggtggcggatattccggcgttggagacaatggtttaccctttggtggcgtcggtggaggtgtgtctggtcccggagtaaatcttggttatgggggattttggtggtgctggtggcggcttaggcggtggtttgggcggtggagcaggccgtggagttaggcggtggcttaggtggtggaagtggaattggtgccgaaccagtggagaagtaccggaggagttcatttcccttgagttgttactttggttttttaaggcgtcatcggtccttattaagctaggtctagcttaagatgatgtcataataataatttatcat

SEQ ID NO: 136253 - DNA, 642 bp, Arabidopsis thaliana
  unsure (1)..(642): unsure at all n locations
gattcaaaagaatccagttcatgatacttgatccccatgtttttcgagataacattgataaattgtcactttaaagaagattgaacaactcttttggtaggaaaccataaagccataaaancacagaatacaaagtagaacgagattgttgtattctttattcaaaaagtggaaggaaaataaagaaatcatcatttcttcttgaagaggaagtgtgcaatcatccactcgtctccattgttgtatgcgacaagctcagcaagcgcgatgaagaaggttctccagtaaaccgtccacttcactgcttcttctttcccataagtcacttccattatctcttttacggcaactatctccttatccattcctttcagccactcttcacttgtctttgcataatgcgtcccgttaacgagccaatgatccataatcgnaacattttcttggaaatataggnggagatctgctgatggcattgttcctccgttgaagaagtgtcttgtgancagtcatcgcattnacatccncaagtggtagcattgctttatggnagngttngtgncaaacagnggcttnttcctnaaccagttccnatttttttaagaggccncanggtttcaaaatnncnacaatttgggggac

SEQ ID NO: 136254 - DNA, 391 bp, Arabidopsis thaliana
gtttgcttatgagcacaagatttttgtcggtcctttttctagaaagttccccaaggctcaagtatgggttgcaccaagacaatggagctggccattgaacttaccacttgagtttttcggtatctttcgtgctaaaatcatcaaagacagggacttatctacgccatgggctgaggagatcgaacagaaagtcctaagctccccagaagttggaattggaccatatgtcgaagtagcgttctaccataagcggtcaagaacccttttagtcactgatgctgtgatcttcgtcccgcggaaacctccctcgagtatcagcaacgaatcctttgttggcctcggctaagaatggactagctgtgaaaggttacttagcaaaggtaaagacatt

SEQ ID NO: 136255 - DNA, 467 bp, Arabidopsis thaliana
  unsure (1)..(467): unsure at all n locations
ttttttttttggtaaagcaaagtgaaaactttcttgaaggagagttttgcaacagtaagtttgtttctaacaaggatactacaacaatcacaagaggatgggaacctaaagatagcagcttctaaacattctgtgttaataaaaacaatcaaccaaaatctgaaatccatcaaacctaacaaatccgcgaaaagaaaccgtatgatcatcatcagctcggaatctcgttgtcagattggctatcgcctccgaattcttcgtcttcaccttctaattcatcatcatcttcttcaccctcttcttctcctacctctccacctcctcctcctcctactgggatagacgagaagggatccttgacatggttaaccgaggtttgtatagtaactgtggaaccgcatttgttgtgtttacatgcgtgtatgaagtggttgntnncnggaataagncaagcagnacattgatct

SEQ ID NO: 136256 - DNA, 1063 bp, Arabidopsis thaliana
  unsure (1)..(1063): unsure at all n locations
gtgaccggncccggnaattncccgggtncgnacccacgtcgntccgccaagctcgctgtcgtctaaaagagcttaaaaccggaattactattcttcaatcatttgttcgtggagaaaagatgagaaaggaatacacggagttactgcagaggcatcgagcttctnctgctatacaaagccatgttaagagaaggattgctagccaacagtataaagccacagttgatgcatctgctgtaatacaatcagcaattcgtggagagctggttagaagatgtgcgggggatattggatggcttagttctggtggcaccaagagaaatgagtcagacgaggtgctagtgaaggcatcatatctttccgatcttcagcgtagggttcttagaaccgaagctgctcttcgtgagaaagaagaggagaacggcatcctccgacaaagagtccagcagtacggtaaccggtggtctgaatatgaaccaggggtgtcatccagggaagaaatttggcaaaagcagatgaaatctttgcaatccagtctttccatcgcaaagaaaagcctagaggttgaggactcagcgagaaactcggatgcatcggtgaatgcaagcgatgcaacagatttagattcaggaggtagtcattaccaaatgggccatggcaggtcaagaagtgtaggcgtgggtttaagcgtgataagccggttagctgaggaatttggacaaagagctcaggtaatttggtgacgacagaaagttcttgatgggaagtgaaatctggggtcaggtggaagcaaacttgaaccttttcttgagacggcacggtctccttttctacacgtttgatgtaactacggtttttggctttgctgctacaagtgagaaggctccttgggactgaaagagtcatgtttttcatttgccacccaaatctattggcaaattcagtaaataatttttatattatacagtatatctatttgtcaaggattccaaagtccagtgaaccattgctgtatttgaatataaatagtcgtggcaaaaacaaatcaatatttatatttctt

SEQ ID NO: 136257 - DNA, 423 bp, Arabidopsis thaliana
  unsure (1)..(423): unsure at all n locations
tcattaatgtcttcaaaggtctcaacatcttgaaaccacaagacacgtacaagacggccttacattgcagtgattgccgttcttggaggcattgctttgctcttagaagccatcacttgggtcgttgtactcaagagaaaatcaaacaactcaatgaagcctcttaggacctaagccaacaaagatctggtcaacttattaaaggttcatctgcagttgttgttattaatttattatgagctcttgtattattaatgtttatagaacaagggtgtcacatgtattattgtnctcttgttttgtagctttttgggtttgtttgttgagtattcttgggggtatgaattctttgtagggggatgaatgntttttgaaaaaaggtcctnattttacctttggaatcaatgnggttttttccagttc

SEQ ID NO: 136258 - DNA, 441 bp, Arabidopsis thaliana
  unsure (1)..(441): unsure at all n locations
tatgncggtccncanttcttnatgtgcaaggccnttgggnatccttaatctcacgccttccntcttctctgnganccgctttcntccnccntatttgaagatccctgttatcgacggggtctcccagagcctggaattggcttctcttggggtgcaagattacattggatgcgcgtctatccacggggttggaccgtcggttgcggttttcgatgcgcttggggatggaaaattggactgtgcgtttgtgtatccttcggccattgcattcaagagagcagatggatgggctgattcaacatatgaaaactattcttttggaaggatctgcttcttccttttgatttgtgttttgacaatcaaaactctctcttttgtccagaggcatagatggtctctgtaaaaaaattagtcgaaataaattaacttcaaattctcctc

SEQ ID NO: 136259 - DNA, 526 bp, Arabidopsis thaliana
  unsure (1)..(526): unsure at all n locations
gcggcggaaccgtttcctgaaagtctcccccctctaaagcggaccnctgatttccccccctgttactccgggactggctgttaccgacggtggtcacccgaggatgtacgacccggggaagtcgtgcctgagctggtcttgccgcttagaaagactagaccaagatatcgtgaggatggaatcaacggttcggagtggtctaaggttgagcggatggatccgtttctgtttgctaggaagttttctccgcaggctcttgagccgttgctgggtatggctcgaaccgtcttgttcaatgactcagccggtggtgtgtgaatggtttctctaatggtattgttgtaaattcagttttagttttagttttttttttttttcttttttgtggggaaataataattgtaatttaaatgggtagctgggaaaaacaaaaacccgagtataccattatcgtgagtaaaaaagtaaactcgtcctactcgaatctcatcataatcttcatattagcaaatggaaccaattcatt

SEQ ID NO: 136260 - DNA, 318 bp, Arabidopsis thaliana
ctggattctggtgtcaaaaatcgtaaacagacacaaggaggcactacattaagtactgggtactctactcataacaatgccaactcatcacttcggtccaatatgtataacccttccagtactgcacaccatcttgaaaatccggatactgccttatcagtacctgatccaggagactgggacccaaattacaggcaagtaaacgaagatatctctctaatttaccagttaatgaatgtcaaggttctttgtctgtatgttagtgtgtatatgatgtgtacttgaacaaatctggctggtttagcatgaattcgtgat

SEQ ID NO: 136261 - DNA, 416 bp, Arabidopsis thaliana
  unsure (1)..(416): unsure at all n locations
aaagaactatggaattacggtatcgaagaatcagagtctcacacaccggaggatccaatgcctgtggcataataacatgattcaacaatattctaatgatgtgttatcaatcaaactgaattagcttttccccaaaacatcgagcatagcttaagcagatttcatatgtgagaggtacacaaaagctgatgatgtaagttctctgcaaagccaaagttaatcggataccaaaagtaattcaagacacatcggaaagtactgtattatatcgttttttttttccttgttttggggcagaagaaagaaaggttctctagtaagactcatgacatgttgtacagagtctatattaaccttctcttgaattcagactcgtttttgtaggattccaagtataatgcaaatncccttttgtt

SEQ ID NO: 136262 - DNA, 630 bp, Arabidopsis thaliana
cgaagggatattgtcctatgacatggtctctgggaaatggaaacagttcattatacctggcccaccagacctgagcgatcacacgctggctgcgtgcggagagcggttgatgctggtgggtctactgactaaaaacgctgccacttgcgtttgcatatgggagctgcagaagatgacactgttgtggaaggaggttgacagaatgccaaacatatggtgcttggagttttacggaaagcacattaggatgaattgtctgggcaacaaaggttgtctgatattatttgtcccttgaggtccagacagatgaaccgtctgataacctacaatgctgtgactaggcaatggaccaaggtccctggctgcaccgttcctcgtgggagggaaaagactttggatcgcttgcggaaccagcgtttcatccctcccctacagctaggggcttgatcatcctttcccccctgggacaatttccctttggccaagcttttgagggttcgtattcgaaccgggtccacacaccgggttggggtcccttttttgttggtttatttcggttttgatttttcgagactgtaataatacaaaaacgttctgtattgtaataaataactttgggttgtgtggatc

SEQ ID NO: 136263 - DNA, 474 bp, Arabidopsis thaliana
  unsure (1)..(474): unsure at all n locations
ccaaaatatcctcctagtaaagagattgatgcgaaaatgcgtgatgaagcgaaaaggcaacaacctatgagggcggagaaacaagaaagacaagactctatgacgagaatatcacacgagagaaaatttntaccaccggtcaaagcaaataactctctgtcaatgacaatggagaaacaatataaagatttgaggagtagccgcgatagtttcaagtcgtttaaggaggagaggactcctcatggaccagttcctgattatcaaaatatgcagcacaacaggaacaatcaaactggtgtgagaatttcacactcaggtccattgatgagcaaccggaacatggctaagtcaacaatgcatgtgaaggaggatgcacttcctagataccctccagctagagtaaacccgaagatgttatcaggctcagtctcctccaaacattattagaacgggaagatcaaccagtcacgaacc

SEQ ID NO: 136264 - DNA, 576 bp, Arabidopsis thaliana
  unsure (1)..(576): unsure at all n locations
cnnanagttntttncntttttanaanttgaaattttagggaggggtttctaggtttttatacccaagaaaaccttggcccaaatggccccaattacacgggccattccgacttcgatcactgacctggtccgacactcctttgccttattagcagaaccgaggatgccacccaacgaaataattaaaggaacaaaataaccaagagaaaaacaaatcactcgtaaatcgcaaagattaaaagaaattttgctgataataatactaaaaacggaaatattttccacaagccaccggaatattcccaagaaaattaaagggaaaacccagggctggaaaatgtctcatctctcttcttgtttgtgtcttcttccattgtaaaaaataaaattaaaaaacatcttttgggtggtttttcagatttcagactcgaaagtttttgccggagaaagtctgaccaaactgccacgtggcaggacgcaacgttccatgaggtaggaggacgtcggtcagaggccggttactcggaaagagagtnatttgccgatgagaccgccttttggnttgncnggttctgt

SEQ ID NO: 136265 - DNA, 599 bp, Arabidopsis thaliana
gccggagaacaaaaaatgaagcatctcatccgccgcctctctagagtcgccgactcatcctccgaattctccatccgccgttccacctcctccttccgcaaccgtcgcggtcaccatcgtctccacgcgccgccgccgcctccgtggtcaatatgtccagctagaagagtcaacaccgtccccgctggtcacgtacctgtctacgtcggcgaggagatggagaggttcgtggttagcgcagagcttatgaaccacccgatcttcgttggtttgctaaaccgatccgctcaagaatacggttacgctcagaaaggagttcttcatatcccttgccacgtcatcgtgtttgagcgcgtggtggaaacgctccggttgggagggtttgaagggtccggtgcatctcagagaatcttgtggcttcgttgctctccggtgatgagttgatacctgaaactacaagagtagcttttgaaggaggatccaaaatcggcggtttgatattttcctctggttttctctgttttctttcaaattttccggtttttttactttctcggttttgtaaatatataattatttttacaccaggtttttttttt

SEQ ID NO: 136266 - DNA, 409 bp, Arabidopsis thaliana
  unsure (1)..(409): unsure at all n locations
ttttttttttttttttgcaaaaagatatcgagtcagaatgcncgatcacacaattatacaaaacactgaattaaattcaaagattcactagaaacctcggtttacaaatactttaatcacacaattatacaaaatcaacgaaatttaaataatacaacacttacagaactaagacgcatacaagtcaacttcgacagattataccaaattaaaaaacaaaaacatcatcaatttgtattaccttgagagaaacaacgaaacaaagagagtgactcaacggatttttcttgtagagggagaggacagagatgatggataggaggaggnggacaaccgnngcaaacaatgagacggcgttgctcctccaccatgncggcaaacttgtcgtggttatgancagattttgccc

SEQ ID NO: 136267 - DNA, 502 bp, Arabidopsis thaliana
  unsure (1)..(502): unsure at all n locations
tttttcttaaaataaaatttaagagcttgattaagttttgatcttcattagctatctataagatagtcactagctagctatcttttattagtgatagtaacaaaacaagtaaagacagctacgaagattattagaaaaaccttaagatgattaaatttgaaacgtacgagtatttgaactccactgagctagacgttaagaaacaaaaagaaagagtcaagtgagaactaatgttgctttcgtcttcttgaaacaatctccgacgcccaagccttgcctatatcagtctggaacttacctgctgttgattggaaaaactcttctagatctttcccttgctcntgntnatattccaaagcntgtagtatcagctcaaactttatcgaaatcttttaacaactttgggctcaggngaagaagtctccttcgggatnctcncccaaagctcagcggtttcttttgctccntncngcctccacccaaagngtttggcacaatgggc

SEQ ID NO: 136268 - DNA, 377 bp, Arabidopsis thaliana
tttttttttttttttccatcaaaactagtcaactttattacacagctccagattttggacatcaaaggctcagtgttgtcatacaaatgcttttgtgacttggtctctatcaaaactagtcaacggttttacaaagtaggtagagaatgttttcaattaccagctagagaaatctttaaaccctgtggaggctgacgcagtaggtttttcttttcttagacactccaatggttgaaatatctgagtctagggaacctttagtgtctttagtggctgtactactcatagctttcaagtattttccgacaacaccgcaccggtccagcttctggtggttcctgatcccgggttgctgtaccagggcccgatcttctcaa

SEQ ID NO: 136269 - DNA, 522 bp, Arabidopsis thaliana
  unsure (1)..(522): unsure at all n locations
agaagatgaaggaaggagaaccgcaggatattctctcatttccaacgcccaaacctcgaaacgaatgctgacatcattcacatcaagatgttgaggaacaacacttttgtcacggttacagattccaaaggaaacgtcaaatgcaaagctacatctggtagtttacccgatctgaaaggtggaaggaagatgacgaattacacagctgatgcaaccgctgaaaacattgggagaagagctaaggctatggggctgaaatctgtggtggttaaggtgaacggatttacgcatttcggaaagaagaagaaagctattatcgcgtttagagacggtttcacccaacctcgaggtctngatcagaatccggttaggtctnccatcgggggccactactagggaagctcataattgttgcaggttaccacgggaancgtcgggtgttnaaagaaaacggccnntgtcgtnggctcttgttnattctttggncccntngaaccnctttttttttgnaagtattanttt

SEQ ID NO: 136270 - DNA, 245 bp, Arabidopsis thaliana
  unsure (1)..(245): unsure at all n locations
ttacttctcaataggaaccattcagtttacaaaacacaacagagaggtaagtcacgcatcgagaacnnnnggttctttttcttttttcctttctcgtttaattttggagtcatcaggtaatggttttgagtttgtcttgttgtgtctatagaacatttgtaacatcttttacttaagaggtatttaatcttctttatgtcaaagagtttgtctctgtttattggcattttcgtctaaaaaaaaaa

SEQ ID NO: 136271 - DNA, 588 bp, Arabidopsis thaliana
  unsure (1)..(588): unsure at all n locations
ccccgtgcaggaagagcatgactgctgcaattcgtgagaggatgttcgtgaagcatatagaaagaaaggttggggggttactaatccagatttgattgaccagtgtaaacgagaaggttttctacaaagagtaaaggatgaagaaggtgaagggtgtaatatatatgggttcttggaggtcaataaggtggctgggaacttccactttgctcctgggaaaagctttcatcagtcgggcgtgcatgttcacgatcttcttgcttttcagaaagacagttttaacataagtcacaagatcaatagacttacttatggagactactttcctggcgtcgttaaccctcttgacaaagtcgagtggagtnaagncacacctaaatgctatgtaccaatactttatcaaaggttgtaccaccagtatncacaggtntcagngggcacacaattcaatcgnatcagtttcagtgcccgacatntaaagggctcagaagnaggnaactgaatctttcccggggtttcttcttcaagnccttcccatcangnacatttgggggccaattatttgncttttngggttttcccnagtnc

SEQ ID NO: 136272 - DNA, 353 bp, Arabidopsis thaliana
gtagcttttaagaaagaaggaaacatcatcagaagcttctctctcagattgacagaagaataagattccaagctcctctctttcttctcttaaagaaaagatgttgtgtagaatggtggtggtgactggccggaaaaagaacccccgttcggttccggtttatctgaatgtatacgatctcacacccatcaatggctacgcttactggttaggacttgggatctatcactctggtgttgaagttcatggagttgaatatggttttggagctcacgatcattcgactaccggatattcgaggtggacagagcaatgtcggttcacattaggagtctatattgattggagactga

SEQ ID NO: 136273 - DNA, 597 bp, Arabidopsis thaliana
taaactcagaaacaaacaaaagatcaagaagaaacatggtgatgatcaagaccacaatggtttccctttttgctctagcggcggttctcctaatgattctagccccggcggcagaagccgtgacgtgctcgccaatgcagctaagcccatgtgcaacggcgataacgtcgtcttctccaccatcggctttgtgctgtgcaaagctgaaggagcagaggccatgcttatgtggttacatgagaaaccctagcctccgtcgcttcgtcagcactcccaaccctcgtaaagtctctaaaagttgcaaactccccatcccaaggtgttagaaagtcagaaaagtgtttgctgtgtatgatcatcctatatatgtttgaatcctactgggggtgtgtgtttaaggatgtttatttatgcccgctataagtagtagagttaaataagtgagtggtactcttggtgatgctttgtatgcatcttatttaaatgggtgctatctcattctgggtggtggtgatatatatatatatacatgatggtgtaataactgagatgatataatatatggaaattatatttccaaaaaaaaaaaaaaaaaaa

SEQ ID NO: 136274 - DNA, 304 bp, Arabidopsis thaliana
  unsure (1)..(304): unsure at all n locations
gagagagagaagaaatggattcatactcttcgccgccgatgggaggttcaggtagttcggtttcgcccgaagtaatgatggagtcggtcaagactcagctcgctcccgcttacnccgaagagttaatcgagactttgaggacaaaatgttttgacaagtgcgtaacgaacccaggatcaagcctcggcggaagtgagagtagctgtatttccagatgtgttgaacgttacatggaagctactgcaatcataagtcgttctcttttcactcaactttgatcattccagctacctcttnctttttt

SEQ ID NO: 136275 - DNA, 581 bp, Arabidopsis thaliana
  unsure (1)..(581): unsure at all n locations
ctaaggttcaactatggcgactcttcgtttcactctacttcttcttgtcttcgtcgtcgggatcttcttctccttctcctccgtttctcatgtacgtgcaacaagtgaaatcaatctcaggatcgaaccattttcctcgccgttcgcgacggatcttgcaaagctgcaaactcaaattggctacaagtttaacaacatcaaccttcttcgccgtgcaatgactcatgcttctttttctcaagagaacaacaaagccttgagtatctttggaacccatatcattgaaaccgcggtctctcttcagtttctcgctaaagatatcgatatttcctcgaaagcactgggccgtttgatatcagangtttcaaatgtggaatcccccatgtgctctttganngaaaaccggttgggttttggggaaaaaataatccagaatttctacttaagaaagaatnccatcgaaactcgggccattccttttgtttctggcttttagggcaanctttttgggancctattaccttattgatgntngaacngggtgaataaaaccctccnagggtttccntggaaaggtaatg

SEQ ID NO: 136276 - DNA, 492 bp, Arabidopsis thaliana
  unsure (1)..(492): unsure at all n locations
aaggngttttctgcgggagtcggatccttgtancttgggatacccagcatgcttgtttgngacattcccaacttgagtgccagtcagaccattaggcttcaactattcgggagagtatattgcttcagccagtgaggatttattccattgatattgctaatgtccaaaccgggcggacggtgcatcagattccatgtcgggcagccatgaacagtgttgagtggaatcccaaatacaatttacttgcatatgcaggtgatgacaagaatcccaagtataatactgatgaaggtgttttccggatatttggttttgagagctcgtaggaacagagcactgaatcgggaaacatgatacacaactccacttgattgttccttgttgagttagaaaaagtttatgtgcctagtgtacctaaatatgtattgtcagtatatcaagttggaataatcttacagtatcactaaatacattgaaagtttgcagttcaaa

SEQ ID NO: 136277 - DNA, 400 bp, Arabidopsis thaliana
ttttttttttaaagaaagatctttgccaaaaacttctgagttggttattacagatcattaagaatgctcgaaaaagaaattctcacgtccgtattgaaaaaccttcttcaagacactcagttctaagatcttccatgagaccctgaaacatagatggcatcgctcgtcacaagcagcatccacacctaagtgaagcatccttttcatgggatcagcatcatccacagtccatgcatacacctctgtgtttctccggagcggacaactctatctaattcttcatcgcaatcaggggatgataatctcccacaacccgtagctcccctcattctcagcaggctgtctctcgcccccagacaagggctcttaccatcacaaatgtctccccaccatagtatct

SEQ ID NO: 136278 - DNA, 400 bp, Arabidopsis thaliana
ccggggcaagagaggttctaagaacatacgaccaaatcctctctagccgtacccccactaactcgatacggtccattaatcacgacaaggtttccgttgtctggcttccaccatcgtcgtctcgttggagacttttgagaaaactgtcggcgactcagctcttctcgcctcagcgtatcgaagccacgaaaacgttgagggagaacaaggtgaaggaactcgtgagctttcatgagtgaaagcagcgagagagaagaagctgttgatatatctcgtgctaccttcatcactgctcttaatatcatatcaaacattctgttttctgtcgatctcggtaactacgactcgaataaatccggtgtgtttcaagacacggggattggtgtcatggaagcttgtc

SEQ ID NO: 136279 - DNA, 563 bp, Arabidopsis thaliana
  unsure (1)..(563): unsure at all n locations
aaacacaagtagatgtaatatatattatgaattcagtgaaacaatagttaaaactcaagttgatcaatcatcaatagcatgtgagcaataagtgtcaaaagagatacacatacacatcaaaccccaacaaatacattccttcatgtacactgattttacactacctcttcaaggaaatcatggatcataatgtctattggcatctaagcaagtccacttaacatatccatagtgtgttggcttctacgtctaaagccgttccccaaaaattcaagattgattgacgtattgaacaggaacaagtcccgccatcttcccatctcttccagggccgcttcttctttacgtaaaaccagccatcaacttcatactctatctccaattcctcttctgccgtcaagtttagctcatcatctcctcgtgctgtgaagcatagagcgtgttccaatcttggacagagttggggnggtctcacacngntcanaatcggacagccngggnaggtccaagtccgntggggcagaacgaagggggggctnnctatggggcngctcatgggggga

SEQ ID NO: 136280 - DNA, 490 bp, Arabidopsis thaliana
  unsure (1)..(490): unsure at all n locations
aagcaaaacatacatcaaaacgctaaagtttaaacccctcgccatcatcagatcttcagacttctgaggatcatggacaaagtgatgagaatgtcttcagagaaaggagtggtgatcttcacgaagagctcatgttgttcttctgctacgccgttcagatcctgttccgtgaccttagggttcaaccaaccatccacgagatcgacaacgacccggactgccgtgagatcgagaaggctcttctccggctcggctgttccacggcggttccagctgtctttgtcggaggcaagcttgttggctccaccaatgaagtcatgtcccttcaccttagtggctctcttgtcccattggatcaaaccctatcagtccatcctttactagcaaaattaaaccaactcaatatataatatctaattattagctagtgagaataaacacagttacagctagagtgtgagctagctagatattcagtngaaagtcgtct

SEQ ID NO: 136281 - DNA, 307 bp, Arabidopsis thaliana
actcttcatagaatcagcggatagacctggactattagttgagctggtgaagatcatttcagatatcagcgtcgctgtttgaatctggagaattcgacaccgagggtttgttggctaaggtgaagtttcatgtaagctacaggaacaaagccctaatcaagcctctccagcaggtccttgctaatagtctgaggtacttcttgaggcgtccatcaactgacgagtcaagtttctgattatgcccatttttcaaaatctcaagtctcattcctcgtgactactatttttaccactttttttttttttt

SEQ ID NO: 136282 - DNA, 403 bp, Arabidopsis thaliana
  unsure (1)..(403): unsure at all n locations
aacttaaccacaacctaatccacaaaagagttatagaatcatctgatggcgtctactgagaaccctgaccctgaaactggcaaatctgaaccgattcccgcgtcggctacaccaccaccctcatcagccgccagtttcctagattgtcgtaaaatagacattataacaagagttctgcttttttccgccactctgactgctcttatagtaatggtgactagcgaccagacagagatgactcagctccctggggtttcgtctccggctcctgtctccgccgagttcaatgactcgcccgctttcatatacttccgtgggttgctctcgtggtagctaagtttctatgcgctcatatcaacacctgtctncccctctctactcttgaaatctgaggtcactgcac

SEQ ID NO: 136283 - DNA, 781 bp, Arabidopsis thaliana
  unsure (1)..(781): unsure at all n locations
atncatctatcatctatttgatttgtttaaggcttacattgagaatatcaaagaggagaaaaagaaggaatcagccgatgaggcagtcttcccatgtgtccttcagattttacctaactgtgtgttcaataagaaagacccaatagtccttngagttgatgtcatcgagggtatacttaagattggaacccccatttgcgtccctggcagagagttcatcgatattggccgaattgcctcgattgagaataaccacaagcctgttgactatgcaaagaagggcaacaaggtggcaataaagattgttggttcgaatgctgaagaacagaagatgtttggaaggcactttgacatggcaaggtgagctagtgagtcaccatatcgaggagatctatcgacatactaaaatctaactaccgggatgaattatcgttggaagaatggaagctagtagtgaaactgaagaacatcttcaagatacagtaggagattccaaatgtctactttggagcttgaaacaccctcacatgncttggttatgccgtgtctgcggccgatgccaggacaaatagatcggcctccctggttcctagccgggagaaccttccacaggagattttggaagnggggccagagaggttttggtttttgggttaattccctcccttttttnggccttccccccnggaaaggncggnaaatngggccaggaccnccagctggngaatcccngggggaaaanncctngggccttgggaaaccccaacncctttaaanggtt

SEQ ID NO: 136284 - DNA, 434 bp, Arabidopsis thaliana
  unsure (1)..(434): unsure at all n locations
catgatgtaccaagaagcagcactcctctaagttctcctcttcgtctcttcgaatgtcgtcttatcggccccagtccgcgatggtttattaccaaacggcaacttcgagttgggtcctaaaccctcccaaatgaaaggntccgtggttaaggaacgaaccgccgtaccaaactggaacataatcggctttgtggagttcattaaatccggtcagaaacaagatgacatggtcttggtcgtaccgcaggttcctccgccgttagactaggcaacgaagcctcaatcttcccaggaaaatatcccgtcctaccctggccgtctcttcttcaataacggttcagcggcgcttcggaaccctgcgcgcaagacggggaggcttcaattatttcccgtgacggatgagtcaggtgtgatccctattcagacaatgtacg

SEQ ID NO: 136285 - DNA, 445 bp, Arabidopsis thaliana
  unsure (1)..(445): unsure at all n locations
tgaaaataaagaacagtacagagcggaggaggttaggattcttctcatgcgccaccggaaacccaatagacgactgttggagatgtgatcggaattggcatctccgacgaaagcgtctcgcgaattgcgcgatcggattcggtcgtaacgctatcggaggacgagatggtcgttactacgtagtcacagatccatctgaccacgacgcggttaatccacgaccaggaacactccgtcacgctgtgatacaagaccgtccgttatggatcgtcttcaagcgagacaatggtgattactctaacctcaagagctaatcatgaacagctttcaaaaacaatccgatggaaagaggcgtgaaccgttgcaatccgccaggcgggtgcttgttatttacgngttcangtattttttcggnntanttatcannccntgggggttaaatgtt

SEQ ID NO: 136286 - DNA, 621 bp, Arabidopsis thaliana
  unsure (1)..(621): unsure at all n locations
aagacatgggcaaaatggacacagctctacgttatcttcaagaggctttgaagaaaaatgagagacttcttggtcctgaacacattcagactgcagtatgctaccacgctcttgccattgcgttcaactgtatgggtgcattcaagctctcacaccagcatgagaagaaaacatacgacatacttgttaaacaattgggagacgatgattctaggacacgagactctctaaattggatgaagacgtttaagatgcgtgacttcagatgactgcacaaaagcagaaaggacaggcagctaatgcagccaacacgcaaaaggctatcgatctcctaaaggcacatccagacctgatacatgcgttccaaaacgcagctgctactgggaggacaaatgcactgaactctgctgtccttggggagactcaaccacggggcagaggttttaatgaaagagcactcgtgctcagctttaagttagganggaagcagctncaaaggggctnctggttcgcccccagggtggtgttccagttnaagcnttncaccggttttttagttcaaannntggtnaattccgccnagttttgntttngaaaggttngggnaacggggngggaaag

SEQ ID NO: 136287 - DNA, 575 bp, Arabidopsis thaliana
ctttcccttaaaatcaacagacagaaagtgagtgttatagacttatagtgagaaagagataaagatagaaagaaaagagagaaaaagagagaatgagatttagtgatattttctgctcttctccggcatcaaccgccgtacgacatagtacacttcaccacgacggaaatgttaccggaggtcgcagatctttccaaagccacctccggagccaaaaccctagtaagaagaaggataaaactgtcccttgcttctcttccgagatgcctttaatccctattcctcgtcacttgagctgtagaaactcctttgaatctccaagcgggtttcgtccgaaaatcgcttcggctcgcggtagcgttgttcaaatccgccggaaaagctctgctgacgtaagtgacttgaggagatcaaggagttctctgctaagatcatcggccaggtatcttttaaaagatcataagtctttgaaaggtgatgataaggacctctggttatcatcggatcgttctaaagatttggattctttaccgcgaaccgcaacggtaacttcttcagcctcaacatcttcttcg

SEQ ID NO: 136288 - DNA, 400 bp, Arabidopsis thaliana
cattcgttgatgaaatgtacaagaggctgaacgaaaccattcaagactatcaagttatcatttccagatggccagaatatatctttgttctggagagtgccattgctgatgttgaaaaggcaacagtggaagctctggagaagcagtatgcagatgtcttatcacctctcaaagaaaacttggctccaaaaaaactaagcttcaagtatgtccaaaaactgaccaaaagatctgtgattccatatgtagtcccggatgagctgggcattctattaaactccatgaagaggatgcttgatgttctacggcctaatatagaggctaaatttaaagcatggtcttcatgcattcctgatggtgggaatgcagctcctggtgatcgtctttctgaggtgacagt

SEQ ID NO: 136289 - DNA, 371 bp, Arabidopsis thaliana
  unsure (1)..(371): unsure at all n locations
gactagttcttgagtttgacttgttaaacccctaaaaatagtacctataagaggcttctttttcaacttctcattcttcatttccggcgaagttatggaccgatcaacgccggaacataactcatctccctcacacaagcgtctaagcgtgagtttctcgtctcaatgatggttctctgcgccaggcatgcgaatcggctctcgaagaaactaaagctgaagtcaaagaagcgaacttgcagcggcggagagggtggaggagaaagattccgatggaatatgataagctcgtcgatgagttctcctcggccaaaagagttgttcacggctttaagcaacaaggcggtgaccatggtcccccggnaaaaacc

SEQ ID NO: 136290 - DNA, 512 bp, Arabidopsis thaliana
  unsure (1)..(512): unsure at all n locations
ctctcaattcttttactgtttattttctttgtaatcaacaacagtttaactcttcttcttcttttctttatcaagaacagtagtttctcaatncttgattatgatactaagcaagagacctcatctaatgatccgtaaattgtctgagatgttggttccaagaagcagatctgctgctattaaaccggaggagtacacggccagtccgagaagtccgttggatttgaacttcccctccccggttcactcgaagcggttcggttctggtggtgtcggtttggggattgttgctgcgttggaggaaactagcaacggggcttaaccggccatgatcccgtttcgttactccgcgagattccagggtgcccggaggattgatcttttcgggattgagggaatacactttttttttacggggcccaaaaagggggccggcccaaaggtntntttacaaacggncggccgggggtttaaaatttntntgnaaaaangntttttccgggggggttnna

SEQ ID NO: 136291 - DNA, 403 bp, Arabidopsis thaliana
  unsure (1)..(403): unsure at all n locations
atcggcaggaatcttttatatgttatgtataataataattgagaatatggaaagagtatgtaagttttgtaaagcgtatagagcagtggtttattgtatagctgatacagcaaatctttgtttaacatgtgatgcaaaggttcattcagctaattcactctcgggacggcatttacgtacggttttatgtgattctggtaagaatcagccttgtgttgttcgatgttttgaccataaaatgtttctttnccatggatgtaatgataagtttcatggtggtggctcttctgagcatcgtagaagggatttaaggtgttatacggggttgtccccctgctaaagatttccccggttatgtgggggtttccggttatggatgacgctgaatgatgnttcgttagag

SEQ ID NO: 136292 - DNA, 380 bp, Arabidopsis thaliana
  unsure (1)..(380): unsure at all n locations
gtaagaacatacacaaaggttaaaaatttgctccataacagaactggaataacatatgatgctgagggaagaatagatatgagtgatgattggtggaatgancgcattaaggaatggcctgcagctataaagtatagaaacaagcttgtaccaaacatggatgtgtttagagaggagttttgtccaaatcttgttactggagcagagggatggagcgcccaacaaggagaaacaagcttagattctagagttggtccagaaaatgatgatgaagctgattcatttatgccaccaccaccaccacaagcaccagctgtaggatcacagattagagcgggaagttcatcacagttaagagcgggaagttcagggtcaaaaag

SEQ ID NO: 136293 - DNA, 404 bp, Arabidopsis thaliana
  unsure (1)..(404): unsure at all n locations
actggaaattttattaacagatggtgccagatcagcctttgggaagcgtttgatatctgcaggaaaaaggttccagggcatgggacaatatgccaaagattgcgaaangatgatcacaactggaggggtcttatctgcaaaaacatcatctgtttcagtcagcaatgaatctaagtcaggaacaaggatgtttaagtttggggagcttcaagttgctgtgactccagagaaagcctacaccggagctgccattgcgttcatctacgggatactttcatggcaaatcagtcaagggatccgcagcataccagaggactcattgcagtatgcaaatggcaatgcattgctaatcggcaagtcttctaagaggggctcttctagctcttttttattggggcaaccgg

SEQ ID NO: 136294 - DNA, 444 bp, Arabidopsis thaliana
  unsure (1)..(444): unsure at all n locations
agacttcagagttgaagttgaagctataggtcacgttcgacataaaaacttggtccgccttctcggatattgtatggaaggaacgcagaggatgctggtgtatgagtatgttaacaatggaaatttggagcaatggctccgtggagacaatcaaaatcatgagtatcttacatgggaggcacgagtgaaaatncttattgggacagccaaagcgctcgcgtaccttcacgaggcgattgagccaaaagtggtgcacagagacattaagtctagtaagcattctgcttgttgacaaattcaattctaaaattttctgactttggncttgctaaactactttggtgctgatagnggttttataaccccctagngttttggggaccntncggttnnggagctnccnngntttncgattncggtctcttnnttngaaaagggtttttt

SEQ ID NO: 136295 - DNA, 549 bp, Arabidopsis thaliana
  unsure (1)..(549): unsure at all n locations
tnagtccgtcggatcccgggngccccngccgtcagttccctcatcaaaggaatactctgcaacttcactcctgatgagttctgtccagatcaagtccccggagctgtcctagaagagcttaatgctgcagagagcattggtgataggaagctatcagaagcaagcttcccttatgcagcttcttctgtttcttacatgcctccatcgaccatggatatagcagaaaaagttgcagaggcttcagcaaaattgtcaaggaatgtgtctatgatacagagaaaagggtacacaagcgacgaggagcttgaggaactggactctcctcttacatccattgttgacaaagcgagtgacttcactggttcagcgacttcaaatgcaagatacaagcttcttcgacaagtgtgggtttagtttggaaccaagtcgaactgtaagtagtatgtatgtggttggtgtttggtattgcaaagagaatttggttgacttataaaaaagttgacttcttcacctaaaaactcataaactcaaatcaaagcttctcgaaag

SEQ ID NO: 136296 - DNA, 498 bp, Arabidopsis thaliana
  unsure (1)..(498): unsure at all n locations
ggggacaccgattctnaaagcacaagatgtgcccacgaaattttcagggaacaaaggtgaagctgttgttgaggcagagctagttgttgatggagtaagctggaatgtgacgtgtgttagtatgggcaatcctcactgtatcacatttggtaaaaagggtggaccgaatctgaaagttgatgatttgaacttaccagagattggtccaaagttcgagcatcatgaaatgttcccagctcgaacttaacacagaatttgttgaggtcttatcacgttctcatttgaaaaatgcgtgtgtgggagccccggagcaggagcaactttggccttgtgggaacttggagcttgtcctctgggttgttgcagcaagtccctttgaaggtccgagccgacaggaaatgcacggtggatctaccgggcggaccatttggagatagagtggaaacaggaagncaaccatatctacatgacgggtcctgcagaagctgttttctatgg

SEQ ID NO: 136297 - DNA, 894 bp, Arabidopsis thaliana
  unsure (1)..(894): unsure at all n locations
ttctaagtacactctccgtcttctccaccgcgacagattcccttcagtcacttaccgtaaccaccaccaccgtctccatgctcgtatgcgcagagacacagacagagtctccgccattctccgccgcatttntgggaaagttataccttcttccgattctagatacgaggttaacgattttgggtccgatattgtttccggtatggatcaaggaagtggtgagtatttcgtcagaatcggcgtcggaagtcctccgagagatcagtacatggtcattgattccggtagcggtatggtttggggtcaattgtcagccttgtaagctctgttacaaacaatccgaccccggtttttgaacccggctaaatccgggggtcttacactggggtctcttgtggctcttccgtctgtaccccgtttgaaaaccccggttgtcactccggtgggtgccgttacgaggtcatgtacggagacgggtcttacacgaagggaacgttagctctcgaaacgctgacgtttgctaagacggtggttagaaacgttgcgatgggatgtgggcacccggaatagagggatgttttttggagcttgccggtttattgggtatcggaggcggttcaatgtcgtttgtgggtcaattaagcggtcaaaccggtggtgcgttcggttattgtttagtgagtcgtggcactgactcgaccggttcattggtattcgggcgggaagcgttgcccgttggtgcctcgtgggtccccttggtccggaacccncgggctccaagtttttactacgtttgggtcaaagggcccttnngagtaggaggcnnccggattccntnanccgatggnntttttaaccntnnntaaaaccngttaccgtgggttttgnttantg

SEQ ID NO: 136298 - DNA, 454 bp, Arabidopsis thaliana
gaagcagagagagagagagtgtgagagagaaagcagcttcttcttcttctcctcctcttctcccttatgtggatttcaaatccttctctgctactctctcttcacatttctctaccaacattcttcttctgacactcaacacacacactgcaacttccacagctaaatctagcaacaccaagtcaaaatccgccactaacgatgcttcttcaaaacttctccaacaccattttccttctctgcctcttcttcacactcctctccgccactaaacccctaaatctcactctccctcaaccaacacccttccccctggattccgtcggtctccatggtcatcacgggggggtaaatggatctctttttgcaaaggaggcaactaaggtcaccatcatcatcctcatcatcatcatcctcctcatcatcattcctcttgccgtaccgggaacccaat

SEQ ID NO: 136299 - DNA, 474 bp, Arabidopsis thaliana
gtaatgttgcaaccgtggatagagaagtggatggaggtcttgagactcttaatgtagacttacccgctgtgataacaactgatttgaggctgaaccaaccaagatatgcatcactccctaacataatgaaggcaaaatcaaagcctataaagaaaatgacggtgcaagatctgaaagtagacattaaatccgacatagagatcttggaagtcacggagcctccaaagaggaaatctggggttatggtttcttcggtggatgagttgatagataaacttaaaaatgaagctcatgttgtttgaacggaagaaacatttgtctttttcccattctgctacacacttctttcttcttaatctaccgttgctgttttcaggcaatcaaagtgggaggtaaattaaataaattcaacgtgtgggtccttcgcttattccagtaattccaatggtcttccactgtaaaaaaatccttcct

SEQ ID NO: 136300 - DNA, 478 bp, Arabidopsis thaliana
agtagagccactggtgaaggactttggaagcagatggaagacagcgattgacttgatggacaaagacatcataactcccttcagtaactccttgtgtggtatggatattttcagagctgcattgacacaactattgccctattacacaagactcacagactgcatcaagaagatagatggtggatctgctctgaatagggatcttgtctccatccaatctatcatgtacgagatcaggaaatactccaagactttctgaaagatagcatatgtggctccttaatgaagagtatgtaagataagtcaaaattttcaaagtgaatctaaagccagtattatgggtcagtaatgtatctatcttcaaaccagtaagagttcctctaatgtcttctttgctaaatctcacatacttgccatatgttgatcattcataatgacaagcacgtctcgttttaagagccattcgttacattgacat

SEQ ID NO: 136301 - DNA, 571 bp, Arabidopsis thaliana
  unsure (1)..(571): unsure at all n locations
gcaaattgaatgatctgtgattttgggctggctcgcgtttcttttaacgatgccccaaccgctatattttggactgattatgtagctactcggtggtatcgtgcccctgaactctgtggatcgtttttctccaaatatacccctgcgattgatatctggagtgtcggttgcatttttgcggaaatgcttttgggtaagccttttgtttcccgggaaaaacgttgtgcaccaattggatctaatgactgactttcttggtactccacctcctgagtcaatttcaaggattagaaatgaaaaggcgaggagatatcttagcagcatgaggaaaaaacagccagtccctttctctcataaattccctaaagctgatcctttggctcttccgccttntngaacgcctgctttcctttnatncgaaagaatcgtgcatcagctgnagatgcactagctggtnccatatttcaantgggttgtcaaattcagnggngtgacccaacaancanaagccaatttcaaaaggctngaattttnactttgngggaaanaagtttgttaaanatgnttncag

SEQ ID NO: 136302 - DNA, 390 bp, Arabidopsis thaliana
ggacaagtcgaaaaggaaacaattagacagttgcaaggcaaagagacaggactccgtgaacacggtgagttcatcaaagtccgactcatcccatatagagagctctggcgcaaaacagctgacgctaaggttcttatgagcattggtctctatgaaatggctcagcgagagggtcttgtgtccagccagagactgaaacccaactcttgatcgcctacaattctctgaaatatacaataactggattcagtcaaccagatgcgatagattgagattaggacgttcttatggttgtgcaaaggagtttttagataaatgttatcgctttataacttggtaccatgacaacttgggaacttatctttagaaccaaaagattttgccaaaccc

SEQ ID NO: 136303 - DNA, 382 bp, Arabidopsis thaliana
  unsure (1)..(382): unsure at all n locations
ctacgtctgagaggaggtgcgaagaagaggaagaagaagacgtncacgaaacctaagaagattaagcatacgcacaagaaagtgangctagcagttctgcagttttacaaggttgatggaagtgggaaagttcagaggttgaagaaagagtgtccttctgttagttgtggtcctggaactttcatggcgagtcatttcgataggcattattgtgggaaatgtggaactacttacgtgttcaagaaggctgatgaagagtaggttatgtctttttgcttttggaanttagattgttttttttttaattcagatattttgagatggttttatactattgagggatggtttaattgttgcataatacattatattatctttgatt

SEQ ID NO: 136304 - DNA, 462 bp, Arabidopsis thaliana
gtttgttgaggaagacaatggagactgcaaagaagcagaacagaggttttgaggatgggaaaaccacaagtggggaggaagtgaaagcgctcggggaagagatcgcggcgttaaaagcgaagataaagacgttagaatcggagagtgaaagtaaaggcaaagaattgaaaggtgcacaaggtgaaacagaggctttgagaaagcaacctgatgggtttcttatggagtatgataggttgcttgaggataatcagaatttgaggaaccagttggagtctattgggcatagtcctgagggaaagaagggtatgtaagagtaaaaactaaggattctgttttgtagagaaccaagtaactataggaaatgtggttttactgatttttccttcatgtaatatgcaatatcgtctcctcttttgaatgtattttactattatattgcaatctagtaagtttggaccc

SEQ ID NO: 136305 - DNA, 646 bp, Arabidopsis thaliana
caaattcaaatttcgtatgaacaaaacataaattctcaagaaattaagttgtgcaaaaactttataaactcagaaaagagttgatctaatactaaagtcgaattacattttaaaaaggtacagaaatcaaaaactctagcacgaaattgtccctggatccttttgatgagctctatgaggatgtgtacctcctgtttacagatggtacctagtatcataaatctgtgttgcgggaaaaagacgggagaggcacggcttcttgaggccgtagtatcacgagcagaccgaacatcccgagcatcgagaacaagaagccatttcagaagcttgtagtaatgcgtgtggaaaagttagtgagaattcgtctgagaaatggagtccattcttatctgccatctccaccattacagttcctgttgttctcactcccacagttggtagttttatccggtattttccagggcggtcatagatctggctctgcgttatcctcctctctccctggtaattgcctggaaccaacagcgtcgtagtaacgttgtagggtgcttgtgaaccagatggatatctatatttatcaacgatctcgatctcagcccagaagtttttgccttcctcatcacggaaacctctggtcgaatgcgtg

SEQ ID NO: 136306 - DNA, 470 bp, Arabidopsis thaliana
ctcaatactaaatcaagaacattgtaccggataatctctggtcgtattattgcaaggaatgtgattacgctacgcatttacactcatgtaagaaagaggaagaggcaaagaaagaagatcaaaaaggagaaggaagtaaaaactcgatgaattcggagttagctgcaatgttagaggctcaaagagaagtggagaggatgcagattgagatgcatttggcgatgcaaagtgctttgatttcgaaaaaggcgaataaggcagctctcaattgcatctaattcgaagaagttgggattcttcaaattctctttacttgtgtctgtttttcttctttttgttgctttttcttgatttatgttgttgttgctcctgcaaacttttcatgttgttgttgttgttgttgtttttctgttaaattgttatctgaaataaaagaattatcagtttttttaaaaaaaaaaaaaaaaaaa

SEQ ID NO: 136307 - DNA, 574 bp, Arabidopsis thaliana
cgtgtgggttgagaggcatgatattgacgaggaaactgcgttttcctttgttcttcgtttagctgacaagaatctccttactatagtgaacaatccgaggtttggcgatgtgcacattggctactatgatgtatttgtgacgcaacacgatgttttgagagacctagcccttcatatgtccaatcgtgtggacgtaaataggagagagcggttattaatgccaaaaacagagccagtgcttccaagagaatgggaaaagaataaagatgagccatttgatgccaagatagtttcccttcatacaggggaaatggatgaaatgaattggtttgacatggacctccctaaggcagaagttttaatactgaacttctcttcggacaactacgtcttgccaccatttattggtaagatgagtagactcagggtgctcgtgattatcaacaaatggcatgtctcctgcgcgtctacatggcttctccatcttttgccaatttggccaaacttgaggagtctctggctcaagagggtacatgtccctgaactcaccagcttgaaccattccactgaaaaa

SEQ ID NO: 136308 - DNA, 334 bp, Arabidopsis thaliana
  unsure (1)..(334): unsure at all n locations
cttagctactatgaatagatttattgacaaaaagaaaccaaggatacaaataacattccttnacaaggagatttctatctctcttaccctgggattgcttcgcatgtaaagcttattcaaactgcaaatcaaataacataaaggaaattacttaatagaattcataatattcatatcaatcaccttccaaacaaatcatctaattattcccaattagccccgttatctagatcggaatgtatgaaggataagttgaagtttatcgttgaagaaaagaaaccgcacggaggagatacgcgaataaggtagttgggacagagaggaaagctaaata

SEQ ID NO: 136309 - DNA, 803 bp, Arabidopsis thaliana
  unsure (1)..(803): unsure at all n locations
cgaggttaataagaaaattaactaagaggagagagtgacacacacaaaacaagagagtaaaaaagcttaaaatgttgaacaaaacaaccctacctctactactgcagtactactatacataacgcaacagagtaagaaatatatcagctaagtgaagtcaatgtccccctttacccttgaatgttggaatgcttttagagaaacacacatcgaatcaatcaggtactttacacgattatctctttcggcttttgaatcccttctctcaatttggtacaagaaccttaaggcaagccacagagaccaaccagtgattgatcgaatcagtttgtcactgtgtgctcctcgtcatcccgattcgtccagacactcttccagaaagtagctgagctgtgtttccctttgagaccgagagacgtcgggtcttactacctggttgtcctttatcaacaacacgcattgcagcaacttctttccccattacagctacttctcttcgcatcttctttgcctcaacgtccatcgcctttgttaatgtttcaaccttcttggccaacatntcaatcgcttcgtccttgtctctcaggctctgatctttttcatgcgccgcttttcttaatgttatgacctctttctgcagcagatcgtacaagacacctgggangctatcattatttgttgccttgtcagntgattcttcttccccttttattgagctaggcgattcgcctctgctagttccttcagaanacttgtggttcaaaggnaaattcgatctcggtccatttattagnactttgctt

SEQ ID NO: 136310 - DNA, 451 bp, Arabidopsis thaliana
  unsure (1)..(451): unsure at all n locations
annaaatcntangaaacatnntnnnnngnaanattaacaaatcaatacaaagatgagtcaaagagttcgattctcgttaactcggtttgagaaattagtcttccaaaaacgcaataaggtacaggacatggtaaacagatcaatagccagcaaaactaaattaattcatgttaagggctatttagagtgaacctaattttcgggatgatttacggagaagctctagtaaagaattagcttttcgtttagctctctctgtaccgcctcttgatagttccatcaatgggaacaacagctccaagtctaccaatggacgatcagttttgcagtatccctcttgcaaagacacagtagtatcgcagctgcgttctctcggtttcgcggttgatcctcctgggaaaatctatcaaaggtggantgcgtggcccccaaancgngtttncgngnntgg

SEQ ID NO: 136311 - DNA, 588 bp, Arabidopsis thaliana
gacatttcagtctcattccacctggtgcggaggatcttagcacattccctagcacatgtagcatcttcgctaaagtttaaagaagtggatcaagctaatggaggcatcgaatctgtaattaaaaaggtggataattacttggcggaaggaaaactagcagaagcagcagcaacactagaagaaggtgttaaaggaagtaaagcagaccaaatagtgagtgattgggtctcgcgacgtgcaatgaaacagagccattacagaacaagctcttacgcttctccaatccttatgcaacctgtgttagcctcacttgaatcccttccagatcttccattgaggtacattgcttcttcttttttttttaattcgatactgagattcctggagttaacaattattttgcgggaagtagtaccaactctttttctggtgaagaggaagaattacgattctctattccaatgtttatgttgaatcacagctgttcatgttatctgaattagaatgttaccagaaagtttgatacaaaaataagatcgaatctcacgaatttatgatttttgtctggaatgggatcaggagatgttg

SEQ ID NO: 136312 - DNA, 682 bp, Arabidopsis thaliana
  unsure (1)..(682): unsure at all n locations
ccnaacccngggcaaatggttttttttcnnnnnttccgggnntccngggganttngcccccnaaaaancccaaaaaccttggggggttttnccaactggcccaagttaccgggccgaactcatgccnctgtaaaaggccagcctaaatnccaaaggtacacccctttgtttgtgtaaaatacattcttgaaacgaaaaaagcaccagtataaagaagatgagaactgagaagcatagctaaattaaaacataacaaagcaccacaaatcttcgatgttcagaattcagcatttacagaagacaaccattgtatctcttaaccatttagtagacataagggaaaatggcatgccgattagccggataattctcaaacttccggagataccaacggtgcgtttctccagccgcgtatgtcagattagcagccacaaaaccaaagagtaaccagatggttatatctgttcctccactcgcaatcagtaaacccgcatacaaaacaatttctgccaagaaatgtggagaagacaccatcccaaaccaatctccatacggaataatgtactctttcgcttggctcggattttcccggagcgatccaagaatggcgtgacagcggcgctgatgtatccatccccaaangaaaatggctccaccaatccactggagtganccaagcttc

SEQ ID NO: 136313 - DNA, 573 bp, Arabidopsis thaliana
  unsure (1)..(573): unsure at all n locations
aaacncatttccntgccctttaggaatgtcggcacccntnggcngaccttcaaccttccagcgncanaaacattagccanttnccgggaattnccattcccatgaaaccctgataancattttgnncgttncnccagttanngccccgagttctggcagatagtgaaagtgcttgaaccgtttgcgatatcactggaacgtgaaggggaaccctgaatctgtcttcgagcaagatctgtaaggacccaaggaaaggtctgaaacactggatccagaagcttggaccagtccacgcaggaggaggcggtggcagcagcagcagcggccattggtggctcagccttgccgaagcctaaattcgcttgagagacaggaaagagtctcttttgtaaatttatatataatacaaaaagaagggttttgtgtttgtgttgtatcctttttttttgtggattgttgttgttagtgatctttcatcgtcaatgtcatcttctctggatttgatgtgtaatgactgccaactggggaatggttgtgatttgatatttatgggattcaaatatcgtttctact

SEQ ID NO: 136314 - DNA, 584 bp, Arabidopsis thaliana
  unsure (1)..(584): unsure at all n locations
cgaaccantcccccgggttccccgacccccaggccttggaacccttacccnccggagaaccccaaaccccggntgaccccctttcccgttttgggggtanaccccttttccgagnggncatggnggtttncccgtggaggnaaccccatttttccctttggggaagggttacttgtgacgagggtccatgattaatcagaagatgatgatgaaaaatcaccatcgtgcccaagtgatggaggaagagtccgttccgtggtgaaggttggataagtgcactggagaggaacatgtgtttagggttagggttccccgaggagaagccattattgaagcttaaattcaaatcttatagattattgggtacgttagagcaaagatgatcacctctgtgatggttcagacgagtgaaagtagtaattaagaggatgattagttattttgtataagtaattatattaagagagttttgattggctttggagtattttgtgnngtgagaagagtgaaaaagtctatgtttttcgagtaaatgactttttttgtaagtgtaaatatgaaatgatgtgttttggtttaaactt

SEQ ID NO: 136315 - DNA, 447 bp, Arabidopsis thaliana
  unsure (1)..(447): unsure at all n locations
gcaagnccttacatctattaatttttcgacaatcgagtaaaatcataaatcaaagctcggctacaacacagttccaaagaaaagaaaatatatgtttaacagagaaaaactgtccagagatgattgtatatatattcttttggttcttcaaatttagaacaaagatgtaaaggcaaattcagaaaaagtctctctctcttgatcaatgttttgtgaacattccatccatcaaggaagagaaatcaaagtctttgcctgattgtgaagatggtgtggtgcttgttggttgggttgcggatgatgactgaggtttaccggttgagtttggggtcataccgttcacttgattagcttgacccattgtgtagaaactggatgatgggtattgtagagtgttctcttgcggttgtgcgggtctcgtgttcatgtttgccgttcatattcatg

SEQ ID NO: 136316 - DNA, 389 bp, Arabidopsis thaliana
gaaattttgatatgtgactcgcttttttttatcttattagaattgcaacgagaacatacaagtcgaaaatcatacataagccggcggataaacaaaaatccctagagacaaagaccaaaaggaggaaaagtaatccctaaaaaccagacgtgccaaattaccaagaaaggtaaaagcgacaagataaactcgcaaaaggaagagatggagaccaaagcactaagctgacctattgttccatagaggttctcactaagatttccaaaagaacacgtgaagcagcaataagactggtaatgccacaaaattaagacatctttctgaagtcaaaccgccaggtacgaaagcaaagaaccaaatgatactagagagacaacaatcacaccaat

SEQ ID NO: 136317 - DNA, 440 bp, Arabidopsis thaliana
tttaagaaaggcaaatattgttgaagagtgtctctctctctacataatgctggatttggtttccttttcgataaaatattattgttgatattggaaaagattacaaattacatcaccaaactagactccatctaatatttggatacagctacatgaccttacaatttcacaaacagttctacagcaccaaagcagagaacatacttacagagatcatctaaacgccagcttctggtagctaagttcttcatctgtttcctatgcgaggctttgcaaaatgcggagcagtctcttctcgagctcaaccaaggtctcaaatctgcgcttagcttctttctgttttgtgcggtagaggtcactgtctttcggtatgttgctcatgggtcagccggaagcgtcgttggtgttctcgcaactctttgtgacttcattgcagtagg

SEQ ID NO: 136318 - DNA, 790 bp, Arabidopsis thaliana
  unsure (1)..(790): unsure at all n locations
ggagaatctgttgggataaagaaactgagtttcagaccgtnattcacgaaaacgaggatctgaagccgaagnaggatgtttctctgaagnaagatcgagtagttaatcgaagttactcgaggaagcaatattggccaagaagcaaccggaagaagagaatggcgagctcagtgagagcgagaaagactatgatttgctaccaaaagtggttgagttttcttctgagaacggtcatagaagtgtagaagagaaatctgctaaagtcgaaacccttgatcacgaacctccacaagagcagatcagcaatggaaacagcaatggcaacggtatggaggagaaagaagtgaatggaaaacccgaggtggaaaccgaaaagaaggagaagaaagatgagtcccaagatgatgacaaagatgattcggttgaagttatattcaaaatgtgggaaagttgccaaatcgagaaggaaagaagcttttccggacaaagaaatcagaactagagtcacaagaaggaggaagagggttcaagcaaaatcgatgaaagcgacaaaacctcaacagagaacatcggtgaaaccggaaacgctttaaccgcagaagatcagctttcgatggggaagaagatcaagaagaagaagactttacttggtaaagttgggaatcttctcaagaagaaagcacctgtaaaccaggaataccaaactcttcgaggtaaggcgggaaaaaaaaggtaaatcttatccatgttaaaccgatttctggataccccctttttgnnttccaccngg

SEQ ID NO: 136319 - DNA, 493 bp, Arabidopsis thaliana
  unsure (1)..(493): unsure at all n locations
gngtgttggttccgatagattttaaccaanatacaccaaaacaaatcagngaaaccattgattngttcattatttccatgtaangtacacgcttttatcacaacagtctcttcccacaacataaatggagagaaccaaagagtcaaaatccaaaaactaaaccggactagtcacattggtaagttcactggaatgggaagcataccacctgtttttagagcttggaagatgctggtttgtccaggaaccaaaccaactcgtcttcagcagaaacagaaccagcaggtggtacattcccagtcttctttaaagctgcctccacagcttcagctttcccagaaccgcaaacaactagagctacatgtgcagatgagttgatgaccgggaacgtgaaggtgattctctcagacggtggttttggagagtcagagattgaaactacccatttcttgctctcgttgcagagacccatgncccagggaattaattgatg

SEQ ID NO: 136320 - DNA, 566 bp, Arabidopsis thaliana
  unsure (1)..(566): unsure at all n locations
tcgatttttggcgttctccatctgtaatgtaatgtttctgcaaaaacaagtgacaataaaaactttttcatggatctgagattttctccaaatctatatttgtgattgtttcgtgtagtttttctcttaaagttgtgttctttaagctctctcgtgctcaatcttacgtttccctttggtttgatttcgtgtttttgttattcgatttcacctttaacttttatctaatctcttgtttttgattttgtaaattgtaaaaagtttctggtgattctcttagcgaatttgggaaactttatctgtattttnctgtttcgccgtagatttaggatccttaattaatgaatttntgggtttcaatattcctcgtctctgcaatagctggatcatgcttancttctgggntttgcttacggntgacggtttgcaatcacggnttcgaggggttccgatccgtgatcgagcaaaaatgtcctcggtctttgtatncaaggccncctatcgaggtagatggggncttccagacaaacncatggttgaaanccttggaatnccaaantcccacg

SEQ ID NO: 136321 - DNA, 483 bp, Arabidopsis thaliana
  unsure (1)..(483): unsure at all n locations
ctaanctnnanccttgatctcccttgcnaggagnctggtcagagtnnctngggnccagctcaacgnttgccncttgcaagnctctagccnaacgagccctgaggtgtngcctnctcgatgacccaacaagtgctcttgatccgatatcgacagagaacattgaggatgttatagtgaaactgaagaagcagagagggattactactgtgattgtttctcacagtatcaagcagattcagaaagttgctgatatcgtttgccttgttgtcgacggagagattgttgaagttcttaaaccaagtgagctttcgccacgctacgcatccaatggcacagaggtttcttcaactcagttcttgagaccattttctcattgatggttcctgcaagttatttgctattttgcttgaatcttaataatctctttcaagagaggaacaaatgctggttgaatgtaacaacacctttcatggtttatgtctt

SEQ ID NO: 136322 - DNA, 397 bp, Arabidopsis thaliana
cctgatccagaatatctgagccggaggtggcgttcaaagacttaaacgagtagtgggccaaagggctctataatgatagttcgccctcagcttttgtccaggattggcattctcaaaggagaaagatctgatcagggaaggattgatcgatcaagatcaggaagaggagaacgagggacaattaacgtaagaaggggaaagggctaaagcatctgcttccactttccgctgcagaagaagttgggggaggttacaaagcccttatttcaacagactgttaaccactttaatgcctttatccggctttgcaacaaagtgatcttcggtcgcactaaggcgcataagcagtacacttcaccgagattcaccaagtaaccctacgggattgatggttgtg

SEQ ID NO: 136323 - DNA, 472 bp, Arabidopsis thaliana
  unsure (1)..(472): unsure at all n locations
tggagaaagaacccaagcaagagccagaggaagggagagataagtacgagccacatcagcaccagccaccgtatatctcgcagatgcagccagtgacgcacgaagcctacggtggtggcctctacggtcaggacgacgaaaaagagaccacaaatttagagaaagaggccaagaatatagagaaagaacctcagcagcaaagaccaccggccagtgatacacagagcgcagatgggcctgacgaggtaaagtcgttgacaccaaaacacaagcaaccagcttcttcgggtgatagagacgttgacataactggccagtnttacattcaatgaagggagtactctctttttttttggtgttgtaatgcctttctagtttcctatcatttgtgttttntttggagcaagtttttttggtnctgttttttcnagnaaggganttttggntnatcaacggncaaattttngngttt

SEQ ID NO: 136324 - DNA, 490 bp, Arabidopsis thaliana
ggcagctaatatgatgagaccggagtttgcttacactgttgtgtacgtgaaggacgtagctaaatctgtagaattctactctagagcttttggtcacaacgtccgtcgtcttgacgaatcccacaggtggggggagctagagagcgggcaaaccacgatagcgttcacaccgcttcaccagcatgagaccgacgacctaaccgggaaggttcaggctacgcagtcagcacgtgaaagagcacccatcgaagtctgcttctgttaccctgatgttgatgccgctttcaagagagcggtggagaacggtgcggaggcagtgagcaagccggaagataaagaatgggggcagaaggttggatacgtgcgagacattgacgccattgttgtacgcatcggaagccacgttaagtgaattcaaaataaagactcgtaaaatatgatcattaactagtctatatacatatgaataaatattacaagatactttggt

SEQ ID NO: 136325 - DNA, 582 bp, Arabidopsis thaliana
cttgtatacccggcggagagaagatgaagcaaccggagacaccaaacgcggcggaggaaaccaaatcagaacaaaagcagaaatcgaagaaattcccaactccgacggaactaatctctcactaccagaaacgagggctggaaccagcagaagcttcaataaaggtcatcgaagatttacaaaacgcgctcgtccgagtagtttcgtcctccagaaacgcctcgagcaaggataagcttgtaaccgacgcgaggaaaatcgacgccattaacgggaggcttgccgtcgtcgacgcgaagctggagacgaaacctggatacgttgagactttcgcgttagggttagcttctggtgcgacacttaacggaattagcgccgtttggcctcacgttaccagaggcattggtcaaatttggtcccccgttaggatcgggacggatccttcatctacctcttgaattgttagaaaggaaaattctaggttgatatggtttcttatgagtttttttccggtgttgtatttagtgaaatttgagtatcagcgacttcaatctttgtactgttgaacaataatctcattag

SEQ ID NO: 136326 - DNA, 418 bp, Arabidopsis thaliana
aggtggaggaggacatggcggaggatggcagggaggtggtggacgaggaggaggatggaaaggaggtggtggacatggcggaggatggcagggaggcggtggaagaggtggaggatggaaaggaggcggtggcggcggaggatggagaggaggcggtggcggaggaggatggagaggaggcggtggcggcggaggatagagtaatcgaccgtctctactcatctgaaaaccaaatattatgagtagaaatattagtgtaagcaaatggtaaactataataaacaaataacgtctcatgcacggtttaccgattcattaagccaccttacgtagcctagctcaaagccttaactgtcatgtaagttatatctgttgctcttcgtataatccaagataagtgaatattaaaacttcgaac

SEQ ID NO: 136327 - DNA, 388 bp, Arabidopsis thaliana
aagaagcagcacagtggagaagatcacaaggcatatcaatggaaggggatgcagagttgttggcagcaaccgaggttacccctgaacctaaaagagatgagtggatgaccactctgcctcctgaaagaaaggttggagtggccgtgcagcaatcacccacgtttagtagaaatgctagagaaggacgcggagacactacagcgtggactgatactcctatggacaaagctgaaagagcaaagatgaattacttggaggcatacaacaaggcgagtgcgcttgcatcatacgatggggaaaatatgtaaagaagcatggatgctgagcttgtagacaagtataccaaagagaaaagagcaaagtctctggtagagaagcaccagagaag

SEQ ID NO: 136328 - DNA, 453 bp, Arabidopsis thaliana
  unsure (1)..(453): unsure at all n locations
ttcagccggaggatcctctggatggncccctctngctctgccactttttggnagaccatggnttcnccggctgataatgagtgntagataatgttaatggagangctgtccataggaaagtnccccgctcttacaagcccgggaggaagagtttgtgtatgagagttgttcccagttttcccaacaactgctggatcccattgatggctctttcacctttgtacctggaagtttgagagatccaaaagggagtcaattcgaagtcaaagtcgtagagtttcctctggagttaccggactacatcttctgaactctttctggcacaaggttcgttactctttcaagataatttgttgtatcgtttgctttgtccgtacagcatgcaatgtcctaataaaataaaggtgttggatcaactggtttacaagttcatgagaacagattattcttaac

SEQ ID NO: 136329 - DNA, 573 bp, Arabidopsis thaliana
gggcattgagctaagtcaagcttttttccaagtgttgtaaagaacgggctacaacgaaagtaaaaaagatgaaaacttccgtcactgcgcaccactttgggctctggtccactttcgctccgtttacgcgaattggttgtatctgcccgctaggaacgctggcatctgttgacaacagtcccgctaaaggccgctgtctcttctcggcaaggtaagttagttaggaatcatagcagtcggtgaagctttttctttgttatgcacagatggttgggcgcagcttgctaaggaaaaagtgctaaagctttagctgcttgattgaccgaagagcctgactaccagagctagtaagctagcggaagagctcagctcctactataagctgataaagagctactatcaccaagagagggcgaagaaactcattaattcattgatgagggctccccattctctttctaaatctgcagtccaatccttcctaatttcgaaactcatccttaagttaccaggggcaaggtggacatgaatcaagagaataagctctttaatcagaatacatagttgaattta

SEQ ID NO: 136330 - DNA, 402 bp, Arabidopsis thaliana
ggaaactgttgagcccaacgatgttgagcctcagcagggtggccgtggtggtggcggtggtggtggcggtggccgtggtggttgtaggtggggatgttgcggtgggtggtggcgtggacggtgcagatactgttgcaggagtcaagccgaggcaaacgaggttgtggaaactgttgaggcccaacaagctaagccatgaattgcgtgtaatacaaactctctatgtttgtatgcatgcatagctaattaccattacgtacgtatgtcaaaataaagcaaaaatagtacctaagaaggtacctagaggtcaataaaagaaaacgtaggttcatataatatgtattttgttatgtaggtgtttcttttctcgtggaatgttataaataataacaactgtttttt

SEQ ID NO: 136331 - DNA, 546 bp, Arabidopsis thaliana
  unsure (1)..(546): unsure at all n locations
aggcattctaggaccagtgcagatgatactgagacagatgaagcatccttttctggtcaagatgatacaagtagtaattttnatatccttgagtgggcaaagtccaaaaaaaatgggtcgttgcaaatattatgtgagtattaccaattaaaatgcccggcaagaggttcaactatcacatttcatcctttggagcatcttcatccggttgaatatcatagacctaatgaagtggcattgcatactcctggttcagcaattgacctaagatcatgcagcactagtctagaactcgcggaggcacacacaacactcatggctgaggaagaagcagctgcattatcaacatggggctgttgcctcctttatgtgggtcacttcgggcttgacaatgtctttgatggtacttagcaggggcactnctttgcagaaacaggattgtatttggtttgccccaattttgggattttttgcagcatcagttttttnaaattntcccagtnaanccgccccttngggnggganccntttnaatccnggttttcc

SEQ ID NO: 136332 - DNA, 539 bp, Arabidopsis thaliana
  unsure (1)..(539): unsure at all n locations
gcactgaaaacacttcagcccaaaccacctcccatgtnttatctcagccaggtacgtacacaactatggttcaacaacaacaacaacctctggctcaacaacctttcttacaccaaggcgttcagtatatccctcacccatcacaatacataccaatttactctcatcagcaacaaaactaccctgtttacgtgatgtccgtcccacaatctcagcagtatatcccagcaggaactcccccgctctacccgaactcaaaacccggcacaaactcgagacctgatagctgcccagaacggtttaccgagctgctccccctcatggttattcaggcttcagcaacagcatcagtaccatgggttacgctggagctcctcaacatagcacaaacgcaaacgccaattacggtactggagctnctcaacatagcacaaacgtaaacggcaactacggtggnccctttgaatacacaaacttttcaatacgagacagtgtattaccacacacaagcttctgctgnaaacaactcccattccatt

SEQ ID NO: 136333 - DNA, 538 bp, Arabidopsis thaliana
  unsure (1)..(538): unsure at all n locations
ggaaacaatactaaaaaaggttgaggtttcttgtataaagaaagacaaatataaaagaagaatattggaaggtaactaagcaccaaacccaaagtcaataaccattaacaaaaaccttttgcttcatctcaaagaaccacaaagagcgaaataagaaaacaaaaagagagtatcatcaatggatggtttaataccaatggcccttaaggccgtgaagaagaacctaactcgtcgtcgttacgaacgtctctcctattccgcaacaactcgtgagtctttacggcttcgctttccgatatttgaaatgaaccggtcgacgggtcgttcaaccatcggccgtggcttggtccccttggggagttttctcactcggttatttcaaggccggggaaccccaaaagaaaccgggtgggttttagcttccccgngaaggggtcttttttttncnccccgggggggggtgaaacctttttnagggttttaannggcccttnnngttttttttttttnaatcctngggcaaaaattttttcttttt

SEQ ID NO: 136334 - DNA, 535 bp, Arabidopsis thaliana
  unsure (1)..(535): unsure at all n locations
gagaaagctttatgatacagataaaaacgataccaaagttgcttctgtttgatcaataagttttttggttttttgtcacaagatcaaatacaaacacagatagcaataatgtatttaacatgataagaatctttccagttttaaagaacaacttcatagagaataaaacaaacgaggaatgagtgtaatgaacatataaaccctctgttcatctactttccaagcaaacggcgaccacgttggtttgattgttgcacgctgaagttgagttcgtcaacatcatcatgaagatggtcaagtcctttgttctgcttctcgatttcgcttcccatggcaacagccatgttctttagctcgccgagtatatcactcaagctgaaagcccatcgtcttgcttagccttttccatctccannctctgataagcatcagctgattcggggangggtcccgggtcttgatggccncnggggctgagtcaagcccagttttcccttcccaagggaanctnccgtggggcaccnggtagngggct

SEQ ID NO: 136335 - DNA, 486 bp, Arabidopsis thaliana
  unsure (1)..(486): unsure at all n locations
agcaacagtctctcccatctaccgctccgcctcctcagagtctccggtggttcttcaatctctaaatccactaatgatgaaaacgacgaacaatgatgttaagtctgagagcgatgatgatggcggatcggaaggtgatgctgctattaagggtactatcttagccggagttttgttgattggtactgttggtggattcgccggcgttggatatgtctacagggatcagatcaatactttcctcactcaatcctccacttacatcgaaggttatggtacagctgggtatgcnctgttcattgccgtctatgctgggcttnanatactagccattccagctttncccattnacgatgtcggctggttttttnttnggnccacccattggcacatcaagtttttatcagnggacnatggctgcagngttgctttctnaaatgnaagaattttcccgaggggntnctnagtagttnagcnanagagtcc

SEQ ID NO: 136336 - DNA, 407 bp, Arabidopsis thaliana
  unsure (1)..(407): unsure at all n locations
gaggtcacttctcattttcacccaaatatatcaataatctctctataagttatctagttttcccattttcatctctaatctagcattttgaccaaacacacctatttttctcctttgcaagacaggttttcaaatatctatcacgttatattactaatggcagatctacaaaagatgatctccgagaagtcggtagtgatctttagcaagaactcttgctgcatgtctcacacaatcaagactctcttcttagacctgcgcgtgaacccgacggtctatgaactcgatgagattagcngagggaaggngntagagcatgcattggctcagctcgggtgnagccgccagtgccagtggngttcataggnggncactttttggnggggcnatcaaggcanggggnccca

SEQ ID NO: 136337 - DNA, 464 bp, Arabidopsis thaliana
gagcttggatgctcctgttgaagagtggacagttggtggtactgcactgacttcgttgatggatgttgagagaagacatggtaaattcaagcctgttatcaagaaagcttatgggttgaaccttgaaggtgcaccgtttaaagaaatttgcatcacaccgagaagaatgggctttgaagattcgatacattagccctggtccaattcagtttaagggaccgggatctgatgcgagaaatcacacattaatgctcgaactcgggccccgcgcctaaagaattttggtactgtgagattcactcactgactcactttctttgttgttgttcgtttttgctgtaaaatctagttactgtgagtcaagtgaaccaacaagtggtcatcaatgtgtaagtcctgtattgtggtgtcacttgaatatagatgactcatgtgttaataataaagtttcgcaatttcataaa

SEQ ID NO: 136338 - DNA, 585 bp, Arabidopsis thaliana
  unsure (1)..(585): unsure at all n locations
ggcgcgtgtaaacggtgacggggctctaatggctaatcttcctcctccgctctccatgaaatctgtcgccctctcaggagcttcttctccttcttcttcctccaacaacgatcggaagctatcatcggcggagagttaattctcgatctcagcaatcccgaactcagagaaaatgcacttcacgagttgtctaagaagagagagatctttcaagatttggctccgcttttatggcattctgttggtaccattcctgctcttctacaggagattatcgcagtttaccctgcccctatctcctccaaccatggactcctgctcaatcctaacagggtgtgcaaatgcaccttgcttcttcctttcaagtgtggttgcttctcatacctgatacggggaatgttggttcctaaaaaggcccatctgccaattgtacctgtaatgcttttctttgaatacatcaaggaaattaaaggccggttttncggacccttcgggttnnctagntttngggggtanttgggngnccttgttaagggttggtgnacttgaggggcangttcctttgtaaacnngnttntccncttt

SEQ ID NO: 136339 - DNA, 509 bp, Arabidopsis thaliana
  unsure (1)..(509): unsure at all n locations
aggttgntccnaccncactgttngcccncccccagctcagngtccccctgtncggcttcacanctcnttgccngcgatgatnccagaccctcctccacaaggtttgggatngagtatancngataatgaancggntggtctgnaaataaggtgtatgtggaaagtgaaggattttgggtcccngtgttgaactcataaaccggatcccataaggttgctgaagcttctggtcattacccttctcttcacttggaaagtcctacccaagttcgagctgaactatttacctcttctatcggagggttgagcatgaatgatttcataatggcggctaaaatagatgatatcaagacttctgatctttcccctaggaaaagagcttgggcgtgatcttcttttcattattttggaacatttttgtttgatagtatgtaatgtatgtgatgtattctaaattgtgtgtgatcggtctacatgtcgagttatatagaaagcattgtcataaccgc

SEQ ID NO: 136340 - DNA, 312 bp, Arabidopsis thaliana
gagtgatgaggccaagacaccttctttgtccaaatgggctgagaatttctgtaatgatcccgctgtaaaacctgtcatgcccgagactgcaaagcttgctgaattcgcaaagaagatctttcctaagccgcaggcctaagttgttggtggactaggttttgtatttgtgggttgggttcttgcaagaataaattaagagtgttattgtttttagatggctttatctttgtgtgtgagttttaatcaggcgtacgttaaacgttacgtatgtatcaggtttggtgaatgattttatttaggttgtgttggaaa

SEQ ID NO: 136341 - DNA, 576 bp, Arabidopsis thaliana
  unsure (1)..(576): unsure at all n locations
ttcgttccaccagcaccaaaccaacaatcggcgttaactccaattctttcaacattcacttctctcttcaacttctccgatcactctccatatccatctccatctctccattatcttcttcctggatcttctccttccttttctctccagttatctgcgttgagtagaactccgatctacttcgaggcacttaaagttttatcgagatcgaaatgtttcgccaagtctccgacaaccgccgaggatttcgtcggcgattacggaatcccttaacgttagcgacggcggcgatggtagtgacagtaatagtagtgatggaggtaacggaggaggaagaggtgattcaaagaaggatccggttccttcttcttcttcttcatcaaagtgacctctaacggcctcttngggaattccgtgaacccggttttaatgaaggtttttgggaaagttaaaggcggccttggngcaaatnttctacaaagggaagggnttaacaagccggcaagcttgcttaaaatncnagtnggntnttntgcccaaangnatnttccggggnggttnnncccnccggngntt

SEQ ID NO: 136342 - DNA, 524 bp, Arabidopsis thaliana
  unsure (1)..(524): unsure at all n locations
gttaaaccctatatttgaatttccatttgctttcgaaccagtttattaaatgatacattgatcttacaacattaccaagcaatgaggacatagcacacaagtcactggggttcaatggagaccacaacaataaatatttatcagacatttgatgaactcacctcgctctaactactagtaggggcctaatgccataatgtaactgtgatgaatgaaattcactttcttcacggattttaaacctcttctttcgtcttttaggattgaaggttcaaaagattttgcgtctactgaggataggaatacatgaggaagaaggcgactgcagcgcctatgatgattccacccgttggttagccagaatgcagaagcntgttcctccaagatangncctcaagttccatgccggatatacngcgatgagagcnccactgnaacncaaatgaccgcctgaagagcacncgacnggtgccncagcnccggactagttgcagcattggctccatncctgnngaccanagctt

SEQ ID NO: 136343 - DNA, 483 bp, Arabidopsis thaliana
  unsure (1)..(483): unsure at all n locations
gaaaaccataagatgggttttagagcactgcctcttcaacacagcagtgggttcatctccacgaccaaagtatccatctcaagaacctcgcccaggattttccggaaccctagatgggtcgttgtctcagcaaagcaagagaaagatgaggataagaagaagaatgaagaggagacttcgttgtttactcaattaacggatgccttggacttctcacaagttcgatcggagaaagacgctgagcttctctacgaggctcgagaagccaccaaatctggtcgcaagatgacccaagaaccagtatggggcatttagggggaaaaactcgggnggnncatncaagggccttttttttaaatccctacggttggnaggtgggatggggcaaatattgtgggaggnaggggttgggtnggccaaaacnatntatggtnttncaaaaaagggcnncaanggggttnggnaatgccaggtggccangtt

SEQ ID NO: 136344 - DNA, 403 bp, Arabidopsis thaliana
aaatatcatgatggctgttactcgaagacggacaactttatccggaaatgatcaaggagacggaaaagcaatttggagtatcgatagacacggagcgagagtctagggcttatatgatgggtccagaccatgggatccatcccttgccacatggaggagccacaggcctgtagttggagttgcgagaggttgacataaagccggttgagtccgttccaagagtcttcgtttaagttatacttaaatagacaacttaagaagaataaataaataagcgatcgagcttttcttttgtatagccctccccgcatcatgtgtataagatgtaaaatacacttggagtagtatattatggtgtcgtctagtggttataaatattacgtcttcatgactccagttcatt

SEQ ID NO: 136345 - DNA, 409 bp, Arabidopsis thaliana
  unsure (1)..(409): unsure at all n locations
tgttaaaccggcttcnccccgccatcctcctcaggattgcaaattttgcncntttaaggaggaaaggccccaaatgccgggctcttgatataatcccgggaggattcagcaactctctgctttgacactgatgggggctccgctggttgatatggagatcagaggtgtcccctgctctgcgcttcttgggcgatatcatttggaaataagatcattacatattatcaccacaaggatgaagaacaagcaggttcacttgtatgagatagtgttggttaatacattacatagtttttggtatagatgttgatgtttgtctttgatgggtttggtctttggctaaaaatgaatatcgacgagtttttcaaactgttaacagattcagtatttgctacattttggtgggtgt

SEQ ID NO: 136346 - DNA, 565 bp, Arabidopsis thaliana
  unsure (1)..(565): unsure at all n locations
tttgcatcggtgcagcgagaggattacattatctacacaccggtgcatcgcagagcattatacaccgtgatgttaaaaccacgaatatcttactcgacgagaatctagtcgccaaagttgcagactttggactatccaaaaccggcccttcgctcgatcaaacacacgtgagcacggcggttaaaggaagctttggttatctagacccggaatacttcaggagacagcagttaacagagaaatcagacgtttattcgtttggtgttgtactaatggaagtactctgttgtagaccggctttaaacccggtattacctagagaacaagtgaacatagcggaatgggcaatggcgtggcagaaaaagggtctgctagatcaaatcatggacagtaacttaaccgggaaggtgcaaccctgcctcgttgaaggaatttggagaaaccgcagaggaatgtttagcggaatacgggtgtggaccggccttcttatggggagatcnatttgntnggaattttggaatacggggttacanncttganggaacatcttcgggctttnattgga

SEQ ID NO: 136347 - DNA, 604 bp, Arabidopsis thaliana
  unsure (1)..(604): unsure at all n locations
gagttgattataaaataactcaagagagatcacagagagatatggcggagggtaaacccgacgagcagctctttcagcttctttcgggtcttcttcaacaggtagaatcattgacaaatacagaagaggttgagctacgttctaagattgaagctcttggtttagaagtcactaaagtgccatcaaagtctgctcaacacctcaatgaggtggagatagctaaggaattggacaagttatccagcaaagttaagatgatgggggatgagatgatatcatcagctatagcttctgatccacaggttcagacgcttcttagcggcacagctgatgtttggatgccggttatcactgccggcgccgaagagagactcaacttcacagcctctcntgctgatgatgatgacctttctaacaaggagactactaccgacaataccagcagctcttaatcccattttctttttgataaactcatgtcgaagttttctattttgcagtcttgtttcttttatgtatatcaaaaccaagataagctttaattcatgagtgatattgatgtttgatttttacgcaaactgaatacaactgtttatttattaaa

SEQ ID NO: 136348 - DNA, 622 bp, Arabidopsis thaliana
gattagattatccgaattttattctccatacagacaatcaattattcgaatcttgatttttttggtccaagtataataaaggtaacggcacatcagaactctatttttttcccaaacacctattgcccaaaaagaaagtaaaccactgtgatacaaattctataaagataaaaaaagtttatgctcaattaaataacgtaaaggaaactatattgacaaataaagacaacaacgacggaaataaacaactaaaaaccactttctttgatttcacacaattttagtgagtcaaaacgctgtgctgaagtagctactcaccacattctcacacagaatttggagaaccttagcattacttggcttcacacatcttggcatcttaaactgtccagccgatgaaccaagcccgagaaaatgttcttgaatcttccggaaagttccttttgcgacaactctcagctccaaggctccaatagtcttgcatttccgggaactaacgtaacccgcatcgatgaatgctcggtctaaacagttgcagcaatcttgaagaacgtcttcgtttgtttctcctgaaatctcccagaagatagcgtaatgtcctggatctgtcgagacatcgatg

SEQ ID NO: 136349 - DNA, 359 bp, Arabidopsis thaliana
  unsure (1)..(359): unsure at all n locations
ttttttttttttttttaaaaaaaaaggtccagtcccaattgggcttaggcccggaattacaatcgtccacagttacaaaacaggaaaattccggtcaccggaaaacgagaaccagaggtggttttgggcagtggaacgggaggcagcaaatagatctattagctaccgtcgtttacacggcccactactctgcaacacacccaccggaacgagatcattgggccgaagtatacgagtcctgccgcaattctcttaccaatgagctggccggacctggaacaaaccttaacgggaaaaaacccagtttccgaaactccgccacccgnattttgggtngaagtccccaaacctcgcaaaac

SEQ ID NO: 136350 - DNA, 537 bp, Arabidopsis thaliana
ctttactctgttcttaactcttacgattctcgtcgtcttcatcatctcttcacctccggtccaagccggcttcgcaacgacctcggtggtgtagcatgggctacgactggagacaatggttcaggctgccacggttcaatagcagagtgtatcggggcggaggaagaagaaatggactcagagatcaatagaagaatattggcgacccacaaaatacataagctatcagtctttgaaacggaacagtgtgccttgttcaagaagaggtgcgtcttattacaattgtcagaacggagctcaggctaatccttatagtcgtggttgcagcaaaattgctcgttgcaggagttagacctacaaacaaggaagctatcttcttgatcttgacttatgttttctttgatccatcaagcgttttcattttaattaaatctttaaatattcatcatgtctctgcacaatagtaaagacctatgttttgatcaaattgggttgatttgtaatattttatgtgaataatcatggtcttaatgatca

SEQ ID NO: 136351 - DNA, 451 bp, Arabidopsis thaliana
  unsure (1)..(451): unsure at all n locations
cagctctaaaaaccctaaccgtttcgattcacactctaacctttcgataatttcccagaagatgttggagcttcgtttagttcaaggttctctactgaagaaggttctagaagcggtcaaagatctggtgaacgatgcgaacttcgactgttcgaccacagggttctcgcttcaagctatggattcgagccatgtcgcgttggtgtctcttttgcttagatctgaaggtttcgagcactatagatgcgataggaacctctctatgggaatgaatcttggtaatatgtctaagatgctgaaatgtgctggaaatgatgatatcatcaccatcaaaagctnatgattggtagccggcactgttaactttccatggtttgaggaggcccacacaacggcaaggatttgcagggtttttgagattgaagctcatggatatccgacagttgaggca

SEQ ID NO: 136352 - DNA, 632 bp, Arabidopsis thaliana
  unsure (1)..(632): unsure at all n locations
tgttgatgttgaatactgtccacctgtttcatcagatggtgcccatttccctccagaagctgctaaagccaaggaggccgcacaaagctctcctagccctcagaacacacttgagtatcatgaaattgtggaagaggaaatgatccgcggtctgcagaggttggggtggaagaaagttgatgtcagcttccactccaccttctggccttacttagctcataacaacattcacgtgaaaagtgaaagactttacaaaagcaggagctggagttattgcacacgttgcagatagtataaaacagcaagagtcttccacgtttattaccgccagctttattaaatcgtggagcattttcggagtgtttcgaccccgtttaatgctgagtgtgctacgacatttgaaccattcctgtgttttgcttttaccatacagtttgggagatcggtgcagatcaagaatgttcgcatctttgcttcttctattttttttcttggcgaaatcagaagaagtacaatccaattcatctgtacatgattttcttgtattagcttgttgatgatacaacacttgaaagatgttattatagattaaggtttcttaaagagnaaaggttatatatgttcaaaaaaaa

SEQ ID NO: 136353 - DNA, 243 bp, Arabidopsis thaliana
gttgattacagtccatatgttcctcaagtggaaaaatgcagcggacgtcctcgagaagcacactcagttaatatgtctgtagtagcttgttgttttgtggggttcttgtcttgttgataaaaacggcagtaccgaagatgcaaaattaagtttaagatgctatgtatgtaccttggaaaataacgggtgataagcttttctttcttgttttagaagtaaaaataaaaataaatctatattctc

SEQ ID NO: 136354 - DNA, 420 bp, Arabidopsis thaliana
cagatacaggcaaaggaagctctgtcgctggctgcaacgatagctgtggctgcccttctccctgtcccggtgggaattcctgcaggtgcaggatgagagaagcatctgctggggagcaagggcacatggtgtgcccgtgtggagagcactgcggatgcaacccctgcaactgccccaagacccaaacccaaacctccgacaagggctgcacctgtggtgagggttgcacatgcgcctcttgcgacacttagacatccttatctctgtctgtaccacactttgtataatagtactagctagacagatctgaaaaataaatctgtttattaggtccaggtacaagaaaacatatgtcgtcgtatgctctgctctcgtcttcatgaatcaacaagaatctgaaaatcctgaaggtcttggact

SEQ ID NO: 136355 - DNA, 430 bp, Arabidopsis thaliana
gcaagcagcatggcgacggtacataaagaggaagaaattggagcaacttagtaaagaagaggaagaagaagaagcggcagcagcatcagttatagcaggaggaagtccttatagcataagagcaacgttcttggcttcaaagtttgcggcaaatgcacttcgtagcgttcacaagaaccgggccgcgaaatcaacattgttgttgtcatctactaaagaattggtgaaatttcagaaacctccagaaccagatttctctgctgaagatcactgatccaatatcgcatacgcaagaattctttttctttttaacttgtacacaatctctaagaatgctccaaatttttttgttgttgtttaaacacttactgtaatataaatgattatttgtgatcgttcttaatcttgttattacatagaaatgtttttt

SEQ ID NO: 136356 - DNA, 555 bp, Arabidopsis thaliana
ctgatctaacaatggcgacgaacaacatcgtacgtttgatcgctccaagccgatccgactcctctagattcctcgagccagtgtcacggtttctaagctccggtacacctcctccgccgcaagctccatctccgaatcaggatctgaaccgggacgtgaagccagatcagaatcttcaacagaatctgcagatgcagaaggaagaagaagaggaaggagaaggtggtggaggtggagagttttgagaacgaagatactggtgagattggagggactagaggtcctgaaccgactcggtacggcgattgggaacaaacgtggtcgatgctctgatttctgagaggattcatgtatccctgtgttttagcttgttcttatatatttctgggaaaaatggaaataaattcgttttatgtgtttatgtatttccacaataatggagaaaatggaagaaaatgtagtagaacttcaaattcgttgcctttatttggatcatcattctctggtgatcttgttattccagtaatagttaataagttcttcctcaggtgggtt

SEQ ID NO: 136357 - DNA, 518 bp, Arabidopsis thaliana
  unsure (1)..(518): unsure at all n locations
cccncacattgcngttcaacagctgnagttttaaaggcatgcccgttgttttncaagatgatggtccnacnatggcancctggncaaaggctgatggtccccaacatccctgtcctcccctggtggaaccaaaagcttcgatccnatcgcttgtgnttgtggcccgtncagtagtggaactgtaccaaatccctgaagaagcacgcatcaatccccatttaaaccttgagaaaccggcgacacctgaaccggtgatctcgacccatgaaatctgatgagaagatcgagggtgatagttccaaggatgagttgtgatgatcggaacagagtgtgtaacaaggctatagatgatgactcttctataaatgatagaaaatgttttgccctttgtttttttccattgttgtatgctatgaaatgaataattaaagaagttttggtttctcaagtttttggatgtaactggaggtttgatccacacattgagtgttgatttaatgcgacttgtggttcataaa

SEQ ID NO: 136358 - DNA, 411 bp, Arabidopsis thaliana
aatggaagcaatgattttattatgccatgtgttattagaaggttgtttcctacgaagatctggttaaagaaaagacgcaaaccgattcatataacctttattctagtacactatcgaagggtttttatgaacttggtttagatctaattttattgggaatcctaagcttaatgatgactcagtcaacatcggagggtagatactctacatggcaactgcatgttgacaatgtcctgtcttgggaagtgtctccacatttgggggagtcccctggaattaggaggagaagtggctaccccgggttttccggaagacaaggtaaagctatggcggcctaaatagagagcaatgcctgcgaccccaagattccacagaagacgacgaggataagcttcatatgactgtggataa

SEQ ID NO: 136359 - DNA, 530 bp, Arabidopsis thaliana
  unsure (1)..(530): unsure at all n locations
gatgtagcttttcacattggaccaaaacaagggccggaaaccccgctagctttgttgatagaaagttagcttcccgtgcttgactagtagggctaatgaacgacccttaactatggaatgttacgcctttcctcggttantcacaacgtaatcaactccattggttatttcccccgggggaacacctatagccccaatagactgatttagtaggtatgatgtattactaggagtctctaagttcctggtttggttgtccctgtccgggctaagcggagtttagctttggccgttaataagagcttccctccattccttcagtccagtcacgcttttcttttcggcttttgcttcagtctcttcttttcgtcctttcaggtggcatttcgcttagtcttgtcattccttccgtcatgctactgtcatgtgctanaaattgatcctcccgtctagtgtttcctctctcatgttaaacagaccgctcctttaanccaatgaataggcggcgagggtaaaaaaaaaaaaaaaaa

SEQ ID NO: 136360 - DNA, 625 bp, Arabidopsis thaliana
  unsure (1)..(625): unsure at all n locations
gtaaggaccgggataagctgaagtggaactttcttaggacagacaagtccatatgattcttcaagatcaacatcttctacctccattccttccggaagcttccaatcaaatcggtaaagaagattgataagagtcaagtgtaccaaagccatacccatccctataccagggcacattctccttccgctaccaaacggnaaaaactcaaagttcaaacccttataatcaatctggttatccataaacctctcggggatgaaagcttctggatctttccaaacgtttggattcctatgaatagcccatatgttgacatggatccatgttttctttggaatgtcataacctccaatctttacatcttttgaagcctctcttggaattagaagtggaacgagcggtaataccctaaacgtttctttaactaccattttcagatattcgagtcgttctatatcttcctcaatgatatcgtctttgttttttataacttctctcacctcggcttgcgctttcttcataactcttgggtttgaaatcaaatatgtcatcacccatgtcataacttgtgcagaagtgtctattccagcgttaagaatattgaaaagaattcctttggtgttgt

SEQ ID NO: 136361 - DNA, 449 bp, Arabidopsis thaliana
  unsure (1)..(449): unsure at all n locations
gcgtaacaatgaatctctttgnaactctctcttccctgtcaagggtccctcagttcccttagcacagtatcttcgttacgttgaccagtactgggataatctcaatgctcttggtcgagccgacggaagcagactccgtctattgacgtacgacattgtcctgatgctggctcggtttgcaacaggagcttcttttagcgcggattgccgaggtggaggaagagatagcaattcccgtttcttgcctttcatgttccaaatggcccgtcatcttctcgaccaaggaggccccgtgcaacgcacaaacatggctagatctgtttcatcgtacatttcatcatcatcgacatctacagcaacagcgccatcctcggactcgcgacctttaactcctggatcccagctatcatcaactggaacagaggaaacggttcagttcatgatggtaa

SEQ ID NO: 136362 - DNA, 595 bp, Arabidopsis thaliana
  unsure (1)..(595): unsure at all n locations
gcccaaaccccctgccatttcnaggtgnaaaccccngggttggnaaaaaanagananccccggggggggagggattnccngcctttnttgggaaaatcccgccntttaccttccactgcctcccaaaagcactcttcttggtgagaagagtcagaagtatcagaaacacccaggagcaagagtggagagcgcatatgcatcatctgctcacagaagtgcagacgaacagatcccatcaagcacaagctttgtgaagctgtcggatatgagcgaagaagagtggacgattttcctggagaaatatcaagagctgctttatccagccattgaaaagcgcaagtcgataactttaggacagaagcagaggcagaggctggggacttcttgtcagttttgagaagactgaagaagaagaagaagaataaaaggatcgtgtaaagtcgtgtttctaagggctttgcttagactggattgttggaaacgcgtaaaggtgaagatatgagtggaatggatttagtgtaaatattcgttggttactctcagcttttagtatggaggagtctcgagagatgaagagaaattagtcatttgtttc

SEQ ID NO: 136363 - DNA, 396 bp, Arabidopsis thaliana
  unsure (1)..(396): unsure at all n locations
aaaaaccccacaaacaaatctgtaatattcacatattacaaaccaataaaaaaaataacaaaccaataaaaaaccttttatagacactgattgtgtttttcttgtttcttcacttatgtaggtgatgaaggctttgttgtgtgagaagatttgccagtgagtactttcttgaccttagaaattgaatgctttacctttgaaccaacaccagagagaatgccgtgagatttcttatgagtcttgacaatgcttactgtatctttagcttcaaccatcactattggatctgggcttgttttatcatctttatgttcatgatctncatcatcattctcatcttcctctgttttaggctctttttggatgtggtcagatagtgatttccttgccggttct

SEQ ID NO: 136364 - DNA, 610 bp, Arabidopsis thaliana
  unsure (1)..(610): unsure at all n locations
aaaaagngggnaaatcttagnccgggttaaacccnccnanaatntncatttccaggnannntttcccctggaattantanccctccaggnccaattttatttctncnngggtccccattaaaaattgggnacccttcttcttnagatgtttcccacaccttgnaggctnctgcctncaacggctacagaccagttttgcgatnccgttttggtggttcataatgccctggtccgatcttcattgcaaccttttcatctattatagccgcatacacatctctctcactcttgtctatattcccctcactccgacagtggagtttctgtctgttcctgagagagagaagtgcagcaatctcggaatgataatccgagaagatatggtcgaagaagaccgctggtgttcctggatgagttaggatgtaagcatatccttgcatttccttcccctccggaaatctccaatgaccctgtgtagagccagtgtcatgattctcgatgaatgttacagcacgagaaggccaccaaccaactacacctggaggcttcccttttgggtctgagagtctccaatattcacatttttgaagcgccgtatgaagaattcctg

SEQ ID NO: 136365 - DNA, 537 bp, Arabidopsis thaliana
  unsure (1)..(537): unsure at all n locations
tttttttttttttttttttccacaagaacaatcattctccgcttaaaacacaantccagatacaagagtactngttttttcatttcaacgccttaaaacagggtcaactatgcatgatgcggaactaaagatgttttaaaagatctacaagacgtgtccctatggctagggtacattacacaagagatgcatcattcatctacacaaacaacacgcactcttgatctggtctcagttcacttcccctcttctcttcaggtactcttgcatgcaactggggtgggtttcaaatataaagggcatcccccgtctctcaactagacaatcggatttgaggattaaactctgtccaggatctacttccttctcatttacttgngattgaatacttccccaggntttttatatgancgnacccgtcatcaaccagccgtatgatcgcctgtcggcgngatattttnntnncccgntttnttttcccaatnaatgtccacaggggggnntntgntgacttcccaccaaaacntangggttttt

SEQ ID NO: 136366 - DNA, 483 bp, Arabidopsis thaliana
  unsure (1)..(483): unsure at all n locations
atgtatgttatatgaaatttagttgtcggaaagagaaaaacaaaaccacctgctacaaacatgtgtgtatatgtatgttaaactacaccacattaatgtcgcattgatacgattcacaacatgacatttgtctaatgaccatagcctgggatctaataacaagaaaacagattaagatggggggagtgaataattaggaatgtgaggaaatgggggagaagaagaggaaggccaaagctgagcgaatttgacctgggagatgctttctactagtccgacgggtgttatctttccgcccaccgtcaccttctggggcgctaaatcaatagtgtatgacgccaccccccccattggggagatatgctttccaacctttccttcacatcccttgcaatggatgatnccncaaacacacctggcacagtggtggaccgcgtgaacattggcnngagagngaagtgtgagagcggagtgtgggcgaga

SEQ ID NO: 136367 - DNA, 370 bp, Arabidopsis thaliana
aattcggcacgagtataaattatcaggagacacttttgttgagattggcttagttatttaatacaaggaagcaatataaggactacaaaagaccaatacatcatcaagactaaccttattttcatctccaaatatagattcttttccatctttcctcttagcatatgacaatcccaatcttgatttagccaccctcaaatcaccaatccccgagttcgtatccggacccgcaaatccgcccatcacgggagctaaaggcggtccgataagaagcccgtcagctccaatttgaggccctccgcgagcatattcaaatagtgctgctccacttcctccaatccttaaggaaggacgattgggtcatcacaat

SEQ ID NO: 136368 - DNA, 369 bp, Arabidopsis thaliana
  unsure (1)..(369): unsure at all n locations
nnnnnnnnnnnnnnnnnnnnnnnnnaggttggaaacagtatgactctgtctttaagattcagtttcacgatagtaataataaaattacataaacaaagacaacaaggtaacaacatcaaatggtctttaatggcaacaagatgacactattattcccaagtttacgaatcacaaccaaaagggaaccaaacacttaatcacttggtaagccaaggatattcgtcaggcgatgaaggaagcctcgctgttaaaacctcaacaccagtctccgttaccaatagggtatgctcaaactgagcgctgcgttttccatctgcggtaactgcagtccatccatcaggccatgttcgatccctccacccccctgcg

SEQ ID NO: 136369 - DNA, 357 bp, Arabidopsis thaliana
ggcacgagcttgctgttgaggttggagaaagaagaagctgttctttggaaatgacaagctcactagaaaccatatcaaagcgatattgatggtaactaatcatatattcacaatcaaatctgtaagaaaaatttaaacaattgatgtttatatgttgttacaggatgttcttctagcaggaatggatacttctgcaataaccatgacatgggcaatggcagaactcgcaaagaatccacgagtgatgaaaaagctccaatccgaaatcagaagtcaaatcaagaacaaagaagaatcagctttgatgacactgataagcttgagtacctcaaaatggttatcaaagaaacatggagg

SEQ ID NO: 136370 - DNA, 313 bp, Arabidopsis thaliana
  unsure (1)..(313): unsure at all n locations
ggcacgagaaataaccaaatgcaatagtatgttgtattgtaccatcaaccattgttttcgagtttttcctttctttgttttctttttgctttctgaaaagttatatataaattttttattctgcttcttctctttttaatggagaacattttcatttccatttcttctgatatgcaattatcttaacggataaaagggataataattgtttttatttggccctttctcttggagcttttncccatccatctgttagacgtacttgaggtttaatttatttcttataacatttttctccttgctaaaaaaaaaa

SEQ ID NO: 136371 - DNA, 403 bp, Arabidopsis thaliana
  unsure (1)..(403): unsure at all n locations
tttttttttttttttttttaaagagcaatatgtgtgtgctttggcattaataacacaacaaaacagagtgtctcaatgtttacaacaacgacaattttctaaattacaatcaatcacaatttttaataacaagagacacattgccaaaaataaaacacataaagctcttccttgttcccgaaatcaatctttatcgatcgccgatctcacaaactgatcacactgtgtaactccttcagacaaaacatcagccaaaacgccgacaatatcaaatgcttcttgtagatcagttgcagagttgatttcgtcgagccacgagatcaattccttggngaaaccaatcatttctttcacattcagcagcttctctttcattacaatctcccatggctcaagctctact

SEQ ID NO: 136372 - DNA, 398 bp, Arabidopsis thaliana
  unsure (1)..(398): unsure at all n locations
ggaaaggaaagtcaaaacttgaaggactttcttttattcattctctttcgnntttactcatttaattctcaaagaaagtgtataacgaagaaaaccacaagtcacaaagtactgactagtacaaggaatcaaaagagaggctttttcccattgttcattcccaacaaatgttcaataatttgtcttccagcatcacgaagacccgaatgcataaactcattcgttacccaaagtctgatacccgagatatgagaagctgtttccgtcaccagcttgaagtttacagtacatatcgtcgtaggaaaccgctgcagcaacaggcaccttggtgattctgcaagctaggaacatcatataatgggggccaatcctctttcttggccaaaagatcggcggca

SEQ ID NO: 136373 - DNA, 505 bp, Arabidopsis thaliana
  unsure (1)..(505): unsure at all n locations
caaaacatcaagccaacttctgtgctcgacttaaggaggaaatggtgtgtcctttgcgagtgattatcgtgaaccgaggaccagatactgagctattagtagccaaccctgtggaactatccggaaaaggaagaccacgagttttctacgatgtcacacttgcgttgaaatcactaggaatctgcatcttctccgctgagattgggagacattcgactttagatcgacaatgggaagtttatagatttcttttggatgagagtcgtgaattcccattggctagcctccgtgcgagaaatcaagtagtagatagagtcacaaagacacttatgggttggtgaagcggatgagagtgagctttcatgaacgttatgctacactcaaggggacaaagaaacaaagtcttcttcgcttgcggcttcgggccggtgaaaaagtgttcaaaggggtttttattcttttntttnggccnananngttaaantttngaatttaaaaggtttnt

SEQ ID NO: 136374 - DNA, 518 bp, Arabidopsis thaliana
  unsure (1)..(518): unsure at all n locations
ttttttttttaacaattccagccaattctcatttcacatgatcaaccaattcttaaagtgacttaatacaattcattactcctgaaatgaacacagaaacaaaacaaaaccgatgggatttggctacatctaacaatcactaaacactgagatctagtagttttcacctacaggtctagaaggaaagaggcgcataagaaaagtgataaacgaccagagacacattacagctagaaactgcaaagtcacaaccaaaccaactagtgcaactcctcgctctgttatttcagcagtcgttgccgcatctttcatcataaacatcagcctctgaacaaaagtcgctgctcttgtcacctgatacagcctatacacctcaaagactattgggacaatggggccacagggatgagccacgtctttcaagccgngctcgaaactcttggactggacagccaccaagaagggggcctgnaatcaaggatctttccagggtggcaagctgnaacagaatcggggct

SEQ ID NO: 136375 - DNA, 332 bp, Arabidopsis thaliana
  unsure (1)..(332): unsure at all n locations
ttttttttttgcgttaaaacattttatttaaaaagaagaaactctttattttttagtcctagtctagattaaacatcaaaggaagatcgcgatgtttttatatattgccatgtgatgacattatttttaggatctagaaacttcgttggcacaaagtataagctcgtttttcttgttgacaagtgagtccgggagcttcttccatgtcaatatcgtcaaccttcatgccttctggtaacttccaatccaaatgatacaaagattagtcaaaccaaactcgaccattgttgtccccatataaactgcaggacacattctccggncgcctccaa

SEQ ID NO: 136376 - DNA, 888 bp, Arabidopsis thaliana
  unsure (1)..(888): unsure at all n locations
agaatggtttccaacagcttttggaggattggcaagaaactgaaacatttactactgcacttgagaaaatcgagttttgggtattctctagaatagtggagtctgtttggtggcaggtctttactcctcatatgcaatcacctgaagacgactcatcagcaagtaaatcaaatgggaaactgatgggaccttccttgggtgatcagaaccaaggaaccttttcgataagcctatggaaaaatgctttccgagatgctctgaacggatttgtcctatgcgagganggngacacgaatgcggttgcttacctgtattggctagaatggttatggacaagtgtatcggtagattcgatgtagccatgtttaatgctattctccgcgaatcagaacatcagattccaactgatcctgtctctgatcctattcttgattccaaagttctgcctattcctgctggagacttaagctttggatcaggggcacaacttaaaaacgcgattggcaattggtctagatgcctcactgaaatgtttggcatgaactctgatgattcttcagcgaaagaaaaacgaaacagtgaagatgatcatgtagaaagtaaagcctttgttttactaaatgaacttagtgatcttcttatgctcccaaaagaccatgctgatggnaatatccattagggnagaggtatgcccatcaatccaggcttccacccatcaaaagnatacccctggnaattcaccccggatgngtctggccagtnaaganccggngntggcccagaagagnttatgctgcagngaccattggnggnaggnaccntccgaagaagntcccctatngggttntccggtntnaaagncccatggccangggatccagaaagggc

SEQ ID NO: 136377 - DNA, 558 bp, Arabidopsis thaliana
  unsure (1)..(558): unsure at all n locations
ctaacccaaaantnaggntttncaaaaagggncccaaaaaatnaatacataggttaagaaacagccncaagnggtttnctttttaccaattttncacttgccgnttcttttcttcaccatctccttatacttagtgatggaatcaattctctgtaacttcaactgatgcttgaatcgattgataaagtcatcagnttttgcatctacttcttcatcagcttcttccaccgtcgtaactctcggcactttcaccgtcgcaggacggcgagcctccacggagatttcatcttcttgaaagtgagagaacggagatttggtactagcagattttttcatcttctttggaagcttcggaggtctaattccagcagctggttcagtgtcagattttgtcctagcgacatggtttagattaagtttactataaacctcttcaagactctgttcttcttcttcttcttcttcttttacttcttgttcttgtacttgtacttgttcttgttttgtctctacggtcaccgacggtggtgaagcttcgattatattggtgggttcttg

SEQ ID NO: 136378 - DNA, 581 bp, Arabidopsis thaliana
  unsure (1)..(581): unsure at all n locations
gccgcctgacaataaagggcaaccctaaaacgttctncctaggnggcctttagaacaggtaaaaatggtgcctcccgaaagacaacccaggtcaaaaacaggacctactacctcagggaaaactttcaacagctttgcacctcataggcattgcacctggacctttacacaaggtcccatcaccatggttcccggtgctacacagcgtgttcagaaggggtgcccatggtttccacttggccgtaatacagcaattcgaattctgctgctggttttccccagaccattgaacagcattcattatcccatcccagatnacatgcacaacctcagtctctggcagctttgcatctttcacctgttgcttcaccatttcagtcacttcatctacgtttatttcctctgtcacttggctcgtaaggaccgctttgatttccttcagcttcacctcaaatattttcctttcattgtactctaccagagctgtcaatcctgccttagtgaaatgctcggcaaaactttctgtagtccgctttgtgggtggcaggaactccaagagtttgtcatccatcttgccacgc

SEQ ID NO: 136379 - DNA, 534 bp, Arabidopsis thaliana
  unsure (1)..(534): unsure at all n locations
caacttcttgtggtattcctgatttccgaggccccaaaggaatttggacgttacagcgcgagggcaaagatttacctaaagcatctctgccatttcaccgtgcaatgccgagtatgccccatatggctttggttgaattagaaagagctggcattttaaaatttgttatcagtcagaatgtggatggcttacatcttcgatctggaataccaagagagaagctttctgaactgcatggagactcttttatggagatgtgcccatcatgtggagcagagtacctgcgtgatttcgaggtggaaactattggcattaaaaggagacatcaagaaagtgttctgttgaaaagtgtcggagctaaacttaaagataccggtcttgggtttggggggatgcttttcctccaaaagaaattgatcccttcgggggaggacctcaaaaaaggctnntccttggtnncctgttttgggtnccngttttcaggtaaccccntcttncaattttccntnaaagtnnnaaaaggtggggcaaacc

SEQ ID NO: 136380 - DNA, 571 bp, Arabidopsis thaliana
  unsure (1)..(571): unsure at all n locations
ccnctttgaaaaaantnttttgggtgaanaanttggngggtcgacatccnatgntgaggcaaagctaaacctcttgcagcncctaaaccaatcctaaaccgaggcggccaatcctattcacccctatttgaatccaacaaccgagtgaagtgccccattagacatatacttgtaaacaaggaacttctcttcttccacaacggagaaaccaagaagcggtgctaagttaggatgacgaagctcccatagctgattcatctcataccgaaactccctttccccgagcttacacgtactcaaatgcttcaccgcaagcgctgaaccatccgggagaagcgccttataggtagtcccagtcctagtggaaacaataatgttctctgagttgaagttattagttgcagccatnaaatccccaagtttaactttaaccaaaggcttctgaaacaaagacacttgagtaagcttatgactacgaagtctctgcgctaaaccgctaactcctacttcggttaaaccgcttcttcgtctccttgtccacttcaaatgataataccaccaaattcccaaa

SEQ ID NO: 136381 - DNA, 461 bp, Arabidopsis thaliana
  unsure (1)..(461): unsure at all n locations
ttnngnatccgnaaaccttnaaaganttgggcntaaggnttgatannccaccgtcttgtcaagatncaccccaatttgcagtgctgggtgaatctctcaaatacaatcagctaaaagctctctacacttgtcatcaccaaggaaagtcacccatctaggtgtctcaggagaatcagaaccctcacatttcacaccactctctaccttaccagagttaaatccaaggacaagattcttagcaaagctaccaacaacaactgaaacaaaaccagttccagcctctgagaaaaccttatcaatcactctatcaacaacactcgagtctgatgatttctcaattcctgaatcaccaatagacgattcggatttgtacccacgaaaggcaccaatagtcacagcctgagaaaccctagaaagcgaatccgtaaactcattcgaagttgtgatcttcgcgatctgct

SEQ ID NO: 136382 - DNA, 584 bp, Arabidopsis thaliana
  unsure (1)..(584): unsure at all n locations
aataatagactttgaacttttattcacatgtatcaatgacaaaaagttcagagttcattaacaaaggtggcctagaagagagataaaaatttgaggatagttctgtaaatagaaacatataaacaaatttatgtgataccgcatgataatatttcatgtaatctacctagccgttgggctcacatcagtatcaaatgtcaagcttacctctagggaactctttgagtccatgtccctactcgctcctccccntgaattttcagataccaaacattcgtttaatgcaataagaacttgagacatggtaggtcttctcgttgaagaaggattcagacaagacattgctagttcaacagctttccacacagaaccagaatcatagtctccatttagacttggatccataatgctaatgatgtctcctttcgtaagcattatccccacccattctgaaatatatggcttttcacggctttggtctatcactggccgatttgtgatcatctccaacagtacaatcccaaaactatatacatcactcttctctgtcaaccgatttgttttgtaatattcaggatcgagat

SEQ ID NO: 136383 - DNA, 684 bp, Arabidopsis thaliana
  unsure (1)..(684): unsure at all n locations
cnggttcccccccccgaaaggnaaaatcngccnacccaatgcctnntnctgaaancacccgagantccagattcactagaacngcanattttgttgctgctttgnccggatcaagatgttcctgattaccttttccattcagcaacagcggttcatttcactagctactaattcaattccctgtgaagnaaattcaggactcgtgcaaccatagattccaaacaatcccggtattgttaaagacgctagtgaatgcagtgcatgattgaaactgctgatgttgggttcaaaaaggcgcaagatagagcccaagagtgcattccttttccaggggcctcccgcaagaaaatgagccacctcctcccataagcatctgaagaaaagttgcaatgatagcttccttctcgttattccatcctggcacttnaaaagcaagcgcaaaatgtgtagcctctccacccgtatgttgacggaaatctccaccgacatattgaaactttgctccgcaggtcggggtacattagggaggtcagatagtaatggctcaaccacttttagaagttcttcatgatcaactccactagctgctaggaccattcgtgaagcagtgtaattctnaaaaaaaaaattctccaagacctccccagtcaatccagtaattgcagantcaggtgcatacaatgg

SEQ ID NO: 136384 - DNA, 558 bp, Arabidopsis thaliana
  unsure (1)..(558): unsure at all n locations
catcaaaaatcccatagccttcgagagncggtggtgctactgtcaaggtaactgcatcaccttctggaacaccatcatgctcaggagcggcccccattgtttggtctacaaccagctccatcatctagcttagcctcttgctcatcaccttcaatgtggtctaaagccacagcttcctcagaaccttcaatgtgatctgaagccatagcttcctcagaaccttcaatgtgatctgacgacacagcatttagagcctcaggtgaattgtctggattgggagacgaagatccttcatctcgtgtttctgtctccattttggcaccagcatttgacgacactttttgcagttccttttgggatgtgtctgaatctgatacatccgnaattttcatatctgttgcctcaattgaactatttccattccttgcatcattcagatcatcattgttttcaactttaaccaagttggaaggaggcacttgaggagcctcgtgatttttgacatttggaagaccctttatttcaaatctttgctccttgtagaaatccatagcaatc

SEQ ID NO: 136385 - DNA, 573 bp, Arabidopsis thaliana
  unsure (1)..(573): unsure at all n locations
ggtgccaaanggagaagcaccagaccccataaaccgacccgnccacccaagntttcctttttattttgttgaacaccagcttgccccaaaatgcagaaggagtccgcccattaatgatcgcttgcttctttgagttataggcaatttcgaaaagcctttttttcacaaacccccagatggttttccggccctttgtaatgccatcatatattcgatttatacaagcgagggacccctacagaaatattggtggccttaacacagggaaaatcatccatcagcttgaagacatccccctgatagaaaccgacagcaacaccaccatacacccccataatctgatttgcacgttcatatatgtgcgccaaaggnagatatgatatgtaaacatctgaaggaaagaattctgcttccacactggaaccagcnanattngcgatcaagtttccatgagtcaacacaacaccctttggtgttcctgtggttccacttgtgtagcatatggttgcaatgtcttctggctttggaggcnnaaatggatgtaagctacttcgaccctgactcaatagcttt

SEQ ID NO: 136386 - DNA, 496 bp, Arabidopsis thaliana
  unsure (1)..(496): unsure at all n locations
cctgnngaaaagctnatnangtaccctgtaactgacccccnaagaaccctnacgccggaatatggaacnccnaaactgttgtnaaacctatagttggtgtttgctggaaatggcctgcttgatggatttaacagcatttagataaccaccactgcacagtgaacctagttcatcgatgaccaagcaatgaaacgttggatatatcaacacccttcaaggttacaatctccaaaagtctctcaggtgtagcaactataaattcaggctcaacgctttttaatccggaaatctgatgatctagtggtgctccttggtgtaagctcacagtatgaattccaatacctttcagtgccttgcaaaccgatcgaacctgagaagctttagactgagatggcacaaggtacaaaagnaaaggactgtttcccaacaactcctcctcctcctccacctcgtctttctcccgtctagcaatagcatcagcagcagtagaaacaat

SEQ ID NO: 136387 - DNA, 409 bp, Arabidopsis thaliana
tccacctaatatgaatggtgccgaaaacttcaggcgcgtggtaactttgggtatgcaccccagtctattcgaacggtttcggttctcctactgaagagctcatcaagcaacgaatctgatgcaggttgtcgcgttaaaatcttgtatgtcatatctgttttactatatttccttagaattgagatgcatgagaatggaattagaggatcttcaagggttcccaccaaagctggaacatctgaaagcgatttcatcccaaagtatcctgggtttaaaagccccctcacaaatgtcgtgtgcgtgtgttgtagttctctcttaggaattgagatcgtgggtgagaactgaatatcccttcgtctaatggtgtggctactactgtgacatcacacttgtagctgtttccttt

SEQ ID NO: 136388 - DNA, 552 bp, Arabidopsis thaliana
  unsure (1)..(552): unsure at all n locations
tataaacattgaggctatatgaaacactactttccactatcagtcacccccaaaagaaaaccaaaatagagaacgagattcatattatacacacaataaaaccatataatatacatatgattaacaaatacttggaatgaataatttggattgttctgacaaatccatcaaagcctcctccactaactcctccagcaacttcaattctaattcctctcccatggaatccatttccaatctcaaactctcctgtgaaccaatctcagctacttcaatcctcaccactttattcaccgccaaactgctcaagtctccgtcttcatcccaccaccggtcttccactcttccggtacccggtaaacactcttgcattctggttatcacataaacccccaatgggttaccagagagggtatgggctactacggggccaagatggcccggggtacgccccaagggagcgtgtggcggggggaaacccaggtctccgggtggtccggggctttcgggcggtgggcnggaggttcccnaatggnagggggcntgggaggc

SEQ ID NO: 136389 - DNA, 612 bp, Arabidopsis thaliana
  unsure (1)..(612): unsure at all n locations
ttttttttttcatataacaaaaattgaaggaacagatgagttaaggcattacaatattcagtttaaacgttgtatcaaaaaatctgaaacagcctttgaaggtcataacaatcagacattgtcaagttgtcgaaactaacagagaacaagatgtggaaccaaaatcagcatcaccttcctttatatttacatggctaatatatgttcgagaagtacatgttaggaccatgaagctatgagtcatgttgagtcacctattcccttatgaaccagcatatcatatactctgtctactttactcggctctactttgaagaagctataagcatcagactttttctttatctgccccttctttatttctcttgttaagatatccaacatcttcaaatagtgtacaggcagtattctgggcccattgcacatcttcctttcgggcnctgagagtaagtcagcnccaaggggnccatcacatccccagngnccaaacgggggaaaatcctngggggggggccttggnagngggccgaccaagggggnaaattttggggaacccctgggctttangggtaccgggaaaagccgggcccggggaanngggnggaattnnng

SEQ ID NO: 136390 - DNA, 543 bp, Arabidopsis thaliana
  unsure (1)..(543): unsure at all n locations
angggtgagaagaggnttggaagcccattgangntctcaccgggaaanctgggaagncatggggttaaaagatgttgtagctgctgancancgtcagcctcttncctttcatcttaagcctaagatagtggagctaaaggtgtcaatgcattgctacggatgtccgaagaaagtcgagaagcatatttctaaattagacggagtgacatggtacaaagtggagctagagagcaagaaggtggtggtgaaagggaacatattgccggtagatgtgttagagagtatttgtaaagtcaagaatgctcagctttggtcttctccttgaatcactcttttctttccacatgggcctttcatgtcaatctccatctttcatgttatattattgtcattatctaattttgcgtacatacacatgcatgcatctattttctctgaatctctaatctatatcccttttttgttttgttcaattccactctattttgtaacattttgaatctatctcgtttgtcatatatacaaattagtggggatgctttt

SEQ ID NO: 136391 - DNA, 589 bp, Arabidopsis thaliana
  unsure (1)..(589): unsure at all n locations
cgccaaataaaccgattgatggaccactagatgatttgacaataatgaaggaaactctgcgtgtcaaagatgaagaattacataatttagccagggaacttcgttctcgtgactcaatgataaaggaaatagcagataagctatctgagactgctgaagcacctgtagctcgagcatctgctgctcattacaatggatgaacaaaggaaaatcgtttgtgtggaatttgagcgcttgactacagactcacagagacagcaagaagccacaaaattaaagctcaaggaattgggaagagaagacctttactttgagtaagggaaaaaggtccaattgggttaagggaaagagacgctgctctccaagaggcacatatgtggcggtctgagcttgggnaagccagagagcgtgttgtcatacttgaagggagctnttntnagggccgagagnaagttagggtttcagaagcaagcggtnaagcaaattcaaaggggcttttcagaggaagcacctctttggccaggnngcaagncttttgcctntntantttnttcacctagcttaaaggnggctnttgatttttcccgga

SEQ ID NO: 136392 - DNA, 304 bp, Arabidopsis thaliana
gagcgagagagatgcagcgcgtacgagctttaaacatgttaggaaggtctgtgaatagtctaaaatctacatcaaatgagtgaagggaaatgggcagcaacacatgtggtggatgcggagaaagggcagtcagtaatgaggcagaaaggagcattatccaagatattgttaccgcagtgattgtgtactcgaaggaaagatatatatttgacatggtatccatattttgttctagcctaagaaggattcataatctggaaatcatactattagtaattatttggagagatgctccacgacgtta

SEQ ID NO: 136393 - DNA, 398 bp, Arabidopsis thaliana
taagtatatataaaccatatattagttttacatcaaaaccattgatataggttgatatttttaaaaaaaaaaaaccttgtgacagtttcatgcatggctttaacagtcataaaagaaggcattacacatataatcaaagtcccaagcacccttattagacaagctaaatcacattctcagatcttgagatagagtaatccagaggtaccatcgaatcctttggatctgtagaactttgcatactctgtaatagtagtgtctctataattaggagggttttcttcagacaaaatctctttgatgggtccataaactcgaggattcgccatcaaatacgagctgaagaaacatgccactgaaattctcggtccagctacattggccaaaaccctatgctc

SEQ ID NO: 136394 - DNA, 407 bp, Arabidopsis thaliana
ttttttttttttttttttaggtaaacgaactatagaatctgaagaatagaatcgtaaaatcagagcatgaaattgcatcttatgtcaaccgataagaaaagcatatttgtactttaaagaaaacttatactaaatggctaattacggccacgtttcttgacgggtacggcatgtaacgggttggtcttgtgcaatgtgagaccgaaagtctcgtccatgtccaaatcctctgaaccgacaccgtttggaagcttccagtcaaatgaataaagaagagaagcaagcataagaggcactgttttcacagccaaaggaaatcccgggcatattctacgtccggctccgaatggtgtaagctcataatctctacctctcaggtcgatatctttccctaaaaacctctctgg

SEQ ID NO: 136395 - DNA, 692 bp, Arabidopsis thaliana
  unsure (1)..(692): unsure at all n locations
cgaaagaggcatgattctnatgttagcgagcctgaatcggaggataataaacaaccactgcgaaagaaagaagaagcttaccgtggaggacagaagcagaaaagagatgatgaagacgtggaggctgatcatttgaaagacagatatactagagatgacaagaaagctgcaagagactctgatgacagtgagattgagtatcagaacaagaaacaactgcgcagtaaggtagaagtttacagtgcaggaatgagccagaaaagaaaagaggaagaagatgtgaccaaacatggcaaggacaagtatagaagtgattctcgtggcaaggaagttgctagagactctgatgacagtaaggctgagtatgaaaataggaagaagctaaagaatgaaagttaccaacgaggacgtaaacacaaaagagaggaggatgaggacaacgataaccatgggagggacagatattagaggtgatgatgctgttaaaaggtattggaaccacttaagggagacggcggtaggtattggaggtcgggccctttaggaagaaggagatgatgataggggtagatacagaccgagacgngaaagtttnaagnatgntgaggnaggnntttaancntgggggagncaggtacagngggttattgaagaccggncaacgggttaggaaggttnttattnttgtttgg

SEQ ID NO: 136396 - DNA, 357 bp, Arabidopsis thaliana
gattgccacggagagagcgcaaatattgaaagttgttttgaaaggagagagtgttgaatcagatattaactatgatccgtatagctcgtttatgtgaggactatacccggatcagatatttttgaacctctgcaaaaaagcagcttacttcccaatccgagaaatcctagaggcaagagaaagagggcaaaccgagtttctgttcctagaccattgacacaactggccttggaggaggttcttgctacctcaaaggaggcacaagttgctgcaagggggtacactggtttaagctcttcaatcttctgtctgggggagtccagcaatgccgttgaggtccagcagctataaacggca

SEQ ID NO: 136397 - DNA, 512 bp, Arabidopsis thaliana
  unsure (1)..(512): unsure at all n locations
tggnattacagattacaaagatacgaggntcttcatagacgttgtggaccattcactagatcctataacttaacacttgacaaactcaagtcgggagatcggtctgacggtgaagtttctggttgtagatatgtaatatggttganttccaatggtgatcttgggaataggatgctgagtctagcttcagcttttctttatgctctcttaacaaataggttttaacttgtcgaactaggagttgacatggctgaccttttctgcgagccatttccaaacactacttggtttctccccccagagtttccgctcaacagccacttcaacgagcaagtctctttctaacgcaaattcttggcaaccccgatgggtgcataatcgaccatgtagttccgtgattcccagtgaccaacaaaaagctttttctttttgtgaggatagccaagtttttttnggggaaaccccctggttgtcttaaaancgggtagnttttttttcccaactttttttna

SEQ ID NO: 136398 - DNA, 447 bp, Arabidopsis thaliana
tcgaaccccgacaacatcaggagggtaggttctaccggaaatttctgggtcgcctctgtcgtgaacaaggttgttatgcctaccgaccctagggcggtcaaactagacgctaatggaaaagtgctccagaccattttcctcaagaatgagtttgggaatactttgcttagtgaagtcaacgagttcaacggccatctttacatcggaactcttactggacctttcgccggagtcatgaaactttaaattggtatcaactatatggttctttggtgattaccatttttgatatcattttgaaaggtctgtttacagttattttaaccataataatatcccctcaaatgtcctgcttgttacgtgggtgacacaattgttcggtgattccttgaataggctactactacttattgtttcatattttcgaagagattatctctagttctt

SEQ ID NO: 136399 - DNA, 446 bp, Arabidopsis thaliana
ccgagaagccgcgatcgcgtacttaaacgacgctcttttgccacacccttggcttagagctatatgcttagataacgaccgtccgattggctcgatctccgtaacgccagtcgatgagatcagaggagagattggttatgtcctcggaagcaagtattgggggaaagggatcgccactgaagcggtgaggcttgtggcgggggagatattcaaggagaagccagagatgcagaggcttgaggcacttgttgacgttgacaatgttggatctcaaaaggttcttgaaaaagttgggtttgtgaaagaaggtgtgatgaggaaatttatgtatcttaaaggaaatgttagagatatggtcatgtttagtttcttgccttctgattcgttgcactgatctgatttgaattaacaaatatcaaatatatatattaagtttgtttgatgtc

SEQ ID NO: 136400 - DNA, 690 bp, Arabidopsis thaliana
  unsure (1)..(690): unsure at all n locations
atatctatggttttattcaaaatgatataatcagtcagaattttaagtcatgaggtggatgtctccactgttgtatctgtttgtaatgcctgtgatgatataataatacgacttgtgaaaaaaagaagaagatttcgtttctgagtcaagacactacctatatatagaactacagtgtgatttttatgaagaccattgtcagaactgacatgacttgttctacggtagatcttgcacttttagttggtttacatttgtgagatttctgattcttgtacattgttggtgtttcgtctccgaaccagggccgggcttgggcttgagtattctgcatcatcaccagcagatgatatgtttgatgcgacagattcagatattgtgcttganatggagtgtgatggagattgctgtctataggtttgggaagctgataagtctggaacttcctgtgttgtttttccttgcggttcttccgcaagctttcttaggaggttcataaccagttggaagnaacttcgaccgtgatggacagtactccagcaacttcgccatgttgaaattcccncggaattncaaagttgacccctaaggnntttgngggaaaaacgccacggnggaacccaaangnccaaagggttttnaaaagnatcattggntcnttnaaaccaggccatcattanaggnnnccaa

SEQ ID NO: 136401 - DNA, 464 bp, Arabidopsis thaliana
gtcgacggtatcgataagcttgatatcgaattcggcacgagttgggatacccatttggcctaatggcctcgattctctttgggcgacaccacaaggcattctctcatcccctaaacccaaactcttcgtaatgggaacacaagacgggttcactagcgttagccagctaaagaagaagctgaaatctgcagtcggacgcactgaaacacacctcattgaaggcgttagtcatttccagatggaaggacctgaatatgattctcaggtgaccgatattatatgtaaatttatttcatccctgtaaaataccacatgaaaagatagaccttaggggattattacatcctcgtcgaactacgttggtgtatgtccggaaattacttggataaatctttactagcacgataggagtttgatgtccctgtacactacgcactaaaagacttgttttcatatgttgagtt

SEQ ID NO: 136402 - DNA, 454 bp, Arabidopsis thaliana
aagatctctgtggggtttgatcgaatttaatagcgaaggagagagtgagagagagattgaagcagtaatggcaggaacatctggattgctcaacgcagtatagccaaagatccaaacgattgatattcaggccgccgctggatggggaatcgccgccgcagccggtgccatctgggtcgtccaaccatttggttggataaagaagacattcattgacccacccccaactgaagagaagtgagatatcaccaagattcaagactaagtgaagagttttccagtttctaagtttgttaccgcctctttggcgtggagctgaataaatttttggttcttttcttgggggcttttctggtttcaatttcttcaaatggaaggttgactgatttgtcctttctcaaatgtttttacccaaccaaggaaagcactttctccaaaaaaaaaaaaaaaaaaa

SEQ ID NO: 136403 - DNA, 477 bp, Arabidopsis thaliana
gccggtgcgattttgtttcaacttgttactgggaaaccaccttttgatggaaataatcacatacagctttttcataatattgtgagagacactgagctgaaatttcctgaagatactaggaatgagattcatccagattgtgttgatctgtgcagaagtcttctccgccgaaacccaattgaacgcttgacattccgagagtccttcaatcacatgttccttcgagagccaagacaaattccggatgttgagcattctggttttagtacctgtacggggaaatcactgttgccctccgcacaaccgagtactagtacaaaccgtttttaaatcaagtgcagaggaatgttcacaaacatgggagttcctctagtgcctcaaattctcaaatttcaaatgccacatacctcttttgagaagactagaaaagatactgagggacaatgctcatcaaaccaatctggagttgttgattca

SEQ ID NO: 136404 - DNA, 329 bp, Arabidopsis thaliana
attctccgcctccatctccagtacactacagctctccaccaccgccaccatcagctccatgtgaagaatctcctccaccagcaccggtagttcaccacagtccaccaccgcccatggttcaccacagcccaccacctccagtgatccaccaaagcccaccaccgccatctcctgaatatgaaggaccactaccaccggtcatcggcgtatcatacgcttctcctccaccaccgccgttctattgattcttttggaaaacacgagactgaaacgattgacgtgacacgatacagatcgaaacactatacgacgtcgttgtcaattcttac

SEQ ID NO: 136405 - DNA, 567 bp, Arabidopsis thaliana
  unsure (1)..(567): unsure at all n locations
gacaaaataagtgtaatcttactcaagaaaacatatatacttgcatggtacgtcacaacaaggacttgatccatatctaatacacaaaatcgagtaaaaatcattcttcatcaccgcgatttccattgacacgggctcccgaaaccatttcggattcggacattactctctcgtacttaacagaacgagaagggagaatcctaaaccgtccaaaggataaagcttgtgaaagcttgtcatagtcccatctctgctgaacaaacacaatgacagcaagtagaatcgcggtaaacaggtatggcgatatctccaaacttaggagaaggaagtccgaaattcgggtttaccaaaactcatggtccttctccaatgaagtaaggggtcagggacagagccaacgatggtagccttaggcatnncggggaaagtttgacagtntgatncccgaggtaatanagcttccttagtggntgccgggnatcatntgccacttaggctttggcanaacctgggggggcagaagattntggctaaccattncccccngttcagttgcccattgnggtt

SEQ ID NO: 136406 - DNA, 592 bp, Arabidopsis thaliana
  unsure (1)..(592): unsure at all n locations
caatgatcatgaagaatnttgtggcaacgtttctaaagaactataactcaacctcgtnaccgtttttttgggcggcggagaaaaaaggtgttgacgccgttaaagtgaagncgtgtaatccacgcgccggttttcggatgccggctttgctcgcggagtggaggcagccggggcggttgtaagggaatataatcggagttgataccggtggtgtggagaaagtatacgtcagggatgatgttagcggagagatagccgtgggagatttgaggaagtttaacggtgtgttgacggacttgacggaatgtgaggctgagacttggtgggacgctgacgtccttatctcgggctgatggaatccttgacgagagaaaatattggttgggacggttttgtcttaaagttaagaggacggacgaaagattcaacgccaaaaagaagtgtttaaagattaatgagaacgtcgcaacgttttgtaaataatttgtctgtttgcttctctgcgatttttattttaaaattttagttttgattgaataaaaatcagcgtcagattaataaaagtgtttgtgtgtttggtcggttactagtt

SEQ ID NO: 136407 - DNA, 561 bp, Arabidopsis thaliana
  unsure (1)..(561): unsure at all n locations
gagatttacttttagtcttttagacaagactcctaatgtatattcaaaatgtcatgaactaaagtagataacaaagcccaacgaagtccacaagctaaaaaaaaaaaaaaatatcactagcgaggaaatcagactaggcaacgctcattttctgccggttgctccaactcttggcttggccttaacctcgctttcctgtggcaggtgcaagaaaatgctgctttttgcagtcgccgggttgtgattttctgcacctttgctccagtcatagcaagccgcatatgcatatatcgatccatcgtggttgaacgagctgcatggaattggctgattgcacctcgaaatggccttgagtctttggtttacaaanctttggncccagaaattgnaagcnccatctgacccagcagttgcnaaagngccatgtaccnggggggnaattccagngngttgncagaatatatancatttccaccccgggggattgaatggaagttttgnccngtgggacncccagtgnnaaccaaccgccccattgccaccaaaactgngtaggggggg

SEQ ID NO: 136408 - DNA, 535 bp, Arabidopsis thaliana
  unsure (1)..(535): unsure at all n locations
cttctgcttaccggaaaagtctatatctccgacggaccttcttctctctagttaatcagacctcgcgctcgtgataatggcaacttttggtgcgcctgctaccgccaacagtaaccctaacaaatcctacgaggttactccatcaccggcagattctatttcgagcttaagttttagtccaagagctgatatacttgtggccacttcatgggacaatcaggtgaggtgttgggaaatatcccgtagtggagcctctctagccagtgctcctaaagcatcaatatcacatgatcagccggttttatgttctgcttggaaagatgatggaaccacagtctttagcgggtggatgtgataagcaagcaaaaatgtggcccttgttgtctggtggtcaacctgtaactgttgctatgcatggggggtcctatcgcagctatggtttggttcccggggataanntcccnttnnaactggangttggggtaaaacttttnaanttttgggcanaggcngnaaancttttnatcccacgggc

SEQ ID NO: 136409 - DNA, 457 bp, Arabidopsis thaliana
  unsure (1)..(457): unsure at all n locations
gaagagttctgtgcggctgcggtcagtgtttaccaactggaggctcttgaagaatgggaacagattgcaacttcagcatttgagcactttgaacatgaaggaaaccgaatcatatctgtccgtgatctcgcccgggagatgagcgtggggccgagtgcatatcctctgctcaaggattggatccgaagttcggatggaaagctgagtttcttggggtacgctaagttcttgcatggtgtgaccgtacgaagctcaagctcgagacctaggtgacacaccatgatgtaaaaagtcttctaacatgtgaattgagtttcaaggaaacatcctaaaacaatgttcgtccgtcagagaccttgggattcaaagatttaaaaaaaaaaacttgaaatggaattgaagtcaggtaggtntttcctttgtaaatnatnctttgancattttgttttcgaaacaa

SEQ ID NO: 136410 - DNA, 527 bp, Arabidopsis thaliana
gtggaattacaattacagcaatttgtattcaattgttgaatctaagcctggcttcatctctttggcctggaacgatttacctctcctcactctttcttcctggcgataaccaaaccaaaccgatccggtattcttagttttgttttgttttcaatgttatttttggttagacaaatattcaattgttaatatactccgtggtcagagtgttttgtttttcttttagttcgaacgttgaattaattcaggggtaggttttgaattctctgaaccttatgtgttttttggtaacatcatttggatttgtgaactaggtttaaaaactggtcttagtcttgttgttttctcattagataatttaaactggtttgcttctttatttttggttgggataaagtgaccggttctggtcatctgtttgagatgtaattactatttcataaaattaggaagttgaaagccaaatatatttgtaactactcttttatttgtaattttgctcaaaaaagtgatgaaatgtagttttg

SEQ ID NO: 136411 - DNA, 446 bp, Arabidopsis thaliana
  unsure (1)..(446): unsure at all n locations
aaaagaagctcaaataatcaatgatatcgtctctgcagatatatgaatctgtacagaaangatcagccagagaaattcaactacaaaaagctcaaaagcctttttttttttaatttacacgggtaaagtattacacaacaaggtattctgcgttcgctggtcacgaaatcaaaatcgaaataatgaatcaattgaaattgtaaccccttgatcctctttgctggtaaaggtccagtcctctctttgcctcctgcaacaaagcttctaagctctccagctgcgttacccatgactgcttcgaagcccattccaacactgccagaacctcgtccttggccagctgttcgctgtctgggacattgagtgctatgtaacagaggagctctaatgccggaatctgtacgccaccctctccaaagtaggccaactgaaccagatgtttgccc

SEQ ID NO: 136412 - DNA, 498 bp, Arabidopsis thaliana
  unsure (1)..(498): unsure at all n locations
cactaggaaagaggagactttattactcacggtcttcgtttcaatctagtaagcgtttaagcaggttcacaatgttacgtagaagtaaatacatcactcgcgtgggaactaactgacacatagaccagtcaggccgtagagacattcggtctggtttagtttgattaaccggtttggaatcagcatacatatcttaagctttcccggatttgctaaaggaaacaagttgtttctctctgtgcttctgaacaagtgcttccagattcttcgccttctcgtctccatctttgaaatgtactcttcttccatgtcccggtattagccaattgaaatccaggttgatcaatttttctacgttctcgagctggagaggcactgaaccgtgattgtactgctcaaaatgctcatccagatcggcataatannggcgcaggaanaangcctgaggnctatggacagcaacgacctcgatgncaganggaaagcgcacccaaganc

SEQ ID NO: 136413 - DNA, 602 bp, Arabidopsis thaliana
  unsure (1)..(602): unsure at all n locations
cagcgatgaaagcgagaagatgattgtgaaccatagtctcaacatactcgaatctcgattacctccctggtaaaatccttgctgcagagtcagctaggcagaagaagctgagtgaaacattagctaacgcattgagttcaaatggaagaatcattaatctccaagggagagagaggattcctgtcgagtttttacctggtaggagagctgaacaaaccgatgtcaaagcggaaatcccaaaagctgaaccgatcaagaggaagactcatggtcaagagtcgaaagaagagaagaaagagcggaaaaatgctgtaaaagccgaaaagcgagaagcaaggataattaagaaacagacaaagatgctgtattgcggtgaaacgcagcgtgctcaaagagcttgttgcttacctctggtccatcgtcgagacctcttaaataatatgttccttaggtaaaccaaaccaattcttcagcctgtttaaaaccagtttttccagccatttcgtggaatatttgcctggttgtttttttctttttcaccaaggtttgaaactcttgaaccttgttttggttgggcctttttttttttttttnctttcctt

SEQ ID NO: 136414 - DNA, 422 bp, Arabidopsis thaliana
  unsure (1)..(422): unsure at all n locations
caataattgaaaaaaactaactatttaaggaacaatgttacacgtcagaattcgctggctcaaagtagactttcaaaattttaacataagttttgngttcccacaattatgttttaaacccttatagtttcttatatttacaggttaaccccattattacataacagagcaaccattgggattctcgtcgctgaacattccaggagcgttcacgtttggctgcgcgtacggcacgtaactctcacttgcgttgtggtatcctgaacctggataactctgacctcccactgggataatcctgacctgtcatcgaataactcggaccgtacacggggcccttctggccaatgcataggggccgtgggataagctagtaccataattatccatcttattcaacatcgccacccgagccggcacaa

SEQ ID NO: 136415 - DNA, 565 bp, Arabidopsis thaliana
  unsure (1)..(565): unsure at all n locations
ccgatcatcaaattagttatcttcagctcaaattggatttggtttggtattacacccacaccagaccaaattgaaccaacacacaaaggctttacatgcagaggcagtagaagcatttaagccaaaatagcataaagagacagaaagtcaccatcacaaaacaactaagattgtgtccccatgtatacaaaaaagaaagggactctgctcataaccaaaatagaagacaaactgtaatatatcattcacttcctgcatctccaagctgataccgagtatagaggtcgatcttgccagcaaattactgcgcacccgctctcttccttgattctatacccatcaaaaccgcacccttgaagcaatctcctaggctgcaacatcgcataatagctaagngggacattccaaaaccagncaaatcgntcctctggtccatttntaagnttnttggggctttttcttctntaaatcccngnagggtatgatgtcttgantcctcccgaagggatttttcactttgtncatttgngggtttgncttttgttccaggataaaaatgtggngg

SEQ ID NO: 136416 - DNA, 512 bp, Arabidopsis thaliana
  unsure (1)..(512): unsure at all n locations
aatggtttttttttttttnccttttctacagaacagaaacattctacatacaaagaagccgagtcaagatttacatccacaatagatgttaaaaatgtacctgagttggttttatattttnccccaatttcttggtgaagccaaaattagatttgattttttaccactctcttattggatatcctatgaggacccttcacattcagtttccttgacgaggtgtggtctttnctcttcatcatctctgtctctgtgaaaagaagggttcttcccgctgctgctgctagggctattcggatcatatttagaagaggctaagaagttgagtgccaatactacatcaggtaccactggtctcatggtaggctgctcttgaacgcacattgctgatattgctagtgcttggtacagtcctctaactgggtattgtccctgaagcaatggatcaaccatttttgggaagttcctcctgtctttgaacaatggtcgtgcccatccaaccaaattctcgg

SEQ ID NO: 136417 - DNA, 363 bp, Arabidopsis thaliana
  unsure (1)..(363): unsure at all n locations
catggctacaacagaaacaatcatacaaggagcaattctggtgttaaccttggttatgttctgggcgattaagtatctctctcaacgaggcctaaccaaattccgaaccaaacaccgagccacactccaaacccagcgtcagctaatccaagcctcacgtctcctagctcgagcccgaaccacacccaagaaatctcaatctcaatctctcgccaaaacggcgctcaccgaagctgataatgtgatcgcgatttctccagatgatgccgccggtcacatcgtccgtgccctagctctagatctgctcggtcaccatacttctgctctcaaatcgttcgatatggcgntgacttatccgcgttt

SEQ ID NO: 136418 - DNA, 507 bp, Arabidopsis thaliana
  unsure (1)..(507): unsure at all n locations
ctcaaattgtcataacatttttaaaagcataattgaacacactttaaatctgagggaaacgaaagcgttcgaggtcataatgtaaataatggggaatagcaggatacaaagtgaaattcttagaagttattctaaaaggaaacaaagccacgacctagtccggtccatcgcgattcatcacgtgccgtttacggaactaggttgagcttttaaagcttcattaaaggcccactgggctttctctttcaagcccttgaactcataacactctcccaacagccgggaacaatctcgccggtatctgtaccggcgggcgagcctcaccggcctcttccagatcctcgaccggccgaatcaatcctccgtngccgattcaaagccagtttaattaaggtttttttaaaagggatggggnnnnttcccaaccgnaagggntttaacggggaaaatcnncccaattnaannttttnnnccaaaatttggtcccggaaatttanatngggncgg

SEQ ID NO: 136419 - DNA, 242 bp, Arabidopsis thaliana
aaagaacacaaagagatgatgaaagcaaaacaactactcgtggttggccttttgtggtctctactccttttaatcattcacacaacagagtccatatcagactatgaggtgaagtcaaacgttaacgtagaagctttaaccgtagaggagcaaaagcaatcaaacagaggaagacgcagcagtggtagcagtcgtaatcgcggacgcagaagctgcgatcctctgtatcaatacttgttcgc

SEQ ID NO: 136420 - DNA, 665 bp, Arabidopsis thaliana
ggctgaaaaagtaaagtctggtcaagtttttaacctattatgcatattctcgatctttttcttcctctttgtgttatcagtgaatgtttcggctgatgtcgattctgagagagcggtgccatctgaagataaaacgacgactgtttggctaactaaaatcaaacggtccggtaaaaattattgggctaaagttagagagactttggatcgtggacagtcccacttctttcctccgaacacatattttaccggaaagaatgatgcgccgatgggagccggtgaaaatatgaaagaggcggcgacgaggagctttgagcatagcaaagcgacggtggaggaagctgctagatcagcggcagaagtggtgagtgatacggcggaagctgtgaaagaaaaggtgaagaggagcgtttccggtggagtgacgcagccgtcggagggatctgaggagctataaatacgcagttgttctaagcttatgggttttaattatttaaataattagtgtgtgtttgagatccaaatgacacagttttgggggagtatatctccacatcatatgttgtttgcatcacatggtttctctgtatacaacgaccagatccacatcactcattctcgtccttctttttgtcatgaatacagaataatattttagattctac

SEQ ID NO: 136421 - DNA, 617 bp, Arabidopsis thaliana
  unsure (1)..(617): unsure at all n locations
gactcctcaagcaaatcactcctcacaccacagaaaaacaaataattgaagaaatgaagtcaatagtcttcttcttcctcctcctgctctttgccgtagcaacctccgataacgtgataaatggttggtataatctcacagccgtccatgacgatgaagtgatttggagttcttttgcggcgccaatgatgaaaggtggttcgtcgtacataacctatccggtcttgcgacctcagcaggcatgtaatccttgtagtggagccgttaaatataccaataagaagaattgtcttgcctacaccagatgcaaacgcggtcttaacggcatgtaacatactcccttatatattctctatgtttcaggtttgtgtcgttctaagcgtttggggaataaacttgcttgtaaccaaaattgtaccgggtggcttgtttgttgcccaaattattcgggggggttggttnnttaataattttcnttttaaaggcagcggggnatttttnctttaaaaccctanggggttncnntaaaaaaaaaaaaanggggggccnccnttngggncccagntttggnccggggnnatnggcggaataggcnnnttttnggccccaattaattc

SEQ ID NO: 136422 - DNA, 580 bp, Arabidopsis thaliana
  unsure (1)..(580): unsure at all n locations
gagattttgtctttaaaaaaaaaaaatacaaagacagaataatctctgtctcttcctttttatcttagaagataagtatgtctagttgggattataagttgtttagcagatcttacgatttctcattatctgttttaattactgtgtgaataaaaagagatttagatttttggtcggtctttgtttgggatcatggagttagttgcttgaggattaggattaattaattagctgattagtctaatgcaaactctgttttactatctcttgcagctcctactactcctcttcctgggctctcatgctatgtgggtgcaaattttacgacccaccaactttacttgtcaattgccggtggaggatgtgacaaatgaagggttatgcccgctttcccaacaaagatctccggagcctatctgcgaatcctccctgcaactggtcggcctcttattgtcaatcntgggcaaccncccccgnagggggaaccttanaattaagggccgggngggaaactaancgtnacttggtccccccntcccccccaantgggganaaaaggcggctgngggnggaaatcntt

SEQ ID NO: 136423 - DNA, 586 bp, Arabidopsis thaliana
  unsure (1)..(586): unsure at all n locations
catcaaaaccatttcatccgtagtggtcaatggcggcttctccgttggtggttcagaaaacagaggaggagtggcgtgcggttctttctccggagcagtttcgtattcttcgtcaaaaaggcactgaaaagccaggaactggagaatatgacaagtttttcgaggaaggaatcttcgattgcgtaggatgcaagactcctctttataaatcaaccacgaagttcgattccggatgtggctggccagctttctttgaaggactccctggtgccataaaccgaacccctgatccagatgggagaagaactgagatcacttgtgctgcgtgcgatggacatttaggcccatgttttcaaaggaggagggttacggtaatccaaccgatgaacgccattgcgttaacagtgtttcgatcaagttttaacccggcaaaatcttccccctaataatcctgagggtatgtttgatccgatcatacaacatcttcnaaaccagattgnggtggtnaaaattggccaccatggagnggatatgccncttccgggggggggcaatttaatgccncaaatnataggccccctttggt

SEQ ID NO: 136424 - DNA, 555 bp, Arabidopsis thaliana
ccccaatgtcaaaacctttgtccgtgcacatgacgttgatcatggtctcaatcttgaaaaagccggcgctcccgctgttgttcctgagacgctgggaccaagtcttcagttagcagctgctgttcttgcacaggccaaattaccttcatcgggaatggcaaccaacgatcaacgagttcagatctcgtcacttgtctgaacttgctgagctatgtgaggcaagtggaagctctctaggttacgggttctcaaggaagtacgagcaaacccaaaaccaccatcaccatctgaaacatctgacgataaccagattattgaaggcacactcgcttatctaacccttttttctcgcttctgggtaagaccacacaaatttcaacttctttttgcttaaaacttggtacaggaacccaaaatcctttatttttgaaggatctttagcgggggaaaaaggtaacaaactctcaaaattttgatgggatgatgatgtgttgaaatttctctagtttctttcctctgggggaaaaacaaaggcaaataatatttgtattcaac

SEQ ID NO: 136425 - DNA, 462 bp, Arabidopsis thaliana
  unsure (1)..(462): unsure at all n locations
ctaacgcataaatatgtcagaggagctgcaactacaaaaattgaatcgtctttcttagttatttagggttctttagagaagcaagaaggagaaggagaagatgggattacagttggagagtttgatggagacgataaagtcaaaggtgagtttgctaaggaagaagaagaaaacttacatcaaaatggacaaaagctccagcgtcagagtcgccatccgtcgtaagaagactagagatctcatcgataagaccttaaaggtcgctgatcgtcctggcaaacgaactcttttctaataatacttcttcttcttcttttttttctctcatattttgccatcattttttggttgttcttccgttccagtggatttggtgtttttggattcaggggtccatgtttgtgataatatggataggttctgggaataaataaaaggaaaaccatttttgggnaaanaaaa

SEQ ID NO: 136426 - DNA, 490 bp, Arabidopsis thaliana
  unsure (1)..(490): unsure at all n locations
gaggatggttgcatgttgagtcaagtgactgcaacggcaaaagttgcaaggaagtgtctcaatctgaaagggagaaaacgaccaagcatgagagaagtgtcgatggagcttgatagtatccgtatgccttgtggagatatgcaactgcaagaatgtgttagcgaaaacgaggaaggggaaggacaaaacaaaggacttgtggaagatatcatgagggcagaatcaaggagcaaagagtttgttaccgctccagcttctcactacaataatattgctgctgcctcatcttcttcgtggtcagatgtttgaaccattgttccctctttcaaacacggtaaaacttcatcttcggacacgaccgtttaatatctggtctttgctttttatattggttttcggtgttttgcaagtgtctgtaataaggantcttgtttgtatccatttccaaacaaaaaagnaaacacgnaaataattttatagtttggttaaa

SEQ ID NO: 136427 - DNA, 477 bp, Arabidopsis thaliana
  unsure (1)..(477): unsure at all n locations
aagaaaagaaaaaaaaaccctcctacggtatatttnacgaccattatcctcataatgggtctactgtcacttgaagacaccataaaagagaagctaaaggaccgcaaaaacgctcacttcatgttggttgacggaatgtctaagctactgacggaaaaagttaagacttgtcagtcattggatttccaagtttctggtgtcaaatggaggttggttatacgcttatctaggggaagaaaagaccatctatcttttgtcctggagatcacagatgaaaagtgtaccgggtctacttgggacgtcaaattcaactttaaaatcgggatagtccctcagaatggacccaggttatttgctctcgttttgggtggggcatcaaacgggaaaaaaacgtgtcaaaggggtagccactttcatntcacacacggnttttagggggggttttttttnancgccaaanggggttnttttccgngt

SEQ ID NO: 136428 - DNA, 469 bp, Arabidopsis thaliana
ttttttaagagagcatgccaaatccaaaagtaaaccactattgatccagctagattgaacagtggataccggtcccactaggggtcaccaggcgtgttctaacttgtttcaaacccacggttaatgattttgaggagaatcttccttcatcaagtcctttacctcattgattatctttggtcccatgtcttctctttaaccaaccaaacatgccttatcaataggacaaaaggggttgtaggtttttcaccaatggttattcaaaccctttgatgagtttaagctttgcttcagcaacttgaggtaatcaatggcttcgtctagtagtaaaagagcttcttttccctttgcccctggaactacactctccaggattctcagagcggtgtgaatcttgtcttttcttgactgctcgtcgctcaaaccagaacccgtttcttgtttgcttgaaatgtttgattcaggaagg

SEQ ID NO: 136429 - DNA, 299 bp, Arabidopsis thaliana
  unsure (1)..(299): unsure at all n locations
tttttacacaccaatatattatttggatgtaggagctctaaacacaaatccagttcatatgtacaaacaatcctctatggtctctactcatctcaattcaaaaccaaaaaaaaacaaacaaacaggaaatgcataagaacaagttcaaagaatagctcataatcatgaaacgcgttgaaagcttacgcggatttgataaattttggtcgccccttgcgctggggatctttgaaactnggnggtacnccatgnncaggggnccgggggtttnacccccaaaantccccttttcgggggnt

SEQ ID NO: 136430 - DNA, 352 bp, Arabidopsis thaliana
cttcaacctcgtcctccacatcttcctcatcatcatcaaagcccttgacggcattagaagacggagctggattcctggcttctccaacgatcttcattatgtcctctacgctttggagggaaaagcttggggtttctctcttgtagtcacgccgcttgagcaggctctgtaagctcctttggcaagttctttaagtaccatggatgcttcttgatctctttaagtgtgattctcttagctgaattagtgacaaatatgcgagagagaaggtgtctgcactcctgcgatatatgaacgtaatccgggatcttgtactggacagccattatacgttgggattgttttcctgaag

SEQ ID NO: 136431 - DNA, 553 bp, Arabidopsis thaliana
  unsure (1)..(553): unsure at all n locations
caatctccacgattcctctcttctctctaacttccagagacaagttgtatccctcgtttgctttctgcgaaactaaggtgcaatggcgaagataaaaccgcagcttcttctaaatcaaagcaagaagaagaagggtccaagtcgcataagtatttccactattattgtctgtaatcttgtagttgctgtagtcatattatcgttggtcacaacctatcgccattggtcccaaaggtcaagaaacacaattgaacatgaaactcggagtcagagatttgaggacactaatactgcgtcagggcaaaaaacttacgatcttcctggttttgctgatataaacacatcaaaaggccttataactgtcggaactcttcaaagaaggttcccctgaacgttgtgggacaagtttctagatctatgtcaaaaagatcacttcaagggaatgccgtttcagcgggttataaagaactacttggtacaagcttggncactcaccgagctctatacctntagaagaatggacagctaaaggnaagctcagaggtcgncttca

SEQ ID NO: 136432 - DNA, 547 bp, Arabidopsis thaliana
  unsure (1)..(547): unsure at all n locations
gacctaacaatggccgttcctccattattcttcctcctcacactcctctctctcccttctcttcttatctccgccggtgcttccaatgcctatccttctattcccggaaccgctcctatcgacggaggtttcaccgatgaacttaaacccattcgccgtgaagtctacgggaatggcaaaatctatgacatcagtcaccgttacactccggagatgccgtcgtgggactcatcggaaggaatcggacggttcctatggttagctgcgagtatgaagaacggatctcttgctaataactctgaaatgaagattcccacggacactggtactcatgttgattcacctggtcacgtctatgacaagtattacggatgcttggctttgatgttgacttcgctttgatctttcaaaggcctcaaatgggtcttgcgttgtctcggttgatgttcccaaagggttaaggaccatttncttgcttggaggngatgnaaancttttnanattccaaaaggggttagncgggggcttttnananaattgacaattg

SEQ ID NO: 136433 - DNA, 424 bp, Arabidopsis thaliana
  unsure (1)..(424): unsure at all n locations
tctaatttggggtcacgggtgggagtaccctcganttatgatgacatttctaaatcaagaggaggctacagagatncctacagtttgccacagagtgcaacaacagggaccggntcgctttggtccagacagccctttnagcagtttggtgtagcggagaggaatggtgctgttggtgaggagctcaggaatagatcgaatccgatcaatatagacaacaaacgcttcttctaatgttgatgcagaggctaagcttcttcagtcgttcaggcactgtattctaaagcttattaaacttgaaggatccgagtggttgtttggacaaagcggtggagttgatgaagacctgattgacccgggtagctgcacgggagaaggtttttctttgaggctgaagctcgagaaataaaccaggtgggtcaca

SEQ ID NO: 136434 - DNA, 533 bp, Arabidopsis thaliana
  unsure (1)..(533): unsure at all n locations
ctgttgacggcggcgattggccgtcgcggcgaaacgtggtggcttgtgccggcgtttgtngtagctggaggattctnaccaaggagattgtagctgttcctgaattctcctctaaattgactttccctatctccctcaagcagtctggtccaagagattctctagttcaatgctttataaaacgtaatcgaaatactcaatcgtatcatctctatctcggattaactacctctttgacggataacgggaagtttcttcttgctgcttctaagctgaagcgcgcaacttgcactgattacatcatctctttgcgttcagacggtatctcaaagaggagcaacggtattcttgggagaatgagatcgaacttccttggaacaaaattcacggtctttgatggtagtcagaccggagcagcgaagatgcagnaagagccgctcttctaatttcatcaaagtttcacctagagttcctcagggaagttaccccatcgcttcacatttcatacgagttaaacgtcttaggctctcggg

SEQ ID NO: 136435 - DNA, 417 bp, Arabidopsis thaliana
  unsure (1)..(417): unsure at all n locations
gctacaccccgaaatccacattgatataaagccattaaaggtgttgataacagaggaaatttaaatgtaaaggaccaaattttaccaaaaggggacaataacagttgcagtattagacgactttaaacatagacatactgaggaaaagaataaatccttgcttaccaaggaaaatcctccattgtatgcttttcaaagctcaaactcttcgtccctaagggccaaagcagcagcttcttcttcatcatcatcaacagcaaagtactcattcttctcctcaggcctaaacatatgaaacatgatcacatagaacaccaaactnacaatctcctcaagctgcaaanccggacgcagtgggttgacccagggaanttccagggcccggtccctnacgctgtgcnccgtnggancgtnggc

SEQ ID NO: 136436 - DNA, 354 bp, Arabidopsis thaliana
  unsure (1)..(354): unsure at all n locations
ggacttgcgtttatattaaagttaaaaaccgnaacgaggaataataaaaccctttagcgtttatataaagttacaaagattacaatttttgaagtaagtggtgattaacgtgccagaatttgcaagtaatccaaagattctaactttcgttatccaaaactttgttgttaccaaacaaatgatctcttctattaccaaacccgtttgaatcaagacccgagccaccaccgcgataattgttatgatcctgtgcggttgttctatagtttccatcaaccggagctcttgaactcgggtcgttagctccaactgaccggtatgagccaccagcgtaccttctccgtaggatccatg

SEQ ID NO: 136437 - DNA, 402 bp, Arabidopsis thaliana
  unsure (1)..(402): unsure at all n locations
caaattagtaagctcgcccatgctcagatccggtctggcttcgttaatcgtcgatgtcaatttgcggcgcacggttacgtccatccccaaccttttcttttccggcgcatcttagccgttgcattatcaacttcccgttactcctcccgtacatctctaaggtttccgattcaaatatctcgccaccaacaccgtctatcctacttttcttcatcctcttcgtcggagcaaagcagaccaacttcctcttcccgaaacagtttcagtggtcacggtcagcttgatagtgatgataattcttccaccgcctccgtcgcaatcatctttcccaaagttctttacattggcttaaccgttatttaacacttnggtcgngtttnnccggccggtccccggtttcct

SEQ ID NO: 136438 - DNA, 530 bp, Arabidopsis thaliana
  unsure (1)..(530): unsure at all n locations
ttgtttataaaactaaatttattgaggtcaatctttgattaatttttattgatctaaatcgtcgttgcaaagaaataacttcgagcagaagtccacacacttaggactcagcaattcaaaataagcatagaagccatagcaaacgtttggtttctaagcatctaagttcatctttctagctacaaacttgagagagagacacccgcttgttgttttgagtgaacatcgtcaggagcctgatttacccatgctgagatcaggtggtgcgcgatggcaaatggccccggggataaacataggagcaagctcaccgctttcaagattgaaatcagttgatagactctggcgttctctccacaccctttacagatctgccctacctttgcagctgcggttcctttgagcctcccggaatctggaaccgccnaagnttttttnacccctnncaaaggggcattgggacctcaaacnccctggnaaggtnancgggggnttggggaaaaaaaaaccgggncaatgggnggggggnt

SEQ ID NO: 136439 - DNA, 458 bp, Arabidopsis thaliana
  unsure (1)..(458): unsure at all n locations
cagagaacgacaacgaggctaaacacgtgagacagctaattgccgaggtagttgttagcggcggcgcagggaacgcagcagactacttccctatccttcgttacgtaacgaactatgagaaacatgttaagaagttagcaggtcgtgttgatgagtttttgcaaagtctagttaacgagaaacgtgtggagaaagtaaaaggtaacacaatgatcgatcatttactttctctacaagaaactcagcctgattactacacggatgtgatccatcaaaggaatcatacttgttatgatacttgccgggactgatacatcagctggaccgttagaatgggcgatntcgaattttttganccatncagaagtnttncggnagncaaaggccgaattgncggccaatcgggtttggccngttagnngnggncaagccatttttgaacnttccnttnctttagg

SEQ ID NO: 136440 - DNA, 627 bp, Arabidopsis thaliana
  unsure (1)..(627): unsure at all n locations
ttttttacaaaaaaaaaatacaaataaattaataatgggatcatttgatttcagtatacacatgggaccatgttctttaaaagaaatttatcttctcttcactccatggaaacagagaaaacactctcaaacacacaaacaaacaaattctgcagatgaatttgaatataccatataccactcttcaaacctgaaattaataatatacttaagaatgtgtatatatatatgggagatgttttttatacaattgatttggaatggtctgcaatgtgagtaagtcgaccaaatctttaagggcaattagggtttcgaccaggaccaccatagtagaagtaacttccccaagaacctccattcccacttttcacattggtaacagttctcttggatcagtaaacaccttggaagattctcccgggggttccccagttcattcnggtccatcaactacttgnacggtccttgaagtaacccgctttncccaaccttcctctggnaacctcccacttcccacngggggggtggggggtggcctccccnggctgngggtaaccattgggcncccattngnnannggggcttcnggaagaaggaaggggagggggcagacccataggatcccca

SEQ ID NO: 136441 - DNA, 294 bp, Arabidopsis thaliana
ttttttttttattattgcatatgtctggtttcttttttcaattatgcacaatgatatataatgcgcatcacaatgtatagtaagcttcatcttctagtttgatgtgtaaagttaattcattgctgcttaggcaacttatcacaccatatcagttgctattttccatcacgtggttatactccaatagctgatgcagctgaatccacataaagtagcaagcaagaatatattttcttcttccatcgttctatattctctaacaagattatcactagagagattgtcatttaactt

SEQ ID NO: 136442 - DNA, 209 bp, Arabidopsis thaliana
agaggagaaatttagctgctctcatagccgcagaagtgcaaagagaggcattggctgcttcacatctcatcaaatgcatcagtatgtttgctgaactcagctcaaatacctcaccaaagaatccacacacctctctcagaaacctcttccttcccccctcccagagttatcccttgaaccaagtacaagttccagtgtagcatccgaag

SEQ ID NO: 136443 - DNA, 603 bp, Arabidopsis thaliana
  unsure (1)..(603): unsure at all n locations
ctcttccttcatatatgctttaagtttgagngacgtttcttctcaaagatgggtttctccgacgctggaatttacctctccgacccaaacaatctctgccaaaccgaactaggtttctttcatgaaccatctctagggttttnagaccagagcgatccacaaaacgagttccacatcactcctcctatatatcaagaattacaagatcagggtcttgaacctaaatcccaagagacgaataattgctcacgcaaagaaggagcaaccgtcaagaaagaaggaggaaggaggaggcggttattgtaaaacttccgacttcgttcagaccagattctcttcgcgggtgccaagaatttgtccaccggcgcctaggaaacctaaaagagtcccgtcgagaagccttaaggttagaaattcatatagaagcaagagaatgatcattctaaatgtttctagagagattgattgtttgtttaatccaacatcactatgtaanaaaattaagaaagccagatacatctaatgttttgtacgtactgtatttgtataacgtagcaacctaataaccaaattgtaatacactacgactttacataaaaaaaa

SEQ ID NO: 136444 - DNA, 655 bp, Arabidopsis thaliana
  unsure (1)..(655): unsure at all n locations
ttttttttgtgggtggttcttgtggtttccgaatcatttctttgtttgggaccaagataatggacatatttctgtccctgaagtttttgctctcttcagtgggcaagctcccctatttcggtttggaaacgtctgaggagttcaatagcgatatttctgaactcgttttctcgtccttgcatgctcacaatcaccttaaccttgtcaccatcttgcaagaacttttgggcagcccttagacgaacggaataatcatgctgatcaatattataacccattttaagctcctttaaatccatgcgagttgttttcttttgctgatcttttttcctcttttgctgtncgnatctgtatttactgnaagtccatcattttaacaaccggggggtctggcatcaggggntagtataaccaggatcaagtccagncatccatcagccattcggaangggttcggcctttaggcaccaaanccagcatggtttggtgnccancggtaagcccaacaggagntggccnaattggggggggatncaangggttaccaattcaaggtnttcgggggaacccctcaatnggcccanngnacgggaacccnccacaacggggngggggaantcnggggnaaccgggggggaaagggngggttgtaaaa

SEQ ID NO: 136445 - DNA, 648 bp, Arabidopsis thaliana
  unsure (1)..(648): unsure at all n locations
gcgccatggctgggattaccagcagcaccgttggattcaacgccgtcttcaccggaataaccaaaacagtatcatcacattcactcttctctgttgattccaaactctgtagtcttcgtctctccaaaaccgaactgtctttcactaatctcactccttctcctcgccgtgctttcgccgtcacttgccgcttcggcggtggtggtggaggttatcgattctctggagacaatagaagaggtaggccgaaagaagctgaaattgatgaagctcttgatatctcctcaattaggtcagctactgttaggcttatcgatgggcaacaaaacatgcttggtttaagtgtctaaaagacggagcccgttcggaatggcttgatggatgcctgaaactttgatcctgggttaatactatcggcctgatgcaagatcctccgggttgttaaaaatgcatggcctccagtaaattncaggttccggccagcaaaaagngggnaaaaaggtcagcaaaaggaancaacncgnatgggttttaaaggggcttaaaatggggtataantttgcnngcattggtattccggncgcntaggggttcccnaaagtntttcaaggtgggcaaggttaggggtttngnttaaggcgggaccgg

SEQ ID NO: 136446 - DNA, 481 bp, Arabidopsis thaliana
  unsure (1)..(481): unsure at all n locations
ctcaaataatgaccacgttattcctccttattgctctattcatcacaaccatcctcaacccaacaagtggagaatcagtaggtgtatgctatggaatgatggggaacaaccttccttctcaatcagacacaatcgctctctttagacaaaacaacatccgacgtgttagactctacgatccaaaccaagccgctttaaacgctcttagaaacacgggtatcgaagtcatcatcggcgttccaaacaccgatcttcgttcactcactaacccttcttccgctagatcatggctccaaaacaacgtcctcaacttttaccccgccgttagcttcaagtacatcgccgtaggtaaccggagtatctccgtcgaacggcggtgatgttgtgctccctgccatgcgtaacggtttaagggtgcttctaagggggtggcaaatnttcaagatcggatttaaaagttttttacncncatttgntaatt

SEQ ID NO: 136447 - DNA, 537 bp, Arabidopsis thaliana
  unsure (1)..(537): unsure at all n locations
tttagaacgtaaataaccaaaatttattaaatttgtagggtttcttctgcctaaacctcgactacatgctgttttttgcaccagtgaaataagcgaaactacatagaaagaaacaaggtcttacttccacagaggaaagtttagagaagtagaaaagccacaaagcaacaccagcaaatacatatagcttaagctgctcagacacaattcaacgagacacttagtgagagagtagcaaatgacttactcttcctgggacggcaaatttagcttcaactttaagaaatcattggtctttgcaatcttcacaatctcctcagcttcttctctctttagnccctttcaaccaattcaatcaaactaactgctgcaacggttgttttaccgncaagatacccgttacttgaatggctccttttagggntcaatcgnagnctnaaaggcacctgntttcacatngcaggaggaattangcaaggtgnttttttaggcggtancctgntannatntttttgccccgntnagttggnccntttc

SEQ ID NO: 136448 - DNA, 312 bp, Arabidopsis thaliana
  unsure (1)..(312): unsure at all n locations
tagcacatgacttcccttacaaagataacatggtttaaaaagaacttaccgggacatcgaggttgaagagacctggtcagcctatataacgcgaagagaaggaaatagtttcgaatcattagtaggggtatgttgataagaggagaagacaaagtgaatgtatttctccttacatggttaagatagtgcccttggctatacccttgtaatcacaagttgtaacattacagacagcgctagtcttctgcaccctgatgttacccagcatanaggttgctgtnttctacactgcatacttnagcaagagacggc

SEQ ID NO: 136449 - DNA, 354 bp, Arabidopsis thaliana
  unsure (1)..(354): unsure at all n locations
gaaggacaaatacaccagtttatttatattaattatatgctggagatgcatgttaataggtgatattatatgtattgtacatttttttatgcatcaagctaaatgttctcatcacccacaacattagtgttgttgcgtctcgaagacttaatgttccaacgagaccaaaagagatagctaagaaagttcaagagactaagaaccgctaaaagccagtaaaaatagatccgagcctgtccttatttaggtccgtttctccccgagccaccctttagagtcggcctnnggtgggaggtnttcttttttangcccgaaangggcaccgangttgaggtaaaccccaaggngntnggc

SEQ ID NO: 136450 - DNA, 481 bp, Arabidopsis thaliana
  unsure (1)..(481): unsure at all n locations
gcatcaccgtcgtcgtcctcctaacatgctccatctccttcttctctccgacgaagaacattccaccaccaatagcatgcccccttcctcctccgcctctagatccgcctccaatcacagctcctcttcctcctcctcctcctcctctctccacctctgcaagcactctccttccgcgactntngacctcctcatcctaatcctcgtcctcttctccggcgctttcctcctctcctcttacttctcctatctnttccactccttttntctcctctcctctnacttcccttccctctcctccttgatcttctccgacgatgaagatctctcctcggatcccctccgggtttcctacttcttcggcttcggcggtcttcttcgccggtctcaattggggtttttgggaccttttggttgtggnaccaagatcggagggaagtgtnggaaatccaaggggtaaagggtttnaaggaaagnanat

SEQ ID NO: 136451 - DNA, 509 bp, Arabidopsis thaliana
  unsure (1)..(509): unsure at all n locations
ctggagcgcctcctgagctaagagccatttgcgggctgtggaaagggctcgattcaaagtttcaataggagagctatggcgatccttgaatatncgttggttccgagagatccaaatcgaccatagtacccaagggaggattgtncctgcacctattccagttggtggtgctgattgccaaacgtctgcatcaaaggagcaagtgaagaagaggtgaaaggtggattcctcctctccgcagaaagggcaacgagcttctgcatttatccctcttctgcgtaagtnctctcccggttggtagagctcctcgcatagccttccacatgcaaaagttttgttttttgggaagtattaaccttccaaaatctttttggtccaattgaaatcagcagtaggtcctgcaaagaagttagggacatntccctttaaaaaaactttggtggccanttgaaccccnttacccttntttnnncncntttttggnntngccgggaaataattntttnnng

SEQ ID NO: 136452 - DNA, 426 bp, Arabidopsis thaliana
  unsure (1)..(426): unsure at all n locations
ggacattaatctaacaaaatctgtcgatacaaaagagaccatgaagccaaaggatgaaggnggagaggaagaggatggagaaaaatccaaaaaaagcatctgacgttcatttaaacattcgattacctgatggtagtagccttcaggagaagttttctgtgacaagtatattgagaatggtcaagggttatntgaacagtaatcaaacaatcggactgggtgcttatgatcttgcggttccttacccacgtaaggtgtatactgaccaagatctggataagtctctatcccgngttgagattgttcgatagtcaaagcacttggtagtagttccccggaaaaagagcaaccgtctatcaaaggggaccatcttnctcggngtntaacnaacaaccacagnccctaatagtggcggttacttttnta

SEQ ID NO: 136453 - DNA, 499 bp, Arabidopsis thaliana
  unsure (1)..(499): unsure at all n locations
caaaagaacaaagatgggaatcattggtaagagtgtttctntaactctntttgcacttttntgcttcacttcctctgttttcaccttaggagtgaatcaacctggttcatcagatcccttccatagccttccccaacaccttcccctacctccaatcaaactaccaactcttccaccggccaaagctcccatcaaactaccagcctacccaccagccaaagctccgatcaagctaccaactctcccaccagccaaagctccgattaagttaccaactctcccacccgatcaaacctccctgttctcccaccagtttaccctcctaagtacaacaagaccctagtgggcagttagaggtgtggtctactgcaaaggttgcaagtacggcgggcgtcaacaacgtccaagggggctaaacccggtaaagatgcggtggtgagacttttgtgcaagacnangaaggactcaattatcggngcnaaaggnnggncaagaacgg

SEQ ID NO: 136454 - DNA, 469 bp, Arabidopsis thaliana
  unsure (1)..(469): unsure at all n locations
gtaagtgtgagaaatggattcgtgatgatgacaattactcagaagggtcgagggcaagatggtggttgaatagacttataggaaggaggaaaagggtcaaagtagaatggccgtttccttttgtggaagagaagctgttcgtcctaactcttagcgccggtttagagggttaccatatcaatgttgatggaaagcatgttacttctttcccttatcgcactggtttcaccctttgaggatgcaacagggctaacagtaaaccggagacaatttgatgtccattcctgtttttgattgcctctcttgccaacaatcacaatcctaagtttttgcttccccaaagggcattcccgcaatttttcaaatagagattgccaggcttccctgtaaggttcccccactgggccttttgggggaccttttttanggcatttcttttcccgaggnaattnaatttctntgttgcgga

SEQ ID NO: 136455 - DNA, 721 bp, Arabidopsis thaliana
  unsure (1)..(721): unsure at all n locations
ccagaaccggtttcgactccgaaatccaatcctcaaccggaacaagtaatgcaacagagtaatctcccggttaactcgcaatggcaatatgcccctggcccaggccaacaggttcattaccagggtcataccattcaccaatcaccggtttattacgttcctggttcggttccgggtaatcatatggtccagcaaggaaatcatatggttcaaccgggtaatcatatggtacaaccggttcaaatgccgggtcagtatcttcaacaataccatcatgtaccaatgggataccaccaacctcagactcatcagatggctggtccgggtcaaggtatattggtggaccggttaggccggttatgatggccagttgatgggatgaaccggacgggttatttttggaatgaaaacacccggtccggttcaaatgtatcagcatcacactggtatggttgttcctggtgtagaaggacaacaacaatacaggacccgaaacggatttcggatacggggtcgggcttcttagctgtttgaaggaggaatatgaaaaaattatcacatccgggggtttccgccttttcaattggagtcgttcttattcgttactggtgtgaaccttgggtattatttttgggtttacttttggaaaatttatttttgggggtaataattttgtttcaaatttatggcngaaacccctatnatacctttnactttcttt

SEQ ID NO: 136456 - DNA, 489 bp, Arabidopsis thaliana
  unsure (1)..(489): unsure at all n locations
acaaaatggtgaccttaacttcatcttcttcaactccaaacgtatcttttgatttcatgatgaacaataataataacagtaacaatctctatggtcctttctcttcttcttctacttctttctcttacttgacaagcaaggaagatgctctcacccagaagaacctaatgagtggtatcaccaatgatgttcttggaattaacaagaaagcttctgaagatttggagatcagtgtgtttggagctgagaagtacttcaatggagatatggattctgaccacagtcctagacttgtgtctcctcttgccagatccagaaggttccaataggggagaatcttttgttnggtccgtagcaaaggttcgaaggaattcccccgggaaactccctaggcctccggtctggatctcccaggtttggataggccagnagtttntttgcttnaangngaaatnttttggggnnggaggagggccntncnggaaaact

SEQ ID NO: 136457 - DNA, 761 bp, Arabidopsis thaliana
  unsure (1)..(761): unsure at all n locations
ggagcgtacaaagatccgcctgtatattgtgtcctcacgcagtatttacctgaaggatctttaagatcttttctgcacaagcctgagaataggtctcttcctttgaaaaagcttatagagtttgctatagatattgctagagggatggaatatattcactcacgacgcataattcatcgggatcttaagccagaaaatgtattgatcgacgaagaattccatttgaagatcgctgactttggcatagcgtgcgaggaggagtactgtgacatgttggctgatgaccccggaacatataggtggatggcacctgaaatgataaaacggaaaccacatggacgtaaggccgatgtatacagctttggactcgttttatgggaaatggtagctggagcaatcccatatgagggccatgaatccctattccaaagctgcttttcgcagtcgtaccataaggaccattagggccagctttccccgggagggttgtcccgtagccattgaaagctctgttagagcagttttggtcggtttcaccccgtaaggggcccgtgttcttgcagatagtgcaagtcctttnaccagtttcgntatcacttngaccgtnaaagggaccntnatctttntttgggcaanacttttaaggcccaaggaaaggcttaaccttggtccnaaggtttgnccctncncggagnngagggggtgaaaaaaaaggcctttgnggtaccttccagcctattttttnaanaaaagntttttnc

SEQ ID NO: 136458 - DNA, 568 bp, Arabidopsis thaliana
  unsure (1)..(568): unsure at all n locations
ctgaacaacgtcaagtgtttggacccgatcaaagatggatcaacccgacccgaaaaatggctctggtctgattctctccgccactgaaccgctgcgatcgtttctcgctctcgcctccggtgatcgtcgtctctccgacgagctcagaggaattgcttccgatcttcgctcgaagaacaccattccgtacaaattgctccgcgctatatggaccggatccgatccgtcgaccagaccggatttgttgggacttttctccggctccaattttcgtcttcaccagtcccaaacccagagaaaagagcgaagaacttgaaactgagatttagtgaagctcagagaaatagcagagaggaaggggtatgctgagcttgttaaaggtataacaccaaggaacaagtcgnagagctttcttttttacaagnccagntcggttttgggttanatgttggnttaccatgtcactggntatttggttgntaggttccttagagtttntnaacgaanccngttagnntntggngggtttngctagtttgggtntttgaacgtttttttaaaaacggta

SEQ ID NO: 136459 - DNA, 427 bp, Arabidopsis thaliana
  unsure (1)..(427): unsure at all n locations
gaaactaattttccatatagccattggaatgatccatccagctttattgataacttatcctcacttaaaagagaagccgaggacgatggaaaattgtttctcggagctcagaacggagagtccgggaatcgtatgcagttactgtcgcatcatttgagcctaccaaagtcatcatcgacagcctcggacatggtttcagtggataagtatcttcagctacaagattctnttccttgtaaaatcagagccaaacgtggttgcgctacacatcctcgaagcatccgtgaacgggtaagaaggacgcgggtaaagcggagcgnatttngggaggttcaaagagntttttcctaaacattggncaaggcaaacccaacactttcgggttattntttggntttagcttntggggttncaatcnaagnntttt

SEQ ID NO: 136460 - DNA, 562 bp, Arabidopsis thaliana
aaaaggaggcactggtatcgttgccgcagccacaggcatggatggacagataaaggtctcggagagagatgaaagggtgatatgctacatagttaattctgctgagtattgccacaaaacatctggtgaactggcagaaaacgtctcagaaattattgacccacattatgctgatggtgtagacatgtcagaggtccaggatgaattttcagccgtcataacgaaagcattggtaacgctggtccttggacttgagactaaatttgacacagaaatggcagtgatgacacgtgttccatggagcacacttgagagtgttggtgaccagtctggggtacgtgaatggaataaataccagtccttagcggcagatacctgtcctcgggaaccttctaacaccagtttacttccagtttttcccttgacaaagctggcatcatccctgggaccacggttctttgctaatattttcagatgcaagcaactatccgaaactggagctcaacagatgttactagatacgcaagctgtgaagtcgattctactagaaattccttccctt

SEQ ID NO: 136461 - DNA, 720 bp, Arabidopsis thaliana
ggtttatcaaactgtacactgatcaaagaactatacctagctgggaacaagatcagcaatgtagaaggcttacacagattgctgaaacttattgtccttgaccttagtttcaacaagatcgccaccaccaaagcaataggccagcttgtagccaactacaactctctcgttgctttgaacatcctcggaaacccgatccagaacaatgtaggcgaggaccagctacgcaagaccgtttcccagccttctccctaagctagtttaccataacaagcagctcattaagccacaacgagccagggaagttctcaaagatagtgtagcgagagctgcgtttggtggtggagattctttgcaccacaggcgcaaaaggacatccaccaagagtggttgttggatcagcctcccctagcggttcaccacccgaggccacattgcaaaaggacgtggatccaaaaacagaagccaacgtcaactaagaaaaacttcagctgcagggacgccatcacattgaattgttctttttgtttgaatctcatgaattggccaatgcaaattgcaaagccatctccattctttgattttataattcagcatcttttctaacgcttatgtttccggttcggtttcaattctggtttactgtctttttactttttagttgatccggttctcggaaacatgtaaaaccgaataacactttccggtttaactcaattt

SEQ ID NO: 136462 - DNA, 673 bp, Arabidopsis thaliana
  unsure (1)..(673): unsure at all n locations
gataatgttttgtgatagttttgcatttncccaagtnatgagttgcttcgggtgttttggtggctctnagagatcaagacattcaccaaatccatatgatgatgatacatattcccatgatagtggtgaaaccagcaatccgggaggagatgatgaagaaggagaagaggaagaggaagtagaggagctaagtcgttccaaacgatctgaagaaattttgaaatgtaaactacaaaatggactagtctgcaggcagtttccagtcaaggaaactaataaacttacacgcggagaggatgaagatggaaacaagacaataaatgagtttgttcgtgagcgtaaaattgggtctggtagttatgggaaagtggttctctatcgaagcactgtcgatgacaagcattatgctattaaggcttttcacaagtcacattttatccgaggctacggggtttcaccttcaggaacctgctattgggtgatgtcctccgtgaggttatggttttgtgaaaacccctgggggcatccctaataccgtaaaccccatttggggtccccggatattgtttatgggaaatgggcctttgatcgtttttggccccccgggtcccttcnggggaatttcctccttcgaaggcctttccgggtttatgttccgccccatgccccntca

SEQ ID NO: 136463 - DNA, 404 bp, Arabidopsis thaliana
  unsure (1)..(404): unsure at all n locations
aattcatggaagaagtagattccntggtctatatatttggttaaggaatggagagaaggttgcggttaaagttccggtaggctgtctcttgattcaagctggaaagcagatagaatggttaactcctggagaatgcattgctggaatncatgaagtggttgtaacgagcaagacgaaggatgccatcacattagcaaaggaacaaaaccgaagcctatggagagtttcctcgactttttttgcccacattgccttctaatgcggactgaaacctttgggacatttcgcagaatcatctttggcaagtaaatatccggcgntacccgcaggggngtttnttgaccaagnactctcggcatcnattctcaaagggnattaagggntcttcatngtttcngtgttca

SEQ ID NO: 136464 - DNA, 754 bp, Arabidopsis thaliana
  unsure (1)..(754): unsure at all n locations
gatttatgcccttctggaaattnctcttacgaaaaanctggagggaacgataccctgggaaattnccctatttgtggaaaggatgtnccgcgtggatactacatgttttnccgtggcagcaagaacgatactcgcggatttagctgtggattatgggttctaatgcattcnctttccgtnagaattgaggatggagaaagtnattttncattcacgacaatatgcgatttcgtcaacaacttcttcatgtgtgatgaatgccgcctgcatttcaatgacatgtgcttgagcgtcaaaacccctttcaaaaaggcacgtgatttcgtattgtgggtgtggagcacacacaacaaggtcaacgagagactcttgaaggacgaagctttcccttggtacaggtgaccccaagttccccaaggttttatggccaccaaaggagctttgcccattgtgttatcctttcaagtaatcagaaaagcatagagtgggaccatgaacatgtctacaaagttctttgaaggacctacttatggggctaaagctcggtatcttttttacaaagggaaaagaggtgttcaagccgggagccaaagggaaggggncccgnttttaggccacttgaaggcctttancagntgggccacccaattngttcttggtttntnccngntttggngcttcaatttgnaaattgncntttgccaanttnttgaattttgggggngntttnttttttacttggggggcaanncag

SEQ ID NO: 136465 - DNA, 472 bp, Arabidopsis thaliana
  unsure (1)..(472): unsure at all n locations
attgcaggagcttcatagctttgcgttagcagactagagtgggtgttcttaagcaggttaagaaggaaatncacgcttcattgttgtggattttccaacgtgtgttctctcagacacctactttgatggtttatgtgatgatccttttggcgaactacactgtgcattcagttgcatcaaacctacctattgcagcatctcctccagttgttaataaaggtccggatcagacgcaacaaaggattgattttccttcgttaaaggagtctacgaagcttgatgggtccaaatggttaggatcgatcaattttgacaaggtttcccacttgccgagacatcgngactcggtttcaggagaagggnttagagaagaggaggtgagtctnntggattcgatggtgggaggagcngtcaaatgcaagattncnctgttnatccgnnacatnaggtttannctttgtttnanccgtca

SEQ ID NO: 136466 - DNA, 611 bp, Arabidopsis thaliana
  unsure (1)..(611): unsure at all n locations
aagaaacccataactctacataaaacactagcaagcttctccattctcagtttcatcttccattttcacctgccaccaaaacacaagaacctgttatacaaaaactcatttcaaaaaacagattttnttgagatatgagtgcagactggggcccttggattgtaccagtggccctgttcaccctactctcccccggnttgctattccagctaccggcaaggacaggagtgatggaattcgggaacatgagcacaagcggggatttcgattttggtccacgccattatttacttctgtatactcactatcttgatcattgccatacaaattcacatccatttctgatcatgtagtgtaacaaagacagcttctttgggctcaacttcgccttcatctattttttcttttctttttgttcctaatctctgattcttggctcatagggtctcaagcngggaaatttaaaaaggttgtacacaaataaataatcggtaattttgttttccacaattcaaatgagataacaatatcctctgatctctcgtagcttcagcatgtaataacgtaacataaagcatcttcatttagttacaaatttggtttgttcccac

SEQ ID NO: 136467 - DNA, 587 bp, Arabidopsis thaliana
  unsure (1)..(587): unsure at all n locations
cgagggagaccaaagagagttgacgctggtggtgcttcctctgttgctccaccaccaccaccaccaactaacgtagagagtggaggagaggaggttgcagtcaagaaacgaggaagaggacggcctcctaagattggaggtgttatcaggaagcctatgaagccgatgagaagctttgctcgtactggaaaacccgtaggaagacccagaaagaatgcggtgtcagtgggagcttctggacgacaagatggtgactatggagaactgaagaagaagtttgagttgtttcaagcgagagctaaggatattgtaattgtgttgaaatccgagataggaggaagtggaaatcaagcagtggttcaagccatacaggacctgggaagggatccgcagagacaacaaacgggccaaagcacattggatgaagttcaacttccagacggggacccctttaaacccgacccgaagcagagggtcaaggcagccaggagcagngcaattcaaggagttttttcttaagntaagncttgcattnaaagtttcaagtggtggttcttttgnggttcatgaattttanctttangggc

SEQ ID NO: 136468 - DNA, 817 bp, Arabidopsis thaliana
  unsure (1)..(817): unsure at all n locations
tacctctctctctctggtcatcaatcaattcaaaggtattgtncttcttcatcaaaccagtaagagtgacttgagagtctgatgattccttggggtggagttacttgctgccttagcgccgccgctctttatcttctcggccggagtagtggcagggatgctgaagtactcaaaactgtcactagagttaatcagctcaaggaattagctcaattgctagaattagatagcaagattctgcctttcattgttgccgtatcaggaagagtcggctctgagacacctatcaaatgcgagcatagtggcattccgcggtgttattgtttgagggaacggcggaacaacaatttcctgaaacataattgagaccgggttcttgggtgcaagatcagtgcgttgatgctatcaaatgggcaaggaggtccctgggtttctggccggtgggccaagccgggtcccggtattgggagctcgtggtgcgacgggttttgccttgactgttggtagtgaagttttttgaagagtcaggacggtcgctttgtacgaggaccacttgattatcttcaaggacttnagatgcttggagttaagccgcatttagcggtgttcttccaacctggaatanccgctaancaattgtttggtnagggaatgnccggattccccaagtgtttccggggcccccccttttgcttaaggtggaacccnnttnntaggggttcaattgcccactaacncctncaacaagcctggnatttnccccttgaaatttcnnaaaagtcccttaattgcaaaatttttggggggggggtttttc

SEQ ID NO: 136469 - DNA, 455 bp, Arabidopsis thaliana
  unsure (1)..(455): unsure at all n locations
agaaagagacttactttggatatcaaaacatgtcttgctctctattctaattaagtctagcctatctacaacatacataaacctctatctacgattatatttggttctacaagtgaagattgatcgatgttagctctgtctccggcgacaagagatggttgcaacggagcgtcagagtttcttgatacgtcgtgtggattcacgattataaacccggaggaggaggaggagtttccggatttcgctgaccacggtgatcttcttgacatcattgacttcgacggtatattcggtgtggccggagatgtgcttcctgacttngagatcgnccatgagatcttatncggggggtttntccgntccaaatgaaccgttttttcaacggttannnnggncgncgggtnaanccttttagncaaggggggcctcntaaggggtattccggggnaagttaa

SEQ ID NO: 136470 - DNA, 506 bp, Arabidopsis thaliana
  unsure (1)..(506): unsure at all n locations
ttacctttttccattgggaactggtctttcactaaactggaccaccacgaagacaatatagtctacgactgcaatcgcctcttccccgagcctccatatccaagagaggttaaaataatggaacctgatccgtctaaacgaagaggtctaattttnagtttggaatgcatgaatacattgaacgagggactcatactgcgtcacgcagaaaatgggtgtccaaaaccaaagtggaccaaatacttgagctttctgaagagcaaaactttcatggagttaacaaggcctaaacttgctttgcaccagggagtgtacatatcctgccaggccaacacgggcccgccacccattggttggattcaaagggactttttccaaagnttcacacaatgtttttttacttgggtgcnncgnnttntttcggtttgggaaacagtgggntttattgaanagttttccgccangggggcaanctngggaattaactcgggttttaagtnnnnagt

SEQ ID NO: 136471 - DNA, 631 bp, Arabidopsis thaliana
  unsure (1)..(631): unsure at all n locations
aaagccgttgtggattcatcgcctcgcacaagcactcttgtcgtgtctgagtttattggatgctcaccttctttgagtggtgccattagggtgaatccatgggatgtggatgctgttgctgaagcggtaaactcggctcttaaaatgagtgagactgagaagcaactacggcatgagaaacattatcattatattagcactcatgatgttggttattgggcaaagagctttatgcaggatcttgagagagcgtgccgagatcattatagtaaacgttgttgggggattggttttggtttggggttcagagtttttgtcactctctccaagttttaggaagctatctgtgggacacattgttccagtttataggaaaacacagagaagggctatattccttgattataatgggactcttgttcctgaaagccccattgttcaagatcccagcaacggggttgtctctgtcctgaaagccctctgtgaaggccccaataacacggtgtttattgttagtggaagaggtagagagtctctnagcaattggctatctccttgtgaaaatctttggnataagcagcttgancatgggtaccttccattagatnggagggncaaaagattnagtggg

SEQ ID NO: 136472 - DNA, 586 bp, Arabidopsis thaliana
  unsure (1)..(586): unsure at all n locations
aaaaaacatgacagagaattctgaaaaaatcgatcgtttaaacgatctcacgacttttatctcgacgaagacaggagtgaaaggactcgtcgatgccgaaataaccgaagttcctagcatgtttcatgtcccttcttctattttatcaaacaacagaccttctgatatctccggcttaaacctcaccgtcccaatcatcgacctcggagatcgtaacacatcttcaagaaacgttgtcatttcgaagatcaaagacgcagctgagaattggggatttttccaagtgatcaatcatgatgttcctttaactgttcttgaagagatcaaagagagtgttcgaaggtttcatgaacaagatccagttgtcaagaaccaatatcttcctaccgataacaacaagagatttgtttataacaaatgatttcgatctctatcattcctcctcctttggaattggggngnctntttcacttgtaatattggtccagatcccccgaattcntgggggaatcccnctagctttcaggggtcgggngntcgnntncanggggatttaattggattaggggtgtgtnttccnacttct

SEQ ID NO: 136473 - DNA, 338 bp, Arabidopsis thaliana
  unsure (1)..(338): unsure at all n locations
ggagtcgaagaagagacaaaagagagcggttaaatcggagtctactgtttctccggttgtttcagcgacgacgactacgacgggagagaagaagttccgaggagtgagacagcgtccatggggaaaatgggcggcggagataagagatccgttgaaacgtgtacggctctggttaggtacttacaacacggcggaagaagctgctatggtttacgataacgccgctattcancttcgtggtcccnacgntcttactaatttntcagtcaactccgacaaacagcganggagaagaaagcccccaccanccgttttccngtgnaagaagaagaagaagg

SEQ ID NO: 136474 - DNA, 368 bp, Arabidopsis thaliana
  unsure (1)..(368): unsure at all n locations
cacaaccaaaaaaaagaaaacacaaaaacaaagattataatggcttcctcaaccatggctttgtcctcccctgccttcgccggaaaggctgtgaagctgccgcatcaaatgtcctcggaagcggccgtgtgaccatgaggaagactgtcgccaagccaaagggtccatcaggcagcccatggtacggttctnaccgagtcaagtacttggttccattctccggcgagcccccgagctaccttaccggtgagttccccggtgactacggatgggacaccgctggtctatccgccgacccagagacctttgccaggaaccgtgagctagaagttattcacagcagattggccattttnggagccctaggt

SEQ ID NO: 136475 - DNA, 420 bp, Arabidopsis thaliana
  unsure (1)..(420): unsure at all n locations
ccaacaggtcgcctgcaaaggctgttggtaaggtccttccggaactcaatggaaaactaacaggaatggccttccgtgtcccaacaccaaatgtctctgttgtggatttaacttgtcgacttgagaaggatgcatcgtatgaagacgtcaaggcagccataaagtttgcatcagaaggaccacttaggggcattcttggatatacagaagaagatgtcgtctctaatgatttttttggagattcaaggtcaagtatctttgatgctaatgctgggatttggattaagcaagtccttcaatgaaacttgtcttcctgggtatgacaacgantcgggggttacaagcaaaccgtgtccttttacctgttagnnacacattggnngttagntttgcagncagncngctaaaanccattatncc

SEQ ID NO: 136476 - DNA, 489 bp, Arabidopsis thaliana
  unsure (1)..(489): unsure at all n locations
gcaacatacaacgtcgcgaagggacaatcgttcccaccgaaaaccctctcttctctctcctcaactcagatcgtagatctactttttnctcttctttctttttcaattaaagatcttcatcgtcgcttgatgggttggagggtaaaacggtggtgagcttctttcttctccgatggtgtgacggtggctctccttcacggtggcctgaaaattggttcctttgttctgctagttatggacaacagcggattggttcttgttattacggtttggcgatttgtgattgtacctccggcgagtagcggaagttgagtttttggatcggtgggtttcaccacttttgtnaagaggttaacggtggctcctttggctggagcctagatggctagttcggggtnatctttngccgantntcgggtaggtnattggattntttaagccggtngtcaacannttncgccntaantggttcccctttncngaacntaa

SEQ ID NO: 136477 - DNA, 410 bp, Arabidopsis thaliana
  unsure (1)..(410): unsure at all n locations
gcagctagcgtgaagacgatgaaatcgattgggaggagatagataagcgcgaatttgagagtgaaaattctaaattcagacccattttcaccggcgcgagtcatcgttgaaccatgtcttggcttcctgtagaatctgatcctggtattttcactgagattatacaacaaatgcaagtgaaaggtgtgcaggttgaggaattgtattccttggacttcaactctctggatgaaataagacctgtctatggattgatattgctttacaagtggcgtccagaagaaaaggagaatcgtgttgtcatcacagagccaaacccgaatttcttcttttgcaagccagataaatcaacaatgcttgtgcgncccaagcgatnttntcagtcctcatgaacctcttcgngtattgat

SEQ ID NO: 136478 - DNA, 700 bp, Arabidopsis thaliana
  unsure (1)..(700): unsure at all n locations
aaagtctctctcttgtagcccatcatcaaatccatccatcttaataagcgaagaaccaaaatctgtatcctctagtcaattgatttcatcaccagccaaaccgagattaccaggaacagaagacaagattgtgccccccctccccaccctcaggggaatccgaaagacatacggaggattgttgttgcgttagagcgatattgaggggaggtcaagtgcccgtaagacggaacgtgacatctctatggattcccaaatacaggaaagagcctccaaagcgtgcttggcgccgcaagaagaaaccggtttgtttgcctcaggtgtttatcagaggaactcacattggtggcgtggaggagattatgcagctaaatgcatggtggtgatttagcagagatgttgaaagatttcccctgcttgtgaacgcttggggacatcccggagctgtggtgatgcaaggtttgtgccttgtactaactgtgatggtagcaccanagtgtttgaagaacaagatgancggtttaagcggtgtcctaaatncaatgagaatggattggtgcgttgtcgtgtgtgttgtctctaagtgatcagtttgancaccagatgtgtgtgagaaaggggatatagattgattgactaaacatggtatttggttagtaatgtataancaaataagtaaggtgnctcaagccttttagca

SEQ ID NO: 136479 - DNA, 530 bp, Arabidopsis thaliana
  unsure (1)..(530): unsure at all n locations
anggatcgaacctccgggatttttccttggccgtatgngggcgtccagtcccctagccgaccgtgcctccctatggatcccaattccaggaaggccttccaaaccgtcctgccccccccagagaacccggtttgtttncctccaggtgtttatccggaggaactcacattggtgccgtggaggagattatgccagctaaatgatggtggtgaattagccagagatgttgaaagatttcccctgcttgtgaacgcttggggacatgccggagctgtggtgatgcaaggtttgtgccttgtactaactgtgatggtagcaccaaagtgtttgaagaacaagatgaacggtttaagcggtgtcctaaatgcaatgagaatggattggtgcgttgtcgtgtgtgttgtctctaagtgatcagtttgatcaaaagatgtgtgtgagaaaggggatatagattgattgactaaacatggtatttggttagtaatgtatattcaaataagtaagttggctcaagccttttattattt

SEQ ID NO: 136480 - DNA, 238 bp, Arabidopsis thaliana
gattcaaataatttggccagaatatttcctgctgttcccttttgtttacatgtatcactcaccagtcaccagttaactttcttcatcaacctggtgcactggcaaaataattttaaggtactatgtttttttatattccacttgcttatcatcttatgcttcttggctctgccatggattgttccgtgtatcatcattatttgttaacaagatctgtctgtaactctgttctcttttt

SEQ ID NO: 136481 - DNA, 460 bp, Arabidopsis thaliana
  unsure (1)..(460): unsure at all n locations
catacccattttcccctgttcttgttctgttttctactagttgtgtctgaaagtaaagtcctctgtttttgctctgtttatgtcgtctctgaactcctacaatggcgtttaatcacagaaagatgcttctttcatgtctacagtttaaagatttacgcttttgtttccggcaataccctctcccgccaccaccaccaccgccaccgagggagctctctctcctactccccacctcgatctgcgtcgtcgggctcaatcatactctttctatttctagtcttcttcctctacctccacatcacggaacaacggcgggttttagccggcagcgtaaactcccgggtgncaaaaaaccaacaagggagggtgacggccgggaacaagaggggggagatttttttgctggttttttaaaaaggtttgggaaantcccaancggggggtttncancgntncgggg

SEQ ID NO: 136482 - DNA, 307 bp, Arabidopsis thaliana
  unsure (1)..(307): unsure at all n locations
caagccaaagnncaagaaaatatgagangactctttctcttctctctcctctttttattcttttactcatcctcctcctcaagatcttcatcagaatctcacatcttcatctacggaggatgttcaccgggaaaatacacaccaaacacaccttttgagtcaaaccgcggcactttcctctcctctgtcgtcacttcctcctctgacgcgtccttcaacagctttgccgtcggaacgactcctcctcctcctcatcctctttcgncgtcttcggnctctatcaatgccngtgaaggtctccgatcat

SEQ ID NO: 136483 - DNA, 535 bp, Arabidopsis thaliana
  unsure (1)..(535): unsure at all n locations
ataatcacattgcatgattgatcaaatactcgattttccgtgaaatctctttgaatatttcgattccttgttaccatggcgcttcatgggtctggagttttttgtaaagtttcaaacatggtagagatcacttctccgtttggtggttccatgaggctgcttcacttgcctaaatcttatccgattcactgcaacatggtttcagctagcaatacatttgggtcagctcatctcaagctgcaaaacaaagaaccgtgctcccgtttaagggccttgtcgagtcaaacgcggagaaaataaccaaactgcggatgttgaaagcatttcaatggatgagaccacgttgaagcaagatctcgagactgccggtccagggagaggattttttggggggagcttaaaatccgggataaactaaaagagctttcngnaggcaacaaagcctctttttttttagccaattnttgggtctnccatctttcagnancgggggttttgnttngnttnnattactttngnnaaaanaaggaccccg

SEQ ID NO: 136484 - DNA, 566 bp, Arabidopsis thaliana
  unsure (1)..(566): unsure at all n locations
gaaatttgtnctgagctcaacgccatttttaacgatttcgaatctctgtcttctctgagttgttccaagtaatcggagggaactcgtaaagtggaagaataggagaaagagagaaggaagaagatttntgaatagctcttgatctggtgaagaatggatgcaattagaaaacaagctagcaggttgagagaacaagttgcgagacagcagcaggctgtctttaagcaatttggaggagggggatatggctctggtttagctgatgaagcagaactcaatcagcatcagaagctagaaaagctttacatatccactcgtgctgctaagctttaccaaagaggtatttgttcgtggtgtggaaggtatatagttacaggggcaaaacaagttgaaataggtccggaattntctttgggttgcagggaatttggtnccgggnttcatgtccggntngtaccgntttacnccggggtcacctnaccnttgggggcccccnccccaattgggnggaccctggaaatttttaaggcccttggccccaggttctnnccttcgggatgnttggg

SEQ ID NO: 136485 - DNA, 372 bp, Arabidopsis thaliana
  unsure (1)..(372): unsure at all n locations
ggctcaatcaactgcatagacaataataatctggtaacaaatcaagctgctttgttcgtgttcggagattctctttttgatgccggaaacaacaactacatcaatactgtctcaagtttccggtctaatatctggccgtacggtcaaaccactttcaagtttcccaccggaagattatccgctggacgtttgattcccgacttcatcggtaacataacaaaactactctgctttgttattttnatttcctaggaatgtttaacatttttttnattcactgacttggaagccgaaaaggcatggttgccgttgatcccgncaaatctacaaccagacaacggtaacantcaatttacctatggagtaagtttt

SEQ ID NO: 136486 - DNA, 407 bp, Arabidopsis thaliana
  unsure (1)..(407): unsure at all n locations
tntcttcgaacaaagctagcagcttggcgggacaatgttaggaatgtaccccgcccgaccgaaccgaatagggccaccgggggaaggtacccaggccttcatcagccagctccggggattggcctgcccgttgaaatatatctctgaggaagaagcttctcaatctaaagagtgatctgatattgtcatctcaaaagctttattgaattctttgcagagttcttttgaccgttggatctttttgattccggccttcttctttgtgttggcctctttttgtcccttaaatttatgcggagacttgcgatacattgtttagataaatttatcaccaatgcatgaatatttgggagtggctaataacagtggcgcaaaatcattggattaaaaaataagagctttgtttt

SEQ ID NO: 136487 - DNA, 429 bp, Arabidopsis thaliana
  unsure (1)..(429): unsure at all n locations
cacgnttactatttaactgtcgacgaaattagagagcaaaagagtcactcaaaagtgtgtgtgtgtcaaaatctctagcaccgattttcctaaataacgtcgtctcacagtcacacacacacagctctaaaatccctctacgaggttttctttcaaactcgccgaaaaatctaatctttacgaagacccagatcggcggatctagagttgaaatggcgagacacacggcggcgctgaagatcgggctagcttttactggggctgagcatggctggttacacttcttggtccgcctctctactggcatctcactgaggcttttggccgccggttccggctcctctttgtccttctttgcccctgtgaaaggttttacccntttcggtgtaaacattttcccaaagggttngtaaaggtttttttttgntg

SEQ ID NO: 136488 - DNA, 372 bp, Arabidopsis thaliana
  unsure (1)..(372): unsure at all n locations
cagaggtttctatgtgaaacttgctaaaatagatacaacacacatctcatatcgacaataaaaatttgttttcaaagatcagtattttttgaagcttgccaagtgaagcatcttttgggtaattagaaccagagaagcttcaaaaaatggcttagagtgaagcatcttgtggcatttcgacggcatcatcttaggacgacttatcttgttcgttttctttctcgtctctgttgtaattttgctataagtttctcatatatagtttcattttgtcttttgttcgtccgtatttggtagtttgtccaaatacagaacatatgaaattttacaagagtggatattttcaattccanataaaattnnaaanaaaaa

SEQ ID NO: 136489 - DNA, 330 bp, Arabidopsis thaliana
  unsure (1)..(330): unsure at all n locations
gccggcaaaacgttactacggagacggtgttgaggatgatccggaggctaaacgtgtccggcagcttatagcggatgtggtggcttgtgctggtgctggaaacgctgttgattacttaccggttttncggttggtttcagcttacgagacacgggttaagaagttggcgggtaggctcgacgagttcttgcaaggcttggttgatgagaaacgagaagctaacggagaaaaggaaacactatgatcgatccacttgctttactctgcaagcattcccaacccggttttacttcacggatcgnatcattaaaaggnaacaatnattcactt

SEQ ID NO: 136490 - DNA, 607 bp, Arabidopsis thaliana
  unsure (1)..(607): unsure at all n locations
gacgcatttaacagcgacttgcagtatgagtttgttgaaaagaagtttgccactttattgcaccagtgtttacactgcaccaagaaagggtctactaaggagacttcattagcaactcatgtcattgggttgctagcgttaactgttggactcggggatcatgcacaagaggttttggaagaatctgtcactcctctgtctcaagcccttaaatctggtcgtgaaatcttgaaaataacttcgatacttgagtgtttagcagtcataaccttcgttggcgggaatgatccagagcaaaccgagaaatctatgcagattatctggcaaatgatccaccccaaactagggtctaattgttgtggcaactaaacctttcacctgctgtaataaggtgctgttgtatcttcctgggcgggtccggtcacaacagttgattcggtggcctctagggccgaacttttttcaaggggctggaacttatcctccctccattgttgggaaaggatgcccgcctgnccggtagctcctgggaagggttcagtatatgggtggtccgccngcggaaggtgttccacgcaaanggttctntgccattaaaagggggttc

SEQ ID NO: 136491 - DNA, 558 bp, Arabidopsis thaliana
  unsure (1)..(558): unsure at all n locations
cttagatttgcttatccttcttcactttctcaattttgaatctgagaattcgtgcctccgatctctctccctctcgccgtggatagagatggagagcttaccaacgacggtctcagggaaatcagaccggcgaggtaggttttccaagtctcagaacacctccaagccctctcttatcttggccttcttctcttgtcttgcttggctctacgtcgctggccggttatggcaagatgcgcagtacagagcagcactcaatactgtgcttaagatgaattatgatcagaggcctaaggttcttacggtggaggacaaacttgtggtccttggatgcaaagatctttgagaggagaattgttgaaactgaaatggagttngcacaggcaaaggagtcaaggctatctttaaaaaacaggaaagtgtctcttcttcaaggggaaggaaattcctagcttgttaattggnggtttcaccaggctttgggaagnacctttttgagcaattaattttgnggcttttgntcccgcgtgnttcctnaaaactttggaagggggttgc

SEQ ID NO: 136492 - DNA, 489 bp, Arabidopsis thaliana
  unsure (1)..(489): unsure at all n locations
caantctatcgcccttnggaactgtcgctgcagtncggtcggaatcccggncgcccacgcgtcggacaaaggaagaaccaaataggaagaaaaaggagaggaacattcaaatggcaccaagaagttctttgaatccgcgtcgccttcatctgcattgtcttggccgtgatggtcatgactgctgagtcgaacaacgggaacccaccaccatggtccggctatggcttccaatgccacccatggctaaggctccggtctccaagtgcccgccactttctctcgcctaccctcagctcaatcgccaccgcattggtcgctgctatgtctttcgtcttctgatgagatgtgttgccattcatcttcagaatatgttttactctctatgagtttttattttaattttcacatgtattccttcttttttttttacttcttcaaagattgtgatgttgtgttcctatcataataaaacatttatctcttgatgtt

SEQ ID NO: 136493 - DNA, 571 bp, Arabidopsis thaliana
  unsure (1)..(571): unsure at all n locations
tataaaacagcccccagttcttctcagataccggtcctggcctcgtatcctcgttgtaaagctcgtagatgtatgtagtaactgcagttcccgggtgttttggcgttccagtcttgttgatcacatgctggatcaaattgctattgtaagtgtttgcattctctaccgttgcgtcgtgctcagaagggcctcctttagatggccatccagattctgtgaccacgattggaatgttggtgaagttaagataagacattgcaaaataagcagcgtctacggttgcatcaaaaacgttttgtgtaatgtaaccaattgtgttggcgtctacaagcttctttttgttggctttggaggaggctggaaaagcgccgtagtcaaagcgggtttaacccccattgggctggaccataggcggaaattcgggggaaaccgttggccagcaattggcggtccctgtggcctgtagggaattttaagggnnaggggcaaatancctggttcccaangctttntttgnagaaancttcgatggggngaaagatnannatgntgggttnagngtnngtantgc

SEQ ID NO: 136494 - DNA, 643 bp, Arabidopsis thaliana
  unsure (1)..(643): unsure at all n locations
cctaactcaggtatgtatcctgcaggcagggaagaagcccttgacagaaagantctcggttaccccagaggntccagctacattagtggagaatccgaaaaccaaagtgtaaattcgttggaaagaattcacatgaagttgcagtggatgaaactgcagcaaaatgccccccttgaagagaataaacgcataccatatcaacagacaccactgtctcgatctaccggggggaccctttttgggccggctctaggcgatcaattcaagaggcttcagccgccaagttttgggggnaccagtttatggtggtccagcagcagcagcaacaaccaacaacgttctcaacccgctaacacaaatgtgctacctgtctctaccatgaatgcatcctttacccggagcagcagcagcaggcagcggttggcaccctgcaaatagatctgaggcggcccaatctaacgggtacttgccctcaagaagtctgcctcctaatgatctgaactcaaacctgatgtaccagcaacttcagtatcaacaatatcaaggccaagtgaacaacaatggtcacagaatggcaggatcttctgtccgcctgctgtggctccagctgcttctcttgggctcttctcggggtttggatcac

SEQ ID NO: 136495 - DNA, 510 bp, Arabidopsis thaliana
  unsure (1)..(510): unsure at all n locations
caaacaaaatttcagctcctccatatccatcaagaaagatcaagaatcaagaactaatcaatatcgatcgatccgttaaaaaaaaatggatatgattccccaattgatggaaggctcttcagcttacggaggtgtcacaaacctcaacatcatctcaaacaactcctcctccgtcaccggagccaccggaggnaatgcaacgcaaccactgtnttcctcctcctcaccatcggcgaactcaagccgttacgagaaccagaagaggagagactggaacacgttcggacagtacttaaggaaccatcggccaccgntttcgntttcccggatgcaagtggagctcacgtgctcgacgttcctccgttacttgggccagttcggtaaggcaaaaagtccacacggacatttgtcacttctatggccatcctaatccttcgggaccgtgtccgtgtcctttcggcaaagtttggggaggctttgnggttttatcggtggtttgggttcctttgc

SEQ ID NO: 136496 - DNA, 515 bp, Arabidopsis thaliana
  unsure (1)..(515): unsure at all n locations
ttttcttcttctccttcttctcactgtaaaaaagaaaaaaaaatggcggaaactgagagaccccaccggtcttcaagtattaacagtagtagcaacaacaacagtggttcatcaaccgatctattcatttgtttcacatctngtttctnttcttcttcctctatgcgtctntnttctaaatccatccatagcccagctcgttccgcttgtttcaccacttctnttagccgtcgtctccgtactagcggtagcttgaagaacgcttcagctggagttttgaactctcccatgtttggtgctaatggaggacggaagagatctggatctggctacgcggaatagtaacaacaacaacaactaattaccatagagccgtcgtttccgaagtgacggtgtattgggnaagntagngtnaaggctaggaagcatgtgaggagaggttagngctngatcttgaagggaanggaggtgngattgttttaggnganccgttgtcaaacgncgggggtggtggg

SEQ ID NO: 136497 - DNA, 538 bp, Arabidopsis thaliana
  unsure (1)..(538): unsure at all n locations
ctactatcccccgtgtccacaacctaatctggttacgggtctaattccgcattccgatgcagtcgggctcaccatacttttgcaggtgaatgaagttgacggtctccaaatcaagaaaaatggcaagtggttttttgtcaaacctctccaaaatgctttcattgtcaatgttggggacgtattagagatcataacgaacgggacataccgaagcatcgagcaccgggcaatggtgaacttggagaaagagaggctctccattgcgacatttcacaacacgggaatggataaagaaattggtcccgccgagaagccttgttcaaagacaagaggctgcaaagtttaggaggcctgaaaacttaaggcctactttgaatggcttgttttcccgtggacctcaaaggaaaggctttttcttgatgctattgggaattttaggggagtggtctctttgtttncccagaaatttggtttttcaaccggcaatgccgggctaaatttgttttcccccccccaaagnnttgggnnaaactntnag

SEQ ID NO: 136498 - DNA, 501 bp, Arabidopsis thaliana
  unsure (1)..(501): unsure at all n locations
cacagaatgtggcaattccggattacagaagtcccaatggagcatacagttctggtttcaaancaattacccatcaggtgatctgaaggagtttactcgatcaagccgagctcgtaggcggtattgggcgaggagttacgctggatggaggaggttcactgcagcacaaccaggaccagctcatactgctttagcatcactaggaaaagctggacggataaatttttatggtcacacaaaatgttgccaggttgcatcatcgtgcttgggagcggtcccctttggatttacatggcaaccagttttttactgtnatcgtgcttagagtgcggcgtcttttttttttcccccgagacttgtttcaggatcaagctaaaagcaatcaaatcctaagtggggcttnaagctntngaaaggntttgtccatgggggtccngggtcannggaggggntttgggattaaacaaaggnccttntnggtggtatcggggtttncggaaa

SEQ ID NO: 136499 - DNA, 483 bp, Arabidopsis thaliana
  unsure (1)..(483): unsure at all n locations
caagattaaaaagaaggagaaaatgagagaaggatctcatcttatcgtcttgcctttcccaggacaaggccacataactccaatgtcccagttctgcaaacgcttagcctcaaaaggtcttaagctcactctggtcctcgtctccgacaaaccctctcctccatacaaaacagagcacgactcaatcactgtcttccccatctccaacggcttccaagaaggcgaggaaccattacaagacctcgatgattacatggaaagagtagaaaccagcatcaaaaacaccttaccgaagttggttgaaggccatgaaactgtcgggaaatcccacctacgggctatcgtgtacggctccacccatgccatgggtttcttcgatgtaggctcatagttatggggtttagccggtnccgngtttttcaagggaacccttggttttnnaaagttttttacttcccatntttnnaagggntcggtntttng

SEQ ID NO: 136500 - DNA, 520 bp, Arabidopsis thaliana
  unsure (1)..(520): unsure at all n locations
gaaacatctcagagcacaagagattgctgctcggtgcagacttccttgcatatatcttgttgatagtggtggtgcttaccttccaaaacaggctgaggttttccctgacaaggagaattttggtagggttttctacaacgaatcggttatgtcatctgatggaattccacaaatcgccattgttttaggctcctgcactgctggtggtgcctacattcctgccatggctgatgaaagtgtaatggtcaaagggaatggtaccatatttttagcaggaccgccacttgtcaaggctgctacaggagaagaaggttcagctgagggttttaggaggcgccactgttcactggacctgtgtccggtggtgtcanattattttnccctaggcggggctacatggcctcnctattggaggaacatttgtcaagantttcccatggctgcaaacaagggttggaaggacnttttgnggaaaattttgtttnaagggnccctctttgcataanngnttgncccnttg

SEQ ID NO: 136501 - DNA, 505 bp, Arabidopsis thaliana
  unsure (1)..(505): unsure at all n locations
cgatttcagatttgatggcaatctccaatggcgccgtggaatttctccggcgacgactcctcccaactacactaatccacgtcacggctatagacggcatcgtgaacgttaattcactcttctcgcttgcccttttcctcggcctaaccacaagtggaaacatcactttcccggtttcctcatcagcctccgagaaccaccatctccgccgatgtatctctgcaaaaggtcccgcattagcggagaggctagtatcaagccatgttttactccttcagtttaatttcctcttctccagtctcatcgctatgtctctcaagcaaagcaattaggncaacaacaacaacaacaaacggggactggntttagaaggaggaggcgcgtntgttgaacncgggaaaaggggngttgtgaatttggaagtttaaaggggttggnatngtnccttncggggnttcgnccggntttnggattnggggtnnttnnaatggggtagggggcnttt

SEQ ID NO: 136502 - DNA, 575 bp, Arabidopsis thaliana
  unsure (1)..(575): unsure at all n locations
gcagattgaagagatagctgaagccttggaactcaccggccacaggtttctttggtcaatacgtacaaatccgacggagaaagcgagcccgtacgatctgttgccggagggatttctcgatcggacggccagtaagggattggtgtgtgattgggccccgcaagtagaagttctggcccataaagcgctcggaggattcgtgtctcactgcggttggaactctgtactggagagcttatggttcggtgttccgatcgccacgtggccaatgtacgctgagcaacagttaaacgcattctcgatggtgaaggagttagggttagccgtggagctgcgtttagactacgtttcggcgtacggagagatagtaaaanctgaggagatcgcgggagccatacggtcattgatggacggtgaggatacgccgaggaagagagtnaagganatggcggaagcggcgaggaatgctttnatggacggaggatcttcgtttnttgcggttaaacgatttctcgncgagttnatcgncggagatgtttagttctattataaacgtcgtcgttcgtncncntttt

SEQ ID NO: 136503 - DNA, 370 bp, Arabidopsis thaliana
  unsure (1)..(370): unsure at all n locations
tccttcgtcgctaaaactcgccggagaatcccacaccatcaagaaaacgtcgtcttgcaagtngaagccacgaccacatggacgggcatctccggttatnatctacgcgcattctccaaaantaatccacacgcntgccgaagacttcatggccctggttcaaaggctgaacgggtctagacgagattattagacggaacactagtgaatctccctcttctnttgtaacggaagaggttaacgtcggggatgataacacggcggctccgtttagtcaggatagagcacaacgacagaagttaactgatatgccgttnttcacaccgagctcgatgaccttntttggttctccaactcaacttatgtatat

SEQ ID NO: 136504 - DNA, 507 bp, Arabidopsis thaliana
  unsure (1)..(507): unsure at all n locations
cattaagaagtcaaaagtcgccggtgccgtttccgttaaggataaatctcacccacccgctctaggtttccgtaccagagccgccgccgctaaaaacctcgccctccaccgtctccgttctcattccgacgaagcagactcctttaactacctccagctccggagccgccgtctcgtgaagcttccattactcactaataccagaaaacagcagaagcaacagctcattcctagtgtcaatcaatgtcaaacgaaaaaccctagggctagttccggtccggcgaagaaattagagccggatacggcggcggaaggaagcttgtggtgataattgagagaatatctagggctngatttgnaatttttggggttaaagggttttaaatttcggattcaggaaaacaagggggtttgttaaggggttcaaaattaattttnaaaggggggtttnnaggcctttttttttngggggggnccgggnannanngggttttttttttnaaaang

SEQ ID NO: 136505 - DNA, 510 bp, Arabidopsis thaliana
  unsure (1)..(510): unsure at all n locations
tgcatacaacgcaccgtttttcgtaacacggtttcgcgaagtctatttcatttctcctcgatttttgacatgcttgagacaattgtgccacgagaagacgaagagaggatgttccttgagatggaggtctttgggagagaggcactgaatgtaattgcttgcnaaggttgggaaagagtggagaggcctgagacatacaagcagtggcacgtacgggctatgaggtcagggttggtgcaggttccatttgacccaagcattatgaagacatcgctgcataaggtccacacattctaccacaagggttttgtgatccgtccaagataaccgggtggctctttcaaggctgtgaaggggaaggacctgtcatgggtcttttcttttttggaaaccagagtcccaaggttttncccggaaatcccccttgggattttgangccccttttgttgtttttttccccggnaatttcccnggggnagtttccagtttnaggngngtttttncnaaaa

SEQ ID NO: 136506 - DNA, 395 bp, Arabidopsis thaliana
  unsure (1)..(395): unsure at all n locations
agcttcatgcttcatcaaatccggaaaatnattggacttgctgttgctatcatgaggaactatgctcctgaatcactgatcgaagcttctttcaagaaggatgtgagaataaatgtaccgatggcgccagaagttggattataccttcatgaatgcttcttcacgtcttacaacaaaaggtttaaaggcagtcatgaggaggtgtcaatggaagagtacaaggaagtagctgaagagttcaaatggaagtatggttattcaccatattggctctgctgaaggaaaagatggagctgtggcggtttggttgcattctctgnaccnnggaactatcctgnnctncggngcaattgntttnccancccggntgaaggcattttctttaagaaggnttt

SEQ ID NO: 136507 - DNA, 382 bp, Arabidopsis thaliana
  unsure (1)..(382): unsure at all n locations
atcatatcttgcctaaagttgatcacttcatgagaagctatcttgatcagtggaatgagcttgaggttattgatatccaagataagaccaaacatatggcatttttatcttcactgacgcaaatcgctgggaacttaggaaaaccatttgttgaagaattcaaaactgcattcttcaagcttgttgttgggactttatccgttccgattgatcttccgggcacaaattatcgttgcggaatccaagcaagaaataacattgataggttgctaagagagctgatgcaaagaacgtagagattctggtgaaaccattcacaagncatggttaaggttaccttgttgaagaaggnagggtaaccggatacccgttaaaaccgttg

SEQ ID NO: 136508 - DNA, 510 bp, Arabidopsis thaliana
  unsure (1)..(510): unsure at all n locations
ctctgtactgctcgtntgcgtttaaccaagactctcccatcatttccccgagataagtctctctcaagccgcagaaatgggagtaattgtccatcataaagatgcaagaaagagcggtttctttgttggaacttgaccatgcgtccaagttcaaagcaatctctctcagtatgttgtagatgtnacctgtgagaagctcttcttgatactttgcgttcttccatcccaaatcaatttcgaggaccttcgacaagattggcttgttgttgttccccagtagcttgttgcagtactcagtcacaacgcttacaagctttgggacacctccatcaagaggtgggcaatttggtctctgtagctctacctgacaaggtaactcccagaagatctcggcgacacccttaccgngattcctgattagntcccgtgtaactttgcggattctttttgacatttgttccccccggaaatagccgnttaacctntctccgaaagtgnccctttttgggg

SEQ ID NO: 136509 - DNA, 629 bp, Arabidopsis thaliana
  unsure (1)..(629): unsure at all n locations
ccaggcanancccaatctnctctctcgaagctgtctaaaattaatcaatcaatcattgagctaatcatattctaggttttntttttaaggatttgtgtagactttcattgctgctacgtttttnaaagggtaatttgaagggcttagcttcccaaaggcactaggtggcaatcttatccaagatgaacagtcaaaatcctgatgatcattagggcccaacggttgtgggatttgaagtccctgtatcaccggtttcaagttacaacaatgtgtattcctcaaccgaagatgagacaagagatcctccagcagtaccgccacaccttcaacactctctattaggcaatcagggtagcatggaactggcttatgcgccncagaatgttgtcctgaaccacctctntatcgggaaccgagacgccccaagatctgttgtagcactcggtttctcgcatcggttcagggctaagtttgtcnctgtggtgatatacaagcctgtccaaagaagagggngcnccaatgtttgaataatgatacctctttttaagtagtgttgggaatttgcttctttatggattgaatttggtatacaaaaccatntggtccgtactgaattttattcttctctt

SEQ ID NO: 136510 - DNA, 755 bp, Arabidopsis thaliana
  unsure (1)..(755): unsure at all n locations
attttngttcaggtgtttatnaatggtggaagagaagaagactcaattcagggagagtttatncctgtgggatcagatgggaagattgtcctttcgttcagtcttttaaatnccaatccacgtgattgggtctacgattggaactttcagaggatagatgaggcattgttggctccggtgactaaggccttagcacctatagctaatataactnttgaaagtcaggttttgtatcatacaccgaagtcttcgttttcatcttgggataaaaaacttcagagctacatctttaggaccagtgatcttccgctttttggtgaattcggacgaatggcacttgggtacttctcctggggccagtggacgggcccaaatactgcaatttgtgggatatattccatccggaaaagaatgcccccttcttttgcagttcccaaatggggagatatctaaaacaaatggcttcatatctccgatgtggggtggtgtgattgtntggaacccgggaaattgtgacaaggactctgaaagcccaagtaggnacacgatatcgcttcaggatctcgggcaaataggtcggaaattttctttgggncaaattccggcaactatttggctttaagtcttaagccaaatataccccctgggatttgggcactttcnaaggttttaacctagntgaaagngggntttacaagggtggggattttggntntcttttcnnngggngccanatttnntaaaatcccnntctt

SEQ ID NO: 136511 - DNA, 523 bp, Arabidopsis thaliana
  unsure (1)..(523): unsure at all n locations
agatactgaatgagtggttcttgtttaatggagttttaaatttaaaaatatttggtaaccgagtggatcatcatgttattgagaagcacatctgctccgatactgaactcgtggcttccacaacactgctcgagagaatcgtctccggaaccggagtcacagctctggcgccggtcaacatcattgtctcttttctcatcaaagtccatagatggacacactggggagcagctgcaccaagctctctctgacaacaaggagattattattcttaaatcaaaaagcaacgagcacagctacaaaactccaacatcaagcaggcaacgcaggtcatctttagatgaaacacggtacacaaaaaaggcttttggttcggtcgtcacctttcttaggtggagaggcttttcttgngctcttggcaggggggtaagggcccctaggaatgtncgcttggggccgtcttttgagtgggtggtggttgcgggnttgnggggaccggngggaanttttttacggnggggnt

SEQ ID NO: 136512 - DNA, 480 bp, Arabidopsis thaliana
  unsure (1)..(480): unsure at all n locations
actgattcantcaactgagacgtgcatagcaaagaagaagaaaattattttttgtcaattggaggtggaacgaaatcaaggntcagaagagaatcagaaacgtagctctttcttcagaagaattgttgggactgttgtccggtcggttcaagatgaccaaaaggaacaagacataaaaatattggaagcggaggtggaagccttagaggagctgtcaaaacagttatttttggaagtatatganctgcgtcaagcaaaggatgctgctgcttatcctagaacttggaagggtcatgtgcagaacttacttggttatgcatgtccccatttatttgtgtgtataaaatgttgaagtctctccaaagtgtttgtcttcaaagagggccggtccaaaagtccctgtcacggccggtgntccnccatattctttcngggtnntttnntntngggggaggtcctncccccccntcncaggttnna

SEQ ID NO: 136513 - DNA, 622 bp, Arabidopsis thaliana
  unsure (1)..(622): unsure at all n locations
ctgaacgatcaaagagtgcaaaatatgaaagttatacaggagaagatgcagctcaaccagaaagaagttaaacgcttcaatccgatagatgcatttcctggtgatattgttatttttgcgagggtcattaatttactcagaggactttcatctactatgaatgttcggattgtttatctggacatcatgagaccatttgccgaatctgttctgttagggagtattagtcgaggaccaactgtggatgctcattggatacatgactcgccaatccattctgatgtagagtccaaagtgaggaagctgctcgcttgaacttgggaggtatccagaaaatacttgggattcagggtgtgtgcatattaaagatgggaaagtcataattggcacctgcttgcttggagtgcttcggaagatatgaccctcggtccagttcaacccgataggttaatttcccggtttctctgtgancaaaggggtgtcactngcttggaatnntacattnggctttnttgacaaaaaggaaactccagcttcgnccagnctttgggaaannatttggccaggggttcggntcaaattgggaaaagtncccntaaagggccccnattgtgctnaacca

SEQ ID NO: 136514 - DNA, 331 bp, Arabidopsis thaliana
  unsure (1)..(331): unsure at all n locations
cntagtagcgttctaagatcactgaggggaaggttggtcataaatttggagagtacacggaaactcagactttcgagaacaaatattgtaccgggaagaaaaaagggacagaaatccataaagtcaaaaaatatggcacgaaaaggaaatccgattttggtaaganttggaaaaaatcgtagttcagattcaagtcggttcagtnccgcggcactgtnagggtgtttatactttttaatatatttngtagccccaacattggggcctgtcctgtttctactgcngttaanacatttggttttngggggcttaggtttggntttggggaatt

SEQ ID NO: 136515 - DNA, 497 bp, Arabidopsis thaliana
  unsure (1)..(497): unsure at all n locations
aaaatggcttcctcatcaacgagaaagtacgagacacgaaagcnagatccaaactctaaaatcgcagctcttctcgttatcgacatgcagaatcacttctcctccatggccaaacccatcctcaacaacgttctcaccaccatcgacatctgccgacgcgcctcantccccgtattctttacgcgtcacaaccacaaatccccgaccgaccacggcatgctcggcgagtggtgtaacggcgatgtaatccttgacggaaccaccgattctnaaatcatccaggggatacaagggccaagtaaccggcccagacgggatggttggagaagaacacgtacagtgcgttttcaacaaaacccggctccaggnaaacctggaaaagatcggagtaaaggaggtgatcgtnatcggagtnatgacgnacttttgcttttngacaacggngcgtnaaggttttttaaggggttttngggtttttttnttgacgggcggggctt

SEQ ID NO: 136516 - DNA, 736 bp, Arabidopsis thaliana
  unsure (1)..(736): unsure at all n locations
tatgtcactcccacgtccaataaatcaatagttatcagtgatagacatgacatagctatgagcaaaacccgagtcaaggttgagagggatattgagatggaagtagataatcagtttagctctcggtcattgttttctgttgaaaacataaagtctgatgatcatggtgagcagaagccacgaagaagaaataaaaaccagtacctagcaatccaagaaatttctgatgagaccaagcttggttgcacataacctaatcggccgcttgctagagaaatttggccagaccgtcaacgtctaaacttagaaacggatgaacgttcatatcttggaggtgaatccaggcttcaagaaaaagtagaagtgagtgaaaaaaagcaagcttcatcgcaggcgaagtcagatgaggcgatcattctttcagttgtcaaagagcaaataacgtccctagaagagagtgtcttgatgagattaaaagagttgatggaagtgagctagcatcagcaaagttataacctttcctgcctaagtgaagtagcaatggaatcaagagagaatcggcaaaggatattgagatgaacacaacaaggaatacgattttgcatcacattgtattcatttttacttcgttctcaatccccctttagggaagaacttaagagtgtactcatttttttctttatatgataagatgatctttgccatacattnnnnnnnnnnnnnnnnnnnnnnnnnn

SEQ ID NO: 136517 - DNA, 686 bp, Arabidopsis thaliana
  unsure (1)..(686): unsure at all n locations
acggaagtggacagtctcagtaaactgaaagcaagcagaatgaaggagcttgtaatgaaacgaagatccgagttagaggatctttgcagactaactcacattcaacctgacacaagcacttccgctgagaaatcaacggcattaatagattctggattagtggacccttcagagcttcttgcaaatattgaaatgcaaataaacaaaattaaagacgaagcacagagtcgaaaagatatcatggacagaattgaccgttggctctctgcatgtgaagaagaaaattggctggaagagtataatctggatgagaaccggtatagtgctggaagagggggacatgtaaacctcaagcgtgcagagcgagctcgggttacaatcaataagatccccggaatggttgacactcttatcaagnaaacacttgtgtgggaagaagacatgcagaagtcatttctatacgacggtgttcgattggttaacatactagaagactataaactgacaaggaaacaacaggaagaggnaaagnaaagntacagggntcaaaaggaggggcaggntctcctacttaaccccaaagggantccattttcnggntcaaaaccggtcccaaggaggagcagcaanttnagnaagccccattggntttaacatttgcantngggatgnttcaantccnccca

SEQ ID NO: 136518 - DNA, 380 bp, Arabidopsis thaliana
  unsure (1)..(380): unsure at all n locations
attttaaaaaacacaaacccattcgtgcgtctctggctaattaagttaaaacactaatggacacttctncttcacttttgtccttctccttcttcttctttatcatcatcgtcatcttcaacaagatcaacggtctcagatcatccccagcttcaaagaaaaaacttaatgatcatcatgttacatcccagagtcacgggccaaagtttccacacggaagcttnggatggcccgtnatcggtgaaaccactcgagttcgtctcttctgcttactcagaccgtcctgagagtttcatggtcaagcgtcgtctcatgtatggggtgagtgtttaaagtcgcatattttttgggcacggcggngntccntntngacggntgct

SEQ ID NO: 136519 - DNA, 550 bp, Arabidopsis thaliana
  unsure (1)..(550): unsure at all n locations
cagtccngtccggaatcccggncgccccagggnccgccgggattcaagcccccccaacttaggccaggtggttttccaccagcttttgccagggaatgttgtaaagcccgaagagtgggaccaggtttgggacccaaagagagttgatataacccggcctgatgttttacttgcgtcgagctggcttgacccaaggctgttatggccattgttagtgacacaagcagcatgagtgatgcgcttgcacttcttggtggtgacgacattgggaacagttacgtgactgttgggtcatcatcaggtcaagcaccacgaggcgtcgggtcttatggatggaccaatatgccttctgtttggtcgctgtaacaaaatgaaccatatcacacaattttgaacctttctgtattttcatgcaaccctggcttacatgactttgggggtttgttaatagttgtagggaaggatttgtgggcctttggtaaaaatttggattttcttcacctgatttttcttatacttgaaggcatttatatatactcatttcttgttc

SEQ ID NO: 136520 - DNA, 497 bp, Arabidopsis thaliana
  unsure (1)..(497): unsure at all n locations
ttctgataaacctcgtggagatgatgttgagaaagcacgagacaaatccttggaacgtcatggtagagaacgctcagttgagaagggtctagataaaggaacaactaggagttatgatagaaacaaggatgaaagaaacaaagatgatagangcaaactncgtcatagtgaagcatcacttgagaaatctcatcctgatgaccattttnattctcaaggtttacccccacctccacctttacctcctaacatcattccacattctatggccgcaaaagaagacctcgaaagaagggctggcggtgcaaggcattctcagaggctttccccgcggcatgttaggaagagaggaacgccgctctttaagggaattttttcagtttctgtgggtgatgcaaaacggtagaagggatgatgatattaggggcccgaagcgagatnaccntggaacaatcactgttaagggnggngganggggaaaggggaaggggnaagag

SEQ ID NO: 136521 - DNA, 467 bp, Arabidopsis thaliana
  unsure (1)..(467): unsure at all n locations
gaaagcagctgctgaagtgagttgcttgaaattggcctcctcttccttgcaactggaactcgagaaagaaaagtctactcttgcctctatcaaacagagagaaggaatggcctctatagcagtagcttctatagaggctgaaattgacagaacgaggtcggaaatagcttcggttcagtcaaaggagaaagacgcgaganagaaaatggtggagctaccgangcaacttcagcaagcagcagaagaggctgatgaagcaaagtcacttgctgaagttcctcgcgaagagctacggaaggcggaagaaggagccagaccaagnnaaagccttgggccaagttccattggggggnaagcttttttccttcncaaaagggaattcgagcagcttaaacttncanagngggcttgnccttacttncccctaaaggnttttggggggggntnttncccctttnaagtttttc

SEQ ID NO: 136522 - DNA, 428 bp, Arabidopsis thaliana
  unsure (1)..(428): unsure at all n locations
agcggcggaggattctccgaatctaagtctcagtccaaggctgatgaagtcgatagctgggtctccactaagccatcggagccccggagattcgtttctagcaacggcggcggcggtgacagatttaagaaaaggggaagttttgaatccttgtntagaaaccgggattctnaatacggtggtggtggtggttctaaatcggatacctggggaagaagaagagaagaaagcggtgctgctaatggctcgccaccaccgagcggtggttcacgcccaaaattggtgttacagccacgtacacttcccgtggccgttttggaggtcgtaaacgccggagagtcccggtctttggtcatttttnggggaaaccttaaaggtgcttaatcccttttttggganacgcaaagccctttgggagggaagttntt

SEQ ID NO: 136523 - DNA, 527 bp, Arabidopsis thaliana
  unsure (1)..(527): unsure at all n locations
aaatccgattgnaagaaaacactaacttcaaattcgagatctgaattagggattctagaggatgacgaaggattttccaattccaccggttgttttccccaccagtggatcatctccggccaccgcaaatnttcagcaacgccgagttcccacagctccttaccaaccaccacgtcaatcctccgcttcatcttcaatccctttcattccatttgaaatcggatccgccgccgtttcaatgccggcgggaccattcgacggaacaatcgcttcatctgcatctttcggtagagggagtctctgcttcggttnagggttgaggagcctttantcggnnggactcgggtatccatccagttcaaaatntggaagaaaacttagctcggtttctaaanccttttnggatnaatcagatttncaaaaaggttnagatttttttgggccgtttttttaaaacctggggntttgttaatnaaaattnctcgtngggaganaaanttngggtnaaacttggtggggttnttttt

SEQ ID NO: 136524 - DNA, 412 bp, Arabidopsis thaliana
  unsure (1)..(412): unsure at all n locations
gcaactnttgtacgacttcacgtaattactcagagtattagggagttcattaatgaagtcaacacattggcgtcgctgcaacaccagaacctttgtaagctggtaggctatcatgctcgtgacggttctgacacaagaatgttggtgtacganaggcttgctctgggcagcttggaccgtttactgcatgggagatcagatgggcctcctcttgattggaacactagaatgaagattgcactatgcgcagctcaaggtctaaccttccttgcacgaaaaaaaggcccttttccaggcaatgttcaatgaattttcgacgggcaaatatccaagtccgtatagtttcagccccaagttctcaggntacggttntccagncatgngccttaaaacagngccttttnttgtccgg

SEQ ID NO: 136525 - DNA, 466 bp, Arabidopsis thaliana
  unsure (1)..(466): unsure at all n locations
ttttttaatacaaagtcttatgcatatacagtggcagtctcatacaaatctataagtagagttacaagctgggatacaaaactgtagatacatattaacaagatatttttcggccttttagtgtagggtacttgttgagccagtgacagtcttcgaacgagcacctagaatcattcctcctttgcagctccacattgttggggtggatgaaccgaggggcccatgccggtgtcccatcttcataagagttatgcgttagcctcctcacattagggccatctaaatttcaccgtgaaggtatcaccgtatggctgggaatgatgcggggtcgaaaacggttccgccgagattccagcataatcagaagtgaagacnaaaggattactgtccnggntgaaaaccggggggttgttcccccaccgncccgcttnggagagctccctaaccngtnccgtgggggggacaa

SEQ ID NO: 136526 - DNA, 584 bp, Arabidopsis thaliana
  unsure (1)..(584): unsure at all n locations
cctttgcaggcacgccaggttacgtaccaccagagtattaccaaagtttcagatgtaccgcaaaaggcgacgtgtactcaatcggagtagtgatgctcgagatcttaagcgggaaaagaccaacggataaagaagagtttngtgatacgaatttagtaggttngtcgaagatgaggccaagagaggggaaccacatggaagtgattgatgaagaccctcctaaaagagggtcccttcggagcctctgaatgagaaagaaggttttgaaggaggagtgattgtgaaagaaatgttgaggtatttggagataccgttacggtccgttgacgatttcccatcaaagagacctaatatgttacaagttgttgcttcgttgagagacctccgtggaagtgaaaataatagncacagtcacagtaatagcttgtaacaacatgaagatctctgtttttttttgttttcctggttttttcaatgcattttttttncctgtgagaatgtgtatgtgtggttgatcaatgattaaaatttcatgatgtatcaagacttaattaatgtaatttaaattctgattcctttaaaaa

SEQ ID NO: 136527 - DNA, 551 bp, Arabidopsis thaliana
  unsure (1)..(551): unsure at all n locations
aagcaccgtaccaaaccgtagcagcttgagccgaccgagttcgatccgttcgcctagtacaacaccatcacagtcaccaccaacccatccaaaatcatgatgtctccactggttgttgtaattgggttcgtagccatgtgctcggccagcccttcactgtacttcagcggtccacaatactacagcggttactacgcagcccccgccgccgttgtcagcccgatcaagagccaataccacacccaaaacgaattcggacagtacggctacggctaacaacgacggattctccagcaaatccgagaccaagcacggcaacggtctgaccgaaggcggcgtactcgtacgtcgacccggaacggggttnttcagcaattcaaattcgtgtcccacgagaacggtttccgggtatntggtaccaactttgcagtgggttcaaccgttccccgagtagaggttcccgcggtcccgngtcccgcgtcgagtccttattgaagtaaggcggccccgggccggccaaagggttttcagtnggtccannatnaaaacgc

SEQ ID NO: 136528 - DNA, 622 bp, Arabidopsis thaliana
  unsure (1)..(622): unsure at all n locations
gatatattgccactagaaaaaccggctgcttccgtgccgcctccaaaaaagcaaggaaaaggaatgttaaagtccatgttcaaaaggaaaacatctgactcctcttctaatatcgagaaagagtacgcagaacctgatgtagttgaagaactctttgaagagggctctgctatgctatcagagagattagacacaaagtacccgctttgcaatatgtttaagttgttcatgtgtgctgtgtgtcaagtagaagtgaaacctggagaaggtgtctcgatccatgccgggtcggataattgccgtaagcttcgtccctgggatggtccattcctttgtgcaagttgccaagataaggaagacgcaatggaaggggaaagatcatcgggggatagaccatagtagtgaaagcggctagccagcaatcttgcaaatttatttgcaaaanaacctatccaaacagtatttttgggaaatttggggcaggtctaagggtcttcgggggtgtaaatttttcccccctgggggggtttgaggttccttgctaancccccacattttnccnttttccngnagctccaaggngtttttttttttttccccttangggggtnnaacaactntt

SEQ ID NO: 136529 - DNA, 537 bp, Arabidopsis thaliana
  unsure (1)..(537): unsure at all n locations
caagagactgtaacttatctctctacattgttggaaaaggatgaccgatctgtacgtatagctgctggtgaagcgcttgcagtaatatatgagttgggaactctagagaagttcgctgccgaagtcaaagggtctgctaatggatccagtgaaagaaggaggtgtctctcaggaagcattgatgcacatgcatggcttgaaagctaaagtcactaaacaagttagagagctctctgtagaggcaggtggtaaaggttctgctaagaaagatctcaacacccaccgacaatttgttcaaagatcttgttgaattttcttgtggatgggtatgctcctgaaacctcaccaaaagtcggaggggggctatttacagacggcaacgtggtatcagatgttccagttgnattattttgaagcatttcctaggggggtggctttntttagcatttccagggggattaatccctcnctgatgatttaggttcnncccaagaaggnttggtggggaagtttctttttcggaaaagggtntttngc

SEQ ID NO: 136530 - DNA, 557 bp, Arabidopsis thaliana
  unsure (1)..(557): unsure at all n locations
taatagctcactggtctagctccatggcaccgaaaatntatcagggctcaagtgattcaccgaagcgacgagaccttgaaagctgctttttcaagtgtcagtagcggaacgttctgtcaatcggggaaggtttttggtgacaagacctggagatatcagaagtgagaatgctgacatgagtaacgataaatcctgtgaaaaacacgatcgcctgccagtggaaggctttctgcgttcagtcaatctacgcagagtgaatcggtccctaaggaacccccgaaaggcctnccgtccgatggggacacggaagtaccgaagttgcttttgactacaaaaccatgcctctttcttggagcgnattggatgatcgggccgagggcagcgtagacttcttccnctnantctcctttccctaatatgaaccttgagtcatcaaagcctttctgactcggcctggnccggtcgncctangntactngngnttcaaaaggcggaagttttcgtcgtagtttttgcgaccttcagtaggggcctttaggctttttgataggagtngg

SEQ ID NO: 136531 - DNA, 636 bp, Arabidopsis thaliana
  unsure (1)..(636): unsure at all n locations
ggactttacttgctggtgataagtttcaagggaatggtgttaactatcanatagcttctncttttnttgaagagcttaggccgttnctnccattaaggaaagaggttttggaactnctctttgctccttttgtgaagattatgggtgttgttaatgataagattttggtggggaagattaagagtaatttgtttgatgagttactgaagatggggaagaagctactgataattaaacaatctggggatgatgcagtgcctgaggatgatgatgttgtggttttgggatctattgctttgtctatggagtttgcaaagaggttttatgagttgggttcttcctccggaggtgtcatcaggggtaattaggaaatttgatattgccccttcacaaggagtttttgcagttggagaaggttatgtcgagttctagtatcgaagtatctatcgtagaagcttctcgtcctggcaacgatgaagttccngaatcggttccngtgtctnagtctaatacaaaatnttggtttctnaggctaaggaagaattntttnctaaatgggnccttcttcaaaagaagaaagggttttaaggaantgttcaaangcctnnaaaaagccagtntcaaagaaagggtnnt

SEQ ID NO: 136532 - DNA, 612 bp, Arabidopsis thaliana
  unsure (1)..(612): unsure at all n locations
tggacatttatcgatacggcgattcttgttgcgtctcttgactatggtcaagaactgaaacgtcggagagataacatcgtcgagcgtctctacgctacgtcgatggctaacaagtgtagaaactncgattttggcggcggtggtaacgttacggaggcggcgattggtagggttaataatgggagggttcacgaggagacggaggaggaagatgaagaaggagtaacagcagcagcagaagaagaagttagagagaaatctgttaatgttgaagacgatgacgatttcgatccctttgctggtttgtttgatgatgagcaagaagagtattgtttgaaatcaaggggcaacctttgaagatcccgatcctgtcctgaagaatccttttggttgaggttncttcagaatcctggaagntattgggtataacatttccaagctcttcaagggaaccttgtnntttgggggcattntnaatcgagntcggaagcatccttccgaccaattttcgagnttntgctaancaccttncaaaaattgnnggacccgtggtgattggcaaattacccncctgggccttaccccagtttncccttgggtnccgccnagggc

SEQ ID NO: 136533 - DNA, 531 bp, Arabidopsis thaliana
  unsure (1)..(531): unsure at all n locations
tggctcttgagaactatgaagaactctttggttcagccttcaactcatcaagatatctcttcgagcacggtggaattggaagtcttttcgagaaagatgaagctcatgagggctcaatgcagcagccagcattaagcaataatgcatctncagattcgttcatgacttgtagaaccgagccaataatttgctattcatcaaagccagcacattcgaatatctccttctctggcatcactggagaaagtaatgctgggagatttccaagattgtgggggcggcatcgatgaagcagctttcaagggagccacaaccatcggtggccatccaacagcacagggcattattgcttcctcacatgcaacaacacggtaataaccggtgttatncggttccaaggcaaggaggagggctcgcaagttttccaagcggggaaaggtttncccttcggaagaaagggctntttttngccgnggtntnaagnccggttttnaagcccggggggtttttttncgnccnntnnccncagng

SEQ ID NO: 136534 - DNA, 522 bp, Arabidopsis thaliana
  unsure (1)..(522): unsure at all n locations
ttcctcgagctgtgttgtacctggtattggtcttcatctaaacgccgttgcaatgtctgcaaaggacagtaacatcagtgtcatacatggctattccatatctggagagattcaaaagagtttctcaggctctaccactccaattcagtcccaagacactgtgcaagaaacttcggaccaggcagaaaacgaacctgtagaagaagttcccaaagcattggtgttcccagagttgaatcttggcagccttaagaaaaagatgcgtaaatcttgaacaagcttggggaggggtgggtcatgttaaacgatgcaactgcaaaaaggcttagggtttgtagcgttactgtgaatgctttgctgctggggtttnttgcatagngccatgttcatgtatagnttgcttcaacaaacctttccatgangnacctnttttggttcccggaaacaggttgntnccggaatccncttgcatttgcncccaaagncttngaattgnggttccctcntggnggctngtnttgt

SEQ ID NO: 136535 - DNA, 396 bp, Arabidopsis thaliana
  unsure (1)..(396): unsure at all n locations
gggaaaacaagtttgtaatctccacaatctcaacaagttgtgcctgagacggaggtggctggacaagttaagacaggtttgccaactatatactcagctgagacagttacaccttgtcaaattttcccatatttggaaaagtagtatcacaagatgggactggtatatttttatgcagaggacctagtaaaaacactgcttgtaaagtagtagttttccccttttctgataaatcctataaacagcaacaacttaacagggaaaggattaatgnccttttcacaaaatggtncatcctattgcagttatgggnaaaccntggttcaaagntncntgnggncctgattttaatggaaaaaaccccttttttttnagncaaggatttccnntttnggg

SEQ ID NO: 136536 - DNA, 422 bp, Arabidopsis thaliana
  unsure (1)..(422): unsure at all n locations
aaccngaaaagctaacgggacgtggcatcgcatcgaccgagtttgcttatggagctggacatgtcgacccgatggccgctttaaatcctggacttgtctatgaattggacaaagctgaccacatcgcctttctctgcggcatgaactacacttcgaagacccttaaaatcatctcgggtgataccgtcaagtgctccaagaaaaacaaaatcttgcctagaaaccttaactatccttcaatggtcggccaaattgtcagggaccgntagtaaccttcccctggtgacttttcaaacagaacggtggcccccgccgggacggcaaactttttcatacaaatcaaaggtagtnggngggtcacgggtcttaaggtttgnatcanggtnacgcctagtgtttctgnattttaaagncagtnaccg

SEQ ID NO: 136537 - DNA, 359 bp, Arabidopsis thaliana
  unsure (1)..(359): unsure at all n locations
gttgtgtctccataggacccggggcatacgatatcgatatacgaaatatcacttgtggaccaggagggcatggaattagcattggaagtttgggagaaaaaaactcacatgcgtgtgtctccaacgttacggttagagactcgttcataaaattttccgaaaatggagtacgaatcaagacatggcaaggtggatcagggtccgtttcgggtgtaacgtttgacaatatccatgtagatactgtccggaatccggtaatcatcgatcaatactattgcacggctaaaagttgtgctaacaaaacatcagcggtttttgtgaatgatatagtatatcaaagtntaaangggcannnaant

SEQ ID NO: 136538 - DNA, 529 bp, Arabidopsis thaliana
  unsure (1)..(529): unsure at all n locations
ccagataaaacctaaataaaatccctttctgcgcatgtnagcaagatatggttccagagtaaactgaagaccaaacaaaacaaaactnttttctctccttcaatttctccgtctctctctcgttttccatggccgagttacagttagtagaaggtcaccagattaacggcggttttatcccgccggcgataataaactcaatcgaagcaccggaaacatccgccgcagccggagtttcagtcggatcgaaacgattgagaagacctagcgttaggttaggagacatcggcggtgaccagtaccaccaacacgtggttgcggcgtacgatttctccgcaagtccgacggccgaaatggaggcctagtggtggtggtggtggtggtggtggtaacaaggagggggccggataatcagagtgggaagacgacgtcttcttcgaggactcgaactatgacgaatttgagctccggtgggtatgagaatactggaaccctagatgaagaccggtttcnattgggagttggcggg

SEQ ID NO: 136539 - DNA, 359 bp, Arabidopsis thaliana
  unsure (1)..(359): unsure at all n locations
tggaaaggattgtnagatatcaaggggatgtcattaacaagcaaccgggaatcacctattgttttcttaaaatnagagaaatctagcggttcagctaaagatgatttgcttctacttgagaaaatggctgaccgtgctctgaaggaagactcattgttggttgtgagttctaaaagatcatttcttgataaatgccggttacctgtgggaatcaaactctacgtctcagcgggacattcggaatccgatcttcttaaagcgtcggagtcactgagagagacttgcttcagagcttctactcaaggccctgaaaaaaccgaaaccttttttttttaaaggaccancaacccntnggggna

SEQ ID NO: 136540 - DNA, 509 bp, Arabidopsis thaliana
  unsure (1)..(509): unsure at all n locations
ctgcaatgattcctcttcagaaagatcttnanattncttctaatcaattgtngggcgtacctaacagtgccacaacgacagctctttcacctcttggcgaagatgccctaagatcagatctaactgccatacatgagatcattgagaagcttggatataaggatgacgagggtgcaaccacagagctttctttccagatgtggaccgaccagatgcaggacacattggtcttcaagaaaaagggggattctgcattccgacataaaggctttgcaaagggccatcggatgcttttcttagttcatcgaggtaggtacaatgggttccccaactgttcatgcangacagagtctgtgttacctaatgaatgatatncctagagaagcactaaacaatgcaatgcaagcacaagtcatatctcccngcttgggnatatcgcatcgtatctnccagctgtagctttgtcaagctnttnggncanggggacggggnncanacngttctnaaag

SEQ ID NO: 136541 - DNA, 302 bp, Arabidopsis thaliana
aaggcggccagcgattttatccaacaagacctcaagatggactatgtgtatgactacatgtaccatcttttaaccgaatactcgaaactcctccagtttaaacccgagattccgcggaatgccgtggagatttgctcggaaacaatggcatgtctgaggagtgggaatgagcggaagttcatgacagaatcactcgtgaagcaacctgcggattctggtccgtgtgccatgcctcctccttatgatccggctacggattacgaggtttttaagagggaacagagtactaatatgggaatcct

SEQ ID NO: 136542 - DNA, 527 bp, Arabidopsis thaliana
  unsure (1)..(527): unsure at all n locations
aaggaaaaaataaaccttgttcattagaataacctgctgaatcagctggagggttttaagcaatgcatataaaggtacaaacctataaacagagatctctctacaaagcagacgaaggagaagagaaggctgtacaattttttatacactaaaagctctgtataaaccaaacaacataactttgcctagatttatacatatatgtatggacactgaaacccaaaatcacacttttatttatctatcctgaggttatgacagagatgtccaagttccggccgtgacttcatccatcccatgcatttcatttcttccggcgacgtgctatagaggtatgatctgaatgttatcaggtaaaagtagcgccttaaggnnttaacacccatgtccatgatggtatgaccgggtttccaccttttggaananggaagtttggtcagcccttacnggaggnaacgagncctcnccgcaaagncctgaccagnacacatacagtcgggtatccancaaggccgattgncnggggg

SEQ ID NO: 136543 - DNA, 532 bp, Arabidopsis thaliana
  unsure (1)..(532): unsure at all n locations
aaaagtaagaatttttatacaacacttacatatgtgtcaaattccaatatagttttaacaacaatataggattaactatgaaactcaactgcaaaaaagccgcaagtttgttcaacctcatacattcaatagtaaatataccaaccatataaatttttacaagtaagacatgttgttacaacaacacaaaaaccccataatctcaccatgtgcgaatcaatcaagttgatgagtgacttcctatgagagactgaaccatttccctccatgttcttttaaacaatctgctcccaaagtttcaagcaaaaacctccacaaggcagtgtgtttttcctccgggttttttatggtggnctcctattatcggggnagattacagggggtttacatggatttagctagccattgnctgnacatatcgggancggggtgcgaattggnatgnaggggttgntgngcaccaattggacanagccanngtccgggttttagntngaccgggatngggttccnggggggantnccancagnc

SEQ ID NO: 136544 - DNA, 433 bp, Arabidopsis thaliana
aaaaattcaaaaaaaaaaaaagaattaagttaaaaaaaaaaaggtaaccaaaagagaaaagaaggtataggcagagaaagcattggtggtggtattttgagtgagcttggatgatgaccaaagctcaatatgcgtcatcaggatcataacttgaagattgaaatgatttatataatgtctggatgatgaatgcttttttttttttattattcggctgtttcaagactctggtcctcttagggctttgacttgaatccgtttgtgcttttttaattttatttccgcgttatataagatcctcatacatccttgtctctcgtttttggagttatgctgtcaaaactaaagtgagagtagttgcaatgaaaggctttaaaattaaaggtttctgatctatatcaaggtcaaaacactgtttcttttaaaaaaaaaa

SEQ ID NO: 136545 - DNA, 431 bp, Arabidopsis thaliana
  unsure (1)..(431): unsure at all n locations
gacagtgcgaacaatactcggagccaattgactgaagctcctgacctcattgccaaatgatgaaaaggttgtgctcgttggtcacagctttggtggcttgaacttagccatagccatggaaaagtttcccgaaaaaatctctgtcgctgtattcttgactgctttcatgccggacaccgaacactcaccatccttcgtcttggacaagtttggaagcaacatgcctcaagaagcatggaatgggcaccgaatttcgaaccttatggttcagacaattccggactgagtatgttttttcagccctggtcttcaatgaaaggttgggncctctacccagcntttcctccagtttgaaggatccttngaacctgggggttaccttttaaatgangggcaaggggtccgttattttaatttaaacggnttttatc

SEQ ID NO: 136546 - DNA, 570 bp, Arabidopsis thaliana
  unsure (1)..(570): unsure at all n locations
aatccagctggtcttattgagtatagggcacatcccttttggatgcaaaagtattgtccttcacatgagcgtgatggaactcctcggtgttgcagttgtgagcgaatggagccaaaagatacaaaatatctcattcttgatgatggtcgaaaactgtgtcttgaatgtctcgactcagccattatggacactcatgaatgccaaccattgtaccttgagatacgtgaattttacgaaggcttacatatgaaagtggaacagcaaattcctatgcttttggtggagagatcagctctaaaacgnagctattggaaggagaggaaccacggaccatcatcaatttacctggaactaggagggctttgtttgtcctgaagaaccaaactgtcaccacgggtgttaaaggnggcccagnatttngggcaggctccaagttaattggcatggtcacagngccttcaggcttntncggcggtnttaagcacttcggttcncanttttnnttggctccccggttttacccgggcaancttncnangngttgtcatnatgnttcnctaatggggccaa

SEQ ID NO: 136547 - DNA, 611 bp, Arabidopsis thaliana
  unsure (1)..(611): unsure at all n locations
ctcgccggtcggaataaaggttttacaaattcctcttgtctcatccgtgatgttgaagcgtactgacaaatggaaatcttcgcatggatctcgaatccatcaattcggacttgttttcgttgttgggatcttcctggtggtggttctgttatttggctttcagtgggcaagaatcagagcacgaaaatgcaactaccgaaacagatctctaacaatgtcaagcccgaattgcaatctcagccaacattagagattcagaacgggcctcaattgatatggacgataccaaattcaccaaaagcgggtctgtttatagctcatgggtggcacaggaaagcttcagacttttggggacaaatcttcagattggcctcaatgtactggcctaccagaggagagggttctttatgngatttgggcctagctcgaaagttggtggnntnaacttgnttttggaatggacanactggcattgggaaggaaaaacgatggngggngntttaaaatcgnggtcgggaagatagtcgaagatcccttggggggaagggtcactggggtantggttggtttggaaaaataagtngganggnttntggngggtggaanntaaa

SEQ ID NO: 136548 - DNA, 413 bp, Arabidopsis thaliana
  unsure (1)..(413): unsure at all n locations
ctttatgaaggcttggactggttatcatctactcttaaggatgttaaagccgctggattcacatcggttggccactcgttttaaatcttccaggtatactttgatatcaatggccagtgtcttcttcttggctttatcacgaaatcagaatctctgaagactttttttgttaaggaaagaatgatcttctcattgtggcaatattagactccattagactatttttgaattttgatcatgctgccatgaaagcttctttgtatatgcngctgatgaagagttgtatcatctggaaaaaccttctcttttggggggcatctttgtccgattaagaccttttggtagatggatataccatgccctccggaaatcatggttatatttgntgaataacaattataaggtttnccntt

SEQ ID NO: 136549 - DNA, 396 bp, Arabidopsis thaliana
  unsure (1)..(396): unsure at all n locations
ggcaacagctcgtacgacctcctgtngaccnggatgggtctacccaacggacccggattccaagtcgcatgcacagacccagcgctcttnagtggtgacccgcaacccgtgggagtaaccattccgagtgcgccctactccttcggcatcatctcggtcctcatggactacacgacgttgcccgagccacttcccacctccacttcgtcctggaccaccagcaaagggcgaggaggcggagaatgcgtcggcaccaaacggattccaccgataccggattcgagatgacccgttcctcaaccggtcaaacgnactaaccgnttttttganaaccaactactngaccttaaanttttgggacttngattcggttttggttgaaatttggcggcnaaa

SEQ ID NO: 136550 - DNA, 485 bp, Arabidopsis thaliana
  unsure (1)..(485): unsure at all n locations
ctgatgtaacgcaatcaggcgacccttcctaaggaaataactcttagggaagagtgcttcaaattttcattagcccacgcaagcgaatttgatgaacttctagcttttctggacgaactgtcggaactatcgagattcaaggcactagaggagagtcttcagtcgtgcctgctctgtcatctagggggtttaatgagaatattctcaggttcaagaatgaataaattgtttgacgatgtctcttgctttgtagtctcgctatcatcagaccaaacatatagctgtgatcagaagagctcactgagggtctcttgttggaagggtctgagtcaagtgtcttgaaggaaacttcactgtgaatcttccagaataccgccacaaaaggttggaaaaatggcttgggngtttctttttggctntcctnnncccagnagcatcaanaatnntccttggggcagaccaaatggggtncggtaaaagagttg

SEQ ID NO: 136551 - DNA, 646 bp, Arabidopsis thaliana
  unsure (1)..(646): unsure at all n locations
ccatctcagtcgaagctcaaggcaaaggtgagagtgccacggctaaatggggaacggaagggagtctttgctacgcggtcccctcatcgaccttgtcccattggcctcaccgttgctaaggtggaggaaatccaaaaggataaggttctcctctctggtgtcgatctggtggatgggactccggtgctcgacatcaaaccatatttaccatactcggacagtattcaaggagcctcagtgccaaactgggtaaaggaggactgctcattggctgtggcttctgtgactttctcagataccttctcttcatccatcaccagctgctggaaactcgatagaaaaagaaagtctctatataggttcaagcaagatgacgtttaggggctttgatcacggcaggtcccgtctcatggggcatacggctcaaattgttcggaacgggaccaagccccaaggttcatttggttgngggaattttttncnccttgggccttgngggggctanncgggttttcatggtagtnntnaagnaatttnncggcagggtttttntttcccaaaccttaangttttaaggaggtgccttnaagtttagggccctggntaattntnaaaaaaaaggggccttnggccngtttggngggtt

SEQ ID NO: 136552 - DNA, 495 bp, Arabidopsis thaliana
  unsure (1)..(495): unsure at all n locations
atcagaagtagacaagcttgttgacaagattgattttggggaattatgcaacgattttaagtgcacaagtagtccgcaggtggaatccacagctagacaacttgttcgcgacattcttgaaatcagagaaggaaatcgtgcctttgcatgctatgcagtttccgttaaatataaggttccggttagaagttttacaggtcgtgagaagtacaaaagaccaatgtggataactagtggattagagaatcctaccgtgacggtacaagagatggtaatgttatcggccagcgtcttgcgaattaaaatggccagtgaaaggaaaacccaaaaatcttattccttggcttgctgtaagtgggcggattttgttagtaaaagtgcaaatcctgnantttcccctttaccccgntttattgggcaaagtttttttngcntttangggtttttgggccttttttttnaanaancccccttttncccaagcctttttttggg

SEQ ID NO: 136553 - DNA, 480 bp, Arabidopsis thaliana
  unsure (1)..(480): unsure at all n locations
ctctctcagagtactctcttagtttctttcttctncttctttgtaatacggtgccgtttgacatggataaccatcgcaggactaagcaacccaagaccaactccatcgttacttcttcttctgaaggtaagctgaaaacttaaacaccttcgttttctcattttnccatgtttttttatacttatctatatataatgagaaatctgaattttggtgatgacaaggaacagaagtgagtagtcttgagtgggaagttgtgaacatgagtcaagaagaagaagatttggtctctcgaatgcataagctttgtcgggtgacaggtttgatctttttacctaataatggattcctatttcgtagggaaattaattttaaattggaacccccattaggtaaaaggctggaatttggggggggttattaattttgatnaaaaggtggggacntgaatagcctggggngggtcccnnggnaggaccc

SEQ ID NO: 136554 - DNA, 599 bp, Arabidopsis thaliana
  unsure (1)..(599): unsure at all n locations
ggaaaacgtgttgccgagactcttatgtttgattaccataggcaacatgggattgagatacgcatagcgagcgatattcaacacatatggtcctcgtatgaacattgatgatggtcgcgttgtgagcaacttcattgctcaggctctcaggggagaagctctgactgttcagaaaccgggaacacaaacccgcagtttctgttatgtttcggacatggtggaaggtctaatgcgtttgatggaaggagaccaaaccggaccgataaacataggcaatccaggcgaatttcacgatggttgaagctcgctgagaccggttaaagagcttattaaacccggaccggtgggggtataaagatggttagagaacacaccttgattgatcccaaggcaaggggggnaacccggccttaagcaaaagcttaaagaaggtcctttggtttgggaacccaaaggtgaaacgtcatgagggttcccncttnttgganaaattttccgcccaagngttggtgtncccaaaagtaaantntttcccaaaaaaaaggggggnaantttccatttaatcccngatgngggccacattgttgtnttaaacggt

SEQ ID NO: 136555 - DNA, 443 bp, Arabidopsis thaliana
  unsure (1)..(443): unsure at all n locations
taaatcttttccacacaaaaaaaagagaaggaaaaggttaaaacctttatttncaaaccaccctaatcacttctctttggtttacaaaaatgggtcgaccagtccaaactccgagcccgaggatgaacaataactttaatccggtctttcatgcacaatctgaacaaccggttgacgagaaacgggttctgcaagctgagcagatatatcccaacaacggtggagtggttaaccaaccaaaccaagtaccgatgagacctggtccacctacgtatatcaatcaaaagtgcaacatttaaccaacccttttggagtatccaaatgcgccggacccggtccataccaacaggccattcggaacttgggccttcagggncttatttttnattgcatgnancganggggaaaatgcnctcattaanatgctgttttccaattggtca

SEQ ID NO: 136556 - DNA, 581 bp, Arabidopsis thaliana
  unsure (1)..(581): unsure at all n locations
atcaagaccgttagattgactcgtgatcgagtcaaagatggtcaagccatggagaaattgctgagccagggagatctcgtggtttgtccggaagggactacgtgtagagagccttacttgcttcggtttagtccacttttctctgaggtttgtgacgtcatcgtacctgttgctattgactcacacgtgactttcttctatggcacgacggctagtggtcttaaggcatttgatcccattttcttccttttgaatcctttcccttcctacaccgtcaaattgcttgaccctgtctctggaagtagctcgtccacgtgtcgaggagtccctgacaatggaaaagttaaacttcgagggggctaatcacgtgcaagcatgagatcggggaatccgttgggggtttatgtcaccaacccacgggaaggggtaagtactttatctttggcccgtaanaacggggttntnaaagaaaaaataatttgttttnggaggttnntttcntaaanaggggcctttttttgtacggcnctttatttnctaaaaggttttttcccaagnggaccaccttttaggaaaanngc

SEQ ID NO: 136557 - DNA, 427 bp, Arabidopsis thaliana
  unsure (1)..(427): unsure at all n locations
gtggataatccaaatctcaggaagaagaagaacccatgagagtcttcctcgtgatcatggttgtccttgagattctttagtctgttttctctcgggtctgtgtctgtcggatgagcgttttagccactgtagttcaatgagtaacctctatttgctacgaactctcattcctagatcgtgggttaccttttggtttctccaagcaatttgaggctagcctccaataaaaaatagtatttctagtatttgaaaaaacgctactttcgtggtatagagaaagataaagagagagagagagagagagagagagagagagagagagagagagagagagagagagagagatgctcttgataattgctcttgatacaactctattattatngctcttaaatccataaatgnaagntctttatgaattgtaatt

SEQ ID NO: 136558 - DNA, 724 bp, Arabidopsis thaliana
  unsure (1)..(724): unsure at all n locations
aagaatttgattgtgcaatggtgtactgcgagtggtatatcttatgagtcagagtttacggattctccgaatgagtcttttgcttctgctcttcccacgaaagctgcggttgaagcgaacaaagcgacggtgtcgatacttattaagtatctagctgatggttctcaagcagctcagactgttgcagcacgggagattcgtcttttagctaagactggaaaagaaaacagagcatatattgctgaagcaggcgcgataccgcacttgtgccgncttcttacatccgaaaatgctattgtcgcaagagaattcaagtgacccgcgcatgctgaatctctccgatatatggagaaggcaccaagagtcggatcatggaagaaggtgattgtttggagtctatagtaagtgttcttgtttctggtctcacagtggaagcgcaagaaaatccagcggctacattgttcagtctctctgcagtacacgagtatatgaaccggatagcgattgtgggtccagtgcgttgaggcattagcgttgcctgctttcaaaacgggacgccgagaggcaaggaaagatgcggttactgcgttgtataacttatcgacacatccagataactncagtaggntgattgaaggaggaggtgttgtctagtctttgtttggagctttaaagaancgaaggtgtagcagagnacgcaagcanggnncttttggncntttgt

SEQ ID NO: 136559 - DNA, 576 bp, Arabidopsis thaliana
  unsure (1)..(576): unsure at all n locations
aaaaaaactaanccncttttggcaaaagaaaaactttgaattgtataactcttcactttcttcggtcatatctttaatggggtctgaagagagaatgatgataagttcttcttcagttctagacgaagagtatgaatatacagatgatgggtttcattacgagacaaggcaaaacagtttgtctagattatctatctgcacaaactccttccacgaagacgacgaagatcatccttcagaattgggtaatttcttctctacgttgtcgttagagagcttcaacgacgacgtcggagccgaagctgacgtagaaatctccgatgacggtggcgaatcggattccgacaaagactcttccggattttactctctaccgacgatcacatctcgccggagaagaaaactcacagtttccggcggtttagaaacgagcaaagagagtnagacggaagtcgattgggagtaagtgtaatatagttagtcaacggagggtattaagggaaaaaagtaaaanggggatcagttcggncantnggtttancggcgttgnngagnggccantttccggccggnagg

SEQ ID NO: 136560 - DNA, 570 bp, Arabidopsis thaliana
  unsure (1)..(570): unsure at all n locations
ggaaaaagatgctatctattccattatgcggcaataccgccgcgaggagtagagtgagtccatgcttcctaattttctgactgaaaagtcttttggctcgatgcgcttaacaaaagggaactctctagattaagaatgaatttccttctccattaagccggaccggcgacgaataataaataggtacgtacccccaccccaggcagagttagtgagccgtgtaataggcgaccatttcgcgcggttcggggggcacttgagtaagccgccggcgcccgactgccgcttgacccctatccaatttttcgggccatttcccccctcgtactatccaaaaaatgggattcttcccgaatcccggttttgcggccccaaccttttcccaactaatacctattctgtttagtacttcaggtgcttttnttgcngatnatgtnaatcccgtngggggtcaattccaacgngcctttcaaactnggactttttgnaacggctcttnggttcttcaataaanggtggtcttcgtcaagttttattncttcttgtnaaccgtccccgttgggnaaaaat

SEQ ID NO: 136561 - DNA, 362 bp, Arabidopsis thaliana
  unsure (1)..(362): unsure at all n locations
agggggaccnccccaaagggaaccccccttggcttaataccccaaccgttttttagcgtcaaagaggaggtgggatgatgatgttagtattcaaaacccaggcacgtggtgaaatgaaagctcctaagcgcttcatcaatgatacaatcaggaatgacttccacagaaaattcctgcatagatacatgaagtgattgtttgtcaagagtgttattgctacttctttgtatgatgattatgactaaaagcttttattctgtctggaattacgatgtctctgtactcaaacaacaaatgtttttaagctttatatcaaaaacttatgcatttgattttaatgtaatatctcacaaaanagnaaa

SEQ ID NO: 136562 - DNA, 505 bp, Arabidopsis thaliana
  unsure (1)..(505): unsure at all n locations
gtgacaaggacccttatcccaaaaagattgtgggagagggaaatctcgagagacgaatnctagaaatgaacaggaagagaataaaggttgtgaaaccaggttcaaagacgtctttcgcaactactgaagtccgtggaagctatggtcctcctttccacgtggagacatttcgtaacgaccaaagaaggctaaggatagttgtggatagtgagaatgaagtagacatagtggtgcagtcgcgccatctccgcgatgttatagtacttgtcattcgcggctttgctcagcggttcaacagcacttcactcaattctctacttaagatcgatacatgaaaccttaaagagcgacacgtccattgcaactttatttcagtgtgccattcaaaatctcattcgctttgttgatggaattgtctctctgtttgtttttggtgctttcatctttccaatatgctggcctgttttcccaatgggttttaaaatccaaatttnnantcaggttt

SEQ ID NO: 136563 - DNA, 581 bp, Arabidopsis thaliana
  unsure (1)..(581): unsure at all n locations
ttgggtcctagaggaaacnccctcaaacgagttgaagcgagtactgattgtcgtgttctaataaggggtagaggcagcattaaagatccgattaaggaggatatgatgagaggtaaacctggttatgagcacctcaatgaaccactccacatcttagtcgaggcagaattacccattgaaatagtggacgcacgtctcatgcaagcccgtgaaatactcgacgatctacttactcccgtggaggaaacccatgatttctacaagaaacaacagctacgggaattggcccttctcaacggcagtcttcgagaagaaggatctccaatgtctggttccatctcaccttacaataggcctcggcatgaagagagctaagncaaggggctaaaaaccacgccttaatttcataatttttngcttgcctctctcacctttccaaggaggtatatatccaccgtaacagcttccttcaaacaaggaggatttgganttttgtttccatcccattcctcctttcctggggtaccggactgnntntaatccctgggttaaaaccaaaaggcagnntgntntnattttgc

SEQ ID NO: 136564 - DNA, 302 bp, Arabidopsis thaliana
  unsure (1)..(302): unsure at all n locations
cttagcagaatctagccttgatccatctagttcttctactgttgtttcacttcttgaagatgctcttaaatncccctctgataggttgcgcaaaggtcaggctctgaacaatctcgggagtgtctatgtcgattgcgagaagctagatttagctgcggattgctatataaacgctctcaaggtaagacacacgcgtgcacaccaaggtctagctcgtgtccacttccttagaaacggcaaagctgcagcctacggagaaatgaccagcctaatcgnaaaggntcaaaacaatgnatccggct

SEQ ID NO: 136565 - DNA, 279 bp, Arabidopsis thaliana
atttgattcctgggataaacacagagtattctagattgtgcaagtcctctagcgcacagacacatctgaatcagaccaacgcaaacaccccccagaggaccggttttatctagtactagtagtatttacctgtagtgaaatttaacgaataagactgcactttcgcaggtgtattttgatattcgttgactaaaaaccttttactactatgtaatacgactttttcttctagaaagtttgaaaatcggaatttaaagttatgcttgagtaaaaaaaaaa

SEQ ID NO: 136566 - DNA, 416 bp, Arabidopsis thaliana
  unsure (1)..(416): unsure at all n locations
gaaacgccgaagctgacttcttcttccacgcgttctccaaatccaaatgcacactcgtataaattgatcggagacgatctctatcaaatcaatctgagataacaaaaaaaaaacccagattccattaacccagctcgagaatataatgcacgatttctgcttcactatcccgtacgggatccttctcgatcgtcggaggatctatcgggtatctgaagtttggaagtattgcatctctcgccggaggagcaggcactggattgcttgtagttctctgctggtttcatcagccttaaagctttcgagangaagnagncatccgttactcgntancttttctcggaaacantcattncagctggctctnacattttgnaatggggcaacgggttttttcnagcctcagaaggttttnc

SEQ ID NO: 136567 - DNA, 478 bp, Arabidopsis thaliana
aggaaacgcctcatgtctttacctcaggtgatcagtcacatccacaggtaaaggaaatctatgagaagctggagaagcttgaagggaagatgagggaagctgggtaccaacccgagactgagttggccctgcatgatgtggaggaggaagaaagggagctgatggtgaaggttcacagcgagaggctagccattgcctttggactcatagctactgagccaggaactgaaatccggatcataaagaatcttcgagtctgtttagactgtcacaccgtaaccaaactcatctcaaagatcacagagagagtgattgttgtaagagatgccaaccgcttccatcacttcaaagacggtgtctgttcatgtggagattattggtagtgactcgtttttggcctcaacacaagtcatagtgtactcatcctgtaacattacctcactcataattgatttcttttttgacaataaaaaaaaaa

SEQ ID NO: 136568 - DNA, 247 bp, Arabidopsis thaliana
  unsure (1)..(247): unsure at all n locations
ttttttttttcggaaaacaaataatgtatattcttagcaagtatcaaggttatatgagctacatccatcgatcccctgatttctcttacaacttatataatcgtaaaactgacttagttacgccgccttccaactaaattattcttgagttttacttttgtaatttgatatatctctttcagcgtctgcttcatatctattaccttccccgttgtaaggctcactggagattcatcatgattnccat

SEQ ID NO: 136569 - DNA, 409 bp, Arabidopsis thaliana
  unsure (1)..(409): unsure at all n locations
tttttttcgagctgaaaattcttattgttagatataacaacggaaatgtagtaaaacagatagaaatgagtaggctacaacaacatatggtttcatcaaataagacacacaaaaaagagtttttggttgttttcactgacaaccgctcaatcttgcccaatccacaaactgcattccgccgtagatgttattggccaaccgtacaccaactgtgaaggccatagccgccggaggaatttcttgggcaaaaggtgatgcttcgaccactctttctagaccattggatggtttggataacgagtattcgaagaaacactccaagaatacaccccagagagctggcactcttgattagcggtggtacggggagttccctcnggattattanggtttcgttgggcagtcaggt

SEQ ID NO: 136570 - DNA, 631 bp, Arabidopsis thaliana
  unsure (1)..(631): unsure at all n locations
gaggatacattctactgaagtaatgccattgttgctacggattctttccacatccccctttgatataaggaaagaagttgcctatgtcttgggaaatctctgtgtagaatctgcagaaggagacagaaaaccagggataattcaagagcatttagtctctattgtcagtggcggttgcctccggggtttcattgagctggtcagatctcctgatatcgaagctgctaggcttggtcttcagttcattgagctggttttaagaggaatgcccaaacggggaagggccaaagcttgtggaaaggagaaagacggtatcgatgccaatggaacggttntcagtttcatgagaacgaagagctgagagtacatggcgaacagtcttgtggataaatactttggtgaagattatggaatcgatgaatgaaatcgcctcggattttagggtgagaatacaaagaaagncggatgatgaaatcaaaaggaaactagtcatcttagcgtttgcttgtaacgatagtgagtgagagagaaagacaatagtctttaggttttgtcttntgggttgttgttgtaactacttgtaatacagttttgtntcacngaaggtttgattcctttttgtcgtaaaaaa

SEQ ID NO: 136571 - DNA, 556 bp, Arabidopsis thaliana
gaggaacaatccaattcttcctcaagatccttacgagaaggccatggctcgattttgggcaaagttcatcgatgaccagatcctaacactagggtttaggtcccttgtaaaagcagagaaaggaagagaggttgctattgaagagactcgggaactgcttatgtttcttgagaaagaagtcactggaaaagatttcttcggtggcaagacaatcggattcttggacatgatcgcaggaagtatgatcccattttgtctagctagactttggaaaggtattggaattgatatgattccagaggagaagtttccggaattaaatagatggatcaagaatttggaagaagttgaggcagtgaggggatgtattcctccaagagagaaacaaattgagcgcatgaccaaaattgcagagacaattaagtctgcctaaattaaagatacttcttgcctacggaaatattttgatttatatgctttgcatcggttttttcatttatatttttaatttttttaaaggtttttccggaaaattggatggcctaatattttaggt

SEQ ID NO: 136572 - DNA, 322 bp, Arabidopsis thaliana
ttttttaacacaaacacaccctttgaacaactttattaaacacatgtactttttacatttttgaaccagcaaacttgttttttacagtatacttatatattacatgaaattgtttacagtaattaaaatactggagaagctagcgccttgagcttggtggcttccgtgaaaccgcataaggggactgaaacccaactgtttctacgtctccaacagttttgaacaatcttctttttctagcctcttcccctggcgaccggtgcagtaactgtctctgcacgtctacaagtgatcggttccttgtaagtgtgcggtttgtctg

SEQ ID NO: 136573 - DNA, 834 bp, Arabidopsis thaliana
  unsure (1)..(834): unsure at all n locations
agggnccgccccgacttttgnaagatnctcaagggnttntgtncnccatgattttngccggggntcaaactngtttcagcttcagtggccccccacagngaatctcaactgacgctgtgagcataagcaatcagaatcacgtggaggaagtaaaattcgtgtcacgatgttgggttctcgcatgactgcaagcatcggcagtgtaaaatttgcaagcgaaggcgatatttttgggaaagagttgcaatgcactgctgagtctgggaacccttcgacaagccagaaagcagatattaacaaccgaactgtaccacctagcttcttaccactagaccacagtatggaaaacgagccgcagcagaaatacgcgaccctccaaacactttcgattggtaaagaaaaggaaaagaagaagacaaggaaagaagagagagaggaaagagagatccgttatctagagagaacggtaagaagggagaacgaaagggaaggaaatgcgaagctcgtgagcagcactacggatccagctaaaaagaagatagagagtgttgcggaggttaaagaagaagaaccaagtgatggtgccatgttgattaaggttgaaccaaagactgaaccatcaacagcagaagctagaccgcttcccaaattccgaatcaaactgaaaagcaaagcgttcaacaactcataaggttagatccgagccagtccctccccgccaaaatctgagtagtaacttttatttccaaaagctttgttgttacaacttgcaaggtgttgtgattatatgtcaatgtaatctgtttattcaatgcgcttaaacaaaaaaaaaaa

SEQ ID NO: 136574 - DNA, 560 bp, Arabidopsis thaliana
  unsure (1)..(560): unsure at all n locations
gggttcctttttcgatggatatgtgaatcagcagacaacccttccgatgttctttaggctgtacgaaagggctatggagagctggttcgagatggagattgaagcagatcttgacactgtcaacacacctccagtcttgaagacgccatcacccatggagaatcaggctgcaaatctctttacaaggaaaatatttggaaagttccaggaagagttggtagagacattcgctcacacggcaaacagaattgtagatgatggtactaccagcacatttagggttgcaaattttggaaatgacancaaagccttatatagtaacggtttgctaccctgaaatgtgngcaaacttcagctgtcaaatgtttgagcactccggcatactttgccgacatgtttttncgggggttactgtcactaatatanccancttttgcccccacattatatttttngggcggtggcaaggaattcccagnggatggtggggttnggttngcttnccagtgaaatgggattntagctgnncaccgttnaccgnttntnggggcgntcaaggt

SEQ ID NO: 136575 - DNA, 612 bp, Arabidopsis thaliana
  unsure (1)..(612): unsure at all n locations
caacctcaacaccgtacttctctctcgccgtcgagaaaagcttccgagtaaaaagttgaggatgcacttgtgctgttgtttgagttgtaccaatcgttgatgtgcttttagctgggccgttgacccaatccggtaatcccaaaccgccggaaccgggttttgattccgtcacggtgacgctaagagtcgtgagtgctctgtatccgtacgattcgacaccgtttagctcctcagcgagcgatcgatggagtttaaagctcgcgcgtgctaaatcgcgcaacaggacttccatcgcacccaattcgaaagcgggaaatccccccccggtaccggaagcagcgcacggancgggctgattttctcgacgagagtaacgggngattcctttctttggcgaggaaataagcagtacaagacggcgattactcaccgccggatacaaaggcccgtttgaggttnttnaccgattttgttttttagnccccaattatttngatgagtttggnaaattgngattttncgtcgggtnanaccgggggatnntacggtgggcaccncntcccgngtgggnagttgtgctnccggcnncggttttgaattttttttggtnnc

SEQ ID NO: 136576 - DNA, 391 bp, Arabidopsis thaliana
  unsure (1)..(391): unsure at all n locations
caagattggntcacttcagatgtttactgagaacgatggcagctgtgaagatatgggtccactttnatttccagtagaagaagttcataagatttctgtgttggatattagactggccaacgcagacagacatggtgggaacattttnatgaccaaggacgaaagcgggaagctcgttttggttcctatagaccatggatactgcttgcctgaaagctttgaagattgcacgtttgagtggcttattattggccacaaggccgggaaaccgtactttgcagagacccaagaggtacataaggtccccgggccgagaggaagatattgatctactaaagtttcatgggatggaaaatnccggcagaggcggnttaaaacggttaggactttt

SEQ ID NO: 136577 - DNA, 497 bp, Arabidopsis thaliana
  unsure (1)..(497): unsure at all n locations
gctctgctttgaaagaaccaagtttgcagtttgagcttctggatcctgtgctggttaaacggcgtgtgattccacatactccagccccgggacagaaaccgataacgttagaggacgaagagcttgttccgtcagcgctcatcaggttcagaccgatcgaaacagactctctcgtctttacaggactccgcaatgaactcctggagatcagtgaaccactctcgtgatcatttgtgttccactagatgatttagcttgagcccatgaaataagtttacaaatttaggtttctcctcttatatgggtgtggatttgatgatgattcttgtgtttgtgaatttcgagcaccattttttttagggttataaaggaaattttgtggccattttggcccaataacgggggaatcanaaatttgaaggcccttcaaaaaaaaaaaaaaaaangggggccgnccanagntccaaccttncgangcggnatnggngcaanccctc

SEQ ID NO: 136578 - DNA, 527 bp, Arabidopsis thaliana
gcgcatgtttatcagttacggggtggtattgttagaggttttaaccggaaagcatccgttagatccggatctaccaggaggtgcacatttggttaagtgggtgagagatcacttggctgagaaaaaagatcctagcaggcttcttgatccgagactcgatggacggactgactcgataatgcatgagatgcttcaaactcttgcggttgcgttcttgtgtgttagcaacaaggcaaacgaacgacctttaatgaaagatgttgtggcaatgctcacagaaataaggcatattgatgttggaagatcggagacagagaagatcaaagctgggtggttgcggaagaaaagagccacaacaatttatgtcgaattgagaaaatcatcaatttctcacggttcgtctaattgtttcatttccgttttcggatgactccgtttaaaaaagggacaagggtaccaaatgtaaacccgtgagcctatttgtttccaaagcctgtcgtgaatatatatccctttgttggggcctt

SEQ ID NO: 136579 - DNA, 363 bp, Arabidopsis thaliana
  unsure (1)..(363): unsure at all n locations
ggaagtttgcnacgaacttgcaaaggaaataggagaagataaagctgagattgaagcattgaagagagaatccatgagcctcagagaagaagtggacgatgaaagaagaatgctacagatggctgaggtctggcgtgaggaacgtntccagatgaagcttattgatgccaaagtagcactcgaggaaaggtactcacaaatgaacaagcttgtaggggatttggaatctttccttaggtcacggggtatcgtgaccanatgtcaaagaggtgagagaagctgngttattaagngaaaccncagcatcagttaatntcccaggnaatcaaggattttccgnntgtccctncaaacccggntgtt

SEQ ID NO: 136580 - DNA, 602 bp, Arabidopsis thaliana
  unsure (1)..(602): unsure at all n locations
ttccccagctctattcgcccactttggggaactggtccgcctcagtcccgtccgnatcccgntcgnccacgcgtccgaatgcacaggcttaaggcacatcaaaaattgaaaggagaaagaagatgggtttgttgccattggtgaagaaactaggtttcatcatctttcttctagtttcagcttcagcgtttgctctctgttctgcaggccgatcatccattttaatctatagccaagaagatgatcatcccgaggtagtagaaagaagaatacatgagcatgagagaattctgagaatgaattcaagagactatggccactccagtcctaaaccaaagctcgtgagacctcctttcaagcttattcccaactgatcatgcatatcaccgatcgactatatatagatgccagactttctgagatgtataatatatgtaaacctaaatactaacactgcaataagtttgaatgataatcatatatataagtttcaagatatgttttctagtaaattaatgattagatagtgctctttgctatcatgcagaatgtaaatttggtgaatagtcatcattagatgaatattacaatttatctgatag

SEQ ID NO: 136581 - DNA, 602 bp, Arabidopsis thaliana
  unsure (1)..(602): unsure at all n locations
ggaaaacttccttgacaatgtgggagaaacggtggctctaactagaagagnggttttcttggttcagggattttggtcatcagcattggtcaagttatattgattgcaagaaagtttactattgaactagatgatctcagtttgtactattttnctttaggccttgtccatctttgactctttaagtactggttcatgagccttggtattattttggaattgttttttttggtaaattttatcttttaccaaaaaaattacatccatctgactacaaacatgaacacgagagagaacctaataaatgaagggtttttataggacccgtggttggaaggggagaggaggccagttttgtgatagtctgagcttgctttcaaggcttaagaggaagttgtagngggcatgntttgatgggtgaagatctgtgtgtcccgttcccgtatttggtggacccctnacccttggattcctggcattgggccaatggggcccaccatgcaatgggtttgctnaccctttccctncattggggggggttccccaagcttgtgggaaaggggnccaacnttttggggggttccctccggggnngttnttta

SEQ ID NO: 136582 - DNA, 506 bp, Arabidopsis thaliana
  unsure (1)..(506): unsure at all n locations
ttttttgttcattcacctaattttatcgttacaagtagcaacaacaatgatgataataataatagttacaaagggttaagaatagggctttttcttttcttgttgagctcccacttcgattgaactccacaagcttttccccaacccatcaatctttttttgtttgtctcctctcgtctgaccgtaataacaaaaagaacaaaaaaaagcaaagaagaatggcaatccccacccgttggctctttgaaccagaccaggtaaggcaacatcttctgtctaacgtatcttacatcaaactttcactcgtattcgctctggtgcttatgtttagaccctgaagccgcttcaaactttgcatcagctgtgtaaacgatggccggaaatgcgggtccgtttgccaaattcacggatatcggngccanagtaaatcggaancanccgggattcaagggncgtccnggacccaaggccacgantgancgggntaaccttcaggggcgggaaga

SEQ ID NO: 136583 - DNA, 353 bp, Arabidopsis thaliana
tttttttaagcaaagagcagagacttatcggttatcagatttacatttacattcatcactccaatccaatcactgacttaacacacgatgatccatggtacaaacgacagacgaaaagtaaagagttgaagcttgaaggtttttggtcattcaaatgatatctggacaaagcgtgtgaaataaaaactagctaataagcgaagtagcagccaaggatgacttccctttttttgtaggaacgtacacatcaccagattccaccgggctcagatatggacagagaaatggtgtgtgttcctacctccatgcatggtcatttgattggccatggaaccatatcattggttggggtt

SEQ ID NO: 136584 - DNA, 485 bp, Arabidopsis thaliana
  unsure (1)..(485): unsure at all n locations
caccagtnttcaagactcaanccggccggagtggggcctcagaaaaaggaagacgtgggagaggccgncgagaggaaggttcgaagccaaagcaggaagggagatccacccattgcttcacgttctaaactaaagaagagactaccaaagattcacaagaagaaaacaagtcttggtaagatcgcaattggaacggatagggttgtttcagttgcagctaaactggagaaactggatttggatttgataaggaaagagcgaacaagaggagatatctcacttgctgatcagatccaagctgctaagaaccaacgaggaagtgatgttttatcgagatttggtctttttgccatgaaatcgatggattttgattaactcttttctactcctagtttatagctttctctttttttcttgtgccactaaataaataaacaaggttgacttgaggatataataaataaatagattgacgaaaaaaaaaa

SEQ ID NO: 136585 - DNA, 501 bp, Arabidopsis thaliana
ttttttttttttggcagagctaaagatcggttattattctcataaattgcatctcatatcatacaatgttatgaattctcaataaatgcagagcaaaacaaaacatctcaaggtcaagatgtgatcaaatattaagctgaaagataaagagttaacattagcctcgtcaccacaatgcttttttaagttagctccataacttttgctgtcttcatgatgcaaagacccgttgacgagtggaaacatgagcttgagacttgacggatacatgagaaacaataggcttcaacaatgccttcacttcctccggtaaatcgagttgcttcctaacctcattcgctaactcaatcacatactcttcctcatgctcaatgtcgaacattgctttctctagcttgaaaagatactctcggttgttcccacaaggtcccgaagccgtagcgatttgcctcgccatttcttccaatggagctggacctaagtagtatttgttcgacactt

SEQ ID NO: 136586 - DNA, 537 bp, Arabidopsis thaliana
  unsure (1)..(537): unsure at all n locations
ttttttttttgatagctaaaaatgatcttatatatagagagaaacataccaaacttcaaataactcgctctaattactgctgatcaatgattaatacaaggggttatcaagagtttgaaggaacaagaagcctaatcgtcaagccaatccacggtgaagcatttttttggcgacttcaatgcaaagttcaggaaccaccttcttgaccatttcccacatagacgaagtcccctcatcgcaaatgacatggcgttgagacacaagtgcagctacagaacttggtaaacccaataaactgcattctctcatgtcaattttctcaagactccctagctttccaaacttttcagggaagggnaaccaggctgacacactgtggaaatgtcaacgtactttaggccatggcagctcacaaactttggnccgggnggggtttcagcttgggggcaggnatttaaccttnggcggtcaangggctntncggtacnnnaaattttttgggaatncaagnatccgnnggcatttggttntnctnng

SEQ ID NO: 136587 - DNA, 522 bp, Arabidopsis thaliana
  unsure (1)..(522): unsure at all n locations
agaaacaacaaaaaggtgaatagatctttttcagctacgaaatacttttttaaatctcaacaaaaatttaaaaactaacagcacttacaacaaccaatttaggcaattacacaagaaaacgagaataaccaaaaattgggattccacccctcagatctcaatcaaatttataattcatgccatggtattgatgaagtatttcaagactcaaactgcaattacgcttccctgtgcttcggcaatgagtctcttcttattcgatttacctttggatttctgagactttcgtttcctcgaaggagtctcctgcttttagctcgtctgtggcttgttccattgcagcaatgacatccttttctttttccttcctcgnccttaggganacnctgnctcnaaagtccctggatcgatcacagncatccaccaagggggaggccaacaagaacgggtcttanaaactggnatcnacggaaggccngncaaanggggtancctccagggtcccatccttacggaatcggg

SEQ ID NO: 136588 - DNA, 668 bp, Arabidopsis thaliana
  unsure (1)..(668): unsure at all n locations
gttattgggcccgttaaagcccgtaactgttaaaagcccattaacaagctgcttctaatctccgaggccaagtgaaaaacaatgatagagatataacatcaatccaatcgaattatcttttaacacttctgtataagatatttaggtaatctcggaattctcaatctactatcaaactccgtttggactttctgcactcggtaattggaaattgttttcggttttagaattatagcaccattgcaaagggcctcatcatcatattgtcttcatggtccaatatgtgacagtgcgtaaacatagcctggctcttgagttgcgtcaaaggagtaagattcgtttgagtgaatgtaagaaaatctaacgagtatcttcgttacatgtcccggcatcatcttgaatacgtttttccatccccgctcgtgtaccgtaaccgcggttttgttccctcgtgcgtatttgctaatctcacacttcacagcatcgtttcttttagtcatgcactctatgaactcctcactcttcaccaatgccgtttgctccaatactttaaacaatcccaagtgaatatgcaacggatggttatcctccgttaaatttatcacttccccaaaacctaggtttgtnccngnttttttgggngttncggntacggggngngttttnta

SEQ ID NO: 136589 - DNA, 657 bp, Arabidopsis thaliana
  unsure (1)..(657): unsure at all n locations
atgtcattgctcgtggtgcttatggtattgtctacaaaggcatatatgatggtcaagatgttgctgtgaaagtacttgattggggagaagatggttacgcgacaacggctgagacatctgctctacgtgcttcatttcgtcaagaagttgcggtttggcataaacttgaccatcctaatgtcacaaggtttntgggagcatcaatgggaacagcgaatttnaagataccttcatcagctgagacggagaactcgttgcctcaacgagcttgttgtgtcgttgtggagtatatccctggaggaactctttaagcagtattttgttccgaaacagggcggaagaaaactcgcttttaaagccgtgggttcaactcgctctcggtctcttcccgaggggttaagttcatttgcattcagagaggattgttccatcgcgatgttgaaaacagggaactatccttttggggttatcagaggaatctcaaagattgctgattttggggttgctagagttgaagctcagaatccaaaagacatgactggagaaactggaactcttggatacatggctccagagggttcttggatggcaaagccatacaacagaagatgtgatgttttacagcttttgggatatgcttggtgggaggatttattg

SEQ ID NO: 136590 - DNA, 607 bp, Arabidopsis thaliana
  unsure (1)..(607): unsure at all n locations
aatgtactggttgcttaaaacccaggaggttcgagcagacaaagaacactacgggaaggagttaactggggatatatatgaatccggttggatcagcgaaatgtatggttattcatttggtgctgcagagctgaatttgcggcatagcataaacaaagaaattatgatttatcccgggtatgttcctgaacctggtgctgactatcgagttttccactacggtcttgagttcaaagtcggaaattggagctttgacaaggcgaactggaggaacactgattttatcaacaaatgctgggcaaagtttccagacccgcctagtccttcgggcagtccatcaaacaggcaatggtcttcgggcaaaagaggcccttctcagcttctgaatgtggcacagaagctaaacggggctctaatttctgcatcacaagagaagaaattgncctgnaacctgnatcagaaancgactgggaagatctccggtttcgngaaagttnggaacnttgaacggaccaaccccaggnagcggtnaccnaaagagccagtgggncgccnntncgnaggggntnccccgttnattttggggttcccgggggnacngngangg

SEQ ID NO: 136591 - DNA, 603 bp, Arabidopsis thaliana
  unsure (1)..(603): unsure at all n locations
aacaacttgtcatagatcttcatgctaatctcggcaataattacttatggtccgacgaaactactaaagatgaggcctcttggagtgatagtaactttggtgttggtggaacattatatgaccacaatatctccggcgccgatgcagattttccgatatggtcaccggaaagaatcaatgacgagaagatgtttttggattattgtcaagactttggtgttcatgattttgggttttgactgttcaccattgacatattggcaactctatggagatgaacacaagcattgagttgtcatgtttatacatacgtgggcatatacatatatatatatatggtccattataatggaaaccatataccccgcataccaatccataaaccatggtaaggggtaataaatccatggtaaagccagtaaggggtgccccctgggtttccaggatttattaatctagggggttggaaggtttccgccaaggccaggatcccggttgaggtaccttccttggttggaaaantatccccnatcccaaccggggnttttntttgaaaaggtgatgntgtccgaatngggccncttcggtaaccaaccnaaaggc

SEQ ID NO: 136592 - DNA, 448 bp, Arabidopsis thaliana
  unsure (1)..(448): unsure at all n locations
aattcacaatcacacacataagttacacacttgacgcataatattcaacacgcacagatgatttcacagagaaaagggactaataaaaaacttcaaatgatatcttcaggtaactttgttcaccagaggaatgctctgttcatcgcagaagaaatctgttggatcaaccctagtcttcactctcaccaatctctcgaaattgttcttgaaatacttcactccccaactctttccttcctcgtactttgtcttcctcctttccaagatacatacccaaatccatatccttgaaattgacataagctccctcttggagatttcgaaacatattgggngtcataaaattccgtaaacggctatccgnccccattttcagatatttatctgtctccggcttgttcttggcttcctcttctntcagtagcacatnntgatctatagggtccgc

SEQ ID NO: 136593 - DNA, 586 bp, Arabidopsis thaliana
  unsure (1)..(586): unsure at all n locations
ttttgtaaaatttataagacttacttttttgtttcagaggttttgaaatttacgaatttgcaaatgattaaacggaaaagagttccacaaagctttttgtggatgtgaaagcgccaaagttcttttgtacaaactcaaaggagaaagccaacaatattcaaaaaaaagaaacgaagaaaacaaaaacctctctcgctgcaaagttttatattcacagaaggaaaatatgattgagagaaagttagcaaagcgaatactcacaatccagcaaacgagagagtatctcattgcaactcggtctttgttccggttctgtccaacaatctgcaataagctttcccagtggtccttcagggatctcaagccgagctccctcgtaagcaatagcataaacaacccgttcaggcggtctccttcccaagggcttggttaaagtggataggtcccccatttttacccctaaactggaggtttcccccttttctgagaaggggccattgcggttaggtccgggggcctccctgttggggtccgcaggggctttgtttcatggtgnccnggntttttttgnagccnantanagttc

SEQ ID NO: 136594 - DNA, 565 bp, Arabidopsis thaliana
  unsure (1)..(565): unsure at all n locations
atatgataccgttttacattggtaagctctttagacaaagtggagcatcagatgatgtttgttcaaagctcggtatagttaaagagaaagcgttaagcattactcaggcagtccaaaagtatggcaacctctcaggttttgtggaaagattttctgtgggaatgaggaatcctacagcgttcttcgccggggctcttggaatatctccagagtgtttctttgcaggagtttgttgcggtggtttgattactcttccacttcagcttgtgattgggtttctccttagagaacgccccatgtttgctcttgcagcagtagcaactgcagtgggaatatggacaatctttccctatgtggtggctgcatctacggctttgttcctctacattcgcagtcggtactccacgaaagataagtcctcctggtactacccaatatcaatacatagaaagatgaaggccatatgaaaagacaattatagacccagcancaattaatggttatgtgactgngatatgacaagntttgnacaactgccattggtttaaacaaaaaaagggggggt

SEQ ID NO: 136595 - DNA, 672 bp, Arabidopsis thaliana
  unsure (1)..(672): unsure at all n locations
atcgantgtaatnttccaaacacaatcaataagcttgcatctnataagcttcagtngaccttagctgtcagcttacatgcgccaaatcagagcctcagggagaaaattgtaccaagtgccaaggcttatccgctggaagcaattatgaaggattgtggtgattacttccaagaaacaaatagacgagtctntttcgaatatgcccttctagctggagtcaatgatcaagttgagcatgcggtggaacttgcagagctactccgtgaatggggtaaaagttatcacgtaaatttgataccttacaacccgatagagggatcagagtaccagcgaccttacaagaaagcggtcctagcgtttgcagctgcgttggagtcgcgtaagataacagcaagcgtaaggcaaacaagaggacttgatgcaagtcctgcttgtggtcagcttgaggaataagtttcaggaaaagccctttgcttacttgagacggatagtcaagagtctcagccagatgcagaaagcttgtccctttgctttgatgtcctgggtttgcaccaaatttcccggtttttgcccctttggattggcctctggttcaaacttttgggttttaaagnggnggccattgnttcntaaagggttttgtttggnnagtttnnaanccnaaggtttnna

SEQ ID NO: 136596 - DNA, 548 bp, Arabidopsis thaliana
  unsure (1)..(548): unsure at all n locations
gatatgattagctcaccaagcaaattttttaaaaaaagatgattacaaactctacaaagacattattcttgtctacagactaatcagcaattactctccctaacttcaatcagccaagctttatgaacaatcaaatcatcaatcaacatgaaacgaaaaaacaagaatcgtcgttcggaaaatatatgattcttcttacatacaggttaaaaacgtatcctgcgcagtctcttatggccttgtaaagacgccccaaatcttactccgggaaagattctccgccagtttcttagctccttcggtatccatatccacaagcttttgcaaatgcaagcaagcaccagcagctacgacttggtttcctggcatttctttggagttaccagcaggtccaacggcgngactggggtacgggttatccaatttccttaatcttcgggggcccagaggtggactagnntggcaaacccctggcaaccttcctggaaaccttctggaaccggggnncccaaagggggaaagggtttgagggggtctttcctcaaggc

SEQ ID NO: 136597 - DNA, 426 bp, Arabidopsis thaliana
  unsure (1)..(426): unsure at all n locations
gcaacagtctggttatgcttcttctggctctgactactctcctcctagcttaaactctgatgctcaggaccgcactggaaagatagtctttaaactacttgataaagatccaagtcagctccctgggactctacgatctgagatctataactggctttcgaacattccatcagaaatggagagttatatcaggcctggctgtgttgttctatctgtttatgtagcaatgtcacctgcagcctgggaacaacttgagcaaaaattgctgcaacgggcttggtgtttttgctacaaaattntccttctgnattttnggaggaacggcaagttttttaggttaaacacggggaaggcaacttggatcnnnnnaaaattgggnangtncgtttttggnaancntttgggggccttggnttttncccnggg

SEQ ID NO: 136598 - DNA, 667 bp, Arabidopsis thaliana
  unsure (1)..(667): unsure at all n locations
atagagaacctcacaggttaagtggacagggttaagttaatagtaagacatatgaaaacttagttaaggtgtttgtttgaattatgttaagaaagaagaacaaaaggacatcatatgcttagttacacaattagctaccaaacaacatcagatcaaatccatcacaaatcttcttcttccagccctcgagatgaatcttgtgtcttcaccgccttctattgagtggtttcgctgaagatgaagtgctaattgttggccttttagcacctgttaaagccttagaggaggagctagtggcaattgacagacgagacggtctggtttggcctggtggtttcaaggtctgctttggaatcctcgatgggaatattagtcctgtcttttggctcgggtttccccattttcactgatttctcgaggttctcagaagtcatgcgtgcttcagggccgttctattaagttcaagaggcttagcagtttcaggggatagagtcaactcnaactgnactgctaatggntncaaccaggttctgntccaatggaaggcaactatcngggtatcacccanctggcncanaatctggtctggaannccanngggnaacaactcacancaaacggaccnttgcggcagaaattantggtgggnaacctttggtgncggngc

SEQ ID NO: 136599 - DNA, 722 bp, Arabidopsis thaliana
  unsure (1)..(722): unsure at all n locations
caataagcatttaatattacatagttggaaaattaaggattattatgcaagaaacgtaagaaacaaaaacgagattctggcatttctgaatatacaacacataacggacatgcatgaagctttaaagctaatacaacaagacctttgtttcatgaagaagagagctattgaatcttatattttttacctcagctatagacatcttcttctcttcttgatggtcattcatctatttcccataagaaccgagcgtactctccaagaataatgctatcatttggagaggcttcaacggccttctcaaagtagaacaaggccttctcatggtcattattaatactccagaacgccttcgcgtatctgcatagcgtttctccatcttctgtcttggacaagcttgatttgccttttcccgctgcatcagcctcaaattcggcttttccttggccagaagatcatcatcatcctcatcatcaacctcatcatcatcatccggngttatctcccagaggaactagcatntggtggaagancaatggaaccancaggngatggttgactgacggtcaaagngnccatgggttangtnaccttgggaaggtcatacaacnaccaanggtggaaagaaccacncanggnacnnagngcccttttggaatngngggganctgnncccggggggcccaaggttnngggggggccngggggggccangnttgccc

SEQ ID NO: 136600 - DNA, 629 bp, Arabidopsis thaliana
  unsure (1)..(629): unsure at all n locations
ancaccccaaagntttaaaccctttntganngntttataagttgacttaccatannaacgacttaaataccggggaaatacaggtggatataatgatacagtatattcatggtaatatgaacaaatccttgtaccagaaactctcaatctcttgtttttctccaatgcgttaagtttcagagcagcactgttgaggcaatatcgttttccggttgggcgtggaccgtcgtcaaagacatgaccaagatgggcgttacaaacagcacagacaacttcttgtctaggcatgaagatgatagagaggtctagctttgtcttcacattgtttccaattggttggtagtaagatggccaccctgttccactatcaaactttgttgatgaatcaaatagaggtgtgtcgcaacatacacaatttatatactcccagggggtctttgagttccaatactcccccagtggaaactctcccctgggggcccttctggccnaggtggatgtaaganctggtcccggggggttaanccggttcttcccattccnattttnccctttggggggnaaancccnttnttttnaaagccccttggganggtngcnngggtncgggnnaaaacnttggnnnaccc

SEQ ID NO: 136601 - DNA, 585 bp, Arabidopsis thaliana
  unsure (1)..(585): unsure at all n locations
gagcctttaaataatttccatttcattctcatatatacaagaaaaaagagaggcctntagatcacaagaccaggtctacaaaattatcacagacctttgtttgtttgtgttttttcttatttatcctataaatctatataatccttcttcctttgctcccatcctaaagatctttccttctgtgtctactacatcaacaacctgtaaccgcaactaacccgagcttcatgtgcttcttttgtgaccatcatcgtcttcttcttcttcttcttctttatctcttataacatctatcaccgtagcattgcagaaaaaacatctctgacagttgagaagatgtctagttatgcagccataacatgatcgatgtggacacggggcaatcattgcattagcctcccccgngtagaggcttacagcaagtgggggcctccaaaacctggccgggcctttgttgaaggccccctccttttccttcgggggtcttggggttgaacccgggtcatgtgaggggccaagaaggtcccaaggggccaaggtttttaaaaagggcaatccccggttaaaaagggccaattanttcca

SEQ ID NO: 136602 - DNA, 614 bp, Arabidopsis thaliana
  unsure (1)..(614): unsure at all n locations
aagccctttctagtctgcgcttgagtttgattgcagctagcgccgcgctttactaagaagtgcgaaagggcttttctcgcttgtttagtaaagtcaagtttttgacccaggtgacgacgacgtcgagttggcggcggagaaagactcggcattcaggcgagccgcccggtggtgtgggacgaagtaagtgggtttagtacgccctgccaaaacggctccgaaacaaacaaaaaggtgcgtgccgcactcacgagggactgccacatgatatactggaggaaggtggggatgacgtcaaagtccgcatggcccttatgggctgggccacacacgtgctacaaatggcaattacaatgggaagcaaggctgtaaggcggancgaaatcccggaaagaattgcctcancttcgggattgttcttctgcaactcggggacatgaagttggaatcgctagtaatcgcggntcaanatnccgcggtgaatatntacccggggccttttcaaaacgnccgtaaaaccttggaattggttngcccaagattggccattntcacccttgcttntttttcnctngtgccaaaaggttttggggcttntttgggnnnccggtngg

SEQ ID NO: 136603 - DNA, 538 bp, Arabidopsis thaliana
  unsure (1)..(538): unsure at all n locations
aatgattatnagatgacactgaatgaaaattcagaggttgaggaagctagtagcgaagaaatgttcatccctgagacaaacattcaacttcgtacccattgaagagttgggtctgtatgttaatcagaaggaacttattgatcttattggagttgttcaaagtgtatctcctaccatgagtattagaaaggagaactgacaatgtgatgattcctaagagggatataaactttggctgatgagtcaaggaaaactgttgtggtgtccctntggaatnatcttgcaactngcataggtcaggagctactagacatggctgatcagtcacctgtgattgcaatcaaagtctctcaaaaggtttggggntttttcaaagggtngtttccggttggctanccatcagcaggaagcaattttnggttatttancccgggatnaccaggangctaaaaagttggaaancttngtttgattcttaaggcanggaaatntccatggctnctttggcnagggnttggcccttcttccaaaaatnggc

SEQ ID NO: 136604 - DNA, 450 bp, Arabidopsis thaliana
  unsure (1)..(450): unsure at all n locations
ctggaagtaggatcattgtgaccacggaaaacaaacagctattgagagcgcatgggatcacttgcatatatgagttgggttttccatctagaagtgattctcttcagattttctgccaatatgcatttggagagagttctgcaccagatggttgtatcgagcttgctactgaaataacaaagcttgctggctatcttcccctagctctaaaggttttggggtcctctctgcgaaggatgagccaaagatgagcaaaaatcagcattgcctccactccagaaccaatctttaatgaagatattanaaatgtttttacgantccggttatgatgggtttacatgacaangatnaaggtcntatcccctccatattgcttggtttnttccatggtgaaaacnttgaatatntttaaacaaatacttgcaattcctggnttggatnttccattg

SEQ ID NO: 136605 - DNA, 577 bp, Arabidopsis thaliana
  unsure (1)..(577): unsure at all n locations
aggcccgggatacccgtngggaaccatttgtaganacgagcaaaaccgangccctttccgactgcataacaccgggactcccaganaanagaaacgccgatgaagcagtataggcacttcttagatgcaaatgtgtacccaatgctcagttactcatccatcattctccttctttcaccaattaaagacccctgagtttgcgtgattcctccaaaagcgtattagacaaaatcacaacatatgaaggaatcttctcaaatgtgaatgagatgcatatacagacaactatttcgttacctatataatgtattatagtaaaggttccttttatggttagaagaatctgaatggggtacctttggtcggcttcagatatgcccactcattgttaatagattcctttatcgtctgttaatccaatcaaaagcttgttacatcggtttccggaaaaaaaaaaaanaaaacggggggcgcccnagaggatccaagcttacgtacgcgtgcatggggncgtcatagctcttctanagnggccccaaantcaattcaccgggcggcggtttacaancgccgtncc

SEQ ID NO: 136606 - DNA, 337 bp, Arabidopsis thaliana
  unsure (1)..(337): unsure at all n locations
gaaatgttttgtttagagcttttgtgtgctgtttgttcgaagccgacccctaagttaactctctaggtataaaattccatctgagcctttctcttctctatgattgaatgactcagtctccacggttcaatggagatgatcttcaactatctctagaaccttttttttttttaaacaataaaaatatgttccatttcatatttgttgaacacncttatctttattattggagatctattaaaagtttgcatctttggggtgttcttgttcttcatccaataatcaaacaagagagatcatttatggaaatttaaggataagccttgacaaattaant

SEQ ID NO: 136607 - DNA, 389 bp, Arabidopsis thaliana
cataaaggtgtttttgcagagtaatcgccaagccaaattcacaccaagagccatcgcgagaataatgcacggagttggaagtccagcttttccgaattcagtctggtccaagactcatttctggggaaggtatatgaacgtagacttccgagtgataatggaagcggcacaaacagagttgttcaattttgttgacaggaacgcagctttagctacataacataagattagaggctttgagtaggttcttaggatatttaaatttatttgtattgtattctagattcattgaaagtacccagtaaagagaaattgtgtcatatgagagttgagagaattgttttgcatccgcaaggaaaggtggaagttaacctttaggattttaaagg

SEQ ID NO: 136608 - DNA, 550 bp, Arabidopsis thaliana
  unsure (1)..(550): unsure at all n locations
gggttttggatttagaactagtgtgattggatttagaacaaccagtggaattggatttagaactagtgcgaagatgatggttgatacttctgctggagagaaacgtatatccttagttgatatgccgcctgagaaagttgatgatggtggatacatcggtggtgggtggaaaaatgatgatggaagcttgagctgtgggtactgtagtttcagagggaaaagatctacgatggaagatttctatgatatcaaagcttccactattgaaggccaagcagtttgcatgtttggaatatttgatggccatggtggttcacgtgctgctgaataccctgaaggaacaccctggtttaacaatccccatgaagccatccccaattttttgacagaccccaagcggcattaaatggacccttttaaccaaccggggtggccttcccccgggccccaaaagggttcttccaaggatttgggcccccaaaaatctcccccttttttgggggggcccccttttttttnnaatttttggccctggggcnaatttttaanc

SEQ ID NO: 136609 - DNA, 424 bp, Arabidopsis thaliana
  unsure (1)..(424): unsure at all n locations
tnatcggggcagcccacagggtcctggagaaatttaccggcgtcaagttcatacatcctgaaaacacaccaggtcttttccattgggctgacagattctacgcccatgaagcggtcaagcctgtcatgcccgatatcgaaaaactggtccagttcgctaggctcaagttcaatacttcaatctttaaatgaaaaccaaggacttataaatatatatacgacgactaaattaacataatcgagttcatggaattaataagatgtaaactcgtttagttaaaaggcgtagtcaaaaagttctttcgtttgtttgttttttccgtcttcctacatttcatatgtatgcagagataaccaatcgtgccacgtaaaaaaaaaaaaaaaaaaaaggggctactaacgccgggagggggcgccctaggggg

SEQ ID NO: 136610 - DNA, 475 bp, Arabidopsis thaliana
  unsure (1)..(475): unsure at all n locations
cgcatcagaattgtcccgttagagtcgtaggcgacgaaaacgttggaacatcgaagcactttgagtacacattctacgtcgacttcgaagcgtcgatggcggaggcgcgtgcacaaaacgcgttaggatggtgcaagagtacacgtcattcctcagggtgctgggaagttacccaatggatatgacgccatggtccacgttacctagcgaagacgtatgacacaattaaaaaatttatctgaattttaaataacattatggtaaaattatcataagtaaaatacatggaaactaaagtagaatttgtagaactcgttttgcatgtgaagccgggaggataattattattttatttccccttaaacccaaatattttgtgtgtatgtatttgctaactacttgggaccaagaccgggtttgtaggtttgggtcctggtgattccaaattggatgatattaccttgangcnangcng

SEQ ID NO: 136611 - DNA, 597 bp, Arabidopsis thaliana
gatcttgagcgtgattttggcgaaagaagagatggcagaagacgtagacttagaagcaatagcaaatatgacagatgggtactcagggagtgacttaaagaatctttgcgtgaccgcggcacatcttcctatccgagagattcttgaaaaagaaaagaaggagagaagtgtggctcaagccgaaaaccgagcaatgccacagctatatagcagtacagacgttagacccttgaacatgaatgatttcaaaaccgcacatgatcaggtatgtgcgagtgtggcgtctgattcatcgaacatgaatgagctccagcaatggaacgagctctatggagaaggaggctcgaggaagaagacatcactgagttacttcatgtaaagagaaaaccagagaggttgtgttttgttagtttatatatatatatatatatatatataaatctctctctaatttatatgttgtacagagagattgagagagaagagagtcagtccccccttgaattgcctaaaaaatgttttccccggacctgcctcaattcttttctttctttctccaaaaaaatattctaatatcagatgtacaatcaatttaaa

SEQ ID NO: 136612 - DNA, 512 bp, Arabidopsis thaliana
  unsure (1)..(512): unsure at all n locations
tggtgtcctgggtcgcgnacttctctggggagttacgangttcaaccgctntgacgttncggagattttggagagggtattnccgttgtaaagncgngcagcttcaggaaatcggggaaaagaatcagtgagcatgcggaaaagttcggctacaccgttgtggagcggtttgttgggcatggtgttggaccngtattccactccgaacctcttatatatcattaccgaaatgatgagcctggactaatgggttgagggacacgccattcccaattggacccgattctcacgattgggacccaccagaatgtgtaacatggcccagacaactggacttactctgacagcagatggtggcgtcgctgctcagtttgagcataccattctgattactagaactggttcagagattcttaccaaatgctaaaactattcacattgatcatttccatttcaccttttatttgctgatcatttaaggtccatagtataaattcattatctttgagacc

SEQ ID NO: 136613 - DNA, 561 bp, Arabidopsis thaliana
  unsure (1)..(561): unsure at all n locations
ttggncccaacggnccttaactttgggaaccnttttccagnttnccctngaaatttttcccgggnccnaaattttgggaacctttaaagggntccccccggttcggacccaattccgcgaaatttccggggtgccctcacccttttcgcggcttcccggaaaagggaaagggggccaccggttccaaaggtttgggaatcagggatcggattacccttaagccagtggccggttccttctggggaaccaaattacgcaaggacatttgctttcttctacacattgggattgcacggtccttgtcttcacttgtctctacccgtatgtctgcttacagttatctcagccatggagcagaggagactctaatgacagaagcaaccacaaacccttcctcacggtctttaagctctcaccctagggacttattcgtttttggtcgttatgttctttcttgtccttgtagtgttccgtgggcaattctaaaacggttgaatatttgtacagagggatccgaatcactcgatacatatataaagccacagaaaaaacttccttcag

SEQ ID NO: 136614 - DNA, 573 bp, Arabidopsis thaliana
  unsure (1)..(573): unsure at all n locations
accccngnttttccaagtggcccntggnaatttcccnggggaattccctcnccttnaanggcctccgngntttaaattttgcngggcaatttttgggcccttgaccncaattncccatggcctcnccccacngaattccggnttgaccattcttaggccccattcttcggtagtgactcaagacttttctcccttttccaaccaggcattnggtactacaagatccttggaggcagatcatattattgtccattattaacccgggaccgagccangtntggaagtccgatttgatctacgacagtatcttttgagcggtgcaggaaaccttgttttcagggaaggctcctcaggccttgccttacggagcttcacccccaggaaggaggaggcccaggaggagtaggggagccccaaatgtgatcaacaaatgtatagcttcgtttgtaacaagaagaatccccaaagctcgagatttttggtgtctcataactctgaccagcgtcttaagattactggattaggatctggaattggcagtgttcactatttatgataatatcctattcgaag

SEQ ID NO: 136615 - DNA, 351 bp, Arabidopsis thaliana
  unsure (1)..(351): unsure at all n locations
gggtcagcccacngngtcctnacaggcatttaaagaagggaatgcaacggttgatgtattggacatgcgtttatttgttggccattcacatgctaattagaagatcgtactagaagcaaaaacaaattgagagagcttctaagtgtaaatagagagtccactaatgcggtccaatttttcaacgagaagaattaaattattctcgaaagtgtctcagatgattctttaaaaggggaaaaaaacactcagaaaaattgagaagggaatgcagtactgcaaagcgaatcctatgtataaaaaactgacgattcatattatagaactttatttgtatttgtggcnttnnaaaaa

SEQ ID NO: 136616 - DNA, 299 bp, Arabidopsis thaliana
  unsure (1)..(299): unsure at all n locations
actnccagggcagcccacngcngcctnagactgcagacggtgagcctcacagatttatggagcaacttcaacagctgagaaacaaagttgtttgaaacctcaaattcccaattactaggatgaggatgaattttctgttacattttactaccccttttgagcctgaaatcctaatagatttttttccttataaaaataaaagatgcaatattttaaggtcattcaagggatgtggcaattatgtgaaaaaacttgtactctaattagatatataattatacttaaacannaaaaaaaaa

SEQ ID NO: 136617 - DNA, 537 bp, Arabidopsis thaliana
  unsure (1)..(537): unsure at all n locations
aanccgctccnaggggnttccccaatcanctttcnaagtnngctgcncccncaagtatgncctcatcccagnttggcaacatttcccggntcncaatatatccntcatgccccccagactctccaagtcgcttagggcagcaacctcctcaacggtataatcatgggagaccaaatgctggaagaactatggatcggaatcacatgaacgctcagcttcctccttccaatacaaattctgggggtcaacaacgttcacccagaagtagctcatatacaaatggtgtcccttggggtcgtaggactaacaatcatgtcccgaatgttccatcgacgtcccatggaagggtagactacggaagtattgcttaattctgcagtctttcttctcatttattttgttctttcccttggtgtgcaatcttcttgttagaagtgtgggaacaaagttgtactggggcaaggaacaaacttagttcatggcttgtgggcttctgatcggaccgngcttttcctttgggctttttgccaaataacc

SEQ ID NO: 136618 - DNA, 467 bp, Arabidopsis thaliana
  unsure (1)..(467): unsure at all n locations
cagggacttacgtctgaaacgctattttnctgagcggattaacagagaactaccagaaccaatctcggggcttgctgaggaggttatgtatgatacagttgaagctataaacggagacccactgagctctatctttgtngtcgacactttgattgaaaacgaacactatggaacaagatgtacgacagcattggttgtgagacgcaccatgcaagtgaggttctttgagaggtacagggcgagatttaatgatgactggaacgtgcacgacttccggttcaccatctagttacaaggagcattccgcagcatccgaatattattatctatactaaacaatcttgttgatgctgtaattaattaataggtcataatctttctcggttcaggggaacctattcaccttgggcacaggtatttatctctgggctatgaaacaaataaataaaaagtaggtggttttctgg

SEQ ID NO: 136619 - DNA, 557 bp, Arabidopsis thaliana
  unsure (1)..(557): unsure at all n locations
tgagaaccccttcaacaaaggaatagtggggaactttatggaagttttctgcacaaatgttgccgtatctcagaacagtttcagagaaaaggtttcaaaggagccagcaataccaccaaggacagtaaatggagggatgtcaagcccgagcttacagaaagtttccaacgacatagagatggggagaaaaccagtgtggcacgagacagtagaagaagagcccggtgacatcgaaaaggacatggaagcaggggttgcatcacgggatttgagcagaatgcttcctccagaagaatctgaaggacgagggattatgcattcaagagagtcaagcaggggacgcgggattatgcattcaagagagtcaagcaggggaagaacaggagggaccttgggaattgtcaagccgtgtaaccaaggattttagaaccacagatgagtctgtgtcaaaagtcggtgaaacagccccagcctcaacaattgtgcctcaaggtttcctgtgggattttttccgnccanttnggnaccngcngttttggggtttcnccggttaacct

SEQ ID NO: 136620 - DNA, 444 bp, Arabidopsis thaliana
  unsure (1)..(444): unsure at all n locations
ggtttacaagaaggttttggtggttcacatttcgctatcgctttggttctcaccaccattgttatgtatgatgcaactggtgtaaggttacatgctggacgccaagctgaggttctaaatcagattgtgtatgaccttcctgcagagcatcctctggctgaaaccagacctttgcgtgaacttctaggtcatactcctccccaggttattgctggtggaatgcttggaatatctacagcagttgttgggtacttagtcatcttgttagccaagtagcttaagcngggaacagcaaaatctcgccttttcngctccattggggtggcnaagncgctgccaagggantttaaaagnnagccatggcatgnaaatagaattttggnattgggctaaattcccccgggtttttttngccgncccggtcctggcntngccaaaaanttt

SEQ ID NO: 136621 - DNA, 640 bp, Arabidopsis thaliana
  unsure (1)..(640): unsure at all n locations
cacagagtttggtgtgtctgcacatgaccctggtttcaacacgtctttccgtgacatgatgttgaacacagtgtacaagatgaccctcaactcaacaaggaaaggaggggctggtgccgggagtctggtctggcaggtcttccctcagggggcagagttcatggatgacggctatgcggtttacctcacaagagctcacacagcttcaaaaatcatatctctgcagtcaaagcgactagccatcttcaactccttgtgtagctggagatgcagatggggatgcaagaaaaagaatcagattgctcttgatgccctcctctcgcacggcgggctttaagtatcacaatcttttgtggattacaactgcgtgaatacaaaggtcagtgtattcaagtttttaacaaattttttttttgtaaaggatcagggtggttggtttaaacattcccaaccttggagggggaaaacaaaaaaaaaaggggggncnggnctngagggtcaagctttcgancggggnatnggcgnaaagcnctccaatgngcccnaatcaantcctggnggngtttaangnnggatggaaccggggccacttatggttgggatccttccaccggnatcgaagnccccggtnctcaaagtg

SEQ ID NO: 136622 - DNA, 502 bp, Arabidopsis thaliana
  unsure (1)..(502): unsure at all n locations
tttntttcagttaagaggncgggntccccctntagcttcacctctcgcttntntcancnccccgtgnttcnggccgtttaagngagaagccaaaggagaggaagaaggctgntgttggggaggacccaaaactgggnnccntcaaggaggaatccgattaggaggaaggccggaagcagaccntgaanccgccgaagagccctgcaaagaagggagaagaagaagaagagaaaacacgaggaagaggaaactgaaatgcctgctaagaagaaggaaaagagtgagaagaagaagaagaagaaaactgaggtctgaagagacctttaatatttttgcgtggtctagtttactttgttatcagaaacaaagaaaatcttttgtggcgttaggtgttaagtaaggtttttgttttgtttgaaacttaaaaaaaagaactactcttcgttttgtaaggttataatatgtttggtttagtccttatcccagaaacttgcattttgcc

SEQ ID NO: 136623 - DNA, 564 bp, Arabidopsis thaliana
  unsure (1)..(564): unsure at all n locations
atntgttgtccnagnatttggtttggccnntngcccccttggaaggttttcncaacggccattaaacttacggttaaaggcacaaggctnggtcttggtgcgaggttgcatggggtgacatatggtgcttctgccttggaacaacccatttggccttcgcctgccgcagctccagaccggttgtggaccccctttgccaaattggcctaaaaatccccaaccatgtaacgacgaggttggctccacttcagatgtctattgaatcaaagaggagttgcagctgcacctttggttggtggcggacgagttgtgccttttgaacccaggttcttgtctcgctcagtgattcgaaagattagcattgtagaatatattacagtcagcaacaccttggtcaattcaggttgaaatgaacccctacaaaaaagggatactttgaatttttttcttggttgattttttagtggtagaaatattccttcttatttgggaataattgttgcaacattcatgtataaaaggccttaccaatttcaggcttgaataagaatacatagtttgcac

SEQ ID NO: 136624 - DNA, 381 bp, Arabidopsis thaliana
acggacttggctcaattcagtaccagcacatccagcctaacctagacatggataggcgggccccctttttgggggcggaattccgcgcccttctccaacaaacgtcatcaaacaaccatgctttgcggttgaagcggagcgccaagatgtcttactacggagccaacggctttgacccccgagaccctcctaccgatgatgtctcctcctgcagcctccatgaatcctcctgcttgaccacatacgacttaggatacttgcaagccactcaaccttgcggactacgatctttaaaacacaaaattgccttcgattttatgtttttcaattttaataaaattatgttctcagtcacaattttaacatttaatttttttgccc

SEQ ID NO: 136625 - DNA, 544 bp, Arabidopsis thaliana
  unsure (1)..(544): unsure at all n locations
gcccggcccccnggtttccccgttcgggccttngtcacattcccttcccgggttccatccccatccaagttccncccccggggaattttcccgttttggatttgtttncttgggattctaccctcaaggccccccgttggaggaagattttggtgaagggattagatttggtgaaatgggcccatggcgcttcagccggggggagaacccccggaccagttactcgatgccaagctttaggccccgtgtcttttgcttggaggagagagatgcttgcagctctgaaagttgcattgctttgcacagacatcacacctgcaaaaaggccaaagatgaagaaagtagttgaaatgcttcaagaggttaagcaaatcaaatgagcaaatgaatatatagtttcctcttgtgacattcatatacaaaagaaaacgcattcctatatatgcgagcttctcctctgtgtattatataggtttttatgataaaattgatccgcttatggttgatttacttatccaatgacacaaattataaattagatcat

SEQ ID NO: 136626 - DNA, 357 bp, Arabidopsis thaliana
tggctgtgtgagtaaagcagagtatgtgatatacaaactgaaggagatggagaaaataaccgataaggacatactaccaatctccaaacagtttgacaaactcgaccgatgcagcaacggaaagatcactcctttagatctcttggaaggtggcagtggcgattgatcaatcctctgcaactttttgttttagcttagaattacagttactaattacaacggatcaacgatcctaatgatgctaatggtgatgatgaggagtccagtctccagtttatgtaaactggtttggtccgatattatgtctttggtcttgtcttgcataattggttaagcaggattcactggattcacatc

SEQ ID NO: 136627 - DNA, 260 bp, Arabidopsis thaliana
cgagtatgagccaaaggagacgcttcggacaattccacagtgtcaacattgttttcatgctgattgtatcgacgagtggctgaagttgaatgggacttgtccggtgtgtcggaactcaccggagcagattttgccgcctgcttaagctattatcttttgtgttctctttttcgttacatcatttgtactttttgtagttagttcaatactccgtccgttttatttaaatgtcgttcttaagattttttttaatacatatc

SEQ ID NO: 136628 - DNA, 554 bp, Arabidopsis thaliana
  unsure (1)..(554): unsure at all n locations
ggcccaaagggncnttnaccggggggnggtggtttatccccntntttnaaanattgnggcttcttcaacccgggngtntcttttnatggacccncnncntggaaatcttttgaaaaccaatcgccgtgtctccagagacaactgcaatgaattnccgaccgattgttttacgacccagcccgtttcccaagaaattcttcttgataagattgggtttagaacagtggaagatcttacatcaagcttgtccggtgcaagcaaagggtttgatagacagattcttgcgttccagaaatgaacataacaaaccagatgcctcattgaagaagaaggacaagttgttgagtttttgaatagccttgtgaaaatcaaattatgacatggttgaacacaagatataaaaggcaactaaaagtcgcttcatatctaatatgtaatctttttgctacagcttaggctcactaatctaattccattggtcctctttttgtacgcggttttatatgataatgacataaaactttgaatcgataaatgaaagaatctttgaatac

SEQ ID NO: 136629 - DNA, 518 bp, Arabidopsis thaliana
  unsure (1)..(518): unsure at all n locations
agngnggcccccattntggggttcccccctttgccccccnggttnnctttngctcccnccccattttttngggaatttgggcggntacaattttccccccgggaacacntttgcccntggtttcnccnaggccttattccnncccccctnttggggaaagctggtccncctncaggtaccnggtccgggattccccgggtcgaccccacgcgtccggagaagtctaaaccggaattcggccaaagacaagcgacccagaccgcgagaaacagcatgaacataaggagtttagcggttaggcgttctggggttgagattgctttgtgagcaatttgctgtctctgcttttgttctttagtactattggcctcaaatgtgtcttttgtgtttgtgtttctaggatgtaatgagtagaatgttacatcatagaaacgcaaaatacaaataaacaatcagaacctatgtaaccttatgttagaatcaccattgcaccaataaatctttaatagcttataact

SEQ ID NO: 136630 - DNA, 548 bp, Arabidopsis thaliana
  unsure (1)..(548): unsure at all n locations
gggnttnctccttnccaacagttngaccttgacaacccccaacctccnncaccttatctagtgacaggaggtttctagagagaccggctcggaccggtgtggatgttgtgtgcctggactggacctgtggacatggctgaaggaagagaccggctaggaagagacatagcagttccagggaaccgttgatccgggagttctatttggatccgaaaggaatttatcacaagccggattcatgatactgtgaagaaagctgggagagataaacacattctcaacttggggcatggtattaaagttggaacccctgtaagagaatgtagcacacttctttgaggttgctcaagcaaattagatattaagagaaaggaatgaaatgtgatggttattatgcctttttgttgttaatttccggccttccccacctttttttctttttcccattttgggagggggaattttatttttcaatattttaactgtaattttttttttgtagactacttggaagaaagtaatgattaacgtgcaatggatattcatat

SEQ ID NO: 136631 - DNA, 538 bp, Arabidopsis thaliana
  unsure (1)..(538): unsure at all n locations
gntnanccccgatgttttcccttggngngtcttccttaacccnttnctggaaaaaccctgtgatccttcgctcccccaccccccccagctggccaaacctgatactccaaggtggagagattgagaacctggtggatcccgaggancggtgaagaatttgatctgcaacaacttccatcgcattgctttcgccgcgtctctctgcatccgatcttcttctctatgtcgaccttccatgatcgaggtcttagaagtactacaaggagaagatatagagaaagagaaatggaaaatggaagaggaagaagaagttaaagaagagttttggggatatgaagatcttgaggattgtgaatgtgattcttcaatctcactttctcctcctgactctatctctaatagaagttcttcgcatcgtagtcgctagatctaaatttagttgtaaaatgttgaaaaatcaattttgttttgttgtatatatttgtttagagttgtctatttcataaacaattgtagtattcaatgaggtgttttattt

SEQ ID NO: 136632 - DNA, 467 bp, Arabidopsis thaliana
  unsure (1)..(467): unsure at all n locations
ctcnnttttccccccncgnannntccccccgngggnttnaatntcccnacggggnttgaaacccggcttcaaaataatcccgngngtcccccggcggggaatttttagacccaagtggttaaaggagccgttagccaacccgtggctgcccctacccgctcgggcttaaacccgccgtcccgcggagagcgttttggctggantaaccgcgtcaaggcatctcagccgtcccttcttcttcttgtctaatcaacggctctcatcgtctccgctgacgtgtccatgatgaaacagaacccgcagatatgatgacgtcatgcgtggcgtacttgtccgtgtctgacgatccgaagcgggaactgattcggatcctgagagttgttttttaattgttgtttttaattttttgttgtcataaaaacatttgtctctattggtattattaaagaagatcggacggtggagat

SEQ ID NO: 136633 - DNA, 509 bp, Arabidopsis thaliana
  unsure (1)..(509): unsure at all n locations
ccntgccaggcttcacgttttcggtgagaacctggccncatgggatctatcccgccgcttttggaggatggttccagaggaattgagttcccgtcgagaaagtggataatgatgagtccaccggaaagtcaaagtttccccggtgaggtttgtacccgagaaagaaatggtgtttgaagagtatatgaccgtatctgaggtcatcttccggcgtatccagacggctaaggagaaaggtttagagcttttgacggctgagatggaaggagagtttgctggttcgtggaaagaagatgggaaagagaagaaagttgttaggtatccgatttatctgttgatcggaagagttgcagaagaacgtgtataaattgatatctctcagttaggcatttcgtcgaacaccttgtacttacacacaagaagacattagttttgattggttcaatgtaaaaataaaactttgtcgttccagcattcctggggatctctaatctttccttttttacccc

SEQ ID NO: 136634 - DNA, 604 bp, Arabidopsis thaliana
  unsure (1)..(604): unsure at all n locations
cggtcttggctnccgtccttgccaaggtctccacttgatctcctggtccgcaaggaagcgcacncncgccaacgggagcgcaaagccgaactgcagatccacgtncagaatntcnttcccccattccactggtggacantctatgctgctccacatgncctgcaggtccaaccatcccantacacgcaccaccacaantaccgcgggacccagccacaacttctatgggaagccgcgtggtccacctggtccaaaccgctaccctcctagcggaaaccagagcgggggttataatcaaagccgaggaggttacagcagtggatcatatcctccacaaggacgtggagctccttatgtggctggtcctagagggcctagtggtggcccgtacggggttggacctcctaactacacacaaggtggtcagtatggtggctctggtagctcgggaagagggcagaatcagagaaaccagcaatacggatggcaacagtaaagagctctaatgatttgttgatctgatatcttactcttacatttaatgtgatactagtaataagctaataatagattaatatgagaaactgaatctctttcttttccc

SEQ ID NO: 136635 - DNA, 499 bp, Arabidopsis thaliana
  unsure (1)..(499): unsure at all n locations
tgcgttagttctnccgtnaactgatgcaccacgcgcgagcntcntcattcccttcacttntcnctcgtggcgggancattttgatcggcatctgntttcgttcaggttggaggacggctgaaaccggaagagtttatatgaacttggaagagaagacccttgcaaaggaagttggaagaagcccaatttgcaggccgaaatccaaaaggagaccccggaagaagaggtccaaaggttgaggaagagcttgacgttcaaggctgggcccatgcccaagtttctacaaaggaccccccacctaaggttgaattgaagaagataccaactactcggtcctaagtctccaaagctaggacgcagaaagagtagcagtgatgcaacaggaggtgaagccgctcctcgcgtgacaaaaccaaaagactcatcatcatctacagtgaagaaaccaataacaaagtctcagccaaagcttgaaactcaagagaaatcagtgaaggcc

SEQ ID NO: 136636 - DNA, 471 bp, Arabidopsis thaliana
  unsure (1)..(471): unsure at all n locations
tncccgggaaaattttggnnttaatccncaaggatttgngcccccaattnccagtttcnttgggaggaagggttttccttagccggtttgattatgnaaaatcccccnccactnggnttntccagntttgnaccattnaaccncctgcaaaggtttcctttgttgacgagaaggaaaaaaaggtcccccatggntcnggataaagacaggttccagttataaatttactccgcaacatagcttacatcattggggaagaagggggttcctcggaaaagtggatcttggggaatctacagtttcaaagttgtgcctcacttgtgtgctcttacgttccaagctcagtgcaaatctagcaagcttcaccacgaggcaaccaatcgattcaattgttttcttttcttatgtatctgatttgtcttggagattttttatctttgtctagttgttgtgcccagaactctaagttcc

SEQ ID NO: 136637 - DNA, 511 bp, Arabidopsis thaliana
  unsure (1)..(511): unsure at all n locations
tngtgtaccnntngagtagtgaggaatttgtctgngaggcccncnaccncagtnggattccgagtccgctgatcattggcnatgattatgtggnggcccccnccctgaagatgaccagttcagccncctgnggagaccactgatgcaggagcagagactaatggggcccccctcctaatgtagctgtagaggattaagaaacccgaagttgaagcctgattttgatgatatggggtatatttcaagccgtgttgttttgagttacttttaaaaaatgttcgaaagcttgtccactttttcatagactatttatgttccaaaatgttggttcatgctttcttggttgtttttgaattaactctttgaacttaaaaggtcatcactgtggtaggtgcttggtcattgatattccggcattagagaacagtagcatctttgattattcgtgagactcttttctgatcgagaatatgctttttctcaagtgtttatatatcagttttctcaagcc

SEQ ID NO: 136638 - DNA, 454 bp, Arabidopsis thaliana
  unsure (1)..(454): unsure at all n locations
accccgnatncttctccggntcagggccttccggtttggacactcgcgggccgggtccaatggctctgcctctacctaaacttggttcaccgatccccccaaaatacgatgtgtactttaaaagggagtctccggtgttgatgcttagggagacgattatagcttccatttcatcgcctacccccactcctgcacccgaagattccagcagtcgaacttcaagtccaaacctccattcaagaatgttaaaaagtttgatttttgcatgatatatgctattttttgtgcttttacgtttctgcggttaactttttctctaccgtgtcttgcaaactgattgaatcttcacttgccaagatttcgaagatttttgttatgagaattttgtgtagatctaattagaagaaaccaaactgcaaaagccttggctcaagtatatatgtattttacgatt

SEQ ID NO: 136639 - DNA, 598 bp, Arabidopsis thaliana
  unsure (1)..(598): unsure at all n locations
accagtggnctaaaagnagtggaagnnttccaattcnatanaatnccatgnacagagaactaggggnnctgttaggaaatgcngttccggnctgcattgggttgaacagatggtcaccttggaataagtgttgttgagtgtcatggctgctggtgcaaccccattggctcccaactcggctggccctaaaaatggccattgtgttggaagaagccggccacaaaaccgggtttcttgctgagcctgtggagggattacnctgaagcgatcccttgggattgtgaaggatggaattgaaaccagggaggctttaaaatggctggaatctgcttagaaaacgagcgccaaggttctctgaacaacggttttgtgaggacttcaaaactgcgattcgacccattttcacaggtcctcttaaatgacagttcttaaaccctcaaaacctgcttactgcactagcttttaaacgcacaagacaagctaggttataccttttatcctctctttatagattttttttttaattctggttaaaggtctgacgtagacgttgtaagaaacagtttggtcaaaagaaacgagttagacgtccgggggc

SEQ ID NO: 136640 - DNA, 531 bp, Arabidopsis thaliana
  unsure (1)..(531): unsure at all n locations
aangcngnttnaagacccgtttcccttaaccaaatttccccctgggggcgcccctttttnttcaacttccccccccngccccccaaaagttgccgggaaagagttggtttttaaaccccggggtcatctcccagtcccgttgagattgggggcaacccngtgccagggattgggggaggaccatcgagcttccccgatgaaagtgatgatgagtctgatggagatgacccatgtggagatctctcagaaagaagtcccctgccgctgtttttggaggacttgctagaaagagagacgaagacggcgaagaagctggagaagacggtgctgcccagaaattgggtgcacttgagaggatcaagagacagaagcttaatcagtgaacaagcgagtcgtagacaattagtcttgtgcttagtgattctggaaccaaacttcattgtaatacccagaaacgtgaaacttagagaaaaattttgtattctgttttgttttataattcgacactttgtttacataagagttctctgt

SEQ ID NO: 136641 - DNA, 496 bp, Arabidopsis thaliana
  unsure (1)..(496): unsure at all n locations
cgctccatgccggtataatctccgccctgactnagtccaacgtgtggcggcatcnccccagtatcgggttactgtgatatggtgcggcatatggagagttgatgtaggatgtccagtggtgtcttgactctagaccagaggttctggagataagaggggacaaagctagagtaataaggcgcaaccgtgacagacttcatgaacttcaggttgcagattacatttaaaaaaaagaaccagactctcatgttcaagattcaaactttatcaccgtatttgtcatcatacacataataaagcatcagaaggtttcagtctttcagacaaggtccagatgcagttgagcgaggccatactttgaactctatgtacgtatctatgtatatatgtgtgtgaatcatcagatacaacatactatactcatcaagtaaaggttttgtatagcaaaaacactgggttagtgttacttaaagagtggtgaaattctctggttttt

SEQ ID NO: 136642 - DNA, 548 bp, Arabidopsis thaliana
  unsure (1)..(548): unsure at all n locations
ttncggtttcccacatttttgccaaaggggcaagccngtctacacctccttngtcncntaccgggggttncaccccccgttgtaaccncggnggncctggataatagtggccaaaaaggcncaaaggcttncnccctcaacgggatgctttgttcttggggtggctggttgccgaggatccttttgtttatcttcttctttgttcacatgtacctccatttccatcaggtgaagcaagtgtttccactgggattttacagccttcttacgataccaccggctctagcagtgatgaatctcctttggttctggaaaatcaccaaaggattgatcaaaacactctccaaggcgaaaacatcggggatgaagaaacagtgatggttaccctgaaaaagatttttcaactgcattcactttgatgtgtccatgaaaaattgattgatattcatgttgtggttgtcttggatgcccttttgggttttatggacaaagagtgtgcaagctaatgggggattgtatattcaaacttttcagctgtttctttaggt

SEQ ID NO: 136643 - DNA, 568 bp, Arabidopsis thaliana
  unsure (1)..(568): unsure at all n locations
ccaactntttggncgctatcgtntttcccgnntcctanaacatttctcacaattcctctccaaaagtgttcgcagaggtcaccctgtgcttcagccaaaacgggcaagccagcttgtaaggtgaagagcgtcgctgaaaattcagctccatcagcttacaagaccccggagaaatttgtgcaggagattttggacaaaacttcggctctattattgtccgaggctaagggagagtgcgtggaggctttggcagaaacactaagaaaacgacttacctcagagttgacccacctctctattatgtacaagaactcagcgtacgcagaaggtttttatgctggtacacgccaccagccgaagcgattgtaagaggtttggtttacatgttgaaccggagatatttgggagagaaacattacccggttcagcaatatattttcctttcgttgggcagcaaactttttggttaaggccttgaaatggtttacattttacatggaaagctccgaccctttttttcacttanttgntgctttgntttgtcaatnaaaggtaaaccttttctttt

SEQ ID NO: 136644 - DNA, 500 bp, Arabidopsis thaliana
  unsure (1)..(500): unsure at all n locations
ttgctgcccntgatcgcaacaacgcccctgnnnagaagcccnctagtttgggccggccttcacgcgtggattggnccgngtctggaaaaagaattgccgttanncccaagcgaaagagtcaggngtgnngtatctactgggacatggggncataagggctcctaaggattcttggtttctgaagaagctggtaataaattacttgtatgctttcttgaggaagaactccaggagagggataacaaaccttaangttccgcatacacatttgatgcaagttggaatgacttatatggtatgaacaagaccccgatcaaactactggttttcatctactcgcaagtctcatgaattgtcgaagaacatgaaacacttaccaattcaagagattttttttttcttttacacattgttgcaaaagtgtgatggagttataaaagtacaggagaaacaaaatgatttttttgtattgagagttgctatttgattctgtgtttgtt

SEQ ID NO: 136645 - DNA, 492 bp, Arabidopsis thaliana
  unsure (1)..(492): unsure at all n locations
taccaaggcaatcagtgttgtgatncctgnccacttaggatgccgttgtgaaggattgtttgaccccagagtgaagaaagttagttatggagatgccccttcgaggttatgggaaggacctcttttggtgttgatgtattcccttgtgacacttatagagtcgatgatgagtgcagtgttctattttagctgccgagtttattatagtatggaagcttctagaggtgaaactcacccaatcatggaaacggttacggttgtggatgctgagtaatggtgcgttgtgcggatcacactcggtgaatggacatggaaacgtattagctgaagaagaagttgtatatcatcacatggggttttattgagcactttttgtttcactttgaaacttgatgcatctttaaggtttttgttatatatggtttctctgtttacattgtttgaagattatatagcatcccaagttcgttcatagttctgctcttgtttctt

SEQ ID NO: 136646 - DNA, 538 bp, Arabidopsis thaliana
  unsure (1)..(538): unsure at all n locations
tattcagcccaactggtgncatggtatatccacnacacttttccccccccagaggagngcccttcaaatgttcctccgcccatccggcccagaaatgggacccgtaccatcaagcctgttccaagccccccatatccggtccagaatcccccgggtccgggtataatggaattgaaggatgaagtggctaagaggctgaaagttgatccaggaacgtccgatatcaagtatcttgacgatgataccgaatgggttttaatagcttgtgatgctgatcttcaagaatgtctcgagatccctagatcctcccgcacgaaaatcgtaaggctcttagttcatgatgtaacgacaaatctagggagctcctgcgagagcactggagaattgtgacctgataattcattcgaactcttttgtaaatatgttttttgaattttattattgtttagggtttctttggacaaattaaagttgtaaaagaaaacatttgtttgtaacttttaactgtaaaagtgtaagagagagagaggttagaagt

SEQ ID NO: 136647 - DNA, 420 bp, Arabidopsis thaliana
  unsure (1)..(420): unsure at all n locations
ccaagatcccatcttcaactcacgttcaagangagagccaagtggagaaagaagcgagtncggcgtctgaagcgtaagaggagaaagatgagggctagatccaagtaaacaactcgcctcaactcggcctactggatctgccacccaccccaccatgacaactggcaaacccacacgttgcggaatcactcgcgtcatccgctgtttcgacacctcgaatcaacctggcggcacgctcttgtggcatttggaggatggaattggtctgaaggaaactgtagcttgtcaagacagtcggtgtcgtcaagggcatgtttgcaaggaatccgagttggaagcttttttgcctccgccttggatgcagaccggttncccccaagttggcagagagagggaaatcacctatgcngtnttgcttcc

SEQ ID NO: 136648 - DNA, 532 bp, Arabidopsis thaliana
  unsure (1)..(532): unsure at all n locations
ccggaccnctgccatgttccccnancnaatcngcccctttgggnaagctgtnccccncaggtccggccggatccccgggcgncccacngncactaagggcctttcttccgcaaaatccccggagccttccacatacatgaaggaatggagggaattttggcggctcatgtcccccaaggaatgacagggaattggattgtgatgtctttggggattggttcccagattatccgttcttaaagagattatcttgtttctcctctgaaaccaagtaaacatcttttgggatctaaggaacactctcgatcatcatcacccggttaatgcaatgaattagtgtgggctaaaaaaaaggtctttccttttatcttctttgttttatgaataagaacttgatgcaatgttgcatttttaccttcaagcttttgttgtgtgttgtttcagtttctggtttcgtgtatttgattctgtaaggcttaaaatggaattctaagcctgttaatcttttgattgaataatgacaacttttctc

SEQ ID NO: 136649 - DNA, 430 bp, Arabidopsis thaliana
  unsure (1)..(430): unsure at all n locations
gtgagagacccgggtgagagatccggaagaaggtcaagatcgccggcgacgaatagatcggtgatggattcgaatcagagtagtcgggtgggtggggcaaagactaggaagaataatcagtctccgggtcgggttagactagatccggctaaaaacgggttggatcagcaacagcatcagaattacggttataccacagaggaattgttagagaacccgcttgtttcgttagagtgtttcatatttctttgaaaaagaacggatatttcgatggggataaatgtcttcccatttgacggttgggattcatcaattcggtaaaagcgacctttactttaatttaccggttacccccttgtaaatttcaatttcctggtggttggtaatttncctggatttaaaggtattaattccgggttgaatngnttgt

SEQ ID NO: 136650 - DNA, 216 bp, Arabidopsis thaliana
tccggataaaaacgggttggatcagcaacatcctcagaactacagttataccacagaggaattattagagaacccgcttgtttcgttagagtgtttcatatttctttgaaaaagaagaatttcgatgggaataatatttctcattttgacgttggatttataattcgtaaagttacttacttaattacgttacctctgtaattcatttgtgtgttg

SEQ ID NO: 136651 - DNA, 314 bp, Arabidopsis thaliana
  unsure (1)..(314): unsure at all n locations
atgtacttgctttcgcaggcagctttcccaacaggaggattgtatttcaagaacaaaacatgggttaaagaaacaaagggaaaacatgcgataatccacaataactacatagtcggttttgagaagaagatcaaacgtttccgtgactttaatctatggctagtcgatgatcatgcttccgagtctcctttagggaaattagagtaaattccaatggcagaaaaagatttttggtcgctccatctttctccttgttattggaatattcaggctgcagaaaggaagnnagntccatcgngtaaattcttttacnt

SEQ ID NO: 136652 - DNA, 383 bp, Arabidopsis thaliana
  unsure (1)..(383): unsure at all n locations
ggaaagctaaaaatacctgttgaaaaaacatttccaataaccgatgttgtagcagctcatgaagccaaggagaagaaacagattccgggtaaggtggttctagagttctgaactacatatacatagtagaaataataacacctgcatagttctctagcagttgttctttctagaatttacacgcagagaaacaaatgtttcgcgtctggagttttctgtaaatgagatctatcaggcttagattcagatcaagaacttgaagtgtctgtatagactttccaaagggttcgtttttatttggattttgtctgtgtttgcaaacctctttagccaaggtaatgggaatgggtttggaaggtccnaaaaaaannnaaantnntnnt

SEQ ID NO: 136653 - DNA, 288 bp, Arabidopsis thaliana
  unsure (1)..(288): unsure at all n locations
aaaacatgtcacaatctcatcttcaagtgagatgacaaatgacatatactcttcaaactcaaacagcttacttgattcttataccatactaccattagtaacaacaattcctgaaaaaccgcatttcatcttttacataatatgtgctatttcgactcaaataaagttagtttttcgtgtgttttgtttaatccttggattcattgtattctaatacacaaagcatcagactctgcttttcataaaagggtaactgatttcatatgtgatttgtngaattgggtgcta

SEQ ID NO: 136654 - DNA, 369 bp, Arabidopsis thaliana
  unsure (1)..(369): unsure at all n locations
cgctgtactctgtcgttgaatcatcctcataaccatcaacaaagatggaaaagcaatgcttcatcatcactcagtgaaacaagcgaagaggtctcatcttcttctggtccattcatcttcagagattgttttgcttcttcgaagattgatcttaatcttaatcnctccttttctctactccatagctgaagctttgttcagctttgttcctttgtnctaaattttagcgtagtgaacatttagattgtttttaaaccaccttaaaagttcctaatcttttagttaggcctcttgatttgtgattgtaaatgttttttttttttggctgtctacaatgtcacaattacatcgggctttatttaaccaagg

SEQ ID NO: 136655 - DNA, 464 bp, Arabidopsis thaliana
  unsure (1)..(464): unsure at all n locations
aacttgtcccccntcnggtcccgtccggattcccggtngccccnagggtccatcgatgggccatggacccccgggaaccggtcccggatgctttgaccattaccatggccatttgtattccaggtgtggaccaatgatggagttattgggagtgctgaaccttagagtggtcgtgaatacaagccaaagggagattctcaataccattcttcttcttcccatcacatgaagccaatattgagccattggaggagcttataagtgaggaaaacccgccttgttataaaaagtacaattggggaaagttctttgtttcaagaaacagaagtgatttcaagaaactcgaggttgagaatatccagattgatcacttcaaggcttagttaatcacattataattaaaccttatgttgatttctaattggttctttttcatataagttagccaaggtcataatttcccc

SEQ ID NO: 136656 - DNA, 576 bp, Arabidopsis thaliana
  unsure (1)..(576): unsure at all n locations
tttcttaaggaaancccttccgctcagctggnaaccagccccgagcacantnttgcncggaatggcccccgntgttttccnaacccggtgngtttgcccgttgatggcccaactcttttccnggggtattccnatcatgatcatgatcacccatctcattgcgcttggggatcctaaggttcccagaaaaggtaaactttcccagagtatgctgcgccagagtcacgttactgccccagccccgtgtttaccgaatatatcgaagacgaagagggtaagccaaaactgcagatcaacgctcaaaactgtttgcactgcaaggcatgtgacatcaaagatccaaagcagaacatagagtggacagtgcctgaaggtggtggaggccctgcctattccctcatgtagtccttaagattcaacatacctctctcactttaccatatctggtaaataaggggggctcaacaaaatccttaattcgtctggggtttttctttttactaaaatggtttgtaaatcattagggtggttaccgggtggttttgttccanntttcaatttgacgggntttttccc

SEQ ID NO: 136657 - DNA, 439 bp, Arabidopsis thaliana
  unsure (1)..(439): unsure at all n locations
acaccgtttcattagaaattaagaacatttggtttgaaagaagacggtttgcatttacctccaagtttcgactatttgccccgtacactcaaactattgtgctggtccaaatttccaatgaggtgtatgccttttggttttcgtcctgaaaaccttgtcaagctcgaaatgcagtacagcaagctacataagctatgggaaggagttgcgccacttacatgtctaaaggaaatggatctgcacggatcatcaaacctgaaagtaattccagatctttctgaagctactaatctcgagatacttaatcttaagttttgcgagagtttggtcgagctcccgtcctctatacggaatcgcaataaactgttgaacttgggcatgcgaaccggcaaaaggtctgaaaattcctccaaccggnttcaacggccnaaaaaaaaaa

SEQ ID NO: 136658 - DNA, 273 bp, Arabidopsis thaliana
agcgggtcgcaaaggtgcaccgccaaaggaaatggttttggacgtggcattactactgcatttggcagcaccgggcctaaaccgtgaggtgatcatgctcatttctccgcctatatatcataatactctacaaacccaacaataatctctttgtattcataaataagactagagattgccacctttattaattatgatgaaagtgctactctttgtgtgatgtctattgttaaataaaataaatgcaataattacggctttaatagtcttttt

SEQ ID NO: 136659 - DNA, 235 bp, Arabidopsis thaliana
caaaaaacaaaaaaaaaaccccggaagaatgctcgctttttaagtccaagctggaaaaatcagcagcagttcacaaaagcacaacttctccgggtcacaacatcaatcaaggtaattgtataaaggaacacaaggaacaaaaaatgtatgtatgaaaaaatgaagagagtttttttttgtaaaagagttgttgaggtttgcagcacaaaagtgtgtcttgcaccttacatccgag

SEQ ID NO: 136660 - DNA, 244 bp, Arabidopsis thaliana
cagcatcgtacttcacggtgctggatcttgcgaacaatcgtcttcagggaccgattccggcgagtatcacggcggcgtcgtttattggtcaccttgacgtgagccataaccatttgtgtgggaagattccgatgggatctccgtttgatcatcttgacgcgacgtcgtttgcttacaatgcttgtctttgtggaaagcctcttgggaattgtaggaaataattaattaaattattggtttaaag

SEQ ID NO: 136661 - DNA, 391 bp, Arabidopsis thaliana
  unsure (1)..(391): unsure at all n locations
cagnaaaagtcaatatgaattgattaaaaggtgtctggcgtatcctgatggagcagtgtatatggctgcaaagaagtactatttcggggtcggtggagggacaaggcaattcttgtctatgatagagaaagacggtgctcttgcttcaacgttggtgtctcaagtcacagatggttcctcaaatgtcagagaggtatggaagctttcgtacaagtaagtcgaagctatactggaattcagtgtccaacgatctgattttagtggatttgggttgctcataaaaatgagtggaaattcaaaatctctcatccatgtgtttagcttatagactctcctgactgtgttataataattgcttaggtttttccatttttggaccattttctgggct

SEQ ID NO: 136662 - DNA, 509 bp, Arabidopsis thaliana
  unsure (1)..(509): unsure at all n locations
aggggccttggtgtgaagtttntgcncactgtttgngaagacccgtagagccttcnccagccgtacgggctcttatcagagaaaccgaagtaacaatgcttctcaaacgatttcgttcaggctcggttcttcagcttcatcagcacctagagagtttgctgttccaagctcctccattatgacgagaagccaaactgtaaaccctactgaagtggttacttcgagtacttcagcttcatcgtctaggagaagaacagaagatgtaaacaatggacctcggaccaggtctagaaggaggctgaggtaaaaaggaaaaacggtcgccggaatcttgacaccatccattctcaaccattgctccatcattactaaaacctcatcataactctgttcttgtctgaatactgaatgtatatgtacattctatgtctacttgtaatttctgctagcctctgaaactttggatatcatatctttgttttttttttgggaaaataatttaacttgat

SEQ ID NO: 136663 - DNA, 288 bp, Arabidopsis thaliana
tagggtttccaggaaatgtttgtatagaggatgatgataaaatcggagcaacatcttctgctcttaatgtttttcttcatttgtgtctttttttcgattaattttatttttatttttgtgttctatttgagttcctaatttcgtagtgaaaactcgaccacatttttctcttttgagtttgtgtttgatctattagaaagatctttaggctgttacatttttattttgttccttgtttgctatcgaaccgatttgagacataaacaataataacattcataatttgtc

SEQ ID NO: 136664 - DNA, 521 bp, Arabidopsis thaliana
  unsure (1)..(521): unsure at all n locations
acgggtcntntntnctacctcgtgatttttttggtccttttccgggacgtcatggctatgcatcggaccaaaggcactttcatcggtttacttgaaggagggagagttaacgaatgggtcgtcaccgagaaattaggtgatgcgcttgagactaagttacttccccaagtaagaaaacctcgcaacgggtttctcgaaaggataaactcaaaagagatgatggtggggatatacatattgtgctgtgcatcatataaccttgtctttgggaagacagtgttatatatctatcctttacatgcagggctccttgcttttattaattgcccggaattgggttttaataggnaccttgttaaggggtaatcggtaatttgatataatccggtaggattccccgtcctttcccttttcaaaattccagataaggagggggaattattttaattaanancaaatnctaatccntnaattccaaaaaaaaaaaaaaaaagggngggccnccnnnggggccaancttc

SEQ ID NO: 136665 - DNA, 377 bp, Arabidopsis thaliana
  unsure (1)..(377): unsure at all n locations
caaggagnagaaggntgccagggaagtcccngngaggatcncccagcggatgcctcgttggcttngccgtaatgttggtcctgtgtgtgatgccggtgtcgttttgccgtcatgagtgtaatgctcgcatggttttatttgtgatgaaaagctttttttttttttgtgctgataaattgttattttttattactcatgattttctgccatgtgggtgattttggggatatatttgtgtcttggttttcatacgattttgtgttaatcaatccatttgttttttatatttccgtttatttttattaatacaaatcatattttccgttttcgtgcgagtgagaattgtgtttttgttaatatctcgtttatctttgctt

SEQ ID NO: 136666 - DNA, 295 bp, Arabidopsis thaliana
ccttttgaagctatctaaggctttcaaaggcattggacgtttttacaatgctaacaaacattccaagaaagcttgaaaaggagatgaataataaaactttgtattaattgggatctataaacaatgtaacttgtaagtttccattgttttgggcaagttctatgaacaatgtaagggaaaataaaaggtaaaggctaggattttgccatatgtgtttagctttgatcttaactttctttcctatccttgtatattttggggcgggtaacccgtaatggcccgtatcgattggggg

SEQ ID NO: 136667 - DNA, 478 bp, Arabidopsis thaliana
  unsure (1)..(478): unsure at all n locations
ccaacctttacccgtgcgttgtgtacgtggtgcagggaggagccattccgtatagctgttgcaatggcgtcaggatgctcagcaaacaggcaactagcgcatcagacaaacaaggtgtgtgtcgctgcatcaagtctgtggtgggaagagtgtcttactcgtcaatctatctcaagaaagctgctgctttgccaggcaagtccggtgtcaaacttccttacaagatcgacccttccaccaactgcaacagcattaagtgagagaaataagttacggggaccgaccaagaataaaggccatgtatttccgtctaatgtaacccgggagttttagtgcttttcaagctttctttccttaatataatggtggaatggacccattccaaattataacccaattgaccnattttatctccaaaaaaaaaaaaaangggggggggccggcntnngaggggnccaaaccttttcgganccccggg

SEQ ID NO: 136668 - DNA, 229 bp, Arabidopsis thaliana
tctcaatatggtgatttgatctgatccttctgggttttaaaacactgaaccagaactgttttttgtaaactcattgcaaagattgtaaaagaaaaaaaggagttttgtgagaggaaatgattagagatgtgcaaggcttttttaccttgatcactgccattgatcaatgactctgtacttcttggctttttgctttggtactaatgtgaaagtgaagcatattgatttg

SEQ ID NO: 136669 - DNA, 551 bp, Arabidopsis thaliana
  unsure (1)..(551): unsure at all n locations
tacaatctaaatcccttaacgaggatccattggagggcaagtctggtgccagcagccgcggtaattccagctccaatagcgtatatttaagttgttgcagttaaaaagctcgtagttgtcccttcggtcggcgatacgctcctggtcttaattggccgggtcgtgcctccggcgctgttactttgaagaaattagagtgctcaaagcaagcctacgctctggatacattagcatgggataacatcataggatttcgatcctattgtgttggccttcgggatcggagtaatgattaacaggggccagtcggggggcattccgtatttccttagtccagaggtgaaattccttcgggttttttggaaggacggaccaactgcggtaaactttttgccaaggggtgtttccattaacccagaccgaaattgggggggcccaaaccnntcagataccggcctagccncaaccataaacgatccggccagggntcagcggnttttcttaagnncccgtggncctttggaancanntttggccngggggatgnccca

SEQ ID NO: 136670 - DNA, 566 bp, Arabidopsis thaliana
  unsure (1)..(566): unsure at all n locations
tagttaaaccttggaatgggtcggccggtccgcctttggtgtgcattggtcggcttgtcccttcggtcggcnatacgctcctggtcttaattggccgggtcgtgcctccggcgctgtaactttaaagaaattagagtgctcaaagcaagcctacgctctggatacattagcatgggataacatcataggatttcgatcctattgtgttggccttcgggatcggagtaatgattaacaagcaacatcaaatggccacaacttgatttcaaagaacaaaagtcagaggctgaccccaatgtgcaaagcaatgagttaaaagaagaagaagaagaggactcagggaaaggtgaacatattgtggagacaacaaagtttgaggagttcaaggcaggtaaagaagcgagtctcaaggcatggcttggagatatggatgggaatgtggatgttggtggncgtgttgccgagagaatttagatgttttttcattaatgccgctgtggttccgggaacctgcttatttatgnaatcatccncttccccgggnaaaagngttaaantttgncttt

SEQ ID NO: 136671 - DNA, 493 bp, Arabidopsis thaliana
  unsure (1)..(493): unsure at all n locations
tcacacgacattgagctggtcctctcactncnccatccacaccaccgagcgaatgangctatttgttgatgcgtcagaaggatttatttaccttgtgagctcattggattgactgttcacgatcatctgtaagcggaaaggttcagtcgctctgaaggatatcaagaggcgacagacaagccggtggcagtcggttttggaatatcaaagccggagcatgtgaaacagatagctggatggggagctgatggagtgatcgtaggcagtgcatggtaaagctattgggtgatgcaaagtcgccaactgaaggacttaaggagcttgagaaactaaccaagtctcttaaatctgctcttctttgaaacacaaacatttgcagacaacatctttagattgtgtttttgattattatcggtgtgtgacaatgatgtctcaatcttttgatacatttcaagtatgattaataagttactgtgactcaagccacacaacc

SEQ ID NO: 136672 - DNA, 547 bp, Arabidopsis thaliana
  unsure (1)..(547): unsure at all n locations
tcaaagcactaacaaaggtcaatgggaaagaagacttcagacagacattaacatggcaaaacaagctctttgtgaggccttgtctttagacaaaccatcatccactctttcatcatcttcatcattaccgacaccagtaatcacacaacaaaacatccgtaacttctcatcagctttgcttgaccgttgttatgatccatcctcttcttcttcatctaccacaaccaccactacaagcaacactactaatccatacccatcaggggtatatgcgtcaagtgctgagaacatcgcccggttgcttcaagatttcatgaaagacacacccaagggtttaactttatcatcttcatctccggtttcagagactggaccactcactgctgcagtctcgggaagaaggtggagaaggggttggaacaatctttcttcaggttcaattcaatggcgnaactcaaaactgtctcaggggcaagctncttccatggtcaagtggcaancgggaanacatggccagntctgggcaantccangggcctgctttntt

SEQ ID NO: 136673 - DNA, 616 bp, Arabidopsis thaliana
  unsure (1)..(616): unsure at all n locations
tttggagtgatcttacgaatctaatccaaaaaaactttccctaatactctgacattatacacataatctgatgttgagatcaaaagagtttacacaactgacttgacacaaacgaacacttcaccacaaaggatatgataattttacattgtcaatgttttcttccacctttactctctttttgtaaggcatgaaccctctcatgttgttcatctcagtcaccgacgattttaactgagaggaagctgatctctcacttcttttgaactccgacactaccactttctgtttcagcgttttctgaagtagaagaagaacattggaagagactcgtgtttctgagtatagcttcttcttgccatcttcagaatccatcacaactcacttgaaggggtgtaatcaccaacttcaaaaggttttccaaagngcttaagggtccggtttgggccccnggttctagnggcaatgatcccccggggtgagatggtaacncagctggaagnaaggttagggggatttggnccaagggncccaaacccancggggcccangngcgganaaaccggntgttggngnccggggacctcnncccngnaannnctgggccggggnggcc

SEQ ID NO: 136674 - DNA, 598 bp, Arabidopsis thaliana
caaaagggtcgggattcccgttttaaggttccgagcggatacatcctcccgggggagaccctaggtgtgacccgtttcaaaagcctttcaccccatcttaagctctggttgttccagaaggccctaatggctgtagatactcccctcgggcgtttaaaggtagagttgctggagtaaaagtgaagccccgttgatacaaccggtgcagggagatgcattcgtgagcgggttattggaaccagctttagcttctgatcttactcttctcaaggatgagaaggaaactaaggagaggcgcttctatttgcaaacgcatgtggagccattacagtaacagagagaggagcgataccggcgatgccaagcatggatgctgttcaagatcttctttcttctactcgctcctaaaatgcttcaaaagtctcttttgagtgtatcaattcattaccttttacagtgtttttgtttttttaaatatttttccccaatttgtaggaactcaagaatgttgtgtgtgtttttttagtttgttgttgatctcccggagttttagtattggggtggtttggttttactattatcaagttaggttttctac

SEQ ID NO: 136675 - DNA, 382 bp, Arabidopsis thaliana
caactaggagaaacgacgaccacatggatcttcggagaagatacgtttcgccatctcggcatcctcctggagcagcaacaggtgcttaccgttcagtagggtctaacgacccgagctcaagagctccggtggaaactactaactacagaacaaccgcacaggagatgaagtatcgtggtgggtcaggtcttgattctggcggatttggtaaaagaagagagagtttgtttggtaataacaaagctttagacgacgaaagttagttcctttttttttcatagttcgttatgttctttttttaccggtcaacgcttgaaaaattttctaattgtgtaaaaccgccggccgaggaaataaaaatttttacccggttgctttgttt

SEQ ID NO: 136676 - DNA, 496 bp, Arabidopsis thaliana
  unsure (1)..(496): unsure at all n locations
aggacctgngaataccaccgtgnctatattcaaatnaacacgngaccagcttgttnctctcaaggcgaaatccaaggaggatnggaacactgtcagctatagctcatatgagntgttggcaggccatgtgtggagatcagtgggaaaggcgcgagggnttccaaacgaccaagngacgaaactgtacattgcaactgatggaaggtctagactgcgtccgcagcttgcctcctggttactttgggaatgtgatattcactgcaacaccattggctgttgcaggggatctgctatcctaaaccaacatggtatgctgcaggacaggttcatgatttctttggttcgtatgggatgataactatctgagggcagctcttgacnacctggagatgcagcctgatctgtaacccttgtccnggggganaaacnncaagngncaaatttngggatcncaagcngggcanttnccnntttnggggnananttggaanggggc

SEQ ID NO: 136677 - DNA, 387 bp, Arabidopsis thaliana
  unsure (1)..(387): unsure at all n locations
ggaccnggccnggacnnccagggcatcccacaatttgtgcaaagacaagagtggtttgctacacaaggagacagtgagagccgtctatgatggttctcttttcgaacaactcgagaaacaaagatcttctaaaaccccttagaatataatcatccaaaaaaaatcctaatgtaaattcattgttatgctcgtgaatctgttttagttaaatctttagtagttacagtaatctatggtgtgaagatcgggatgtgtttgattttcaagaattatagtttatttgtgtaagcacctgtgtgattggatcctattccaataaaaggttatatggtttttttttaaaaaaaaaannaaaanggggggnccccagggggcccggaaaaannc

SEQ ID NO: 136678 - DNA, 497 bp, Arabidopsis thaliana
  unsure (1)..(497): unsure at all n locations
caattcaagaacgaaatcgaaatcttgaaatcactaaaacatccgaacctcgtgatcctctacggatgcacatcaagacacagcagagagcttctactagtctacgaatacatctcaaacggaactctagccgaacatctacacggcaaccgcgcagaagctcgtcctctctgctggtcaacccgattaaacatcgcaatcgaaaccgcaagcgcattatcattcctccacataaaaggaatcatacacagagacatcaagactactaacatactcttagacggtaacttaccaagtcaaagtcgccgattttcgggcttttcacgggtggtttccaatgggctcaaacccacattttcaaaccggaccccaacgggnaccccgggttacggggggcccaggggtttcccaatggttaccaattaaacggggaggagcgnttntnttcaannttngggngtngtaccttancgggnccttattntnattcaaaaaga

SEQ ID NO: 136679 - DNA, 532 bp, Arabidopsis thaliana
  unsure (1)..(532): unsure at all n locations
cgacgaagcagctcgctaccaaggcggcaaggaaatctgcaccgactaccggaggagtcaagaaacctcaccgtttccgtcctggaaccgtcgctcttcgtgagattcgtaaataccaaaagagcacagagttgttgaaccgtaaacttccattccaacgtcttgttcgtgaaatcgctcaagatttcaagacggatctgagattccaaagccatgcagtgttagctcttcaagaagctgcggaggcatatttggttggtttgtttgaagacacaaatctctgtgccattcatgcaaagagggttaccattatcgcctaaagatgttcaatttggcaagaagggttcgtgcagaccgtgcttagcaaattagaatttaatcccttcatatgaccggggttttttttttccataaggggttccgattgttttcgctttgcgcttttaacaaaatcattanggcacatcccctttgagagatggattgcttatganatnacccttttaaaanaaaannaaaaaaaaagggggtc

SEQ ID NO: 136680 - DNA, 575 bp, Arabidopsis thaliana
  unsure (1)..(575): unsure at all n locations
attttttaaaaactacttctttctagagacaacaacaggctaatcaagagactagatatatggccatggagctcgagcttgatgatgatgtcttctttgctgacataagcaagcaactcaatctcttaatcacagatgaagatgaacaaaaccctatttcactttcctcttctgtctctttccaggggttgttcagaggaaacgagccaaaccatcagcaacaccactatatggtggacaatggaggcaggtcaattacaacgtaattcgagagggcaaagggacaggagtgtttatccccaagatctttttcagccaaggaagggaaccataaatcatcatcctcatcaggaggngcaaaggggggattcatcgggttcctttatncccaagnaacaagtttcctcataatggccatgccaacaatntttcaaatnttaacaacaccacccnggangnttccctttatnnggnttttntncccagggggcctccanggtgnggatttttttcncttggcaanaagttttngnggatgggtttggctaattcaatntttaatggtttggntttgg

SEQ ID NO: 136681 - DNA, 530 bp, Arabidopsis thaliana
  unsure (1)..(530): unsure at all n locations
gctttcaaccacattgctagcaacattgacaagatctataagcaactaaccaagagtaatacgcacccactgggtgggactgcttatctaaacctagaaaatgaggatgatccgtttctacatggtataaagtatactacaatgcccccaacaaagcgatttcgtgacatgggaccagctcttctcgggggggaggaaaacagttgcggccttggcgttgctcttctccatacatagctatagggccttcacccttttttcatacttgatgaagtggatgctggcgcttgataatctaaacgtggcaaaagtggctaaaatccattcgtagcaaagccatggccaagccgnacgtggacaatcaggatgcaganggatgggaatgncttcccaaggattggnaatatccccccaagggangntcntattggcaaggcggaggcnctnggttggggntnnaaagccnccgganggggttgcccaggacantgcatttggcctnnggacaccaanaancggnttgggtnaaa

SEQ ID NO: 136682 - DNA, 454 bp, Arabidopsis thaliana
  unsure (1)..(454): unsure at all n locations
gaacntcaatccggggccttntcnctttttggaatncccncntgnngggntttacccttncggagnggggnttttacaggcattggaaaggtcactcgatgatccngaaccggaaagttcgagaaggaagctattnggtgcagacaggcttgggcgtcaatcacatccggaagtaacatattctgaagttgaattgagagattaacgaagccaagttatcttcttcaaagtaatattcttttttacatttgtgacatttgttagagagccagcgaatcagtgtcttgtgacacatttaacgcataccaaccaataccatctaacatttgtgatacagtgagtgacacttacactttagttgagtagtctttagaagagtttattggtcagcgaattttaaataattnnggaattcaaaccaaaattataggtgttattaggatcatttggtttt

SEQ ID NO: 136683 - DNA, 569 bp, Arabidopsis thaliana
  unsure (1)..(569): unsure at all n locations
tttagtgaggatagcttgcataacccaaccaaggaagtttatactcaagatattggggataaaacagaggagattgattcaaagctgagaaggtctaacgagactnttagagatggaaaccactatgatggccaaggagtacttaaccctgttgagaatcttactcagtggaaatccgctaaatccaaagggagaacaaagcagaaacagtctcaaaaggagaactctaacttcatcgcaggtcaagaaggaaaaagggattcctcttctttcggtacagaccctcagattgatgatataacactcagcgtcaaaccggaatgcagaattgaacccaagnaactngcggaaccaaggactnggccgttgatgcttggcctttcaacatgggttatcaaccatctgnggcntggtaggtgaattnnaacagcggccnctatgtatacctttacacccggggaactnaagttttccagttgntcnttaaanccgtttggngttaattatngcgggtggcccntttttttnggntttcaattggggggttttaannanttttgggtnaattt

SEQ ID NO: 136684 - DNA, 357 bp, Arabidopsis thaliana
  unsure (1)..(357): unsure at all n locations
gtactcnntttttntcaacnagttgtgttggtcctgcctgacatngttgcaccaccttngagaccagttggctttaagtaacaatcccttattggatgaaattgtcagaaaccactacccttcttttgctcaactccaatcactttgccacccaattttatctcattcattttgcaaaaaagatcaaagagagagagagagagagagagagaaagaaaaaaaggaaaaaaccttcctccgttacaacctcacaattgcaacaaagtttcatataaaagaggacagaaatttcgcaggttcctccgttgtctgaggatcttggagaaggaaggaaacaacaacaaccaaaaaaaaacc

SEQ ID NO: 136685 - DNA, 356 bp, Arabidopsis thaliana
  unsure (1)..(356): unsure at all n locations
taagaacatacttgcttccaactttcctgatggtgaagaaaaccacccacaaactctcttgtacaagantctctggctcgaaactgaagctgccttatgttccacaacttgcatggctcggtatcatcggntcaagaacgagattggtaatctcaaattgaacaataaagagatctctgcggatgcagtaagctttatgcaggaaccttctcttaacacacagaaatcggttcccatcatgaatgcaaatgcaggacaaggntacacctgaatcttttcatcaaaacatggaagcaattgtggggaaaatgcagcaacaatggggctcgtggcttccattccgnaaagtnctaggg

SEQ ID NO: 136686 - DNA, 240 bp, Arabidopsis thaliana
  unsure (1)..(240): unsure at all n locations
tacagctccccaccaccaccatactattcaccctctcctaaggtagaatacaagtntcccccaccaccgtatgtttacagttctcctccaccaccatactactcaccttcccctaaggttgactacaaatntcctccaccaccatatgtctacagttcaccaccaccaccatattattnaccttcccctaaggtagactacaagtgtccggcaccaccgtatgtttacagttttccacca

SEQ ID NO: 136687 - DNA, 579 bp, Arabidopsis thaliana
  unsure (1)..(579): unsure at all n locations
ggacattaatgctgtctcatccagaagtagaatggatttggtggatggatagtnatgctttgttcactgatatactgtttgaaatcccgttgcctcggtacgaaaatcataatctggtgatacacggttatccagacttgctgttcaaccaaaaatcatgggttgcattgaacacgggtatctttctnttgagaaattgtcagtggtcattggatttattagatgcttggnccccaatgggaccaaaagggaagatccgtgacgaaactgggaagatactgccacctatctgaaaggcaggccagcattttaggccgatgatcaatcggcgttgatatatcccttgctttcgcagcaaggaaaaatggnttagaggaaggtttatttggaggatcaatacttcttgcacgggttttggggaaggtttngttnacaggtttgaaggggttgnttgngnagtntcatccagggttggccgtganagatgncctttttacacatttttttagggtnaacccgtntgcagctttctgttccgagcggtagttnttaagggcattggggggntttnantttcng

SEQ ID NO: 136688 - DNA, 532 bp, Arabidopsis thaliana
  unsure (1)..(532): unsure at all n locations
caatcactctcacccacttccctcctctcgctggccgtctctcaacctcctcctccggccacgttttcctcacctgcaatnacgccggcgccgatttttttttcgcccaagcaaaatccatccacgtgagcnacgtgatcgccggaatcgacgttcccgatgtagtcaaagagtttttcacctacgacagagctgtgagctacgagggacataacagaccaatcctcgccgttcaagtgacggaactgaacgacggcgttttcatcggatgctccgttaaccacgccggtgactgacggaacctccgctgtggcaatttcattaaacaccttccgcggagggttcttgtggggctgagaatgtgacacgtcagcctgattttacgcgggagtctgtgctaatctcaccggctgtgctcaaagtccctcaaggtggtccaaaggtgacattttacggaaacgggncgtttacggtgaacggntnttcagttncaattggggatnggttnnanagnnttnaaanttttgngnac

SEQ ID NO: 136689 - DNA, 403 bp, Arabidopsis thaliana
  unsure (1)..(403): unsure at all n locations
acaacaaatcttaaacgttttactttgtgctgcactactcaacctcaatggccgcctcaacaatggctctctcctcccctgccttcgccggtaaggccgtcaagctttcccccgcggcatctgaagtccttggaagcggtcgtgtgacaatnaggaagactgttgccaagccaaagggcccatcaggcagcccatggtacggatctgaccgtgtcaagtacttgggtccattctctggcgaatcaaccgagctaccttancggagagtttcccggagactcacggatgggacaaccgccgggcctttcaagttgacccccgggacaatttgcaaggaaaccgttgaacttngangtttatccancaancagtttgggncattgnttnggagcccttnaggatt

SEQ ID NO: 136690 - DNA, 427 bp, Arabidopsis thaliana
  unsure (1)..(427): unsure at all n locations
ttggaacatcgtataaggcggtgttagaggaaggtaccacggttgttgttaagcggcttaaagatgtaatggcgtctaagaaagagttcgaaacacaaatggaagttgttggtaaaatcaaacatccaaatgttattccattaagagcttattactactctaaagatgagaaacttctcgttttcgatttcatgcctaccggaagcttatctgctcttntccacgggagccgtggatcagggcgaactccgttagattgggataaccgtatganaatagcggtaacttgcagcgagaggtttggcgcatctttcacggtttcaagccaaatttggtacatnggaaccatttaaggctttcaaaacaatccctcctttcaacccaaacccaaggacaatttgggtctctaatttttggggcctaaatt

SEQ ID NO: 136691 - DNA, 454 bp, Arabidopsis thaliana
  unsure (1)..(454): unsure at all n locations
aantcggtgaaaatnaacgtgtcgtggctaaagacagcggtaacggaactggcggaggcggtggagtatttcgggcagtacgacacgncgaaggtggagaaagaggtgtgcnagaaanatctgacggcgaaaaagggggagatggaggagatgacggcggactggtgaagagggagaaggaaatcaaagantgcagagagaaggtnacggtggtcgcagggaggctagggcagctggagatgaaaggttcgaaattnaacaagaatctcgacctcttccagtccaaagtccacaaattccaaggngaagcccgtccttctccacctttagctccgtctccaaattttttcccgttttggttctcatttatttcaattattttccttatttgaccatgnaatgtttatnaatttaaanggttttggggccattagtgtaatttttttaaaangtt

SEQ ID NO: 136692 - DNA, 389 bp, Arabidopsis thaliana
  unsure (1)..(389): unsure at all n locations
agtatctgtatatatatatgcctttcgctctactcatgtgttctgcttctnataacatcaatccgtagcggagatctctactgtccgcgtggagttaacccatgctgaactgacttggtgttgcattgcaataccccgaatgcaaatncctatgactccttgtaagtttcattccctgttcagtgtgtcttgcctcaagtgtcaccattttnatgtgatgtgaatgtgtgatgaatgcaggatgcaacnttgcctcattgtatgctgatgatttgattgccactcttgacaaatgcanaaacgnacgcngctttgtcctgtgtcagcatactaagctttttnttnncctttccggngcgttctatttttccgntcccaggtntacaana

SEQ ID NO: 136693 - DNA, 502 bp, Arabidopsis thaliana
  unsure (1)..(502): unsure at all n locations
ccttttatagcttgtcatagttgctttgagctgctttacttgcctaagaagaagcttttgtctcaggaaaggttacataagctgcagtgcggtgcttgtcctgaagttattagtttcacaatcgttgataggaaactcgttttctcttctggtaatgaggaaacaaaaccggtctctctagaggttgaagatagaaacacaacaaacacagtagtgatagagggaggaagtctctcctgttggatttcaacagctcaggtagagatattccacgtaaggatgaagaagaaccagtgcaagaactgngaaatcatcaggatactattactacgcaaaggtcccgctctgaatctcancactcagatgatnaaggnaagatcgagcaattcttagtgancaccaccagaaggnaggtcaaatctttttngtccgggcgnagggtaaaagggtcaaaaaggaccttaaccccggtnntnctnnntanttnccagtttccttnnac

SEQ ID NO: 136694 - DNA, 432 bp, Arabidopsis thaliana
  unsure (1)..(432): unsure at all n locations
aatggagtgtcttaggccccaccggtcctggtctcctttgtatcaccggcgttcttggctccgcctcttntccgccgtaaacnccttcctatggctcggaagctggctctgctcgatccggacaagcggaaactcattctcatggagcaccacttgggtagcgacgttcctctcaagaatccagaacgagatgtctcctcttttgcaatgcagctcaattatgaaagaacaacttataaatcctcactgggaaagctgtggttcgatgaggctggatcaaaactggactttcaggaggatgatgatgatgctttcacaaaatctttggtggtgcttttaaagaacctcggggtcttgcaatgagggagtttggcttttccctaggcncgtttttttcgaacagggagtttggnggnggnttttnttngngag

SEQ ID NO: 136695 - DNA, 335 bp, Arabidopsis thaliana
  unsure (1)..(335): unsure at all n locations
agggaccgggcctggaattcccagggtnaacccactgcgtccggccgcattttggttctgcaaatgtgtggagcttatggattggaacaaaaggtttganattgccacggatatagcaaaaggcatcgagtttnttcaccattgttgtnatccaattataatccatggagatattaaacctagtaacatccttctcgattctaatttcaaagccaaaatcggagatttcggtctcgcgagagtaaagtcggaggatttcgatactaggattctaattgnggaagaagataagagcaaggatgttgttgangntaaatgggtcgattcttgaggng

SEQ ID NO: 136696 - DNA, 293 bp, Arabidopsis thaliana
tgttacggaccaagaaaggtggaacaccagtgaatacaaatgcggctgaaaaaattgtgagtatgttatagtttggaagttgtgacagtttggtttgtgatgattgttaggttagtgatggtttgttaaattggataggttagtgatggaacataaattggactggtttgtgatggttttgaaatgaatgtgataggcaataggttagccagtgattgtgtggactggtttgtgattgtgtgtgatggtttgcagaaaaaggcagctgagattgttagcagtggtccgtaaca

SEQ ID NO: 136697 - DNA, 476 bp, Arabidopsis thaliana
  unsure (1)..(476): unsure at all n locations
aaagaagagccaagtcgaaacgatggagtttgaggttaagaagttatttgaaaccgtgaatggaatccacgatgagatgttctatctccgcgacagggaagaagaaatgcacaatctgaacatagcgacaaattcgaagatggcatggttgagtttcgtgtcgcttgcagtttgtttatcggtcgcaggtcttcagttttggcacttgaagactttcttccagaaaaagaagcttatctgaaaacccattaaccatcttcctgaggggcagagatttgtatttgaaaaccccatggctataggctttatatacaactactcgacctcactttttcattttgttactgaatttttcgggaacaggctttttttcctgtctgctatggtatgaacttctcattnaccctgcaaacttcaattccaatccatgtaaccaaccaattaaaggtttccttatctcacanctcttttaaagg

SEQ ID NO: 136698 - DNA, 461 bp, Arabidopsis thaliana
  unsure (1)..(461): unsure at all n locations
ttggaatctatgatggccatggcgggcctgagacgtcgcgatttgttaatgatcacctttttcagcatctaaagagatttcctgcagagcaggcctctatgtcggtggatgtaattaaaaaggcgtatgaggcgacagaagaaggtttttnaggggttgtgacaaagcagtggccaactaagccacagattgcagcggttgggtcttcctgcttggtgggtgttatatncggagggatgctttacatagctaatnttggggattcccgtgcagttcttggaaggnctatgaaggcgacaggtgaggttattgcccttcaanctctctgctgaacataatgtgnagtatagagtctgttagacaggagatgcacttccttgcancccagatgacctcggcatattgncaatgttnaangcccaattntntggcgttgttaaaggncccttnattcaagatat

SEQ ID NO: 136699 - DNA, 547 bp, Arabidopsis thaliana
  unsure (1)..(547): unsure at all n locations
aagtggtaggaagaatagcagcttcggcgagtcagacggtgcacaagacttgctcacacatgcttggaggctttggactaacaaaaaagcattagacctcgtggatccacttatagcagagaattgccagaatagtgaagtggttcgatgcatccatatcggtcttttatgtgttcaagaagatcctgcaaagcgtccggcaatatcaaccgttttcatgatgctcactagtaatactgtgaccttaccagtgcctcggcaaccagggtttttcattcaatgtagagccgtaaaggacccgcttgattcagatcaagtctaccacggccaagtcttttccagcggtctattgatgatgcaatcgatcacaggatttatatccgcgctaaatatgaccttaaaccttcatgcttggaatcaggttacggaaatgtttacataatttgtaggattgtgggtgtggcaaccctataaatttttaaggtttaaatttgggtgtaaacccatgggttggttgctttggtttttaaaaatggtaanttggctt

SEQ ID NO: 136700 - DNA, 531 bp, Arabidopsis thaliana
  unsure (1)..(531): unsure at all n locations
aaagcatctaacttacaattaaagacaatccatggcgatcagaatccctcgtgtgctgcaatcatcgaagcagattctccgacaagccaaactgttgtcatcatcttcttcttctagctctcttgatgttcccaaaggctacttagcggtttacgtaggagaacaaaatatgaagagatttgtagttccggtttcgtacttggaccagccttcatttcaagatctattaagaaaggcagaggaagagtttggatttgatcatccaatgggtggcctcacaatcccttgcagtgaagaaatttttatggatcttgcttctcgcttcaactgatcatgactcactcggtaaccttactttttggcaattgattttgggaccattttgttttcccaattaaggtttcctccaaggggttgggatgccctttgaaccagatctntcccttgaaaggggaccaggggctttgtaccactctttttcccnaacttcaagggggttgggctcaaacctattaaaaccntcattttggc

SEQ ID NO: 136701 - DNA, 503 bp, Arabidopsis thaliana
  unsure (1)..(503): unsure at all n locations
atgactcaaccaccaccatatcctcctccaggcgttaactaccctactccagctgggaatttaccaaattaccctcctccggttgggaatatacctaactacccttctccaccgtatggtgccgggagacagtagtggcagcagcttctatggccctccaccgccgaatgctattttgccgtacttcccttactactttagaaaacctcctcaccaaacggatcaaacgtcctcgtctttcacacgtggcggttccagggaaatgggccggtgagggatcgtagccgtggcaaatctttgtggttgttggagttctcgggtaacatttctggtttcataactttaattaaactacggaaactcttgtttgggggggttttttttgtggggtaaatgtatgaaagggtattttcgaaatcctttaggattatcctgagggggnctttttgcagaaaaaattgttggtttcctaaaaccnttttcgtgggtttnttggttttttt

SEQ ID NO: 136702 - DNA, 413 bp, Arabidopsis thaliana
  unsure (1)..(413): unsure at all n locations
cttcgactaaatattataatttagcttctttttttttctaattctcgtctcggttttcctagtaatggcgacgattaatgtttacgtttttccatttatctttcttttgactatnagtgttggttcaattgaaggccgaaaactcaccaaattcaccgtaacgacgtctgaggaaatcagagctggtggctctgtattgtcgtcgtcacctccgactgagccacttgagtcgccgccgagccacggggttgatacccttcagaccctacggaacctggtcatagccccggtattggacattcccggacataaattaaccggggagggaccaatagcantcgccnatgggnattacatgttgaaaatatnntttggccctgggggnntttttttttccnaanangcntttccgg

SEQ ID NO: 136703 - DNA, 507 bp, Arabidopsis thaliana
  unsure (1)..(507): unsure at all n locations
aattccaaccctcattttaatggatttctcaaaaaaaaaagcccaaaaatattgaaaactgaaaacgaaaccggagaatcggctgtctccataaccaaaccggaaaatcaaaacctaaaccggttttctccaaagtagaaaccaaaaaaaaaaacgaaaccaatgtacacacagcaaatcactaattcagaaactaagaactctgtttcaaacttttcataaatacctatttacacacttttaaatccatttcttagaatcttttatcgggccgtacacatgatcatcatcttcaaactcgggtactccgngcatcgcaaggttcaaggtggcatttccatcccggggtttgggntggtggcaattggggataaggggccatccctacccggaaactatttgtaggtttcccgcctggaatggggttccggggccaaaccctttttcggctttccaggttggggcattcccttcccacccgggggtttgggggccccccttgntnnc

SEQ ID NO: 136704 - DNA, 501 bp, Arabidopsis thaliana
  unsure (1)..(501): unsure at all n locations
gaagacgatccatcagctttcttctttcttttcatgcttcgagccgctggttttctcctcccgtgttacatcatggcttgggctattagtatattacaacgtcgaagcacaagacaggaagctgctgctctagctgcggcagaagtagcgtttatgttacatagcggtgggggcgggggaggacaacgcagaggaggtttgcactttgctgtaccaccagagcttatatctaatccacaccaccaacctgaagcttcaccgcagtgattatatattcccgtcaccggtaagagaaatcaatcatcatctacggcgtttggtttctctctatcgtctcacttctctctctcgtgtagtagcttgtgtggtttgtttgtgtcccggcctttgttcttttaccaaacacacaaaactgggggttttacaaacacggcaagtttctttggctataccttttnacaggcgggaaagnaaggttttnncctttnggtttnggntnac

SEQ ID NO: 136705 - DNA, 394 bp, Arabidopsis thaliana
  unsure (1)..(394): unsure at all n locations
tccacctttggaacttccaccgtttctaaagaagccatgtccacctaaatacagtcctcctgtggaggttccacccccggtaccagtttacnagccgccgccaaagaaaganattccccctccggttccggtttacgatccaccgcctaagaaagaggttccaccacctgtcccagtttacaagccaccaccaaagggatgcttccaccgcntattcctaagangcnttgtccacctaaaccgccgaagatagagcacccacctccggttccggttttaaagcccccgccaaagatagagcacccacctccggttccggtttanaagcccccgccaaagatagagcacccacctccngttccggtacacaagccaccgaagaagncatgtccgc

SEQ ID NO: 136706 - DNA, 548 bp, Arabidopsis thaliana
  unsure (1)..(548): unsure at all n locations
ctctctgaaccatagaactccaagcttgtactgtactctactaatacgtcgtcgtttatatcttactcttttgtttcctcttaccagaaaaaataaataaacagcaatattttcaattttcgactcaaatcatgcaaaccatttcgcctgcgttctcgtgcgatctcaaatccgtaattcaaccgaatctaacggctaagaacgcgcgttactcgcacgtaaatggaaagcgcgtgtctgttcgttgcagttacaggtctgagtcgtttagcttccctaacggtgttggctcaagccgagccgattggcaaagctcatgcgccatcttagccagtaaagtagtttcggctgagaattcaagctccgtcgccgtcgttaacggacacagtaacgggtccgttgatttaagccttgttcccgtcaaagtcgcagcacaacggaagcctgggtttgtttcagccgtaacggtaacagtntntttcccgggcgtttatggtntactttcgngncggnntaagngttncggggggnctncgagggcccggatt

SEQ ID NO: 136707 - DNA, 455 bp, Arabidopsis thaliana
  unsure (1)..(455): unsure at all n locations
tccctttcgaaaatcgaaacaaatcggtgcgattacnccgttttnaatttnaccggcgacgatggctttnaacaatccgcgaagaacacggagatatctcgctttaggtttagccgatgaaccaatcgccgtaccagaaaccgtttacgctcaagtccgtnagaaaaaccgtcaaagcttggtttgtcgagttcttagccctagaagacaagatctctactctgtgatcgataacnccgtcttgagtggtgtctcggaggatatgaatgtnatggacgcattatcggcggcgggaagtgtcagttcgtgtttgagaaagagccggggttttagaaatgggtcttttggtcttggtcccttacacggttgtaatgggatggctcccgttgtgttgcagaaatgggaagatnagcaagttccngagnttttaaagtccggtgccnatntggtttaaa

SEQ ID NO: 136708 - DNA, 490 bp, Arabidopsis thaliana
  unsure (1)..(490): unsure at all n locations
ttcttcctttagtcaaatcagctttagagacttctcaagttacncctgaagaaatcgactgtatttgttatacgaaaggtcccgggatgggagcgccgttgcaggtttcagccattgttgttagagtattgtcacagctttggaaaaagccaattgttgctgtgaatcattgtgtggctcacattgagatggggagagtagttactggagctgatgatcctgttgtgttgtatgtnagtggtggtaacactcaggtgattgcttatagtgaaggtaggtaccggatttttggtgagactattgatattgctgttggtaattgtttggatcggttttctaagagtcttgaagctttctaaatgatcccagcccccgggtataaacattgaccagctttcttaggaaagggggaaaacttttattganctncccgaatccctgttcaaaaggnttgggatgatccgttcaacgggattnttgngttatntcg

SEQ ID NO: 136709 - DNA, 460 bp, Arabidopsis thaliana
  unsure (1)..(460): unsure at all n locations
ttcccccaagcttttattccggcccccctttggggnaaancttgttncccctttcagggttcccnggtccgggaattccccngggtcggncccnacggngtcccgcacnancaccttggttggggacccttttagcgttcgggatcccgttgtgcttcttaccggggtgcctggaatttgtttccagcatatctggaagtttttccgaggatttataaggtaaggtatattatttgggtaaggcccataggaaatcccagtgatgcaatttcaggggatgagttcaggaactcaaagcacaatgaagcattggtattggcttctgtatgtgtgcagatactgttgatttcactttttgtaatctccgtactaaatctttgcagatgatgaaacaacaaaaacaaggaaaaaaaaaccctctgttggttttaactaaacaaccttttgaccggcttgaaac

SEQ ID NO: 136710 - DNA, 351 bp, Arabidopsis thaliana
  unsure (1)..(351): unsure at all n locations
ctttnggttcaacggaactnctggcgtctggagaatctcagcattgaatgagtccgggggatggaatgaccagacaacagtagaagacatggatttagctgtacgagctacactgagaggctggaagtttctatatatcgatgatctcaaggtaaaaagtgagttaccttgttccttcaaagctctgcgtagcagcagcatcgatggacttgcggccctgccaatcttttaagggaaatggctggacaaataataagaggcgagaatgtatctctntggaagaggtggtatatgttgtacagcttctnctttcaatgcgcaagatcgtggggtcanattcctaaaattctg

SEQ ID NO: 136711 - DNA, 323 bp, Arabidopsis thaliana
cgacatgcacctcctgttgccctccctgactcctccaaccgtaggatgccccagcccaattcttaatactatttagactcgtttcgtctctagttagtactgtgttgtgctcagctcctactctattagttaatgtttgtttgggacaccaagtccttccaaccatgagtgctagtaggctggccattttggtttttgtttagattcggtttggttcagttttaataaatctctggctgaactctaaccgaagttatttcgcttttggtttggttttactttggttcggtttccatttggttaggtttgttttagtttgttcc

SEQ ID NO: 136712 - DNA, 335 bp, Arabidopsis thaliana
  unsure (1)..(335): unsure at all n locations
gagggaaaacagttccaaggaagaaaggtngggattttgattgctgtcattggtggagctgttcttgtnctggtgttttttgtattagttatcctcctcctgttatgcacaaaccgctgctctagctgttgtncaagagaaaagtcagtgccgcaaactcggcttaaggttgtgacagataactcacacaccagtctctcctctgaggttcttgctagtgcaaggttaatctctcaaacagcaaagctaggtgcacagggtgtgccctctatgccggtccttttcttttgaagattttaaatggaagccacagncgntttttannttcatcacgg

SEQ ID NO: 136713 - DNA, 435 bp, Arabidopsis thaliana
  unsure (1)..(435): unsure at all n locations
agatcaaacagattccacggtcccatttntnctcctgaggtctctntttcatttacggcactgcggataattnanatttcccgtaacagcttcaacgggagcctaccgcaaaantactttncnaattggagtgcacctttggttaataccccacaaggatatcgttggccagagtacacaggagatgaacactctaaatatgagaccccgctttggtcttatccttccattcatttgagaataaaaggacgaagcatagagttgggaaagattccagatacatacacgtcgatagatttntnaggaaatagttttgaaggacagattccagaatcaataggtgatttgaaatcgttgnttgtcctggncttatnttaacaacctttttaactggtcggtnttcccatngggggttggccaanctttaaanaanct

SEQ ID NO: 136714 - DNA, 431 bp, Arabidopsis thaliana
  unsure (1)..(431): unsure at all n locations
agaagctgaagagaatgctgagacttctgacaatgagactcttggagcttggaagagtaaagtgggtaagtcaatctcgaggacagcaatataggtttcccgtatgccgtaatgtagaagaaattccggtgattgtcctcaaaaattggtggtctctggattnctgtggtgtatatgtggtaaaaatgtgagacttgtagggttagtgatacatacttgtcctaaccaccatgttggaaagaataataggcagaaagaagctcctccagaagcttttttggtcatgtattgtagcctctgtgtgtgtttatttgtaggnntgttttacgtttttcctnttnctgtantatttacancttatatncctttaccccaaggactattctnttgttgaacttaacctctttcccaantnttttttttaaccaanc

SEQ ID NO: 136715 - DNA, 442 bp, Arabidopsis thaliana
  unsure (1)..(442): unsure at all n locations
gcaaggtgctgtttgtggtgcgtgtggcgacaactatggaggagatgagttctggatatgttgtgatgcttgcaagaaatggttccatgggaaatncgtgaagatcacaccagcaaaggctgagcatatcaaacattacaaatgcccaagttgcactaccagcaagaaaatgaaagcctgaaagtgataataacattagagcctgtgaaagaggaaaacgttttcacagtttaagaagacagtacaagagtttagctgtgggaagangaagnaacaaaaggcttctgattgcntagttttaaatgggnttgngacagcttaccagttagtaatgtccccttccncttncctttnctnntttttttgctgttaatgttaaaatgttantgnctaatttgtcttaaggttctggggaaattcctgnccttttaagcccncnctt

SEQ ID NO: 136716 - DNA, 566 bp, Arabidopsis thaliana
  unsure (1)..(566): unsure at all n locations
acaaaccnngaacagccagggncnaaacaaaatccgccgnantgatantnggtngtnaaccanggccanagggtaaaaccagnggaagaaaacgggtttccagcaagaattaaaaagaagacgtgtggccttgattccttggaaagggatttaaaggaaggaacctctcccgcaaaaaaagaagctaaagatcagaattaagagcggtggaaatgttaagaaagatagtaaaaacaaaaccaagagaacttagaaagtagcagtgtgggtaaaaagaaggccgaggtagagaatactccggtgaaaagagcccccgggagaccgcagaagaaaacagcagaggcaactgcatctgcctcaggaaaacggggtagggatacaggaagcacggggaaggacaataaacagccaaagataagaatcagaaaatggccattcaaaacatgtttgcccctttagtggcatttcttaagggctcaagttattgtatatgcttttggggtttttttttttttaaaccttaattcttaactttggacgccccattctcatagttatggattaga

SEQ ID NO: 136717 - DNA, 687 bp, Arabidopsis thaliana
  unsure (1)..(687): unsure at all n locations
aaaaaatgaaactccgttatatataatatatgttgaaacggtgattaactagttaataaattttgtgggactagttcgtaaattacatttttattatgtaacatgaattacaattatccattaatgtagtatattcaaccgaatgagtcaacgaccccaactttcatcctcggagtttcccaaccgctaccagcctaacgtcatcgatcaccggaccacatagcgagccagagtgatcgcttttcatgtggtaaaacgtgctcaagaaagtgacacgtgtcctggccgacactgccttgaacacaagcctcccacgtctaaacccgccttttcctttagaagcgtagtccaccatgaccttggcctcgtccagcgaacgcttccacaatcattggtccctcacaaccgtctctggcgtctcccacgtcggaacgtgagggcgtagaatttgttcagtgacgtcctcacttatcttgaggaaatggngctctctttggctccaaacaagctcgatggttcggtggtccttccggggaaagagaagntgtgctttnggcttacngtactttaacgggtttggggagattcgttcaatccaaccgggnaatngnttnttnccgcctcgatggacnggnggattcanncactccccanttgggngnggaaaaangtaagtcncctccgnat

SEQ ID NO: 136718 - DNA, 616 bp, Arabidopsis thaliana
  unsure (1)..(616): unsure at all n locations
gncngnggnnnngggatcaataattccattatttatacattagataccaacataaagcaaaatcaacacacactgaaacaatgaaatcaacacaaaaacaaacacaaacacaaacaacatgattacatctgcacacaagatgtaacctcaaaacacaataggaatcaaacttatacaagtttaggatttaggcctcttgccttccttgtcttccccacaaacagatccttagacttgatcaaaccagggaggcaaccaacaactgtcacaaacggaaactgagccaccgagtcctttcttcctaaagatacaatggccaactctggaccgggcttgtaagtcgacatcttcttctttttcccacctgacatcattacctttatgttcttcacaacgacattagcatgagtctctgctatatatcctngnntcatctcagggatattagtgatatctccaacagngaatacatggttcgacctctaatccgaaagtctcatcgaccatgatcttccctttaccatccaagtttctttcagacaagtcccatgggcccatgggaagnaangttccccacaagnggagggattntggggtttggttctccccgaggcgg

SEQ ID NO: 136719 - DNA, 673 bp, Arabidopsis thaliana
  unsure (1)..(673): unsure at all n locations
ccagattcagtnttgatncctctttagccggtgcaatcatnnggaaaggcggagtcagttcaaagcagatatntcgtcagcgggagtaaaattatcaattcaagatcacgagagagacccaaacttgaagaacattgtgcttganggaacacttgagcagataagcgaagtgatncaatggtaaaagatttgattgggaggcttaattcagcagctaagaaaccacctggtggtggtcttggtggtggtggtggcatgggttctgaagggaaaccacatccagggagcaacttcaagactaagatatgtgagagattctcaaaaggaaacctgtaccatttcggtgatagatgtccactttgctcatcggggaagcagagctacgcaagtccaggaatcgtctaggtgttgcttgcaagatagggaattttcctggtaaaacctaggttcttatttagggggtggtgatatctgagatcatcttcacctactttgtttttgtttgttatgagagaatacaattttagtttcattatcattgtaagnctatttngtgtttttttnaaaagtttagnttttgggttaatnctgngtatgantttagatnggaggaagctttnangggaattntttncaaaccncngaaccagtggtaaggatntntgccgccttt

SEQ ID NO: 136720 - DNA, 457 bp, Arabidopsis thaliana
  unsure (1)..(457): unsure at all n locations
ataaatctaatggatgcttctccagcaccaatggagataacaacaacgacggcttctaatgttgtggatcacggcggaggaacggagacgacgcgtggtgggaagagtgttgatgagatttggagagagatggtatcaggagaaggtaaagggatgaaggaagagacgtcggaagagataataacgttagaggattttttagcgaaactgcggtggaagacgaaacaccggtgacggcgtcggcggaggatttggatgtaaagattccggtgacgaattacggattcgttccattctgcaccnccgcataatccgtttccaaatggattgataaaagtggaaggtccaatagttgccgttttgggaatggttttaaaatgttttccggggggggggcctctagggggaagagaccccgattaatntttaaccccttggtaaagcncttcacanngcc

SEQ ID NO: 136721 - DNA, 427 bp, Arabidopsis thaliana
  unsure (1)..(427): unsure at all n locations
agggaccnggccnggaatnccngggnagcccacgcgtccgggagaaagagaagggagtnaagcgcaaaagaactcctaagaaaagttcacctgcagctggaagttcatcttcaaaacgatcagcaaagagccaaaaaaagaccgaggaagcaacaaggactaacaaaaagagtgtagctcattctgatgatgagtctgaggaagagaaagaggacgacgaagaagaagagaaagagcaggaggtttaggaggaagaggaggagaatnaaaatgggattcctgataaatcttaggacgaggctcctcagctttctgaaagtgangggagaatttttgantcccgtggaggagtcagangggatggaanctnaaaaaggangaaaccgtgggttctnaggncatcatntttttnngaaaaggattcncc

SEQ ID NO: 136722 - DNA, 539 bp, Arabidopsis thaliana
  unsure (1)..(539): unsure at all n locations
tggttggagattgancggaaaccccngtttnnttcgggctntcngcatcccatttcagtggtggcaatggactcaggngngcatgcgntgcgaacagacccgatcaggaccgntncatacttaccccngtacccgtctaaaatgaaagtgcttgagaaagtgttaagaggtatgaaaacacctgtcacttatctaaacatcacgagattaacggactacaggaaggacggtcacccgtcagtataccggaaacagagcttatcggaaaaagagaaaaagtcgccattgctgtaccaagactgcagccattggtgcctccccggggttccagactcttggaatgaaatcctctacgctgagctgatcgtcaaactcaatcagctcagccaaacacaacgaaaaacttaaggttcttccacccccaatacttgtttgatctcaacacttttactttctattttgatggtaattgttggttataggatgtgtagggtaaaaaagganggtgggntatanttggttcactcggtnncctttgt

SEQ ID NO: 136723 - DNA, 869 bp, Arabidopsis thaliana
  unsure (1)..(869): unsure at all n locations
nnnnnnnnnnnnnnnnnnnnnncataaaagggatgcatgtgtattcaacaaatacgtgtgacaaaacaatttcaaccaactggaataaacttttcaacttttttttgtttgtttttgttaaagaacaaaaaaaggaaaggagaaggatcaagaaatatctctctccaaaccccaaatcgaaaaagtataaaaaaattggactctttgtaatcgacttatgttctcttttcactgcacataaaaaaaaaaaaggtttttcatttggaacccctgtgagctgatggcttggattgagttgaatttgctgctgatgacattactcgtaagcgaccagctatctctgtgaaaaatggtcttgccattgggtttggtgcccaacattcctccattagtgttctccattcatcgtcacagaagcctggtatggttggtctcagtgtgttgttcactatcccacctattattgccccatagtgcatattggcatatggttcctctccggttaaaatctcccacagaacgataccgaaagagaaaacatcaaccttttcagaaactttgctactgctcccgtttaaaactctggtgccatccacggtaaggttccacgtacaccaccagataccaacgtatttctcttgatttttgacaaagccaaatcaccaaccttgcagattgggcgaaaaggatctttcntttcacanttaaattgtccatttcaaatcaaantgaacagtgttttggantgtaaatatcccnccaaatgcncctccatggaatnatatctcttacaananaaaaaactgtcttccggacaaaaatnctcaaaaaacancaccttttttcttcacntcccangtcctccnncc

SEQ ID NO: 136724 - DNA, 631 bp, Arabidopsis thaliana
  unsure (1)..(631): unsure at all n locations
ctttttttagtggcagccaaaataatgacaagaatttatattacaaacgcaccggttaggttcagtcacactaatcacataaccattttaaaagcaaaacattcgacacccaaaaggcccaaagcctctatctctagttctctacacaacacaatcctcctaattggttttgttcctgactgtacaaaagcagagctccaagaaaaataaaatttctagagctgcagcctaggttcatgatttgttttacacacacagctaagagaaaaaaaagcttcagtttgttagcccaaaaaatgacatgccggcaattatcagaaaccaacccactgtttctgtaagttccttaaagccgcaccattcccgcagaaaaaggagaaggcgggaccgagttatttcacatttctggtgntcccttcggnaactctttactatcaacaccttttcttcaggaccttcagntctcaaccaaaattcagggagggtttaatatcnccaaggnggncagnttgccaaaggggtggcnccncgggggcatatctgnattttggctggcggggcccccgggtggaactttaggaacgggccaggatcnanggatggcnttccttcccaaatncctcncccgggc

SEQ ID NO: 136725 - DNA, 626 bp, Arabidopsis thaliana
  unsure (1)..(626): unsure at all n locations
angnanctttagancntacctttggcccgancccttncaaacccaagnttcacccacttccnggccaaatccccaaacagcgcgcggggggaaatgttaaggccccctgacccttggaaggcccccctggggagggatttacccaaaccggacttgggtctggcggtctgttgggctgaagtccggcccacccggccggaagatacccggtgggaattaccaccctggatattcnccaaatacccttgggaattccccccattttaggccgagggctgctgctttagccggaggttggcaatattggtatctccagaatatccattccatgctttcctttattccactttggagggtcccgtggtgatttgtgaagatgattttcctcctttcgcccactgagaatccttgcaggtttaatgtgttcacaagctaggctggccagttagtgctatggctttctgacagtgcttgttttgtaagacaatctccaatgtatagctctatatcttactctaaaatagagttgctttctctccaatgtatatttctattttctagtctaaaaaagaatatttttagaaatattctatttctatttatatactaataccttttaattatat

SEQ ID NO: 136726 - DNA, 508 bp, Arabidopsis thaliana
  unsure (1)..(508): unsure at all n locations
ggnccccgccggaatcccngggtnnccccaggncccnggaaaatccgggtttgggcccccgggggcgtacaaaggcccgggaaaggccaaaggtcggatccacggctaggagccgatgccgaaatccaggcatcctaaggtcggaaactgaaccaggaaccagtcaaatctctcacatttttccagctcaaggacgcaatgtccacccgagatccattgtagcccttgtatgcgggtttgttgtttttctacaggtccaattctctgatgcatcagactttggagacaggtcttgaagctaattttgttgagagtttataatagagtgagatcatgtaaagagtagcctctgatgtttttcctacttgttgggttcgaattttcctttatctttgtacacattatacttacgggtttggtgtatacttaggacagaatgccaaaaaacataacaaagaatcttcctttgtgcctctaatcatttaattggtcatttatataaaaaaac

SEQ ID NO: 136727 - DNA, 360 bp, Arabidopsis thaliana
  unsure (1)..(360): unsure at all n locations
agactttaaaatgtctctctatcactctcttagcatttncctcctcctatctctctgccatggctctnacagtcttcaaccacgtcgagttcctcatctagacgggattctcccaaatggaaacttcgagataacccctctnaaatnaaacatgaagggtcgacaaataatcggggctaactctcttcctcattgggaaatcgccgggcacgtggagctagtctccggtggacctcagcctggaggattctatttccccgttccacgggggagtccacgcggttagactcgggaactttgggccaccatcttnttaagaaccgtgaagggttgaagagttgttttggacttacntctnnt

SEQ ID NO: 136728 - DNA, 539 bp, Arabidopsis thaliana
  unsure (1)..(539): unsure at all n locations
gagaatttctgcaaaagatactgccactgctgctcagactgtttcttcaagtggtaagatcgacgtaggagcaatcgcgagtgtacgggctgcaaatatctatggtctagatattcttgctgagaacatacaagatgatgttaacaatgtgactcgctttctgatacttgcgagagagcctatgattccaagaacagatcgaccatataagacaagtatcgtgttctcgctagaagaaggtcctggtgtgctgttcaaggccttggctgtttttcctttacgaagcattaacttatctaaggtaagttccaaggaaaagttgggatcctattatcagtaattcattnccaaaaataggaaatatatgacggtaactttttgctcttccttttagataggaaagtcgtccccagnggaaggagncccgttagggggttgtttgatgggtctaaccaatggagccgctaagtcctttttttttccttattctccattngtttttaagccncntggtntnanggcgnngnggtctttgccat

SEQ ID NO: 136729 - DNA, 408 bp, Arabidopsis thaliana
  unsure (1)..(408): unsure at all n locations
cccggagtgcgcacccacgcgtccgcaacaaagaaacatttccattgagtctctctcaatgttcttcttcttcttcttctaagattaattcaaagtgtttaatacttttaaaattttaagtttctttttggtcagtttcaaatgggtgacatcatcggtcacaaggataggcaaatatggccaccctctcatcatgttcttcaagatccattgtttgatcattccaacaaacatcagttgcagaaatatgtcaagaaccaccatcaccacggcaacggtgaatttggtcggcccggggcacctcctcttaggcaaacatttcctttgaactttaattcaaggcaaaagcacccaagcaattggcaaagggggtaanggggggggttcgtttnnangcattttttnttt

SEQ ID NO: 136730 - DNA, 329 bp, Arabidopsis thaliana
  unsure (1)..(329): unsure at all n locations
agatggtgaatgagaagaagatgctcccaaaacgcatcatactaatgcgtcacggtgagtcagccggtaacatcgacgcaggggcttacgcgaccacacccgatcacaagatccctctaacggaagaaggaagagcgcaacgcggtnaggccgggaagaaaatnagagccctcatatcaacccaaagcggcggtgcgtgtggagagaattggcgcgtgtacttctacgtgtcgccttacgagagaacgaggacgactttgaggngaagtaggaaaaggattctcgaggaagcgcgttataggagtnagggaagagtntaagnatcagng

SEQ ID NO: 136731 - DNA, 426 bp, Arabidopsis thaliana
  unsure (1)..(426): unsure at all n locations
ggaaaattccaagcttcgagattttnttatggntcgtggtcagattgttgataccttacaaggagaaatttctgtnatctgtcaagatgtgaagctgttgaaagaaaaatttgaaaaccgagtgcctttaaccaaatcgatctcctcaagcttcactagttcatgcggatcatctatgaaaagcttggtgctcgagaacccttctnagcgattgantggagtgactgaaacctcaaacaacaacaagttcccagaagcagcagctttcttcatgaacaaagagaaagatgattgtagagatcttcttgaagatggatgggncatcttttgtcaaggngaccgcacaagttgtttgggacctgaaggaatgaagtaattgtacatataggggaccttaatncttaaaaataaaatgggttggtttcc

SEQ ID NO: 136732 - DNA, 445 bp, Arabidopsis thaliana
  unsure (1)..(445): unsure at all n locations
tcgaagcaattggngggaagggagggaaacggtgggatgacggtgcgaatgataatgtagcaaaggtttacatacgaggtgatcatgaaggcattcagtacatcaaattcgactatgtcaaggatggacaatcgtttaatggatcagtccatggtgtttcagccgacggtttcacacagacgtttgagattgaccatctccagtatgaacaaattgtatctgttgagggttactacgactggaagaccggtgtgatgcaagcactccaattcaaaaccaacctcacagacttcagaatttatttggatttcacaaggggtactaatgttttcaccttggaggtcgatgggaacaatcatcgttggcttccatggatcctnctttggcgtactcccgatctctttggtgcatannnaaagnctccnncnaccaaaaaaaancccng

SEQ ID NO: 136733 - DNA, 448 bp, Arabidopsis thaliana
  unsure (1)..(448): unsure at all n locations
ctatctatctcttatcaggtaattcgaaagacatcaaaagcaagcaaaagatggctcaaaaggtggaagcacaaggaggtattggaggagatgtatgggatgatggtgctcacgacggcgttagaaaggtgcatgtagggcaaggccttgatggtgtttcgtttatcaatgtcgtgtacgagaatggttcacaggaagttgtaggaggtgaacatggaaagaagtcactaattggaatcgaaacgtttgaggttgatgcagacgactacatcgtagcagtgcaggtgacctacggcaaaatatttggctatgactccggcatcatcacatccataaccttcttttacattcagggggaaaaacccttggcccccctngggtttggttccccccaaaaaagttttttccnnanggaaaaaacgggnggaactttttgggtccntggcgg

SEQ ID NO: 136734 - DNA, 477 bp, Arabidopsis thaliana
  unsure (1)..(477): unsure at all n locations
gctcacttgggatggaattccgccgttggagagtttgtaccccggtgttcccgatgatctgttggcccatttttttgctgatccagttgccgaatcgaaaagtnctgttgcgaggattgggggcattgggatggagatcggcgaggaggtgaagagggagagagtggagaaggtggttaaagagctcatggacggagagaagggaaagaggttaagagagaaggtggtggagtggcggcgcttggcggaagaagcttcggcgccaccgttgggatcatcgtacgtgaattttgaaacggtggttaataaagtccttacatgtcacacgattagatcgaccctaattgggctttcccgattccaaactaggccctttagaaaaaggcctgtttgttttcccctatcaatttgggctggctttaatgacaattttaaaagatgtacttacaagttgcaataatctttagtgttcttctc

SEQ ID NO: 136735 - DNA, 469 bp, Arabidopsis thaliana
  unsure (1)..(469): unsure at all n locations
agaattacgtatggntggtctttttaaactgaaggaacatgcggtccagttaacaaaagagtttactgctctatatacaaacggaccagctggtggtggtggaattagtaccggacacaagatggaaattgtccttgaaaagcgtttggtcagccgtgaatctgtaatgtggaaaactggacttcagcacaccaacacttcagagccagagacctctgaacatcattctccagagaaaatgccaaagttacctaaggaaaatccaaagaaccttacaatgggaggctttcaatctgggtttccatcacttttcctgnttccttttgggccaaaagttcccccttttactcttgttggaanatnagccggggttgggggttaagggaccggccattaattttttcaaaaaatncccgantttttccccaaatgncccnggtttnaaacccaaaattnccccnnnatgggg

SEQ ID NO: 136736 - DNA, 469 bp, Arabidopsis thaliana
  unsure (1)..(469): unsure at all n locations
tttttttttttttttttttgataaagatttgtgatttcttgcatataaaggaggaaaatgagagttatataaacacatttcctttaagtatacctcttcccaaaatgcaaataaccccaaataaattcatgaatcaaatatgataataaccaattgtgaaaaaaatccttaggactctccaatgactttggtagcatcatgaggtgtgtcataaaacatccttagatcgagatttcttgacaccagcagtgaaccagagcttgtcagacttggggctctcggcctgagcattgttgggcctttaacccacaccaacactttngtgtccattcccttccacacccatcagcttccctctaagnaaaatcccttttnanangggtggcnatcttnttggtggtcccnnctttggatggggcttccncatggggaggggangnagncggngggttttttttngggcccaccg

SEQ ID NO: 136737 - DNA, 512 bp, Arabidopsis thaliana
  unsure (1)..(512): unsure at all n locations
cccaaatcttctagattcatattcaaatcaagaaatgactctcgctaagaaccaaaaatcatcattgtcacgactatacaagaaagtttcctcgaagagatcagaatcgtcaagaaaccttgaagacgaatcaagaacgagcagtaatagtagcggaagacgctcgttaaacgttaacgagctaaganccgtttttaactatatggatgcaaactcagacgggaaaatctccggtgaagagctacaaagctgcgttagtctcttaggcggcgcgttatcgtcacgtgaggtggaggaagtggtgaagacatcagacgttgacggagacgggtttatagattttnacggagtttttgaagcttatgggaagggggaagatggtagtgattgaaggaaagggcggaaggcagtttaaagaagcgctttgggatgttttgttatggagggggaaggagtttttnncggccggccgnntttncggaggnccgttnagtcncctcntngantcnntg

SEQ ID NO: 136738 - DNA, 594 bp, Arabidopsis thaliana
  unsure (1)..(594): unsure at all n locations
acttctttacttttgtgttttcacaatttgagaaacgaaatggagccaaagtttcatgcttttatgtttccatggtttgcttttggtcatatgattccatttctacatcttgcaaacaaactagctgaaaaaggtcaccgagttactttcttgctacctaagaaagcacaaaaacagttggaacatcacaacttgttcccagacagtattgtctttcaccctctcacagttcctcctgtcaatggcctccctgctggtgccgagacaacctcgggtatccccatctcgttggacaacctcttgtccaaagccttggatctcactcgcgatcaggttgaagctgcggttcgtgctttgaggcctgactttgatcttttttcgntttttgctcaatgggntttccaggatatgggtaaaaggaccatattgttcaaggngtgtgagttaacantcattgtattttngggnaacaattagntcaannnaaaatgtccccnggggggnaaaannngggtttttgnnccnccggggttttccggcaatcaaangggnttttccnggnaaaagggttttntatgcctttgggaacctttt

SEQ ID NO: 136739 - DNA, 452 bp, Arabidopsis thaliana
  unsure (1)..(452): unsure at all n locations
tacgattccttaagaatctccttctagcttatcttgtattaattttaagttttgtagggtttaggttgtttgattaagttagcaagtnagggattagttacgtnacgagatttctctccaaggaatctattactaaaaagatggagcaatctgaaattgtgattgcataatccactagtaaacgtcacaaagcaattgggcatgcccatggacgttnatggagctctagggcttctccgttttgggtatcttgctattggctctcatattccattgccttgcggacgggcgtcgctgcttttaacccgtttggaaccggccatgggtcctatatccccccgtattttgggtttaagntttatctagttaggattgtatttagccaatnaggacatcagattataaaagaacaccatctttngggnctgattaacattgntggntacttctgc

SEQ ID NO: 136740 - DNA, 435 bp, Arabidopsis thaliana
agacgaaagaaaaaaaaagaagcaaaacaaaatagagaaagagaaagaaagagaggatggtgataaagaaaatcgagctatgcatagagattacgaagataacaatggagttcttggtggtggtggctgacgccgtcacaatcttcttaaggcaatcttctccacctcctccggctctactccgccatggtctctactcatactctgcctcccctaatcctccttcttcccattacatcatcggctttcttccctaagtttgtaatcgtttcgttttaatgctttgtacatactatacatatgtatatcctggccttttttttttaaaaaggaatgcccctggatataaatttcttaattttcgaataaatcacctctcaccttactttctctatatgtatgtttatttttataaacaagaactagtttttagcc

SEQ ID NO: 136741 - DNA, 453 bp, Arabidopsis thaliana
gtgcaaatttgtcatattgagtaactatataatagtataaagttacagttcattataaatgaaaaagtacaaaaaacaatctgatttccattacaaaacaacaaagcccagataggcttatggtacacttgggaactctcactgcacattccccaaaaccgtgacaattgtccatcatatctcttgaaaagaacaaaacccgttttttagatgcgttataatctctgattctccttgcatatagtgtgacaagtttcccatatatgtagaattgtatgatcgacttcaggcttgagaacagtttctatagtttcaggtaaataacatctctgagttccctctatacgtgcacttcgtacttccttgatcggttaaagccccagagatcattctctgcttcctcgcctgaaccgcctccattctctcttcaaccgttcccttaacgatgaatct

SEQ ID NO: 136742 - DNA, 310 bp, Arabidopsis thaliana
  unsure (1)..(310): unsure at all n locations
gggatttagggcttgcgtcgtgcttgatgctgaatctatgtcatccgagttatacgtaattgatatcaaggtatgttgtcgcttgagtggtaaacgcagcaacctctttgattccgctgactgtcgggatgccttctttacacctcagatggatagtcatttggttatatttgaccgttgtttccctctaaaccaagatnacnttcgtctagctgaactgaacaatgatnaggtggtcacanaagtttcagttcactantatttctcgctgcaaataacaggagtcggtatacgcttcctcagggactgt

SEQ ID NO: 136743 - DNA, 428 bp, Arabidopsis thaliana
  unsure (1)..(428): unsure at all n locations
gaacagaaaatggaaatgatactgatctcgtcatcgacactcaggttccatccattgaggacatcacaaagaatcgccaccggaaccaatagaagacgaaccaccaccgtgtgtgcagactactacagaggaggaagaacggtggacganaacatggtggtccttaggaaacgaatccatgagatgaagatggttgaacgcaactttgaacctccttctcattggatgcaatgggagaaacgtttctactgcaactacgacgctactatatgtgatgcactcactcttctccaaacttttctcatgaactctcgtcccagcgtcgcgtttggaacgtgtcttcttctcctcgtcagcgttcccgtctcctccgcccgtttttgcttttcgcatccttgatctactctttggcttttggacgcccgttc

SEQ ID NO: 136744 - DNA, 216 bp, Arabidopsis thaliana
gcgtcgctgctccgtaccagttgcactgcataaatttgatataaaactctgcaaacatgttggcttaacaagacctccttacatgtgatcagcttctctcggactccttccgttacaatgaaattgagaatggaatgctgtgggaagttgaggggaaatgggttgttaacggagcagttgatgttgacattggtgcaaacccatctgctgagggtg

SEQ ID NO: 136745 - DNA, 270 bp, Arabidopsis thaliana
atcgtcttaagcttgatttctctgttttcgttctgtctttctttatcgtcgcggtgtcgtcctctgatgtcaacgacggcgatgatgacgtgatccgtcaggtggatggcggaaccgatcctcaggttttgacctcagaggatcacgtttcgctcttcaagcagaagttcgggaacgtcaacgcttccaacgaggaggatgactatacattctcggtttacaaagcgaatctcacgcgatcgaggcgtcaccagaagttggatacgtctg

SEQ ID NO: 136746 - DNA, 405 bp, Arabidopsis thaliana
gaccagaaacatcgccattggtggagtccaagaagaggtctatcaccccaacgcacttagggcggcgctcgctgagtttatctcgactttgatcttcgtcttcgccggctcaggctccggaattgctttcaacaagatcactgacaatggagcaaccactccttccggcctcgtcgccgctgccttagctcatgctttcggtctctttgtcgctgtctctgttggcgctaacatttccggtggccacgttaaccctgccgttaccttcggtgtcttactcggtggtaacatcactctcctccgtggtattctctactggattgctcagcttcttggctccgtcgccgcttgtttcctccttagctttgccaccggtggcgagccaattccagcgttcggtctctc

SEQ ID NO: 136747 - DNA, 408 bp, Arabidopsis thaliana
  unsure (1)..(408): unsure at all n locations
gaaaaatgaacgcagcgcttgcaacaaccaccgccacaactcccgtactccgccgtgagacgcctcttcttcattattgttctctcacaacaaaatcgccggtttaccaaatcaacagagttagattcggatcttgcgtgcaaacagtcagcaagaaattcttgaaaatctcggcgagctctcagagcgcttcagcggcggtcaatgtcacggcggatgcttcgattccgaaagagatgaaggcgtgggtgtatagtgactacggcggagttgatgttctgaagctggagagtaacattgttgtgccggagattaaagaagatcaggttttgattaaagttgttgcggcggctcttaatcncgtcgatgctaagagacggcaagggaaatttaaagccactgattcgc

SEQ ID NO: 136748 - DNA, 404 bp, Arabidopsis thaliana
ggactcatttgcgatttttaagatttaggcaaaactcttctctgtttcgacgcaaaaggaagcatttttaatggacgcattgggtggttgcggcggcgctggtggtttctggggatggaatggcttcgatcaacggagaaagaagaagtcttccggtgatagaggtaagaaacgtaattctggatcgtcggattccgtcgatgtgagcagagacgccggcggttatcggtttcctttgaagcaagctgtgacggccggagcactcactttcaccggtgacacgattgctcagctatcagggagatggaaaaagagaaccgctcttaaacaatcatcttctgagcttgacgagggggaattgtggaacattttctcagaacatgactggattcgtgcgctgcgga

SEQ ID NO: 136749 - DNA, 78 bp, Arabidopsis thaliana
gttcttgcgacgtgtgtttgattggatttttcaatcgtttcgtgttcctttgattgtcaaataaactttgatttggtg

SEQ ID NO: 136750 - DNA, 406 bp, Arabidopsis thaliana
gagaagaatagtttgatcatcttgtgagaaaaataatggctgcttcagtgatgctatcttcggtgacattgaaaccagctggtttcacggtggagaagacggcggctagaggattaccgtcgctcacaagagctcgtccctccttcaaaattgtcgccagtggcgtcaagaagatcaagaccgacaagcccttcggaattaacggcagcatggacttgagggacggcgtcgacgcctccggcagaaagggcaagggatacggtgtttacaagtacgtcgacaagtatggagctaacgtcgatggatacagtcctatttacaacgagaacgagtggtcagcgagtggtgacgtgtacaagggaggagtcaccggattggcaatttgggcggtaactctcgccggaat

SEQ ID NO: 136751 - DNA, 391 bp, Arabidopsis thaliana
gggataaatcgccgacgactctttcttctctcacatgtcatactaatacctaagtcgtcgtctctggcagagaaaattcggattcgattgagagatggagaactctgtggatctagtaccggcgatggttgtatttctcgccgcagtccacgttatcgccttggtttactggatttatagattggcctctgatcgtccacctcagaggaaaaaaattcagtgaggtaactacgattcatcgattggtggattacgattccgatctgatgttgcgtttatcggcgtttttgtgattgttaagtttgatgaatttgtccttaagtaactttttggaattgaacttggtagtttcttgtgtttatgggaagtgatagattttgttacattttcc

SEQ ID NO: 136752 - DNA, 175 bp, Arabidopsis thaliana
acagtaaatgaagagatatatattctacatggtcttgcatcgttgttacatttcatcacccaaaacttggggagagggaaaggcagtgaataagcaatataaaacgaaagtttaaactttcaattaagtataacagcaacctcttttgccaactccagatgtgtcttcaacgtta

SEQ ID NO: 136753 - DNA, 383 bp, Arabidopsis thaliana
acattaataccccaattatattcgatactgaaaccatattacaaactcattttaataaattgcacacaactgaagatggtaggacactaacacatgcgataaatttattacatagaaattattgtcattagatgaaacgccttttgagagagatctaacataattgtcagaccctattggcataaagttactgacgtgtcatttcaagataacagcgcttcgaacaaatctttaaacctatctttcatgaagtcggaaattggcgaagcgatgatattgctggcaaccccgaccgctatgtccctctcccaattggtgccaccagctctgtcatttctagtgtgacgctgcacttgaccctgaccttgattcacaactctgta

SEQ ID NO: 136754 - DNA, 393 bp, Arabidopsis thaliana
agttataaataaaaatttattttattttcctgaatagcttaagagaaatttgatcttcgtcttcgtcactacgtccccagctctcgagctttgggcactcgatttcctctatacatttccttaaaacccaaaattcttaagcctaatccaaaggagaaaaaaacagagcatttttcttcttctccaatttaaacagtttcctaataatctcactttgtctactcgattctcccaactccaatttgactcatcggaatcatgccattatcaatgaatcctccgacgaatccgccaccattgttccgttgcatctccgtcatgtaactcctcacttccgccttaatcatctcttgcaccaccgccataaactcgcctccgttaccgggaaaagac

SEQ ID NO: 136755 - DNA, 179 bp, Arabidopsis thaliana
gatgagaagagccttccatagtctcttggtaaacagtaattttgtatttgaaacctttcagaatgatatggtatcaggcagcgaggctgaagaatacaaatataaatgtaactacttgctcatagttgaagataagtagaagttccaaaacacagaacccatggacatgaacgctactc

SEQ ID NO: 136756 - DNA, 203 bp, Arabidopsis thaliana
gaataagataatttcgatttcgactgtataaatgattaacaaagattaattaaattaattaattataaatccctcaaaaaaggtctaagacatacaaaactccggcgtgtttctccgccccatcctcaacgaaatacaaatccctcatcctctgaaacgcctgccacgtcagcaaactatccgaaccggcttgatgacatttc

SEQ ID NO: 136757 - DNA, 78 bp, Arabidopsis thaliana
caccaaatcaaagtttatttgacaatcaaaggaacacgaggggattggaaaatccaatcaaacacacgtcgcaagaac

SEQ ID NO: 136758 - DNA, 339 bp, Arabidopsis thaliana
tcagctcaaatggtattacgttattgtagcttacattttcgcgccttctctggccttctgtaacgcttatggagctggacttacagacattaacatggcttataactacggcaaaattggtctttttgtcatcgcggctgtgacgggaagagagaacggagttgtagccggactcgccggttgtggactgatcaaatccgttgtttcggtttcttgtattttgatgcaagatttcaagacggctcattacacgatgacgtcacctaaggctatgtttgctagccaaatgattggaacggtcgttggatgcatcgtgacgccgttaagtttctttttgtt

SEQ ID NO: 136759 - DNA, 373 bp, Arabidopsis thaliana
gttctagatcgcgagcggtcgccctttttttttttttttgttttgttgcttttcctctctcttctctcatctctatcctttagagagaggaaacgatcgaagcttcttaatctgataacgattgctacttcagcatctgttgatcgttcacgatggcttctgaacagaatcctatggctttctcagcatagatgtctggctcttgtccgttaacgtttgtcttttcgacaacgtttgatcggctctcttctgacaccatcttgtttctcttttacggtggtggttggcttgtgtctggcttccgttggcttctacagtagcggtgggctagctaagttctagaaattcaccatatagctctggtgtttctttt

SEQ ID NO: 136760 - DNA, 363 bp, Arabidopsis thaliana
aagtgttcttaagggcatcaagcttaatatcatctttcaagactcaaattgcagtggatttatcggcaccatgggagctttgcagctgatggaaaacaaagtggttgcagccattggtccacaatcttcagggattgctcacatgatctcctatgtagctaatgagcttcatgtacctctcttgtcatttggagcaacggatccgactctctcctctctgcaatttccttatttcctccgcaccacgcagaatgattacttccaaatgcatgcgatcgcagattttctagcatattccggatggagacaagtcattgcgatattcgttgatgatgagtgtggcatgaacgggatatctgtcct

SEQ ID NO: 136761 - DNA, 320 bp, Arabidopsis thaliana
aaaagcagagagcagcggcagagacgtctgagtagaacctgggatccaggttcagttattttaccattataccccttgaactcgtcttcttcgtcaaggtaatcttcgatttcagatggaatctgtagaaatctagattccaatttgcttaattgccaatagtttgatgggtttttgcggttttgcgaatccgaggctctcggaggtgagattttcgtctttgaatttagagttctcgggtctgcttagttcctttaagttccagagatgatgaagaaaaatctattttggattaagctcaaatatgaactctgtaattc

SEQ ID NO: 136762 - DNA, 251 bp, Arabidopsis thaliana
ttctcccacagtttcatttcttcttgtgtggggaaatctgcatctttgtccactctcttttattttcccaagaaaggaaacaaattcccacaatttcttgtcttctcttaaagttcttcttaagttgaagcttcttgtctgtttttgagatttccagtaagaagaaacttcgctaattttcccgcggaaattctcttacaatcataaagttttcttttttttttgctctcgagaaagttttgagaattttt

SEQ ID NO: 136763 - DNA, 398 bp, Arabidopsis thaliana
aaacgggcaatttatcaagtttgtttactgagttttattgcctaaaggagaaaggcaagagttagagatatatctcccctgttccagttccagagctgggagaaaacagtggactgtcacagccctggcccggggctaatgccagcgagttttaaagtgaaatctgcgccacttgagggaaatgatggttcatttgaggagtttttagatccagactttggtggatcagccattggacgtgttagccctgttgactctggtttgtggtggatcatattgctgagagcttatggaaagctcacgggtgactacacgttgcaagagagaattgatgttcaaacagggattaagttgatactcaagctttgtccaaccgacggttttgacatgttcccgac

SEQ ID NO: 136764 - DNA, 417 bp, Arabidopsis thaliana
cctaactttctccgtcgatggctttcttcttctactttttcttcctcttgactctttcttctccttcttcttctgcttcctcttcaaactccttgacttacatcgtccacgtcgaccacgaagctaaaccctcaatcttccccactcattttcactggtacacttcctctcttgcctcactcacctcttctcctccctccattatccacacatacgacaccgttttccatggcttctccgctagactcacttcacaagacgctagtcaactcttagaccatcctcatgtcatctctgttatcccggaacaagtccgtcacttgcacaccactcgttcccctgagtttcttggtcttaggtccaccgacaaagcgggtctactcgaagagtctgatttcgggtcggatctagttatcg

SEQ ID NO: 136765 - DNA, 418 bp, Arabidopsis thaliana
cggagccctaggctgcgttttccctgagctattggctaggaacggagtgaagttcggagaagcggtttggttcaaggctggttcacagatcttcagcgacggaggattggactacttgggcaacccgagcttggtccacgctcagagcatcttagccatttgggctactcaagttatcctcatgggagctgttgagggctacagagtcgccggagatggtccattgggagaagcagaggacttgctttacccaggtgggagcttcgacccattgggcctcgctactgaccccgaggctttcgcggagttgaaggtgaaggagctcaagaacggaaggttggctatgttctctatgtttggattcttcgttcaggccattgtcaccggaaagggaccgttggagaacctcgcggaccac

SEQ ID NO: 136766 - DNA, 328 bp, Arabidopsis thaliana
ctcgaaggcgtcaccggaaagtatttcggcgactgtaacatcgttgctccctgaggtatgactttcctcttttggaaaaatatacctcagggagcagcaacaacatgctacgttgcacttcatccagatctcgaaggcgtcaccggaaagtatttcggcgactgtaacatcgttgctccgagcaaatttgctaccaacaattctctcgccgataaactttgggatttcagtgtctttctcatcgattctatctctaaataatctatcatcatcaagacaaattcttagacattcaaaatttatttatccttcttgatattgttacatt

SEQ ID NO: 136767 - DNA, 140 bp, Arabidopsis thaliana
gattgattgaagcaatcatcctttctcctgaaagagcatccttcggcgatctttgttgttgttgttggctatgatgttatcactggaattttaaaatgtttggatttttaatataagtaagcagagtttgctcttttact

SEQ ID NO: 136768 - DNA, 136 bp, Arabidopsis thaliana
agctgatcaagaccgtttcttcaacgccttctcttccgcgtttgtaaaattgtcgtcttacaaagtgttaaccgggaatgaaggagtaattagaagcgtgtgtgacaaggttgattgatgtatatttataattatc

SEQ ID NO: 136769 - DNA, 278 bp, Arabidopsis thaliana
catctcgttctctcttccgtcaatatggaaggcgtcaccgtcgtgtctttcttccttcttttcatcgccaccgccatggccgccaagtccaccgtctccttccgtgacggtaactctatttacacatatacatacacatacattcattacatattccggtttactacattaataacaaagttctgatttatcactttcaagtctgaaaattggaattggggtactatacaattcaagttttttttttccctcaaagtatattaacatacctttttttt

SEQ ID NO: 136770 - DNA, 148 bp, Arabidopsis thaliana
gaaagcttcagctctctgatttgtttttttctctcgtacgttctttgtttctctgtaactgttgtttcattttctttcaccgaatttcaccagtgagaatttcttccattttcgaaaaagaaataaaaatgaaattctgttttgggct

SEQ ID NO: 136771 - DNA, 199 bp, Arabidopsis thaliana
gttctccaactcgtccaggctgatgtcgaacaagaagagatatgagaagagaagcgataagagcttttgtaatagccatgattctccacggggagtttatgatgatagaagttatcgcttcacttctcatatctcttcatgttctcgaactcgtccacgcggatgtctacgactcacaagcgaaatgtggttacgcacc

SEQ ID NO: 136772 - DNA, 247 bp, Arabidopsis thaliana
ataatcttaaagctttgatttattattctcttgcgctcttcagcattagcttatgagactattcactagtttgaattcactctcctattcagtcagtactcaggcatctattatctatatacaacttgaatctgtgattgagaaaaagaaagaagtagcaagtgaccattaatcataggtggcgatgaacggaatgaccatcaacatgaagacatcgtaagagagcgttgcgtagcctgtgtaacca

SEQ ID NO: 136773 - DNA, 368 bp, Arabidopsis thaliana
aaaactataatattattatcattccactggaagtacaaactcatcacatggcagagttgctagacatctaagggatatgatcaaaacaaacacaaaagacaatgatcggctaaaagataagctgaagccattattacacataaaccaaacctaaaaacaccatcctatatatggtttacttattgaataacttaattaattaaagagactcgattatctctgcttatttaaaaaggcttcttcacttgcaggtgcaaggatcacacttgcagtcagatccacacttgcaagcatcgttctcagcgttgttactctcccctgaagcctcgtactgattcttcatcgccggtgcaacgcccaagacaaaa

SEQ ID NO: 136774 - DNA, 256 bp, Arabidopsis thaliana
gattaaacagtctattccttctcgaatataacagtttaagggttttttctttgtgattgcaacactagggccctgtggcacagggagaaggacaaaaaagactttaagagccaaaagaaaaaaccaattcaagaagaaaataattcattacaaaaccataataaacatccattttctccatcttttttttccagatttaatgatgaaaacccccacagaagacaaggttgcaatcagactctgtgacactattaca

SEQ ID NO: 136775 - DNA, 180 bp, Arabidopsis thaliana
atcaaccccaagtttccatattttttatacatgaaaaagtttcattcattgtcgatttgtaccaggattgcattatgaatctagaagttagcatgaaaaagtggtcggactgttctgtttatagtttcccgatgaagacaaatggagttaccaacagcacagccaaggttcatgtcttca

SEQ ID NO: 136776 - DNA, 136 bp, Arabidopsis thaliana
gataattataaatatacatcaatcaaccttgtcacacacgcttctaagtactgcttcagtcccggttaacactttgtaagacgacaattttacaaacgcggaagagaaggcgttgaagaaacggtcttgatcagct

SEQ ID NO: 136777 - DNA, 352 bp, Arabidopsis thaliana
caattaaaactggaacctttaaacattcattgattactcatatatacatgatacatacaaagtcaccagcttctggttgtggtccccggtttagccatctattaagccagctacatgattcatatcaagaccaatgcgggattaaggatcacgtttaccggcgattgcaacatcatcttcatcatcaccatccgaggcatattcatcttcactcatttcatcatcactagacatttcctcagtatccgcccttggctttgcgtatttctcacaatactctttaactctctgttcataggtacgacgatcacgcatcatcaatgcagctgcttcaccattcaatggatctgac

SEQ ID NO: 136778 - DNA, 126 bp, Arabidopsis thaliana
agtggaaatgctaacttcaaactgttcacaggactgtttgtacaagcaaacacataaacgaggatgctgatgccgtgtgtgtgaacacaatacagcactgttttgagtaaatgtttatgcacactc

SEQ ID NO: 136779 - DNA, 148 bp, Arabidopsis thaliana
agcccaaaacagaatttcatttttatttctttttcgaaaatggaagaaattctcactggtgaaattcggtgaagggaaatgaaacaacagttacagagaaacaaagaacgtacgagagaaaaaaacaaatcagagagctgaagctttc

SEQ ID NO: 136780 - DNA, 274 bp, Arabidopsis thaliana
gtttgattgaacaagcttatgacaatcctcatgaagctctatcacgaataaaacgtcatcttctcacccaacgaggctttaaagaggttggcatagaatttatggatctttatagctacttgattccagtttatgaaatagagcctctagagaaaattaccgatgcatatcttgatcaatacttgtggtacgaaggtgacaagcgtcacttgtttccaaactggattaagccagcagactcagagccgcccccacttctggtttataaatggtg

SEQ ID NO: 136781 - DNA, 193 bp, Arabidopsis thaliana
ctttttctttccccttgctcactccaagtctccaagcccccaatttttttcacaatcaagcatgtctttgttgcgaaccaaacttgtgagatggcgacaccgagtcaggacacagtcaacactttcaccagcatcaccggtgcttctgacgccgtcgcccttcagatactcgaggagcatcatggtgatctta

SEQ ID NO: 136782 - DNA, 355 bp, Arabidopsis thaliana
gacatgaggttcttcggttacttgttaatgtttaccagaagctggcttctcctgattatttgagcatttgccaatgccttatgttcttggatgaaccacaatgcgttgcaagcatattggagaagcttcttcgttcagagaacaaagatgatgctttattggctttccaaatctctttcgatcttgtacagaatgagcaccaggcattcctcatgagtgttagagatcgccttccagcgcccaagacccgtcctgtagaagcaattcaagctgttgaaacctctactgctcacaatgagaacactgcaggggatgttcagatggcggatgatactccatctcagacaattgtgca

SEQ ID NO: 136783 - DNA, 324 bp, Arabidopsis thaliana
caatagcattgactggtctttagaccacacacctcgtgttcttatcccggtagccaacgggtctgaagcggttgaactggtctcaattgcagatgttcttagaagagccaaagtagatgtcacggtttcatcagttgaacgatctttgcggattacggcattccaaggcaccaaaattatcactgacaaattgattggtgaagctgctgagtcatcatatgatctaatcattcttccgggaggccatactggctcagaacgtctgcagaagtccaaaattctcaagaaactgctcaaggaacaacatgaatctgggcgaatata

SEQ ID NO: 136784 - DNA, 334 bp, Arabidopsis thaliana
ctcttgaagagcagagcggtggtgctctcctccgtgttcctcgtgccacacgagacgtgttgcgtctccgtgatgatgctgtgtctctgcgtggttctgttgctggaatcctccagaagctcaagaaggcagacggttcttcagcagattgtatagctgcgcttgctagagtggacaatgtcaaacagagaatggaggctgcctacaaaacactacaggatgctgcagggttaactcagttaagctcgacggttgaggatgtatttgctaatggcgatcttcctcgtgctgcataaactcttgctagcatgcgatattgcctgtctgctgttgg

SEQ ID NO: 136785 - DNA, 250 bp, Arabidopsis thaliana
cgctacaatggcaacaatgttgatttgggtactgcttgtggtaaatacttccgagtttcttgcctcagcatcgttgatcctggtgattccgacatcatcaagacacttcctggagatcagtgattctgattttgatgattttgccatgttgttctctatgcttgattatgctttgtgttcttcaaagacttaatgttagatttctttggtttcccgacttcctcttaatggttataattaattactacaa

SEQ ID NO: 136786 - DNA, 345 bp, Arabidopsis thaliana
gttttcatgtggggagaaggaataggcgaaggtgttttgggtggtggaaaccacagagttggaagttcgttggagatcaaaatggattccttactgccaaaagctttagagtctactatagtacttgatgtccagaatattgcttgcggtggacaacatgctgtccttgtaacaaaacaaggagaaagtttttcttggggagaggaatctgaaggtaggcttggccatggtgtggattccaatgttcaacatccaaagctcattgatgccctcaataccacaaatattgagcttgtagcatgtggtgaataccatagttgtgcagttactctatcgggggatttg

SEQ ID NO: 136787 - DNA, 298 bp, Arabidopsis thaliana
gtacgacgtcaaggatccaaatgcaatcttgcgagcctctccttcagctcagcctttgaaacattggctcttccagggtgaagaacatcactaacgaacggcctcctggagagaagtctgtctggtcatcgaatttcctggttcggatggtgagctgaaggagaagctagcaaggatgtacgacgtcaaagatccatatgcaatcttcgtattcatattcagaatccactttggacgtggtaaatcatccgggtttggtttgatctatgagactgttgagagcgctaagaagtttgaa

SEQ ID NO: 136788 - DNA, 334 bp, Arabidopsis thaliana
ctttgtgaataaagcatccagagatgatggattggcctaaggatcatgatttccgcttctttaaactcgagatcatcgatatatttctcatcaattggtatggtggagctaaacctatcactgtagatgaataccttcatgccaagtcgtaagtacattgcgtgaacccttttaaaaacatcggatcaaactcgcttcctttttataataactcacaagaatcaagcaaatggtgaagcaagaaaatgtatattggatgaacaataaaaagtgtgtaactgtttctgtaaataactctttgttttggaccataatagatattaaaatctcttgt

SEQ ID NO: 136789 - DNA, 312 bp, Arabidopsis thaliana
ctaatctccgtaaattaatggcgagtagttgcgagctttgctgcgagatcttcatcgcaattcttcttcctcctgtcggagtttgtctcaggcatggctgttgcactgtaagtttcatctctctctatcgatctctgaactttcacagcttcttatttcagaaatcgaaaccgtagttgaaattgaattgattacggttatttaaattgaaattggttgcactccggtttacgggaaccaatcaatatgatgaatgtggagattaattactgaaaatataattgtggtgtttttgttaaaaagaaacactaa

SEQ ID NO: 136790 - DNA, 247 bp, Arabidopsis thaliana
attctgactctgttaaagaaacgagtattcatgcctagtccagtagcttgtgactccaataccctttcccaattcaaggcagaggagtttgctaagaatggttctgggaggagtgataagatagaagatgtggaattaagcgaggaagaattgaatatgtatttggatttgcacccattctctaatgcctctccgtacactgttgtggagacaatgtcacttgcaaaggcccgtattctcttccgtg

SEQ ID NO: 136791 - DNA, 387 bp, Arabidopsis thaliana
ttaacggcagcatggacttgagggacggcgtcgacgcctccggcagaaagggcaagggatacggtgtttacaagtacgtcgacaagtatggagctaacgtcgatggatacagtcctatttacaacgagaacgagtggtcagcgagtggtgacgtgtacaagggaggagtcaccggattggcaatttgggcggtaactctcgccggaattcttgccggaggtgctcttcttgtgtacaacacaagtgctttggctcagtaaatcttaaagttgttagcgcatgtgtaatcatgtttctataaatgtttctgtgttgttctctttctctctaatgttgtaaaactcagacatactttgaatttataagacttctagtgtttgtatatat

SEQ ID NO: 136792 - DNA, 409 bp, Arabidopsis thaliana
atgtagcgcaggtcctgttgctgaagacatgtttcactggcaggcaacgataatgggtccttcagagagtccttatgctggaggtgttttccttgtaaccatccatttcgacgccatatccaaaaatcaaaggtttttggatatggcgtcgaagcggatcttgaaggaattgaaggatctccagaaggatccacctacatcatgtagcgcaggtcctgttgctgaagacatgtttcactggcaggcaacgataatgggtccttcagagagtccttatgctggaggtgttttccttgtaaccatccatttccctccggattacccattcaagcctcctaaggtggcctttaggaccaaggtgttccatcccaacattaacagcaacggtagcatttgcctcgacatcttg

SEQ ID NO: 136793 - DNA, 373 bp, Arabidopsis thaliana
ggagcagagtgaagtttaaaatcatgagcctgaaggtgaaaggtccaatggactatgtgcctgagctgttcgatgagcaaaaggatgatgtctctaaggagcaaatattgcgtgtgattttcttggatcctgagcgctccaaccctgcattggaaaaactgaagcgtcaattagcagaagcggatgcagcggtggaggcacgaaagaaacctccagaggaaacaggtccaaagatgattggagaagggcttgtgatcgatgaatggaaggagcgtagagagagatatcttgcacagcaacaaggcgaaggagctgactctgtctgagagactaaaagagttttctcaggacaaaaacaagtgcgcttgtgaag

SEQ ID NO: 136794 - DNA, 176 bp, Arabidopsis thaliana
gtcacaaccaaaagagccatttacatgcgcaacaatcacaatggattcgtcaactatagatttgtcctctcctgccttcgcttgaaaggctgtgaagtctgccgaatcacatgtcctccgaaactgtcgtgtaaccatgaagaaaacagtcgcaaagccacaaggtccatcaggca

SEQ ID NO: 136795 - DNA, 394 bp, Arabidopsis thaliana
ctttctcactcttttttatctctcaaatttgaccttctccgttgttctttcgcatcgctcaggagcagaagcttcaatctttgataatgtcgaggaacaagggtttggctgagcaagatcttaaaaaattggatgtaactgtgctacatcctctgtctcctgaggtcatttctcgccaggccactattaatataggaaccattggtcatgtcgctcatggaaagtccactgttgttaaagctatttctggtgtccaggtaaaatttgattatgcggttttcacaattgtaatcctagaggcttttctagcttgcagcgtttgatcaattggagtgggtgaagtgatttctatggtttccttatcttctctgtacagactgtccgttttaaaaat

SEQ ID NO: 136796 - DNA, 404 bp, Arabidopsis thaliana
gtttccataatgatagtctgattggttctggtgggtttggagatgtttacaaagcgattttgaaagatggaagcgcggtggctatcaagaaactgattcatgttagcggtcaaggtgatagagagttcatggcggagatggaaaccattgggaagatcaaacatcgaaatcttgtgcctcttcttggttattgcaaagttggagacgagcggcttcttgtgtatgagtttatgaagtatggaagtttagaagatgttttgcacgaccccaagaaagctggggtgaaactaaactggtccacacggcggaagattgcgataggatcagctagagggcttgctttccttcaccacaactgcagtccgcatatcatccacagagacatgaaatccagtaatgtgttg

SEQ ID NO: 136797 - DNA, 287 bp, Arabidopsis thaliana
cattgacgcaggtgaagaatctacagaagataaacgctagggaatcagatttaggaatatctgatgaagcttcatggcacgctaagtacaaaaactctgcatatgtctacgtcggaggcataccgttcgatctcaccgaagatatggtgaaattgttgatgtcaatcttattcgagacaagggaacgggtaaatctaaaggttttgcttttcttgcttatgaagatcagagaagtaccattcttgctgttgataatctgaatggagctcttgtgttgggacggacca

SEQ ID NO: 136798 - DNA, 379 bp, Arabidopsis thaliana
aaaaattctgctttagaaaaaaaaaagaagcaaacctcactgttctttcatcgtttccgagagaggagagacggacatggaaggaggaactgcgcactacagccctcgaactgtcgaagaagtctttcgagattttaagggccgtcgagctggcatcatccaagctctcaccactgatgtggaagattttttccagcaatgcgaccctgagaagcagaatctctgcttgtatggattcccaaatgaagtgtgggaagttaacttaccagctgaagaagtgcctcctgagcttcccgaacctgcactcggcattaactttgccagagatgggatgcaggaaagaaactggctttctctcgttgctgtccacagtgatgcg

SEQ ID NO: 136799 - DNA, 280 bp, Arabidopsis thaliana
ggaagattggctatgttctctatgtttggattcttcgttcaagccatcgtcactggtaagggaccgatagagaaccttgctgaccatttggccgatccagttaacaacaacgcatgggccttcgccaccaactttgttcccggaaagtgagccaagttttatctgtattttgcttcagtctttgcttcgtgagtgtgagaggagaaagagagcttgtttagatgtaaaatttgcaagcctttgtatttttttcattaatcaaataactcgtttttctctc

SEQ ID NO: 136800 - DNA, 431 bp, Arabidopsis thaliana
cattacaacaacaacaacagaaaaaaaaaacagagagttaaaaaaaaaaagaaccagacataatgttgtgtttcagatctcaaagagtgtttatacttgtgtctctgtgtttactctcttcgtttcttgtggtcgtcactggaacaacatcgattactggggttggtaacgaagaagaaagaggtgtagaagaagaatggagaacaagtgtaatagaaagagtaattgcagaggaaagtggagagaactcatctctgattttagctgcaaagagaacaagaagaaaagatcctgctgataatttcaaactctacactggtggatggaatataagcaattcccattatttgacttctgttggttatacagcggcgcctttcattataatagcactagtctggtttgtgttctttgggctatcattgtctctg

SEQ ID NO: 136801 - DNA, 243 bp, Arabidopsis thaliana
gtgaatcgcgtcaaaatctgcgactatctcaagggtttggggataatcaccgatgaattggagagtattgagctaccttccaccattgaagtcatgtgtgagcgtgttgagttcttacagaagctagggttaacgattgacgatatgaatgagtatcctttgatgttacgttgtagtgtgcgtaagaatttgattcctgtcatggcttacttagagaaaattggaatctcgagatcgaaatta

SEQ ID NO: 136802 - DNA, 168 bp, Arabidopsis thaliana
attaagttccgtgaaataaatcaacaaatttcatatttatacctcacatcgcaggataaaatcaatagaaagcaaaacaaatctttgctattaggttttatcgtgcgatgtgaggtataaatatgaaatttgttgattaagttccgtgaaataaaatgtgagattttt

SEQ ID NO: 136803 - DNA, 270 bp, Arabidopsis thaliana
acttaatcatcgactttttgaccatttctccatctgggttttattatcttcagttctttgtgtcacaactccagtttctttttgtattttgttgttttttgcacaaattgagattgttgtttcctataaggttttgttttattctatttatggaagtctcttgatttcgcttttataacctcaaaaagcatctttcttgatagcaccaagtatgatttgatcatcaaaagggtttggatttgacaggtctctattttaggtttgtttttg

SEQ ID NO: 136804 - DNA, 299 bp, Arabidopsis thaliana
agcaacgaagatatgcttacttcaccttcttcttcttctacatatgatccattctcttccaatttctctccgtcgctcactaatgccttctctagtagctggaccaggcgcatgggattgaaattgagtaggagagtcaccagagctcggatcttctctcgtaagattaaggatcgttcaacacttaaggtcacttgtcgtcgcgcacacgaacgtgtggttgaggaagaagcatctacaatgacggagacgaaattgtttaaagtttcttctggtgaagtatctcctcttggtgtgtc

SEQ ID NO: 136805 - DNA, 327 bp, Arabidopsis thaliana
tgtgaagcctgccgcatcagatgtcctcggaagcggccgtgtgaccatgaggaagactgtcgccaagccaaagggtccatcaggcagcccatggtacggatctgaccgagtcaagtacttgggtccattctccggcgagcccccgagctaccttaccggtgagttccccggtgactacggatgggacaccgctggtctatccgccgacccagagaccttcgccaggaaccgtgagctagaagttatccacagcagatgggccatgctcggagccctaggctgcgttttccctgagctattggctaggaacggagtgaagttcggaga

SEQ ID NO: 136806 - DNA, 371 bp, Arabidopsis thaliana
ggaacatcgcctgactctgtgccgcctcgtttggcccgtagaaactttcctatgcctcctggaaactacatgggatctggttatcctgctatgcgaggtcatccttttccatttgcttatcccagaggaattgttagtcctcgccctctaagtagctctcctggatctatatcacctggcatgtcaacacctttaggcattggtttgagttctgtggttcaaaccgaaggtccagaaggtgcaaatctgtttatctataacatacctcgggagttcggggatcaagaactcgcggctgcatttcaatctttcggtattgttctgagtgccaaggtttttgtagacaaagccactggtgtaagcaaatgttt

SEQ ID NO: 136807 - DNA, 388 bp, Arabidopsis thaliana
aatctctctctttctctctctaatggcggcgacattaggcagagaccagtatgtgtacatggcgaagctcgccgagcaggcggagcgttacgaagagatggttcaattcatggaacagctcgttacaggcgctactccagcggaagagctcaccgttgaagagaggaatctcctctctgttgcttacaaaaacgtgatcggatctctacgcgccgcctggaggatcgtgtcttcgattgagcagaaggaagagagtaggaagaacgacgagcacgtgtcgcttgtcaaggattacagatctaaagttgagtctgagctttcttctgtttgctctggaatccttaagctccttgactcgcatctgatcccatctgctggagcgagtgag

SEQ ID NO: 136808 - DNA, 234 bp, Arabidopsis thaliana
gcaaaaaaggagaatccggatgcatataaggccgcctggaagttactcaagggtgctgatggcgttcttgtgccgggaggttttggcagtagaggtgtagaaggaaagatgctggcagcgaaatacgccagagaaaacagaattccataccttggtatctgtctaggtatgcaactcgctgtgatcgagtatgcaagaaccatactcggtttggcagatgcaaatagcactgaa

SEQ ID NO: 136809 - DNA, 238 bp, Arabidopsis thaliana
gttatattgacggatatgagttcttatgctgatgctcttcgtgaggtttccgctgcccgagaagaggttcccggaagacgtggatatccaggttatatgtacactgatcttgcaactatttatgaacgtgctgggcgtatagaacgaagagaaggttccatcacccaaattccaatcctcactatgcccaatgacgatatcactcatccaactccggatcttactggttacattactg

SEQ ID NO: 136810 - DNA, 248 bp, Arabidopsis thaliana
gttttctcttgatgttattcaaattagcaaagtgcaagctaaccaacgtgctggacacaacaaatggtggagcaaatgagataagcactgtttctagcgactttggactcatagttcgtgaagaaaacttacggaagataccacaacgtgttcgtgacgacgttcggatacgaaggagagcattgggactcctttacagtcgtcaacggagagtttcctgacgagaaagatctggagaaataccatgg

SEQ ID NO: 136811 - DNA, 248 bp, Arabidopsis thaliana
caaatcttaaacgttttactttgtgctgcactactcaacctcaatggccgcctcaacaatggctctctcctcccctgccttcgccggtaaggccgtcaagctttcccccgcggcatctgaagtccttggaagcggccgtgtgacaatgaggaagactgttgccaagccaaagggcccatcaggcatcccatggtacggatctgaccgtgtcaagtacttgggtcgattctctggcgaatcaccgagct

SEQ ID NO: 136812 - DNA, 242 bp, Arabidopsis thaliana
ggctgttatacgcttggatgatgaactcgacaatattgaaaagacattgacgctagctctgtttaattctacgggcaacaatgctactagcaagagcatcagcacaattgattcacttgcctcaagcacttgggagaaggttgcaccagaaaagacgttgatcacacctgtgcagtgtaaatcactgtggaggcaatttaagaacgagacagaatataccgttacacaggccatttctgcac

SEQ ID NO: 136813 - DNA, 291 bp, Arabidopsis thaliana
ccatagacccccagtcactggttaaccgcgagggtcaaatgtatatgaccaactggggtattggtcatggtataaaagatattttagaggctcataaaggtccatttacaggccaaggccataaaggcctatatgaaattctaacaacatcatggcatgctcaattatctcttaacctagctatgttaggctctttaaccattattgtagctcaccatatgtattccatgcccccttatccatatctagctactgactatgctacacaactgtcattgttcacacatcaca

SEQ ID NO: 136814 - DNA, 315 bp, Arabidopsis thaliana
gtgagactggaagatcaaggggattcggattcgtcaccttcaaggatgagaaagccatgaaggatgcgattgagggaatgaacggacaagatctcgatggccgtagcatcactgttaacgaggctcagtcacgaggaagcggtggcggcggaggccaccgtggaggtggtggcggtggataccgcagcggcggtggtggaggttactccggtggaggtggtagctacggaggtggcggcggtagacgcgagggtggaggaggatacagcggcggcggcggcggttactcctcaagaggtggtggtggcggaagct

SEQ ID NO: 136815 - DNA, 363 bp, Arabidopsis thaliana
caaaggcggtggatccggtggcggatccggtggaggaagcggtccaacggccgccgccgccgccgcggctttacagaagcaaaaggcgttgttacagagagtggagactgacatcacatctgtcgtcgataacttcacgcagatcgtcaatgtttcaagggtgagtgatccgccggtgaagaactcgcaggagacatacatgatggagatgcgagcttctagaatggcatatggattagggaagttacataggccactcaagtgttgttgaaagattttcttatgagtctctggagtgttgttaacttacttcctcaccaatggtggcaggttcaagcagctgattctcttttgaaactcgta

SEQ ID NO: 136816 - DNA, 113 bp, Arabidopsis thaliana
ataccatgcaattcatctgagtacggcgagactactgataatcctcggtactggtggtggtttacgtcatgcatctcatgactctccgactcgcgatacatctgagcaggttt

SEQ ID NO: 136817 - DNA, 144 bp, Arabidopsis thaliana
cggctcgagcggctcgagtacgactaataataataaccagaacacggcgtggaacaacaaacctgtgagaagttataacgttaaagattcaaagtatagaccaccgggaaggaagagtccatcttcctccaattgttgcatttg

SEQ ID NO: 136818 - DNA, 336 bp, Arabidopsis thaliana
gagatgcatcctctagaaatgcatgggaatgactccactgtgcagtattatgtgccttacttatccggtattcagttgtatgttgatccgttgaagaagcctagaaatccagttggagataatgaaggaagtagtgaaggaagcagcaacagtaggactttgccggtggacttgagtgtcggtgaactgaatagaattagtctgaaagatcaatctattactggctcgttgtctagtggagaagctgagatcagcaatccgcagggacgattactattcgagtacttggagtatgaacctccatttggcagggaacctctggctaacaaaatctcg

SEQ ID NO: 136819 - DNA, 357 bp, Arabidopsis thaliana
ctggacggacagatgagtatctggcttcctcgtcactggatttggtgatagtgggtttgatttggaggacaacgcattgctggatacttgcaacgatctgacttttggtggctcatctacttctgatggccagaagccagcttctagtggcaagggctgtgaagaattacgggtatcgggtgacagtcagtcttctcggaaaaataaaaatgtagatcaaagctgctcaacctctaaacagcaatccaaagattttcctgccgcaggcagcaatatcagtgagagccagctagatgagcaaagaagaaagaataacgaagaggtttcacacaataacagatcagctgaggaatcaac

SEQ ID NO: 136820 - DNA, 104 bp, Arabidopsis thaliana
cttatgtaaaaacagagctatgatgatactgaatcgactttgggcttttgcttgtttggtttatttacatgtttggcccatgacattaaattgggcttctcctt

SEQ ID NO: 136821 - DNA, 303 bp, Arabidopsis thaliana
gtgaagcctgccgcatcagatgtcctcggaagcggccgtgtgaccatgaggaagactgtcgccaagccaaagggtccatcaggcagcccatggtacggatctgaccgagtcaagtacttgggtccattctccggcgagcccccgagctaccttaccggtgagttccccggtgactacggatgggacaccgctggtctatccgccgacccagagaccttcgccaggaaccgtgagctagaagttatccacagcagatgggccatgctcggagccctaggctgcgttttccctgagctattggct

SEQ ID NO: 136822 - DNA, 398 bp, Arabidopsis thaliana
aacaaatcttaaacgttttactttgtgctgcactactcaacctcaatggccgcctcaacaatggctctctcctcccctgccttcgccggtaaggccgtcaagctttcccccgcggcatctgaagtccttggaagcggccgtgtgacaatgaggaagactgttgccaagccaaagggcccatcaggcagcccatggtacggatctgaccgtgtcaagtacttgggtccattctctggcgaatcaccgagctaccttaccggagagttccccggagactacggatgggacaccgccggactttcagctgaccccgagacattcgcaaggaaccgtgaactagaagttatccacagcaggtgggccatgctcggagccctaagctgcgtcttccctgagct

SEQ ID NO: 136823 - DNA, 148 bp, Arabidopsis thaliana
gccaccacatcaggaggaagagaaggtatcgataatggtggtgtgaagtgggtcactaaggtgagtcgcccagttgttgagcggtcctttaccggtgtcatgtaatgatgtaacgtcgttattttaaagaaaatttggcaccttttgt

SEQ ID NO: 136824 - DNA, 326 bp, Arabidopsis thaliana
atcgctgctcgccatcgccggccaccggggttgccgctgatgcgattcgatccagtgggaacttttgtcaccttgcctcttctctctttcctaacactcagatctctggtcagccttcagatagatagtctttgaagcaaaccaaaggtgaaaactgttctgcagttggtgatgacaagaagaatcacaagcttttgacttatgtttgagaatcatcatgggacaaggcttccgcaatcgaaatgggactttttcagcagcatcctagaaagactctttgcctttatcgcttcacctagacaacgagcaaggataactccatcctc

SEQ ID NO: 136825 - DNA, 339 bp, Arabidopsis thaliana
caggagatgttactcaaatttccagacagaatcaggctgttctcccaacaatctctgttcctattcgtttaagtacggtgatggaagtggcacttctggttactacatctcagatttcatgtcctttgatactgttattaccagtaccttggctataaattcctctgctccctttgtttttgggtgtagcaatttacaatctggagatttacagaggcctagaagagcagtagatggcatctttgggttaggacaagggagtttatcagtaatttctcagcttgctgtgcaaggactcgcgccacgagtattctcgcattgtctgaagggagataaaag

SEQ ID NO: 136826 - DNA, 287 bp, Arabidopsis thaliana
atgagttcaagttctataacctcaggtgtcgccagagaacggggtatgccgacgaaatgtgtgtgtggcttagaggtcacgatgttcgtctcaaaaacgcaggagaaggcatgacgaccgttcttccggtgtattagcaaaaggaatgctaattcgtggtcaaccaaaagggatgatcatgtgttcaaatgggtcgaagatgctgtgtttgaagaagtagaagatgctttgccaagattagccatcattgcaaatgagataagcaaagctaaatctgaggcaaatga

SEQ ID NO: 136827 - DNA, 427 bp, Arabidopsis thaliana
aacagcgatatatcttcatctctctctctctcgccagattttcatcgactcgatttcagatttaagatctcagatacaaaactccgacatgtctacgtgcagcggcgatgaaacagctcccttcttcggcttcctcggcgctgcagccgcactcgttttctcctgtatgggagctgcttatggaaccgcaaagagtggtgttggtgtggcttctatgggagttatgagacctgagttggtgatgaaatctattgtccctgttgttatggctggagtgttgggtatctatggattgatcattgctgttatcatcagtaccgggattaaccccaaggctaagtcttactacctctttgatggatacgcacatctctcgtctggtcttgcttgtggtcttgctggtctctcagctggaatggccattggg

SEQ ID NO: 136828 - DNA, 120 bp, Arabidopsis thaliana
gaattggcttcaccactctcaaaagaaaacgagaaccggtttggtgtgtagatcatcttgaacctttttgaggttttcacattctgagtttatattaagagagggaataatattttggtt

SEQ ID NO: 136829 - DNA, 288 bp, Arabidopsis thaliana
aacaacaaaactctttaaaaagcaagaaaactttcactagtagttgaagaatttctctcttcctctacttattattattatcaactggtgatttgatttctctctctctctctcacaatggattcattaggatcaagaagaaggacacataatagccgtacggttccttcaatgggaatagaaggggacgaagagtttcaagaagaagatgtgtggtcagttttacgagaaggagaaacttcaagtcctgaaatgaagatacccaagagtcatttctcttcctcatca

SEQ ID NO: 136830 - DNA, 329 bp, Arabidopsis thaliana
tggtaacattgatattttccaggccaagaccattggtgagcgaatgcgtgttattgatggaaatggaaagctggttccccacttgtactgcatcggtgatgccaatggtaaactgatgcttgctcatgcagctagtgctcaaggaatttctgtggtggagcaagtcacaggtagagatcatgtgcttaatcatcttagcatcccagctgcttgttttactcatcctgaaataagtatggtgggattgacagagcctcaagcgagagagaaagctgagaaagagggattcaaagtaagtatcgccaagacaagtttcaaggcaaacacaa

SEQ ID NO: 136831 - DNA, 267 bp, Arabidopsis thaliana
aaaaaaatctatttcgaaaagccgatgcagagagcatggacaaagaaaaagatggtagagttttaagttttggatcagaaagattaacatcatgtgatttaagaagtcttgtgtttgtgtttataatgtttctgcaagaacttcttaagatatgattaagagggaagatgataaacttagagtgcaagcaaaacctgtataattgtgtttccctctgtttatttttcctctctctttgaatttgcaatggagacatttgatttcatc

SEQ ID NO: 136832 - DNA, 152 bp, Arabidopsis thaliana
caactttgttcgcggaaagtgagccaagttttatctgtattttgcttcagtctttgcttcgtgagtgtgagaggagaaagagagcttgtttagatgtaaaatttgcaagactttgtatttttttcattaatcaaataagtcgtttgtctctc

SEQ ID NO: 136833 - DNA, 367 bp, Arabidopsis thaliana
gtcgaaatcttcttcttcttctctacctttgtttgctctgttcaattttttcctcataagtttttgcagatgggtttcttctacacgtatctttttatcaagattcgtccctcttcttcaacatcatcaacgcgttttcgacaaaaagaacaacacagaccaacaagagactttgaccaaacaagaagatgatgatgatgatgatgatgatgatgatgatgatgatgatgatgatattgatatttctagagaagaggcagagatggttatgagaagcttagggcttttttacaacgatgatcagcttcaacaacaatacagtgcaaaagaagtctcgagtttgttcgaagagaaagaagcgagtttg

SEQ ID NO: 136834 - DNA, 325 bp, Arabidopsis thaliana
catcaacaatgtccgaacaccaaatggttgtgggagtgtgacgggacgagtctcatccccgggaaaccgttcgttttttctctcggtaaatcgagttggatctccggcgatccgatcgggatgagtaacatcgatctgattgggatgagtaaccgcgatctgatcgggatgagtaacagcgagcttcgcaccgtcgagcctctcgatcttcaattcccttttgaattgaagaagcagatctcttgctctctctatttgacgaacaagaccgacaataatgttgcctttaaggttaagacgacgaatccgaaaaagtattggtgtt

SEQ ID NO: 136835 - DNA, 354 bp, Arabidopsis thaliana
caaattaatacaatggactaatgtcatagagcaatttttttttgctaaacttcaggatttaactcattcttcttcttgttcaagtggttgctgattctgaaatctcttcttcaataacttagctcctaagcaccgtgccacagcctccgccgtagttacacatcctccgaatggttccttccttagcacaagctctgaatcgtagatggttcctccactcactgatgcgtctatttccgtatccaaacacactctaaccgctcctgcttctcttaacaccacctcgctagctttgaccatctccttcgcgtgtttccacgtcgcgtcgaatacgattagtctcagcggcggggg

SEQ ID NO: 136836 - DNA, 375 bp, Arabidopsis thaliana
agaggagcagctaatggaattgccatgacagcgatgtctcttttcaaagccataggtccagcagcagcaggaatcatgtatgcaacttcttctacctccttctttacattaaatatgcttcaacattttgttataaaacaaacaacaagaacaacatgaacttgttggtttatcgaattctcagttttgttttgcgcttaacaacggtttgttgacagtttttcgtggagcgagaaacgtcagggtgctgcttttctccctggcacccaaatggtattctttatactgaatgtggttttggcacttggagttgtattgacattcaaaccatttctagctgaaacacaacagtagaaaatgatgaagattttgatg

SEQ ID NO: 136837 - DNA, 212 bp, Arabidopsis thaliana
tggcagcgccggctgcagccagatctaccgtggctaaggaagacaaggatgatgttaaaggcaaagtaataggaaaaggagggtaaactatttagtagatgattgttacagatactagataacaaaagatggtcaagtattttgtaaacacttttatatatctccttaatgtgaaacctatcttttattaatagcattttgttttgtttaaa

SEQ ID NO: 136838 - DNA, 322 bp, Arabidopsis thaliana
gctaaaagtgcctctgcatcaatggcgatttccaagctccatctagtactctttcttctctcagtctttctcgcgcttcatcgtcctgttctttccaacaccggtaaactctctcattccgaccaagatcttctagatttttcaatttaggtttcttgatctagttctagtctgaaaatcgtcaaatcttgtttcattcaagcctagatcttgatcaatggcgattacgttgttaactaaactatactttcggtgttctgtttttgatatccacagatggagaaaaccttctatttacagtattcaaccaatacagagaatc

SEQ ID NO: 136839 - DNA, 229 bp, Arabidopsis thaliana
gacattcaaaaatacaggtaaggttgaagctttcacacaatgtcacatacacatgccgccttaattttttggggggtgattcttcagacagaaacatgccggaagtactaaggataacgcgtctccggtgacatcgcaaccgttggatcagatcagtggacggcggataagagatgcgtgtggagaagagagagtctgggttaaatgattaagacatttcgtgggtaat

SEQ ID NO: 136840 - DNA, 316 bp, Arabidopsis thaliana
aaccaccgaaaagcacgattgtttatcgtagtgcgttacaagcgttttaagctctcactagcaagcaagtactagcaacaatggcgtcaagcactgcgactatgctcaaagcctcaccggtgaaatctgattgggttaagggacagagtcttctcctccgtcaaccttcctctgtctcagctattcgcagccacgtggcaccttccgctctcaccgtccgagccgcttctgcttacgccgatgagctcgtcaaaaccgctaaaacaatcgcgtctccgggacacggaattatggcgatggatgagtccaacgcgac

SEQ ID NO: 136841 - DNA, 283 bp, Arabidopsis thaliana
gaggcaataaacttaacttaggtgctgcgatttatgcgtagaggtttgcttctcatgctctgaggaatctaagagcaaatgcagcagcccgaaattctagattcccacacatgttaattttgttgcctcagaaaccagccgatccttagtttcctatggatgaaacctagttttgtatagttgttgactctatctctctgtaatgtgatcgctagtgatttcttgcaaataacttttgtgtaaaccagtaaagatatttttatgtgaaataataatcaatagg

SEQ ID NO: 136842 - DNA, 313 bp, Arabidopsis thaliana
gctcaaagagactttccatcatccatagaagatgaaaaaccaatcactggattattagatgggaatggagaatatactcttacatatgaagacaatgaaggagacaagatgcttgtaggagatgttccatggcagtaagaatcttttcttttctttttcgtttttttctgaatctgagtcagctttttgttctatctaaaggagaagtattagattcctagtcacatatttatgatatcttaatcacagtttgattaataacaaacttagtttggttaagctattagagattgtggactttttgatcactaaa

SEQ ID NO: 136843 - DNA, 287 bp, Arabidopsis thaliana
atgaatatgaagtaagagagaatccaaatctggacacatggatggaggtaggacgggattttatcaggttgcagttcttgaatactgatgggatcagaaccataggatgtgttctgggccagagtattgctctggattactatggccggcaggttgatggtatggtagcagaatttactgagataaaccgtcagttggagataacaggaacgtttacaatgaaaaggaaaaagctgttccagttggttggaaaggctaatgtgattctggctgatgtgattctgaag

SEQ ID NO: 136844 - DNA, 304 bp, Arabidopsis thaliana
cgactttgatattggtatgatttcgttgcaaaatgatgatgagatgatgaattggtgtacggaactttcttacatggatggtgtggtagatagtggtgttcttgagattgaaggtggtgattattattctcatattaactatgcactcacatttgaggaaccaactctttctctatggcaagagaataatgatgtagttatgtattgattgatttcgtgaagtcataatataacaaaggctgtttcgtaatccgttaacccccaaaaaaagaaggaataagaggctgtttcattaatctttaac

SEQ ID NO: 136845 - DNA, 358 bp, Arabidopsis thaliana
gtagattcattccttttacgtatatgttcttcacgcgatgaaatgggttttttggatgaccggaaattacaaagctcatgctgattctcattacgatcctcacgctctaccggagataaccgggattaattacagagatattgtagctgagaatgtttctatggctggaaggttagagggaatctctggagatccttttactgggatttgtatttcgaatgcaacgatttctatggcggctaagcataagaaagcgatttggatgtgtagtgatgttgaaggagttacgagtggtgttgatcctaagccttgtgatttgcttgatggacaagaatcagagacgacgaagaagaagatg

SEQ ID NO: 136846 - DNA, 270 bp, Arabidopsis thaliana
gttctatgtcatcggttactcgatgggaggacaagctacttgggcatgccttaaatacattcctcacaggttggctggagtaacgcttgttgctccagtggtgaactattggtggaagaactttccatcagagatctcaaccgaagcttttaaccaacaagggagaaatgaccaatgggcggttcgtgttgcacactatgctccttggcttactcattggtggaactcccagagctggttccctggatcaagtgttgtggctcgcaatct

SEQ ID NO: 136847 - DNA, 167 bp, Arabidopsis thaliana
atttattccgcataaaacttgagaatcttccaacacagaatacaataagagagaaaagtaaactggcaggtaatttttctctcttcttgttttctgtgttggtagattctcaagttatttatgccgcacaacacggtttatcatttacaattagttgaattttggtc

SEQ ID NO: 136848 - DNA, 281 bp, Arabidopsis thaliana
ggatcccgagaccggcgatgtggggtttgtgggccgtcgctagttagtagattcagagaagaacttgagttccatggtcttcaaggtaaagtgtcaattagcccatgttctcacataggtggtcacaaatacgctgggaatgttatcatctaccgatcaaacatcaacagggaagtcacaggacactggtatgggtatgtgaccccagaagatgtacctattcttttggagcagcacatcaacaaaggcgagattgtagaccggctatggaggggtgaaat

SEQ ID NO: 136849 - DNA, 297 bp, Arabidopsis thaliana
  unsure (1)..(297): unsure at all n locations
attaccaaatcatcaacttaatcgtttctctcaaatttagggttttctcttttctcgaaagtcttgcggttttctgaatcatctctatctggtttgagggtttcgtttgatatctggagaaaggggtttctggaaacaaggagttcataattcgcgatcttgatctatcgatcttcatttatatataaaagcgtgaatgagattatgatggagtcgaaaggtggtaaaaagaagtccagcagtagtagttccttattttacgaagctcncctcggttacagcattgaagacgttcgt

SEQ ID NO: 136850 - DNA, 325 bp, Arabidopsis thaliana
tgactgatctagtacagtaccattcaaagaaaatgtttgaggtgaaactgagggaaatcaaaaccgttcttacaagcaaggtcacagaggaaagtaatgtaaactaagtcattgaatcggtgaagcaacagatcaaagatgctaagttacctgacattgaggttgtgcgtgttgtttgggatggtttaatggatgctgttcagtggtctggaaaaaaccagcagtatcatgcaaattctgttctgcgccaggtgaaaacatgggctccacttctgaacacgttctgtaccagcggaaagctagagctggaactgatgtacaaagt

SEQ ID NO: 136851 - DNA, 296 bp, Arabidopsis thaliana
ctcgaggttgagagtgatagtcttgccagtgagtgttttcacgaagatttgcatcttgaaagagagagtcgcgagactatcactctcgaggttgagagctctgacaccatcgacaatgttaaggcaaagattcaggacaaggaaggcattcctccggatcagcaaagattaatattcgccggtaaacagctagaagatggccgtaccttggccgattacagcattcagaaagaatcaacccttcatttggttctccgtttaagaggtggtatgcaaatctttgtcaagactctgac

SEQ ID NO: 136852 - DNA, 233 bp, Arabidopsis thaliana
ggtattgattacgcaatgcggattttcaattcagatggtagtgaaccacagatgtgtggcaatggaattcgatgctttgctaagttcattgctgagcttgagaacttgcacggaaaacatagttttacagtacataccggtgccgggttgattgattccagaagttcaagatgacggacacgttaaggttgccatggggacaccgattcttaaagcacacgatgtgcccacga

SEQ ID NO: 136853 - DNA, 275 bp, Arabidopsis thaliana
ccggccgaatcaccatgcgcatagcctccaagcccaccggtccatccggcagcccatggtacggatccgaccgagtcaagtacttgggtccagtctccggtgagcctctgagctatctcactggacagttccccggtgactacaggtgggacattgccggtctatccgcagatgccgagaccttcgctaggaaccgtgagctagaagttatccacagcagatgggccatgctcggagccctaggctgcgtcttccctgagctactggctaggaac

SEQ ID NO: 136854 - DNA, 322 bp, Arabidopsis thaliana
ggcgcagctttttcttcgtcttcttcaattattctattccctctgagagattctctgtgcgtttcttagatcgagcgagcgaagcgagagatcatggaaggtggagctgctctctacaatcctcgaactgtcgaagaagttttcaaggatttcaaaggtcgtcgtactgccattgtcaaagctctcaccaccgatgttcaagagttttaccaacaatgtgaccctgagaaggagaatctttgcttgtatgggttaccgaatgaagaatgggaagtgaatttaccagctgaagaagtgcctcctgagttaccagagccagctc

SEQ ID NO: 136855 - DNA, 384 bp, Arabidopsis thaliana
gttgatcgtcacgaacccaactgtcataatcttcgtcgatttgatcgattcttcttcgtctctctccgagtgaaatagacccttgatttcactagagaaagttttttttttgtgatcgggaattgaatcttcttatgatgaattatcttcttggagctttcaagccagcatgtaatatttcaatcacatttactgatgggaaaaaccgtaaacaggtacccactaagaaagataatggagaaatagttatgaatccacttttccagagtcaagaaactattgctgggaagattagcattgaaccatatcaaggaaaaaaagtggagcataatggtgtaaaagttgagcttcttggtcacatagaaatgtactttgacagaggaa

SEQ ID NO: 136856 - DNA, 269 bp, Arabidopsis thaliana
agagaatctctccggcgagatcaccggcgttattccgataatttcgcctgagagttgtcgcatgttataaatgggtcttcctttattgtcttgtagttccacaagagtcactctctcttcttcttcttcttcatcttggtgtagtaccggaagcggtggatttaggagtagttctaagcttttcgattctccggcgtgttcgagatcggatttgaagaaacgtagcgggaagagaaattcacggttaaacggactttcgttagagaaat

SEQ ID NO: 136857 - DNA, 273 bp, Arabidopsis thaliana
ggcacctgtaagaaggataagttgaaacaaaaggttgtgacaattgatagctatgctggtgtaaaatcaaatgatgagaaagcgttaatggaggctgtagcggctcagccagttagtgttggcatctgtggaagcgagagagcgtttcagctatattctagtggaatattctctggcccgtgttcgacatcattggatcatgctgtgctcatagtaggatatggttcacagaatggtgttgattattggattgtgaaaaactcatggggaaaa

SEQ ID NO: 136858 - DNA, 209 bp, Arabidopsis thaliana
cccgtcaacaacaacgtcttgaccagcctcaagttccactgaggtgatcatcatctcatgtgtttttatgtctcttgtatcgtacaatatttccatctttcgctaccattggcttcttcgtattgtaacaccctgtgtaaacatattcgtgttttgtaagaaatgacaatgtcaatggccaaataaattgtcaggatcagaatcgagcc

SEQ ID NO: 136859 - DNA, 350 bp, Arabidopsis thaliana
  unsure (1)..(350): unsure at all n locations
tgaagcatgcgaaaatggaagagtagagaaatcacaaggtatatgaacatgatgactccattttcccattttcttctcagtcgtcatcttcatcatcactcctccttcaccttcaccttcactctctcttttaccgccaatcattaccaccgattcacctcctaagcttccggcgaaaactgagcttcctgtcatcggaagctgtatagattgaagatccagtttcaaatttctcgaatcatcgttagtttcccatcgacgttcactctgtaaatcagtgtctgtgaaacaccataacgtanaggagcttctaaagtctccggcggtgcgacctctcgggctagtatctg

SEQ ID NO: 136860 - DNA, 211 bp, Arabidopsis thaliana
ggagaatgggaacaaaacaagcaacatcgtctccgcctttgtctccagctgataaagccgatgcattttcacggctgaggcgccgtcgcaccgccgtactaaacgaactgattagttctttagattccttaagtctcacggaagcacttgcagcttcttcatcgtctcccgttaccatgcccatttccacggcgacgatgatcgcttcatc

SEQ ID NO: 136861 - DNA, 209 bp, Arabidopsis thaliana
gatatctggcccactgtatgtggaagacttaccaaaccatcattggatatcaaagaacttgggtcagggaatggcatgttttttgtcccgcagcgaccttatacatgtttagggacactgagagatcaaattatataccctctatctaaagaagaagcagagaaaagggcagcaaagttgtacaccagtggagagagctcaacagaagc

SEQ ID NO: 136862 - DNA, 323 bp, Arabidopsis thaliana
gttttatcttcggttagagaaagatttaaacgttaaagagtctaagggtgtagaaggtactacactagttgatgggaaaggtagccgccagagtagacgtaggattgaaaacattatgggtgatttggccaaatcaattgagaaagagaagaagatttctgtcaagatgcttaaggatgttggggagctattaagcctcactctcagccaggctcaaaaccgtcaacagctgtcgggtttgacaaaatttcgtcgcattgatgtgacaccatcactagatcccctagacggactttatattggcgcacatgggctatatacat

SEQ ID NO: 136863 - DNA, 293 bp, Arabidopsis thaliana
aaaaaacctatctctctctctctctctcgccgccttcctctcaccctcttcgcatagcttcactttcgccgatggctctacctaaccagcaaaccgtggattaccctagcttcaagctcgttatcgttggcgatggaggcacagggaagaccacatttgtaaagagacatcttactggagagtttgagaagaagtatgaacccactattggtgttgaggttcatcctcttgatttcttcactaactgtggcaagatccgtttctactgttgggatactgctggccaagagaaa

SEQ ID NO: 136864 - DNA, 206 bp, Arabidopsis thaliana
gtccaacccagtagacccagtgaccagagaagtctccggcagcaacagctggtccaaaggaaacaagtgatgattcttgattcatgtttctgtgtttggttactttgcctcgatctttcttgttttgtttggagtttggtccggtttcgttgtaatttttatccaatttgtatgaatattatttaatggatggctgttttggttat

SEQ ID NO: 136865 - DNA, 177 bp, Arabidopsis thaliana
gttttgtaagaaatgacaatgtcaatggccaaacacgaatatgtttacacagggtgttacaatacgaagaagccaatggtagcgaaagatggaaatattgtaacaccctgtgtaaacatattcgtgttttgtaagaaatgacaatgtcaatggccaaacgaaaaaacttttaggatt

SEQ ID NO: 136866 - DNA, 100 bp, Arabidopsis thaliana
gaaaaatgtatcatacatatttcacttcaagatgtgatttcttctatttttgtgtaagaatgttttcaaaaaagaggaatctaataagaaaatattgaat

SEQ ID NO: 136867 - DNA, 373 bp, Arabidopsis thaliana
ggacaaggcttcgcaagcttcacttgtcgttcgttggttcagatgaagatcatcgtttggtgaaatcaggagctcttactgatctcgacatgttttatctggcttctttgtacttttcctttaggtgtgataccaataagtacggtcctgctggaacctatgtgtctgggaagcctctttgggctgcagatttgcctagctgcttgagttattatagggttaggtctttcttagctaggtcagctggttttcagactgtgttgtctgtaccagtgaattctggagttgtggagcttggttctttaagacatattccagaagataagagtgtgattgagatggtgaaatcagtgtttggtgggtctgactttgt

SEQ ID NO: 136868 - DNA, 90 bp, Arabidopsis thaliana
gtttttatggtttaattaaaaatgtatttgcgtctaatgctgaatgctaaagttcgagtttcgtatcaaatgaagttgtaacgatttaat

SEQ ID NO: 136869 - DNA, 364 bp, Arabidopsis thaliana
ctcccacatacatttttgtgatcaaacaactaatcaatcaaaagatggaaggcaagactttgattgtaagtgtgctcataatgagtctgttcatggcacaaaatcaagttgacgcaaatatttgctgtccgtccatccaggctagaactttctataatgcttgcctcttcgcggtaggtagcccgtcaagctgtatacgcaactcgagttgtcttgacattagtgagtcgacatgtcctagaggatatacgaatgacattctcgaaaacacaggtgatgctgtcactgaatactgcaagttggggtgtgtatcctctgtttgcggtgctttaaccattctccagaactccgatgcaagtgaaat

SEQ ID NO: 136870 - DNA, 289 bp, Arabidopsis thaliana
gaagatttctagttacacactacattgctgagcgggattcttccactgtcaccgtcaaggtttcaaaaactgaaggagactggcagaggccaaaccgccgtgttcatgtccaattattactaggaggcggtgcaatgcttgatgcttggggaatggatggagagtttatccacattaaggtgccttcagaaagtggaatttcagagttaatatccacaagcaatgagcgctttaaacttcatatggaaaatacaaaactgatacctgagaaggaagtggtacctggaca

SEQ ID NO: 136871 - DNA, 270 bp, Arabidopsis thaliana
gtggtggagatggaaatgatggtggattttgggggaaattgttttctccttcaccagcggttgctgatgaagaacaatcaccggattgggattctcatggtttaccggcgaatatcgttgtgcaattgaacaagcttagtggtttcaagaagtataaggtatctgatattatgttctttgatcgacggagacaaaccactattggtactgaagattccttcttcgagatggtctcgattcgtcctggtggagtttacactaaagctcaat

SEQ ID NO: 136872 - DNA, 301 bp, Arabidopsis thaliana
ccgtcgtccgatcggtgaacacatgtaactgtaacgatcgaaatgctgagattgaaaatggtcagggagttagaaacagtgctgcaactacttgagtttgcccaagaaaccctaataagaaacctatttgttgactattttgactttgtacccttcttgatatacctatcaatcaccattgtccacgtgtactagtttcgttgtagtaattttcaaagtttatcgaagtatgcgtattcgaggattaattaaatcgggaattacattttcctgagttaattttttctctttttcttttact

SEQ ID NO: 136873 - DNA, 355 bp, Arabidopsis thaliana
aatctttcagtgggaagagaatggtttgctcgggcggtgggtttcctcaattgcagaagctttcaatacgggaaatagagtgggaagagtggatagtagaacaaggctccatgccccttcttcatactctctatatcggggtttgtccaaacttaaaggagcttcctgatgggctgcgatttatctattcattaaaaaatttgatagtatcaaaaagatggaagaagagattgtcggaaggaggagaagattattacaaagtccaacacattccttctgttgaattcgacgactaggaatgctctcagcaatcacagaagccaggagtctcataagcctctgtttccacccaaaa

SEQ ID NO: 136874 - DNA, 256 bp, Arabidopsis thaliana
aaagcggccccttaagtagttcgctgcgatctccatgtctgctcattgacttgattgttccttcgtctactattggaaatcatccccaatcgcgattgcggtgatatgcaacctttgcgcaggagatggtatggctgacattgtgggtcggcggtttggaacagagaagcttccttacaacaaaaacaaatcatttgctggtagcattggaatggccaccgccgggtttctagcatctgttgcgtatatgtactac

SEQ ID NO: 136875 - DNA, 145 bp, Arabidopsis thaliana
cagaacagcaaaaaaaaaggggtggtctttgtgcttcttctcaataaagcttttcttctgagtaaaactttgtattagtttgtaatgttttggtagtttcatgtgaatcttgtgaaaggtgtttgttaatatttgtgaatcacgt

SEQ ID NO: 136876 - DNA, 113 bp, Arabidopsis thaliana
ggggtttctcgcggtaatcaagagttatttaaacacattaacattgtacatggatctaaatctttaacctacttgacgtgtgggttgtgagaatatgtttcttgcacaggagt

SEQ ID NO: 136877 - DNA, 255 bp, Arabidopsis thaliana
cgacatccaaggatatacttgcgttccatcgtctcctccacctctttatggtggctatcatcatagccagggaccattttgctatcatcttcacaagcagtaaagtacttcagcgtgcagtgtctaagctagcttatcttcttggtataaccatggttctcaacagtgtgcagccggttgtttctggtgtggctgttggaggcggttggcaaggcttagtggcctatatcaacttgggctgttactacatttttg

SEQ ID NO: 136878 - DNA, 217 bp, Arabidopsis thaliana
cgaattgccaccgtctcttaagccgttaagtaacgaggaggaagagaatcacggaactatagtgacgacggagaaggagagaccggttcttggagaagaacacaccataatggaagctatgttgaccgttgacttttgggtgttgttcgtgtcgttcttgtgtggagtaggaactggtttagcagttatgaacaatatgggtcagatcgggcttgcg

SEQ ID NO: 136879 - DNA, 242 bp, Arabidopsis thaliana
aaggactcacggtggtcatcattgatggagtacattggcttagaggttgtatgggcttcataaccaacagtagcagtaatggaacttcgccgtcgtctgattgttgtaactcgctgaggtctttgaccaccggaggaatgggatgtctttgtctaattgtcactggaactgttcctttcaatattcctattaaccgcacaaccgctgtctcacttccccgtgcttgtaacatgcctagagtc

SEQ ID NO: 136880 - DNA, 191 bp, Arabidopsis thaliana
gttgttgttgtcaatgcaagcaaagtaaagtaacaaagacgaagaagaacagtgtatcatcatgatatacactgttgttgttgtcaatgcaagcaaagtaaagtaacaaagacgaataagaagcagacacagtgtatatcatgatgatacttagtctgcctttgtgaaatctgaacatatttgtatttgga

SEQ ID NO: 136881 - DNA, 392 bp, Arabidopsis thaliana
aagagaacaaacgtcgtacgcttcagaaaaacgatatcgctgctgcgattactagaaccgatatcttcgatttccttgttgatattgttcctagggaagagatcaaggaagaggaagatgcagcatcggctcttggtggaggaggtatggttgctcccgccgcgagcggtgttccttattattatccaccgatgggacaaccggcggttcctggagggatgatgattggaagaccggcgatggatcctagcggtgtttatgctcagcctccttctcaggcatggcaaagcgtttggcagaattcagctggtggtggtgatgatgtgtcttatggaagtggaggaagtagcggccatggtaatctcgatagccaaggttgagctatggaacca

SEQ ID NO: 136882 - DNA, 362 bp, Arabidopsis thaliana
tggctggccaaggaatcaatttagccttacctactggtgttggacataaacatgaagatagggtattaaagagccagcttttcgttgacaagtttactgaaaccgtccagcatacattcctagaatacttggcttctggatttgaattgaacttcatggttgcaattgatttcacagcttcaaatggaaatcctcgcctgccagattccttgcattacattgatcctacaggacgattaaatgcctaccagagagcaatagttgaagttggagaagtgttgcagttctatgactcggacaaacgctttcccgcatggggttttggagctcgtccaatcgacatcccggtctcacattgcttt

SEQ ID NO: 136883 - DNA, 393 bp, Arabidopsis thaliana
tgaatctgtgcaatgcttcggaaggaagaagaccgcagtggccgtcactcactgcaagcgtggatctggtttgatcaagctcaacggttgcccaatcgagcttttccagcctgagatcctccgattcaagatcttcgagccggttcttctcctcggaaagcaccgtttcgctggtgtgaacatgaggatccgtgtcaacggtggtggtcacacatcccaggtttacgccatccgtcagagtatcgcgaaggctcttgttgcgtactaccagaagtatgtggatgagcagtcgaagaaggagattaaggatatcttggtgaggtatgataggactctgcttgtggcggatccgaggaggtgtgagccgaagaagtttggtggtcgtggtgctcg

SEQ ID NO: 136884 - DNA, 362 bp, Arabidopsis thaliana
gaatgaagttgtttataggttcataacttcacaacacaatgtaaaaacataatcaagtaccagtaccatcactcaaaaataacagaataagagaatagatctttcaaggggatgatgataataaactttggtttttactttttacttggcacggctcctgaaaacatcgagatccatctctgttggatcagttgcctgtagctctacttgaatcccatctagttccctcttgaacctgtccttggagctcgcctagatcatcttgcttctcaccttagcaatatccggacaccacgcgatgaataagatcttgctcttctggcaattctcagcagttacaaagtcaaaatcgtaaatggcgt

SEQ ID NO: 136885 - DNA, 215 bp, Arabidopsis thaliana
cttgaaacacaaaccaaattaaaacacaaaaatagtacaataaccaagttgatttaacttaaatataaacacacattgagaaaattctccatactttttccggtgatgttgcctttctacctttctcaagaactctcctccggtgactccggttttctgcagagaatcatattcatcggagagaatattccggtttcacctcctctggtcaaata

SEQ ID NO: 136886 - DNA, 242 bp, Arabidopsis thaliana
gagttcattccggatccccaaggcacaaatatgatgttcgcattctttgcccagcacttcactcagcagtttttcaagacagatcagaagcgaggacctgggttcacccgaggactgggccatggagtggacttaaatcatgtttacggtgaaactctagacagacagcatagacttcgacttttccaggatggaaaattgaaatatcaggtcatcggtggagaggtgtatcctcccacagt

SEQ ID NO: 136887 - DNA, 348 bp, Arabidopsis thaliana
acatatatacaaatttttaacttgcaagaaatcaagtcacatgatcacatgaagacttatcaacaaacagaggttaggattttcggagatgagaattattacaaacgaatcaatcaaaatgcaaagttgatttttctattaatcaacaaggttcacttgtgttcaagccaaattttaaacaagccaactaaatttgagacgagattttcaaatgatttataccaatcatatcattggacaatgaccgtaaattccgaaactcttgatgatcttgagagtgtatgtattcatgaccaaggccagttcgcatctcgccacgcaaagcgacatcctccaaaactactacta

SEQ ID NO: 136888 - DNA, 332 bp, Arabidopsis thaliana
attaaaaatctaagtttaattgtaaaaaataacagcacaacacagaacaatataatctgtgagaagataaaagtaccaaaaggtaaaatctatgaataacacaaaaatgttacctaacaacatataacaataaaccaagaagttccaagtctttggcctgtagtctccctagacccaaataagacctcatttattggtaactatagcatgtcgaactagtggtagagttctaaacctcctcaggaacaaatagctcacatagtagataattcataattgtaatttttacaaaggttggccattaatccaccttcgaaacatgataaaactct

SEQ ID NO: 136889 - DNA, 102 bp, Arabidopsis thaliana
ttcggatgccagtgatagaggtggttgaattccaacgcgatgcggttgcgatactggaactgggctcggaacagcagctccgggtcaaacttgagctgcagg

SEQ ID NO: 136890 - DNA, 358 bp, Arabidopsis thaliana
tgcagttgaagtcaaaaggtgatacgtgggacgaaatcgatttcgagtttcttggtaatctaactggtgatccgtataccatgcatacgaatgtgtatactcaaggcaaaggtgatagagaacaacaatttcatctctggttcgatccaaccgctgatttccacacttactctgttttatggaaccctcatcacatcgtgtaagtatataaagatacatacacaacttagaaacatgagttagtctttttgtttgttctaactataatttccaacctttgggctgacataatttttgtaggtccaaaacacgttttgattataattatggctgatccgcaaaatataaatcttttcac

SEQ ID NO: 136891 - DNA, 230 bp, Arabidopsis thaliana
gtctcaagaaatctgccaccgccgtctcagtacccgccggatctccaccagtgcttccgattgaatccgctatggctccaggtccatcgctagctccggctccggctccaggacctggaggtggacacaaacatttcaacggcgatgctcaggtcaaagatttcatccacacattgttacattaccgtggatacaacgaaatggcggatattctcgtgaatctgacgtca

SEQ ID NO: 136892 - DNA, 303 bp, Arabidopsis thaliana
cttccacataactaaaaaaaaaaggaattagcgatgaggggaggtgatggagaagaaggatcggagtcaagagttgcactgttgaaaagtcctcacacggcggaggaagacggtgaaggattgagggatagaattttggttgagacaaaaaagctatggcaaatagttggtccggccatattcagtcgagtaacgacatattcgatgcctgtaatcactcaagctttcgctggtcatctcggcgatcttgaactcgccgccatatccatcgtgaataacgtcaccgttggcctcaactttggc

SEQ ID NO: 136893 - DNA, 201 bp, Arabidopsis thaliana
attgacatgaaatgtttataaatttaaagtttggggccattagtgtaattcttaaaaagatttaaaaagcttttatgttgaatgttgagagtcaaggtcagctattgcagaagcgtagattgtttcagagtcaagcatctcaatacattgtaataatatgcatgcgtgtgtttcaagctaacagagaaagcaagacgatag

SEQ ID NO: 136894 - DNA, 121 bp, Arabidopsis thaliana
gaacaacaacactaagcaataaagaaaagctcatgccgagagacacagtggcatcaacattcaagagctcaagcagtgttcttaccccaacaggcattccgtggccagattaaagcctcaa

SEQ ID NO: 136895 - DNA, 176 bp, Arabidopsis thaliana
caacaacaaccaatgttcctgcactaagtgatgatgctttgactcgtgtcgccatgtcacttccttctccaaaaactgcgaataaagaagatggactgtgtgtgatttgtgtggatgcaccatctgaagcagtgtgtgtgccgtgtggacatgtcgccggatgcatttcttgcttg

SEQ ID NO: 136896 - DNA, 293 bp, Arabidopsis thaliana
gtggagaagagtgatcggaaatgtcgccgtccggcatcaattacagcgagcgctatctagtaaagccggtggaagtggaaagagcgccaacgtttcagctgcagtggattcgatgcttctgcgttccctcaaggaacattacttagaggtttctaagatgactcctcctccgaaagtgagtcctccgtcaccatttgagattgtgaaagggtcgcttgaaggaagtactggtgctgttctgaagaaatctgttgggaatgaagagatcaatcttttcgttatgcgcttggctc

SEQ ID NO: 136897 - DNA, 268 bp, Arabidopsis thaliana
caaacatgtttggcgaaaccattgatgagagctccggcgcagaagagtatgccgccgaagagcatcgagagccgccgtccgaactttcttgtcacggtggaagccaccagcgacgaaattagcgccgctagatatagagacgatgtgaacatcgttagcgtcgggctatcgtactgacagtactggttcgttgacgcgtcctcttgcttggtttcggtatcggtttcgctaatcaggctgtgccactgtacctctctgagatggctcc

SEQ ID NO: 136898 - DNA, 273 bp, Arabidopsis thaliana
caccgcctccgtcggagtcttgtctccgcagcttgagcctcagatcgcggttaagtcaactaagcgagccagcatcgttggcgtgggactacaatgctatttcaaggagatctcacaaatgccggcttggtctaagcttgaattctgtaagttctctgctagttgggctggtcaagactgcgattgcaaggaaaagatcgatgaagacgaagacaaagtcttagcactaactaatggttttggagattcatcctctttcaatggaagcagtgg

SEQ ID NO: 136899 - DNA, 143 bp, Arabidopsis thaliana
cggctctagcggcacgagcggctcgagctcgagccgattcggctcgagtgaagatctacccatataaaatagaaaagagatggttctgctacaaaaactttgggatgatattgtggctggacctcaccctgaccgtggccttg

SEQ ID NO: 136900 - DNA, 187 bp, Arabidopsis thaliana
tctttttttttttttttattcaattcatacttcaatatatatttctatcgaataaagatcaccaatccaagataaaaatattcggaggattcttctgaccaatgaaaaattaataattgtcagcaaagttgtttctttttttcttgaaatccaaagaattcttattagtttatacgtaggttatcaa

SEQ ID NO: 136901 - DNA, 308 bp, Arabidopsis thaliana
cggactaagaatcacacgcgataaaaaaaatatttgttgagtgggaagagatacatatacttttgttctatgaacaaatcgaaactttaaaccaataataaaagtactctcttatcaaaaaaaacataaagacaattcttctctctctcatttaaacccaaagtaaacgccacaacaacaatggcacatcagtcaccgaccagattgtcccatgaatgaagtgcaagaacaacaaacccattaaaaaaacttacatttccagtatggaatgtagaatcaaacttgatatgccttttcatctcaacacc

SEQ ID NO: 136902 - DNA, 213 bp, Arabidopsis thaliana
tcgcgatctagaacagacatcaaatcaaataacatattacttgatgaaaatctaaccgcaaaggttgccgacttcggtctctccaaacttgtgggagaccctgagaaaactcatgtcacaacacaagtcaaaggaaccatgggctacttggatccagagtactacatgacgaatcaattaacggacaagagcgatgtgtatgggtttggtgtg

SEQ ID NO: 136903 - DNA, 186 bp, Arabidopsis thaliana
caatctcgttcaagcaagaaatgcatccggcgacatgtccacacggcacacacactgcttcagatggtgcatccacacagatcacacacagtccatcttctttattcgcagtttttggagaacgaagtgacatggcgacacgagtcaaagcatcatcacttagtgcaggaacattggttgttgttg

SEQ ID NO: 136904 - DNA, 304 bp, Arabidopsis thaliana
gggccctcttttttttttttaaaatttttttttttttttttttttttttagagagtgaaggcaattgcgtctaaacagttaaaagaacacttatttcatgaacatcatcattatcgacaaaacaaaggagaattgaaacaaagttcaagggccaaacgaaaccctaactctccagtcttcgttatcatcatcattaaacggtaaaaaaactcctcaactcccggagaataaggacataccaaatcaagcaaccggagatccaacggtgatgcttaatcacatgaatctccagcggtcgcgagct

SEQ ID NO: 136905 - DNA, 246 bp, Arabidopsis thaliana
gtggaccaatatggtctgctccaatccacgatcaagaatgggtgaattcgatactaaacggtgttaaatccatgaaagacagatatcctgcttacgaccgaatttgcgctgttcttaccacaatctcagaggaattgccagatgttcctctctttttgagcctgcatagtctctctgcaacgctaaaatgtacttcaccatcagctgctttgtttcgatcagcggtaatcaatgcaaagtaccgtg

SEQ ID NO: 136906 - DNA, 103 bp, Arabidopsis thaliana
gtctttgcttcgtgagtgtgagaggagaaagagagcttgtttagatgtaaaatttgcaagactttgtatttttttcattaatcaaataactcgtttttctctc

SEQ ID NO: 136907 - DNA, 246 bp, Arabidopsis thaliana
gggacatctaaaaatgcttgacgggtacattgatttcttcatggatccaaatttggctgagtcctatgtaaagctgaaggaagaactcgataagcttcttcaaaaaaagcttgaagatccaagcatggacatccacaaagaaggcaagtacctcatgcttgcagttcaagaacttgtggctggagaccaatgcgaaggcagatttgtctttggccgtgacacaaagaggccaagccaaccgcaaat

SEQ ID NO: 136908 - DNA, 246 bp, Arabidopsis thaliana
ggcggtgatttcgctgccgacgacggagcagaatcagcaacagaggccgaatcggtgcacgacgtgtaggaaacgggtcgggttaaccggattcaagtgccggtgcggtacgatgttttgcggggttcataggtacccggagatccatggatgcagctacgatttcaaatcggccggacgtgaagagatcgcgaaagcgaatccgttggtgaaagcagcgaagcttcagaagatatgatcagagcc

SEQ ID NO: 136909 - DNA, 96 bp, Arabidopsis thaliana
ctcccagcgcttcaatatctcccaagacccaaccatcggagggagggggcgagatgatgggattgagttccttggtctttaccgagtttcacagcc

SEQ ID NO: 136910 - DNA, 418 bp, Arabidopsis thaliana
attgaggttttctcttattatctaaacccaccaagtctttcaggattttagccagagaagcttgagtctttgattagggacatgtcaacctccgccgcttccttgtgttgttcatcaacccaggtcaatgggtttggtcttaggcctgaaaggtcgcttctttaccaacccacttccttttctttctccagaaggagaactcatggaattgtcaaggcctcatctcgggttgataggttttcgaaaagtgatatcattgtttctccctctattctctcggctaatttcgccaaattaggcgagcaggtaaaagcagtggagttggcaggttgtgattggattcatgttgatgtcatggacggtcgttttgttcccaacattactatcggacctctcgtggttgatgctttgcgccctg

SEQ ID NO: 136911 - DNA, 308 bp, Arabidopsis thaliana
tggctggaaagaacagagtagggactactcgtgaatcatgatgggattagagcatgaagattctttgtcttttcttccttagaatggtacttcattcagcttatcgtgttaggtacgtgggtttaaggcaaatgaatgtgaacattgctctagaatgatatatgaactagccccttaaggaatatttcttgtaaatcttaaagttctgagatgaattattgttcaaaatacaagtgggagtacatatacgttttgttatcaagaatgcagctggtaaatttaaacaaagtaaaagaattgagtataaa

SEQ ID NO: 136912 - DNA, 322 bp, Arabidopsis thaliana
gagaaagacagagaagagagtgacaatggtgaaatgtatgaagccaggaaaagccgtgatccttttacaaggacgatacaccggtaaaaaggcggtgatcgtgaaatccttcgatgacggtaccgttgagaagaagtacggtcactgtctcgtcgccggattgaagaagtacccaagcaaagtcattcgcaaggattcggcatagaagacggctaagaaatcgcgcgtgaaatgcttcttcaaggtcatcaattaccagcacgtgatgcctacgcgctacactcttgatttggatctgaagaacgttgtctccgccgacgcg

SEQ ID NO: 136913 - DNA, 245 bp, Arabidopsis thaliana
agcttcactttgagattaggtcatttacccttttaagggtttctctcctactttcttgattctcttcattcccaagactcaaaacctagcaaacttggacatttggattgagtgtctctagtccgggtctcatttgggtggattctttctggtgaaatctttcttgtgagagttttgtattgggagaaagagataatcaaatgccggaggaagatttggtagaactgaaattccggttatatgac

SEQ ID NO: 136914 - DNA, 246 bp, Arabidopsis thaliana
gaagaatagtttgatcatcttgtgagaaaaataatggctgcttcagtgatgctatcttcggtgacattgaaaccagctggtttcacggtggagaagacggcggctagaggattaccgtcgctcacaagagctcgtccctccttcaaaattgtcgccagtggcgtcaagaagatcaagaccgacaagcccttcggaattaacggcagcatggacttgagggacggcgtcgacgcctccggcagaaag

SEQ ID NO: 136915 - DNA, 221 bp, Arabidopsis thaliana
ttctaagtaagttcgatggtatttacaaagccaatgccttcaaaactacaaaggccttttttcgttaggaaacaacttaaaaggaactgcgccaccatttctactacgactcaaagtcctttgtagttttgaaggcattggctttgtaaataccttccaagttagttcgatggtgaaaaaactgaaaactttaataaagcctgcctcctttggttaagcct

SEQ ID NO: 136916 - DNA, 247 bp, Arabidopsis thaliana
gaatctgaaaggtttgagtgaagatgtcttcagatcggaaggttctaagttttgaagaagtttcaaagcacaacaaaactaaggattgttggcttattatttccggcaaggtgtatgatgtgactccattcatggatgatcatcctggaggcgatgaagtcttgttgtcctcaacagggaaagatgctacaaatgattttgaagacgttggtcacagcgacactgcaagggacatgatggacaaata

SEQ ID NO: 136917 - DNA, 419 bp, Arabidopsis thaliana
  unsure (1)..(419): unsure at all n locations
aaaaaaaagaaaacacaaaaacaaagattataatggcttcctcaaccatggctttgtcctcccctgccttcgccggaaaggctgtgaagcctgccgcatcagatgtcctcggaagcggccgtgtgaccatgaggaagactgtcgccaagccaaagggtccatcaggcagcccatggtacggatctgaccgagtcaagtacttgggtccattctccggcgagcccccgagctaccttaccggtgagttccccggtgactacggatgggacaccgctggtctatccgctgacccagagaccttcgccaggaaccgtgagctagaagttatccacagcagatgggccatgctcggagccctaggctgcgttttccctgagctattggctangaacggagtgaagttcggagaagcggtttgg

SEQ ID NO: 136918 - DNA, 247 bp, Arabidopsis thaliana
attcatttgatgttccttctaaaaatggggcaacaacaatcgcagtccatggatgagatgctgtttcaagaagtgagtaacaagaacgtcgaaggtatcaaatcacttcacgcatgaaggagcaggactcgagggggtggataaattagggagaacaccattaatcttatcttgtacgaacgacgatctatatgatgtagcagaaactctgcgtgagttgggctccaatgtcaatgcttatcgttct

SEQ ID NO: 136919 - DNA, 245 bp, Arabidopsis thaliana
aaagatttgtagaatcaactaagaaaatggctagcactatgatgactacattgcctcagttcaatggtcttcgagccaccaaaatctctgcagctcctgtacaaggcctggcaagtgttcagcccatgagacgcaagggaaatggagctttgggtgcaaagtgtgacttcatcggttcatcaacaaatctgataatggtaacgtcgacgaccctgatgttgttcgcggggagattcggacttgcg

SEQ ID NO: 136920 - DNA, 397 bp, Arabidopsis thaliana
cacagctttaaaaagaaccaaacctttataagtgttttttagacattgggagagatgggaaaagatattgagctcccgggttttaggttccacccgactgaggaagagcttcttgatttctacctcaagaacatggtttacggtaagagatcgagtgtcgaagtcattggtttccttaacatataccgtcatgatccatgggacttacctggtttatcgagaatcggggagagggaatggtacttctttgtaccaagggaaaggaagcatgggaacggtgggaggccaagcaggacaactgaaaaaggatattggaaagcaactggatccgatcgtaaaatcataagcttgtctgagccaaaacgtgttatagggctcaagaagacgcttgtgttct

SEQ ID NO: 136921 - DNA, 415 bp, Arabidopsis thaliana
tgaacttcatgcacagagatgaggagatcaattactacccctcaaagtttgatcctgtccgctgcgctgagaaagttcccacccctacaaactcctacactggaattcgaacaaagtgcgtcatcaagacagagaacaacttcaaacaggctggagacaggtacagatcatgggcaccagacaggcaagacaggtttgttaagagatgggtggagattctatcggagccacgtctcacccacgagatccgcggcatctggatctcttactggtctcaggctgatcgatccttgggacagaaacttgcaagccgtctgaacgtgaggccaagcatctagaggccaatctccatataagctcagtctatgtgaggtacaatcaatctcatcgatctatcatcgcttggtcgttaaat

SEQ ID NO: 136922 - DNA, 178 bp, Arabidopsis thaliana
cgagaacgtacgttgtcgttgtgagtgtgagtactgtattattaatggttctatttgtttttacttgcaagttttcttgttttgaatttgtttttttcatatttgtatatcgattcgtgcattattgtattatttcaatttgtaataagattatgttacctttgagtggttgtttatc

SEQ ID NO: 136923 - DNA, 248 bp, Arabidopsis thaliana
aaaacatcgaggataagacttatcagcacatcgatgcgcgttcaaaggctagatttgacggtattgctccagaaccttggaagggtttaccgagtggtcatatacccggtagcaagtgtgtcccttttcccctaatgtttgattcctctcaaacactgttaccagcagaggagctgaagaagcagtttgaacaggaagacatatctctggacagtccgattgcggcctcatgtggaaccggtgtaaca

SEQ ID NO: 136924 - DNA, 122 bp, Arabidopsis thaliana
agcgttaaatgccacttggcggcatataagatgatactaaccccaattattgttcaaaatacatcatagcccctaaagtttctacattttaggtttataaccctagactattgttctgcccc

SEQ ID NO: 136925 - DNA, 331 bp, Arabidopsis thaliana
agacaaatgaaatgctttattataagtcaaaaacacatatgtaacaacatatttcttatcacagtgtttcattgcaaaatgtatggaatctgcatatcctcaatttacaagacaatggtacagaatagtatagaggagcctactttgaagatattgagtttgattcttgtgaatgttatggcgaatggagacacaacgacaacatctgggacttctggtgatcgtcattcactttttaactgttcctaagtttaacagagtcttttcgcttgctgttgcttcacattacacagctacagctgctggtcgtttgctggccttaattcctttt

SEQ ID NO: 136926 - DNA, 135 bp, Arabidopsis thaliana
aaaactagaatattattatcattccaacggaagtacaaacccatcagatggcagagttgctagaaatctaaaagatatgatcaaaacaaacacaaacgacaatgatcggtcaaaagataagctgaagccattatt

SEQ ID NO: 136927 - DNA, 351 bp, Arabidopsis thaliana
cgttattgttgatatctaagcttatgttcttcttcaaaaaaaaaaaaaaaaaaaaaaaaaaaaaaaaaaaaaaaaaaaaaaagggcggccgcccttttttttttttttttgatataatcattcactcaaagagaagagtgacagagtgtatacatacatataggtatatccgaatattaacagaatgcataatcttggtatatgcttcatctcatttttacacaaagatataatcctaggctaagcccctaagaggtactacttgttgttggaacagaagacgcctctggctgagcctcactagccatagtttccggcagtgaggtttcttgctgagccaccgatggagtt

SEQ ID NO: 136928 - DNA, 206 bp, Arabidopsis thaliana
atatatataagaaatcataaagtaaaataatgttacacttctaaaacctaacgagttatttcatcattatctcagtgattaccacaaatcaccatcattaaccttcttcttcgtttttttagtcgacagagttaggaccagagcaagctttcaaattagggttccaaatccattgaactaaaaactttcttcctcctttatcattc

SEQ ID NO: 136929 - DNA, 380 bp, Arabidopsis thaliana
caaacaatagttcctcaactgttaagtcggcaaataatttcttaaatttgcattgaccacatagaaatgggttccagaataatcaacgctgaatattccagaaaggggattaagcttcggtgaagcttgggggcttgtaggcaatgaaactgatgcattggacttgacgggtgttgtcgaatccgatgatcctaatgaaggcgccagggtactccttcttgcattcttcaacttccttcaacacttgagcggagtcggtgcatccgaacaatggaagcttccacattgtccagtatcgtccatcatagtatccgggagtgtttccgtgctcacggtacacaaatccgtgctccaactcgaattcaacacaaggaatccac

SEQ ID NO: 136930 - DNA, 346 bp, Arabidopsis thaliana
cgtcaaatatgactataaatagtgttacaaattttcttatgttacaaaattacaaaagatacataaaagtttagtaaatactatttggtacaagctctgttttttacgagagtaagaatatttaaatgtatttgttctttacatatcctaccaatatatgttaactattggtgtaagattctggagccatgggcttatactcaacaactggtcccattctactcctggttttggtaattgtagctctggtaaacttccaaacggtagcttcagtgatgaagaaggttctttggtctctgcttctctttgtttctcttcggttttcgcgttttcttgatgcatttgg

SEQ ID NO: 136931 - DNA, 178 bp, Arabidopsis thaliana
gataaacaaccactcaaaggtaacataatcttattacaaattgaaataatacaataatgcacgaatcgatatacaaatatgaaaaaaacaaattcaaaacaagaaaacttgcaagtaaaaacaaatagaaccattaataatacagtactcacactcacaacgacaacgtacgttctcg

SEQ ID NO: 136932 - DNA, 346 bp, Arabidopsis thaliana
aatcaatctccacaaagatgagaccaaactcaagaatcctgaatactgatgtataatactaatacaaccctcccagcaatttgttaaagtttaacacagaagtggatatatatttataagcttagcttggttcaatccatttctgtgttaaaccaagctaagcttataaatatatatccactggcttgtgatcttgtagctttttcttggactttcttatgaagaagaacccactatgggcaagtttggtgcagttgcccattcagtccaagacccatcatagattgccacattagtttttcccagacgataaagtcccaatgccaaaatacaagctgttacaccg

SEQ ID NO: 136933 - DNA, 198 bp, Arabidopsis thaliana
aagtgattatgtttgttaacgcaatcatcttcccatggtttttacataagacaaaccaaaacaaagagaagaagatttcagatacctacacaaatcctcttctctttgttttggtttgtcttatgtaaaaaccatgggaagatgattatgtttgttaacgcaatttgtaatggaaaataattaagttctgggattagt

SEQ ID NO: 136934 - DNA, 356 bp, Arabidopsis thaliana
  unsure (1)..(356): unsure at all n locations
ctcgagagcaatttataaagaaattaaggcacacatacacacatcaatttcgtaatcgttgcagagtaagaccgatcatcgatggctgatgtaatggaacagaatcttcttcaaaccgctgtgcttaaccggacgtccttccatttccaacctcagagaaattggctcaacgatccaaacgcgccaatgtattacaaaggattctaccatttgttctaccagaataaccctttggctcccgaattcagtaggacaagaatcatatggggacactctgtttcacaagacatggtcaattggattcagctcgaaccagcccttgtcncttctgagtcctttgacatcaacagctgctg

SEQ ID NO: 136935 - DNA, 348 bp, Arabidopsis thaliana
atctcaacgacgacgagccatggcttcaactttcagcggcgatgaaactgctcctttcttcggattccttggcgctgccgccgctctcgttttctcctgtatgggagcagcgtacgggacagcgaagagcggggttggtgtagcgtcgatgggtgtgatgagaccagagcttgtgatgaaatcgattgttcctgttgttatggctggagttttaggtatttatggtttgatcattgctgttatcatcagtaccggaatcaaccctaaggccaagtcttactatctattcgatggctatgctcatctctcttccggtcttgcttgtggtctcgctggtctctccgccgg

SEQ ID NO: 136936 - DNA, 250 bp, Arabidopsis thaliana
ctctatggatccattaatgtgtaaacagatttgccttgagaaacatttactgtgagcagtccaatgcagcaacacacagttggacctccacagtcgagtggcttcacaatgacatcatcaatgcaaccgaatatgttggaccgcccgtggatggccgtgtctgcgccgtttcaacaaagtcattacctctgatctaataaacccataccctagtagaaaaagtaaataacacagaggtttgtcagaaaga

SEQ ID NO: 136937 - DNA, 248 bp, Arabidopsis thaliana
ccctttttaaaatgatcatcatcttcttcttcactcgcctcaatttttgttcccttcttcttctataattcaactgtgaatttcaccgacgaaacagaaaagagagagagagagagagaaacgatgagttctcagatttcggagattgaacaagagcagctgatcgagaagcttgagatcttcaagatctatggcagagacaaatgtggccgtaagatccttcgcactaccggaaaattcgtcccagc

SEQ ID NO: 136938 - DNA, 343 bp, Arabidopsis thaliana
tggaaatcagcggttggatcgaaccagagatgaaattgttgttctccacacttactctgttttatggaaccctcatcacatcgttttcatggttgatgatattccggtaagagaattcaagaagctacaacatatgggtatccagtatccaatattgcagccgatgaggttatactcgagtctatggcacgcggaccagtgggctacaaggggaggtctcgttaagactgactggtcgatggcaccattcatcgcttcgtacagaaactttagagcggatgcatgtgtttcctcgggcggaagatcatcttgtcctgccggttcacctacatggttctctcaa

SEQ ID NO: 136939 - DNA, 362 bp, Arabidopsis thaliana
catgaacttaaagtaatctccataaggagcactaccaaagacagaagatccaatcaagagggaatcatcgattgaagggttgtcacgagattgggaaggaagcaacgaagcttagtaataacagcctctggaggatgagcattgggagaagtttttcagagaagaatggtgaggctgagagagtcaggggactggttactgagttagatggcttgacaaagaaggtcttgtttgcaactttgctgcacaggccccttgagaagcttggaatctctctgttcaaaaaggagatcatgtgtgtttctgacagcttcgatgaggtccttgagagggttcttgtggaacatgaacagaaactggac

SEQ ID NO: 136940 - DNA, 247 bp, Arabidopsis thaliana
aaacagagtcttgttcggaaacaagaggtacccagatggagaaaggtttgattttagatcaagagctatctccgggattgatttgggaagctttgaatctgttcttgaagctattgctgttctcacaacgatcatcgtcgtccatgaatcaggtcatttccttgcggcttctctccaagggatccatgtgagtaaattcgcaattgggtttggtccgattctagctaagttcgattacaacaatgtt

SEQ ID NO: 136941 - DNA, 249 bp, Arabidopsis thaliana
gaagacgaacgcaaagatgcagattttcgtgaaaacgctaaccggcaagaccatcaccctcgaggtcgagagcagtgacaccatcgacaatgtcaaggccaagatccaggacaaagaaggaattcctccggaccagcagaggttgatcttcgccggaaaacagcttgaagatggtcgtaccttggctgactacaacatccagaaagagtcgactttgcatcttgttctgaggcttaggggaggtatcat

SEQ ID NO: 136942 - DNA, 369 bp, Arabidopsis thaliana
aaaggggtcatttactatcttttaagagacgacatatatagttctcgaccaagaaaagaaaagggggtgacctgagttcttcaacacataacataatggccggagttttcaaaacggttacgtttcttgttttggttttcgctgccgttgttgtcttcgcggaggactacgatgttggtgatgatacggaatggacgagacctatggaccccgagttctatactacttgggctaccggtaaaactttccgtgtaggcgacgagctcggtgagttttattgttcttatagctgaaatatgtctttgtttttcttgttcttataacagtcatagttatgggatcgtgcatggatcatgtcggtgttgttct

SEQ ID NO: 136943 - DNA, 246 bp, Arabidopsis thaliana
atcaatgtttggtctatccagagagacccaaatgtgtgggagtatccgactgagtttcgtcccgagaggtttcttgataagaagtcttgtgatttcactggaactgattatagctatcttccgtttggatctggcaggagaatttgcgcaggtatagcactcgccgagaggatgattttgtacactctcgcgacgctattgcattcgtttgattggaagataccggaaggccacattttggatttg

SEQ ID NO: 136944 - DNA, 363 bp, Arabidopsis thaliana
gtcaccttggaggaattgagaaccggtctcccaaaacttggttcaaagatctctgaagctgaaataaggcagttaatggaagcagctgatatggatggagatggatcaattgattacttggagtttatatcagccacaatgcatatgaacagaatcgaacgtgaggatcacttgtacaccgcattccagttctttgacaatgacaacagcggctacataacaatggaagagctagagctagccatgaagaaatacaacatgggtgatgataaatccatcaaagagatcattgctgaagtagacaccgatcgtgacggaaaaatcaactacgaagaatttgtagcgatgatgaagaagggaaat

SEQ ID NO: 136945 - DNA, 251 bp, Arabidopsis thaliana
aacaaccaaacactcatttctccacatcttgagagaaaaaaacagagcaagtatattagagatctcatggcgatggcggtctccggagctgtcctcagtgggcttggttcttcgttcctcaccggaggcaagagaggtgccaccgcattggcaagcggcgtaggcactggagctcagagagttggcaggaaaactcttattgtcgctgctgcggctgctcagcctaagaaatcttggatccctgccgttaa

SEQ ID NO: 136946 - DNA, 372 bp, Arabidopsis thaliana
aaagcttctctctctcttctctctcacaaaaccttcagagagggaaagctttttgtctccacctacaagaattttccgatgatagccgttccaaataatttgggcttttgcccggtatcttctagctcttttagtggagatgaccggttcccgtacggcaaatcctgctttcataagaggttttggccgcttgtatccttgctcgtagtcaatcagttttatgctgattgctttgatattttagttttgtttttcaataaatctcaacagatttgagatggtaattagttttaggtgctagttacttaagattaatttctgtcttgtgtctttagaaacttcgatttgcagaaatctatcaagcgattatgt

SEQ ID NO: 136947 - DNA, 346 bp, Arabidopsis thaliana
gatcgatacaacggcgaacgatgcaactcctcaagtgattccaccaaacagtggtgcgatgcctgagatggtagcgagtccagcttctgtggcgtcaagtggacactttccatttgctgcttcagacatgtcgggtatggtaatggacacttcagtacttgattcggcattcacatctgacgttggaccggatggagaaggagccgggaattccagagattccctcaggtcatttgatcagatcccttggaactttagcctttctgatctcaccgcagatttgtcaaatctgggagatttaagagccttaagaaactatccaggctctccatttcttccatctgat

SEQ ID NO: 136948 - DNA, 248 bp, Arabidopsis thaliana
ggttcgttttggtggtgaccactcctttattcacctacggtgagatcggcggcggagtctagacgacggcgataacgccggtgaccgacggaatcatgttaagatagtcactggcgaattcgttcttcttccccggagacgacaagcatcgaagaatctgtttagagacagctatgcttgtctctgtttctgcgttttctctttccgatcttgtctctcggatccggtgaagaagctgccgccgatca

SEQ ID NO: 136949 - DNA, 248 bp, Arabidopsis thaliana
ctggacccgctcgagccgattcggctcgagctcgagccgcggctcaggaggacgagatattcccgaacatgttgctgtttgcagcagcttgcgggattccagcggcgagggtgacaaagaaagcagatctccgagaagctattcagacaatgctggatacaccaggaccttacctgttggatgtgatttgtccgcaccaagaacatgtgttgccgatgatcccgagtggtggcactttcaacgatgtc

SEQ ID NO: 136950 - DNA, 368 bp, Arabidopsis thaliana
  unsure (1)..(368): unsure at all n locations
gagctagagagatgagagggtgaagaaganagaagaagctgatatgtgatattgatgtgagttaagttgattgatggatgtatgagatgtttatagggacgatccgtcttatacgaagagatccagaggctccggttgattcctcgtcagaagacggatcgtcgcggttgagctccgaagatcggttgaagatctgatctgatcttagatcatgaaccggcctcgaggttcgtcagatctgcgttactgagcttttgatgaggtgatgaatgatgaatccgtcaattctctatggagctagagagatgagagggtgaagaagagagaagaagctgatatgtgatattgatgtgagttaagttgattga

SEQ ID NO: 136951 - DNA, 248 bp, Arabidopsis thaliana
ggcaaattaagatcatcttcataaatcttctcagatctcttccaattttctagaaaaaacatgtcttgctgtggtggaagctgtggttgtggatctgcctgcaagtgcggcaatggttgcggaggttgcaaaaggtaccctgacttggagaacaccgccaccgagactcttgtcctcggtgttgctccggcgatgaactctcagtacgaggcttccggcgagactttcgttgccgagaatgatgcttg

SEQ ID NO: 136952 - DNA, 248 bp, Arabidopsis thaliana
tcaaaggctctctctgtctctttctcaaaaatcatctgcaggaagtgaatcgtcaaaaccgagtttggaggatctgtcttgaggagtttttttttggttgagaaatggcttcgaaaaggatcttgaaagagctcaaggatctccagaaggatcctccaacttcctgcagtgctggcccagttgctgaagacatgtttcattggcaagctacaataatgggtccatctgatagtccttattcaggcggt

SEQ ID NO: 136953 - DNA, 248 bp, Arabidopsis thaliana
aacataagctaagaaaacgaaactcaactaattttgttatcacccaaaaagaagttcaaacacaatggctttcgctttgaggttcttcacatgccttgttttaacggtgtgcatagttgcatcagtcgatgctgcaatctcatgtggcacagtggcaggtagcttggctccatgtgcaacctatctatcaaaaggtgggttggtgccaccttcatgttgtgcaggagtcaaaactttgaacagtatgg

SEQ ID NO: 136954 - DNA, 307 bp, Arabidopsis thaliana
atattcatacagtaaacggaattaaaacataccagtagtaaacatctgaattcagcacttttctatgtttgcgagttcagtgacatctgaaaattacaaacttggcatctactgatcagcaagtaaaggccggtttcgaggaacaggagtgcacttcagggaatgagccatactcaagtttagtcctccagcctcatccatttggaccttgtctcctttgatactccagtcaaagcattgcaccatcattccaactgcggtgccaacaaagatataacccagacttgatccaggacagcctctccgt

SEQ ID NO: 136955 - DNA, 274 bp, Arabidopsis thaliana
atataaccgaacatcagacgtatataaaccggagataaccgattaaatggcggacatagcgattttggtggcggacgagtacgagaggaggatgaagcatacgacggtgggttcgagatcatcgccggtggaatttgattggtggaagataattccggcgaagatgactacagcttttgacatgatgaagattgagagtttgaagaagaattttgaagctaaatctgagtttgctttagccatctctcatggcttcttctctgcttgattccat

SEQ ID NO: 136956 - DNA, 82 bp, Arabidopsis thaliana
gttttctgtgttggaagattctcaagttatttattccgcaaaaaacggtttatcatttacaattagttgaattttggtcgtt

SEQ ID NO: 136957 - DNA, 349 bp, Arabidopsis thaliana
gaaacaggggcatatctgcatcgtggaaatcatgctcatagctttcataaccttgctttgccagcagggaactcgggcatctcgaggtcggcgagtttagtttcttcaaccctgcaaagatgggtcaggcctttttcagctgaaactggagataccgtggaagcagttgtgcctcatatgggggaatcaattactgatggcaccttggccacctttctgaagaaacctggtgagagagtccaggctgatgaggctattgcacaaattgaaactgataaggtgacaatagatattgctagcccagcaagtggtgtaatccaagagtttctagtcaacgaaggagatactg

SEQ ID NO: 136958 - DNA, 352 bp, Arabidopsis thaliana
agagaagaatagtttgatcatcttgtgagaaaaataatggctgcttcagtgatgctatcttcggtgacattgaaaccagctggtttcacggtggagaagacggcggctagaggattaccgtcgctcacaagagctcgtccctccttcaaaattgtcgccagtggcgtcaagaagatcaagaccgacaagcccttcggaattaacggcagcatggacttgagggacggcgtcgacgcctccggcagaaagggcaagggatacggtgtttacaagtacgtcgacaagtatggagctaacgtcgatggatacagtcctatttacaacgagaacgagtggtcagcgagtggtgacg

SEQ ID NO: 136959 - DNA, 362 bp, Arabidopsis thaliana
tgggatgacaatgacggagaagattctagctagagcttcggagaagtcattagtggttcctggtgataacatttgggttaatgttgatgttcttatgactcatgatgtttgtggtcctggtgcttttggtatcttcaagagagagtttggtgaaaaagccaaggtttgggatccggagaagattgttgtgattccggatcattatattttcactgctgataagcgtgcaaaccggaatgttgacatcatgagggagcattgcagggaacagaatattaagtatttctatgatatcactgaccttggaaattttaaggctaatcctgactacaaaggtgtttgccatgttgcacttgcacaag

SEQ ID NO: 136960 - DNA, 354 bp, Arabidopsis thaliana
atcagaataaaaacggtttgatttcgtcctctgagatccataaagttctgaatcgtcttggtatgacttgctctgttgaagattgtgtgagaatgattggtcatgttgatactgatggcgatggaaatgttaatttcgaggagtttcagaagatgatgtcgtcgcctgagctcgttaagggaaccgttgcgaactcttagagttccgattttctttttataaaaatttacattttaagttttaaaggtttttaacaacaaatttactttatatgtaagtaagcattctgctgtgcaaattttaaacttgtttcttttttttttcttttttttttccggcattgcatttaaattt

SEQ ID NO: 136961 - DNA, 337 bp, Arabidopsis thaliana
ctaaaatggcgacggcgttgaagaagaacagaaagaagagaggtcacgtcagcgccggacatggacgtatcggtaagcaccgtaagcatcccggaggtcgtggaaacgcaggaggtatgcatcaccacaggatcctcttcgacaagtaccatccaggttacttcgggaaagttggtatgaggtatttccacaagcttcgtaacaagttcttttgcccaatcgtgaacctggacaagctatggtcacttgttcctgaagacgtgaaagcgaaatcgagcaaggataatgttccgttgatcgatgtgacgcagcatggtttcttcaaagttttggggaa

SEQ ID NO: 136962 - DNA, 109 bp, Arabidopsis thaliana
cacaatgttgtgactatcgagggtttgaattcttctggaaatttgctggctgttggagatggcaatcacatatgttagcttcaccctgatggtaatagttctgactttt

SEQ ID NO: 136963 - DNA, 189 bp, Arabidopsis thaliana
cgagaaagagaatcggatctggacggtggttttggaatcttacgtcgttgatatgccggaaggtaactcggaggatgatactcgtatgtttgctgatacggttgtgaagcttaatttgcagaaactcgcgacggttgctgaagctatggctcgtaactccggtgacggaagtggttctcaggtgacgtg

SEQ ID NO: 136964 - DNA, 217 bp, Arabidopsis thaliana
cgaaccagcagaagagagtgatggagatttgggttttggcttgttcgattaagtgcattttacttgttttttcttcttcgatttgagactatttttttttcgtatcgagctattacttgttttggtctggctgaagaactataattagttgttttctgaaccatatgttgtatgacacaagttttcaagcaaacccatcggctccttctttccttag

SEQ ID NO: 136965 - DNA, 320 bp, Arabidopsis thaliana
gacaatgaaaggaacctcgaactcagagaacttgagataagagagacgaatcatgggacaaggaccatccggaggattgaaccggcaacgagatcggaagcctgacggcggagataacaaggagacgaactttgagccggccgcaccaccggctcgtgtatggaggaagcaaaggaagcagaaagggccagaggcggcggcaagacctctgacggtgactccgtctaccaagtgtaagctccggttactgaacttggcacggatcacggattatttgttgatggacgaatagtttgtggcgaatcatcagaggttgaaac

SEQ ID NO: 136966 - DNA, 331 bp, Arabidopsis thaliana
ctcgagccgattcggctcgagcggctcgaggaagtctcgaagctaacatgaaattcgtaataccaaaactacccttcagactctctctcttcctctccctctcttttctcatcatcttcctcttcgccttccccaccacattcctccgccgtcctctctcctcctcttcctccgtcacctccgttgccgacgaaggaatacggatccgtcaccatggatactcctcctacgaagcatacatcaaacaccagctcaacaaaactcagaacccgaagctacgtaaggtatggacaacgcgcgactgggacaggaaagttcgtgtgttctccac

SEQ ID NO: 136967 - DNA, 325 bp, Arabidopsis thaliana
gctgctgctgctgctgcaatccaggttgcaaagagacctgaaaatgccgggaaactcatagccgttgtgttcccgagcttcggggaacgttacctctcgacccagcttttccagtcgattcgagaagagtgcgagcaaatgcagcccgagctttgattttcttctgtaatttcgtgaccaacaaggaacctcttctttgatttattgctgattgtttttcttctaatagacgtttctgcagaaatctctacgtctactgtgtatatttacaattcgcaacgcaatttggtgtttgttattaataaaggcataagaggttttggtc

SEQ ID NO: 136968 - DNA, 247 bp, Arabidopsis thaliana
aaacatgtatgacagacatctttcttcgtataaaccaccttacataacaccaacacacagatacacacataaagaaagcatataagcagcagctttccctcctcatcttaagctttgagcatccgtagataatcatcgatgattgacatcgcagatgatcggtagcccgagccaaacaggttataatggttcaagtaatgatagagcaaatacagatgcctcctcttctcatatcccgcttgttttg

SEQ ID NO: 136969 - DNA, 82 bp, Arabidopsis thaliana
aacgaccaaaattcaactaattgtaaatgataaaccgttttttgcggaataaataacttgagaatcttccaacacagaaaac

SEQ ID NO: 136970 - DNA, 251 bp, Arabidopsis thaliana
ctattaacaaagcatcaatgtattgataaaacggtcgtcagtgttcaattccaaaatacatattgttaacttggtcacaagctataatccaatctatcaactaagttgcaagacaatgtcacacagaaattatttacgccattatgcactttaattatatttataaaatattaaacaacacaaccccatttcttaaacgcagcattgactttcatcagagttcaagactgatcatccataaacccagtact

SEQ ID NO: 136971 - DNA, 189 bp, Arabidopsis thaliana
cacgtcacctgagaaccacttccgtcaccggagttacgagccatagcttcagcaaccgtcgcgagtttctgcaaattaagcttcacaaccgtatcagcaaacatacgagtatcatcctccgagttaccttccggcatatcaacgacgtaagattccaaaaccaccgtccagatccgattctctttctcg

SEQ ID NO: 136972 - DNA, 217 bp, Arabidopsis thaliana
ctaaggaaagaaggagccgatgggtttgcttgaaaacttgtgtcatacaacatatggttcagaaaacaactaattatagttcttcagccagaccaaaacaagtaatagctcgatacgaaaaaaaaatagtctcaaatcgaagaagaaaaaacaagtaaaatgcacttaatcgaacaagccaaaacccaaatctccatcactctcttctgctggttcg

SEQ ID NO: 136973 - DNA, 238 bp, Arabidopsis thaliana
gagattatcaaccaaacccatttgttctgatttagttacttcaccaatcgattaaactgaatgaaacttatcggagaggttttatctgtacacaaaacctcagcagcagaatcagcagtttttaaatctgaacaataccagcatcaaatgcttttgatgaagtcccaatgtttttgtcgacctcatcttacgcattgtgctttctgctctttgcccataacggtactgcgggtgtacg

SEQ ID NO: 136974 - DNA, 348 bp, Arabidopsis thaliana
tggaaaatcccacctactaaattatctctttagcccatggcatacttctgagtccagcttcgtgcagtggactcgtacttgttcttgtcagtcttgtacatgtgagctggactcagaagtatgccatgggctaaatggaaaatcccacctactaaattatctctttatgaagaaaaaaatctgccttaatttctatgtatgattcgatagacatctctttgtgtccttttaactttctgaagacaggaccaaatgaagtgggtcttgttttaaacgaaacagaaaataacatcatctttgtgaaaactagaatctgatcatcttctgttgtttcttcttgtggtgaaa

SEQ ID NO: 136975 - DNA, 261 bp, Arabidopsis thaliana
gggaccgatagagaaccttgctgaccatttggccgatccagttaacaacaacgcatgggccttcgccaccaactttgttcccggaaagtgagccaagttttatctgtattttgcttcagtctttgcttcgtgagtgtgagaggagaaagagagcttgtttagatgtaaaatttgcaagactttgtatttttttcattaatcaaataactcgtttttctctcaaattatctggcaattaccaaattggattcgttttatgtc

SEQ ID NO: 136976 - DNA, 378 bp, Arabidopsis thaliana
attttatttgatagcccggcgattaataagattcctatcatcatcactcgccggctaatggccacaacgatgacacgtgtctccgtcggcgtcgtcctctttgttctcttagtctcgctggttgccgtctccgccgcgagaagcggtcctgatgatgttatcaaactcccttcgcaggcttctcgcttcttccgtcctgctgaaaacgacgacgattctaactccggtactaggtgggctgttctagtcgccggatctagcggatattggaattacaggcatcaggctgatatatgccatgcctatcaacttctgaggaaaggtggattgaaagaggagaatattgtggtattcatgtatgatgatattgctaacaat

SEQ ID NO: 136977 - DNA, 371 bp, Arabidopsis thaliana
aagagaaaaaggaaaaaatgaatttcatctccgatcaggtaaagaaactctcaagctcaacaccagaggagccagaccacaacaagccagtcgaaggaaccgaaacagctacaagaccagctaccaacgccgagctcatggcaagtgccaaggttgtagctgaagctgctcaagccgcagctcgtaacgaatcagacaaactcgacaagggtaaagtcgccggagcctctgctgatatcttagacgctgccgagaaatacggtaagttcgatgaaaagagtagcactggtcagtacctcgacaaggctgagaagtatctcaacgactacgagtcgtcacactccaccggtgctggtggtcctcctcctccg

SEQ ID NO: 136978 - DNA, 199 bp, Arabidopsis thaliana
ctctcgccgtcttatccttctccgtcacgctcacagttcctgggatgatctttccctcagagaccatgatcgtcctctaagtaaaaccggagaagcagatgctgccaaagtagctcaaatcctctcctcactcggttggcttccccaacttattctctcaagcgacgccactcggactagagagacactgaagtcgatg

SEQ ID NO: 136979 - DNA, 400 bp, Arabidopsis thaliana
agcaaatccaaaccaaagttctccattttcgtagcttctttaagctttttcagtatcatagagacacttttttttttttgattagaaatggctttagctgttacttcttcttcaactgcaatctctggatcgagtttctctcgttctggagcttcttctgaatcgaaagctcttcaaatatgttcgattaggttatctgatcgaacccatttgtctcagagacgttactctatgaaacctttaaacgctgagtcacattcacgaagcgaatcttgggttactcgtgcttcaactctaattgctcctgaagttgaagagaaaggaggagaagttgaagactttgagcaacttgctaaaaagcttgaagatgcttctccacttgaaatcatggataaagctc

SEQ ID NO: 136980 - DNA, 401 bp, Arabidopsis thaliana
aatgattcggtgcttcgcgtggacaccactagtaggtgctcccttaatcaccaccgtccatttcacatctccgccatctctcagaatcttcgcatctcgttcttccgcaccatcatcatcatcatcatcatcatcgacagttgcagcagcatctagaagatcaatatctctgtcaattatcgccgtcacgtcttccgtcgtctcctccttttgcttctcgtctccggcactagccgacttctctgaaatccctaattccggcggcgttaaagctctcgacctccgaatcggcgatggtgacgttcccattgaaggagatcagattgaaatacattactatgggagattagctgcgaagcaaggatggagatttgattcaacatatgatcataaagatagta

SEQ ID NO: 136981 - DNA, 386 bp, Arabidopsis thaliana
gctaacagtcaatcagaaaccacttccaaacactggtctgaagcactcaagtcatcaatctctgctgtcagtaaatatggtggagcaactgccggttatagaacgatgttagatgcgctcatccccgcttcaaaagtccttgaggagaagctgagtgttggggaggaccctattgctgcttttgttctgtctgctgaagctgcgaccgcaggagctgaatctaccattcatatgaaagcacaggccgggagatcaagctatgtatcagctgagatttttgcatcaattcctgatccaggaattgatgcagcggcatggtacagcgccgctgcaagagccgtgatagagcagaggcagaggttttgaatctgatggactacgctctg

SEQ ID NO: 136982 - DNA, 191 bp, Arabidopsis thaliana
ctcgagccgaatcggctcgagccctactctgagtttgtccacagtggattactttccatcttcttatacctttcaatcgcattttcaccaaccactaaaatggacctttttatgtatttgtgttaagtaatatctccattgtccttgttttgctttcttctgaacaaagaaataatatgtaccttactttt

SEQ ID NO: 136983 - DNA, 122 bp, Arabidopsis thaliana
tttttttttttttttttttttttttttttttttttttttttttttttttttttttatttaaaaacttacaaaataaaaattgttcttctttgaacgacaaacaatttttattttgtaagttt

SEQ ID NO: 136984 - DNA, 295 bp, Arabidopsis thaliana
gtcgaaggaattcacctagaaatgactggtcagaacgtgaccgagtgcatcggtggttcacgcacagtcacattcgacgacttgggttcacgttaccacacgcactgtgatcctcgccttaatgcttcacagtctcttgagctctccttcatcatcgccgaacgtcttagaaagagacgcatcaagtctcaaaaggcttttgccctctaatcaaataaacattgcttataataatatctatctatataaatgtgtgtgtgtgtgaacttaatacaatctcatttatctttgattc

SEQ ID NO: 136985 - DNA, 339 bp, Arabidopsis thaliana
cagttcgctaaaagagagaagcaacagatcaagaagcttgaatcttctcttaagctctacgctcctgaatctgcccctgctcttgctctcaatgctcagatcgagaaaaccaaacgcaggttcgacaactacgggaagtacggattgttatgcgggtcagacggtttaccgcacttgatattgaacggagaccagcggcattggggagagttcattactccagggattcttttcctctacattgctggatggatcgggtgggttggaagaagctacttaatagctattagtggtgagaagaaacccgcgatgaaagagatcatcatcgatgttcctttg

SEQ ID NO: 136986 - DNA, 397 bp, Arabidopsis thaliana
gaaacattcttgatagatacaaaaaacatttttcagacacaaaatcataaaatctttgcctttagtagatcaaagttctttacattaatcgttagaagatgagccagtacgatcacaaccagtctgcaggagctaacccaccgccaccgatgtctacctgtacatcaccaccaccgccgattggttacccgactaaccaaccgagtcatggttcggtagctcagggtaaagtggaaaccaagtctaagggtgacggattcttcaaaggctgtcttgcggccatgtgttgctgttgtgccctggacatttgcttctaagccatttgggaattgggatggtctatttatgacgagtttatgtgaatgtgatgtgaattattattattctctccagcctt

SEQ ID NO: 136987 - DNA, 416 bp, Arabidopsis thaliana
caagaactcaaacacttcataactaaacatcctttaaagccttttcaaaaactcaatcatgtcaagcaactgcggaagctgcgactgtgctgacaagacccagtgcgtaaagaagggaaccagctacaccttcgacatcgtcgagactcaggagagctacaaggaggccatgatcatggacgttggtgccgaggagaacaacgcaaattgcaagtgcaagtgcggctcctcttgcagctgcgtcaactgcacttgctgccccaactaatgaagcttctttaatcaaaatgtaatatgaataaaagttgatgtgggctcatctattgagctcatgtctctcttattactactctctagtatggtgtgatgtaatgggttatgacccttctttcccttccctataaaactaaagaaac

SEQ ID NO: 136988 - DNA, 261 bp, Arabidopsis thaliana
gacataaaacgaatccaatttggtaattgccagataatttgagagaaaaacgagttatttgattaatgaaaaaaatacaaagtcttgcaaattttacatctaaacaagctctctttctcctctcacactcacgaagcaaagactgaagcaaaatacagataaaacttggctcactttccgggaacaaagttggtggcgaaggcccatgcgttgttgttaactggatcggccaaatggtcagcaaggttctctatcggtccc

SEQ ID NO: 136989 - DNA, 388 bp, Arabidopsis thaliana
aaggatgagacgttgcaacctttttatatatattatgcaacagacatgaagttgaagaatgacatactgtaggagcaaaagttgcaaccatggaaaaagctaaaaattgaagctttgtaatgttccattctcttacacaaagatgctactatctggagccactagaccctcaagtttccatccaccaggcccggacagcgcaaaagcttcttcccaggagttgccaaaagcctgaagcaaagcagcattgcatgttttcaacttaatagaagctccagagagcatggaagctgcttcttcccaacccttattatgccccatacacatgatagtggagatatcaggggttgaatatttggagataatgttttgaagatgctcggctgtt

SEQ ID NO: 136990 - DNA, 350 bp, Arabidopsis thaliana
actgtgaaacaaaacaagcaacgtttcgttgtctattatttagcaaccttttatttatacacacaaatgtaatacgaatgcaaagcagggagagaagtgacaaataatcaacttcatttacatctaaagttgaaatttctattcacttatccaaaagtactaggacaatatgactcatcggtgaaggcgtctggtgctgacaagttcaatgtcaaaaacgagagttccaagagtagaaccttctccattggcgagacgtgttgggttaaatatagtcgtgaagagtctctgtctgtcaaagaagtttggtgggagaggctcctgtgatgtattctggtatccctgagatg

SEQ ID NO: 136991 - DNA, 366 bp, Arabidopsis thaliana
catgtaaaggcactgattttatatatcacacaatgaaactgttactacaagttaacgtaagagaatagtgaaggaacaagatcaacaacggaccaggcaaggcctgcatattggaagaaccttataccagtatcaatatcaaacgagtcgtggctcaaaaactcgcatagtttctgcaaatatccaactgaattcttgggttcgtctgtcttcttcccacttgcataccccttgagcttgggaatgtacatgctggatcttattggaatcccaagtgcgttggataccattggtaaagtccattttgcaagagatttactgcagaacttcactaatagtatcgtcggtattcccaccatgactcta

SEQ ID NO: 136992 - DNA, 191 bp, Arabidopsis thaliana
aaaagtaaggtacatattatttctttgttcagaagaaagcaaaacaaggacaatggagatattacttaacacaaatacataaaaaggtccattttagtggttggtgaaaatgcgattgaaaggtataagaagatggaaagtaatccactgtggacaaactcagagtagggctcgagccgattcggctcgag

SEQ ID NO: 136993 - DNA, 343 bp, Arabidopsis thaliana
attagaaatatacttcatttatgatgtacgaaaagaaagatcgaatgtgtaataccaaaattagagagaaaaatatcttaataatttttttcataacttaaaaaacgtaatagtttcgcagaaaagaccttcagaaagtgtaacaaaaaattataaaactaacaaaattcaaccaaagagaaacgaaagacagagatagcgaggctgaaggaccaggggtctttactagcccaacgaagggaactgagctgtgtctccaatcgccggagctgcagcttcttttgcatacctttggtttcctccttcaccacgaccaccgcgacctcctcttccgcgggagcct

SEQ ID NO: 136994 - DNA, 270 bp, Arabidopsis thaliana
aaaccaatgggtgactatgtatatccttagaagcatgataaagcaccattgaaaatttgaaatatatcaagaagattcagatggaagtttttttaacattgtcaaaaggagttccaatcgaacaaagtgtacattttggaaacaacttgcttaccgtcatcgctggaactgccgagagagctcccactctctaagccatttctactttttttaagagcttccaaaatgtacactttgttcgattgggactccttttaacattgtcaaaag

SEQ ID NO: 136995 - DNA, 140 bp, Arabidopsis thaliana
aaatttttctcagtacccaaaaacatatgaatttaaaggaccacatataaatcaaagagacagagaattcaaatactcacagcccatagaggaagaatcggggctcgaccggttgacgaaaagccaaacccaatccggta

SEQ ID NO: 136996 - DNA, 230 bp, Arabidopsis thaliana
cgcccttttttttttttttactttggcgtatatatgtggatcgaataataaacgagaacgtacgttgtcgttgtgagtgtgagtactgtattattaatggttctatttgtttttacttgcaagttttcttgttttgaatttgtttttttcatatttgtatatcgattcgtgcattattgtattatttcaatttgtaataagattatgttacctttgagtggttgtttatc

SEQ ID NO: 136997 - DNA, 333 bp, Arabidopsis thaliana
gtgttggggttgatttgtggagcacaggctgtatcttaggtgaactatattccgggaaaccaatcctggccgggaaaaccgaggtagagcaactgcataaaatcttcaagctatgtggttcaccgacagaagattactggaggaaactaaagctaccaccttcagctgcatttagacccgctcttccatatggaagacgtgtagcagagatgtttaaagacttgccaacgaatgttctttcccttttggaggctttactctccatagatcccgatcggagaggctctgcagctagagctcttgagagtgagtatttcagaacagagccgtttg

SEQ ID NO: 136998 - DNA, 68 bp, Arabidopsis thaliana
tgaaataagtgttcttttaactgtttagacgcaattgccttcactctctacttcttattacaattctc

SEQ ID NO: 136999 - DNA, 114 bp, Arabidopsis thaliana
attttgcttcagtctttgcttcgtgagtgtgagaggagaaagagagcttgtttagatgtaaaatttgcaagactttgtatttttttcattaatcaaataactcgtttttctctc

SEQ ID NO: 137000 - DNA, 157 bp, Arabidopsis thaliana
gttctagatcgcagcgactctctaagtttatgtttctttatattgtcctgtgtttcgtcgtcgtcccctattaaaattacctgccagtttacttttctctcttcttgttttctgtgttggaagattctcaagttatttattccgcaaaaaacggttt

SEQ ID NO: 137001 - DNA, 295 bp, Arabidopsis thaliana; identical to SEQ ID NO: 123622

SEQ ID NO: 137002 - DNA, 156 bp, Arabidopsis thaliana
ttgaaactttggactaaaagaatggcgtctttgggtgtgtcggaaatgcttggtactccccttaacttcagggcagtttcaagatcgtctgctccgttggcatcaagcccatccacgttcaagactgttgctctcttctctaagaaaaagccagct

SEQ ID NO: 137003 - DNA, 99 bp, Arabidopsis thaliana
gtggtttctaatagcggtggcgacaatcgccgccgtcgtatcctacaagctaatccaacggctaagatacaagttcccaccaggtcccaagccccaagc

SEQ ID NO: 137004 - DNA, 349 bp, Arabidopsis thaliana
ctttgatgaaagcaggagactttttgatttcgattttgattttgatttggggtttaggtttaagtttttagagaatcagatgaaggcgttacggagaagctatacttcaacgtcttctgggaattcatcttcttcgtcttcgttaccttcttcgtcttcttcttcgttaccatcttcttcttcttcttcacctccttcttctaattctaattcttattcgaattctaattcttcttcggcttcgtcgtcgtggatccatctacggtcggttctctttgtggctaatctttcgtctccgtcttcagttacttcttccgatcgccggcggaaatcaccgtggtctcgccgg

SEQ ID NO: 137005 - DNA, 205 bp, Arabidopsis thaliana
aaaaaaaaccaagaaaaaagaataaaaagcaaaaagcattgagcgtctccggagattaggattaaattagggcataacccttatcggagatttgaagccatgggaagaagaaaaatcgagatcaagcgaatcgagaacaaaagcagtcgacaagtcactttctccaaacgacgcaatggtctcatcgacaaagctcgacaacttt

SEQ ID NO: 137006 - DNA, 288 bp, Arabidopsis thaliana
agagaaaaagaggttcgatttctatacaaagataccacaaaggaaagttcacaaatttacatagaatagaccacaaacaaactctctttctctgctctcattcacataataagcagccgctcactttccggggacgaagttggtggcgaaggcccaagcgttgttgttgactgggtcggccaaatggtcggcgaggttctccaaaggtccctttccggtgacgatggcttgaacgaagaatccaaacatagagaacatagccaaccttccgttcttgagctccttcac

SEQ ID NO: 137007 - DNA, 68 bp, Arabidopsis thaliana
gagaattgtaataagaagtagagagtgaaggcaattgcgtctaaacagttaaaagaacacttatttca

SEQ ID NO: 137008 - DNA, 203 bp, Arabidopsis thaliana
aaaccgaattttgtatctaattgtatcgaaaccacatcaatcattatctgtatccataacacaaatctcagccatacagtctctaaatgggtaaagtacaagtatcatacataggttcactcacgagcaacaccagcaagttgtttcccaacattcataccatggtcgagtcccacaagagcttcgggagcattctcaagccc

SEQ ID NO: 137009 - DNA, 114 bp, Arabidopsis thaliana
gagagaaagacgagttatttgattaatgaaaaaaatacaaattcttgcaaattttacatctaaacaagctctcgttcgcctcgcacactcacgaagcaaagactgaagcaaaat

SEQ ID NO: 137010 - DNA, 163 bp, Arabidopsis thaliana
aaagataaaccgttttttgcggaataaataacttgagaatcttccaacacagaaaacaagaagagagaaaagtaaactggcaggtaattttaagaggggacgacgacgaaacacaggacaatacaaagaaacataaacttagagagtcgctgcgatctagaac

SEQ ID NO: 137011 - DNA, 358 bp, Arabidopsis thaliana
cttgctgaaaagggacattttaccacttgtgcaaatatagacaatcaatacaaaatatctgtttttgttattgctacaaagaaacaaccagaaattatattcttctctttgttttatctatcttacacatttgctgatgatcttcatatatagaaccaccacacaaaggaaacttccttgaggaatttatactctttgtcttttcgagctcatgcgtggcgcgaacccttttaaaaagccgagtcaaagatgatcagatcagcttaaacattctcaaaaccactttctcatggattaagtgagcttctttcaccttataatccttatcccatatagtgttgtttccacacctaaagac

SEQ ID NO: 137012 - DNA, 312 bp, Arabidopsis thaliana
gattgatccacatggcttccgctgccgcaagttccgccttttcactccttaagtccaccggcgctgttgcttcctccgccggaactcgcgcacgtgcctcccttctgccaattccctctacctctgtttccgcgcgtcctctaagcttctccgccactctagattcccgtcgtttctctctccacgttgcttccaaagttgaatcggtgcgtgggaagggaagcagaggagtggtttctatggcgaagaagagcgtcggagatctgacctcagctgatttgaaggggaagaaggttttcgtgagagctgatc

SEQ ID NO: 137013 - DNA, 316 bp, Arabidopsis thaliana
gcaagacatacatggaagtgaaaggaactggaacggctaaccagtgccctactattgacggtggctctgagactttctcgttcaaacccggaaagtatgcaggaaagaagttctgcttcgagcctacttccttcaccgtcaaggcagacagtgtaagcaagaacgctcctccagagttccagaacacaaagctcatgacccgtcttacctacacccttgacgagatcgaaggacccttcgaggttgcttcagacggaagcgtcaatttcaaggaagaagatggaatcgactatgctgcagtcacagtccaacttcc

SEQ ID NO: 137014 - DNA, 337 bp, Arabidopsis thaliana
caacgacgacgagccatggcttcaactttcagcggcgatgaaactgctcctttcttcggattccttggcgctgccgccgctctcgttttctcctgtatgggagcagcgtacgggacagcgaagagcggggttggtgtagcgtcgatgggtgtgatgagaccagagcttgtgatgaaatcgattgttcctgttgttatggctggagttttaggtatttatggtttgatcattgctgttatcatcagtaccggaatcaaccctaaggccaagtcttactatctattcgatggctatgctcatctctcttccggtcttgcttgtggtctcgctggtctct

SEQ ID NO: 137015 - DNA, 315 bp, Arabidopsis thaliana
agaagattagagactacagagacagagaagatgggcatggcaatgaagtcagtttctaacttcgcaatctttttaatcctctttttggtcacctctgaaatatctgagatagaagcgaaagataaggaatgtctaaaaggatacattgatgcgcctttaagctattgtatggctaggatttatccgtcgttgtgttatcgaaattgtcgtttttacaagggcgcgaaaggtggaaaatgcgacggtcttaagtgcttctgcgacttctgcagcgacaagcctttttagtcagtttctgatgagaaatgtttgaat

SEQ ID NO: 137016 - DNA, 316 bp, Arabidopsis thaliana
gagcaagccattgcgtaaagagactgcgttaacgactcccatcagcatactattcacttggcaagaacatgccaagattctcagacacacaattcccctcaaacgatggatttgttcacactgagacaccaggattctgggaaaataatgacctgcaaagcattgttcagatgggttttggagatatcctccagcaacagagcaacaacaacaacaacaactgttctgagccaacgcttcagatgaagcttgaaccatagtccatagctatgattattatctctgttgtacatacagaaaaccaagtagtgatgag

SEQ ID NO: 137017 - DNA, 334 bp, Arabidopsis thaliana
taaagagatgcaggactcgagcgcttttgctgcacggaagcttcgcctaatgatgtctggctcctctgctctccctcgacctgtcatgcatcaatgggaaagtatcacaggtcatcgtcttttggaaagatatggcatgactgagtttgtaatggcaatgtcaaaccccttacggggtgcacgaaatgcaggtactgtcggcaaaccgcttcctggtgtggaggctaaaataaaagaagatgaaaatgacgcaaatggagtgggtgagatatgtgttaaaagcccatctttgttcaaggagtactggaatcttccagaggtgactaaagaatca

SEQ ID NO: 137018 - DNA, 316 bp, Arabidopsis thaliana
caaaacaaaaaattatattcaagagaaaaaggaaaaaatgaatttcatctccgatcaggtaaagaaactctcaagctcaacaccagaggagccagaccacaacaagccagtcgaaggaaccgaaacagctacaagaccagctaccaacgccgagctcatggcaagtgccaaggttgtagctgaagctgctcaagccgcagctcgtaacgaatcagacaaactcgacaagggtaaagtcgccggagcctctgctgatatcttagacgctgccgagaaatacggtaagttcgatgaaaagagtagcactggtcagtac

SEQ ID NO: 137019 - DNA, 312 bp, Arabidopsis thaliana
cacatttatcattacagtctgatttgagctaagttctctcatcataaactctccttggagaatcatggctatttcaaaagctcttatcgcttctcttctcatatctcttcttgttctccaactcgtccaggctgatgtcgaaaactcacagaagaaaaatggttacgcaaagaagatcgattgtgggagtgcgtgtgtagcacggtgcaggctttcgaggaggccgaggctgtgtcacagagcgtgcgggacttgctgctacaggtgcaactgtgtgcctccgggtacgtacggaaactacgacaagtgcca

SEQ ID NO: 137020 - DNA, 314 bp, Arabidopsis thaliana
ctcggctttgcttgggattgagcaagctcctcaagaggagtttccacaatttacggaacggtaagatgggacagctaccgagaacagatcagaaaaacaagtcaaaatgaatgattttgatttgaatgatatctatatagactcagatgacacagacgtcgaaagatctcctcctccaacgaatccagcgaccagttctcttgattatccttcatggatacatcagtctagtccgcctcagacaagtaggaattcagattcagcatctgaccagtcaccctcaagttctagtgaagatgctcagatgcgcacag

SEQ ID NO: 137021 - DNA, 324 bp, Arabidopsis thaliana
gagtgtgttatcacctgtaactgtatgatagagttagtcaattgaacaagattcagatgggaataactactttcaaataagatattgattgcctcttgtatccttattgtagtgtttgttagtatactatatcctcaattcatgatattatcttgttacaaaaataattgcagggaacaagacttggaagttcagatccaaaagggtgttataatatcggactgccatctgggaaatcactttttcagattcaagctgagaggatcttatgtgtccaaaggcttgcttctcaggcaatgagtgaggcaagtccaactcgcccag

SEQ ID NO: 137022 - DNA, 311 bp, Arabidopsis thaliana
attccctcctcctcttcatctcttttgcagatatggatggttattattctctgtctcccatctctgtcctccaccggattaaagattccttccatttcgccgtctctgcccttctcgccaacctcttctccgctctcttcaccttcttcttcgctttagtggggactttgctgggagcattgacaggggctttgatcggccaagaaacagagagcggtttcatcagaggagccgccgttggtgctatctcaggcgccgtcttctccatcgaagtctttgaatcttccctcctcctttggcaatccgatgag

SEQ ID NO: 137023 - DNA, 317 bp, Arabidopsis thaliana
acgagaagaaaaaggcgaaaacctcgccaatccgattacgcgaaaaatcaaaggtttttggatatggcgtcgaagcggatcttgaaggaattgaaggatctccagaaggatccacctacatcatgtagcgcaggtcctgttgctgaagacatgtttcactggcaggcaacgataatgggtccttcagagagtccttatgctggaggtgttttccttgtaaccatccatttccctccggattacccattcaagcctcctaaggtggcctttaggaccaaggtgttccatcccaacattaacagcaacggtagcatttg

SEQ ID NO: 137024 - DNA, 379 bp, Arabidopsis thaliana
ctcgagccgctaagatgtggtcaagaccacttcctgaagtttatgattcacaagctgttgcagattactttaattgcaggcctcatgtcgttgcctttaggcttctcgaggtattttctgcgttcacgattgctgccatcagattacgaacatcagcatcagttaagggcaaaagtttagaagcttcagagcagatttttgggatggtgttgaaagaaaccatgctacatttgggcccaacttttatcaaagttggtcaatcgctttccacgaggccagatatcattgggactgaaatctccaaggcactatctgaactgcatgaccgaatccctccctttccctggcctgaggctgtaaaaatccttgaaggggaatt

SEQ ID NO: 137025 - DNA, 241 bp, Arabidopsis thaliana
cgtgaagcgccgtgattttgctacttgaagatcgggtaccgtttccctgagctattggctaggaacggagtgaagttcggagaaacggtttggttcaaggctggttcacagatcttcagcgacggaggattggactacttgggcaacccgagcttggtccacgctcagagcatcttagccacttgggctactcaagttatcctcatgggagctgttgagggctacagagtcgccggagatg

SEQ ID NO: 137026 - DNA, 382 bp, Arabidopsis thaliana
tgatttcttcaggttggagctcaatagtagaaacgaaatcgacgatgacgaagacgaagatgaagatgatggagatgaagaagaagaggatgaggaagagaatttaaccgtcaacgacgaagaagacgaagaagatgatctgaggaggagaaatcgttttcctctcacgacgacgcagtcgagaaccggaagaaacagaattctcgattgggctgagattttgatgggaatcgaagacaattcgattgagttccgtatggaatcagatcgatacgcatgaaatccggctgattacatagacgatgcagccggatacgaagctttgctacagaatttagcagaaggagatggtggtggtggcggatgaaggagacgcgcacca

SEQ ID NO: 137027 - DNA, 316 bp, Arabidopsis thaliana
gagaaaaatgtcttgctgtggaggaaactgcggatgtggatctggctgcaagtgcggcaacggttgtggaggttgcaaaatgtaccctgacttgggattctccggcgagacaaccacaactgagacttttgtcttgggcgttgcaccggcgatgaagaatcagtacgaggcttcaggggagagtaacaacgctgagaacgatgcttgcaagtgtggatctgactgcaagtgtgatccttgcacctgcaagtgaagaagcctttttaaataagcagagataatcgagtctctttaattaattaagttattcaataag

SEQ ID NO: 137028 - DNA, 373 bp, Arabidopsis thaliana
atatacaaacactagaagtcttataaattcaaagtatgtctgagttttacaacattagagagaaagagaacaacacagaaacatttatagaaacatgattacacatgcgctaacaactttaagatttactgagccaaagcacttgtgttgtacacaagaagagcacctccggcaagaattccggcgagagttaccgcccaaattgccaatccggtgactcctcccttgtacacgtcaccactcgctgaccactcgttctcgttggaaataggactgtatccatcgacgttagctccatacttgtcgacgtacttgtaaacaccgtatcccttgccctttctgccggaggcgtcgacgccgtccctcaagtcca

SEQ ID NO: 137029 - DNA, 310 bp, Arabidopsis thaliana
agagaaaaagaggttcgatttctatacaaagataccacaaaggaaagttcacaaatttacatagaatagaccacaaacaaactctctttctctgctctcattcacataataagcagccgctcactttccggggacgaagttggtggcgaaggcccaagcgttgttgttgactgggtcggccaaatggtcggcgaggttctccaaaggtccctttccggtgacgatggcttgaacgaagaatccaaacatagagaacatagccaaccttccgttcttgagctccttcaccttcaactctgcgaaagcctcg

SEQ ID NO: 137030 - DNA, 372 bp, Arabidopsis thaliana
cattgaatcgtcatattttattacttattgatgtatccatatatagtgtgcaaatgaaaaagaaaagaaatgggttttgaaacaaaagtcaaataaatttcacccatgttgcttgttttcatgagaaactcaaaaacataccacaaaagaaaacagagtaaaatataccaaaacattacaaggactgtagccgataagagagagagatactctggatttcactcggctctagactgaccagctcgagaagagaggatgataccaacaatgagaccgtacagggcaagtgcttcagcaaagatgagaatcagaatcattcgcacaaacaacttaggttgttgtgcattcgctctaacaccggcatcgccgaca

SEQ ID NO: 137031 - DNA, 319 bp, Arabidopsis thaliana
aaagaacacaactctataatggattccttatgaaattgaatgtttgtttatgaagagtacattaccccaaagaaagattgaaagatgaaaaacaaaacagagaggaaaaaaagcaagaatattgaaaaactagaccgacaaaaaagccaataccacatcaactcaagtagtaggcaaaaagaaagacgcaaaacaaaaattaaaactactctcttgtagaggagcgttaaaagcaaagtcaagatgaaccaccacctcgagctccaccacgacctccttctccgcggcctcctcttccacctcctccgttttgaggaac

SEQ ID NO: 137032 - DNA, 383 bp, Arabidopsis thaliana
ggtattgattcttgacattattgagtcaaagtacatgatacaggaaagaaggaaattacattttatgcatacgtgtcatataatcaaaagaacaaggagtagcaatgaaatccatggttgtctttattcttgattttccagagatttctttagctcttttttgttcacctttcccatggcgttgcgaggcaagctctcccatatcagcaatcttgttggtagcttgtaaggagcaagcttgtctttagcccaaccgcacagttcttctaaggttattacaggttttgactcatcctctcttctcttctttgctgcactctctgctataattatcgcagtcacggcttctccatagtcgttgtctgttaaccccaacacgcaac

SEQ ID NO: 137033 - DNA, 353 bp, Arabidopsis thaliana
catgaaactttttaaaattcatgtttgaataacataggatttataaattctacacaaatctcttaaacttccactttcaatacacccccttattcatttaccttttggtaaacaaaaaagtaggacacgagtagcaaaatattttattctatacttatttaaaaacatgtatacacacatgtcattattggatttttgaagcaaagttagaaataacaagattcaagtttcttagctctctctcgtgcactactctcagcctctgcattgccttccatggagtaacttttctccagcaaacgccacatgaaaggaataccatctctggccttaatcctctctctgattacttc

SEQ ID NO: 137034 - DNA, 195 bp, Arabidopsis thaliana
gagagaaaaacgagttatttgattaatgaaaaaaatacaaagtcttgcaaattttacatctaaacaagctctctttctcctctcacactcacgaagcaaagactgaagcaaaatacagataaaacttggctcactttccgggaacaaagttggtggcgaaggcccatgcgttgttgttaactggatcggccaaat

SEQ ID NO: 137035 - DNA, 353 bp, Arabidopsis thaliana
gatgaagccaagaataagtagcataaataaacaggatctccaagagatgagtgaagttacaatgattggtgcatcaaaatctgtgtaacgtgtaatctaaaaaaaatcaaggaagactactagtgtgtatatatgtgtgtgtgtgtatgcctatacctcatgtacaaagaagagaagaaagaagagttcaaaatcaattcaaagatgtcttctgcacaagggacaagaagcatgcctgcgaaaccatttgtcgatgcatggtaggtggaacatatgatggcagtgcggcaaacttctaactgtctctcccacctgaaagtcctgaaggcagacagagcaagagacaatctccg

SEQ ID NO: 137036 - DNA, 347 bp, Arabidopsis thaliana
aacgaaaacatcaaatcataatttcaccacaagaagaaacaacagaagatgatcagattctagttttcacaaagatgatgtttttttttgtttcgtttaaaacaagacccacttcatttggtcctgtcttcagaaagttaaaaggacacaaagagatgtctatcgaatcatacatagaaattaaggcagatttttttcttcataaagagataatttagtaggtgggattttccatttagcccatggcatacttctgagtccagcttcgtgcagtggactcgtacttgttcttgtcagtcctgtacatgtgagctatctcgggcaccaaaggatcatccgggtttgga

SEQ ID NO: 137037 - DNA, 325 bp, Arabidopsis thaliana
ccttgaggtctcggatattatgattagtcatatatcgttacgacaggcattgatcgtctgataggattagatatggaacgactctatacacgaaaatatttagtctttctgtagaatctatccctcttactaaggaaccctttgctttgggtcttgacaacaatatacattagtgattctggttctgtgttggtgtaggatgttcaggtaatcaggtacgaagtgcgactggagcagacagagataagtagttgacgtaaccttcagagaccgagatcacaaaccgatggcaagcaagcgcagtggtggtgagagacatgacaaa

SEQ ID NO: 137038 - DNA, 242 bp, Arabidopsis thaliana
acaagaaaaaattgacctttatggaaccggattttctatttttgatctcagatgtctcgcttcttcgacaaataatacaatcaagcacatcacgatgatagactaaccaaagattaatctaaagagaaagagtaacaacaaaagtaacaacaaatgggggcatttcctccacttcagtaacgaaaatttgaaaaagaagaataagcagcagcagaatctgacacggtagaagttcttttttt

SEQ ID NO: 137039 - DNA, 143 bp, Arabidopsis thaliana
agagaaaaagaggttcgatttctatacaaagataccacaaaggaaagttcacaaatttacatagaatagaccacatacaaactctctttctctgctctcattcacataataagcagccgctcactttccggggacgaagttgg

SEQ ID NO: 137040 - DNA, 325 bp, Arabidopsis thaliana
gaaacagaacattaaaagctttattattcacagttttattcatggcaagcttaggaacagtccataactaagatgaaagcggagaagaagcacaagtgcgaaaaagagaccaaattgaaagtgttattaaaagtattcagagagaccaattggcttcacttcctcgacgagggatactgttaacacgattgtacacatccaccttgaagttggcaccgcatagaactccttcactgtctaccctcggcatcgccttgatcttgttcattggatgctcaaagctcattaaccctccttcactatggaacatacaccctgtaggaaa

SEQ ID NO: 137041 - DNA, 393 bp, Arabidopsis thaliana
aaattcaaccattggacatgctctaacagtcaaaagaaccaatataaaaggatgaacattgtccatacaattctgagttttaaaaatgcaaatgaaaagacaacaaacaatgtcttaatccgaatgtttaaacaacttgagagaccacatagacacgtgtgttcatcagattcatgaaagtttcgactaattttaaacattcaaagaaagcttttgagctgcaagggcttcagcctcaagagttggctcccacaggagtgtggtctctgccaaaagtgaggtcacaatgtatgggtccatgttagatgctggacggcgatcttctaagtaaccttttcctttcgcctcggtgtcacgtcgcacacgaatagagcatccacggttagccacgcc

SEQ ID NO: 137042 - DNA, 371 bp, Arabidopsis thaliana
cctatatatacccattccttccatttgtagattccatattattcacgattctcatcaaatcatctccgatactcacaaccgaaataactaacccctcctcaacaaaaaacaacaaaacatgtacactccatcatacttaaaatattcaataatctcaattatatccgtattattcctccaaggaactcatggagacgacggaggttggcaaggtggtcacgccacgttttacggcggcgaagatgcttccggcaccatgggcggagcttgtggctatggaaatttgtatggccaaggttacgggacgaacacggcggctttaagtacggctctattcaacaacggactcacgtgtggcgcgtgctatgaga

SEQ ID NO: 137043 - DNA, 405 bp, Arabidopsis thaliana
ctaaaaacacttatcgtttcgtctcttctctgatccattgttgaagatgtcgaagagaaaaactaaggagccaaaggttgagactgtgactcttggaccttctgttcgtgaaggagagcaagtttttggtgttgttcacatctttgcatctttcaatgacactttcattcatgtgactgatctctccggtagagaaactctcgtccgcatcaccggtggcatgaaggtgaaggctgaccgtgatgagtcctctccttatgctgctatgcttgcagctcaagatgttgctcaaagatgcaaggagcttggcatcactgccatgcacgtgaagctccgtgctactggaggaaacaaaaccaagactccaggtcctggtgctcagtctgctcttagagcccttgctcg

SEQ ID NO: 137044 - DNA, 215 bp, Arabidopsis thaliana
agaacggaagattggctatgttctctatgtttggcttctttgttcaagccattgttactggaaaaggtcctttggagaatctccttgaccatcttgacaaccctgttgctaacaatgcgtgggctttcgcaactaagtttgcacctggagcttaaattttcaagtcttgatgtgattcttgtaatgatatgaacataacctttcttgttcctctc

SEQ ID NO: 137045 - DNA, 399 bp, Arabidopsis thaliana
gctctacttctctctctctctctagattcgaaaaaatggcgaaactggtgatgttgttggttctctgtatcttaccggcgatagccatggcggcaaggaggggaaatattggaaagaatacaatggtggttcaaggtagcacctactgtgacatttgcaaattcggcttcgagactcctgaatcctcctacttcatccccggtgcaacggtgaagctatcatgcaaagacaggaagacaatggaagaggtttacacagacaaagctgtatcagacaaagaaggaaagtataagttcattgtccacgacgatcacagagaccagatgtgcgatgttttgcttgtgaaaagctcggataaaacctgctctaaaatctccgttggacgtgagaagtctcgtg

SEQ ID NO: 137046 - DNA, 399 bp, Arabidopsis thaliana
caaaaacgattttacaagaaaaaaatatctgaaaaatgtcagagaccaacaagaatgccttccaagccggtcaggccgctggcaaagctgaggagaagagcaatgttctgctggacaaggccaaggatgctgctgctgcagctggagcttccgcgcaacaggcgggaaagagtatatcggatgcggcagtgggaggtgttaacttcgtgaaggacaagaccggcctgaacaagtagcgatccgagtcaactttgggagttataatttcccttttctaattaattgttgggattttcaaataaaatttgggagtcataattgattctcgtactcatcgtacttgttgttgtttttagtgttgtaatgttttaatgtttcttctctctttagatgtactac

SEQ ID NO: 137047 - DNA, 322 bp, Arabidopsis thaliana
ctggatgaatgcgtttaacgcagctgctagtggacctgactcattgaagagatatggatctggcggccatagccgtcgttacagtgatccagcacagaatggtgaggattcttctggatctggtggcagctcccgtcgcaccacaccaaaccggctcccaccagctccgccacagtctggatcatcttacaggtattagaaacctgtttggtttccaggattgttattgaacgaaccataaaacacattcttttctttctttttctgccctttcggattggtccctgtttctgggactatttttcttatgtctcactagttt

SEQ ID NO: 137048 - DNA, 110 bp, Arabidopsis thaliana
tcaaaatatatcgagtgtactttcaactctcttgcatcattgttttttactctttgtcttgatcaagaatcttgaaactcaggattgttaatgtatattactctttcttt

SEQ ID NO: 137049 - DNA, 394 bp, Arabidopsis thaliana
ctaaaaactcctcctttcatttccaaacaaaaacttctttttattctcacatcttaaagatctctctcatggcgatgtctttctcaggagctgttctcactggtatggcttcttctttccacagcggagccaagcagagcagcttcggcgctgtcagagtcggccagaaaactcagttcgtcgtcgtttctcaacgcaagaagtcgttgatctacgccgctaaaggtgacggcaacatcctcgatgacctcaacgaggccacaaagaaagcttcagatttcgtgacggataaaacaaaagaggcattagcagatggtgagaaagcgaaagactacgttgttgaaaaaaacagtgaaaccgcagatacattgggtaaagaagctgagaaagctgc

SEQ ID NO: 137050 - DNA, 60 bp, Arabidopsis thaliana
gttttgtgcatagaacccacccacctgagcataacaagcagtaaattattactttttagc

SEQ ID NO: 137051 - DNA, 385 bp, Arabidopsis thaliana
aagatcatcttcataaatcttctcagatctcttccaattttctagaaaaaacatgtcttgctgtggtggaagctgtggttgtggatctgcctgcaagtgcggcaatggttgcggaggttgcaaaaggtaccctgacttggagaacaccgccaccgagactcttgtcctcggtgttgctccggcgatgaactctcagtacgaggcttccggcgagactttcgttgccgagaatgatgcttgcaaatgcggatctgactgcaagtgcaacccttgtacctgcaaatgaagaacttcataaaccctaagtctgtaataaccctaatgttatgttaggtttgcttatatgtaataattggctgatttttccggtagttttgccggcgac

SEQ ID NO: 137052 - DNA, 275 bp, Arabidopsis thaliana
taatatttttcacatactttaggattggcgaactgttcaagatcacccaacaagccttcgaattgcttcagcttcatcttctccggagcttctcaaaagtgaattcacaaagagcagagtcgaaaagcctccgtgacaaatcaatgacatacatacaaaagctttcacgctcattgggctttcattctttctgaagaggcaagtgtaaatcccagtgcctccatgattgaggtttttctcatcccctgaatcgctgtgctcgttgagagagagtg

SEQ ID NO: 137053 - DNA, 393 bp, Arabidopsis thaliana
cctctatgctattattccaggacaaggagaggttctgctgcttcagtcagctcaagcaacgctactagcagggcaagagatttgaggcgccagagaaagagtgggaaaatccgtgctggcagtgcgggtgaggagatggctcttgttgatcatttgaaaggtatgcgtatgaccgatggaggaaagcgagagctgaagtcgttgttgatatgtctggtaacacttggtgaaatggagtctgcacagaagttgcaacagactgcagagaatttccaggtctcccaagtagcagctgtagagctagcacacgatacagtgtccagcgagagcgtagatgaagaagtttattgctttgaacgttacgctcagaagacgagatccacagcacgagat

SEQ ID NO: 137054 - DNA, 317 bp, Arabidopsis thaliana
accttttggaaggatgcaaggaatggatgtgacctttcggaagggtgcaaggaacggatgtgacctttcggaagggtgcaaggaacagatgtgatgcttcgggaagcatccattcgccccctatataagggaggacgcccaaggcctttggaatcatctcacatcatctcacaacatccaaaacaccataaaacattcttaaaagagtcccaacacatcctgaagttgttggtcggaaagggggtgcggctcggcgagtataactcgaccgaactgatgcgcatactacctcccggtccaactgtttgatggagtgt

SEQ ID NO: 137055 - DNA, 289 bp, Arabidopsis thaliana
cctttgtgacaccaccacaaagcttacccacgagagtcaagtatcctgtactatccatgactctcgtgggtaagctttgtggtggtgtcacaaaggtccgacagtttaattagttcagaaaccacttttcaaagtactgaagatcgttgtctgtcaaaatactgcaatagtgaaaagtcgaatgttttctctttggtttgttttaaactttttttagagtcttaaaaaatgggatggacccataagttgttatgctacataagataatattaatgaacgacccttgagt

SEQ ID NO: 137056 - DNA, 198 bp, Arabidopsis thaliana
tttttgtaacacgaagcattttaaaatatacactcgaacatttatcagtcgctacaaacgattaacctcttgctttctgacagtgacaagagaatcccagacatgaccatcattaaacgccaaatcggatggaacccgaaaacatcgcgatgggacttgctcgagtcgaccttaacctaccagcacaggacatacgct

SEQ ID NO: 137057 - DNA, 367 bp, Arabidopsis thaliana
aacatatgaaaatacatagctaatcaatacatatatgaattataacatgtaattttaggcccaaatatagcataaacatcatgggccaacaaacaatacatatatcaatctcttgaacaagcataattcaaataataatgatagcataaattcattaaaaccctcaagagtagtaacttatgcgtctctgtcccttttacattcagctggcataaccgggaacctagtccggtcggtacagtagttgtagatggtccacttcatacgaacccatttgagacgacgccattgttcagcgtcaaggtcacggaactctttctgatcccaccacatgcggccttgtgtggcacagtacttggcttccaca

SEQ ID NO: 137058 - DNA, 364 bp, Arabidopsis thaliana
gataaaacacctagagagacccagctactgttgtagccggagaatatatttctttttaaaattaaaaacagcaagacatcccaaaaacaaactaggcaagtcttaacagactgcatgtcgtttttgctaaacagaggtttcttcgtatctaaaaacggcattacaataaatctgtaaacaccttttcttttccataaaacccctttcatttctcataatttacgactatgtccagctaatcgccacgggacttcccaccacgtgtttcccatccgaccattcaatactcccaaagctgttagatccagacggcttcgacgagtctacagtaaacgtcaccgtatacgattttttctcgttagct

SEQ ID NO: 137059 - DNA, 215 bp, Arabidopsis thaliana
gagaggaacaagaaaggttatgttcatatcattacaagaatcacatcaagacttgaaaatttaagctccaggtgcaaacttagttgcgaaagcccacgcattgttagcaacagggttgtcaagatggtcaaggagattctccaaaggaccttttccaataacaatggcttgaacaaagaagccaaacatagagaacataaccaatcttccgttct

SEQ ID NO: 137060 - DNA, 366 bp, Arabidopsis thaliana
agacggatgttgcggtagtagatatccgaaatccgacccggatcctgatcctggtctcgacgcgggtcttgaaccggcgcttgaaccggatccgagatcccagcttccttgaggactcgttgtcggcgtagacgccgttgtgcttgtaccgccggtaacatcaataacaaaactcccgccatttttcaaactgatcgacgacgatgcagaaactgcggtggctataccgtcttggaaaagctcgaaacgataacctagagtgtcagagtaaccagcctcacgccatgcttctagtcttccccatggcttccatgtgcaaccgtcaggtcgaagaataagccacgctccgggacttgaccgagtcac

SEQ ID NO: 137061 - DNA, 112 bp, Arabidopsis thaliana
aactcaaatacactaaaaatgatgaaacaacattcacatacaccacaatgctcacaaacaatatagatacaataagaggctttgtgagttggggaacataaagatgttgttg

SEQ ID NO: 137062 - DNA, 340 bp, Arabidopsis thaliana
aagatgaaagtgagtatttatttagctagcatgataaatgaaaatccccacaaataacactaaacaaatctcttttttttttagggttccttctttttttgttctcatcccttttccacacaaaagaaaaaatttacaacatagtaataatgtagacataacttgcgaaaagagataatgggaggagaggcctcgtttccttctggtgatactccttagcattcacaccctgtagacctctgttgattgctcgtccctacatcgattgtgtctggcaagtatagttcttcttcttctccgctcttcaatgcgtccttggcaatgcattggaaagcttcct

SEQ ID NO: 137063 - DNA, 288 bp, Arabidopsis thaliana
aacaaacaaaaatagctcaccacattaggatattcatttatcggccgtatcaattatacaacaacaacaacaacaagaagcaatcaagcatgctcttacatggatcaattcatgaccaaaacaaaagaagcaacaaattaataaaaaaaaatagagatttgttgttgtttctgtacaacaccattccattgaagttgcagctcaagaaaagccaaagcatttcctgaaagagagaaatccagaaggttctgggatcggatccgagatattctgttttgcacttggaag

SEQ ID NO: 137064 - DNA, 110 bp, Arabidopsis thaliana
aaagaaagagtaatatacattaacaatcctgagtttcaagattcttgatcaagacaaagagtaaaaaacaatgatgcaagagagttgaaagtacactcgatatattttga

SEQ ID NO: 137065 - DNA, 60 bp, Arabidopsis thaliana
gctaaaaagtaataatttactgcttgttatgctcaggtgggtgggttctatgcacaaaac

SEQ ID NO: 137066 - DNA, 164 bp, Arabidopsis thaliana
aatgtagcaaatgcaccttaatctcatagtacagtaacaataggaaagatacaaaacggtaaaggaaggttttgatgtttaaaaagcacaagcttattcagtcaaaaacagatgtagagattttcatgggcttatgaaaaccttaagcatccagctaaaggcat

SEQ ID NO: 137067 - DNA, 410 bp, Arabidopsis thaliana
aacaacactaagcaaaaaagaaaagctcaagccgagagagacaatggcatcaacattcacgagctcaagcagtgttcttaccccaacaacattccttggccagactaaagcctcaagctttaacccccttcgtgatgttgtctctctcggatctcccaagtacactatgggaaatgatctttggtatggacctgacagagtgaagtacttaggacccttttccgttcaaactccgtcttacctcaccggagaattccctggcgattatggttgggacaccgccggtttatccgcagaccctgaagcctttgccataaacagagctcttgaggtgatccatgggagatgggcaatgttgggagcttttggttgcataacccctgaagttcttcaaaagtgggtccgtgtgg

SEQ ID NO: 137068 - DNA, 388 bp, Arabidopsis thaliana
ctccgttgaacgatcaagttcctggaatctctgaagaagtagtcgatttcgctgttaaaatctcgacgaaacctggttgttggacagattttccattgtcactcgatactgaatttgaactgtctgaggctcaaagggcacatgcatcagccattgaagatttggttcctggccttgtagctgtgaagaatcaagttagtagttacatggatgatgaacacttctggctgatttattttattttgctgatgccgagactgaatgggcatgattttgaactcttagcaacatgcaaggtatttgaaacaagggatcaacttttactaaagctgcaaaagaaagagacagggtcaagcaagagcactactggtcacgaaactcctgaaga

SEQ ID NO: 137069 - DNA, 406 bp, Arabidopsis thaliana
tctctgtctctttctcaaaaatcatctgcaggaagtgaatcgtcaaaaccgagtttggaggatctgtcttgaggagtttttttttggttgagaaatggcttcgaaaaggatcttgaaagagctcaaggatctccagaaggatcctccaacttcctgcagtgctggcccagttgctgaagacatgtttcattggcaagctacaataatgggtccatctgatagtccttattcaggcggtgtctttctcgtaaccattcacttccctccggattatcctttcaaaccaccaaaggttgcattcaggacaaaagtgttccaccctaatgtcaacagcaatggaagcatttgccttgacattttgaaagaacaatggagtcctgcactcaccatatcgaaggttttgctt

SEQ ID NO: 137070 - DNA, 405 bp, Arabidopsis thaliana
cgtgaatctgcgttaatgtcggagctaagcttcgttgttcctcctgatcacgagactttggacttcaagtttttgttgaagccaaagaacagaaatacgccctgcatagtggaggagggtgaaaataggcttcttactggtggttcgttgcaaggagatgctagattagctctgtttaggctggaaggtgatgtgattgttgaattccgagtcttcatcaacgctgacagagtttctccaattgatcttgctactagttggagagcttatagggagaacctccagccttctactgtacgtggaattcctgatgtcagcattaatcctgatccaaaatctgctgagtgtcctttagaaagtttggagctcgatcttgcacattatgaagttcctgctcctgcgcct

SEQ ID NO: 137071 - DNA, 402 bp, Arabidopsis thaliana
  unsure (1)..(402): unsure at all n locations
cactgatgcaattccagagactgttgggggtaaactcattggacttgtgacttcaagagaagagattcctgatttgcttaagcttgatgacgttatcgatcttgtgatcccaagaggaagcaacaagcttgttactcagataaaaaatactacaaaaatccctgtgctaggtcatgctgatggaatctgtcatgtatatgtcgacaaggcttgtgatacggatatggcaaagcgcatagtttctgatgcanagttggactatccagcagcctgtaatgcgatggaaacccttcttgtgcataaggatctanagcagaatgctgtgcttaatgagcttatttttgctctgcagagcaatggagtcactttgtatggtggaccaagggcaagtaagatactgaa

SEQ ID NO: 137072 - DNA, 327 bp, Arabidopsis thaliana
gattcttccgtcgtttatcacgattccttaagccgttatctttaatttggagctttgatgttttcattctggtgcaaaacacaagaatcatctcaccggaatcagctcaacggcgaaggttgttgccggaaaacttttgattattcatccagcgtgtgacgtggtatatcccggttgtcgacatgtgttcatggatggagttccgatagaatttcttctgcagaaggttatctaatgggccttttttgggctttatgtaattccaaagttggagcttttgtttaagctcttgtatgatatgatgatgtttaataaaacttatgagac

SEQ ID NO: 137073 - DNA, 310 bp, Arabidopsis thaliana
gctaccaaaaaaaaagaaaaaaaaaagagctacttgtgttccttcttttaatggaacttataagcacaatcaatctcttaacaatcgttcttctactcttcgttgtttccaagatatggaaagcttgttggatcctccttttgcgtccattgatgctatcaaaaagattcaagaaacaaggaatctcaggaccaaagtacaaaatcttgtacggaaacctcagcgagataaagaagatgaagaaagaagctgacctttgtgttctggattccaatttcaatgatattttccctcgtgtgtttcctcagta

SEQ ID NO: 137074 - DNA, 402 bp, Arabidopsis thaliana
ctgagattttaggaaaggctggtctgattccagcagagactgctcttccttggttccaaaccggtgtgattccaccagcagggacatacacttactgggcagacaattacacactctttgttctcgagatggctctgatgggattcgctgagcaccggaggttacaggactggtacaacccaggatctatgggaaaacagtacttcttggggttagagaagggtttggccggttcaggtaacccggcttaccccggtggacctttcttcaaccctcttgggtttgggaaagatgagaagtcactgaaggagttgaaactcaaggaggtcaagaacggtagactggctatgctcgccatcctcggttactttatccaaggactagtgaccggtgtgggacctt

SEQ ID NO: 137075 - DNA, 406 bp, Arabidopsis thaliana
cttcatcctcactaatgaattaataatacatttaaatataaaattattgaattcattatttgctcgattcggaaaatcgtaattgaattcagataatggaagctagaagactcgcgatcctctgttctcacctgaacccacctggtccgaacccgacccgagacccgactctcagggtctccgattgtagctctggttcttccggcgacgggaaagtggaatcatctactctccaaaacgactgcgttttctgcaagattatccgtggcgagtctccatgtctcaagttgtacgaggatgatatgtgtttgtgtattctggatactaatccactaagtcatgggcactctcttatcattccaaagttacattatccaaccttagaggaaactcctccctcagagca

SEQ ID NO: 137076 - DNA, 403 bp, Arabidopsis thaliana
gtcttaaaacatgggaagtatcgtggagccatgggcagcaatcgccgagaacggaaacgcaaacgtgaccgcgaaaggctcgagcagggagctgcgacatgggagaacagcacacaacatgtcttcatcgtcgctaaggaagaaatcagacctgagattggttcagaaagttccatgcaaaactctcaagaacattctctctaatcttcaagaagtcattcttggtactaagcttactctcttatttcgcgccatccctctcgccattcttgccaattcttacaactacggtcgtccgttgatatttggactgagcttgatagggctgacacctctagctgagcgagttagctttttgacagagcaactagctttctacactggtccaacagtgggcggtttg

SEQ ID NO: 137077 - DNA, 292 bp, Arabidopsis thaliana
ggaagagattggttattgctaataagttaaggaggagaggaagatctatgtcagcttcgaatttttactcgtggcaaaaccctaattcaatgcctttacttgcactccaagaacctaatgaagaggatcatcacattcacaatgatgattatgaggatgatgatggtgatggtgatgatcataggaagattatgatgatgatgaaaaataaaaaagagttgatggctcagactcgaagttgtttctgtctaagtagtttgcaagaggaagatgatggtgatggtgatgatga

SEQ ID NO: 137078 - DNA, 232 bp, Arabidopsis thaliana
gaaaaatggaaaatattgagtatctgaatgagatccaagccgttgcggggaagctaatccacagctatggagtcccagttatgatcacgttgttcctaagatggctcgcgtccatcgttgcagtgtcagtcatgtctttcatattttaaacatttggatttatgtttaatttttaattttttaatgttggtttacttcttttatttgtgtgtaaagttttcttatgatattg

SEQ ID NO: 137079 - DNA, 404 bp, Arabidopsis thaliana
catgagggaagtcagaacagtggtgtactctcagtttttggaatcttacaaaagtgtgacagttgaagcaatggcaaaggcctttggcgtttctgtcgatttcatagaccaggagttgtcgcgcttcattgctgctgggaagcttcactgtaagatagacaaggttgcaggtgttttggagacaaaccgtcctgatgcaaagaatgcactttaccaggcaacaatcaagcaaggggatttcttgctaaaccgaatccagaagctgtctcgtgtgatcgatctgtgagcatgctacatgtttctgtttcactctttcgtcaagctttgcaacttggaaactccgaacggtagaatcttaaggtctgagaaacgatatgaactttggattttgagatgaatggctg

SEQ ID NO: 137080 - DNA, 322 bp, Arabidopsis thaliana
ctattctctgtttcgtgttccacttcacgattgagagaacactttcctaagtttatcaagaacatttcttttcaatttctcgattctttctggctcattctctcatctctgtttcatatctaaattattgattgagaattcgacttgtggaaatggcaacagttgcatcaaatctcgcttgtatcggaaaagtaacgatgtctagagctagttcaatggtaggatggaggttgcagataaattgcagaaagaaagagaaaggaagagatcagagtcattatccttacaaagtcattgaaatcactcctcctcctaaatctct

SEQ ID NO: 137081 - DNA, 393 bp, Arabidopsis thaliana
atttaggagactcctaaatcattttaaccttcttcctcaatcgtgaccatcaccaatgacgctacacgtcattgagactgcccgagtcacccccaccgactactcagtcatcaactcagccaacttgcacaaacttcctttaactttcttcgaccttccatggctactattccagccagtcaaaagagtcttcttctacgagctcaccgagtctactcgtgaccatttccactccattatcctccctaagctcaaggactctctgtcccttatcctccgtaactatctccctctcactggccacatcacttgggagccaaacgagccaaaaccgagcataatcgtctcggaaaacggcgtcgttttggtgactatagccgagagtgacgctga

SEQ ID NO: 137082 - DNA, 150 bp, Arabidopsis thaliana
aaagcgtcaaacataaagttaggccaagaaacccatttaaaggaaaagagagagagatggagagtttcccgatcatcaatctcgagaagcttaatggagaagagagagcaatcactatggagaagatcaaagacgcttgtgaaaactggg

SEQ ID NO: 137083 - DNA, 381 bp, Arabidopsis thaliana
caaacccttcactttgtcgagtcaccaaggcttgctccacctaaggcttagaagaagaaattacgaaaattttaagcaaaacataaaaattaatttagaacaaaaatatgccaaaaagaatattaggttgattataatgtgtaatttagtaacttgtgttcgtatcattattgtattaccattcaaaaggtataatgcatgatgttaataaaataaaacataattttggtatttaataaaaatttaatatatatatatatataatggtaatttccaaaatatagtatctatataaaaatataaaaataattaataaagtttgataaagatgattattgccttaagtgtattaaagaagtgagaaaagaaaatttaatgaga

SEQ ID NO: 137084 - DNA, 388 bp, Arabidopsis thaliana
accatcatcatcatcatctcttggtgacagaagaaaagagttgaggaacagagaaaatggcagcacaagcacttgtgtcttcttcacttacctcctctgttcagacagctagacagatatttggctcaaaaccagttgcgtctgcctcacagaagaagagttcctttgttgttaaagctgctgcaactccacctgtcaagcaaggagccaacagaccattgtggtttgcttcatcgcagagtctctcttacttggatggcagcttacctggtgactatggattcgaccctcttggtctttcagacccagaaggtactggaggattcattgagccaagatggctagcatacggagagatcatcaacggacggttcgccatgttgggtgc

SEQ ID NO: 137085 - DNA, 350 bp, Arabidopsis thaliana
acaaatcttaaacgttttactttgtgctgcactactcaacctcaatggccgcctcaacaatggctctctcctcccctgccttcgccggtaaggccgtcaagctttcccccgcggcatctgaagtccttggaagcggccgtgtgacaatgaggaagactgttgccaagccaaagggcccatcaggcagcccatggtacggatctgaccgtgtcaagtacttgggtccattctctggcgaatcaccgagctaccttaccggagagttccccggagactacggatgggacaccgccggactttcagctgaccccgagacattcgcaaggaaccgtgaactagaagttatccac

SEQ ID NO: 137086 - DNA, 390 bp, Arabidopsis thaliana
aacaagaacaagattgatgttaagatcgagacgaagaaaggatcgatggatgagtggcctgagccaatcgtccgagtccagtccttagccgagagcaacctctcctctctccccgaccgttacatcaaaccagcgtctctacgccccaccacgaccgaagacgctcctaccgcgaccaacatcccaatcatagaccttgaaggactcttctcggaagaagggttgtctgatgacgtcatcatggctcggatatcggaggcttgccgtgggtgggggttcttccaggtggtgaaccacggggtcaaaccggagctgatggacgcggctagggagaattggagagagtttttccatatgccggttaatgccaaagagacttactcaaactca

SEQ ID NO: 137087 - DNA, 158 bp, Arabidopsis thaliana
gtttgctgtgacggtaccaacctgaacagcttcattttatcagtttggtctttgtctttgtctttggtctcctttttgggtccttatagtgttgtcttaaaacttaaggaatctggcttgtgctctttaccattgtggaagaaatcgaaccctttatt

SEQ ID NO: 137088 - DNA, 390 bp, Arabidopsis thaliana
gtgcgatagagatcgatcgagagatgggtgcttcatcatcatcatctgtgtcggagaaatcaatccatcaattcaccgtcaaggatagctccggcaaggaggttgacctaagcgtgtatcaagggaaagtgctgctcgtcgtcaacgtcgcttctaaatgcggattcacggagtccaattacacccagctgacggaactttaccggaaatataaagatcaaggttttgtggtattggcgtttccttgcaaccagtttctgtcccaagagcctggcaccagcgaagaggctcatcaatttgcttgtactcgctttaaggctgaataccctgttttccaaaaggtgcgtgtaaatggacaaaacgctgcaccagtctacaaattcctcaaat

SEQ ID NO: 137089 - DNA, 389 bp, Arabidopsis thaliana
aatctaatactgtatcaattattattataatcattagagagattgcagtagagacacattgaaaaagactcaaaaccataactaaaataaccccaatagagatgggtttgctcccacggattattctaacgacaatcatcattgcaatacaaaaactaaacatttactttatatcatagcttgaaccggacagattcaaaattctcaaaccggccggtccaactaagaagaaacaatttgattccggttcattaagctctagttccggcagcaccaccaccatcgtgaccgttcttcccaccgtgaaagcccgacgagaaactagtattgagatcagaatacatgttaacaaccttggaaatgtttccgttgagttcttgaatcaaagc

SEQ ID NO: 137090 - DNA, 293 bp, Arabidopsis thaliana
aacataaaagttaaattcttattaattcatagaatcataatacaaaccaatacaacaatacccccaatggtaagagtatatataataggaaataatgaaactgtaaacttcaggaatcttacggatcaccccaatgaacaccagagcaagcagagtagaagaaaccacagatcaagatatataaagacacaatatctttaagtctactccttaatgtttgcagcaaacaacttcctcctggcttccaatgctaaaataccatattgatatataatttagatacacttatgtgt

SEQ ID NO: 137091 - DNA, 302 bp, Arabidopsis thaliana
gggccgcccttttttttttttttttttttttttttttttttcttatttcttttttttttgtctgttttttatattttttttatttttttttttttttagagaggggttgcgagttttgcaacctgcttttttgcgacattaacgaatgaatccctgttaattacttgttctacagtcacaaacctaccctgtggttttaaatttgaaaaactccattgtaccaaatggagtgaagtaccatatgaaatatatcgaatctctcaggtttaaaatgccaaaggaaatgcttctgcaccatcttg

SEQ ID NO: 137092 - DNA, 164 bp, Arabidopsis thaliana
aaaaaacctaattgtaaaattaccgaacagtaaaaatattacaaaacactgaaaacccatccccaccgttaaaacctaaaaactaacccaaatgggggaaaccaacggtcactaacaaacacaaacgacatgaaccaaataaaagattgcacatatacccaaaa

SEQ ID NO: 137093 - DNA, 325 bp, Arabidopsis thaliana
atatacaaacactagaagtcttataaattcaaagtatgtctgagttttacaacattagagagaaagagaacaacacagaaacatttatagaaacatgattacacatgcgctaacaactttaagatttactgagccaaagcacttgtgttgtacacaagaagagcacctccggcaagaattccggcgagagttaccgcccaaattgccaatccggtgactcctcccttgtacacgtcaccactcgctgaccactcgttctcgttgtaaataggactgtatccatcgacgttagctccatacttgtcgacgtacttgtaaacaccgt

SEQ ID NO: 137094 - DNA, 307 bp, Arabidopsis thaliana
agctaaaacagtttcttaaagtttttgttaaatgtatacaacaaggttcttctatatacacaagctgcgattattactgcgagtttgtaatttatttggatcggaacataagacatattgtaagacttcagatcagttgcaggacaagttcgagtgaagtctgctagaacggtctgtctccatctcagttcctcaaagcttggcaagcaggagggattgttgtcaggccacatttgctcagaagagcctggactttagatgggtaaaccgctaaaacggggagaacagacttgaatctgcagatgca

SEQ ID NO: 137095 - DNA, 158 bp, Arabidopsis thaliana
aataaagggttcgatttcttccacaatggtaaagagcacaagccagattccttaagttttaagacaacactataaggacccaaaaaggagaccaaagacaaagacaaagaccaaactgataaaatgaagctgttcaggttggtaccgtcacagcaaac

SEQ ID NO: 137096 - DNA, 310 bp, Arabidopsis thaliana
cttctcataagtgtattatattaaccaccaaaagaggaaacaaagcattaaagcttacaacgatatgtgcagaaagaaaagttaggcccaacatagcccataagattaacatctacggcataaagatgttttgacatttggactctatccaatacacgtgtccacgtgatattacaactgcaacacaagatgaagagtcatcggaagtgtaccgacatcaaccttcgccgccgatgaacaccgaatccggtgaggaatgcatcgccgaaacatcgcacaatgaatccttgtaaccaccgaaataaaactg

SEQ ID NO: 137097 - DNA, 388 bp, Arabidopsis thaliana
cagatctgctttcgaagacgaatctagctattagccatggacaaaccgtacggatacgcgagcgtgagcatgagcggcatagatcgttccgccggaaaggatattgatcttgagatgggagtcggagaagcgacgctttatcctgggctaagttacggcgagaatcagctccgatggggatttattcgtaaggtctatgggattctctcagctcagcttcttcttacgacgcttatctccgccgtcgttgttcttaatcctcctgttaacgatctcttgaccggatctcctgggattcttctcttcctctgcatcgttcccttcatcttaatctggcctctgcacatttaccaccagaagcatcctgttaacctgatcctccttgccc

SEQ ID NO: 137098 - DNA, 130 bp, Arabidopsis thaliana
caatgagatgcaagagggtgaagagattgagagcactaagaagagtaatagtggtgaaagaatcattcagtcgaactagagaagacggcaaatccggcgctactgaaaccgcactcgctgctccgaagtt

SEQ ID NO: 137099 - DNA, 344 bp, Arabidopsis thaliana
tgttgttgttgttgttttaggcaacatgctcgttctttagccagccagcaaactttgccccggacattaacctatcactatcggagctcgctgctctcgacatgtgtaataaaagggtgattttcaagccgatgaatgaagaagaacgtcaagagatgaaacgtaggtgcggaggatcatggaaattagtccttcggtttttgctggctggtgaagcgtgttgtcgaagagagaaatctcaagctgttgctggtcctggtcatagtgtagcagtcacatcgaaaggagaagtttatactttcggatataataactctggacagctaggacatggtcataccgag

SEQ ID NO: 137100 - DNA, 384 bp, Arabidopsis thaliana
ggatcaaacgggtgatcaggatctactgtctcatcttctaaagagccttgtaagccaagctggtgaacatatagggaggaatttagttgggcttctacagggtggaggaggactccaggcttctcaaaatattggaaacttatccgctttgctctcactcgagcaagcccctcgagaggatataaaacatcattcagtgtctgaaacgccttggcaagaagtgtatgccaatagtgctcaagagagagttgccccggataggtccgagaaacaagtcaaagtgaatgattttgatttgaatgacatctacatagactcagatgataccacagatatagagagatcatcacctcctccgacaaatccagctactagttctcttga

SEQ ID NO: 137101 - DNA, 229 bp, Arabidopsis thaliana
  unsure (1)..(229): unsure at all n locations
gtanggtatgaagttgtgacgcactttgagagagtttcaaaaagaaactcaaaactgttgatatggagggttgttgtcagattcaggtttaaaaacgagttgatttttatgtctgtaagttatagataaaacgaattttgtttggtcagataatgtatgtgaaccgtgggcttacctcgtgttgttgtatacctataccatgttgtcttgcaatagaaacttttggagt

SEQ ID NO: 137102 - DNA, 362 bp, Arabidopsis thaliana
ttctagatcgcgagcggccgccctttttttttttttgtttttttttttttttttttttttttttttaacggtaatcacttttcattaacaattgttagtaaacacaaaactacgcacagatctcaaaatcacttcataactaaacatcctttaaagccttttcaaaaactcaatcatgtcaagcaactgcggaagctgcgactgtgctgacaagacccaatgcgtaaagaagggaaccagctacaccttcgacatcgtcgagactcaggacagctacaaggaggccatgatcatggacgttggtgccgaggagaacaacgcaaactgcaagtgcaagtgcggctcctcttgcaactgcgtca

SEQ ID NO: 137103 - DNA, 393 bp, Arabidopsis thaliana
caccgaagaaggaagaagagaagaaagaaggtggcgataagaaggaaggagagaagaaagatcaaccacaagcgcagccgcaaccagttgtgccgccacctgatcatgtgttggaacttgtaaaggcgtataaagcatataatcctcacctaacaacgtattactacgcccaaagcatcgaagaaaaccctaatgcttgcgttatatgttgaaatatttataatgtgatatattttggggaaaagatggaccgatctatatatagtcatgaggatgaagaataagaaacaaaggatatatcttagacttcggatgggatcggatatgtttttgtctcctcgataatgcggggaagttttatttccttaaatcgatttcgatgatatgttttgt

SEQ ID NO: 137104 - DNA, 142 bp, Arabidopsis thaliana
gccgcccttttttttttttttcatattattgggggttgcaatatatatttttttatagatttattcagtgtaaaattaatacatgtacatgatatatactatatatctgttgaatatggtgagtagagacaatgtttataat

SEQ ID NO: 137105 - DNA, 373 bp, Arabidopsis thaliana
cgatcgtcgttgaagattcgtctcagtttctagcttagtgttttggaatcgaaaatggcgggtcgagttaaagaagacgagaagaacgagaagattattaggagtcttcttaaacttcctgagaataagaggtgtataaactgtaacagccttggaccacaatatgtttgcactactttctggacttttgtttgtaccaactgcagtggaatacatcgtgagtttacacatcgtgttaaatcgatatcaatggcgaaatttacctcacaagaagttactgctttgaaagaaggtggaaatcagcatgctaaggatatttattttaaaggattggatcaacagcggcaatcagtgcctgacggaagtaatgttg

SEQ ID NO: 137106 - DNA, 386 bp, Arabidopsis thaliana
ctccaactctgatgctgttgtgtatgttggttgtggagagagaggaaatgaaatggctgaggttcttatggacttcccacaattgacaatgacgttgcctgatggccgtgaggaatctgtcatgaaacgtaccacacttgttgctaacacctctaacatgcctgtggctgctcgtgaagcctcaatttacacaggaatcacaatcgctgaatattttagagatatgggctacaatgttagtatgatggcagactcaacttcccgttgggcagaagcattaagagaaatttcaagacggctggctgaaatgcctgctgacagtggatatccagcctatctagcagcacgtttagcatctttctatgaacgtgctggtaaagtaaaat

SEQ ID NO: 137107 - DNA, 386 bp, Arabidopsis thaliana
gaagaagcaaagatataacccccaaaagtatcaattagtttccattttcgccgctaagattctgttttcgaacatttacaccctcaagaatcgccgccatgtgtggaggagctataatatccgatttcattccaccgccgaggtctcgccgtgttactagcgagtttatttggccggatctgaagaagaatttgaaaggatcgaagaaaagctcgaagaatcgttcgaatttcttcgattttgacgctgagttcgaagctgatttccaaggtttcaaagatgattcgtctatcgattgcgatgatgatttcgacgtcggtgatgttttcgccgatgtgaaaccattcgttttcacttcgactccaaaacccgccgtctccgccgct

SEQ ID NO: 137108 - DNA, 390 bp, Arabidopsis thaliana
tttttgtttgcatcggccatctctaaccttacgattgtgtgttcttgctttgagcgaaaccctagaatcggtcttaacccatttgagcagagatgctgcgagtagcaggaaggaggcttttttctgtttcgcagagatcatcgacggcgacctccttcgtcctttcccgtgaccataccctttccgatggaggcaactcctcttccgcttctagatctgtcccctctgcagatctctcatctttcaattcttaccaccggagcgttataagaggttttgcttctcaagtcattactcagggaaatgagataggttttggttcggaagtcccagccacagtcgaagctgtcaaaacacctaactcaaagattgtctatgacgaccataacc

SEQ ID NO: 137109 - DNA, 333 bp, Arabidopsis thaliana
gaacgagaacatacgcattacgaatgaacggatacgatattttacacaggagttcagaagagagaaacaaagacaccagaaaagttcaagacatattaaacacctaaactccttttattgcactccttcaacatccgaaggatcaagggaaacttttcttaacgttaaaaccttttgattttaagcatctacggtttcagctgaatctgctgcggctaagaccagctccgggcttaggtttccaacgagagttccgtcaatagcattcggtagccccaaagccttaagagcaagttgtcccgccttttgtcccgatatcaccatagcaccaaa

SEQ ID NO: 137110 - DNA, 337 bp, Arabidopsis thaliana
acattaataccccaattatattcgatactgaaaccatattacaaactcattttaataaattgcacacaactgaagatggtaacacactaacacatgcaataaatttattacatagaaattattgtcattagatgaaacgccttttgagagagatctaacataattgtcagaccctattggcataaagttactgacgtgtcatttcaagataacagcgcttcgaacaaatctttaaacctatctttcatgaagtcggaaattggcgaagcgatgatattgctggcaaccccgaccgctatgtccctctcccaattggtgccaccagctctgtcatttc

SEQ ID NO: 137111 - DNA, 347 bp, Arabidopsis thaliana
gattcgaattatatatcaactattaacaataatggagcaatacatttaacgttgatacatgatactctgttggcgttttacaaatcctagagagtcaaaaccattatccaatcgctggcttgtttcctactttgcatctctcttctcatcatcatcaatatcctttatagcatcctttgcaaggcttgtcacatatgttccagccaatgcagtaaccaacagacccaccccgagagttaaaagctggccgtttcctccaggcaagccaacattagattcttcttgaatgattgctcgtccaaaagccccggcgctgacataagcctaagagcctggaagcataccca

SEQ ID NO: 137112 - DNA, 265 bp, Arabidopsis thaliana
gcctcaagaaacaatggattaatggaaaaagagattacaaagacagggggaataaaaagggagggaacaagaatttttgggaatacaagcaataataataaataaaccagaaacaacaacacaagggaataaccttttgaccggtttaacgaccaaaccaagaaagatccaagaaaatgaatggaccccaaaaaaaccggacctaaaaggaaaatgggccccaaaagcctgggcccaacttcaaaacggttgcaaatttccggcc

SEQ ID NO: 137113 - DNA, 371 bp, Arabidopsis thaliana
gacagtgtaaaaagattcatgtaacgatccaacatttcttcataaaattctaacgtaaaaaacaatcatattgtgagatggttttagagaaagaaacaaagttccaaaagacacattcgttctcaaatcaaaggtactatgtaaccttaaataagaccaaaaagaaacaagaaagtccttttcaaggaagatcagatccagcagcaccaccaccgaaaccaccagctccacgaccaaacccttgcctagctccaccagctccacccctgaagccaggctggtaatcagcaggtgctccagccttgtcaccatactctccacctgatttaggacctccacggtatccatctctgtcaccaaacctcctctct

SEQ ID NO: 137114 - DNA, 385 bp, Arabidopsis thaliana
aaaacagaaaccttaagcgttcttttgactcaagatttgaatcaaagataaatgagattgtattaagttcacacacacacacatttatatagatagatattattataagcaatgtttatttgattagagggcaaaagccttttgagacttgatgcgtctctttctaagacgttcggcgatgatgaaggagagctcaagagactgtgaagcattaaggcgaggatcacagtgcgtgtggtaacgtgaacccaagtcgtcgaatgtgactgtgcgtgaaccaccgatgcactcggtcacgttctgaccagtcatttctaggtgaattcctccggggtggctaccttcttgctcgtgcacgtcgaagaaagctctcacttcagccaag

SEQ ID NO: 137115 - DNA, 381 bp, Arabidopsis thaliana
actgcttcaagaaacattgatttattgtaaaaagagattacaaagacagtgagagtagaaaggaaggaaacatgagtttttgggattacaagcattattattatatagacaagaaacaacaacacatgtgattatctttttgacggatttaacgaccaagcgatgatagatcgatgagattgattgtacctcacatagactgagcttatatggagattggcctctagatgcttggcctcacgttcagacggcttgcaagtttctgtcccaaggatcgatcagcctgagaccagtaagagatccagatgccgcggatctcgtgggtgagacgtggctccgatagaatctccacccatctcttaacaaacctgtcttgcctgt

SEQ ID NO: 137116 - DNA, 229 bp, Arabidopsis thaliana
actccaaaagtttctattgcaagacaacatggtataggtatacaacaacacgaggtaagcccacggttcacatacattatctgaccaaacaaaattcgttttaaccataacttacagacataaaaatcaactcgtttttaaacctgaatctgacaacaaccctccatatcaacagttttgagtttccttttgaaactctctcaaagtgcgtcacaacttcataccctac

SEQ ID NO: 137117 - DNA, 142 bp, Arabidopsis thaliana
attataaacattgtctctactcaccatattcaacagatatatagtatatatcatgtacatgtattaattttacactgaataaatctataaaaaaatatatattgcaacccccaataatatgaaaaaaaaaaaaaagggcggc

SEQ ID NO: 137118 - DNA, 388 bp, Arabidopsis thaliana
agcatacaaagaagatttatttgattaaacagatgagaggttcaaacacattatgacaaatgttaaaggagttttggggcataaagtaacaaaaacaaaacacaaacgaattcaaaagattcactaaaacaaaaactaccacaacccctaaaaataagcctctacttaacttcatcacaactaccctcaagatagaggctcatggcttctcgcaatgcaaacaggaactcctgagagagacagacagagacagcagaagaagatgcaagtaacagacattagaaagttttggaggttgataaacgaacgatgcgggaaactcacaaacatgcagccttatttacatgaaactggatctcttcagaagactcctccaatcatggaatga

SEQ ID NO: 137119 - DNA, 155 bp, Arabidopsis thaliana
aaaagagagaagaaaaatggtgttgacaatctatgctcctttattcgcttcttcaaagagagctgttgtgacattggtggagaagggagtatcattcgaaactgtcaatgtcgatctcatgaaaggagaacagagacagcctgagtatctcgcga

SEQ ID NO: 137120 - DNA, 371 bp, Arabidopsis thaliana
ggtagctcagactcagagagtcacaaagtgtgtgtagcagcaatggcgtctgttgcttcttcaactactctcatctcttctccctcttctagggtttttccagcaaagtcttcactttcctctccatctgtttctttccttcgaaccctttcttctccttccgcatctgcttctctccgctccggatttgctcgacgctcttccctcagctccacttctcgtcggagctttgctgtcaaagcccaggccgatgatcttccactggttggaaacaaggcgcctgattttgaggcagaggctgtgtttgatcaagagttcatcaaggttaagctctctgattacattggaaagaagtatgtgattctcttttt

SEQ ID NO: 137121 - DNA, 379 bp, Arabidopsis thaliana
ctaccggttgggttcagatttagtccaacggacgaagagttagtccggtactatctccggctcaagatcaacggtcacgataacgacgttagagtaattcgtgagatcgatatctgcaaatgggagccttgggatttgcctgatttttctgtggtgaagacaacagactcagagtggctcttcttttgtcctttggaccggaaatatccgagtggaagtcgaatgaatagagctactgtggctggatactggaaggcgacgggaaaagaccgtaagatcaaatcaggaaagactaagattataggtgttaagaggactctagtgttttatacaggtcgtgctcctaaagggacacgaacttgttggattatgcatgagt

SEQ ID NO: 137122 - DNA, 387 bp, Arabidopsis thaliana
  unsure (1)..(387): unsure at all n locations
ctaataggaaagggttttgtaacctttgtatgtgtacgatctgtaacaagtttgatttttcggttaatacttgccgctggatcggatgtgacttgtgttcccactggactcatacggattgtgctattcgggatggacagatcaccactggatcctctgctaagaataatacttcaggtccaggagagatagtgtttaagtgtcgggcttgtaaccgaacgtctgagctgttgggatgggttaaagatgtgtttcagcactgtgcaccgaactgggatcgagaatctttgatgaaggaacttgattttgttagtaggattttccgcggaagcgaagatcaacgaggtangaaactgttttggaagtgtgaggagcttattgacaaga

SEQ ID NO: 137123 - DNA, 292 bp, Arabidopsis thaliana
tcacatcttaataaccaaataaccttttacttgcgcgacactctcaccgcaatggccgccacgacaatggctctctcctctcctgctttgaccggagaggccattaaactatcgtcggcggcctcagaactatttggaaccggccgaatcaccattcgcatagcctccatgcccaccggtccatccggcagcccatggtacagatccgaccgaatcaagtacttggatccattctccggtgagcctccgagctaccgcattgaaaagttcctcgatgattacggatgggaca

SEQ ID NO: 137124 - DNA, 383 bp, Arabidopsis thaliana
caaaatggcttcgatgggtggattacacggtgcatctccggcggttcttgaaggaagcttaaagatcaatggctccagccgtctgaatggctctggaagagtggcggtggctcaaaggtctagacttgtcgtcagagctcagcagagtgaggagacttctcgccggtccgtgattgggcttgttgctgctggtttagctggtggctcgtttgttcaggctgtcctcgccgatgctatttcgatcaaagttggccctcctccagctccttccggtggccttcctgggacagataactcagaccaagcaagagactttgcattggcattgaaagacaggttttacttacagccattgccaccaacagaagctgcagctagagcca

SEQ ID NO: 137125 - DNA, 163 bp, Arabidopsis thaliana
ctcgagccgaatcggctcgagaagaaaacaattgaggcagacatgttttcacattttctgcctgttttgaatgtgatgcttaagagaaaattcaaaatatttaaaattcccaagtagtagttactaaaagatttatatatatggtattgagaaaagttgttat

SEQ ID NO: 137126 - DNA, 269 bp, Arabidopsis thaliana
gtgctagagtcattgtgacagcagcacaaccctttccaacatcaccatatccacagataacagcaacctttccagcgatcatgacatcagtggccctcatgagaccatcagggaggaggaggacgataccaaggaggcggtgggcgacaaggatgagggggaagtgggggaagttactgccgccacggctgctgctacagaggttacaacggctgctcaagatgctgctcgtatgccggagaagctgttcagactcagcccggtcacta

SEQ ID NO: 137127 - DNA, 258 bp, Arabidopsis thaliana
gagaaagttatcttccattccatgaccataatattccctaaataagtaattaccactaatttcacaaataaaaaagataagcaaaaaattaaaaacctaaattccaactgcaaaaccctaaaacagactttaaaaacaaataaagagaaattaaacgaaaaaaaaaaaaaaaaaagtttctccgaaaaaataaaaattaatcctaatcactttttatccacaatctttccgatcaccgtcaccgtcaccggactgata

SEQ ID NO: 137128 - DNA, 210 bp, Arabidopsis thaliana
ccggtaacaattctaattggttggtcacttttcacttctataattaaaaattttgcaaacttgtcctttgtgacaagttggtacattaaaattacaataaccaccctccattaaaaatttttgacataaccaccctaaaccattgaaagatttcacaaacccacccattaaaattgtatacttttttaattcaaccctgttgtaaatttt

SEQ ID NO: 137129 - DNA, 323 bp, Arabidopsis thaliana
gagagaaaaacgagttatttgattaatgaaaaaaatacaaagtcttgcaaagtttacatctaaacaagctctctttctcctctcagactcacgaagcaaagactgaagcaaaatacagataaaacttggctcactttccgggaacaaagttggtggcgaaggcccatgcgttgttgttaactggatcggccaaatggtcagcaaggttctctatcggtcccttaccagtgacgatggcttgaacgaagaatccaaacatagagaacatagccaatcttccgttcttgagctccttcaccttcaactcagcgaatgcctctggg

SEQ ID NO: 137130 - DNA, 163 bp, Arabidopsis thaliana
ataacaacttttctcaataccatatatataaatcttttagtaactactacttgggaattttaaatattttgaattttctcttaagcatcacattcaaaacaggcagaaaatgtgaaaacatgtctgcctcaattgttttcttctcgagccgattcggctcgag

SEQ ID NO: 137131 - DNA, 243 bp, Arabidopsis thaliana
cacaaagatgatgtttttttttgtttcgtttaaaacaagacccacttcatttggtcctgtcttcagaaagttaaaaggacacaaagagatgtctatcgaatcatacatagaaattaaggcagatttttttcttcataaagagataatttagtaggtgggattttccatttagcccatggcatacttctgagtccagcttcgtgcagtggactcgtacttgttcttgtcagtcttgtacatgtg

SEQ ID NO: 137132 - DNA, 149 bp, Arabidopsis thaliana
gacaagtaaaccccttccaaatttccctttgatcggatgatccttaattacaaaaagtgcaagaaaatcacgaaaaaaaaagcaaaattagaaattcaaccaaaatcaatattcccgcccaaacttaacccttcgttaattgccctttc

SEQ ID NO: 137133 - DNA, 296 bp, Arabidopsis thaliana
aatgtaatgtaactgtatatattataacatgaagagtttggttatacataaaaactcctgttaattgcatgttttggtactctagataacacaaggatgtcaaaaagaaggaagaaaaaacaaacagatcacggaattgagggtcttgaaaaacagtaaggaaacttgatatgatcggtgaactattcgtggtatagatacaagccgagaccaaatcgagcacatgctctgcagaatgctatttcctcagctgcagtaactggatcctcgatgtgatcatcagtcgtcgttactgt

SEQ ID NO: 137134 - DNA, 343 bp, Arabidopsis thaliana
ctcgagccgaatcggctcgagtgtcattcttctttctgggcttagcaggggtatttgggaaccagttgttatttcttatcggtcttacatacacaaatcccacttatgctgctgccattcaaccatccatcccggtcttcacctttctcttggctgtcatgatgggtacagaaagagtgaatttgttgagaatcgaaggtcaaactaaggttggaggcacacttgtgtgtgttatgggtgctgtcttcatggttgtatttcgaggtccggccttgttaggagataaagatgcagactttgcgatgaacaatgaaatcagtgctaaaggtcaacctgagcctac

SEQ ID NO: 137135 - DNA, 184 bp, Arabidopsis thaliana
tgttaagtcacttgtcattacgtttccagataccaaaatacctaatcacgaactgttacgtcaaatctaaagcagaaccagaacaaaatagagaacacacaaaaccaagtagaagcataacaagcgagagagagaacattcattggtatctggaaacgtaatgttaagtcacttgtcattctct

SEQ ID NO: 137136 - DNA, 270 bp, Arabidopsis thaliana
gggcatgttttgttagattcaagccattgatcgatgcattcttgatgaaaaacatggtaacaagttgtcaagagtcgtaggaggatgtgttcttcttcgaattcaagtagacaaatcgcgcattcgagaccgtatttgtcttccctgagatctttgacggatgagaatggaaacaaagggtaggattggatgatgtgtggctctagaccagggttaaccggtggttgaacgggttcttgttgtgcttggatttgattttcgggcaatccg

SEQ ID NO: 137137 - DNA, 394 bp, Arabidopsis thaliana
cgaaaagtgaagaaaaatgggagtagtactgatcgatggatcaacggtacgatcttttgtagacgacgaagagcaattcaaaaaaagcgtcgacgagaggttcgcagctctggatctgaacaaagacggcgttttatcgcgatcggagctacgaaaagcgtttgaatcgatgaggctacttgaatcgcactttggcgttgatgtggtgactcctcaggacgagctgacgaacctctacgattcgatcttcgagaaattcgatacggatcaaagcggttctgtggatctggaggagtttagatcggagatgaagaagatcgtgcttgcgattgctgatgggcttggatcttgtccgattacgatggtgttagatgatgatgatgataatttcttg

SEQ ID NO: 137138 - DNA, 272 bp, Arabidopsis thaliana
catgattcttccatgtgtgtaccatttaagaaactgataatggtggtggtgttaggcttacagtctcttaaatggtacacacatggaagaatcatggagacaaagaagaagagacatttgatgcgtattgtccaagccactgaaagagaagattcattccaaatcgatagagataaagctagagaagctctgaaacagcttgattaacaaatagaatctcaagctgatgagaaaccaagaatcatcaacaagacatcatcagatgtggtcag

SEQ ID NO: 137139 - DNA, 359 bp, Arabidopsis thaliana
cactttttctctaattccttaattctctcaactaattacaaattatgactcgcaatattctcttgacggttacattgatctgcattgttttcatcaccgtcggtggccaatctccggccaccgcaccgatccattctccttctacatctcctcataagcctaaacccacatctcccgccatttctccagctgctccaacgccggaatccacggaggctccggcgaagactccggtagaagcacctgtagaggctcctccttctcctacacctgcttctacacctcagatctctccgcccgctccttcaccggatgctgatactccttcagctccggagattgcaccttcagctgatgtt

SEQ ID NO: 137140 - DNA, 232 bp, Arabidopsis thaliana
atccggtggagagacggcggcgacgacgacgacgaatacagcttcggcgaagcgagttaggtcgaattgggcgacgagaaacgatggtgtagagcaaggagatgagaaattcagtggagaggaagaagaagaggaagaggatgaagaattgggaggagaagaagggtttagggatttcagcagagaagattcggagagtccgatgaaagaacgaagacggtacgagaataga

SEQ ID NO: 137141 - DNA, 370 bp, Arabidopsis thaliana
cgacaatggtggctggtgcaacccgccacgctctcatttcgacctcgccatgcccgttttcctcaagatcgctgagtatcgtgccggcattgtccccatctcttaccgcagggtggcatgtaggaagagtggagggataaggttcacgatcaacggtcaccgttacttcaacttggtgctgattacgaacgtggccggagcaggagacatcgcgaggacgagtgtgaaaggttcaaagactggttggatgagtttaactaggaactggggacagaactggcagtctaatgctgttctcgttggtcagtcactttccttccgtgttacatccagcgatcgtagaagctctacttcatggaacatcgctcct

SEQ ID NO: 137142 - DNA, 385 bp, Arabidopsis thaliana
gcaagattgggtttgtgactcaagatgatgttctgtttcctcatcttaccgtgaaagaaacgctaacctatgctgctcgtctgcgcttacccaagactcttacgagagagcagaagaagcaacgagctttagacgttatccaagagttgggtttagagagatgccaagacactatgattggtggagcattcgtgcgtggtgtatcaggtggagagaggaaaagagtttctattggaaacgagatcatcattaatccttctctattacttcttgatgaaccaacctctggtttagattccaccactgctcttagaaccattctgatgctccatgacatcgccgaggcggggaaaaccgtgatcacaacgatacatcagccctcgag

SEQ ID NO: 137143 - DNA, 377 bp, Arabidopsis thaliana
ctaccttactttgtgctgatggctgctccatgatcgatcgaagaatgggggtttacgggtatccgatagagatccaagctctcttcttcatggctcttagatcagcaatgtcgatgctaaagcacgacgcggaaggtaaagagttcatggagaggatagtgaagcggctacacgcgcttagcttccacatgagaagttatttctggctcgattttcagcagctcaacgacatttaccgttacaaaacagaagagtactcgcacacagcggttaacaagttcaacgttatccctgactcgatccctgagtgggtcttcgatttcatgcctctacgtggcggttactttataggaaacgttagtccagctcgtatggat

SEQ ID NO: 137144 - DNA, 398 bp, Arabidopsis thaliana
gagtgcggcggcttgcggcgacttgcggcggcttgcggcggaagttgctatgcggctcggtgggtttcgtcgcgcgacttggtggttaacggcggatctgttcggatctgctatggctaatcgtgactcaaggctaattagggttgtcggagccaccgtccctgttagtctcgcgatttggtttccactagtccggatcgatcttgactggtctcgggaagggtgcgttgttcatcggacgacggaagggggttacatcttgcattcatcgatttgctaggtatggctcgtcattggaagcggatcggcgacgggaactgagtactcctgtcaaaggttgtttccggcgatgtagctgcaacgcagtggaccttgtactcaccggatctagtaggtgg

SEQ ID NO: 137145 - DNA, 374 bp, Arabidopsis thaliana
gagctctcagagcaaaaaaacaaaaaaaaagaaaaaaaaaccctaaatctaaatctcaccttccacctctgtctttttttttttttttgttttttttttttttgttctttttttttttttactgtatcttctcttctctttgctctgcaaaaatctcacatccatggatccatctcttggtgatcctcatcatcctcctcagttcaccccttttcctcattttcccacctccaatcatcatcctttaggaccaaatccgtacaataaccatgtcgtcttccaaccgcagccgcaaacgcaaacgcaaatcccgcaaccgcagatgtttcagttatctccacatgtttcaatgccccaacctccttactccgaaa

SEQ ID NO: 137146 - DNA, 266 bp, Arabidopsis thaliana
aaaaagaccttcaagattaaagagtaattaacaagggaacaagtacttgtgaacccgtgattagtaataaccgaaaaagatattaaaaagagatgaaagttaacaaaaagttaaacctgttgtaaaatgggatcccctctgaacctaaactttttggaaccctttaagcccgcaaatttcacagaggaactgggtaacccaaaaaacaactgtccaaaccggttaacggtcccattaaatatcaaaggccctgaggtttttaaacc

SEQ ID NO: 137147 - DNA, 184 bp, Arabidopsis thaliana; identical to SEQ ID NO: 116580

SEQ ID NO: 137148 - DNA, 323 bp, Arabidopsis thaliana
aacaaggagaagtatattatagaaggatcttcatacagcaaaaccattaacattacatgaatatctatctaaagcgtacaacaatcactaatttactatgtacacacgcttctagcttctgatatatctcttctacatgtcgtaagagtttggaatgtgacagatacaaaaccacaaaccaaatgaagaaggaaagagtctttacagatccgagtcttgccggctagccaagcagagttcatgtaattcattgagtatccattcctcaccagtgtgaccaccaaggaccaatactctagttcctccaacaacgcatgtgctat

SEQ ID NO: 137149 - DNA, 369 bp, Arabidopsis thaliana
aaaactataatattattatcattccactggaagtacaaactcatcacatggcagagttgctagacatctaaaagatatgatcaaaacaaacacaaaagacaatgatcggctaaaagataagctgaagccattattacacataaaccaaacctaaaaacaccatcctatatatggtttacttattgaataacttaattaattaaagagactcgattatctctgcttatttaaaaaggcttcttcacttgcaggtgcaaggatcacacttgcagtcagatccacacttgcaagcatcgttctcagcgttgttactctcccctgaagcctcgtactgattcttcatcgccggtgcaacgcccaagacaaaag

SEQ ID NO: 137150 - DNA, 270 bp, Arabidopsis thaliana
gcagaaaatagcatgtattaaaattattatttgtatagataaaagacaaataatatatcaaaatgctgaatacaaaatgtgagctgtaatacatgagacaaatgggagaggatcaaaaaagatataaaataaataaaattaagaattgaaaaaaaaataaaaaaaaagaagaacaaaaatttattagaaggctagaacaagtatagaccatgcgattgccgcagctcccaccatttgtatcacaacacttattctttgtgctccgctctg

SEQ ID NO: 137151 - DNA, 162 bp, Arabidopsis thaliana
attacatccttacaacttcatttgatacaaaactcgaactttagcattcagcattagacgcaaatacattgggacgtaaaccgatataaacgttaaaaaactaagctggatcagttattgaacatactacaactatgggtttgttttccgacaattcacaca

SEQ ID NO: 137152 - DNA, 148 bp, Arabidopsis thaliana
gagaaacgaatactaaatcgttttataaagcaagtagtacagagctgcaagtctggctgggaccatctaaacattcgacaattcagtttcgccattcagagggctttagtgagagattgtggagttatatcatgatgaaaagaaagac

SEQ ID NO: 137153 - DNA, 387 bp, Arabidopsis thaliana
aagcggacaccatcgcatagaaagccgaaaacatgccgcatacaagaggagccagccaaacggtgtccgcttttgtctctggtcattccaccgtcatctttccggtggttttggccagttatgtaccggtgttagatccggtttatttgtttctgttttacttttaataattctcattgagatgtgttggtgataatagtgatagcaatctcgatttctattgcttcttatccaatccactctcttttgagattcaatttgcaggaatatttacagagatttgagttttaagatgaagaaaagaagttgattccttcgcttattatcattgccttaatctgttggtttaattggagtttcgattactttataccggcgaaaaatcag

SEQ ID NO: 137154 - DNA, 357 bp, Arabidopsis thaliana
acgttttactttgtgctgcactactcaacctcaatggccgcctcaacaatggctctctcctcccctgccttcgccggtaaggccgtcaagctttcccccgcggcatctgaagtccttggaagcggccgtgtgacaatgaggaagactgttgccaagccaaagggcccatcaggcagcccatggtacggatctgaccgtgtcaagtacttgggtccattctctggcgaatcaccgagctaccttaccggagagttccccggagactacggatgggacaccgccggactttcagctgaccccgagacattcgcaaggaaccgtgaactagaagttatccacagcaggtgggccatgctc

SEQ ID NO: 137155 - DNA, 268 bp, Arabidopsis thaliana
ttttccttttttgttatgcaataatctgtgaatcagtgaaagtttatctctactgaactactgatcaaaaaaaaaaaaaaactcagagcagaggagatcgagagagacaaagagagagagagagagagagagagatcttaacaaaaaaatgtctatatccatggcgttattctctccgccgatctcttcctcacttcagaaccctaatctcatccccaagatctcaacctctcttctctccaccaagcgtttctctctaatctccgtc

SEQ ID NO: 137156 - DNA, 388 bp, Arabidopsis thaliana
ctcggtatagagcaccaccgatagaacggtgaagggatatgcgcttcaatgccgaagtatggcaatggagatgaacctggaaacgaagctggttacattgttggaatgtcgtcttgttatccagctgatccagtgaaagtgagctatggagagacattgactttggaatctaattacagtaatgccgttggtcataccggagttatgggactcttttacatcctcgttgctcagcagctgccggaaccagatagctccttgcctaataaacaacattttgaggcacctgcgagaagcttgagctttttagccatttttgcagtgacggtagttgtggctgttgtggttttaatagccgccgtgatataccggagacagaaacgggaag

SEQ ID NO: 137157 - DNA, 403 bp, Arabidopsis thaliana
ccaaacacacaaaatatggccatcccctaaagaaactgaagctcaagaaccctctgaatctatcagaagatctcaccaataaagggttttgagaggttcaagtttctctttatgggatggccccaaacacaagagtactcacaaaaggtaagaagaagaagagatctcttggagattatgattgtgaatgttcgtgtgtgggtgttgtgtaaatgatcatcatcatcatcatcatcattatccaatatcataattatcaatatggtgatgatgatgatgatgaggattgtgtgtgaatggagcgatgaagattgcatgaaggttgatgaagacaagcttgatgtgtcttttgttatccctcgtttgggcaacttcgatcctttggcaagcttcggttcccctc

SEQ ID NO: 137158 - DNA, 398 bp, Arabidopsis thaliana
gattggctctcgtttatggagtttgattccccgaagctgttctctccgttgcactctcaggtgcaatctgagctcggttcctctttcaatggcttacaatctgagtctagtgaattgttcaaaaaccacaatgaggattacattcagactcagtacggtacaaatgatgcggatgaatatatgtccaagttcttggattcttttcttgacattccctatgagccagaacagatcccatatgagccacagaatcttagctcatgcaacaagatcaatgatgaatctaagagaggaattaagattagagctcgacgagcacaagccccgggttgtgctgagcagtttgtaatgcagggcgatgcctcaagaaggctgcgtcttcaggttaaccttaacag

SEQ ID NO: 137159 - DNA, 385 bp, Arabidopsis thaliana
atcgaaaaagagcgaaatcgagttctgcacggtgtgccggtttcatcacgaccaaggctcgcgccacaagtacttccctcgccacaaaagttccctctcttccttactcgatcgattcagatcgaagatagctgacgtcagattcttcctgaagaaccctagcgttctacggccacaagagcagtcgcaaaaccgtgtttggtgtgtcttctgcgatgaggacattgttgagctcggtagctccttcgcctgttctaaggctatcaatcacttcgcaagttccgatcatcttaagaatatcaagcaatttctgtcgaaaaatggcccggcaatggattgcatagacgagttccgaatttcagaagctgatgtaactaagtgggag

SEQ ID NO: 137160 - DNA, 385 bp, Arabidopsis thaliana
ggaaaagttctcagatttcaactagaatcgaatgtctctatctgcaaaacaccgccattgaagaagttccctgctgcattgaggatttcacgaggctcactgtacttatgatgtattgttgccagaggttgaaaaccatctccccaaacattttcagacttacaacacttgagctcgccgactttacagactgtagaggtgtcatcacggcgttgagtgattcaactgtggtagcgacaatggatgaccatgtttcttgtgtaccattatctgaaaacattgaatatatctgggataagttgtatcgtgttgcatacctccaggaacattttagcttccgtaattgcttcaaattggatagagatgcgcgagagctcatcctacg

SEQ ID NO: 137161 - DNA, 399 bp, Arabidopsis thaliana
atcgggatgattgtacggtggcccgtagaatgtacggttcaggttgttacggcggagaaccgtttttcgtagctagggatcctggtaatccggaggcggaggaggatgatggttatgtggtgacgtatgttcacgatgaagtgactggagaatcgaagtttctggtgatggacgctaaatcgccggagcttgaaatcgtcgccgccgtgaggttgccgcgaagggttccgtacggattccatgggttatttgtcaaggaaagtgaccttaataagctttaacaatataggtaactgcaatagttaatagaataattaagtcttaattacgtcgcgtacaacaaatcgcatagtgttgttgcacacttgcactttatacattaaactaaagtacacatag

SEQ ID NO: 137162 - DNA, 295 bp, Arabidopsis thaliana
catatagttcacatctccggcgaatttaacacaggtttgggattgaaaatcaactttctgatatccatcatctttattaccttactaattttgtctgtcaggttactttcattctcactacaacttcaataatacactttttgctgcgacaatcaacgaccattccgaaacaccggggccggatacactaataggagggcttttaaccgcagatttcgatgaaagttcttgcttgagtatgtaccataaaactttcttgtaacgcaagccatcatcatccaagccgtcagaatat

SEQ ID NO: 137163 - DNA, 397 bp, Arabidopsis thaliana
aaacaaaatggcttcgatgggtggattacacggtgcatctccggcggttcttgaaggaagcttaaagatcaatggctccagccgtctgaatggctctggaagagtggcggtggctcaaaggtctagacttgtcgtcagagctcagcagagtgaggagacttctcgccggtccgtgattgggcttgttgctgctggtttagctggtggctcgtttgttcaggctgtcctcgccgatgctatttcgatcaaagttggccctcctccagctccttccggtggccttcctgggacagataactcagaccaagcaagagactttgcattggcattgaaagacaggttttacttacagccattgccaccaacagaagctgcagctagagccaaagaatctgca

SEQ ID NO: 137164 - DNA, 390 bp, Arabidopsis thaliana
cacagcaacaaacagagaaaatgtgtggcggtgctattatttccgattatgcccctctcgtcaccaaggccaagggccgtaaactcacggctgaggaactctggtcagagctcgatgcttccgccgccgacgacttctggggtttctattccacctccaaactccatcccaccaaccaagttaacgtgaaagaggaggcagtgaagaaggagcaggcaacagagccggggaaacggaggaagaggaagaatgtttatagagggatacgtaagcgtccatggggaaaatgggcggctgagattcgagatccacgaaaaggtgttagagtttggcttggtacgttcaacacggcggaggaagctgccatggcttatgatgttgcggccaagc

SEQ ID NO: 137165 - DNA, 331 bp, Arabidopsis thaliana
attacaaattacaaaattatcttgctctgaaagtgaaatggtcaaaactcaaaagtgatccccaagaatatctttgataaaattacatgtggccaccgtagaagacccaccatcaccaacagctttcctcgccactgaagatttttctataaccttctttctcacggggttatcactatccatcaatgatcggacggctgtggctatttcatcggctgacacgatctccaaagtaaccctatcaccatccgccacgtagtcaagccttatctccactgctaagcccaactccttcaccatctcaaatgcgttcagttgttgctccgcatac

SEQ ID NO: 137166 - DNA, 324 bp, Arabidopsis thaliana
ataagaggattagacatttaatataatctattttatttacatcttctctaattctctcatatgataaaatcggaacaatgcaaataaaattaggatgaccctacctttgggtttgagctagcttggtttctcactgcacccacacgtgcaattctcttgatcttttttcaaattctgaagttgatgctgaaggcctttgatgtgttgtacagctaaatccagcatgtctgaatagcttgtttgcttatccatgttggggacaagatcttgtagcttctttagcttcccacttattctcgttctcctctcccgctcagcgatgct

SEQ ID NO: 137167 - DNA, 338 bp, Arabidopsis thaliana
acgtaaaactttaaccctttaaaatctctcgtaccaaaaacaaaattttatccattttttacactacttgaaaggagtcccaggatcacatacttctaaattctatcatagctcaacatgaaaacaagatacattggagtaggatctccaggaaacgaggattataaaattcctacatgagataatccttactagttgccattttggatgtcagccaccgccattactcaccactctctcttcgcgcccgtttgctaatgtacggttgtattttgactggttctgattctgtagagatgctttcagttttcactaacttccgtttttccttctcaaat

SEQ ID NO: 137168 - DNA, 207 bp, Arabidopsis thaliana
ttttttttttttttttttttttttttttttttttttttttttttttttttttttttttttttttttttttttttttttttttttttttgattgctcaaacatattcatcattgtttcacctgatttcaaacttaactcaagaaagaataccagtcgaagggtgaaataagttcacacacgatgagtcatgatccaaaaacaaccggt

SEQ ID NO: 137169 - DNA, 355 bp, Arabidopsis thaliana
gtgaatatatatatttataaacgaattagaaaatatataaatgatcgttttctcgaagagcatcaatttgttcaacatgtgcaccatctgccattgcaatcgtgcttcctcgtttccccaacttcttctcagctaagtcgaataggagttggatagagtcaggtaaaatgataagtctaccgttggaatcaccattgtttttgttatcctgactaggaggagcttgtccatgaattatcactctttttggaactccctctcttcttctctcttctatctgtccattttcatgtcttgagaccgttactatttcctcatcgttacattgtggtgtttcctctgactgaactgtttc

SEQ ID NO: 137170 - DNA, 193 bp, Arabidopsis thaliana
aaacaagcccattaatattttaagatccaataagtttcatgattcacatagactttcaccagtaagtagaaactggtcaaagtaaaacaaagcctgccaaatttaatctaaagccgattcactaaatccattaatatcacacaatcttatggaaaaccattaaaataaccgccactaaaagcagaagagcttc

SEQ ID NO: 137171 - DNA, 207 bp, Arabidopsis thaliana
aattaaacattgtttttcatttcacattcatatgggataaatatcaaatcccattgggttttaattataatattttacactttacattcatgtacccaaactaaccagatatctaccaaagtaacttttcaatcacatcttttcttgtttcttcatctttattactgaccccatcactaaaacttagacatcgcttgacgatgatgg

SEQ ID NO: 137172 - DNA, 182 bp, Arabidopsis thaliana
catagataatttggtacttatgggaattgtatcaaaacgatcagatccaaacacgaaatcagaaaacacacaacacaaagatcctcacacacaatagttacataacatagtgcaatctcagaagagagacctaagagacaacacggccaacgacaggatacttagcttcaaatttggtctcc

SEQ ID NO: 137173 - DNA, 225 bp, Arabidopsis thaliana
attgtagatatattatatttatcctatgtttcaataattcaacattcaaatcagatcaaatgtgatcaccaatatctatagctcagcaaaaagcttaagcccccatatatcctcacaatacctaacaataggaacaactttccccgattcagttcaccatgcgtcaggttcacatccatgagtcagaggagtaaggaaacatggctccatcgacgtggatcgaac

SEQ ID NO: 137174 - DNA, 395 bp, Arabidopsis thaliana
gacaaaaagaacaatggcagcgagtgcatctccaatggcgagccagctaaggagcagcttctcctccgcttctctttctcagcgtctcgccgtcccgaagggcatctccggtgctcctttcggtgtttctccgaccaaaagagtctcttccttcactgtccgagctgttaaatccgacaagacaacattccaagtagttcaaccaatcaacggtgatccattcatcggaagtttggaaactccggtgacatcaagcccattgatcgcgtggtacctttccaacctccctggataccgtaccgccgtcaaccctctcctccgcggtgtggaagtgggcctggcccatggtttcttcttagtgggcccattcgtcaaagctggcccattaaggaaca

SEQ ID NO: 137175 - DNA, 399 bp, Arabidopsis thaliana
agagaaagagagaaagagagacagagataatggcgtacagtgcgtgtttcctacaccagagcgcattggcttcatcagccgcacgatcatcatcttcctcctcatcccagcgtcacgtgtcgctctccaaacctgttcagatcatctgtaaagctcaacagtctcatgaagacgataactccgccgtctcccgccgtcttgctctcactctcctcgtcggcgccgctgctgttggttccaaagtatctcctgctgatgccgcctacggtgaagctgcaaacgtgtttgggaagccaaagacgaacacagacttcttgccatacaatggagatgggttcaaagtgcaggttccagcaaaatggaacccaagcaaagagattgagtatccaggacaagtcc

SEQ ID NO: 137176 - DNA, 384 bp, Arabidopsis thaliana
gcaaagaatcgacttcaccactatgggtgtcgttatagatgaagcttccctggcgctggtgtttcttggagatttttgaagcagcttctttgttctatccggcagatcttcgacgtttattggatttggattcgagatcgacaacaaggagaaggctatccatcactactagacggatcggcggtgactgatcgaaggcggtgatgctccggcgagatgaattcggcggtgctcgatttcctgacgcgtggaatggcgtagtacacgtttcaacacgtgttagtatctaaagttaaagtttttggattaaagtgatcgacaggggaatttaaaacgaagatagtcctatacttcatacttgttccataaaagcatgtagagcat

SEQ ID NO: 137177 - DNA, 398 bp, Arabidopsis thaliana
aaaaaaaagaaaacacaaaaacaaagattataatggcttcctcaaccatggctttgtcctcccctgccttcgccggaaaggctgtgaagcctgccgcatcagatgtcctcggaagcggccgtgtgaccatgaggaagactgtcgccaagccaaagggtccatcaggcagcccatggtacggatctgaccgagtcaagtacttgggtccattctccggcgagcccccgagctaccttaccggtgagttccccggtgactacggatgggacaccgctggtctatccgccgacccagagaccttcgccaggaaccgtgagctagaagttatccacagcagatgggccatgctcggagccctatgctgcgttttccctgagctattggctaggaacggagtg

SEQ ID NO: 137178 - DNA, 396 bp, Arabidopsis thaliana
cttcttcttcttcaacaaatcgagtcctttttctgataactcatttcgatttcagaaactcgccaagaactggatactctggcggaatcagagattaagaaccgagacgtggttctgaaactgtatgaagccctgagatctcgcgacgtcaaatctgtgcaccagatcttaaccccagatctggagtattggttccacggtcctccgccgcaccagtttttgatgcgcgtactcaccggaggtgtctctccgtcttcttcctccttcgaattcgtacctctctccgtcgtttccttcggatctaccgtaatcgcggaaggctgcgacgccgcgacatcgatttcttggatccacgcttggactgtagcgaatgggataatcacacaggtgagggag

SEQ ID NO: 137179 - DNA, 265 bp, Arabidopsis thaliana
aatcatcatcaacaaaaaaacaaaatacatttttcagaaaaaacaaattcaaatttcagaaacacacgaaagaactggatactctggcagggatcaaagattaaagaaaacgtatacgtggttctgaaaactgtgtgaagccctgagatctcgcgacgtcaaatctgtgcaccagatcttaagcccagatctggaatattggttccacggtcctccgccgcaacagtttttgatgcgcgtactcatgggaggtgtctctccgtct

SEQ ID NO: 137180 - DNA, 401 bp, Arabidopsis thaliana
aaaggggtcatttactatcttttaagagacgacatatatagttctcgaccaagaaaagaaaagggggtgacctgagttcttcaacacataacataatggccggagttttcaaaacggttacgtttcttgttttggttttcgctgccgttgttgtcttcgcggaggactacgatgttggtgatgatacggaatggacgagacctatggaccccgagttctatactacttgggctaccggtaaaactttccgtgtaggcgacgagctcgaatttgatttcgctgctgggaggcatgatgtggcagttgtatcagaagctgcatttgaaaactgtgagaaagagaaacccattagccacatgaccgttcctccggtcaaaattatgctaaacaccactggacca

SEQ ID NO: 137181 - DNA, 181 bp, Arabidopsis thaliana
cttccctggttgcttatgtcaaagctcctaatgcaaacaaaaagtcaactctttgaggtctgaaagtcatatatatatatgaaattattgtgttgtgtgtttaataaggttcgtttgtgtacctttttaaaaataaatggtgtactgattctcaagataaatcctaatacaaagtgaagtg

SEQ ID NO: 137182 - DNA, 273 bp, Arabidopsis thaliana
gctggacctaagatcgaggaggtcgagcaccgcctgaagcagggggagcatcatcgtccataccagaggcacctggaccaccggcttcacctgcttcaggcggtgctggacctaagatcgaggaggtcgactaatttgttggacattgacctctctctttctcctatctctatctcttttacttgcttttttttgatctgttaagactttttatgttgggcttttttaaagaagcccattttgtggtgttttttggttagtactattttgaac

SEQ ID NO: 137183 - DNA, 378 bp, Arabidopsis thaliana
cactgcaaaagcaggcttcagctgagtagttactcatcaatggaaggtgttttgtactgtaagcctcattttgagcagctctttaaggagagtggtagtttcaacaagaactttcagtcacctgcaaaatcggctgacaaatcaactcctgagctgacaaggacgcctagccgagttgctggcaggttctctggtacacaagagaaatgcgccacttgtagtaaaactgtgtatcctattgaaaaggtaacagtcgagagccagacatatcacaagtcctgcttcaagtgctcacatggaggttgcccaatttcaccttccaactacgcagctcttgaaggaatcctgtactgcaagcaccatttcgctcagctcttc

SEQ ID NO: 137184 - DNA, 397 bp, Arabidopsis thaliana
gaccgaaaactcggatctttcactgttcctgcaggctcttactctgctttcctcatactcacaattctcctcttcacttcccttaacgagagagtctttgttcctttaacaagaaggctcacaaaaaagcctcaaggaatcacaagcctacagagaatcggagtagggctagtattctcaatggctgcaatggctgtagccgcggttatagagaacgctagacgcgaggcagcggttaacaacgataagaaaataagcgcgttttggttggttccacaatatttcttagtcggtgcgggtgaggcctttgcttacgttggacagcttgagttctttataagagaagcaccagagaggatgaaatcgatgagcaccggattgtttctaagcacgatat

SEQ ID NO: 137185 - DNA, 385 bp, Arabidopsis thaliana
cgcttctttcttatataactgtctcttcatattctcactccttctcctccctcttctcctttttctctcttaagttctataaatgttcatatttgtttctagctaagaagtttgtataaggcagtggacatggctcctgtttcaatgcctccaggtttccggtttcatccaacagacgaagagcttgtcatatactacctcaagcgaaagattaatggtcggactattgagttagagataatacccgagattgatctttacaaatgcgaaccttgggatttacctgggaagtccttgctgccaagtaaagacctagaatggttctttttcagtcctcgagaccggaaatatccaaacggatcaagaacaaaccgggcgaccaaag

SEQ ID NO: 137186 - DNA, 355 bp, Arabidopsis thaliana
ggagaggcccaaagataagaaagcaaggccatcactctagccattgtgacacttccacgcattacgatctagaggaaaagatcaactttgctgtttttccatctctacaaggaggtccacacaacaaccatatcgctgctcttgccattgcattgaaacaagtggccactccagagtacaaagcttacatacaacagatgaagaaaaacgcccaagctttagcagcagctcttcttagaagaaaatgcagactggttactggtggtacagacaaccatttgttgctgtgggatctcactcctatgggcttaacagggaaagtctacgagaaagtgtgtgagatgtgccatatcac

SEQ ID NO: 137187 - DNA, 369 bp, Arabidopsis thaliana
tgaaaagcgtggacggagttgcggcggagaaggaaggagagaagaaggagaaaacgtatcgattacatgatccaatttctcgaccggagactaagcgaagacggtaatcacgacgggatcggtgatggaaacggctccgattcgttaccggaatttgttggtaagtgtggtgaatctgggatcttcaaagttccgattaggtcagcggttcatccgaatcgaccacctagtcttgatgtgagacctcatccattgagagaaactcaaattgggaggtttttgaggacaatgactagtactgagagacagttatggactggtggtgaggatggtgcgttgagagtttgggagtttagtgaattgtatgga

SEQ ID NO: 137188 - DNA, 240 bp, Arabidopsis thaliana
aagaaagaaaccatccatgtcttagatagagttaacatagtaacatcatcccaacacaaggcaaaggaacagaccatgtgacgcagcacgacaccagactaagagatcaggttttatttagaaaacataattattcccgatagataagagagatagagaagagttgccagaagccaaagagctcatcaagcctccttctcccctgtgaggagatccattaccacgcctttgatgcttcca

SEQ ID NO: 137189 - DNA, 121 bp, Arabidopsis thaliana
aagaacactagaaatactggaccaacacacatattatacattacatattcgagaaatgaaaagcttggcttgtgaaaacagaaattaaacatatactacaccaacgcatacgttatacgtg

SEQ ID NO: 137190 - DNA, 382 bp, Arabidopsis thaliana
aaacgctcttaccggtgagaaaacctgtaaatggcaaccgcaaaaccgctggttacaagctttgggttctaatcgctgttctactcttggcctttggttctatgttaaccggttccgtctctctcaaaggaatcggtttgttccattctgctgacggcgttaacgcattctctttcggcgatgatctcgacgttctggaaattgaagagagagagaaagtggtgagacagatgtgggatgtgtacggacgctccggtggcgttaaggttcctcggttctggcgagaagctttcgaagcggcgtatgagtttctcatcagtgattccgccgccgttcgaaatgctgccgtttccgatatcgcaaagttgtctcttgttcgttt

SEQ ID NO: 137191 - DNA, 174 bp, Arabidopsis thaliana
tgaactaagagtgttgatgcgttgagcaagaaagagccttttgtgtctgtgtgaaaggagtttatgtaatgttgtttaagacttttctgtttatgtgaaaggagttaatgtaatgttgtttaagacttttgctttctatgtgaaagcagtttaatgttatgttggttaagactg

SEQ ID NO: 137192 - DNA, 385 bp, Arabidopsis thaliana
ctcaacctgagctcacaaagctaaacacaaaaaaaagagcttaggcggagaagaagaggagaccaaaacaccaaacaaacaacaatggctgtctcaactatctactcaacacaagctctcaattcaactcatttcttaacctcttcttcctcctccaaacaagtcttcctctaacgtcgtcaaccacaaaccaaccgtagattcaacacactcagcacttgcgcacaagaaaccatcgtgatcggactagctgctgactctggctgcggcaaaagtacctttatgcggaggctcaccagcgtcgttggtggcgctgctaagccaccaaaaggcgggaaccctgattccaacacactcatcagcgacacgaccactgtgatctgtc

SEQ ID NO: 137193 - DNA, 381 bp, Arabidopsis thaliana
caagaccggaagaagtcaaagtactcgctggtcatgaccgttcgaacacataaaggatcagacgacaagaactacaattgcgtgtaccagaaggaagacgagagaggaacaatcggtgtctctttagctagagagctcatgtctgtcgccggagacgctctgaaaacaaacatcacgactttaggaccgatggttcttccattgtcagagcagttgatgttcttgatttccttggtcaaaaggaagatgttcaagttaaaagttaaaccgtatattccggatttcaagctagctttcgagcatttctgtattcacgcaggaggtagagcggttctagacgaagtgcagaagaatcttgatctcaaagattggcacatggaa

SEQ ID NO: 137194 - DNA, 379 bp, Arabidopsis thaliana
cagagataatggcgtacagtgcgtgtttcctacaccagagcgcattggcttcatcagccgcacgatcatcatcttcctcctcatcccagcgtcacgtgtcgctctccaaacctgttcagatcatctgtaaagctcaacagtctcatgaagacgataactccgccgtctcccgccgtcttgctctcactctcctcgtcggcgccgctgctgttggttccaaagtatctcctgctgatgccgcctacggtgaagctgcaaacgtgtttgggaagccaaagacgaacacagacttcttgccatacaatggagatgggttcaaagtgcaggttccagcaaaatggaacccaagcaaagagattgagtatccaggacaagtcct

SEQ ID NO: 137195 - DNA, 387 bp, Arabidopsis thaliana
aacgccgctcgtcgaagcggcgccgatattgagaccgttcgaaaattcaatgctggatcgaacaaggctgcatcaagcggcacctccttgaacacaaagaagctagatgatgatactgagaacttatctcatgatcgtgtgcccactgaattgaagaaagccatcatgcaagctagaggggagaagaagctgactcagtcccaacttgcccatctgatcaatgagaagccacaagtgatccaagaatacgagtctgggaaagcaattccgaatcaacagatcctttcaaagctggagagggcacttggtgctaaactccgtggaaagaagtagaagtgtagaacaaagctcttaaaggtaacaacaaaagctgatcgcagtttctct

SEQ ID NO: 137196 - DNA, 111 bp, Arabidopsis thaliana
cacgcgtcgtcgccttcgccgtttcttcactgcggcggatcaatcatggttgctccaaaggagagaaatgttcaatgggtgtttttgggatgtcctgatgttggaaaacga

SEQ ID NO: 137197 - DNA, 332 bp, Arabidopsis thaliana
acgaccttttttttttttttttttgtaacacaactcctaaataagtttcaagcaaaattatccggaaactgcataattgaaaaccataataaaaagtctcagagatatccaaaaaggagggagagagaaagtcacagaaataaagagaaaaaagaaaaaggctcaaacgccatcaaagttttaagaaccaaagaaaaccataagagagtcgatcataacgaaagtctcatcatttggcacccttcttcactgcagccttggtgaccttggctccagttgggtccttcttgtccacgctcttaataacaccaacagcaacggtctgcctcatg

SEQ ID NO: 137198 - DNA, 311 bp, Arabidopsis thaliana
gattaacttagttcctctgtacattgaagattccaaatttgttcatggagctacaacggttcaacaataattcaagctcaaaaaccaagaactctaagatgaaacacactcacagacagacatgaaagtgatggaagatagataggtatgagatcataagtctgtcttcactctttagttgaaggtttggacaatagtgttgtgccatgggtcagacaagtgctgcaacagattctcaaatggtccttttccagtcacattgtgttgaaccacaaaccctaagaatgccaacatcgccaaactcccgtttg

SEQ ID NO: 137199 - DNA, 236 bp, Arabidopsis thaliana
gcttgatgatgaaatcaagtcatggttggcgtttgctgcccagaaggtcgttgaagtgaacgctttggccaaggctttggctggtcagaaggacgaggctcttttctctgccaatgctgcggctttggcttcaaggagatcttccccaagagtcaccaacgagggtgtccagaaggctgctgctgctttgaagggatctgaccaccgtcgtgcaaccaatgttagtgctaggctag

SEQ ID NO: 137200 - DNA, 261 bp, Arabidopsis thaliana
tacatcagtagaggtaaggaagttaagtttattcatctccttttcgtcattatatctcgtgagtagactcaaagcaagaagaatcttgctcgagcaagacccaaaggtaagagctcttaataagagctttaaaactagatctaaaaattgagatagctcattagagctttatttagtggaagtgaggaaaatatactaattgaagaacaccaagctaaatgattcctagataatttaatatcatagagagggaataaagag

SEQ ID NO: 137201 - DNA, 171 bp, Arabidopsis thaliana
caaaggagcagtttcttggaccaaggtcttagcattggatttgagccctcatcttcagattgggaatgatggaagtttcttcctaggcgaggataagaaagtcgtcatgttctgtgagaaattgattgatgagaacaaggtcaaagacatggtctacattgttggggagga

SEQ ID NO: 137202 - DNA, 237 bp, Arabidopsis thaliana
atcacatcttattaactaaagagccttttacttgcgccacactctcaccgcaatggccgcctcgacaatggctctctcctctcctgctttgaccggaaaggccgttaagctatccccggcggcctccgaagtatttggaaccggccgaatcaccatgcgcaaagcctccaagcccaccggtccatccggcagcccatggtacggatccgaccgagtcaagtacttgggtccattctc

SEQ ID NO: 137203 - DNA, 237 bp, Arabidopsis thaliana
atcttattaactaaatagccttttacttgcgccacactctcaccgcaatggccgcctcgacaatggctctctcctctcctgctttgaccggaaaggccgttaagctatccccggcggcctccgaagtatttggaaccggccgaatcaccatgcgcaaagcctccaagcccaccggtccatccggcagcccatggtacggatccgaccgagtcaagtacttgggtccattctccggtg

SEQ ID NO: 137204 - DNA, 239 bp, Arabidopsis thaliana
agaagaagaagaagtaatggcttcctctatgctctcctctgccgctgtggttacctccccggctcaagccaccatggtcgctccattcactggtttgaagtcatccgcttctttcccggtcacccgcaaggccaacaacgacattacttccatcacaagcaatgggggaagagttagctgcatgaaggtgtggccaccaatcggaaagaagaagtttgagactctatcttacctccctg

SEQ ID NO: 137205 - DNA, 77 bp, Arabidopsis thaliana
aaaatacaaagctattctacaatactgttgttttgtctcagtgacttttagactaatatatgtcctagtttggttct

SEQ ID NO: 137206 - DNA, 261 bp, Arabidopsis thaliana
caaagagcatcatcggcgctgaagaagaagaagaagaaaatggactcatctttgtcgcagaagttcactcttgcttatgcttctctcctcggagttggtgggttgatgggttacctgaaacgcggaagcaaaatatcacttgtcgcaggaggaggttcagctgcgttgttctattatgtatacacggagctcccaggaaatccagtcttagcatcctccattggcattgtggggtcggcggcactgacagggatgatggga

SEQ ID NO: 137207 - DNA, 239 bp, Arabidopsis thaliana
gccgcttcttcttcttcctcactgtagctcgtcgtcgctacaccatctagaagacccttaaccatggctgtcgggaagaacaagaggatttcaaagggtaggaaaggaggaaagaagaaggctgttgatcccttctccaagaaggattggtatgacgtgaaggctcctggttctttcacgaacaggaatgttgggaagactcttgtttccaggactcagggtaccaagattgcctctga

SEQ ID NO: 137208 - DNA, 236 bp, Arabidopsis thaliana
aagacaaaaagaacaatggcagcgagtgcatctccaatggcgagccagctaaggagcagcttctcctccgcttctctttctcagcgtctcgccgtcccgaagggcatctccggtgctcctttcggtgtttctccgaccaaaagagtctcttccttcactgtccgagctgttaaatccgacaagacaacattccaagtagttcaaccaatcaacggtgatccattcatcggaagtta

SEQ ID NO: 137209 - DNA, 263 bp, Arabidopsis thaliana
atcaaaatgtcttctcatactgcaactaagtatgatgttttcctaagtttcagagggcatgacactcgccacaacttcatcagttttctctacaaagaactggttcgaaggagcattcgaaccttcaaagacgacaaagagctggagaatggccagaggttttcgccggagctcaaaagccccatcgaggtgtcaagattcgccgtcgttgttgtctcagagaactatgctgcgtcttcttggtgtctcgatgagctcgtaac

SEQ ID NO: 137210 - DNA, 261 bp, Arabidopsis thaliana
aagcaccatttgccagtactagtttgagataaggtgttgtcactatgtcttggggccaggaactttgcaaattaatgaggtagacaatgtgataccccctttggtttcataagcatgtgttgtcttttggaacttccttgttaaaatttatggataaaatttgtctttctaccggatcacagctattctaagagtttgagaccttaccgattctccttcatcggttatttgttaagaggtcaaaagcgttgaggtaggtat

SEQ ID NO: 137211 - DNA, 262 bp, Arabidopsis thaliana
gagaaacaagacaaagaagctaaagctgcagaaggtggatggactgtggtcgtgcatcacaaaggaaggaaaaagacaacagaatctgaaaccggaacagccgttggatctttttctcaggctgctttggaggataagatcgctaaaaagaaacagagtgagcctgtcgctcatggtttctaccgtttccaaaggcgagatgcacaacgcaatgaactcttggcgcttcagagtaagttcgaggaagacaagaagaggatac

SEQ ID NO: 137212 - DNA, 242 bp, Arabidopsis thaliana
aaaagaagagcaagcagcggcgcagaagttgaacacaagtgaagctcacaatggcgaggattaaggttcacgaattgagggagaagtcgaagagcgatcttcaaaaccagctgaaggaactcaaagctgagctcgctctcctccgtgtcgctaaagtcaccggaggtgctccaaacaagctctctaaaatcaaggtcgtgcgtaaatccatagctcaggttttgacagtgtcttctcagaag

SEQ ID NO: 137213 - DNA, 241 bp, Arabidopsis thaliana
cggctcgagccgaaaaacagagagagagaacaacaaccaaacactcatttctccacatcttgagagaaaaaaacagagcaagtatattagagatctcatggcgatggcggtctccggagctgtcctcagtgggcttggttcttcgttcctcaccggaggcaagagaggtgccaccgcattggcaagcggcgtaggcactggagctcagagagttggcaggaaaactcttattgtcgctgct

SEQ ID NO: 137214 - DNA, 239 bp, Arabidopsis thaliana
caaaataaaagcacacgaattttcaaatctttctcttctctcgctctctcgaattcttctctctgttcctcgtagatcccctctgtttccgttttcgtcttttcgaattccgaagatctcaaatgggtgaggatgcaatctcaggtaatctcaagaatctaacgatcgacacaagagattcagaaactcttgtggtatgtttcggtgaaatgttgattgattttgttcctacggtggga

SEQ ID NO: 137215 - DNA, 239 bp, Arabidopsis thaliana
gctcgattacttgggaaaccctagcttggttcacgctcagagcattttggccatttgggccacacaagttattttgatgggagccgttgaaggctacagagtcgcaggaaatgggccattgggagaggccgaggacttgctttaccccggtggcagcttcgacccattgggtttggctaccgacccagaggcattcgctgagttgaaggtgaaggagctcaagaacggaagattggcta

SEQ ID NO: 137216 - DNA, 240 bp, Arabidopsis thaliana
agagaaaattcagcatttttgatagctcaagcacttgattctttccaaaggggtttcctgagatcacaaaggccaagtaacaatggcgaaaggagttgcagttttgaacagcagtgagggtgttacggggactatctttttcacccaggaaggcgatggtgtgaccactgtgagtggaacagtttctggccttaagcctggtcttcatggtttccatgtccatgctcttggtgacaccac

SEQ ID NO: 137217 - DNA, 240 bp, Arabidopsis thaliana
acaaaacccaattagccggagatggccgcaacatccgccgctgctgcagctgcttcttccatcatgggtactcgggtggctcccggtatccatcccggttcaggtcggttcacagccgtgttcggtttcggaaagaagaaggcagctcccaaaaagagtgccaaaaagacggtgactacggaccggcctctttggtacccaggcgccatttctcctgactggcttgatggttccttggtt

SEQ ID NO: 137218 - DNA, 236 bp, Arabidopsis thaliana
gagttttaagcatttgaaacaaaaaaatggcttccaaggctttggttctgttgggtctctttgctgttcttctcgtcgtctcataagtagccgcggcatcttctgccacagtgaattcagagagtaaggaaactgtgaaacctgatcaacgtggctacggtgacaatggaggaaattacaataacggaggaggttaccagggaggagggggtaattaccaaggaggaggaggtaaa

SEQ ID NO: 137219 - DNA, 260 bp, Arabidopsis thaliana
caggtataacacacacagaacaaacagaaaatcaattgaagagtctctcactcgttatgggaagcaaattgagaaatggctagctttactgcctccgcttccaccgtctccgccgctcgtccggctctccttctcaagcctaccgtcgccatctctgctcctgttcttggcttgcctccaatgggtaagaagaagggaggagtgagatgttcaatggagacaaagcaaggaaacgtctcagtcatgggggctggcgtttc

SEQ ID NO: 137220 - DNA, 258 bp, Arabidopsis thaliana
  unsure (1)..(258): unsure at all n locations
gcgaggacggccgccatggatccagcaggagcatcggtggccagcgcaatcggaggagaaggagagaaattcgcggtggggaatatttattcagtgaaggtgatcaccggagatgagttcagagggatcgtcatggcttacgaccccatccccaacttcgtcttttttgaagagggtacanaacctagacctgggcatttgaagaacactcggatggtgaatgcgagttttattacagggctttcgtatttaggcaaa

SEQ ID NO: 137221 - DNA, 240 bp, Arabidopsis thaliana
ctcttgaatttttcaagaacaaaagaaaaagacatctttaatggcggccatgaactcgagtgttctcacttgcagctacgcaattgctggctctggctcggtagagcttaaccagaaagttggtttggtgaattcatcagttgggtttggtcagaagaaacagatgattatgcctgtgatcaaagctcaacgcgttgttggtgatgatgttgatggatctaatggaagacgatcagccat

SEQ ID NO: 137222 - DNA, 237 bp, Arabidopsis thaliana
caaacacttcataactaaacatcctttaaagccttttcacaaactcaatcatgtcaagcaactgcggaagctgcgactgtgctgacaagacccagtgcgtaaagaagggaaccagctacaccttcgacatcgtcgagactcaggagagctacaaggaggccatgatcatggacgttggtgccgaggagaacaacgcaaattgcaagtgcaagtgcggctcctcttgcagctgcgtca

SEQ ID NO: 137223 - DNA, 241 bp, Arabidopsis thaliana
cctcaagaagagcacagtgtgttacagaagagttgtgtcagtgaaggctcaggtgacaacagatactaccgaggcaccaccagttaaagtagtcaaggagtctaagaaacaggaagaagggattgttgtcaacaaattcaaacctaagaacccttacactggtcgctgccttttgaacaccaagatcaccggtgatgacgctcccggtgagacttggcacattgtcttcaccaccgaaggt

SEQ ID NO: 137224 - DNA, 260 bp, Arabidopsis thaliana
gagcttttggctagaaacggagtcaagttcggagaggcggtttggttcaaggccggttcacagatcttcagcgatggagggctcgattacttgggaaaccctagcttggttcacgctcagagcattttggccatttgggccacacaagttattttgatgggagccgttgaaggctacagagtcgcaggaaatgggccattgggagaggccgaggacttgctttaccccggtggcagcttcgacccattgggtttggctac

SEQ ID NO: 137225 - DNA, 258 bp, Arabidopsis thaliana
tcgcgagcggccgcccttttttttttttttttgcaaaagaaaactccataacattgtttaaaggataacatcttcctcgtaagactcacagaggtctgcgtaaggttgcttgtattggtgcgtggcatcctgctagagtgtcctacactgttgctagggctggtcagaacggttaccatcaccgtactgagcttaacaagaagatttacaggttgggtaaggttggtactgaggcacacacagccatgactgaatatg

SEQ ID NO: 137226 - DNA, 260 bp, Arabidopsis thaliana
cgcgatatcctcccttttctgagactagctgttccttctgcacttatggtctgcttagagatgtggtcctttgaacttttagttctcttatcaggacttcttccaaacccggttctagaaacttctgttctctcaatctgccttaatacatcaggaacaatgtggatgatcccatttggtctaagtggcgctgcaagcacgaggatctcaaatgaattaggagcgggtaacccgaaagtggctaagcttgcggtgcgtga

SEQ ID NO: 137227 - DNA, 237 bp, Arabidopsis thaliana
attccccacgtctgtcttatccacaataaaaccgaccttagcttaggttagagtcattactcatttcacaaaagcagagagagaaatagagagacatactttacaggcaaacgatcgttcaccagctcagtttgttaggctggataaaccgagagccgtagacgatctctatataggcaagagagaaaagatgcgtaggtggttgtgctgtgcttgccacgttgaagaaccttacca

SEQ ID NO: 137228 - DNA, 239 bp, Arabidopsis thaliana
taaaaaacgaagaatcaaaacaaatcttagagaaaacaaaaatccaatttttgctgtgaagatggcaatgtctgtaaatgtttcttcttcttcgtcttctgggatcataaactctcgtttcggtgtttcattggagccaaaagtttcgcaaattggttcgttgaggttattggatcgtgttcatgttgctcctgtgtctctgaatctatctgggaagcgatcatcatctgttaaacctt

SEQ ID NO: 137229 - DNA, 197 bp, Arabidopsis thaliana
  unsure (1)..(197): unsure at all n locations
ctcgagccgtgccaatccatctgctgaagaaaacaatcaataagcgaccatgttggtgatnatggcaatgtctgtaaatgtatcttcttcttcgtcttctgggatcataaactctcgtttcagtgtttcattggagccaaaagtttcgcacattggttcgttcaggttattgggtcgtgttcatgttgctcttgtgt

SEQ ID NO: 137230 - DNA, 228 bp, Arabidopsis thaliana
ttgccactcagttttacattaatccagctacgagtcagcctaatgtctctggtcttatacttgctggttcagcggattttaagaccgagctaagtcaatcagaactgtttgatcctcgtcttcaagctaagatattgaatgtggttgatgtttcttacggaggagagaatggtttcaaccaagcaattgagctgtctgctgagattctatctaatgtgaagttcatac

SEQ ID NO: 137231 - DNA, 237 bp, Arabidopsis thaliana
acaaatcttaaacgttttactttgtgctgcactactcaacctcaatggccgcctcaacaatggctctctcctcccctgccttcgccggtaaggccgtcaagctttcccccgcggcatctgaagtccttggaagcggtcgtgtgacaatgaggaacactgttgccaagccaaagggcccatcacgcagcccatggtacggatctgaccgtgtcaagtacttgggtccattctctggcg

SEQ ID NO: 137232 - DNA, 258 bp, Arabidopsis thaliana
cgacaaatacactggcacaggatttcaatcaaaggggtcatatttgtttggacattttagtatgcacataaagcttccagctggtgacacagccggagttgtcacagctttctatctatcatctaccaacaatgagcatgacgagatagactttgagttccttggaaacagaacaggacaaccagctatattacagacaaatgtattcacaggaggaaagggaaacagagaacaacgaatctatctctggtttgatcc

SEQ ID NO: 137233 - DNA, 242 bp, Arabidopsis thaliana
aaaaactaaagaagttattttgacaaaagaactaacctgaagagaagcccagacggcgacaacgagaggaacccaattggagaaagcaaagacccatctttcaattgcccagaaagctaagaccaaaggaaccagcaacaacagcgaatgcctctcagcaactagatgattgataaattctcttgcagcttccgtgtttatcagacctttcctctttattctccgacccatctcttcgattc

SEQ ID NO: 137234 - DNA, 241 bp, Arabidopsis thaliana
ccaccacggaattctccctccggccaaatcggatcgaatctttcttaccattccggtgttcccgccggatttcagagctcgtggatggactaagtctcctttctctctccttataaatccctctcttgcttcagctgccaatcgtcgtctctctcatcttcctcctatcgcgtgttccagaggtattgatcaggaagatgaagagaaggagagcagagaacttctaccacacaaaaacgat

SEQ ID NO: 137235 - DNA, 237 bp, Arabidopsis thaliana
ctctctcgatttgctctcacggaagattcttcagaatatctgatccgatatcagaagccccaagttcgcttgaattccgtctgagcaatggctttggtcttgcacacgtacaagggaaacaaaagtgctgagaaggcactcattgcagcagagtacgttggtgtgcagatcgatgtgccctctgactttcagatgggtgtcactaacaaaacccctgcgttcctcaagatgaaccct

SEQ ID NO: 137236 - DNA, 236 bp, Arabidopsis thaliana
agcccttgcaaaccataaccaaaccatcatcatcatcatctcttggtgacagaagaaaagagttgaggaacagagaaaatggcagcacaagcacttgtgtcttcttcacttacctcctctgttcagacagctagacagatatttggctcaaaaccagttgcgtctgcctcacagaagaagagttcctttgttgttaaagctgctgcaactccacctgtcaagcaaggagccaacag

SEQ ID NO: 137237 - DNA, 277 bp, Arabidopsis thaliana
tcgcgatctagaacggccgccctttttttttttttttttttttttttttttttttttttttttttttttcgctttgctgaaattgtgaggtcttttcctaaaccagttaacattttaagtagtataacaccaaagctatacacatcgcccgccatgttcgacatccctgagagtatgtattccggaggtgggtattgatatctaggtgctacatttgaaaacccgatggggtataccaattcatcgagagaaacttttggctttccaaaataggaaa

SEQ ID NO: 137238 - DNA, 77 bp, Arabidopsis thaliana
agaaccaaactaggacatatattagtctaaaagtcactgagacaaaacaacagtattgtagaatagctttgtatttt

SEQ ID NO: 137239 - DNA, 262 bp, Arabidopsis thaliana
ggataaaaagtagaatttacagtaattgctacattgttcaacgagaagaaacaaagaaagagaacctaagaaactttcaaaaaacaacattgaagaaagagttgcgaagtgttaagtattcatgttttcttgaaaaatttcccacctttttccccaattccggtccctgtaaggcttgaagagagatgggatctggtgtctggtctccactgcaattctactaatgctgagaacagagctgacagcgaaggagagacttctg

SEQ ID NO: 137240 - DNA, 228 bp, Arabidopsis thaliana
gtatgaacttcacattagatagaatctcagcagacagctcaattgcttggttgaaaccattctctcctccgtaagaaacatcaaccacattcaatatcttagcttgaagacgaggatcaaacagttctgattgacttagctcggtcttaaaatccgctgaaccagcaagtataagaccagagacattaggctgactcgtagctggattaatgtaaaactgagtggcaa

SEQ ID NO: 137241 - DNA, 280 bp, Arabidopsis thaliana
caatctgaaaaagctagaggatattcattcaattaggtctcatactctcatctttgaataataagctcactactatactatataagtaaggtaaggaaacatatttagaaaattcgttatcatatatggaataatcagaagaagaacctaaattaaaaaaaaaattacaagaagaaaaagagaaatcattgacgaagaagactgtaaccaggataaaaacaaatgtgccgattagatctccaatcatcacgcgtctgttaataatctgaatagtcaacgc

SEQ ID NO: 137242 - DNA, 322 bp, Arabidopsis thaliana
ggaaagaatgccctttctgtgtgttttatctacagtaacacatcagcgaaatgctttgatgaacaatgcgatattattcttatgaactgtgtggttggatacatctggattctgtttctcagtagtcagctctcagttcttagttagctgtcgctggatttgtttgttaggctcaacagtactccggtactgagagaaagtgcaacgacaccaagtgatgcctctgttgatatgtggaagccaaagaaatcaaggatcatcttgactcctatgaagccaagaacaactgctattgatggctgcaagtattccagctcgtcca

SEQ ID NO: 137243 - DNA, 140 bp, Arabidopsis thaliana
tgggggttgcaatatatatttttttatagatttattcagtgtaaaattaatacatgtacatgatatatactatatatctgttgaatatggtgagtagagacaatgtttataatatactgtaacagtttttatccacggac

SEQ ID NO: 137244 - DNA, 153 bp, Arabidopsis thaliana
tataccacgtcacacgctggatgaagttccgatagaatttcttctgcagaaggttatctaatgggccttttttgggctttatgtaattccaaagttggagcttttgtttaagctcttgtatgatatgatgatgtttaataaaacttatgagac

SEQ ID NO: 137245 - DNA, 310 bp, Arabidopsis thaliana
aagacttctacagacaaaaaatatcatggtttcgtcttatgctagaaacaaagaagctagtcaggcaaagtatatatcaatattgaatataattcaaggagaagtcgatcccactcaggtgcatgagagtttgcagaggatacgagaaagaaagcttgttaatttcattgagtggggacctgcaagcatacaggttgctctttccaagaagtccccatatgttcaaactgcccatagggtcagtggtcttatgttagcaagccacactagtatcaggcacctattcagcaaatgtttgagccaatatgat

SEQ ID NO: 137246 - DNA, 245 bp, Arabidopsis thaliana
atttgtaggcaattctcctatgagatagcattcattcatggccaagctactaatataacactacagtcggatttgtcaaagtggatggagaaaccattgctcatgaacagttttcgggtgaaggtagttagctatgaatagattgctgcaagtttaggtgtggtattacattcagcagtagaccatgacacggttctctttatcgcacaacagctcaagttttcagatgatcagatggagacatg

SEQ ID NO: 137247 - DNA, 301 bp, Arabidopsis thaliana
ggtaaagacaaagggaataaattggagcaaggaaagggtaaacctctcggggacttaccgaccgaggtggtcgggttaaagaagagccgaggaaggttgatggaatggttcaagcggcgagttagggaacaacaagattgtgctatatgtctagaccggttcaagaagggtgagaccttggtacacctaccatgtgcccataagtttcactccatatgcttattgccttggctagacaccaatgtttattgcccatattgtagaactgatatttggaattaaatgttatatttttgatgtc

SEQ ID NO: 137248 - DNA, 384 bp, Arabidopsis thaliana
  unsure (1)..(384): unsure at all n locations
aaccacttgaaatctccctcccagagtaagaacttccatactttgctctagatttcttgagaaaagatgcagccgatcttccatgcgatccttaaaaatgaccttccagcttttttagagttggtagaagatagtgaatcgtctctggaggagagaaacgaggaagaacacttgaacaacacggttttgcacatggctgcaaagtttggtcaccgagaactcgtctccaagattattgagctccgaccttccctcgtgtcttcncgcaacgcatacagaaacacacctttgcatcttgctgctatccttggagatgtaaacatagttatgcagatgttagagactggattggaagtgtgttctgcacgcaatatcaacaaccac

SEQ ID NO: 137249 - DNA, 213 bp, Arabidopsis thaliana
aacggaagattggctatgttctctatgtttggcttctttgttcaagccattgttactggaaaaggtcctttggagaatctccttgaccatcttgacaaccctgttgctaacaatgcgtgggctttcgcaactaagtttgcacctggagcttaaattttcaagtcttgatgtgattcttgtaatgatatgaacataacctttcttgttcctctc

SEQ ID NO: 137250 - DNA, 399 bp, Arabidopsis thaliana
caaaaaacttttctcctccatcaaaatcctccgacgatgacaaccatagctgcagctggcctcaacgtcgcgactccacgagtggtcgttcgacctgtggctcgtgtattaggtccggtccggttgaattacccgtggaaattcggttcgatgaagcggatggttgtggttaaggctacatcggaaggagagatatcggagaaggtggagaagagtatacaagaagctaaggagacatgcgctgatgatccggtgagcggggagtgtgtagcggcttgggacgaggtggaggagctgagtgcggcggcgagtcatgctagggacaagaagagtattgcaatgataatcctgagactgatgagtgtcgtacttatgataattaaaaaatatgtttttgat

SEQ ID NO: 137251 - DNA, 340 bp, Arabidopsis thaliana
ttccctttcatattccttttccttttctcattcctcactagcttcagagcttctgctcaagatcctcgtttcctagcctattattgtccaaatgcaacaacttactcaagtaacagcacttacttgaccaatcttaaaacccttttgtcctctctctcttcccgcaacgcctcttactccaccggattccaaaacgccacggtgggacaagcccttgacagggtcaccggacttttcctttgccggggagacgtctcgccggaagtttgccgtaactgcgtcacctttgccgtcaacaacacctttagtaggtgtccgaatcagagagaagctgtgttct

SEQ ID NO: 137252 - DNA, 358 bp, Arabidopsis thaliana
ccaaatttctcaaactctgaaatcgttctttcaaatctctcaatcgggatcaagatgcagatctttgttaagactctcaccggaaagactatcaccctcgaggtggaaagctctgacaccatcgacaacgttaaggccaagatccaggataaggaaggcattcctccggatcagcagaggcttattttcgccggaaaacagctagaggatggccgtacgttggctgattacaatatccagaaggaatccaccctccacttggttctcaggctccgtggtggtatgcagattttcgtcaagaccttaacgggaaagacgattactcttgaggtggagagttctgacaccatcgacaacg

SEQ ID NO: 137253 - DNA, 331 bp, Arabidopsis thaliana
caattcaaaaacttcaccaccgagcaatctcgccggaaacagagcctctcttcttcaccgccgtattttcttcttctccagaaatgtgggattgaagaagttgacgaagaagacgaagtttaacaatggctccagtgaaaaaatcagataagaaagcaacattagatgctgctgcttggatgttcaatgttgttacttctgttggtatcatcattgttaataaagctttaatggctacttatggctttagctttgctacaacgttaaccggtttacatttcgccactacgacgttgatgacgcttgttttaagatgtttaggatatataca

SEQ ID NO: 137254 - DNA, 304 bp, Arabidopsis thaliana
gtcaataaaaatctcttacaaccacaacaacttctcagattcttcttcgctttgttgttcgttctcttcttcaagctctctgtctctccaaatgggcgacaccggtagacacaaatggttctccttccaccaccaccgttcagcctccgccacaactatgccacaacacaacagccccggcgaaactccaacagagttcctctgtcccatcaccggctttttgatgtcagaccccgtcgtcgtcgcttctggtcaaacatttgaacgtatctccgtccaagtttgccggaatctcagttttgct

SEQ ID NO: 137255 - DNA, 329 bp, Arabidopsis thaliana
ctaaagttcttctcgctcgtaggaaccagagagattctgtctgactactgtggggtttatggttatgctagcgagatcaaggctagctcgagatgtgagcagaagatcacagtctttgcagagaatctgctactacgcacgtctctcctctagattttccggcggcggcggtgatgatggcggcggcagctcaccggaaatcggtggtaccgattcagcacacgaatgggagaagctccttataccattcgatctggattctctaaggaattcatttcacaagataactccctttcagctctataagctacctgagttacctctcaatg

SEQ ID NO: 137256 - DNA, 195 bp, Arabidopsis thaliana
ctcgccgaccatttggccgacccagtcaacaacaacgcttgggccttcgccaccaacttcgtccccggaaagtgagcggctgcttattatgtgaatgagagcagagaaagagagtttgtttgtggtctattctatgtaaatttgtgaactttcctttgtggtatctttgtatagaaatcgaacctctttttctct

SEQ ID NO: 137257 - DNA, 336 bp, Arabidopsis thaliana
ccgggattgaaggagtttaaaatcttcaacaacaagttaaccggagaaatacctgcagagattggagttcattcaaagctggagagattcgaagtttcggagaatcagttaaccggaaagttaccggaaaatttgtgcaaaggtggtaaacttcaaggagtggttgtgtactcaaacaatcttaccggagaaatccctgagtcgctcggagattgtggaacgctcttgactgttcagttacagaacaatgacttctccggcaagtttccttctcggatctggaatgcttcaagtatgtatagtctacaggtgagtaacaactcattcaccggagag

SEQ ID NO: 137258 - DNA, 279 bp, Arabidopsis thaliana
gatagacccgattcgcaatggctgttggcaagaacaagcgccttagcaagggtaagaagggtatcaagaagcgtaccgtcgaccccttcacccgcaaggacgagtactccgtgaaggccccctccaccttccagacccgcgatgtcggcaagaccctcgtcaaccgcaccagcggtctgaagaacgccaacgactccctcaagggccgtatcttcgatgtctccatcgccgacctgcaaaacgatgaggatcactccttccgcaacgtcaagctccgcg

SEQ ID NO: 137259 - DNA, 315 bp, Arabidopsis thaliana
atttttcccgtgaatagccgtctctagtgaatcgagtttttgtccatcatcttgtggctccgttagccaagatagctagcttctgtctggcaaatctagcttctataagcagttttggtgttagtcacttaaaatcaatctatcgacttgtatctctggaagctcgatcttgcaaatcgcctaaagtaaagagaataagagttgtttccagcaaatttggattgccatagccgtctctagttgtttttgaatctggtgaaaaacaaagtaaatcgatgtttaagaaatttacagcatcgattgagttcaccagaa

SEQ ID NO: 137260 - DNA, 348 bp, Arabidopsis thaliana
cggctcgagatttctttttttcttccagaaatttcctccgatttcaaaattttccggtgaaatcgaaaaaaaaagcgagatcttcttctctaatggcgacgaccttaagcagagatcaatatgtctacatggcgaagctcgccgagcaagccgagcgttacgaagagatggttcaattcatggaacagctcgtaagtggagctacaccggccggtgagctgaccgtagaagagaggaatcttctctcggtcgcgtataagaacgtgattggatctcttcgtgcggcatggagaatcgtgtcttcgattgagcaaaaggaagagagcaggaagaacgaagaacacgtgt

SEQ ID NO: 137261 - DNA, 227 bp, Arabidopsis thaliana
ctcctccctcacgtcttccaccaccgtagcttccgccaccaccacctcttgaggaggatacggtggtggtgaaggaggaggttacgggggaagcggtggtggtggaggatggtaattcctttaattaggtttgggattaccaatgaatgttctctctctcgcttgttatgcttctacttggttttgtgtgttctctattttgttctggttcggctttagatttgatg

SEQ ID NO: 137262 - DNA, 364 bp, Arabidopsis thaliana
  unsure (1)..(364): unsure at all n locations
caccgaactaacaaaatttgaaattcccaaagcaaaaacaaattacatcattcaattcaattctcaatgcctcttcttctcnctacctcttccttcaaaacgacggccaccgtcgtaatcgccggcgtttcatctattgccacggcgatgattctcacggtcccttccgtttcccatttcgtagtctcttgctttccgattatttacgataacaccgtcttcctcttaaaaccaccgtatctttacttagtcatcaactctatcatcgtctgcatcatcgctacttctaaactcactcataaatcgtcctccgtcgatgactctgagatctcggaagtagtgactccaataccgataccggtac

SEQ ID NO: 137263 - DNA, 307 bp, Arabidopsis thaliana
gcgagtgcatctccaatggcgagccagctaaggagcagcttctcctccgcttctctttctcagcgtctcgccgtcccgaagggcatctccggtgctcctttcggtgtttctccgaccaaaagagtctcttccttcactgtccgagctgttaaatccgacaagacaacattccaagtagttcaaccaatcaacggtgatccattcatcggaagtttggaaactccggtgacatcaagcccattgatcgcgtggtacctttccaacctccctggataccgtaccgccgtcaaccctctcctccgcggtg

SEQ ID NO: 137264 - DNA, 191 bp, Arabidopsis thaliana
gagatattggatcatgagtgagtgaaaagagctgatattaccgatttttaaatacctctcttatcttcttttcgtttggtcggtatatgtttattgagtttcatgtattgtttgtgatggtctgtgtgtaatagtgaggtcggatctaaacttttatgcgtggtttttatatgaaattgtccattgtggtt

SEQ ID NO: 137265 - DNA, 230 bp, Arabidopsis thaliana
cttggctcactttccgggaacaaagttggtggcgaatgcacatgcgttgttgttaactggatcggccacattttatctgtattttgcttcagtcgttgcttcgtgagtgtgagaggagaacgagagcttgtttagatgtaaaatttgcaagactttgtatgtttttcattaatcaaagaagtcgtttttctcgcagaaacaaatgaagaggattccgataatggtaaatc

SEQ ID NO: 137266 - DNA, 315 bp, Arabidopsis thaliana
cacttacactattaatcctgataccagaaggattctgttttcacaagtacctgagacgagaaagcctctgttgtcagtagagattgatagagttgctcaggattttagaattcatcgagatgaaatatacacaatactggctcagattatgagataaagactattggtgcatcttcatggtttgcccaaagttgttgagggctggaacagatctccatataccaagacacaaactaaagagtttgcatggacgctcacaagggaagttggctaccttcaccgtgtgttgtctgagacattgcacgaagccgatgt

SEQ ID NO: 137267 - DNA, 347 bp, Arabidopsis thaliana
agaatagtttgatcatcttgtgagaaaaataatggctgcttcagtgatgctatcttcggtgacattgaaaccagctggtttcacggtggagaagacggcggctagaggattaccgtcgctcacaagagctcgtccctccttcaaaattgtcgccagtggcgtcaagaagatcaagaccgacaagcccttcggaattaacggcagcatggacttgagggacggcgtcgacgcctccgggagaaagggcaagggatacggtgtttacaagtacgtcgacaagtatggagctaacgtcgatggatacagtcctagttacaacgagaacgagtggtcagcgagtggtgacg

SEQ ID NO: 137268 - DNA, 271 bp, Arabidopsis thaliana
ctcgagccgaatcggctcgaggagcacatacgatctcgttgagcagatgcattacctctacgttagcgtcgtgaaagctcgagatcttcctgtcatggatgtttccggtagcttagatccttacgttgaagtgaagctagggaactacagaggtttaacgaggcatttggagaagaattcgaatccgatctggaaacagatctttgccttctctaaagagagattacaatcgaatcttcttgaagtcactgtgaaagataaagatcttttg

SEQ ID NO: 137269 - DNA, 288 bp, Arabidopsis thaliana
ctcaaacctttcaggttcgaattgatgaaaaaatatttggcagtttggatttgacggtctctattgctagaagaactacagatgaagtgaccaccaagaagcccttcatacatcactatcatggtggggcagtggcggataatatcatcttcaaaggtgaattgcctgattggccctcagatgatgttttgaaagacagagaacgtttttacgtgattatgaatgaatcagagtggcgagctactgcttggatttctctgtatttggaacttgtactttgtgcacatg

SEQ ID NO: 137270 - DNA, 145 bp, Arabidopsis thaliana
ggcgtttgctgcccaaaaggtctttaaggtgaacgctttggccaatgctttggctggtcaaaatgacgaggctcttttctctgccaatgctgctgctttggcttcaatgagatcttccccaagagtcaccaactatggtgtccaa

SEQ ID NO: 137271 - DNA, 164 bp, Arabidopsis thaliana
attcagtgatgagaagatacttcagaagaaacagaagtaacagggattcttcgtcttcagttcttcattgattcagaaatatatatatattattttttggtttgttcattcaacaatgtaaatataagattcagaagaaaaagattggtgcttcgttttctatt

SEQ ID NO: 137272 - DNA, 159 bp, Arabidopsis thaliana
ttattctccgggagttgaggagtttttttaccgtttaatgatgatgataacgaagactggagagttagggtttcgtttggcccttgaactttgtttcaattctcctttgttttgtcgataatgatgatgttcatgaaataagtgttcttttaactgttt

SEQ ID NO: 137273 - DNA, 367 bp, Arabidopsis thaliana
actcttcttctctgttctatcgcagacatttttgtttatatgcatacataataataatacactcttgtcaggatttttgattctctctttggttttctcggaaaaatgtctgcgatactccaaggagctggagctgcaacggctctctcgccgtttaattctatcgattccaacaaactcgttgctccttctcgctcttctctttcagtgaggagcaagagatacattgttgccggatctgatagtaaaagctttggttctagcctcgtagctcgtcgctctgagccgttgataccaaatgctgttacgacgaaggcggacactgctgcgagctctacttcatcaaagcctggacatgagctattac

SEQ ID NO: 137274 - DNA, 284 bp, Arabidopsis thaliana
ggagctcaagaacggaaggttggctatgttctctatgtttggattcttcgttcaaagccatcgtcaccggaaagggacctttggagaacctcgccgaccatttggccgacccagtcaacaacaacgcttgggccttcgccaccaacttcgtccccggaaagtgagcggctgcttattatgtgaatgagagcagagaaagagagtttgtttgtggtctattctatgtaaatttgtgaactttcctttgtggtatctttgtatagaaatcgaacctctttttctct

SEQ ID NO: 137275 - DNA, 369 bp, Arabidopsis thaliana
caagaactcaaacacttcataactaaacatcctttaaagccttttcaaaaactcaatcatgtcaagcaactgcggaagctgcgactgtgctgacaagacccagtgcgtaaagaagggaaccagctacaccttcgacatcgtcgagactcaggagagctacaaggaggccatgatcatggacgttggtgccgaggagaacaacgcaaattgcaagtgcaagtgcggctcctcttgcagctgcgtcaactgcacttgctgccccaactaatgaagcttctttaatcaaaatgtaatatgaataaaagttgatgtgggctcatctattgagctcatgtctctcttattactactctctagtatggtgtgatg

SEQ ID NO: 137276 - DNA, 261 bp, Arabidopsis thaliana
atcccacaggagaagaaggaagaccagaaaaccgttgatgctgctctgatcaaatccattgaagctgtcccagagctcaaggtttaccttggagccaggttctcattgagtcaaggaatgaaaccacatgagcttgttttctagatttcgtattgtttctcaaattttaagaatatctgtttccctgagtattttcatctttaatcgtccttggatcttaaagactattttctctgattttatatatcaaattttcgagca

SEQ ID NO: 137277 - DNA, 188 bp, Arabidopsis thaliana
gcttgttaatggattttatgttcttagtaagctcaagcattacatcaaactcaatattgagagaacaaaggttctatcatgaacaagctcaagcattacatcaaactcaacagtgacagaacctttgttctctcaatattgagtttgatgtaatgcttgagcttgttaatggattttatgttcttagt

SEQ ID NO: 137278 - DNA, 338 bp, Arabidopsis thaliana
gggtttggctaccgacccagaggcattcgctgagttgaaggtgaaggagctcaagaacggaagattggctatgttctctatgtttggattcttcgttcaagccatcgtcactggtaagggaccgatagagaaccttgctgaccatttggccgatccagttaacaacaacgcatgggccttcgccaccaactttgttcccggaaagtgagccaagttttatctgtattttgcttcagtctttgcttcgtgagtgtgagaggagaaagagagcttgtttagatgtaaaatttgcaagactttgtatttttttcattaatcaaataactcgtttttctctc

SEQ ID NO: 137279 - DNA, 303 bp, Arabidopsis thaliana
aaatagagtacccggtgacgatgatgaccacgttaacggcgacagtgccggaatttctacccccgtcgctaaaatccaccagaggatatttcaattctcatagtgaatttggcgtttcaatctctaaatttagtcggagaagatttcacaatccgaccagagtcttcgccgtttcagatatcagtaagctcgtgacggagtttgatccgaagattccattggagagagcatctactccgccgagctcgtggtacactgatcctcaattctacagtttcgagctcgatcgtgtcttctatggag

SEQ ID NO: 137280 - DNA, 341 bp, Arabidopsis thaliana
gtagaagaacccagattccaaatgaacaaattcaaacttgaaaaagtctctttctgattctcgaagaatgaggggcaaagagattgattgagaaagatctcttgttcttattataagatcgtgtgattggacccgcagatgtttggtaaaaagaataatcttatcctttgagaataatcaaaaatagaaagtgttcagttggaacatgaaaacgtgaccgagtttgtcctagttactcttcgggacggagtggaagaagggaggagattcgcgaacgaggaaagggacccaatgacttcgaaagaattgaacgaggagccgtatgaggtgaaaatctcatg

SEQ ID NO: 137281 - DNA, 348 bp, Arabidopsis thaliana
  unsure (1)..(348): unsure at all n locations
cttttgcaggaggtcttatagggatctcaccggatttgaatttctcaacagcggaaagcgtgcaagtcattgtaagtataggggacttgtggaaggaggaagattatctaaagaagaagctgaggcttacatagacaaggctgtgtctaaacctctctagtgtataattatttactcagaaaccgcccgtttgaacacgatttggagcttcgggtttctgagttattcaattaggataaaaaccacaagtttaggaatattgtgagacctttgaatttgtcttttgaaagagaggactgtgtcctctgttanctgtgttgtgcttgctccctaagcaaactctcaatg

SEQ ID NO: 137282 - DNA, 344 bp, Arabidopsis thaliana
caaaaacctaacctaaaaatgctgcggcaaacgcagctttttcatcaacaaatttcttcttctcttgggtaatatagatctctcggcaatttgcagcttgttccccacgagcttcctctgttcatcatcgtcctcgagcttcctctgttcatcaagctcctctgttcttgaacatcgacgaaatcagaggctgtggcagatgcgaacaaagcaattgagttggatcattcattaatcaaagcttacctaagaaaagggttacaactcaagtgttttgagaaagaagatggctaaagatctcggagatagatttatctatgaagttgtggatgaagtgaataact

SEQ ID NO: 137283 - DNA, 310 bp, Arabidopsis thaliana
caattcctccagaaaattcttccagatgtatcatgtgttgatgatcaaagtaggatgaaaatgatgtaactaaagagaaacattttcataggggaaggaagagagagcggttcaatggacagagacagaaagagggtgaaaatggagaaggaagatgacgaagaagaaaagatggagaagttgtacacagtgcttaaaaacgcaagggaaatgcggaaatatgtcaacagctccatggagaagaagagacaggaagaagaagaaagagcaagggttcgtagattcccttcgtttcagccagaagatttca

SEQ ID NO: 137284 - DNA, 257 bp, Arabidopsis thaliana
aagaacaacgacgtcgtttctcttaacggaaaatgcaacggcggtatcggtgaaggcgtcgccgttaatgcggctgtggcggttgccgtgtaatgcagcttctcgggttgataacatttttatagtaattaatacatacatttacctttgggttttgtgattgttgtgtaaaacagtaaaaaaaatgatttcgttgtgctatgtaaactttgtaagcaaatactcttcttcctaaagtaaaaaagtttgattgtttt

SEQ ID NO: 137285 - DNA, 309 bp, Arabidopsis thaliana
ttccagcgcaacgccgagcttgattcggagaagcgtttataccccggaggcaagttctttgacccgctaggtttagcggctgacccggagaagactgctcaacttcagttagctggaactcgatgtggccgatcactaacacctcgatccatatcaatgtcgagatcgagaaaggtaatggctgccccaagtaggacgatccatctacaagctccaccttgccaacgtcatgccatgtaacgccggtaagccattcgacggaaagagcgccgagagtatcgatgtgttagtgattcggtacatcgagtt

SEQ ID NO: 137286 - DNA, 340 bp, Arabidopsis thaliana
agtgagagaagaaagatagagaaaaaaaatgggaggcaaaggtgtgatgatggtggcgatactttgcctttgggcactctctgcaacatctgaagcagtaacagaggctgagccaggtttgatgatgaacttctacaaggacacgtgtcctcaggccgaagacatcgtccgtgaacaagtcaaactcctctacaaacgccacaagaacaccgctttctcttggctccgtaacatcttccatgactgcgccgttgagtcatgtgatgcgtcgcttttgctggattcgacaagaagagagctaggagagaaagaacacgacaggagcttcggacttagaaac

SEQ ID NO: 137287 - DNA, 323 bp, Arabidopsis thaliana
ttcttctctctacacctcttaacatctcccatattcgaataatagctcaaagttccgatttttataatttaccttcataacaaacaactgattcacttacttatcagccggtgactgtttttgggtctgcttcaattgcagtggaagagatggtgttcttgagttggggccgtccatcttccgagcaacagcaacaagtcatcaacaaaacaggaaccttcaattatgacaacaagtacagaggagtttcgtctaggtctattgctaaacttaaggaagattcagagattgataaagatggattcttgatcaatcatgctcgt

SEQ ID NO: 137288 - DNA, 345 bp, Arabidopsis thaliana
tcctaatgtacttaagttagaagggttgatcactgcctctgtttcatcttctctgtacttggtttttgagtatatggatcatgatctcgtcggacttgcttccatacctggtatcaagttttcagagcctcaggttaaatgttatatgcaacaacttctaagcgggcttcatcattgtcacagtcgtggtgttctgcatcgtgatataaagggctctaatctactgattgatagtaatggagtcttgaagattgcagattttgggttagcaacgtttttcgatccacagaactgcgttccattaactagccgtgttgtgactctttggtatcgacccccagagct

SEQ ID NO: 137289 - DNA, 406 bp, Arabidopsis thaliana
ggaactcgttgagggattgagaaaaaaataatcagaagagaaagatccatggctgataattgtatcagacttcttcactcagcctctgttttcttctgtttagggcttctaatttcatccttcaacttgttgcagggtattgcagctgaaaatctttccaagcagaaactgacctcatggattcttcagaatgagattgtaaaggaagtcaatgagaatccaaacgctggatggaaagcttctttcaatgatcggtttgcaaacgccactgttgcagagtttaagcgccttcttggtgttaaaccaacaccaaagacggaatttttgggtgtgcctattgtaagccatgatatatctttgaagcttccaaaagaatttgatgctagaaccgcttggtcacagtgca

SEQ ID NO: 137290 - DNA, 341 bp, Arabidopsis thaliana
gtcgcgtacaatgggttctgcattcgatccccttgtcacggccactgaggatctcgccgccgtcaactcggcgccgccactctcaaacctcacgcaagaagaactcaagaaaatcgccgcttataaagccgtcgaattcgtcgaatctggaatggttatcggtctcggcactggctccaccgcgaaacacgccgtggctcgtatcagcgagcttctccgagaaggaaaactcaaggatataatcggaatccctacttcaaccacaacgcatgagcaagcggtgtctctagggataccattatccgatctagattcgcatccggtggtggatctatcaatcg

SEQ ID NO: 137291 - DNA, 352 bp, Arabidopsis thaliana
gaagattgtcaagaaatgagctggcttaacacgacgttgttttgggctatgttaccagcgggtactccgaagaccgtccttctaggtagacctacggatccagtattctttaagagtaaatcggattacgtcaaaaagccaatccccaaagaaggactggagaagatttggaagacaatgttgaaattcaacaatattgtgtggctgcacttcaacccttacggtggaatgatggatcggattccgtcaaacgccacagcgtttcctcaccggaaaggaaacttgttcaaggttcaatactataccacatggttggacccaaacgccacagagagtaacctgagtattatga

SEQ ID NO: 137292 - DNA, 288 bp, Arabidopsis thaliana
aaatcatattgagaacaaatagatttggttatatatggcttttacgcacgtttgtttatggacgttagtcgccttcgtgctgacgtggacggtgttctaccttaccaacatgaagaagaaggcgacggatttggctgatacggtggctgaggatcaaaaagacggtgctgctgacgtcattatcgtcggggctggtgtaggtggttcggctctcgcatatgctcttgctaagtgtgcgcctggaagaaggaacggtgaagtctttactagaagaaaaaggagtggtca

SEQ ID NO: 137293 - DNA, 56 bp, Arabidopsis thaliana
tttttgaggttttcacattctgagtttatattaataaagggaataatattttggtt

SEQ ID NO: 137294 - DNA, 398 bp, Arabidopsis thaliana
ctgctctctctctgaaccggagacggtgtcacgggacgaatctaatcgccgggaaaccgttttttttttctctcggaaaatcgatttgaatctccggcgatctgatcgggatgagtaacatcgatctgattgggatgagtaaccgcgatctgatcgggatgagtaacagcgagcttctcaccgtcgagcctctcgatcttcaattcccttttgaattgaagaagcagatctcttgctctctctatttgacgaacaagaccgacaataatgttgcctttaaggttaagacgacgaatccgaaaaagtattgtgttacgcctaatactggagttgttctcccgaggtctacttgcgaagttcttgtgaccatgcaagctcaaaaggaagctccttccgat

SEQ ID NO: 137295 - DNA, 325 bp, Arabidopsis thaliana
tctcactctcaccgccttcatttcctcgatctccgtcttcctccttctccgtctgtcgcagagcatcgctcgaattagggtttctgctgagagaagatgagggaaattattagcattcatatcggacaagccgggatccaagtcggaaattcctgctgggagctttactgtctcgaacatggaatccagcccgacggaatgatgccgagtgatactacagttggtgttgcacacgatgcgttcaatactttctttagcgagactggagctgggaagcatgttcctaaggctgtcttcgttgatctcgagcctaccgttatcgacg

SEQ ID NO: 137296 - DNA, 331 bp, Arabidopsis thaliana
catggaagagactatagaagatgccatgtttctctttctccttcttcttcttgtatttccacatatagataatgtccttggcgcacgaatggaactccgtgaacttggagagataaattatgctgatccactaggttttactcggcccattgtccccattcatgttccgggttttccgcctcggcggccaactattccgcagttaccaccatatcgtcccagaaggtgccctttctgttatcctcctcctcccccaaaggctttcccaaaaaactcaccaagtcactgatgtcactatagctacgaaattgcgtcaataaatgtatgcacg

SEQ ID NO: 137297 - DNA, 318 bp, Arabidopsis thaliana
gtcgtcttgccatgttctctatgtttggattctttgtccaagccattgttactggtaaaggtcccattgagaacttatttgatcatttggctgatcctgtggctaacaacgcctggtcttacgctactaactttgtccccggaaattaattatcttatgtatttgcttcataatctctctgctttgtaaagtcgtgaatgtacttattggtgttttatgtgagtttggtacttaatgatttttattttgtgggtacttttttttgaatcgtgatgaaagattttgtttcacagatgcaggtgagtttgttttggcacc

SEQ ID NO: 137298 - DNA, 264 bp, Arabidopsis thaliana
tatcaagctacctgatataaactcatagtcttgagcttgtcgagggagaaggtgataagctcgataacccatattgtttctgtctctgatatctattattttcttaccaacaatgtaacgtataagcggagaaccacaagacacagaagcagcaatatgtaagacagtgtttatatcaagctacctgaggtgtgacaccaagacttcagtagaagtggactctaaataggctgacagaaatgtaccacacatagggcattctga

SEQ ID NO: 137299 - DNA, 91 bp, Arabidopsis thaliana
tgataatggaaaggatgtatgatatgatggatggtgttgggtatcatgtatgacgatgtaatgataagtaaacatgtccgaatcttttgat

SEQ ID NO: 137300 - DNA, 319 bp, Arabidopsis thaliana; identical to SEQ ID NO: 119584

SEQ ID NO: 137301 - DNA, 276 bp, Arabidopsis thaliana
gatgcaatgaaacagtcggtgcagtctgatctccggcatcaagtttccttactagttcgtccaatgcaacaggctcttgatgctgcgttccaacactacgaatcggacttgcagagaagaaccgctaagattacatagagaacgttttgtacttggaaagaaagagatttccttcgacaaaaaattaaacattggactgaacatttagattttgtagtgtaatagataagattcttaaagaacttgagtgagaagcatcattagcgggatttggcc

SEQ ID NO: 137302 - DNA, 408 bp, Arabidopsis thaliana
ctaactaacgacgccggagatggccgccacttcaaccgccgctgctgcttcttcaatcatgggtacccgggtggtttccgacattagctccaattcaagccggttcacagcccggttcggattcggaaccaagaaagcatctcccaaaaaggctaagacggttatctcagaccggcctctatggttcccaggcgcaaaatcacccgaatatctcgacggttcacttgtcggggactacgggttcgatccttttggtttaggcaaaccggcggagtatctccaattcgatttggattccttggaccagaacttagccaagaacttatacggagaagtgatcgggactcgtaccgaggcggtggaccccaaatcgacgccgtttcagccatatagtgaagtcttcgggct

SEQ ID NO: 137303 - DNA, 410 bp, Arabidopsis thaliana
aaaaaaagagagaagaaaaatggtgttgacaatctatgctcctttattcgcttcttcaaagagagctgttgtgacattggtggagaagggagtatcattcgaaactgtcaatgtcgatctcatgaaaggagaacagagacagcctgagtatctcgcgattcagcctttcggtaaaatcccagtcctcgtcgacggagactacaaaatcttcgagtcgcgtgcgatcatgaggtatatagcagagaagtatagatcacaaggacctgatcttttggggaagactattgaagagagaggacaagtagagcaatggttagacgttgaggctacaagttaccatccaccactattggctttaacgctcaacattgtctttgcaccacttatgggtttccctgctgatgagaaag

SEQ ID NO: 137304 - DNA, 344 bp, Arabidopsis thaliana
tcttaacatcgtaggtatcgccaaccataaaaagaggaagttctagcttagcttcaacaagggacttgagatcaacaactggatacccatctcggagaagcagtaccagtgtttgaaaacctgtttcatttatcacttagcactgaagtagatttctgttggaatgttctaccaattctgcttgagaaatctccaaatctaaagactctcaccattcaggctttgcattatactactaatcactatggggatgagaacactgtttgcgattgtttggaggtgtattctttcttatcgtcctgccatattgaggttctaaagataacccagttcaagggagatat

SEQ ID NO: 137305 - DNA, 335 bp, Arabidopsis thaliana
ttcttctcatctctcgcccagaggtgttgttgccatggctggatccggaaagtttttcgttggaggaaactggaagtgtaacgggactaaggactccatcgccaagcttatctccgatctcaacagtgcaaccttggaagcagatgtagatgttgttgtgtcacctccatttgtctacatcgaccaggtcaaatcctcgttgacagaccgtattgacatatcaggtcagaactcttgggttgggaaaggtggagccttcactggtgaaatcagcgtggaacagctcaaagaccttggctgcaagtgggtcattcttgggcattccgaacggagac

SEQ ID NO: 137306 - DNA, 402 bp, Arabidopsis thaliana
ctctataaatcctttattattgttataaaaactccgatggatcggcaaaattccgatgacatcatgagatttctcgatggaatggctagctccgacgacgttcttttcggttttcttgacgaaggaaaccagtcaccggaagatttctccgtaaacctcaacgccggcgaagatgacggtgacgaagacgacaataataacaattctgaagataacaaagctttttggcaggaacacgaacaacttcttcaggggacactgtataggacaagttccattgagacaaagattagacaagctacaaaagaagcgttgaaacaagttaaatctaagggtctttattgtgtttgccggcgaccagtggacggcggttgccggagttgcttacgtggcgaaatctct

SEQ ID NO: 137307 - DNA, 223 bp, Arabidopsis thaliana
aagggaccgatagagaaccttgctgaccatttggccgatccagttaacaacaacgcatgggccttcgccaccaactttgttcccggaaagtgagccaagttttatctgtattttgcttcagtctttgcttcgtgagtgtgagaggagaaagagagcttgtttagatgtaaaatttgcaagactttgtatttttttcattaatcaaataactcgtttttctctc

SEQ ID NO: 137308 - DNA, 249 bp, Arabidopsis thaliana
tgaagatggaggagtaattgttatatgcaacatatgtatcattgttaaactggagtctcacatacagtctctttcgggttatttatctttgaaggctcttattgtgtcttggctagaacaagcgcttacctatgagatatgggttggtaccgaggggatatctacatcgaaaatctactactcagatcttccctgggtgatcagcaaggtcatgttttataagcagacatacttggcaaagaaccgttt

SEQ ID NO: 137309 - DNA, 219 bp, Arabidopsis thaliana
aagagatcaagaacggaagattggctatgttctctatgtttggcttctttgttcaagccattgttactggaaaaggtcctttggagaatctccttgaccatcttgacaaccctgttgctaacaatgcgtgggctttcgcaactaagtttgcacctggagcttaaattttcaagtcttgatgtgattcttgtaatgatatgaacataacctttcttgttc

SEQ ID NO: 137310 - DNA, 99 bp, Arabidopsis thaliana
atctctggaaggcttttgtgcaattgtattgtacggtttaataactataattgagaaaaccagggaatgtgaattatgaaaatgaatttttttgttatt

SEQ ID NO: 137311 - DNA, 338 bp, Arabidopsis thaliana
aagaccggcgctattgagtgcgttgaggaaccaatcgtcgctcttggcagagctctcaaggatctgacccatagattgagtagcctcaggcttggaggtgaatagaaacaaccggagacgcgaaggtttggtggaattggaagcggaaatggtacggtcatactctgttaaaagcgccaagcaacagcaacctccaccgccgcagcagcaagaacaacagcaaggaggccaagatgtgaactgcttaccggattctccgatgttagatacatcctcttctttcggctccacttcttcgtctccctcgctcgccaatttgcctccgatccgtgtccatg

SEQ ID NO: 137312 - DNA, 406 bp, Arabidopsis thaliana
ctcatttcttcttcttcgctcagctccgacaacgaagggcgaagaatctcgctccctcaatttcgcattgccatcgattttcttagaggttaaaatggttgaacagactcagcaccccacgattcttcagaaggtttctggccaactcttgagctcgagtgtttctcaggacattcgtggttatgcttcggcttccaaaaggcctgctacataccagaaacatgcagcttacggaaactactccaatgctgcatttcaatatcctcttgtggctgcatctcagattgcaactactacttctcctgtgtttgtccaagctccaggagagaagggatttactaactttgctattgatttcatgatgggtggtgtttctgctgctgtgtcaaagactgctgctgctccc

SEQ ID NO: 137313 - DNA, 385 bp, Arabidopsis thaliana
ggtttgtgagggtgtatctgaaaaaaaataaagtttggttgattcaaaaaatattcttatcctcggagttgcgatccaacgattggtttggaacgttccgaggagtctgttgaagatcctcgattctaaaaagcttccagaggacaataatttgtgacggagtaactctcgaggacatggaatgcaacaaggatgaagcgaaaagggcaatggatattgctgagaggaagatgacagagaaggattacactggggcgaaaaagtttgctaacaaggctcaaaacttgtttcccgagttggatggtctgaaacaattgtttgtggcaatcaatgtttatatctcgggagagaaaacattcgccggagaagctgattggtatggtgt

SEQ ID NO: 137314 - DNA, 406 bp, Arabidopsis thaliana
atccgaagcggttccacttgatctcgaaggtatgttggattcagaagaccaaccagagacggattctggactcagaaagcggcgattcgatttcaaaacccggtaaaactccttctccaaatgcttcatagctttccgcatcaaatcctgtcctttagcaagcttagcggagtccggattcatagcaacggtgctctgaatggcgtattgtaacttgccgagaacctcgaggaagcgtctgccttctaggcggttttgagcggagaagagggaagagaggctgcatgaagaagaagaagagtcgcagaggtgtggagtaacccattggcatatgaaggcgtcagctgcctccacactatcgccgattagagactcggagaagccctgttgctgttgcggcccgacc

SEQ ID NO: 137315 - DNA, 293 bp, Arabidopsis thaliana
gctgccatgtcatcatggatcacaccaaactggtaccaccacaacttacggtactactatcactggtggtgttcaccacatagaaaaagagtgtgactcaaacaagttatcgataatctagcaggtcaccatgggtcacatcagactgggactaacacggcttagggtactaacactaatgtcgttcatcatgacaaaaatggtatagcatcatagattaatgagcaactgccacgtcatcatggaactcacataactgttaccaccacatgttatggtaatactggcgttgt

SEQ ID NO: 137316 - DNA, 362 bp, Arabidopsis thaliana
atcgaaccatcatcccggttcgattaggctaggtggtaccggtagtgttagaggaaattcagtaacaagtccgagcggtgactcggtacgagcagaccggtgggcttttcttagaaacccatcgtttctctggaggaatacgacgccggttccttcgccgagagttgaagtcaataataaggacggtgaaggaacatcgtcagttcaacatatcggtacagttggttcaactagcggttcccttaggctaccggtttagtgttcggtgatgttttgtgcattgttcataaacacgcaatagattttacgtaattctttaattttgtttgtctttttctgtaagatatttaaatcgacaatcc

SEQ ID NO: 137317 - DNA, 361 bp, Arabidopsis thaliana
  unsure (1)..(361): unsure at all n locations
caaaccaagacaatatttgatcaatttatcaaattctctcaacccctagtctaaacacaaaaatgaactccaatagtttcttaatctcagcagccttaatcttctctctactatcatcaaattctccaacatcgattcttgctcaaatcaatacaccatgttcaccatctatgctctctagcgttacaggttgcacgagttttctaacgggaggtggtagttttccgacctcagattgttgtggggctcttaaatcgttaaccggaaccggtatggactgtttgtgtctgatagtaaccgcaggtgttccaatcagtattcctataaaccgaactttagccatctctctcnctcgtgcatg

SEQ ID NO: 137318 - DNA, 190 bp, Arabidopsis thaliana
gcctagtatcaatattaggtatcttctggttttgccatgagcaagcaataccttgccttttccttttttcccgacaaaatctttccttagaacttttgttttctttctgttttaggattcttagattagctcatgatcttatactaatactgtgatttgatattggggatcttgaagttttggtttgttg

SEQ ID NO: 137319 - DNA, 170 bp, Arabidopsis thaliana
ctcgagccgaatcggctcgagcaatgtttcgtttcatgtaaaactttgaacgtctgaggcataagacatagtataatccctgatgaataggtgttctaggatgtttccgttcctgttatctctttctttctagtgacaagtcaaacttcgtcttaaaacatgtagcaaac

SEQ ID NO: 137320 - DNA, 354 bp, Arabidopsis thaliana
ggaggcggtgggcgacaaggaggagggggaagtgggggaagttactgccgccacggctgctgctacagaggttacaacggctgctcaagatgctgctcgtatgccggagaagctgttcagactcagcccggtcactaaaacaatatattaaccaatcaccaccatgcatgtattgcattatgtatgtatgattttaagtaaaccatggtgcgtttgtaatgaactgcctcaagtttttgaggcactatagattaagaagagaactatgggaataaagtttgattatgtaatgttttatgtggtttgagttgtaatacttgctgtttgcataataaaatcgttgtagtttatgtt

SEQ ID NO: 137321 - DNA, 399 bp, Arabidopsis thaliana
  unsure (1)..(399): unsure at all n locations
agagaagttgggagccgattcactgagctccctagcattgctgtggaacgtggaagcgcaagcatgtttgaaggaataggttctcgatccggtggttcctttggaggaggcatgagggatcgtggttcaagctttggtggtcgttcaggcggtggtggttatggtggcagcagtggtggttatggtggtgggcgttcaggcggatcaagcaaccgttattctggtgattctgaccgttctggttttgggagcttcggtatgcgttctcctgagggatatggttcggatcgttcatctcagtcaggtggaaggagcagctttggtggtggtcgttcaagcggatcatcaaacaatcgttcctctggtttcggngactttggctctgaccgttcttctcag

SEQ ID NO: 137322 - DNA, 412 bp, Arabidopsis thaliana
gattcatcctctttgactcccttcactcgatctcatccgcaatggaatcaaagacaacccaaaacggatccgaagtcgtcgaactcacagagttcgagaaaacccagaagaagtatcaagatttcatcgctacacttccaaagagcaaaggctggagaccagatgagatcttaacccaatacggtggacactggtggcaagaatgtctcctcgaaggtctttttcacgctaaagaccatttcgaagcacgaccaactgatttcctcgtctgtagctacccaaaaaccggtacaacttggctcaaagcactaacttacgcaatcgtcaatcgttctcgttacgacgacgccgcaaacccactcctcaaacgaaaccctcacgagtttgtcccttacgttgagatcgacttcgc

SEQ ID NO: 137323 - DNA, 410 bp, Arabidopsis thaliana
  unsure (1)..(410): unsure at all n locations
ctttctctctcagcttacgaacaagaaaaaaagaagaatctttagccacctttgagatcaaaagatgaacatcgctcacactatcttcggcgttttcggaaatgcaactgctctgtttcttttcttggctccttcgataacattcaagagaatcatcaagaacaaatccactgaacaattctctggtatcccttatccaatgactctcctcaactgtctcctctctgcttggtatggacttccctttgtgtcaaaagacaacacacttgtgagcacaatcaatggcacaggagcagtgatcgaaacagtctacgtgttaatctttcttttctacgcaccanagaaggagaaaattaagatctttggtatcttctcttgcgttttggctgtattcgcaacagtagctctcg

SEQ ID NO: 137324 - DNA, 330 bp, Arabidopsis thaliana
ttcttcccacgctgtgtgaccctaggagggcgacgaggccgggaagaactcactgtgtcaagctggtccatcgtttgtaccctgaggtggacccgtccttaaacccggaccacgtccctcacatgctacacaagtgtcctgactcgatccctgacccaaaggcggtccagtacgtgcgtaacgaccgtggcacccccatggtgctagacaacaattactaccgtaacatcctagacaacaagggtttgctccttgtggaccatcagctcgcacacgacaaacgaaccagaccaatcgttaagaagatggctaaggaccaggcctacttct

SEQ ID NO: 137325 - DNA, 148 bp, Arabidopsis thaliana
gtgcgtttgtaatgaactgcctcaagtttttgaggcactatagattaagaagagaactatgggaataaagtttgattatgtaatgttttatgtggtttgagttgtaatacttgctgtttgcataataaaatcgtttgtagtttatgtt

SEQ ID NO: 137326 - DNA, 414 bp, Arabidopsis thaliana
aatgtctctccaagaatctgcgccttcactcgccgtcgttggcgttaccggagccgtcggacaagaattcctctccgtcttatccgatcgagacttcccttatagctccatcaagatgcttgcatcgaaacgctccgcagggaagcgtgttgccttcgatggccatgaatacacggtggaggagctcacggcggatagcttcaacggtgtagacatagctttgttcagtgctggtggatccataagcaaagagtttggtcctctggcggcggagaaaggaaccattgttgttgataatagctcggcttttagaatggttgatggagttccgcttgtgattcctgaagtgaatccagaagcaatgaaagggatcaaagttggaatgggcaaaggggctttgattgcaaaccctaa

SEQ ID NO: 137327 - DNA, 417 bp, Arabidopsis thaliana
  unsure (1)..(417): unsure at all n locations
ggagaatacgtgtacgacggcctcctatgtggcggaggagttgtcaccggagctggagctggagccggagtcgtcgttcccaccaaaatctcaaccacatcaacatcccacaagaaagaatccaatacatgagaagtgtcatgcgtgacagagttacgccatggaggaagtccaccgttggctcgaagcaagtttccgtatctagtcttgagcttcattttggaaccttctctcaccggttcccactctacggaggagtcgagtcgagccggtttagacaagaccactttacgtccagtggctccgagcaagaaccgctcattcgaagcggtgaggtagttaccgtagcagctccttaaacggatcacttcanaggaaccacgaaccggctcgacaatccatctagctctcttgtcg

SEQ ID NO: 137328 - DNA, 336 bp, Arabidopsis thaliana
cttccttctccaaaaactgcgaataaagaagatggactgtgtgtgatttgtgtggatgcaccatctgaagcagtgtgtgtgccgtgtggacatgtcgccggatgcatttcttgcttgaaagagattgaaaacaagaaaatgggatgtcctgtttgtcgcgccaacattgatcaggtcattaagctatatcatgtttgaagcatatctcctctatggctggaagatattgaaactatctcctattttttactttgtctttaaaagataactacaaatttttttattgtgtgtatgttatgtggtgaagtcaaagaagtcgaaatatagaatcacgac

SEQ ID NO: 137329 - DNA, 386 bp, Arabidopsis thaliana
aaaaaacagagcattttttttggtcaagagcaagaaaaaacagagcatacttttgcaaaaagcagagcttggagcgctttcttgtcatctaaaattcaaaggcagagacgatgggagatgtagttttgttcatagatgaaacatatttgaaatcgagttttaatcgctgtagaatctgtcacgaagaagaagctgagagctactttgaagctccttgttcttgttcaggaaccatcaagttcgctcacagagattgcatacaacgatggtgtgatgagaaaggaaacacaatttgtgaaatttgtctccagttttcggttattttgttgataaagcatgcatttgatgcggtttatggaactgaagagtatccctatacaatattc

SEQ ID NO: 137330 - DNA, 287 bp, Arabidopsis thaliana
gagaaaacagaagaaactatggcaactcaagccgccggaatcttcagccccgccataacaaccactacttccgccgtcaagaaactccacctcttctcatcaagccaccgtcccaagtctctctccttcaccaaaaccgccatccgcgccgagaaaacagagtcctcctctgctgccccagccgtgaaagaagctccagttggattcactcccccgcagctagacccaaacacaccatcaccaatcttcgccggaagcacaggaggtctcctccgtaaagcacaagt

SEQ ID NO: 137331 - DNA, 390 bp, Arabidopsis thaliana
caagaggaaacagagatgagcagagacggcggagatgtaattgagacggcggttaagagtcttggcaaaggtttcgatttgacggcggatttccggttgaaatactgtaaagacggcgacggctccgccggagatgacagattggttgtgcttgaccaaactcaaaacagagaattgcatattcctggtttcggtgtttttcaaaatgtctccgccgatataaactgcgacaaaggagaacgaactcgattccgttccgacattcttgacttcaacaagatgtcggagtattttaaccagaggtcgtcggtgaccggaaaaataccgtcgggaaatttcaacgcgacgttcgggtttcaaagcgggtcatgggcgacagacgccgcaaac

SEQ ID NO: 137332 - DNA, 290 bp, Arabidopsis thaliana
tgaactcatcagaagctgaatcggagaagaagaattaacgatgacggcgacgaacaagcaggtggtattgaaaaactacgtgagtggtttccctaaggaatccgatttcgatttcaaaaccaccaccgtcgaatttaaacttccgggagggtctaactcagttctggtgaacaatctctacttgtcatgcgatccttacatgaggattcgcatggggaaacctgatccttccactgctgctcttgctcaagcttacgctcccggcaagccaatctttgggtatggagtgt

SEQ ID NO: 137333 - DNA, 333 bp, Arabidopsis thaliana
aaaaaaagcaaagaacacttgaacgttttctagatagagatggaagggaaagaagaggatgttcgagtgggagctaacaagttcccggagaggcaaccgataggtacatcggctcagacggacaaagactacaaggagccaccaccagctccatttttcgagccaggcgagctgagttcgtggtccttctacagagccggaatcgccgagttcatagccaccttcctgtttctatacataacagtattgacagtgatgggagtgaagagagcaccagacatgtgtgcctctgttggaatccaaggcattgcttgggctttcggtggcatgatc

SEQ ID NO: 137334 - DNA, 395 bp, Arabidopsis thaliana
gccgtagttgctgaggttgttctcctcggtggagccgagtactacagaatcaccaacggattggatttcgaggacaagctacacccaggaggtccatttgatcctctaggccttgctaaggaccctgagcaaggagctcttctcaaagtcaaagagatcaagaacgggagattagccatgtttgcgatgctcggtttctttatccaagcgtatgttaccggagaaggtcctgttgagaaccttgcaaagcatctcagtgatccttttggaaacaacttgcttaccgtcatcgctggaactgccgagagagctcccactctctaagccatttctactttttttaagagcttccaaaatgtacactttgttcgattggaactccttttgacaatgtt

SEQ ID NO: 137335 - DNA, 390 bp, Arabidopsis thaliana
aaacaacaaactgacgggcacagacgttggttacccaggtgggttatggttcgacccgttgggttggggatccggtagcccggctaagctcaaggagttgaggaccaaggagatcaagaacggaaggttggctatgttggcagtgatgggtgcttggttccaacacatctacactggcactggtcctattgataacctttttgcacatcttgctgatcctggtcacgccacaatcttcgctgctttcacacccaagtgagacaacgaaaaagggttatggggaggtgaatgcgtttgtgtgtgatcatgtttgtacaaatatcattttgaacttaaaattattatgtactttatataaattgtggtcgaatgcaaattaacgttccccgt

SEQ ID NO: 137336 - DNA, 319 bp, Arabidopsis thaliana
ctctttcttgtatttattttcctcccaaaaaacatctttaagagtcctcatggcgatgtctttatcaggagctgttctcagtggcatgggttcttctttccacaacgtaggagcaaagcagagtggtgttggtaccgtcagagttggccggaagagtgagctcgtcgtcgttgctcagcgcaagaagtcgttgatatacgccgttaaaagtgacggcaacatcctcgatgacctcaacgaagccacaaagaaagcttctgatttcgtgacggataagacgaaggaggccttggcggatggcgagaaaacaaaagactac

SEQ ID NO: 137337 - DNA, 334 bp, Arabidopsis thaliana
ggctcgagaaaaacgccaaataaatggttttgatctcgtgaagccaaatcgccattagtcaccaccttaaatgactcacctagtatatatatatatgcaccatatgagtttgatcaatctcattcaatacaatggctgaagaaaagatcaagaagagcttgcttgctgcggacgacagcgacgatgagtactcaagaggtgatacagtttcagatcagacagaactgagttcgattcttgataaacttagtctagaacctaagacggagaaaaagaaactcttggtcttgagtctaagtggtcttcttcttcacagagtccacaaaaaagagtt

SEQ ID NO: 137338 - DNA, 357 bp, Arabidopsis thaliana
caatttctcaaaatcttaaaaactttctctcaattctctctaccgtgatcaagatgcagatctttgttaagactctcaccggaaagacaatcaccctcgaggtggaaagctccgacaccatcgacaacgttaaggccaagatccaggataaggagggcattcctccggatcagcagaggcttattttcgccggcaagcagctagaggatggccgtacgttggctgattacaatatccagaaggaatccaccctccacttggtcctcaggctccgtggtggtatgcagattttcgttaaaaccctaacgggaaagacgattactcttgaggtggagagttctgacaccatcgacaacg

SEQ ID NO: 137339 - DNA, 396 bp, Arabidopsis thaliana
  unsure (1)..(396): unsure at all n locations
cagttcttcccggaagcaaatgaagtcaaatttgctcaaaagacagtctttggaggaacttacttcaagttggactatctaacaaaaccatctctttttgaggattttggtttctttgagagagtaaaaatggcagatcgagtgaagccagaagacgaactgtttcttgtcgcatacccgtattttaatgtcaacgagatgcttgtagtggaagagctctacaaggaagctgttgtgaacactgaccgaaaactaatcatcttcaatggagaacttgaccgcatacgatcgggttgtatcctttttcttctcataaatgaaacaaagtagattcttttttccatttgcatcacaacttgagagccanatgagaaagctgaatcaagagagagagac

SEQ ID NO: 137340 - DNA, 264 bp, Arabidopsis thaliana
gaagttgttaaattgtcgcctcatgctcgtgccattagagatgttgaagatgatgagcttcgaggtttctttcaaggaatgtcagcttggcagtttatcttagtagttactgcaagttcagttggagaagagctcttctatcgtgctgcgtttcagggtgcactagctgatatattcctaaggggcacagatcttatctcggattctcgaggaatggttgctttgactggactcttgccaccatttgtaccatttgctcaagta

SEQ ID NO: 137341 - DNA, 180 bp, Arabidopsis thaliana
gctgcccaggagggagacactagttaagatatagctttaaagggaggaaaaaaaaaatgtagtaatggaaacaatgtgagggatataatctatctatctagtcccaaagggtaagcaatattttgttgttatgtctttgtagcaatgcactgaaagctatatttaattacattgctgtac

SEQ ID NO: 137342 - DNA, 278 bp, Arabidopsis thaliana
attcccgatcagatctcaacgacgacgagccatggcttcaactttcagcggcgatgaaactgctcctttcttcggattccttggcgctgccgccgctctcgttttctcctgtatgggagcagcgtacgggacagcgaagagcggggttggtgtagcgtcgatgggtgtgatgagaccagagcttgtgatgaaatcgattgttcctgttgttatggctggagttttaggtatttatggtttgatcattgctgttatcatcagtaccggaatcaacccta

SEQ ID NO: 137343 - DNA, 258 bp, Arabidopsis thaliana
ccaaaacctcccaccgtgaaaccccatcctaaaccaccaaccgtcaaaccccatcctaaaccaccaaccgtcaaaccccaccctaagccacggagcgtcaaaccaccccaccctaaaccacccagcaaacctcacccccacccaaaacctcccatcgtaaagccaccaaccaagcctcctccgtccacccctaaacctcccaccaaacctcccccgtccacacctaaacctcccacgaccaagcctcctccgtctact

SEQ ID NO: 137344 - DNA, 378 bp, Arabidopsis thaliana
ctctttatcagaaactcgatttctccatcgacgacatcgtcaagaacttaacttcagctaacgtgatcggaactggaagctccggtgtagtttacagagtcacaatcccgtccggtgaaactttagctgtgaagaaaatgtggtcaaaggaagaaaacagagcgtttaactcagagatcaacactcttggatcgattcgacataggaacataatccgtcttttgggttggtgttcgaatcggaatctgaagcttttgttctatgattatcttcctaacggaagtttaagctctctgcttcacggtgccggtaaaggaagtggaagagctgattgggaagcacgttacgacgtcgttttaggcgttgcacatgcactag

SEQ ID NO: 137345 - DNA, 410 bp, Arabidopsis thaliana
cgtaccatgggctgcctgatgggccctttggcttggcaacagtcttcctcattgtacggatctgaccgtgtcaagtacttgggtccattctctggcgaatcaccgagctaccttaccggagagttccccggagactacggatgggacaccgccggactttcagctgaccccgagacattcgcaaggaaccgtgaactagaagttatccacagcaggtgggccatgctcggagccctaggctgcgtcttccctgagcttttggctagaaacggagtcaagttcggagaggcggtttggttcaaggccggttcacagatcttcagcgatggagggctcgattacttgggaaaccctagcttggttcacgctcagagcattttggccatttgggccacacaagttattttgat

SEQ ID NO: 137346 - DNA, 287 bp, Arabidopsis thaliana
gacttggttaaaaatcttgagttggacttgtttcattgtgtccctcgttgctgcagccggatcagtgcaaggactcatacaaagtctcaaggatttcaagcctttccaggctccttagtgaaaatatgtgttctcgccaacgtctccaagaacacaagttccatgcactctcttccctccaataaaagtttctatttctttgtagtttattggtgtgagacaatctcataccaaaatattgtacctctacttgcttgtcttaaacaaatctatcatcagtttatccc

SEQ ID NO: 137347 - DNA, 360 bp, Arabidopsis thaliana
ggcagactgttgcagtcggtgttatcaagagtgttgacaagaaggacccaactggagccaaggttaccaaggctgcagtcaagaagggtgccaagtgaactctgaacatcaaaactctttccgctgatgaaatgaaggactattttagtttctttactttagtagtttggtatttggttggttgtttgtgttaccgcttcgtttattctccgtcggagctcaattctcggaattgggttcttgatcggaggtggcggaggtacttggcactcgagcttcctgtttatttcttttgttttgtgttatgattttgaacctttttggatattcggttatatgatatttgtgtcattcctgcgg

SEQ ID NO: 137348 - DNA, 290 bp, Arabidopsis thaliana
ctctgctcttcttcttcttcctccgccatagctacaatgcttagtctctcaatcgctacgccggggacggcggcgatttttcgtagaggaactgcttcggcgacttcaacttcgtcttcattccatggtgtcagaatccagcaccaggtttctgctcgcgtccccgcggcggcgacgatatcgtcgtcgtctcctaaaccgtcggtggtgatgatgtcgaaaagagaggcggaattgaaagagataagatcgaagacgacggagcagttacaagaggaggttgttgacct

SEQ ID NO: 137349 - DNA, 278 bp, Arabidopsis thaliana
cggctgctcaagatgctgctcgtatgccggagaagctgttcagactcagcccggtcactaaaacaatatattaaccaatcaccaccatgcatgtattgcattatgtatgtatgattttaagtaaaccatggtgcgtttgtaatgaactgcctcaagtttttgaggcactatagattaagaagagaactatgggaataaagtttgattatgtaatgttttatgtggtttgagttgtaatacttgctgtttgcataataaaatcgtttgtagtttatgtt

SEQ ID NO: 137350 - DNA, 408 bp, Arabidopsis thaliana
  unsure (1)..(408): unsure at all n locations
cccgtggggtactttgcccacaatcttggccattgagttcttagccattgcatttgttgagcaccagagaagtatggagaaagaccctgagaagaagaagtacccgggaggcgcatttgaccctcttggatactcgaaggaccccaagaagctcgaggaattgaaagttaaagagatcaagaacgggcggcttgcgctgttggcgtttgtaggattctgtgtgcaacagtcggcttacccggggacaggaccattggagaacttggcaactcacttggcggatccatggcacaacaacattggcgatattgttatccctttcaactaatgaatgtaaaaatagaaatatgtgtaccttatgagctttatgtgtatcanaaacactgtgtaatgaaagacagatttgtg

SEQ ID NO: 137351 - DNA, 293 bp, Arabidopsis thaliana
gttcttgagagtttctttggttggtactacgcttcttcatcagttgctgtcttgatcgctttcaccgtcattgtttacattcaagatcatctaggatggaaaatcgggtttggaatacccgcgattctcatgctgctcgcgggtttcttgtttgttttcgcgtctcctctctacgttaagcgcgatgtgagcaagagtctgttcactggtttagctcaagtggttgctgcagcttacgtgaagagaaacttaactttgccggatcatcatgactccagagattgttattaccg

SEQ ID NO: 137352 - DNA, 415 bp, Arabidopsis thaliana
ttcgggaaaagtatttggtgtgataaattccctctccagcttctcggtgacacagatattttgcttccaaataaaacgagtccggtcactggcgctcactgacttcgtcttcctccatctccgatccattggtttaacaagcgcgtgagggccagatagaccgagaatcatgggaaacggaaactcaacggagacgaaagagtcgcgccgatcaaagatgcgtaagaagattcaaaactttcgcagccgccgccgtcttagtcgtccaggatccggaagcgtctctggattggctagtcagagatctgtgagcgcagatgatttcgccggcattgctcttctcactcttatcggcgcggagatgaagttcaaggacaagtggctcgcctgtgtttccttcggggaacaaactttc

SEQ ID NO: 137353 - DNA, 389 bp, Arabidopsis thaliana
ggtttggatacatttgagacagttccagaggcggctccagcagagttgaaagagcctccaatcgaagatcagcttgcgtttcatactttatggccggaatctcataaactctatggtcatggtaatgaactattttctctctgctctgaccacaagggaaaccttgttgcttcatcgtgtaaggctcaatctgcatccatggcagagatatggctatgggaggttgggacatggaaagctgttggtcgtttgcaatctcacagcttgacggtgacgcacttggagttctcttatgatgacactctgctcttgtctgtctcaagagatcgtcacttctccgttttctctatccaaaggacagacaatggtgaggttagtcacaaactcat

SEQ ID NO: 137354 - DNA, 261 bp, Arabidopsis thaliana
gatcattaacgatcgtgagactggaagatcaaggggattcggattcgtcaccttcaaggatgagaaagccatgaaggatgcgattgagggaatgaacggacaagatctcgatggccgtagcatcactgttaacgaggctcagtcacgaggaagcggtggcggcggaggccaccgtggaggtggtggcggtggataccgcagcggcggtggtggaggttactccggtggaggtggtagctacggaggtggcggcggtagacg

SEQ ID NO: 137355 - DNA, 405 bp, Arabidopsis thaliana
  unsure (1)..(405): unsure at all n locations
caacactacanaaaagaaacaaatactctctctcgatacatatttcctcactttgatcagtttgatcacgtagagtgccttgaaggagaagaaagtaacaaaaaagaaagagaaatgggataccttttcgaagaaaccttaagctctaaccctaaaaccccaattgttgttgatgatgataacgagttgggtttgatggccgtgagacttgccaatgccgccgcctttccaatggttcttaaagcttccctcgagctcggtgtctttgacactctctacgcggaagcctctcgcactgactcgttcctttcaccctctgagatagcaagtaagctaccaactacaccccgtaaccctggggctccggtcttgttggaccgcatgcttcgtttactcgctagctat

SEQ ID NO: 137356 - DNA, 333 bp, Arabidopsis thaliana
gttctagatcgcgagcggccgccctttttttttttttttttgaaacgaaacaatttgtgaaattgataactaaaaccaaatgcgtttatcttccttgtcacagatgaggctcgtagagagttctctaaccttcgtcgtgctttcgatgaggttaacacacagctccagaccaaatttagtcaggaacctgaacctatagattgggattactataggaagggtattggagctggcattgttgacaagtacaaggaagcttatgacagcattgagattccaaagtacgttgacaaagttactcctgaatacaagccaaagtttgatgctttgttg

SEQ ID NO: 137357 - DNA, 318 bp, Arabidopsis thaliana
cgtcggatgagtcagctcacgggaatcaagagcaaagagattttgatttgggttacgatctctgagatctttgttaatcatcaagatccgactcaaatcacttttgctaatcctacgggactatcacgtactttccccgtcactgcttttgaagaagacgaatgattcatttgtcaacgctcaccatcatgatactttgcttagctaaattatcttttgttttttccttataattccttttgtttagctaagttctattttcaacatttgtatttctgcatcttttccattagagattttataaaaataataatatag

SEQ ID NO: 137358 - DNA, 264 bp, Arabidopsis thaliana
cggatttgtataaaccaagatctccaaagattctacgaggtccaataagtccgttaattggttcttccttgtgggcgctatagcccctattcttgtatggttagcttcaaggatgtttcctagacaagagtggatcaagcttataaacatgccggttcttataagcgcgacaagctcgatgccgcccgcaacagccgtgaactacacaacatgggttcttgctggattcttatccggatttgttgtgttgacgtacatgctaaa

SEQ ID NO: 137359 - DNA, 324 bp, Arabidopsis thaliana
ccttggaagcggccgtgtgacaatgacttcagatgccgcgggggaaagcttgacggccttaccggcgaaggcaggggatgagagagccattgttgaggcggcatctgaagtccttggaagcggccgtgtgacaatgaggaagactgttgccaagccaaagggcccatcatgcagcccatggtacggatctgaccgtgtcaagtacttgggtccattctctggcgaatcaccgagctaccttaccggagagttccccggagactacggatgggacaccgccggactttcagctgaccccgagacattcgcaaggaaccgtgaact

SEQ ID NO: 137360 - DNA, 150 bp, Arabidopsis thaliana
ttcaatgtcaatctctcgtatatgtatatgtatatgtttgacttgtgttgcaagctatctaatctgttctctatctctgtttcttcttctgttgttgttgttgttgtctaagacttgtccctctttttgcaaatgttttatttctccatt

SEQ ID NO: 137361 - DNA, 165 bp, Arabidopsis thaliana
gtcatcacagaaaataaaaaacaatggcgaataagttcactagacaacagatttcagagtttagggaacagttcagcgtatacgacaagaatggtgatggtcacattaccacagaggagttcggtgccgtgatgcgttccctcggtttaaacctgacccaagctg

SEQ ID NO: 137362 - DNA, 322 bp, Arabidopsis thaliana
gtgaaggaacacttcgttgttacgaagatcggtgtcctcatcggttggctaagttgtctgaaggacaattgattgatgggagattggaatgtttgtatcatgggtggcaatttgaaggagagggcaaatgtgtcaagattcctcagcttcctgcaagtgctaatattccaaaggctgcttgtgtgaagacgtatgacgtgaatgattcacaaggagttgtgtgggtgtggatgtcaacaaagacacctccaaaccctgagaagcttccttggtttgagaatttctctagacccggttttttcgacatttcgactactcatga

SEQ ID NO: 137363 - DNA, 316 bp, Arabidopsis thaliana
caggtggattcttcttgatgaaagccttaacagaattcaggatcttctcattcttggcttgatcagaccaggaaggtaagagaccgggagtgtcaatcacccgtaccttaattccctgaaccaaaccctcaacatcttgaaccctctttgtccccatctggaatgcatcagtacaaaatttcacttcatcaaatatagaattgatcgttgcacttttaccaaccccactttttccgagaaccataatcgtacaagaaaaatcaagtggatcctgtccagcagcctcaagctgttctgccatggcactggcgcgatc

SEQ ID NO: 137364 - DNA, 323 bp, Arabidopsis thaliana
gaaaacatacacaaatagcaaaacatggctaacaagctcttcctcgtctgcgcaactctcgccctctgcttcctcctcaccaacgcttccatctaccgcaccgttgtcgaattcgaagaagatgacgccagcaaccccgtaggtccaagacagagatgccagaaggagtttcagcaatcacaacacctaagagcttgccagagatggatgagcaagcaaatgaggcaaggacgtggtggtggtccttccctcgacgatgagttcgatttcgagggcccccagcacggataccagctactccagcagtgctgcaacgagcttcg

SEQ ID NO: 137365 - DNA, 332 bp, Arabidopsis thaliana
caacaaacaaaaagaaaatggttaagctcagcaatctcctcgttgcaaccttcggggttctcctcgtccttaacggctgccttgcgaggcagtcacttggggttcctcctcagctacagaacgagtgtaacctcgacaacctagatgttctccaagccaccgaaactatcaagagtgaagccggtcagatcgagtactgggaccacaaccaccctcagctccgatgtgttggtgtttccgttgctcgttatgtaattgaacaaggcggtctttacttgcccaccttcttcacttccccaaaaatttcctacgtcgttcaaggaacgggtatc

SEQ ID NO: 137366 - DNA, 392 bp, Arabidopsis thaliana
cctggttttgcagccttgccaaaggcatttagtccatggcattgatttgatcgtaaaaggtacaactcaagacggcaaggttatactgtcacccttggagatgcgttctcagttctacattctgtgttatgatgtgcaaaacaatgatttgagaaaggttgaaatcacaggagtaccacgcctttggttgcataaagaatgcaattttgacttgaagtttatggatgagagtgagagcttcatctacttggaaatttgaccaatacttttgacttttgtttgtgtaccagataagaatacagttaagttttttttttttcttctgtcaagattagtctcctacccataaatccaccgaaccctcgttaacatttattatcaatcaagaacac

SEQ ID NO: 137367 - DNA, 398 bp, Arabidopsis thaliana
gcaaaaaatggcaaacaagttgttcctcgtctgcgcagctctcgctctctgcttcctcctcaccaacgcttccatctaccgcaccgtcgttgagttcgaagaagatgacgccactaaccccataggcccaaaaatgaggaaatgccgcaaggagtttcagaaagaacaacacctaagagcttgccagcaattgatgctccagcaagcaaggcaaggccgtagcgatgagtttgatttcgaagacgacatggagaacccacagggacaacagcaggaacaacagctattccagcagtgctgcaacgagcttcgccaggaagagccagattgtgtttgccccaacttggaacaaacctgcaaaggccgttagactccagggacagcaccaaccaatgcaa

SEQ ID NO: 137368 - DNA, 394 bp, Arabidopsis thaliana
agcaagaacttccccgtttaaagtaatatcaccgcgtaggctctcttttgaaatccgattggctaatgcatcgataagcgttgatttccctgacccgctcgctccaagaacagccatcatctctccttcccgggcttcaccagaaataccattcaggagcaccttagtattcatctccatatcattaccatcaaaaggtgaattcccacaacaaggaaagggcttaaacttcttcttgatcttcacgctgtaagtcaagtctttgaaggaaagaacaaacggagaagaagaaggcacacgagaagacggaaccgaggaccagaaattggacgcaaccgcaatatccatagcccgactctggtcatccccctcatcttccacactcatgagaagt

SEQ ID NO: 137369 - DNA, 401 bp, Arabidopsis thaliana
acacaaacgagtaagaatacaaatacaaatagcaaaaaaaatggcaaacaagctcttcctcgtctgcgcaactttcgccctctgcttcctcctcaccaacgcttccatctaccgcactgttgtcgagttcgacgaagatgacgccagcaaccccatgggcccaagacagaaatgtcagaaggagtttcagcaatcacagcacctaagagcttgccagaaattgatgcgcatgcaaatgaggcaaggccgtggtggtggtccctccctcgacgatgagttcgatttggaagacgacatcgagaacccacaaggcccccagcagggacaccagatcctccagcagtgctgcagcgagcttcgccaggaagagccagtttgtgtttgccccaccttgagacaag

SEQ ID NO: 137370 - DNA, 346 bp, Arabidopsis thaliana
gaaaattttgactcaaatgagttgatgggtcaaatgagttgatgagtcaattggtttgatgagtaaaatgagttgggttgtaatggttaatggtttcaatggtttacccaattaacccatcaagttttgtaaaattgaattaaaccaactaaaatctctaaaccaatgccaatttaagtttaaccaacacatctaaaccaatttaataaaattaatatttttccaaatttcttaaatatacaagcgatgaaattgagaaaaagtaaactcgtaagttttccaccaaaaaacataaatccgtgatttttccgccaaaaacgtaaacccgtgattttctcgtcaaaaa

SEQ ID NO: 137371 - DNA, 366 bp, Arabidopsis thaliana
aatcaataaagaggaagaaaaatgggtcgagtctcatctattatctctttctctttgacactcttgatcctcttcaatggctacactgcccaacagtggcccaacgagtgccagctcgatcaactcaatgcgctcgaaccatcccaaatcatcaagagcgagggtggtcgcatcgaggtctgggaccaccatgcaccccagctccgttgctccggctttgcctttgagcgtttcgtcattgagcctcagggtcttttcttgcccactttcttgaacgccggcaaactcacgtttgttgttcacggaaggggtctaatgggaagagttattccgggatgcgccgagacgttcatggagtcaccggta

SEQ ID NO: 137372 - DNA, 324 bp, Arabidopsis thaliana
aaaaagaaaatggttaagctcagcaatctcctcgttgcaaccttcggggttctcctcgtccttaacggctgccttgcgaggcagtcacttggggttcctcctcagctacagaacgagtgtaacctcgacaacctagatgttctccaagccaccgaaactatcaagagtgaagccggtcagatcgagtactgggaccacaaccaccctcagctccgatgtgttggtgtttccgttgctcgttatgtaattgaacaaggcggtctttacttgcccaccttcttcacttccccaaaaatttcctacgtcgttcaaggaacgggtatc

SEQ ID NO: 137373 - DNA, 400 bp, Arabidopsis thaliana
agccgcggatctcgccagcaaccagaaccagcttgaccgcaaccttagaccatttttgatagccggaaacaacccacaagggcaggaatggctacaaggccgaaagcaacagaagcaaaacaacatcttcaatggcttcgcacctgagatcttggctcaagccttcaagatcaatgtcgagacggctcagcagctccagaaccagcaagataaccgtggcaacatcgtcaaggtcaacggacctttcggcgtcattaggccacccttgagacgcggcgaaggcggccaacaaccacatgaaatagctaatggtttagaggagactttgtgcaccatgcgatgcactgaaaacctcgatgacccgtcggatgctgacgtgtacaagccatcactcggatac

SEQ ID NO: 137374 - DNA, 342 bp, Arabidopsis thaliana
aaatagtgtttttaaccaaaagaaaaaaaagatactgtaaactatataaattttctgtaatctatagaaagaatcaaagtgaagttgcagaaataaagaccaaatcaaatgaataatttattaaattgataaggtggcaaccaacagatatattgcacttaatatagtaaaaaatcatacattgctgtcagtgagtagtaaaccaagtagtcacccatatataaatttctggaaaatatgaaactcctaatcctacatgacttaaaccttttttagataatttcattatcaaatggctattctttcaattcacccttatatctttgcacaacaatagagaga

SEQ ID NO: 137375 - DNA, 330 bp, Arabidopsis thaliana
aataaaaatggtcaaatcattatataaagactggagcaatgggaacgaaaacgggtgcatcaaaccaacatagttgataggcttgatgttaccttagcagctcttgttcttgctctagaccagcgtgaaactgcagtctcttgcttctcaatttcaaaaaacgatatagaacttcttttaagttcagcaaagtcaagtaccttccacctgcaaattccatttagttactactaaacagataattttatcctctctatatataccaatgccaataatcataacaccacgaaccatctttgctcaacgactacagcacaatcagctagcctt

SEQ ID NO: 137376 - DNA, 387 bp, Arabidopsis thaliana
cacaaatctctcttccacccattgttatctctgtagaagcgtgagagagatcacgcgtattcaccgacacaatcaaaatatggcgaacggagccgatagattggatctggacggtaaaccgattaagccgatgacgatatgcatgatcggtgccggaggtttcattggctctcatctctgtgagaagcttatgacggagactcctcacaaggttcttgcgcttgatgtttacaatgataagatcaagcacttgcttgagcctgataccgttcaatgggctggtcggatccagtttcatcgtatcaacattaagcatgattctagactcgaaggactgatcaagatgggagatctgacaataaatctagctgcgatctgtactcccgc

SEQ ID NO: 137377 - DNA, 321 bp, Arabidopsis thaliana
cgtgtcagattcgctttctctacggctggactagaaggattagggatttaccggtggaagaataactccagagataaatctgtaaccatggatatgatgaagaagcgtaagctcgatgagaacggtaacggactcaataccaacggtggcggaaccattggtccaactcgattgtcgccgcaagacgcgaggaagattatcgagcgattcaccactgatcagctgctcgacttattgcaagaggctatcgtacgccatcccgacgtgcttgaatctgtccgattaaccgccgactctgatatctcgcagcggaagctattc

SEQ ID NO: 137378 - DNA, 394 bp, Arabidopsis thaliana
agccaaaattacactgtaaatttggcatttcgagaagaagaagagggagtgatggaattgcaaggagaggaaagcaaaacggcgacgtattgcgtgacgggtgcaagtggatacatcggttcttggttggttaagtctcttctccaaagaggttacacagtccatgccactctcagagatcttgcaaaatctgaatactttcaatctaaatggaaggaaaatgaacggctcagattattccgagcggatcttcgagatgacggcagctttgacgacgccgttaagggttgtgacggcgtcttccatgtcgccgcttccatggagtttgatatctcatcagatcacgttaatctcggtacgaccttttcgttgcaccggtcctttttttttgagc

SEQ ID NO: 137379 - DNA, 324 bp, Arabidopsis thaliana
atgaatgtgtgcaaatcaagcaaaagtaacttgatttgttgggcttctttgttatacgttctccaaggtggttcaactaatattccaacattttttatattacatctttggtgaaccaatgttatcacaagggagcatgaaagctctttgtacttgtttttatcagtactcagtaggtattaatcaaatttgcatgatttgtggaaaacaagtggtcagtggtggatatgttcttgttgagtcacaattacgttgaaaattaagggtgtaaagttagatttcggtttgagacctcgtctcaaccggtttgaacccaaattgggc

SEQ ID NO: 137380 - DNA, 323 bp, Arabidopsis thaliana
caaaaagaaaatggttaagctcagcaatctcctcgttgcaaccttcggggttctcctcgtccttaacggctgccttgcgaggcagtcacttggggttcctcctcagctacagaacgagtgtaacctcgacaacctagatgttctccaagccaccgaaactatcaagagtgaagccggtcagatcgagtactgggaccacaaccaccctcagctccgatgtgttggtgtttccgttgctcgttatgtaattgaacaacgcggtctttacttgcccaacttcttcacttccccaaaaatttcctacgtcgttcaaggaacgggta

SEQ ID NO: 137381 - DNA, 334 bp, Arabidopsis thaliana
  unsure (1)..(334): unsure at all n locations
acatggctaacaagctcttcctcgtctgcgcaactctcgccctctgcttcctcctcagcaacgcttccatctaccgcaccgttgtcgaattcgaagaagatgacgccagcaaccccgtatgtccaagacagagatgccagaaggagtttcagcaatcacaacacctaagagcttgccagagatggatgagcaagcaaatgaggcaaggacgtggtggtggtccttccctcgacgatgagttcgatttcgagggcccccagcanggataccagctactccagcagtgctgcaacgagcttcgccaggaagagccagtttgcgtttgccccacctt

SEQ ID NO: 137382 - DNA, 388 bp, Arabidopsis thaliana
tgccgctataaccgttttctcttggatttacaagtacgcaacgggagagcacccacagggatcagacaagttggacagtgcaaggatgaagttgggaagcaaagctcaggatctgaaagacagagctcagtactacggacagcaacatactggtggggaacatgaccgtgaccgtactcgtggtggccagcacactacttaagttaccccactgatgtcatcgtcatagtccaataactccaatgtcggggagttagtttatgaggaataaagtgtttagaatttgatcagggggagataataaaaaccgagtttgaatctttttgttataagtaatgtttatgtgtgtttccatatgttgtcaaatggtaccatgttttttttcctc

SEQ ID NO: 137383 - DNA, 392 bp, Arabidopsis thaliana
aaaagaaaatggttaagctcagcaatctcctcgttgcaaccttcggggttctcctcgtccttaacggctgccttgcgaggcagtcacttggggttcctcctcagctacagaacgagtgtaacctcgacaacctagatgttctccaagccaccgaaactatcaagagtgaagccggtcagatcgagtactgggaccacaaccaccctcagctccgatgtgttggtgtttccgttgctcgttatgtaattgaacaaggcggtctttacttgcccaccttcttcacttccccaaaaatttcctacgtcgttcaaggaacgggtatcagcggaagagtggtccctggatgtgccgagaccttcatggactcgcagccgatgcaaggacaacaacaa

SEQ ID NO: 137384 - DNA, 390 bp, Arabidopsis thaliana
acacacatagcaaaaaatggcaaacaagttgttcctcgtctgcgcagctctcgctctctgcttcctcctcaccaacgcttccatctaccgcaccgtcgttgagttcgaagaagatgacgccactaaccccataggcccaaaaatgaggaaatgccgcaaggagtttcagaaagaacaacacctaagagcttgccagcaattgatgctccagcaagcaaggcaaggccgtagcgatgagtttgatttcgaagacgacatggagaacccacagggacaacagcaggaacaacagctattccagcagtgctgcaacgagcttcgccaggaagagccagattgtgtttgccccaccttgaaacaagctgccaaggccgttagactccagggaca

SEQ ID NO: 137385 - DNA, 305 bp, Arabidopsis thaliana
acgttggtgggatggagatggcatgaccactggatctattgggtcggaccattcatcggtagtgctttagccgcccttatatatgagtacatggtcatacccaccgaaccacctacccaccacgcacatggtgtacaccagcccttggcccctgaagattactagatggaactttcctcatgtcaccactgcttttgttcgttgttcaagctctctttgtctgtatgatgagatcacttgcatagatactttttttcttatgctactcttatgttgtaataataaaaaataaagaacgatttcgc

SEQ ID NO: 137386 - DNA, 326 bp, Arabidopsis thaliana
acaaaaagaaaatggttaagctcagcaatctcctcgttgcaaccttcggggttctcctcgtccttaacggctgccttgcgaggcagtcacttggggttcctcctcagctacagaacgagtgtaacctcgacaacctagatgttctccaagccaccgaaactatcaagagtgaagccggtcagatcgagtactgggaccacaaccaccctcagctccgatgtgttggtgtttccgttgctcgttatgtaattgaacaaggcggtctttacttgcccaccttcttcacttccccaaaaatttcctacgtcgttcaaggaacgggtatc

SEQ ID NO: 137387 - DNA, 392 bp, Arabidopsis thaliana
ccataaggcggaacatgtgagacgcggagacgtctttgccaacactccaggctctgcccactggatctacaactcaggagaacagccacttgtcatcatcgctcttctcgacatcgccaactaccaaaaccaactcgaccgcaaccctagagtgttccatttggccggaaacaaccagcagggaggctttggcggttcacagcaacaacaagaacagaaaaacttgtggagcgggttcgacgcacaggtcatagctcaagcattgaaaattgacgttcagttggctcagcagcttcagaaccaacaagacagcagaggaaacatcgttcgtgttaagggacctttccaggtcgtgaggccacctctaagacagccctacgagagcgaggagt

SEQ ID NO: 137388 - DNA, 235 bp, Arabidopsis thaliana
cactacttaagttaccccactgatgtcatcgtcatagtccaataactccaatgtcggggagttagtttatgaggaataaagtgtttagaatttgatcagggggagataataaaagccgagtttgaatctttttgttataagtaatgtttatgtgtgtttctatatgttgtcaaatggtaccatgttttttttcctctcttattgtaatttgcaagtgttatgtatgttgtacttt

SEQ ID NO: 137389 - DNA, 395 bp, Arabidopsis thaliana
aaacaaaaagaaaatggttaagctcagcaatctcctcgttgcaaccttcggggttctcctcgtccttaacggctgccttgcgaggcagtcacttggggttcctcctcagctacagaacgagtgtaacctcgacaacctagatgttctccaagccaccgaaactatcaagagtgaagccggtcagatcgagtactgggaccacaaccaccctcagctccgatgtgttggtgtttccgttgctcgttatgtaattgaacaaggcggtctttacttgcccaccttcttcacttccccaaaaatttcctacgtcgttcaaggaacgggtatcagcggaagagtggtccctggatgtgccgagaccttcatggactcgcagccgatgcaaggacaacaac

SEQ ID NO: 137390 - DNA, 408 bp, Arabidopsis thaliana
  unsure (1)..(408): unsure at all n locations
gttgaaaaacaaaagagttccgaccgttgtttcgaactaccagaaggacgatggagcggaggatcccgtcagctgtggacggaattgcctcggcgcttgttgccttaacggggctaggcttccattgtatgcatgtaagaatctggtaaaatccggagaaaagcttgtaatcagtcatgaggctatagagcctcctgtagcttttctcgagtcncttgttcgcggagagtgggatgataggttccaaagtggactttatcgctatgatgtcactgcctgcgaaaccaaagttatcccggggaagtatggtttcgttgctcagcttaacgagggtcgtcacttgaagaagaggccaactgagttccgtgtagataacgtgttgcagtcttttgatggcagcaaattcaa

SEQ ID NO: 137391 - DNA, 309 bp, Arabidopsis thaliana
ctgagattcacattccggtgacaacgccaagaggaagatggatgacgaattgttggcattgcagcgtcagttcgagttcgctcaacaggtgaagtcaagcgtgagattgtcggatcgaaatgttgtcgaattggttcagaagcttcaggagcttggcgttattgacttcgatctgcttcataccgtcaccggaaaagaatacatcactcatgagcaattgatgaatgaaattactcgtgagatcagtaaattgggacgtgtctctgttattgatctggcagatacgattggggttgatttgtatcatgt

SEQ ID NO: 137392 - DNA, 312 bp, Arabidopsis thaliana
cgaaaaccccaaaatgaccacaccttccctatcttccatcctccggcacacacgtccaatcttcaaggaaaccctcagggccgccaggccaactcttcaaaatgctttgcccaatggtttccgcattgcctctgaatccaaggacggggacacctgcactgtgggcgtgtggattgatgctggcagcagatgggagaccgagaaaaacaatggtgtcgcgcacttccttgagcatatgaacttcaagggaacaggaaagaggtcgagacaggatattgagtttgggatggaaaagatgggtgctcatctgaa

SEQ ID NO: 137393 - DNA, 181 bp, Arabidopsis thaliana
actcgacaacaaaacttacttgcgtgatctttggcttccttgacatcatacagttcacagagtttgctcaatgaaggttcacgagacacgatctcacgctcacatgtctggagaccaacatcagaagggaaatttgcggaagcacaaagcacaagggaaacttccagaatctgaacagtct

SEQ ID NO: 137394 - DNA, 423 bp, Arabidopsis thaliana
acgagattttcgaacatgtattggtagtggtcagatctagtcatctatcttaaaagaaactgaatactaacttaaatcaaaccacatatacaaatggtctagacaaagtgtgatatttgtatatgaatttggtagatatcagctagttctaaatgatatactagtagtgtcattggttatatagataataataataataataatacaatgtagatctcttatcgactattgtgatttgcagattaaacaaaaaatgaagaataaaggtcaagattcgttctgagtaaaatgcaggagggcgggaaaacaacctgttgacttagaaaatcaatttttcttataaaaacaattgtcaagtgagaacatctaccgatgattgcggctcgcaaagttttttatactttttagaaaccaaaatttcaa

SEQ ID NO: 137395 - DNA, 373 bp, Arabidopsis thaliana
ctaggccgagggatatcaaaacaccgtatgagaaaatgcttgagaataatgtggaattcgggtcgcctgataagcgctctggtggctttttcaactctggattgatagttctgttctacattgcagtgcttgcagggcttctccaccgatttcctgttaacttttcccagagtacaacgggacagctgatgacccgcaagtctggtggtcctggtgggggaaaagtttctggtgatggtgaaacaatcacttttgcagatgttgctggtgttgatgaagcaaaggaagagctggaagagattgtggaatttctcaagaatcctgataggtatgttcgtctaggtgctcgtcctcctcgtggtgtcctactggt

SEQ ID NO: 137396 - DNA, 411 bp, Arabidopsis thaliana
aatgtcaacagcttcttgattggacaagtgctcccacaagccgtctgatgcaaatataagaaactgatcttctggatggattttgtgtactgtaattgccggctctgctctaaggatgggcttatggaaaacctcagggaccctgaactttgccaacaatggttcccggttgaattctgctttctttaagtatgcatcaccaatcgaccgtgaaaccttcaagaaccagccacgggttatatctagcgaaaaatcctcttcttatacatgcatagggcttacttagttgtatctttcacagtcaagctacttgcaagaaaagagtctagaagtcagcaactcgcattaccgtgaaagtatttttacctgtataatacctttgacacgccaaactttgtgcttcaagaccac

SEQ ID NO: 137397 - DNA, 382 bp, Arabidopsis thaliana
acgcgtccgagtcagctcattaaacggttcagttccttcaaactttagtaactggaaaggcttgacgactttagttctcagcgagaaccggttttcaggaggtattccacagttcttgcctgagcttaagaagctgtcaactctgcagattgctagaaatgcttttggtggtgagattccttcgtcgattgggttgatagaggatctgatctatgacttggaccttagtggaaacggattgacaggtgaaattccagccaagttgggagatctcatcaagttaacaagactcaacatatctaacagcaatttgacatgatctttatcggttctcaaaggtcttacctcattgctacatgttgatgtctccaacaatcagttc

SEQ ID NO: 137398 - DNA, 441 bp, Arabidopsis thaliana
cacgcgtccgagtaaaatatacgaagtaaaataaatggtcccaagtatatgaatgaatacatgtatttacagatatctctctcccctatctccttatgatttgtcattttcctcacccataatcctataaaataatcaagaacctccgagggagagagacatacacacagacagagtaagacatatataacatatatagagagagaagacctaaacaaagagacatatggtgtctttaggttactgcttgaaggagaagaagacatgcgtgagatgggtagagatatacttcgatgactgtctctgtaacttaaacgacgacgtttcattcgcacttggaatcgctagcctcctctgttggggagtcgcagagattcctcaggtcatcactaacttccgtacaaagtcaagtaacggtgtctctctctccttcctcctcgc

SEQ ID NO: 137399 - DNA, 428 bp, Arabidopsis thaliana
agttattgctgtgaggataatcaccgagtgctaatctatgagtacatggctcgtggtagcgtggagaacaatcttttctcaagagtgttgcttcctctttcatgggcaataagaatgaagattgctttcggagctgcgaaaggacttgcctttcttcatgaagcaaagaaacccgtcatttatcgcgatttcaaaacttcgaacattcttctagatatggattacaacgccaaattatctgattttggacttgctaaagacggtcctgtaggagataaatcccatgtttccactcgtataatgggaacttatggctatgcagctcctgaatacatcatgacagggcatttgacaccggggagtgatgtgtatagtttcggtgtagttctgttagagcttcttacgggaagaaaatcattagacaaatc

SEQ ID NO: 137400 - DNA, 386 bp, Arabidopsis thaliana
gcgtccgaggcgaatacgcatctatcaacaacaacggatggaggtggtttccggcgaactccctcctcctctttatgccctcagccttcttgatggcggaacaaatatccactgttctacacaactctcgatccggatttctgttaacacctgaagaacccttcaccttggtttcgttgatggcaggagacgcttctcttggaccataagttgcgccttgccaggtggagacgtcgacggcgcatgacgagcttttcttcaagggtacagtcttctctgctttttggatccccgccttaaccacatatcacggtcagagcttggtaggcccgaatctgtcttcaccggagacgcagaatacaacgcaaatctcaccttcatcttct

SEQ ID NO: 137401 - DNA, 424 bp, Arabidopsis thaliana
aaagaaaaatgaaaacacgtctttgtttaattttcttcaaatttacaattcccacaaatctcaggaacttaaaacgggaagataatttaaataaatgattctttttggaggttttggtttaatgtggagttgaaagcagaaattagttgatctgttcttcttcttcttcccgggtcggtgataaattttgtgattgacgaaaatacccttgttagtgggattgggttgtatgtaaatataagggtgttttaggtagtttgactagaatcgttttcgtgagatggacttttatggagctggtgcggttgatgtgtgttatcgttgactttgtccaaaagtagtggcgttgcttattttttgtgctctttctagaaatatttttgacgctttggaagtcttacactaaaagccaaaaacattccca

SEQ ID NO: 137402 - DNA, 416 bp, Arabidopsis thaliana
actctccggctgttctttgaccagactttaacattttcatcacctgcgtttttagagcaagaggtgacagaatttgcatgttcatcagaagccaaagcttggaaatcttcatttgattggataggtgatacatctgatttctgtatagtacacagttttgcaaaaagctgagatatcatcacagcattctgcccgtgactctgatggccttcgtctaatttgaccggacaacctaataagagatgccatcaaaagtcaatatctattcatccaaaccgcataaaagcagaaatcaacatctttgaaagagaactgtgaccttgatttgctacttctacatccacaggtgtaaagaacctattcaaggaggacatagctgcaggtagattacttatattacttaagggactaatttc

SEQ ID NO: 137403 - DNA, 335 bp, Arabidopsis thaliana
taacggaaagagacgacaatggcgggtcggttcttcgataacgtgatgcctgatttcgtgaaggtgaaggaaagtgtatctggaggagatacgcttaggaatctgcttgctatgccgtattcgtctctctcgcagcagctcaagcggtccgctttggatctcaaagaaaccgtagtgattgaaacttggggttttagtggacagactgttgaagacttcactctttactctggaactcttggagctgcgtttttactctttagagcttatcaggttactggcaacgccaacgatctttccctctgcttggaaatcgtcaaagcttgtgatactgc

SEQ ID NO: 137404 - DNA, 304 bp, Arabidopsis thaliana
gcgtccgacctaatctctttccacatcgtacgtttcctctctctaaggtcttcagctttaaaggtgataagaattgaatctttcccacaacccacaagaaaattcgaatcctttctctctttctatctcttagtcaggctttcgatcagcaatctcctcgaattctggttggttccgtctctgttttctgtacacaaagccctgctgctgttgatacacgtgagccgccattaatgcccctttgttttcttcttccaggattttctatttcctctaaaatcaggatctttcagctgaatttcac

SEQ ID NO: 137405 - DNA, 413 bp, Arabidopsis thaliana
atatctctcttgggattcaaggagatgaatctccaagcacaccactgaaagggaagttaattccatctcctataccagaagagatcaagaggttaaaggctggtctgcgcgaaaacaatgtgaaggccagggagcgtttgaaaattttcaacgaagcttcttcggtatttaacaagttttttcctagtgtacctacaaagaaaaggtctcgtccagaaggattttctaatgaccgctcaggtgatcgtttggctttagggccaggtatgggtaaaatgggaatccaaggtcagactctgcctggttgttttgagcttgaccagcaaaagctggacgaacgacctaaaagtggtgcattaaataagcggacacgtacatccatgatggatgttcgaagtaatgctattgttcga

SEQ ID NO: 137406 - DNA, 386 bp, Arabidopsis thaliana
gtgagtcattatacatgaacaaagcttttctactggtattttatcgtgagttatcttttcacccaagttacaagttgtacaactagaattcatcactcattcacttttaaagttcttcagttctaccactaaagccaatcatgctatgttgcaaatatattaattggtgttttttctctctatcttacaaatacaccacttaaagttaaggaactaaatgagtgattggttgggctgtaactgtaaaaaaatttctatagagattttgatgtagctatgttggctgtaacagtagcttttatagttttattgctatagaattattgctgtaagttttgatttgaaatatttataaaaaatagattaataaatataataattgtaat

SEQ ID NO: 137407 - DNA, 319 bp, Arabidopsis thaliana
aaaaaagaaaatggttaagctcagcaatctcctcgtgtgcaaccttcggggttctcctcgtccttaacggctgccttgcgaggcagtcacttggggttcctcctcagctacagaacgagtgtaacctcgacaacctagatgttctccaagccaccgaaactatcaagagtgaagccggtcagatcgagtactgggaccacaaccaccctcagctccgatgtgttggtgtttccgttgctcgttatgtaattgaacaaggcggtctttacttgcccaccttcttcacttccccaaaaatttcctacgtcgttcaaggaac

SEQ ID NO: 137408 - DNA, 399 bp, Arabidopsis thaliana
tcatctaaggcggtgattagtccagctacacgtttcgcaccgccgctgaaccggccttttcaccgccgatcaatacttgcctcgtttcattcttcctctaggaacttcctcttcctcggaaaacccactccgagctcgacgatcgtttccgtccggtgccagaaacctgtttccgacggggttagctctatggaatccatgaatcacgttgcatcttcagtttcgtcttcgatcgatttcctaacgttgtgtcatcgtctcaagacaacaaagagaaaagggtggattaatcaggggataaatggacctgaatcaattgctgatcatatgtaccgtatggctctaatggcacttatagctggtgatcttactggagttgacagagaaaggtgtataaaa

SEQ ID NO: 137409 - DNA, 333 bp, Arabidopsis thaliana
aagatatcaaacctttcaaggcttgagatattggcaagtgttttgggaatagctccagtgaactgatttgttcccaaaagaagtcttcttagatttggtagaagataaccaaaatcagccctaagattacccgaaaagctattgtcagctagagatagagactcaagagaggagatgttgtacaatgcaggaggaaaaccacctgaaaaactattcagtgctatttggaaaaacaccatttgagtcaatctagctacttcgtctggaatctcacctctcatctggttatatgcaaagtcaagcttctgaagtgacgtcaagtttcctaaagat

SEQ ID NO: 137410 - DNA, 166 bp, Arabidopsis thaliana
agaaaatggttaagctcagcaatctcctcgttgcaaccttcggggttctcctcgtccttaacggctgccttgcgaggcagtcacttggggttcctcctcagctacagaacgagtgtaacctcgacaacctagatgttctccaagccaccgaaactatcaagagtga

SEQ ID NO: 137411 - DNA, 150 bp, Arabidopsis thaliana
gtcgacccacgaatccgaattaactagataaccaaatcaatctttacaacttatcatgcaactagtttaattaattaattttctcacttttaaaatattatacacttgtacaatatctaaaagggagttagaactcacctgacacacata

SEQ ID NO: 137412 - DNA, 321 bp, Arabidopsis thaliana
aattgagaaaaattatattgagtgctctagttcgttaaattggcataaggaaagattgagggagctcgaaacgaaaatcggttcattacaagaggacctcagctcttgcaaagatgcagcaacgaccactgaagagcaatacactgctgaacttttcactgcgaacaagcttgttgatctgtacaaggaaagttccgaggaatggtctagaaaggctggtgaacttgagggtgttattaaggccttagaggcacgcttgagccaagtcgagagtagttacaaggagagacttgataaagaagtgtctacaaaacagctgtt

SEQ ID NO: 137413 - DNA, 399 bp, Arabidopsis thaliana
atccgaaaaaatcattttctctttgcacataagtcaactctctctctctctctcttttacttcttcttctctttgcactctctttggattttcttcaattgatgaacaatcagtctcagatttgagttctcccaaatcatctattgactttgcgaatctaagaaaaaactgaaattaataacgtttttgatgggtaacggagtaacaaaactgagtatatgtttcacaggcggtggaggagaacgtctccggtcaaaagacatctccgttcttcttccggatcctttagacgaaggtttaggtcactccttctgctacgtccgaccaaacccgactctaatcagttcctcaaaagtccattcagatgaagacacaacgactacaacgttccgtacaatc

SEQ ID NO: 137414 - DNA, 414 bp, Arabidopsis thaliana
accgatgatgggccgagaccgagaccagtaccagatgtccggacgaggatctgactactccaagtctaggcagattgctaaagctgcaactgctgtcacagctggtggttccctccttgttctctccagccttacccttgttggaactgtcatagctttgactgttgcaacacctctgctcgttatcttcagcccaatccttgtcccggctctcatcacagttgcactcctcatcaccggttttctttcctctggagggtttggcattgccgctataaccgttttctcttggatttacaagtacgcaacgggagagcacccacagggatcagacaagttggacagtgcaaggatgaagttgggaagcaaagctcaagatctgaaagacagagctcagtactacggacagcaaca

SEQ ID NO: 137415 - DNA, 393 bp, Arabidopsis thaliana
  unsure (1)..(393): unsure at all n locations
aaccaaagaaaatggttaagctcagcaatctcctcgttgcaaccttcggggttctcctcgtccttaacggctgccttgcgaggcagtcacttggggttcctcctcagctacagaacgagtgtaacctcgacaacctagatgttctccaagccaccgaaactatcaagagtgaagccggtcagatcgagtactgggaccacaaccaccctcagctccgatgtgttggtgtttccgttgctcgttatgtaattgaacaaggcggtctttacttgcccaccttcttcacttccccaaaaatttcctacgtcgttcaaggaacgggtatcagcggaagagtggtcnctggatgtgccgagaccttcatggactcgcagccgatgcaaggacaacaac

SEQ ID NO: 137416 - DNA, 398 bp, Arabidopsis thaliana
attttagtcttttgccgctgtggtttattgcaggaagaagcaagtctcatggtttctcaaagtttgctgatcaaagcattgaattggtgactaaactaatgaaaatgccatccacatgcttggtcgatagtctaaccgatggccctccaactgatgttagagttcggctgactgaatacagtgagatattggatctctcaggatgtccacagttaaatgaagccagcctgctactgtcaacactgcctaactcgtatttcgcaaacctcaggtggaggaagagtttggaaagtttcctaaagaaccctgatgacgatgaaagacatcaagaacaaatatctcacagaactttaccaattttgtcttttgaatcggtgaaagagattgatatttccaag

SEQ ID NO: 137417 - DNA, 401 bp, Arabidopsis thaliana
acccacgcaaccagctttcatctctctgtggtgcttgtcatcagtgtcagaactggtgtggatacttctgtcatagtcttcattgtaattgccatccgactgagaaacgttttcaactagctcccatccttcttcaacatccttcttcaaaaaattcccatttgaagcggtgtcaagcagcatccttatcttaggcaagacgcctctatagagtgtgctgagaagagaagcttgcttaaatccgtgatgagggcatttggtttgataacccttaaagcgctcccaagcttcatataatctttcattttgcttctgagtgaatccggatatctcattccagagtcttgcagtcctggagttggagaagaattttgccaagaaggcctttttgcaatcatccc

SEQ ID NO: 137418 - DNA, 367 bp, Arabidopsis thaliana
aaccacggacgcgtgggtttgagcttgatgatttcgattgtagtttcctgttagtgtttgttttcttctgtaaagcttggattttttttggtttcttcgatggcgaatgtggaagctgatttcagaacatcagggtctaatgatgatgaattgtacacggagctatggaaagcttgtgcagggccacttgtggaagttcctcgttatggtgaaagagttttctacttccctcaaggtcacatggaacaattggttgcttcgactaatcaaggagttgttgatcaagagataccagtgtttaatcttcctccaaagatactttgtcgtgttcttagtgttacgttaaaagcagaacatgagaccgatg

SEQ ID NO: 137419 - DNA, 413 bp, Arabidopsis thaliana
atccgattcttgagagattttggaaatttatgaattatacaagtgtttaatggaaacttaaaaacacttttttttttaaacatcgaaaactttattagattgtaaaaggttgatacaagaattgaactaaccaaggaggtgaaacagaatacaaatgatacaaagatgtaatgaatatagcatggtgattgatgagccatcatcgtatttggctatttgctgcactttttctgtaatattcaggaaatactaggttgtgtaatcttttgattataagcaaaagcggtgatattatttataattggattacatgatttgttagttcttactggttcacatgtttatataataaaatttatttagtggttggcatattataggagcatcatatgtgagtcaccacatggaactga

SEQ ID NO: 137420 - DNA, 398 bp, Arabidopsis thaliana
atccagaaatataagaaataacaaaatggctcgagtctcttctcttctttctttcttcttaacacttttgatccttttccatggctacgcggctcaacagggtcagcagggtcagcagtttccgaacgagtgccagctcgaccagctcaatgcgctcgagccgtcacacgtactgaagagcgaggctggtcgcatcgaggtgtgggaccaccacgctcctcagctccgttgctcaggtgtctcctttgcacgttacatcatcgagtctaagggtctctacttgccctctttctttaacaccgcgaagctctctttcgtggctaagggacgaggtcttatgggaaaagtgatccctggatgcgccgaaacatccaagactcatcagagttcaaccacgc

SEQ ID NO: 137421 - DNA, 417 bp, Arabidopsis thaliana
atccgagatcaatctctcattcaaaatctcattctctctagtaaacaagaacaaaaaaatggcggatacagctagaggaacccatcacgatatcatcggcagagaccagtacccgatgatgggccgagaccgagaccagtaccagatgtccggacgaggatctgactactccaagtctaggcagattgctaaagctgcaactgctgtcacagctggtggttccctccttgttctctccagccttacccttgttggaactgtcatagctttgactgttgcaacacctctgctcgttatcttcagcccaatccttgtcccggctctcatcacagttgcactcctcatcaccggttttctttcctctggagggtttggcattgccgctataaccgttttctcttggatttacaagtacgc

SEQ ID NO: 137422 - DNA, 389 bp, Arabidopsis thaliana
  unsure (1)..(389): unsure at all n locations
cccacgcatccgatgtgaccttgcaaacctgaatccatacaaaatgatgtattaggtgactgagctaacctgaacactaatacaaatagaggatcagaggatataacccttaccttttctgatgattctccagaattagggacattttcataattcttatactgttctaatctagtttgtctgtatttctctctagaaatattaagtctgtcccacggaatcccctggatatctttccctttccgagcttgctcagccgtggtatcagctactttattgttctgaaaccatataacacgaaattacaacatagtttaaaaaaaaaaaaagctgtaaaatgagattagaaagtagcatagccaacanaacatgttccatctcatcatact

SEQ ID NO: 137423 - DNA, 373 bp, Arabidopsis thaliana
aatttggtagtcgttttgttagcattgcctttgtttagtttttgttgatactcgatgtttatcgcttaagactgcgacaatttgggttttaggcttttagggttttgcattgtagctttgtcgtgtacgcgcgtgtgtgcttgtatcatctgtcattgaagattgtttatcatgttcgaaattgtgagatatgctttgtgatttaaagaaagatcttttgtggctttagatctaccaaagtgatgattaggccactagagttaatttcatatttattgtgtttggatgttggtaggtgtatttctttattcttagagagtatagtaacatttaagtgtatgataatgtcgacagaggcaagctggggctcaca

SEQ ID NO: 137424 - DNA, 405 bp, Arabidopsis thaliana
atccgatctaatcggcaaaattttctgctcctgagaaacaagtagagatactaaagatggaatctttgaactaaattcgaaaccttttaatgggtaccgagtcgggttcggatccagaatcgagctcaaacgggtggagccgtgctcgtggtctagttgtcaagactctggttttaattggcggtgctcttctcatcaagcgtctcactaaatccaccactcgtcgagatcacgcccgtgtcgtctctcgttctctcaccggagagaagtttacgagggagcaagcgtcaagagatcctgataattacttcaacataagaatgctgagttgtccagctgctgaaatggtggatggttcagaggttttgtatctcgaacaggcattttggaggactcctcagaaac

SEQ ID NO: 137425 - DNA, 375 bp, Arabidopsis thaliana
cccacgcatccacttatttatacagatagtgtgtgctaagcttataatgtttgatatcattgtaataaaatagaaggaacgagagtatgtgtaataaatggtttagtgcgtttgttcagttgcttcagttggacccctttatatagtttcaagaatgtacgagattcaatcgaatctgattttaccttcatgcaggtcccaggactagctgtagttattgttgggagccgaaaggattcacagacctatgtgaatacgaagaggaaagcgtgcgctgaggttgggattaagtcatttgacgtgggcctaccagaggaagtttctgaagctgatcttattagcaaagttcatgaactaaattcaaatccggatgtc

SEQ ID NO: 137426 - DNA, 419 bp, Arabidopsis thaliana
gatgaacatggtggtcagcgtgatatagtaggagtagttgatgaacactttacatttctagggtttttttaatgtcttctttttcgtggttgtacatacattgaccttatcgtgatttacagttttaaattatttgtgtgattgtaggagagacagttacatcacccacagggcattctgtgatgcactcatacaggagtcagcaagaaaccccaccgtgagcttcacggcaatggcagctggtggtggtggtggcgccagacatggcttttacggcggagcttcttccgctctctctcacaaccatttcggtaacaatccaaattccggtttcacccctctagctgctgcaggctacaatctgaaccgttcatcttccgacaagttcgaagactttgttcctcaggccaccaacccta

SEQ ID NO: 137427 - DNA, 393 bp, Arabidopsis thaliana
cccacgcgaccaaatggacggtgccggagaatcacgactcggtggtgatggtggtggtgatggttctgttggagttcagatccgacaaacacggatgctaccggattttctccagagcgtgaatctcaagtatgtgaaattaggttaccattacttaatctcaaatctcttgactctctgtttattccctctcgccgttgttatctccgtcgaagcctctcagatgaacccagatgatctcaaacagctctggatccatctacaatacaatctggttagtatcatcatctgttcagcgattctagtcttcgggttaacggtttatgttatgacccgacctagacccgtttacttggttgatttctcttgttatctcccacctgatcatctcaa

SEQ ID NO: 137428 - DNA, 284 bp, Arabidopsis thaliana
gcgtccgatcagaaatctcctcgttgcaaccttcggggttctcctcgtccttaacggctgccttgcgaggcagtcacttggggttcctcctcagctacagaacgagtgtaacctcgacaacctagatgttctccaagccaccgaaactatcaagagtgaagccggtcagatcgagtactgggaccacaaccaccctcagctccgatgtgttggtgtttccgttgctcgttatgtaattgaacaaggcggtctttacttgcccaccttcttcacttccccaaaaa

SEQ ID NO: 137429 - DNA, 287 bp, Arabidopsis thaliana
aatcacgacagtatggatggctctttgtttcagtcaccttcagcaactgcatcagcgtttatgctcactcgcaacacaaaatgtctagcttatcttcaaaatctcgttcaaaaatgccctaatggaggttaaatcaacattcgtcttatcccaaacgctttaattaacttgaatatgattattcttaagtgcattttttaaatgtttaattaacaagctaggtgtgatttctttctcttagtgccacaaaagtaccctctcaatgaagatctcataaaactctccat

SEQ ID NO: 137430 - DNA, 353 bp, Arabidopsis thaliana
cacgcgtccaataaaatgatcctcttccctctgtattctctatctccagttaaatttatttgaactgaattttatgtgttctcttaacattgcaggaaataaggcgattaaaagagaagataggttttctcacagacgaattggagaagaccaaagcagacaacgtcaaactctatgggaaaatccgttatgtccaagactataaccatgataaagttgtttcccgaggatcgaaaaaggtatttgttttctgcgatacatttcccttgaaccttttctgtctcgtgatcgggttttttccatggttgatatcgttttccaatctcagtatgtggaagatcttgaaagtggat

SEQ ID NO: 137431 - DNA, 408 bp, Arabidopsis thaliana
acccacgcgaccaaattttaataccaaaaattgtgaataaaaaaataaatattatcatgtattatattatagatcaaattctaaaaaaaaaaaacgtattaatatcgtaaacttaaaaactgtacatgatcttgtcaaaaattattaatcaaagaattatatataacaaatttttcattttacaaaaatcaaaaataaataaaatatttaattagcaacatataattccaaaacgtctagtactaaccgtactacaaaagtctataataaacactttacatacaccgtatttatgattggcaactaaaattttgacatatgggaatatgggatacatatatcacgttaaataattacaatgaatttgcttttattaatcagcaaaaaacatttttttctaaaaatcaa

SEQ ID NO: 137432 - DNA, 320 bp, Arabidopsis thaliana
agaaaatggttaagctcagcaatctcctcgttgcaaccttcggggttctcctcgtccttaacggctgccttgcgaggcagtcacttggggttcctcctcagctacagaacgagtgtaacctcgacaacctagatgttctccaagccaccgaaactatcaagagtgaagccggtcagatcgagtactgggaccacaaccaccctcagctccgatgtgttggtgtttccgttgctcgttatgtaattgaacaaggcggtctttacttgcccaccttcttcacttccccaaaaatttcctacgtcgttcatggaacgggtatc

SEQ ID NO: 137433 - DNA, 415 bp, Arabidopsis thaliana
gcgtccgatcggattctggggcatctcatttcttctgctgatgtttccccttctctgacacgaatcacactttgaaatgaactcttgaccgtctttgaacatggttggccaccaaaatcctgcttgtaggattttagatattgtcttgaacgttgcaaaatggccgccattgctagaaccatgacagtgctgcaagataccgtttatttcatcttcttagacacacctcctatagattttatctttgcagagagtgtagaggtacggctcatcccagtagaagcgatttatgtctttgaagaacttctttctttcgtaccctcatagatttggaggctcttcacgtgccaagtagttgacataatcagcgtaccacggaagtttctcctctactacaagcatctcatcccaaaac

SEQ ID NO: 137434 - DNA, 404 bp, Arabidopsis thaliana
cccacgcgaccacagaatcagcagatttacaacgaagcaattgcagtaacaacaatggcgggtgttcatcaaaatccttaaagtcttcacctttaggaatcgtcatgggtctaataggatcaatcctcgcagttgcaatctttggcggttcaacattcacatggtacagacgaaggaaacagaagattggaagcagtcttgatgcaatggacggtaggattagtactgagtacaacttcaaagaagtttctagaagaaaaagctcttctccattgatcagcttagagtacgcaagtggttgggatccgttaggacgaggacagagcagtaacaacaacagtgcattgtctcaagaagtctttgagagctttatgttcaatcttgaggagattgagagagctact

SEQ ID NO: 137435 - DNA, 377 bp, Arabidopsis thaliana
accaggcacgtgatgattagggctacaaggaaatcgccggagttgtctggtcgatgggttcaaaacgttgatccaacctggtgctgggatacacaccaaaccctcacatgtcagcgagggtcgtgtggcgtcaatatcgcagtgtaaatagaccatctggatctcttcctcaccttcgaatcccaactcagtccggtctccaacagccagaattttctccttcttctcaacgttcaaacgcctctccgcgaaactcttcgattccaggattgatctccattgttttgagacggttttgaatctgaggattgattttaaaggcaatccaaggaaaatttcttcaagtagatcgggaactacgtaaatcatcatcggga

SEQ ID NO: 137436 - DNA, 402 bp, Arabidopsis thaliana
  unsure (1)..(402): unsure at all n locations
gcgtccgaagatgtagcaagtgtgaaattctgactgaagatgttgcaaatgatgcagctgatgttatcacctggtttgaagaaaacggaaagcccaaaatcaatggctttgagagagaagtcgtcgtccttgttaaccaacangaaattttcgggctttagatctctatgcatgacaccaagcgaatggcaagcctcaacaacaccaacgatgatctttatcagctcagctgcttttctctcgctgtaatgtcctctctggataattctgtcaaacaattccccacctgagcaaagctccatcacgatgtgaacatacaatggatcctcgtaagcacctttaatggtgacaatgttcttgtagccagccagatggtgcatgatttgaatttccctgcgtacg

SEQ ID NO: 137437 - DNA, 400 bp, Arabidopsis thaliana
acccacgcaaccaccttgagttatttcaagtttattacagcgatggcttgttgttattggtaactgatgaggtagattccaagctcgtggtttggaatccgtatttgggacaaaccaggttgatccaatgcagagatactgagcatttcaaatataggtatgctctgggatacgacaacaaccgtaaccacaaaatcttgatgtataataggaaaaattgtgagatctacgattttaaatctgattcatggagggttcttgatatcattcccgacttgcatacaaatatttatgtacgtgatatgtcaataaagggaaatacttattttttctaccgaggagagaaaataggggaaggactagctggatgcttactttcttttgattttacaagagagag

SEQ ID NO: 137438 - DNA, 302 bp, Arabidopsis thaliana
gcgtccagatgaatttcatggcatcatctggcgaagcactccttgtttcaggtggcactgatggcttacttgtactgtggagtgccgatcatggcgctgactcaagggaacttgtacccaagcttaacttaaaggcacatgatggtggggtggtggctgttgaactgtcaacggtaagtgggagtgctccacaattgattacaattggggctgacaagacattggccatatgggatacaatgacatttaaggagctacgtagaattaaacctgtcccgaaactagcttgccacagtgttgca

SEQ ID NO: 137439 - DNA, 352 bp, Arabidopsis thaliana
aatttaatttaaaacttctactacacaagaacgattttcaagctccatcaatttttagaacatcaaaaatgtagattgcgagcatgcataaaaagaaaaagagtatagtgcaagtgaaaacattcaaatgatccgagagtatcatcacgcaccatgatgaatccctttcggagtgtaagatagtcagaacgaacaacagaatgtccaaactgtctgaagaaacatatctgtaagaataaactataaatatttagcaattggtatcataataggatatttgctagctattatctaaaattttaaatgacctatcatattagtaaaattttaaatgacctatcatatttacctt

SEQ ID NO: 137440 - DNA, 336 bp, Arabidopsis thaliana
acaacaacaaggccaaccatggcaaggacgacagggacaacaaggccaaccatgggaaggacagggacaacagggacaacaaggaagacaaggccaaccatgggaaggacagggacaacagggacaacaaggacgacagggacaacaaggccaaccatgggaaggacagggacagcagggacaacaagggttccgtgacatgcaccagaaggtggaacatgtgagacgcggagacgtctttgccaacactccaggctctgcccactggatctacaactcaggataacagccacttgtcatcatcgctcttctcgacatcgccaactaccaaaacca

SEQ ID NO: 137441 - DNA, 306 bp, Arabidopsis thaliana
ttttcttcgtaaattagtttgaaggtataaaaccctaattcgaaaacctcccaaatcaggaaataatgacgatgaaaaagaggaagaaatcatcaaagtctcctccgacgacgtttctttctttaccagacgatatatatcgctttcaattgtttggctcgtatctcgagattccattatccaactctatcactcgtctccaagggtttccgatcactcatcgcttcgcctgagctcgaggcgacacgttccttcattggggaaaccgagaatcacctttgtgtctgcttaaacctcaacaagaac

SEQ ID NO: 137442 - DNA, 345 bp, Arabidopsis thaliana
gcgtccaattaaagttaatttacagtatattgtttttttcttttcctaattttgaatgtgttctacaacctagcttattttatgtacaaaaagtgttcaataaagtgcataaatcaatttgagatgaccaacattcttgtaaactatgatggtagatgttagagaatattttgaactaattggatttgagtttaatactaatttgatttcataatgataaatgagcatttagtaattgttggttttacgtttaaatggtaattcctatatagatgattagttttgttccatgttcaaaatattgttagtcgttaattagacagccgatgggtcctaatgattact

SEQ ID NO: 137443 - DNA, 355 bp, Arabidopsis thaliana
gtccgagaaaaaatacacaaatagcaaaacatggctaacaagctcttcctcgtctgcgcaactctcgccctctgcttcctcctcaccaacgcttccatctaccgcaccgttgtcgaattcgaagaagatgacgccagcaaccccgtaggtccaagacagagatgccagaaggagtttcagcaatcacaacacctaagagcttgccagagatggatgagcaagcaaatgaggcaaggacgtggtggtggtccttccctcgacgatgagttcgatttcgagggcccccagcagggataccagctactccagcagtgctgcaacgagcttcgccaggaagagccagtttgcgtttgcc

SEQ ID NO: 137444 - DNA, 320 bp, Arabidopsis thaliana
aaagaaaatggttaagctcagcaatctcctcgttgcaaccttcggggttctcctcgtccttaacggctgccttgcgaggcagtcacttggggttcctcctcagctacagaacgagtgtaacctcgacaacctagatgttctccaagccaccgaaactatcaagagtgaagccggtcagatcgagtactgggaccacaaccaccctcagctccgatgtgttggtgtttccgttgctcgttatgtaattgaacaaggcggtctttacttgcccaccttcttcacttccccaaaaatttcctacgtcgttcaaggaacgggta

SEQ ID NO: 137445 - DNA, 415 bp, Arabidopsis thaliana
ccacgcgtacgctcgacttcttgttcttgaattcaacaaagcctattgacatttgagctttgagttctaaatttctacaggggaatcatgagcattatagtggcagttcttctgttgatcccgactacaacatggatgacacagagtcgtcatcttcaaggccagatagagaacatagagaatatgatagcttcataagaaaagctgacatagcccgagggaagagagcgatgacagataggtatgagcttatagatgacgatctggaagacgagtacatgcctgagcatactcgcagagccaccaaacttctgaacaaacccgatgtattgcctactgaggaatatattaggctcttcaagctgaatgaattctgtagcacgacgtatccttactcgaccacacttgcacaact

SEQ ID NO: 137446 - DNA, 325 bp, Arabidopsis thaliana
  unsure (1)..(325): unsure at all n locations
acggaggctgaatctgtggccaaaaaggtattctttagtaattggtggcaccatctgtttangagtttctctctttttcgagaatgtttgaaaaggcaaagaatttttaagctaggttgtgtcttccttgctagttttgcatttttgattttctttctgaaatcattggcctgatgtatgctatatctcttcttgtttggtaactaaattgttttagttaactgtaactcactttttttttttgagtatgactagttaactctgtatattgtaaaaggctaaaaattgtctctaagaaaacagctttgacgatgcaggtctcttc

SEQ ID NO: 137447 - DNA, 435 bp, Arabidopsis thaliana
gggacaacaaggccaaccatgggaaggacagggacagcagggacaacaagggttccgtgacatgcaccagaaggtggaacatgtgagacgcggagacgtctttgccaacactccaggctctgcccactggatctacaactcaggagaacagccacttgtcatcatcgctcttctcgacatcgccaactaccaaaaccaactcgaccgcaaccctagagtgttccatttggccggaaacaaccagcagggaggctttggcggttcacagcaacaacaagaacagaaaaacttgtggagcgggttcgacgcacaggtcatagctcaagcattgaaaattgacgttcagttggctcagcagcttcagaaccaacaagacagcagaggaaacatcgttcgtgttaagggacctttccaggtcgtgaggccacctctaag

SEQ ID NO: 137448 - DNA, 431 bp, Arabidopsis thaliana
aacttcttaaaaaaaaaaaaaatgggagaaaacggagccaagcgatggaacttcggagctaacgaggtcgtcgaacgatctaactcacttaccattcgtgattaccttaacaccttaatcaattgtctcgacggtggtgatgtaagacccgtcatcccactaggtcacggcgatccttctccgttcccgagctttcgtaccgatcaagccgctgttgaagccatctgtgatgctgtccgttcgaccaagtttaacaactactcttcttcttccggtgttcctgtcgctaggaaggctgttgcagagtacctctctagtgatctctcttaccagatatcaccaaatgatgttcatatcacagctggttgtgtgcaagccattgagattttgatatccgctctcgcaattcctggagctaacattctgctacc

SEQ ID NO: 137449 - DNA, 347 bp, Arabidopsis thaliana
tcaagatattgggattgcaagtgtagttccaagcagccgcgttcgagagcagtgctaatccaactgtcagcagaagagaatcgatagtggcggccattgagagagagtctcttgatgggacaagtgtttaagcgagcaacagtttgctccaagaaagcagagaagccactagttgatgagtcttccaaatcgaagttgtctacgagaaggatcagattcctccacctcttggacagaacagatgtggaaacaccaagttttgtcggaagtaaagacaggattttgccaagaatctcatctggcagattgctgatgaactctctaggattcatcgaatcgcatgcaaa

SEQ ID NO: 137450 - DNA, 439 bp, Arabidopsis thaliana
cccacgcgtcaggaaatataagaaataacaaaatggctcgagtctcttctcttctttctttcttcttaacacttttgatccttttccatggctacgcggctcaacagggtcagcagggtcagcagtttccgaacgagtgccagctcgaccagctcaatgcgctcgagccgtcacacgtactgaagagcgaggctggtcgcatcgaggtgtgggaccaccacgctcctcagctccgttgctcaggtgtctcctttgcacgttacatcatcgagtctaagggtctctacttgccctctttctttaacaccgcgaagctctctttcgtggctaagggacgaggtcttatgggaaaagtgatccctggatgcgccgaaacattccaagactcatcagagttccaaccacgcttcgaaggtcaaggtcaaagccagaggttccg

SEQ ID NO: 137451 - DNA, 436 bp, Arabidopsis thaliana
cccacgcgaccgacaatgtgaattcttggaaatgaaggtaatgccaaatcattggagatgacgttaacaacatgacctcacttgggataataatcctgataatcatttgattgtagccacatagaaagcagcaaactaaatgacaattatgatttaagagcaaagatagtgacagtgtaaattaagtccactcttctttgaccttaaggtaataatatatatatggatgaggtgatactaatagagtgattacacatacaagtggtcttgcttcttctatggttttaaaactgcaaataaagatttgcttcgcaggagagatagcgccatcacctcttctaagaagttaactagtggtgacggtatctctcctacgtagcaatccttatatatgcatcttaatacggagagatcaaggtatttcagttgttcaata

SEQ ID NO: 137452 - DNA, 243 bp, Arabidopsis thaliana
ctgtttttctctgtccctattttactaaaaatgttatcttgattcaataaaaatattttacatttaagttaataattctcttttcacaacatcgttttcgattttcattctacttcatcgtttaccaatatttcaaaaacatgatacattgtaaaggttatgaattgtgcgattctcttaacatgtgaactaacctgctatactagcttctacaagaccaatcacaaacatcatgcaaagcat

SEQ ID NO: 137453 - DNA, 292 bp, Arabidopsis thaliana
gaaacaaaagagaggttctgattctatccaaagaactcgtctcaatgcggttcttgaagaagttatggataggattgagatgcacaagaacatcggagatcaacgtaacaattggaactctttactgctcaattctgtcaacatgattactctcactgccgctttgatggccggaatagcctcggttaacggtcacggtgtagattctgtaaccgctgtgaagatagcttcaacggtgttgttaacatctgctacgggttttgctgccttgactgagcaagattcaaccttc

SEQ ID NO: 137454 - DNA, 383 bp, Arabidopsis thaliana
acttcatcaagtactgacggaataaaggcgcccgttgttcttttgattgatgaccttcctctagccaatgggaggcatgcttttgaaaggctgcaaaattgcctactactattggtgaaatcaacgcagattccaacagtgatattaatcactgaccacaataacgcggactcttctgaccagactgcacgacgcatggaggacacacagtcatctcttgagcgagcaggggctttaaaggttgctttatcaaactatttacagtctaaatcttattagaaatatcattttttcaactctagttgattgtccaggtatgtattctcaggttgctttcaatcccatcacgaagaactcaattaaaaaggtacttcagagaatat

SEQ ID NO: 137455 - DNA, 373 bp, Arabidopsis thaliana
attcctcttgtccaattttacgacgagttgattcttcaactgcaacatcagcttcctcttccaatctattttgccttcgtttacttcgcctaagtggagaacaaactgcggttgcatctgccacatcaacggactgacctcgagcttcttctccaatttgatttgcttctccttccggcattggttcaactgcatcgtgagcttcttcttccaatctgatttgccttcgtttacttcgcctaagtggagaacgaacttcggccacatctgccacatcaacatttgatactacattcgcttgacctcgagcttcttctccaattcgatctgcttctccttccggcgttgctttacctgcatcttgtgctccgtc

SEQ ID NO: 137456 - DNA, 356 bp, Arabidopsis thaliana
taaatcaaaataaatattgttctatcattagcaagttggggataaatacaataacgttgacatagtgacggatgtaaaagtcaaactaatcacaatgctttgactctaattaattaaggctgatatccaccgtctactccttcgtttcgtttcgtttcgtttcgtttcgtttcatacaataatgttttttggaatgcatacatactatattgtaaaatgattgaattacacttctttataagaaatgataaatatgataaaagaattggtggacatacaaaaataagagatgctctaaataataatagaattgtgaaaacaaaaacaacaacgcattataataatatgattgtttt

SEQ ID NO: 137457 - DNA, 390 bp, Arabidopsis thaliana
aaatgaaacaaaggcgccattcttgaacttagcccacattgaacagagaaattttattgtgttatgtcttaagctacagaaaaaaaatatttgggtaagaaaataattataatactcacccctggcagttccttggttcaatatgttccccaggcagagaataattttcataatctcttttagcttttgtgaagtacgtatctgataaacaagcaataaggagaaaatgtctaagaaagataaacgcaaatgggctgcgtaaattattgagttttaagtattgcaaatatcttacctcctcacatgcagaatttacggcatttaaacctttattaagttcttttatctgcaaagtaatcatcataaaaaaggagatcaagaatctacagt

SEQ ID NO: 137458 - DNA, 358 bp, Arabidopsis thaliana
tctttggaattaggtgggttaggaggacttagtcttcgaatagacaatcaagatattcaataaaaaaaaaatttttttgagtggttgctattaaataattaatttcttttatgtttgtaggatgacctaaacaagtgccggcacaagaactttacttggaaaagccaggcaaagtacaaaaggagataaaactagactatagaagaaaatctccaaaggggttaaaaatcgactatgaagaaagacttgaccgttgttggcccttcttttactctcaactttcttattcagtttcagataaatgtgaaagcatcaaatggtatgtggacagaatgaagactgggacaagaaaaagatt

SEQ ID NO: 137459 - DNA, 321 bp, Arabidopsis thaliana
aaaagaaaatggttaagctcagcaatctcctcgttgcaaccttcggggttctcctcgtccttaacggctgccttgcgaggcagtcacttggggttcctcctcagctacagaacgagtgtaacctcgacaacctagatgttctccaagccaccgaaactatcaagagtgaagccggtcagatcgagtactgggaccacaaccaccctcagctccgatgtgttggtgtttccgttgctcgttatgtaattgaacaaagcggtctttacttgcccaccttcttcacttccccaaaaatttcctacgtcgttcaaggaactggta

SEQ ID NO: 137460 - DNA, 298 bp, Arabidopsis thaliana
agaaaacatacacaaatagcaaaacatggctaacaagctcttcctcgtctgcgcaactctcgccctctgcttcctcctcaccaacgcttccatctaccgcaccgttgtcgaattcgaagaagatgacgccagcaaccccgtaggtccaagacagagatgccagaaggagtttcagcaatcacaacacctaagagcttgccagagatggatgagcaagcaaatgaggcaaggacgtggtggtggtccttccctcgacgatgagttcgatttcgagggcccccagcatggataccagcta

SEQ ID NO: 137461 - DNA, 364 bp, Arabidopsis thaliana
aaaacctaatttggcattctaaagctatatgtgtacaagctaaggggaaggggaaacaaaaatatctttcttgttaatgtaaaccacacactatagtggagacaaattcaaactcaagatgttctaaacatcacctaggatctcttatccctataccgaatataaccgacaaaatgcaaatagagaaattaggcaacaaaaccaaagcttaatacggataagccgcttgtgtagtgtgacacacacaaaactttgaaaaacgagagaaaaataattgggtaaacgaagaggaagaaactgtaatctcacgtgctggtgagacaaaacaaggagacatatagacaagatatgttccgagaagatc

SEQ ID NO: 137462 - DNA, 226 bp, Arabidopsis thaliana
cattgactagggtgttttttatgggtggtttgtgaaattgttttgaggatataaagatttcaattttgtttgaaaatggaaactgaggatgtgcttgacataccagcttcaagcaactttggctctgaagtaaagaaaaatagccttgaatctgggaatgggtcacctgaggctaattctttagttggtaatgatgagaatgtgaaaggaaatttagatttggatt

SEQ ID NO: 137463 - DNA, 235 bp, Arabidopsis thaliana
caacctaccatatgacctttgactgcataaggccgtcacatttaaagtagctttaggtgtgtagtgtatattccattttttaaaaaaaatgagatgaatttttatagagttatgcaaaattttatccggcttggatattttattaaaccctggatttttaactcacatgttatcatttggaacttggatagagagctgaagacaaatgagaaactatattattagttattactac

SEQ ID NO: 137464 - DNA, 416 bp, Arabidopsis thaliana
attcctggaagatctcaaaaggaaaattcaaaaccaaagcttcaagcaatcatcaagcaaaggaaaagctcaaattttgggtcttttatatatttatttcttaaagttacaatctttttgattgtggtttcagtgtacgaacacgcaagaactcgcgtgaaaaaattgtatccaagcttcgtgaaaggagtctctctgtatttagtggcgttttgttctgttgttatttctgaaatattgaagcttttgatttgggtttcaagagagcagagatgtgtagtttgtcggcgattatgttgttaccaacgaagctgaaaccagcttattcagacaaacggagtaacagtagcagcagcagctcactcttcttcaacaatagaagatccaagaagaagaaccaatcgattgttcccgtt

SEQ ID NO: 137465 - DNA, 142 bp, Arabidopsis thaliana
agaagctgagtttgatacaacatgctattttgcatgaggtaccagcaattaaagccacacgtgagataaatctacagaacacgttaacggaaaaactccagtggcttccagattctcttggtaagttatcgagtttaacttc

SEQ ID NO: 137466 - DNA, 433 bp, Arabidopsis thaliana
aaaaagaaaatggttaagctcagcaatctcctcgttgcaaccttcggggttctcctcgtccttaacggctgccttgcgaggcagtcacttggggttcctcctcagctacagaacgagtgtaacctcgacaacctagatgttctccaagccaccgaaactatcaagagtgaagccggtcagatcgagtactgggaccacaaccaccctcagctccgatgtgttggtgtttccgttgctcgttatgtaattgaacaaggcggtctttacttgcccaccttcttcacttccccaaaaatttcctacgtcgttcaaggaacgggtatcagcggaagagtggtccctggatgtgccgagaccttcatggactcgcagccgatgcaaggacaacaacaaggccaaccatggcattgacgacagggacaacaaggccaac

SEQ ID NO: 137467 - DNA, 392 bp, Arabidopsis thaliana
ttcatcttccacaatctccgatcgaatctctctactcagccgagaaaaatgagtgattacggtgaaaagacttgccctttgtgtgctgatgagatggatttgactgaccagcaattgaagccttgcaaatgtggctatcagatttgtgtttggtgctggcaccatataatggacatggcagagaaagatcaatcagaagggcgctgtccagcttgccgcactccatatgacacagaaaagattgttgggatgactgttgatcacgagagactggcctctgaaggcaacatggatcgcaaaaaaatacaaaagtcaaaaccgaaatcttctgatgggagaaagccactaacaagtgtccgaatggttcaaagaaatcttgtttacattgttgg

SEQ ID NO: 137468 - DNA, 359 bp, Arabidopsis thaliana
gatgttcacctcgaaaatcacgtcaatttggtagaaataataataaatatatagtaatataagaaacaataaatacaaaaatattgaccacaaaaacaaataagaaacaaatctatatgttttaagaaccttgaaaagtgaacggcatatattagaaaattttgatctaacgatagatgttcatcttgaaaataatatcaaaatagtaaaaatatttaatgaaaatagtattagaaagataatattatatagtataaaatataataaatgagaaacgttgactgtaaaaaaaaaacatgttttaagaacctcgaaacctgaacgacatagattagaagattttgatccaacggtaaatg

SEQ ID NO: 137469 - DNA, 373 bp, Arabidopsis thaliana
ggagaaagttttatcgtcttgagaattgtatatgtacatttgagtatctacattacaacaatttggaaacttttgttcatacttgtgttgttgtcttcttttgtggcttaaggagatttgtccatttcttatttacgtctagtagcaatgcatattttcctcgaagggttggaaactattagtgagtcctatgtattattgttaagcgataataaacattcgctccttgttctcttatatttctgtgaattcttgttttctcgatgccatgttcgggtgtttctagctaatgaaaagtgcatttgactgatgtggttctactgatagcttatctttgattaggttgagattttcaagatcccttcagcataat

SEQ ID NO: 137470 - DNA, 408 bp, Arabidopsis thaliana
acgcgtccgagaggactgtgcctgagcaattggagtatgctaagaggagaatggctgatgcggttggctacgcaggacaaaagggcaaagaaatgggccagcatgtgcagaacaaggcccaagatgttaaacaatatgatatttctaagccacatgacactaccactaagggtcatgagactcaggggaggacgacggctgcatgatgagttttcagtatgaacggtagatatgtgttttcactattatgtcgttttttctgcattttcaatatgatgttatgtgtttttttttttgttttttttgtttggctttttgttgaaccgtgtatgtgttttatgtttttgtaagcatgaaagatcgcaagtgttgtggtaatatttgaatgtaataatatgataagttgat

SEQ ID NO: 137471 - DNA, 417 bp, Arabidopsis thaliana
acgcgtccgaaagagttggagaagcgtaatgcggatgcggtgtttgctttcaagctgaggaatcctggttcataatggtcatgctcttcttatgactgatactcgtaggagacttcttgaaatgggttacaaaaaccctattcttttgcttcatccgttaggtgggtttacaaaggctgatgatgttcctttagattggaggatgaagcaacacgagaaggttctagaggatggtgttctcgatccggagactacagtggtttcgatattcccgtcacctatgcattacgctggtccaaccgaagtgcagtggcacgcaaaggctagaatcaatgctggtgctaacttttacattgtgggtcgtgatcctgctgggatgggtcatccagtagagaaacgtgatctttacgatgctga

SEQ ID NO: 137472 - DNA, 370 bp, Arabidopsis thaliana
aagaaaacatacacaaatagcaaaacatggctaacaagctcttcctcgtctgcgcaactctcgccctctgcttcctcctcaccaacgcttccatctaccgcaccgttgtcgaattcgaagaagatgacgccagcaaccccgtaggtccaagacagagatgccagaaggagtttcagcaatcacaacacctaagagcttgccagagatggatgagcaagcaaatgaggcaaggacgtggtggtggtccttccctcgacgatgagttcgatttcgagggcccccagcagggataccagctactccagcagtgctgcaacgagcttcgccaggaagagccagtttgcgtttgccccaccttgaaacaagctgc

SEQ ID NO: 137473 - DNA, 384 bp, Arabidopsis thaliana
acgacgctctctaagcatttagtgataggtgtcatgttagtttatccctgactagaactatgttataacatcttcaggaaggaaaagatcaagctctttactttgacgccattgttcttgacgcacagagaagaagacatgatgtcagaggttgtcgttgtaggttcttggtgcgttacagccacgaccagtccgaggttggacgatcatctctctctctctctctctatcccttgcggttttatttacccgtcagctccatttcatggtttagaccataaagcagaaccctcctcactcacctattttggatttcttttccgttatcccagcaggaaatcgttcccttgacgaagatttgtctgcggcccgagacagattaca

SEQ ID NO: 137474 - DNA, 436 bp, Arabidopsis thaliana
cacagcaatctcctcgttgcaaccttcggggttctcctcgtccttaacggctgccttgcgaggcagtcacttggggttcctcctcagctacagaacgagtgtaacctcgacaacctagatgttctccaagccaccgaaactatcaagagtgaagccggtcagatcgagtactgggaccacaaccaccctcagctccgatgtgttggtgtttccgttgctcgttatgtaattgaacaaggcggtctttacttgcccaccttcttcacttccccaaaaatttcctacgtcgttcaaggaacgggtatcagcggaagagtggtccctggatgtgccgagaccttcatggactcgcagccgatgcaaggacaacaacaaggccaaccatggcaaggacgacagggacaacaaggccaaccatgggaaggacagggacaac

SEQ ID NO: 137475 - DNA, 393 bp, Arabidopsis thaliana
caaaaagaaaatggttaagctcagcaatctcctcgttgcaaccttcggggttctcctcgtccttaacggctgccttgcgaggcagtcacttggggttcctcctcagctacagaacgagtgtaacctcgacaacctagatgttctccaagccaccgaaactatcaagagtgaagccggtcagatcgagtactgggaccacaaccaccctcagctccgatgtgttggtgtttccgttgctcgttatgtaattgaacaaggcggtctttacttgcccaccttcttcacttccccaaaaatttcctacgtcgttcaaggaacgggtatcagcggaagagtggtccctggatgtgccgagaccttcatggactcgcagccgatgcaaggacaacaaca

SEQ ID NO: 137476 - DNA, 294 bp, Arabidopsis thaliana
cgcgtgggcggacgcgtgggcggacgcatgggcggacgcgtgggcgtcacagtgagagactttatatatctcgaattgatcttgatctatacaactacgatatttagggttgattagggtaaattcaactgtgacctttacatgtggaagtctatggagatcgacactcatcgatcgtaccctaagccctttagacatgtgaatcatacactgctttgggcctttatccaagtgttttcttgtgaatctcctatccttgaatagacagttccatcctttgcaagtagaccctaa

SEQ ID NO: 137477 - DNA, 374 bp, Arabidopsis thaliana
gacccacgcgtcagataactttatcaaaagttaaatattataattttaaatttttttataaagtttatctttaaaaaatgctttaaatatttataattttaaaacttataaagttttaaaaattataaattgaattttacaagaaatttaacattataaatatataaaaaatatattaatacgagacgatatattacagaaaaaatcttaaatataacaatcaaaattcaatgatgaattttgggtcgatattgtatttttttaagtttcaaattttataatattgaaatttataagaaaatgacaaaattatgtttaatttcacgggactgggttatatggtatgacgggtttgggtggataataattacgat

SEQ ID NO: 137478 - DNA, 350 bp, Arabidopsis thaliana
aagctaaaaacatgcagctgctacggagacatacattctacatacctaaatatattacatagcatgtctcactccaacctcatttgtagttcatattagtctcaaaatattcccataaagcatatgttaaacctattttacatcacgttttcactaacttcaaaattctaatttgagggatagaagttggtcacatgatacatatttgttaacgtatgaacatcataaaatctaacatttgatacaagagtatgtaggatacaaagttacacgttgtgtttgtctcaaacaacattagtaacattttaaaaaaaaattgtgtacacaaacacaacattagtaacatttta

SEQ ID NO: 137479 - DNA, 364 bp, Arabidopsis thaliana
agtgttttgttcgcttacgcgatttctcgaaggaaaaatctcgtattcctggatcgagacaaggctgattcgattactcgctgttgctgttgttgattttggatctgtgttttgttatctgcggatcgggaaattggaaaaaccctagatatttgagccatttcgtcgcaaaattagggatttttttttcaccgctgggtttttggatctaaaggtatcgaatattgtctggggaaaaaaggaattttgaggatttgtttgatattcgctgaggaaattgatgttgttcgaaggagaagatgatagaaggctatgcatgggagggtttgtgagcggaggcacaaacgtcgtcgtcggcacatgt

SEQ ID NO: 137480 - DNA, 334 bp, Arabidopsis thaliana
agcaacaaacaaaaagaaaatggttaagctcagcaatctcctcgttgcaaccttcggggttctcctcgtccttaacggctgccttgcgaggcagtcacttggggttcctcctcagctacagaacgagtgtaacctcgacaacctagatgttctccaagccaccgaaactatcaagagtgaagccggtcagatcgagtactgggaccacaaccaccctcagctccgatgtgttggtgtttccgttgctcgttatgtaattgaacaaggcggtctttacttgcccaccttcttcacttccccaaaaatttcctacgtcgttcaaggaacgggtatc

SEQ ID NO: 137481 - DNA, 377 bp, Arabidopsis thaliana
acagggattccttcaatcacaaatccatggccgactccatgttcacagtttggagtattggccattaggtcatcatcatcattggctctcagtagcgaaactagcctgatggatatgccacagtacactgaggatttaaaagaaaaaggattatagattttttcagttgaaatggaacttttgacaaaggttctcaagatgaaggattgtttagctgtaaggaagctttgaagacagttcagtagccaacaaaggtatggttaagtagctctctctctctctccctcccacttatcatgtctcttgcactatatcaaaaacagagaataaatccacgaaaacccacacataaacgcacaaaaaaacagaaaacagaa

SEQ ID NO: 137482 - DNA, 321 bp, Arabidopsis thaliana
agattctctctctctatcacataggagaggaaattaaaactctaacaacaaccaacaatggtggtcgctagaacattgttctcaatctcagcaactctaatcatttttctagcactctttctccatgtaaatgcagttcaagaaacaagggaaccgaaacatgagagctcaagaaatacatcaacggtagataatttatcagacggtgaatggcatgaacacgccgttaaagacccagaagaaatagcagcaatggtcgatatgagcatacgtaacagtacgtatcgtagaaagctagggttcttctcctcatgctcaaca

SEQ ID NO: 137483 - DNA, 256 bp, Arabidopsis thaliana
actttctccttccttttttattctcagattgtcacgaagtgtcactacttcgttcaacattttcaacattcatctttctcatttcgctattcgtctctcctcaactttagtaatgagtaggcattttctgtttctgggtattatcattcttctcttctctgggtttgttgcttcagctccttcatcaacttcacctgcgaagattgttaatagtttcatctcaaatcatggcacttccttattgaaatggttatgg

SEQ ID NO: 137484 - DNA, 383 bp, Arabidopsis thaliana
ggcccacatcatcaaggatcgaaaacattaagtagctagttaagagagagagagagatggagatgaacattaagtttccagttatagacttgtctaagctcaatggtgaagagagagaccaaaccatggctttgatcgacgatgcttgtcaaaactggggcttcttcgagctggtgaaccatggactaccatatgatctaatggacaacattgagaggatgacaaaggaacactacaagaaacatatggaacaaaagttcaaagaaatgcttcgttccaaaggtttagataccctcgagaccgaagttgaagatgtcgattgggaaagcactttctacctccgtcatctccctcaatctaacctatacgacatccctgatatg

SEQ ID NO: 137485 - DNA, 277 bp, Arabidopsis thaliana
aagctcagcaatctcctcgttgcaaccttcggggttctcctcgtccttaacggctgccttgcgaggcagtcacttggggttcctcctcagctacagaacgagtgtaacctcgacaacctatatgttctccaagccaccgaaactatcaagagtgaagccggtcagatcgagtactgggaccacaaccaccctcagctccgatgtgttggtgtttccgttgctcgttatgtaattgaacaaggcggtctttacttgcccaccttcttcacttccccaa

SEQ ID NO: 137486 - DNA, 389 bp, Arabidopsis thaliana
atttaattacaaatttcacatttaattaagaaccttcaagattgacctccgatgtaattgtcgaagtcacttatatccaggaatctagccaccccactagcttcaagaaacctgatcaaccacacacataaattcaaagttatcatcaaatgttttactcataaccatatttttcacattgagaagtagacttatatatgaaatttactggtctctgaagactcttgtcatggagagacatccaccaggaagcattgattgcatattaagtgcgatgttagggttatgaatactctgcctcatatgcacccaaccatactcttccccactctcttcatcactcactcttaccctgaattattgactgttaattcgcattggagcatgta

SEQ ID NO: 137487 - DNA, 327 bp, Arabidopsis thaliana
ctcaacaaaaagaaaatggttaagctcagcaatctcctcgttgcaaccttcggggttctcctcgtccttaacggctgccttgcgaggcagtcacttggggttcctcctcagctacagaacgagtgtaacctcgacaacctagatgttctccaagccaccgaaactatcaagagtgaagccggtcagatcgagtactgggaccacaaccaccctcagctccgatgtgttggtgtttccgttgctcgttatgtaattgaacaaggcggtctttacttgcccaccttcttcacttccccaaaaatttcctacgtcgttcaaggaacgggt

SEQ ID NO: 137488 - DNA, 164 bp, Arabidopsis thaliana
aggattgtctaggcttaaatcaaaacgtttttctttttcttaataaagtatggtcagtttgtaatcacgtccctttacctttaacgtacgtgtaaaatatgtgtctgcggcacctcacttgtaataacactttcttctcataaataaaagggaagtttcgagtt

SEQ ID NO: 137489 - DNA, 340 bp, Arabidopsis thaliana
tcatgataattctgttatgctcattaatctttgtaattaccatcataattttcagaaaacagaagagagggacgaaaagaaacacacttccgtcaccaccgggactacctttgatcggaaaccttcatcaactcggccgccaccctcaccgatcactatgctctctcagccaccggtacggtcctcttatgcttcttcactttggccgtgtccccgttcttgtagtatcttcagctgaattggctagagacgttttgaagacgcatgaccgtgttttcgcaagccggccacggtcaaaaatcttcgagaaacttctttacgataagcatgatgtggcctc

SEQ ID NO: 137490 - DNA, 362 bp, Arabidopsis thaliana
agaagaacaggtagactcatagaagggctctggtttagatactaggtgaactaatcgaggttattaacaatgcatgctttagcataggatttctcggcttctctggttatcttagctttaagtatagagagtttcgcggaacgccaccggttactctagaatcatagtttgagttcgagaacggtgcgataacaatcctaatattagctagatctacaatttatctatctcccgagacaattccttagacccgacgctttaatcacttgaatctacaactcatttacttgcttgtttgtcttttacattcaattacttcatttagcttattaaacaacatcattagtccattgtgtgaacat

SEQ ID NO: 137491 - DNA, 150 bp, Arabidopsis thaliana
agataaaaatggctcgagtctcttctcttctttctttctccttaacacttttgatccttttccatggctacgcggctcaacagggtcagcagggtcagcagtttccgaacaattgccagctcgaccacctcaatgcgctcgagccttcac

SEQ ID NO: 137492 - DNA, 259 bp, Arabidopsis thaliana
agcttgactattgcattgttgtgttcactggcggtgacgatttggaagaagacgatcagacattagacgattatttcagagctggttgccctgaattcttgacggtatattccctttcattaaaatctttacattttttttagtgcaataatacatctctcttttcctcttccaactatctttgtattaagttggaatatttatgaactttcagaaagttctcagactctgtggtggacggaaggtgctatttgataac

SEQ ID NO: 137493 - DNA, 356 bp, Arabidopsis thaliana
taaaaacagcgttgaaaaatgtaaaagcgaaagatcgtctttttagagtttttatttttattttcctcttacatctgatttattggatatttttgacaagaattgatacattaaaagtactttttttttacgtacattcttagagagtaaatacataaccgatcattacaaagaagagatgaagaagtgaatttccacaatgttttaaaccttcagaatttatattaatggggtttgcaaatgattggaggtatacaattacaggtgattcacgtcattattgttctcatcaatggaccctttgcatggtttctattttttctatgcgggtcccgttttttattcacacccatttt

SEQ ID NO: 137494 - DNA, 348 bp, Arabidopsis thaliana
acgaaacaagaaaacatacacaaatagcaaaacatggctaacaagctcttcctcgtctgcgcaactctcgccctctgcttcctcctcaccaacgcttccatctaccgcaccgttgtcgaattcgaagaagatgacgccagcaaccccgtaggtccaagacagagatgccagaaggagtttcagcaatcacaacacctaagagcttgccagagatggatgagcaagcaaatgaggcaaggacgtggtggtggtccttccctcgacgatgagttcgatttcgagggcccccagcagggataccagctactccagcagtgctgcaacgagcttcgccaggaagagccagtt

SEQ ID NO: 137495 - DNA, 342 bp, Arabidopsis thaliana
aatgatgaattagattgtctgaacaaaacttgcaacttgtattattgtaataatctttagaacttttcattttaattgcttgaaaagacacgttgtagatgagtattagcataagaattatgtatgctctatgttggggatgtgtttagactgaaagtgcttatgattatgtagtttttttttttttttgtcgtatgattatgtagttttaaaacagtattttgtttccatcggacctctttctgtacgaattcaaattggataattatatttagtaacaaacagaattctacacaattaagtaaacgtcaatgagatcagtgtattgtgacattcgagatc

SEQ ID NO: 137496 - DNA, 353 bp, Arabidopsis thaliana
agcattgttgcagaatttcgggctatgcgtacaaagctgcaatagtgctgcagttgcattctctttgcctcttgctgaacctaactccacaacttccaccaataccggtattcctccttcttcgcctatcgcaatctttccttctctaaccgttgcaagattcgctagcaccaccacagctttctccaccatcccaaaagcaggatccatcagttcaactaagtatctcactgctccagcttcgattactttcgttttgttctcatggtgtattgagaggttgaataaagccgtggctgcatctttcttcccactgagacttccacttcctaagaggtcaacaagtggctcta

SEQ ID NO: 137497 - DNA, 377 bp, Arabidopsis thaliana
agccttaattgctgggatacgaaatcctttcacgtctcttttcaaattccaaacgttcactatatattatgtggctcacacacaactaaagtaacgaaacaaagtgagacagagcaatggctgattggtctaccttaccagtggatctcctcaacatgatcgccggtcgcttgttctctaacattgaactcaaacgtttccgtagcatctgccgttcatggcgctcctccgttcccggcgccggcaagaaaaaccctttcaggacccgtcctctaatcctcctcaatcctaacccaaacaaacctctcaccgaccatcgccgacgcggcgagtttctctcacgctctgccttcttccgtgtaactctctcctcctct

SEQ ID NO: 137498 - DNA, 359 bp, Arabidopsis thaliana
tagaataagattcatctgatcatggccctcgaagcgatgaacactccaacttcttctttcaccagaatcgaaacgaaagaagatttgatgaacgacgccgttttcattgagccgtggcttaaacgcaaacgctccaaacgtcagcgttctcacagcccttcttcgtcttcttcctcaccgcctcgatctcgacccaaatcccagaatcaagatcttacggaagaagagtatctcgctctttgtctcctcatgctcgctaaagatcaaccgtcgcaaacgcgatttcatcaacagtcgcaatcgttaacgccgccgccagaatcaaagaaccttccgtacaagtgtaacgtctgtgaaaa

SEQ ID NO: 137499 - DNA, 328 bp, Arabidopsis thaliana
cgcgtcagacaaatctccattgcgcaggagatatgaagcaaaagaatgtcgatgctgttaaagccataatttcaattgccattgaagatggtaatcacttgcaagatgcttgggagcacattttgacttgtctttctagaatagagcatttgcaattattgggcgagggtgctccaagtgatgcatcttattttgcttcaaccgagaccgaagagaagaaagccttgggttttcctaacttgaagaaaaaaggagccctccagaatccggtgatgatggctgtggttcgagggggctcatatgataacagtacaattggaccaaatat

SEQ ID NO: 137500 - DNA, 346 bp, Arabidopsis thaliana
aaggcctttcgagagggaggcttacgtgatcgtagtggtaaattttactataaggatcatcttcccagaaccagtgtccctgtcttagctcttgcaggtgatcgggacttgatctgcccccctgcggctgtggaagacactgttaagctgtttccggagaacttggtcacttataagttacttggagaaccagatggaccacattatgcacactatgatttggttggaggacgactggcagtggagcaagtctatccttgcataactgaatttcttagccaccatgattccgcataagtgaaacatttcgggagtttctgttccttgcatgctatagcacatgtag

SEQ ID NO: 137501 - DNA, 414 bp, Arabidopsis thaliana
acgcgtccaaagaaattccatctccataaaatcaaattttatggtttattaggttaacgtcataaacctaataccaaaccaaaaatctagtatattaaaccgaactgcaaccgattcaatttactctccacatcataaacttctaatctctcttctttagctaccatgtctctggttttctcttcaagcaaattggattctcaaaccaataagaaaaaattaaattatattggattgtacccataagtgaattataaacttctagttaactcattaatgggcttttggttcaaaagaaaaaaggcagaagaaaacgaattgcttgaatatatgacaacaacataggcttgtagctcagagttatgtataagacaccctaggaaaactgccaaagaagctcagagtcatgcatat

SEQ ID NO: 137502 - DNA, 393 bp, Arabidopsis thaliana
gtcaggtcttttcctcgtaattttttctaagaaaattcttacatccatctccgcgatactaacacacagaataagacttacaaaattggctgttcaacctacatgaataggtctagctggacttgctgtgatgggtcataacctagctctcaatattgcagagaaaggcttcccaatctctgtttacaacacaactacttccaaagttgatgagaccgtcgaacgagccaaaaaggaaggcaatcttcctctttacggcttccatgaccccgagtcttttgtcaagtccattcagaagccacgcgttattatcatgcttgttaaggctggttctcccgttgaccagaccatcaagaccctctctgcttatttggagaaacgtgactgtattgt

SEQ ID NO: 137503 - DNA, 309 bp, Arabidopsis thaliana
agtagaccgccgacttagattttttcgccgacgagagaatatatataaatggctcgtctttttccaaacgatttcttcttcttcgtcgtcgccggtttagggtttccgttgctgtagcaattttctctcgcttctctctccccttttacagtttctcttatattgctcttgccttgcgtccaatctcaagagttcataagagttgacatttgtgaacatcgaagaaatacggtgacgtttcttctctgattactttttgccaacatgaatactaatgtatttatcaacaagtgctacagcctgtttttt

SEQ ID NO: 137504 - DNA, 396 bp, Arabidopsis thaliana
aatcactcctaaacccttggtgttctcagtctcttcgtcatacattagcaatctctcccaatcatcagcttcatacttcaccacctcgcctcctgttggagaatcttgaggctgctggtggtgcttgatgaacttctttctcgccttttccaatccaagagctcctcctttttcttttcctttgaggttcttcaggcgttccaagaaaccccggttctgaaacaacttagccaagaaagagagcaattgcttctgacgttgctctgcagctttcagcctctggtttacagtgtccacatgtcgagctgtgcctctactttgctgctgaagctcaaccatttcctccatcaatgcacgccgctctttcctcagcttctcaatctctcctccaacctc

SEQ ID NO: 137505 - DNA, 388 bp, Arabidopsis thaliana
tgagaaacccctctttagggtttataccttcaatggagaaacagagtactcaaccaatttgcggccaagaggctctccaacttctcaattgcgtcgcggagtctcctttcgatcaagagaaatgcgtccgatttttgcaatctctcagagaatgcgttctatcaaaggttggttttttatcgccccaaattactgatctacgaacctcgtgaatcatttttttttttaaaaagtcagttgaagttttaggacaaggtatctaaattttaaaattctatcatcgatcgatcaagatatatcgaatcgttattgtcacttatgctttatgacaattttggagctgctcttggtctctcatagaaaacttttgagaaattatcacattttt

SEQ ID NO: 137506 - DNA, 226 bp, Arabidopsis thaliana
agcttaaagtaaagatgtaaccaatagaaatatattaaatctagggtgaatttggtaggtagcctaattttaagtataatgtcattttcatcaatttcagtgaaggtccaccctagattatattcatgtcatgttcagttttttgtcacaaagtaatctcaaatgctccagatgttgaaaggcaaccagccaattaacaacttaatgttaaatttacaagaaggac

SEQ ID NO: 137507 - DNA, 422 bp, Arabidopsis thaliana
gacccaagcgtcaggaaaatggttaagctcagcaatctcctcgttgcaaccttcggggttctcctcgtccttaacggctgccttgcgaggcagtcacttggggttcctcctcagctacagaacgagtgtaacctcgacaacctagatgttctccaagccaccgaaactatcaagagtgaagccggtcagatcgagtactgggaccacaaccaccctcagctccgatgtgttggtgtttccgttgctcgttatgtaattgaacaaggcggtctttacttgcccaccttcttcacttccccaaaaatttcctacgtcgttcaaggaacgggtatcagcggaagagtggtccctggatgtgccgagaccttcatggactcgcagccgatgcaaggacaacaacaaggccaaccatggcaaggacg

SEQ ID NO: 137508 - DNA, 407 bp, Arabidopsis thaliana
agggaaaagaggataaaatttaggaaatagaaatgatccagatttagtatggctaccaaaaaaattaaatgtttgaattgagagttcgttcatacgtcaagattttttggatcttttgaattgttggaaaaatcaaaatcgtgaatttgtttaagacagtattaagaattttatcgaaaacttacagcggcttgccaaacaaaggctaagagaagaaagaaaagaggtattacgggcataacatctacgattggattcaaaaaggcgtaggcctctggcaatttggcgactaaaaaagtgcttgaaaaaagggtagaattaaaaaaaatacagatcaaattaaatatattaagcataacaaaaattggtgttcttgtggataatttaattttgattgagtttttaag

SEQ ID NO: 137509 - DNA, 420 bp, Arabidopsis thaliana
gacccaagcgtcaggaaagtgaggagagcgtgctctatcctggagctctctgaacctcccatgcttcatttcgaaaatgacacgtttcagaactacctggacattcttcaagccatagtgacaaataatccaggagtgtcgttggagctaaacgtagagtctcagctgatgacagtgtgtatgcaaatactgaagatgtacctgaaatgcactttgtttcagggtgatgagttggaagaaaccaggcagcccaaaaactggattctacccatgggagcagcctcgaaggaagaagcagcagcgagatctcccctagtggttgcagtgctgaaggctctgagggaactgaaaagagattcattcaagaggtatgcaccgaatttcttcccattgttggtggagcttgtgcggagcgagcac

SEQ ID NO: 137510 - DNA, 404 bp, Arabidopsis thaliana
agcctttgcacgttacatcatcgagtctaagggtctctacttgccctctttctttaacaccgcgaagctctccttcgtggctaaaggacgaggtcttatgggaaaagtgatccctggatgcgccgaaacattccaagactcatcagagttccaaccacgcttcgaaggtcaaggtcaaagccagaggttccgtgacatgcaccagaaagtggagcacattaggagcggtgataccattgccacaacacccggtgtagcccagtggttctacaacgacggacagcaaccacttgtcatcgtcagcatcttcgatctagccagtcaccagaaccagcttgaccgcaacccaaggccattttacttagccggaaacaacccacaaggtcaagtatggctacaaggac

SEQ ID NO: 137511 - DNA, 393 bp, Arabidopsis thaliana
aaattagggcttacggaatttgttctcgctgttccggtttctgtcttcaaggttttcatcggttcgattgtggatattaaaaacgtctgctttagggtttttcttaggagatcgaaacctaagagaacgaggaagaagaacgatactgggttttctaaactggttaaatggttagtctcttttggtgtctttgtcattgcttatgagaggattggtggaattgggtctcttgtcattatctctttagggtttttgtttagttccaagaatgttgattcgtctctctctgcggtctcttctctgaggagtaatagttttaggagaagccatttcactgcttatttcactagagggataatgacgagattgaatactataattgccattggtttg

SEQ ID NO: 137512 - DNA, 373 bp, Arabidopsis thaliana
actacaattggaggcaaaaatggtgaacctaaacagaccattagttacatggccgaacgtgttgttggaacaggatcattcggaattgtattccaggcaaaatgcttggaaactggagaatcagtagccattaagaaggttttgcaagatcgccgttataaaaaccgagagttgcaattaatgcgactaatggaccatccaaatgtggtttccttgaagcattgtttcttctctacaacgactagagatgagctcttcctcaatctcgttatggagtatgtaccagagacattgtaccgggttttgaagcactatactagttcaaaccagcggatgcctatcttctatgtcaaactttacacataccaaatct

SEQ ID NO: 137513 - DNA, 404 bp, Arabidopsis thaliana
acgcgtccgatccattcctttcccccacaaactaaacaaaaaaccattcacaaaaaaaatagagagaatcatctgagagagtagtagtgatgatatgatcgcttcttctcctacaatctcagaaacctccgatcacggttttagatatcttctacaacggatacaatggagagcaccgattcttccggtggtccaccaccgccacaacctaaccttcctccaggcttccggtttcaccctaccgacgaagagcttgttgttcactacctcaaacgcaaagcagcctctgctcctttacctgtcgccatcatcgccgaagtcgatctctataaatttgatccatgggaacttcccgctaaagcatcgtttggagaacaagaatggtacttctttagtccacgaga

SEQ ID NO: 137514 - DNA, 369 bp, Arabidopsis thaliana
tcacatctcaattccaaaggataatccatctgagaaagatatgaatcaggggacattagtggtgtttaacctggatccttcaatttctaatgatgacttacatggaatttttggtgctcatggcgagatcaaagagataagagaaacaccacataagaggcatcacaaattcgtcgagttttatgatgtccgcggtgctgaagcagcattgaaggcattaaacaggtgtgagattgcaggaaaacgtataaaggttgaacctagtcgccctggaggagctcgtcgaagcctgatgttgcaacttaaccaagatcttgagaacgatgatttgcactacctacctatgattggttcacccatggcaaactc

SEQ ID NO: 137515 - DNA, 400 bp, Arabidopsis thaliana
agagatttcaaatcgtggactaggaaatttgaattttctgtaacaagagtactagatttggattgtatcgagcgtatctcatggaaaacgatccatttctccggcagtaccagccgtcggagcttaagatcgcttcggagtttctgactaattggcttccttttttatctaaagatctatgcaaggattgtaatcaccttctctccaatcgaatccgttctcttgacccagcacattgtagtaacaacactgacaaagttgatggagagtgtaaaactggttcttgttcagtggtggaaaatatgggatcagaaagagctagtaacaatgtggatgataattatgatgagaagtcggaaaatggcgaagactgtgataatcattcgttaggtagttggaa

SEQ ID NO: 137516 - DNA, 264 bp, Arabidopsis thaliana
gcattggtgaggcaagcattggtgtttggcggcgtgtttagtccagtgatggttgctgctggtcgggaaaatcagttttggtcgtatgggttgtttggtttgatcataggattgtgtggattgtttgtgtttggattgccggagactagaggaagtgttttatgcgacactatggacgaggaggagtataagactttggcaaaaagacaatttattggttgatacttgatactgttgtcttttgttgtaatggttaaaaagttt

SEQ ID NO: 137517 - DNA, 316 bp, Arabidopsis thaliana
aaatatatgttatattttatttttcttttagtttacgtgagctttgtttcgtatataaagtatgatgaattcatattttttttgttttggtaaaatcatatatttgatatttctactcgcctaacatttaactaactacagttttatatatatatatgtttggtatgtaatattgacacttaatttttttgtgaaacgctccattagtcaatactttgatacgtacagatatagattagtaatatcatttactgaattattaatgtagaaataacacaaatattgatctctcaaataaaatcgcattatcatttat

SEQ ID NO: 137518 - DNA, 278 bp, Arabidopsis thaliana
acgcgtccaaaaaaccttctctttcaactagaagcctttaagccatgtcttcttcttccttgatacttctcttctctactctctctctctttctcaatgtctcactcgcagacaatcacacggcggttgttataacaacctcagatactccaccgccacttcctccgccttctccaccgccacggcataacttcacttcctctctcatgcccggaatcgcagtcgttatcgccgtcctcactgcgtttttctctctcactttcttacttctcctctac

SEQ ID NO: 137519 - DNA, 339 bp, Arabidopsis thaliana
tgggacaagatttgttctgggccattataggaggtggagcagctatctttggtgttgtactttcatggaaagtgaagctagttagggttccataaaacgttacgtgcttcagaaggaacctaccgttgacacagaacatgacgaaaattgttcatagatggcagcaaattgcagcagagcttgacgataatctcttcatccgagtcatcgtttccaattccggaggataagttcagactacattccaagcaaattatcttggaggaatcgacatactaattcctctgatgaatcagaagtttccggaattagggttaacgtttcatgactgttcggaaa

SEQ ID NO: 137520 - DNA, 374 bp, Arabidopsis thaliana
  unsure (1)..(374): unsure at all n locations
agaaatatccaaccagtggttcagtcagaatatatttgcagaagccgtggaagaaggagacttgggaaaagatgacagtgaagacgaaatagcaaataagaaaaagagcaaaaatctgtctaaaccagacaagtcaaagcagaaggcttcaaaagcaagtgtgttgtctgatcagagcttgcccaatagctccaagaaggaagatgagtttgaggtagtccctgcaccagccacagattctgactcagattcatcctctgaagatgatgttcataccaaggccgagatactggcatgtgccaaaaaaatgctgaggaagaagcagagagaacagatgcttgatgatgcatataacanacacatgtttgtagatg

SEQ ID NO: 137521 - DNA, 409 bp, Arabidopsis thaliana
agaaataataaaatggctcgagtctcttctcttctttctttcttcttaacacttttgatccttttccatggctacgcggctcaacagggtcagcagggtcagcagtttccgaacgagtgccagctcgaccagctcaatgcgctcgagccgtcacacgtactgaagagcgaggctggtcgcatcgaggtgtgggaccaccacgctcctcagctccgttgctcaggtgtctcctttgcacgttacatcatcgagtctaagggtctctacttgccctctttctttaacaccgcgaagctctctttcgtggctaagggacgaggtcttatgggaaaagtgatccctggatgcgccgaaacattccaagactcatcagagttccaaccacgcttcgaaggtcaaggtcaaagcc

SEQ ID NO: 137522 - DNA, 276 bp, Arabidopsis thaliana
aaacatggctaacaagctcttcctcgtctgcgcaactctcgccctctgcttcctcctcaccaacgcttccatctaccgcaccgttgtcgaattcgaagaagatgacgccagcaaccccgtaggtccaagacagagatgccagaaggagtttcagcaatcacaacacctaagagcttgccagagatggatgagcaagcaaatgaggcaaggacgtggtggtggtccttccctcgacgatgagttcgatttcgagggcccccagcagggataccagct

SEQ ID NO: 137523 - DNA, 315 bp, Arabidopsis thaliana
cccacgcatccagcaaaagattcaagaatcgggaaggtaagaatcaggctttctactctcgagactgatcgagtttatacacattcataccctcttttggtgctccatcctaacggagtcaagaaaatgggagaaattcacttagctgtgagattcacttgctcttcagtgctcaacatgatgtagatgtactcacagcctcacttaccgaagatgcattatatccatcgactgacggttatccagcttgataacttgaggcatcaagcgactcagattgtatcgattaggctgacccgagcagaaccacctcta

SEQ ID NO: 137524 - DNA, 274 bp, Arabidopsis thaliana
acgcgtccgataaatgaacaaggcggtctttacttgcccaccttcttcacttccccaaaaatttcctacgtcgttcaaggttcatacatgataattacccttccaataaaattaatgtatatatcatgtctaattaatgaagatataatcgattcaccatatgataactcttttttttcctctctacctaatattaatttacaggaacgggtatcagcggaagagtggtccctggatgtgccgagaccttcatggactcgcaaccgatgcaagg

SEQ ID NO: 137525 - DNA, 369 bp, Arabidopsis thaliana
aatccaacaagttcaagggcagatttcgtggtggctcgggacggttcggcgactcatcggacgataaaccaagcattagccgccgtttcaagaatgggtaaaagtcggttgaatagagtgataatatacataaaagctggtgtttataacgaaaaaatcgaaatagatagacacatgaaaaacatcatgctagttggtgatggtatggaccgtacaattgtcaccaataaccgaaacgtcccggacggttccacgacttatggatcagcgacattcggagtgtccggggatggattttgggcacgggacataacgttcgagaatactgcaggaccacataaacatcaagctgtggcgttgagagtgagc

SEQ ID NO: 137526 - DNA, 260 bp, Arabidopsis thaliana
attaccactcctgacataagatggagggtccttagtgggaagttgacctcttcagatgataccaaaatattgcttgcaaaggcactttccattcttcatgaacggtttgatcctatcagtgaatctgggaccaagggagatttgataccagccatggtgtatggaaggcaaacaaaggcccaagattttagtggcatgtactgcactatgttggctgtggactaagtgattgtttcagtgggaatctttacggtttttgg

SEQ ID NO: 137527 - DNA, 350 bp, Arabidopsis thaliana
actctactagagagagacatattgagaaagagagagaaagctttagggtttcaaaaaaaaaaaactgagaccctttagaaatctcctaacaggaatttttttctcaatcgctatagaaaatgggagtcatgatcaatcaccatttcctcgcttttatcttcggcatcttaggaaacgtgatatccttccttgtattcctcgctccagtgccaactttttatagaatatacaagagaaaatcgacggagagtttccagtcgctaccgtaccaagtgtcgctatttagctgcatgctatggctctactacgcattgattaagaaagacgcttttctcctaattaccatcaac

SEQ ID NO: 137528 - DNA, 352 bp, Arabidopsis thaliana
gaaaacatacacaaatagcaaaacatggctaacaagctcttcctcgtctgcgcaactctcgccctctgcttcctcctcaccaacgcttccatctaccgcaccgttgtcgaattcgaagaagatgacgccagcaaccccgtaggtccaagacagagatgccagaaggagtttcagcaatcacaacacctaagagcttgccagagatggatgagcaagcaaatgaggcaaggacgtggtggtggtccttccctcgacgatgagttcgatttcgagggcccccagcagggataccagctactccagcagtgctgcaacgagcttcgccaggaagagccagtttgcgtttgcccca

SEQ ID NO: 137529 - DNA, 362 bp, Arabidopsis thaliana
gacccaaacgtcagttatattcgagaatttggttttctggtttcagttgggtctacaggattattgtttctcaagtcacctgctacatttctctgatcgtcttgttgaaatgtttgattctgtccttgtccagaaaacccttgtctaaatcctggatttcctgctaatccatgtggaggaccatagtttccaccgttctgcatattgtaatttgcggggttcactggaaatctttggttgaagtttgcagatgttccttgaccgtaaccgcctggtgttgcttgattgtagtttccatggtatggaggcgcctgtgctccatgggcttgattgtaactagcctgatatgaaagcactgcata

SEQ ID NO: 137530 - DNA, 371 bp, Arabidopsis thaliana
aggaacaggtttgggaagagattgttaccgatatcaaagatggtgtcttaagcaaccgtattactgtcccatcggtccgtactgcaatgtcgaagctgctcacacctaaccctgagctagctgagacgatccgcaccaaatgtatgagtttgagcaactggtacggattgattcccgcgctcttccccaacgcaaagtatgtttacgggatcatgactggctccatggagccgtatgtgccaaagctgagacattacgcgggtgatctacctcttgtgagccatgactacggtagctcggaaggatggattgctgctaatgttaccccaaggttatctccagaggaagctacatttgctgtgattccgaat

SEQ ID NO: 137531 - DNA, 378 bp, Arabidopsis thaliana
cataatacaaaccataaaaatatctccccttctcttttttctctctttttttgtagccccgctaatatttcgacacctgtttcagtctctttttttgtttcattcttcttcttcttcgtattcctcgatgttttagacgaagcagggactctcagtttacgagttacggaatctctctctgtctcagatccatcagaatagtttcttgcgcaaacccattcttgaagatggacagggcagatacatggggatttgtcagcggtgggagatgtttatatctcaagttgcttttatgtttatagctctacaaggtggtgttctaagtatttattgttttggtcattctatctcctccgctgcattgttctgtctcttctc

SEQ ID NO: 137532 - DNA, 374 bp, Arabidopsis thaliana
acgcgtccactcaatcaagccttcatgttcttctcgctgggttcctgtatcccgctacatgtttgaaactcgttgagtctatcgttgctgccattaatacctctcttaggtctcctcctaccttaatggcattctctgactctgtctccgcatggcttgagagactcagagatattgcttcgaaagaggaagtgatgatcgacaattctgatattactgttactccaaccctcttgggattaaccagttctttatctagtctttgttcaggtgctgaatatctcttacaagttgtacatggtgccatccctcatacgttttttgattcaaactctacgatttccgctgctgagattgctgtccatgttcttgat

SEQ ID NO: 137533 - DNA, 378 bp, Arabidopsis thaliana
ttctgcacgtaagagaagaaggaagctatggatgtagagcaaaagaaaccgttaatcgaatcatcagatcgtaatctacctgatttcaaaaaatcagtgaagcttaaatatgtgaagcttggttaccattaccttatcactcatggaatgtaccttttcctctccccattagtacttgtaatcgctgcacagatttcaactttctctgtcaccgatcttcgtagcctctgggagcatcttcagtacaatcttatctcagtggttgtttgttctatgctgcttgttttcttaatgactatttacttcatgactcgaccacgtcctgtctacttggtgaacttctcgtgctttaaacccgatgagtcacgaaaatgcact

SEQ ID NO: 137534 - DNA, 345 bp, Arabidopsis thaliana
aaatcgagcgacggcggcggagacgacggagatgaacagaatgagatgggtcggagagggagacatctgggacctcgatatgtcaactccggtgacgctcgagggcaccgcacgagctgttcctgacgatcctcttcctctaggtctctctagaggcactcgtctatctcgccctaagcaagttgagttcttccaccgcttcatggcctcacctctcatcccttccttctcccctatccgtcccaacaccggagatggaggcggtggtggattctctcttcaaagagtcctcactcttcctttctccaacaactggcttgtgtctcttctgggccaattcgatgt

SEQ ID NO: 137535 - DNA, 337 bp, Arabidopsis thaliana
ggatgatatttctccaccttaacctacttgatacttaacacacaaaacccattaacacattgggcatgttttacataatgtcccaatggcccttttcctttagtgaccaagtcgcgtttcttctccttagtttcacaaacgatataatatcaagtggacagattaactggcctttttgtatcattacttaatttgaagaatggagcttcacttcatccttggaagagaaaggtaggctaagcgagagtagccaaatttcctctccacttacggtttccatgatattcttgatattttaccttcacaaggagcttgtatgtgtggtagttgaatggca

SEQ ID NO: 137536 - DNA, 368 bp, Arabidopsis thaliana
agaaaacatacacaaatagcaaaacatggctaacaagctcttcctcgtctgcgcaactctcgccctctgcttcctcctcaccaacgcttccatctaccgcaccgttgtcgaattcgaagaagatgacgccagcaaccccgtaggtccaagacagagatgccagaaggagtttcagcaatcacaacacctaagagcttgccagagatggatgagcaagcaaatgaggcaaggacgtggtggtggtccttccctcgacgatgagttcgatttcgagggcccccagcagggataccagctactccagcagtgctgcaacgagcttcgccaggaagagccagtttgcgtttgccccaccttgaaacaagctg

SEQ ID NO: 137537 - DNA, 371 bp, Arabidopsis thaliana
aaaacatacaacatagcaaaaaatggcaaacaagttgttcctcgtctgcgcagctctcgctctctgcttcctcctcaccaacgcttccatctaccgcaccgtcgttgagttcgaagaagatgacgccactaaccccataggcccaaaaatgaggaaatgccgcaaggagtttcagaaagaacaacacctaagagcttgccagcaattgatgctccagcaagcaaggcaaggccgtagcgatgagtttgatttcgaagacgacatggagaacccacagggacaacagcaggaacaacagctattccagcagtgctgcaacgagcttcgccaggaagagccagattgtgtttgccccaccttgaaacaagctg

SEQ ID NO: 137538 - DNA, 390 bp, Arabidopsis thaliana
aggaagaagtatgacaaaagaactggtgatctcatgcgtttacctttcatccagaaagttcttcagcaacctttttacactacacactaacagtagaacttccactcctgatctccttcaaaacccgcaaggcagcgattgtgctcttcatatgaagactctccatgaacttatgctctgataactctgcttggataatctcagactcagtttcgttagcagggaagatctgatcaagcattgcctcagattccttgacaagcttggaacgcgcttgagtacttcaaaactcatctcaagtatgagaagaaccctaagatcagagaagctattacccagaaattcaccgagtatctccgtcgtgctgaggagatccgtgctgttctcgat

SEQ ID NO: 137539 - DNA, 407 bp, Arabidopsis thaliana
agaaaaaagcatctgtgttttcaaagcggaaatcaaatgctgcaacaaagacgaatgagacactgtttaagactcctctgcctgcaaaagaacaacagggtagccgaccagttcgagatggaaaccatgcattcccatttccagcatctattggggctttgtcagaagggagtccctcttttgttgctactcaggtaggaaacctaaaatctatgagccagcatgaatatcgaaatccttctcagctagattttgtcaagcctcaaaataggattcctcagcaagtagaactgaatttacccccaccagcagaacaaaccaattccggttctggctgtgttttggaaaaccaaagctttggaaaatcagatacggtggcatcatacaggtcatcaagtgacatgatg

SEQ ID NO: 137540 - DNA, 415 bp, Arabidopsis thaliana
acccacgagtcaggttcagttttgatcgttattgcgtttggagtgtttgcattacgatatcactgggaaccaacttggggaatgaaaaattctgaaagattttctgcagcaaagccattgatggaacaaggttcgagaaagccaggttttatgagtgaggacagaatcagtgagttgcctgaagttttgcttctgcagatactgtcttcacttcctacaaaacttgtcatatccacaagtgttttgtccaaacgatggctatctctttggaaaatggtacaaagactcgagtttgaatcttctcgaaacatatatgactttgctgaaaacgttaccaggtctttgctttcacataaagctccagttctagagagtttgcatctgaaagttggagatcaatttgatggtgtttatg

SEQ ID NO: 137541 - DNA, 392 bp, Arabidopsis thaliana
agaaaagaaaatggttaagctcagcaatctcctcgttgcaaccttcggggttctcctcgtccttaacggctgccttgcgaggcagtcacttggggttcctcctcagctacagaacgagtgtaacctcgacaacctagatgttctccaagccaccgaaactatcaagagtgaagccggtcagatcgagtactgggaccacaaccaccctcagctccgatgtgttggtgtttccgttgctcgttatgtaattgaacaaggcggtctttacttgcccaccttcttcacttccccaaaaatttcctacgtcgttcaaggaacgggtatcagcggaagagtggtccctggatgtgccgagaccttcatggactcgcagccgatgcaaggacaacaac

SEQ ID NO: 137542 - DNA, 270 bp, Arabidopsis thaliana
tggccggtttcggattgtacggctgaaagttaaaagtgttgccttgtctttggaagcatgccatcggagttgattggcgagaaaatggatgtaaagaggctctatgatgccgttaatttacttctctattttcagagcaaaaatggaggtataacagtgtgggaggcagctcgtggaagaacctggttagagtggcttagtccattggagtttatggaagacacaatcgtcgagcatgagtatgtagaatgtacggggtcagcgatagtg

SEQ ID NO: 137543 - DNA, 356 bp, Arabidopsis thaliana
gactaggttagcttgagagtctctattgcggtggcacttagatttggttaacgaacttgttgtctaaggttaatttgttgagcatgtcaatcacctgtaaactgaggaaacgaaactactcaattaccccatccttaggaattctttgtctgattgattttattgtttactctactgctgtttactgcatcctgtcacctgttgcttagtttctgcaattctttactgttactcgacctgatactcgaccacccagttgtcttgcaacagactgtgcagtcgagtatctttgtttcattttctgtctgttactcgacctgtcactcgacctcacccagtgctctgcaaagagctgt

SEQ ID NO: 137544 - DNA, 236 bp, Arabidopsis thaliana
ggaattgaactgaatcacacattcaccataagcagacctgaaaaacctgcttatcaatttggcgtcattgccaattcatcgttgcattgttacattcaagatatcagaatcttttaagatcaagttcttttacatttttcaagttactaactcatcatttcgtctgcttgtttttgtggtaaaggtactaatctttgtgcatgcaaaatcgatccaaaggttctgcacacctatta

SEQ ID NO: 137545 - DNA, 225 bp, Arabidopsis thaliana
acccacgagtcaactctcattgaaaccagaaaaggagattggttcccttctaatgttgactctagcagcatgaacggtcttcaggcttacaaggtgttcatagctgtcgctacgatcctaggagatggtctatacaacttttgcaaggtgttgatccgaaccttttcaggactgatctcgcagatccgaggtaaagctggttcgagaagctctcttgcacacaaa

SEQ ID NO: 137546 - DNA, 300 bp, Arabidopsis thaliana
tgcgttctgcgtcagtcatttcgaagtagatatcattgagaagagttttaacagtagtatgattctcttttaagtttatagtatgattgcaaataatgatataagattcgcgagacagattcagataaacatacgtaacttagataatgagagagacttctcaagactttagaagaaattaaaacttacgaacctcataaattgatctagaatgtagtactgtaaacatagtatagaaacgtctaaatctcttaatcaatcacttaactaataacggttccaaattatattgattacaat

SEQ ID NO: 137547 - DNA, 260 bp, Arabidopsis thaliana
tacagaacgagtgtaacctcgacaacctagatgttctccaagccaccgaaactatcaagagtgaagccggtcagatcgagtactgggaccacaaccaccctcagctccgatgtgttggtgtttccgttgctcgttatgtaattgaacaaggcggtctttacttgcccaccttcttcacttcgccaaaaatttcctacgtcgttcaaggaacgggtatcagcggaagagtggtccctggatgtgccgagaccttcatggac

SEQ ID NO: 137548 - DNA, 423 bp, Arabidopsis thaliana
acccacgagtcagaagaaaacatacacaaatagcaaaacatggctaacaagctcttcctcgtctgcgcaactctcgccctctgcttcctcctcaccaacgcttccatctaccgcaccgttgtcgaattcgaagaagatgacgccagcaaccccgtaggtccaagacagagatgccagaaggagtttcagcaatcacaacacctaagagcttgccagagatggatgagcaagcaaatgaggcaaggacgtggtggtggtccttccctcgacgatgagttcgatttcgagggcccccagcagggataccagctactccagcagtgctgcaacgagcttcgccaggaagagccagtttgcgtttgccccaccttgaaacaagctgccagggcagttagcctccagggacagcacggaccattccaa

SEQ ID NO: 137549 - DNA, 318 bp, Arabidopsis thaliana
acccacgagtcaggcaaggttatttctcaagaagaatctgaatccttacctgtgcctccagtttccggcggagttgatcatctcaacggccataacagcgccgccgcacgagttccaggaatgaatcttgttccgattgagaaatctgatagcaatccgttgattccacagcatcgtcataatccactgaaaccccttagcatgacggatctctcgccggctccgatgcacggatctaatctacgcgtcgcttatcaaggtgttcccggtgcttactctgaagcagccgccggtaaagcttatcctaattgtcaagct

SEQ ID NO: 137550 - DNA, 374 bp, Arabidopsis thaliana
gttgaaaaacatctccccaaacattttcaggctgacaaatctaatggtcgccgactttacagactgtagaggtgtcatcaaggcgttgagtgatgcaactgtggtagcgacaatggaagatcacgtttcttgtgtaccattatctgaaaacatagaatatacatgtgaacgtttctgggaaaagttgtacttgtatgatgatgataatgatgatgctgatgttaaatacttccaggtagattgggactttgatggggaatattttagcttccgtaattgcttcaaattggaaagagatgcgcgagaactcatcctacgatcatgcttcaagcctgtggccttaccaggtggagaaatccctaactatttcacgt

SEQ ID NO: 137551 - DNA, 400 bp, Arabidopsis thaliana
ttagcattaactaatattaatatgttttgtgtttttaagaattaaaaaggtttgtgtataaaaaattaagagtgtggatgaaagtgaaagcattcgtaaaaagagacgagcggtcggatccatgaatgtgtttgggtcctactttttcctcgttctcccacgtggaccattctgaactatctacgtgtcattttctgtcctaaattcaaaagctacgaacctacgtcgttttgtaggctcgtattctcagcgaatgaactgggcaactggctatgagtctcaatgacattggcttcatcatttatcgttctatgcttttaacattgttagattctagtcagtcaacgtgtttgtgtatatttatttcaacccagatttggttctttttttggaaatgaat

SEQ ID NO: 137552 - DNA, 415 bp, Arabidopsis thaliana
aaaaacatacacacatagcaaaaaatggcaaacaagttgttcctcgtctgcgcagctctcgctctctgcttcctcctcaccaacgcttccatctaccgcaccgtcgttgagttcgaagaagatgacgccactaaccccataggcccaaaaatgaggaaatgccgcaaggagtttcagaaagaacaacacctaagagcttgccagcaattgatgctccagcaagcaaggcaaggccgtagcgatgagtttgatttcgaagacgacatggagaacccacagggacaacagcaggaacaacagctattccagcagtgctgcaacgagcttcgccaggaagagccagattgtgtttgccccaccttgaaacaagctgccaaggccgttagactccagggacagcaccaaccaatgcaag

SEQ ID NO: 137553 - DNA, 404 bp, Arabidopsis thaliana
acgcgtccacaacattttctcgaactcttcggttccagctgctttagtgatgctatatgcttcttctttagagaggaataagtcttgtgctaagagctctgttaagctgttcttgagtaattgtgtagctttaccgaagaatcagaagaactattgtttaccaatagtgttagagttttgtaaactgcttaggaaagtttgccctgatcagaagctatatgttacttgccggaacaccttgggatcgatgctggaaacgtttgataaccctcatggtgtatataatgatcaatatgagacttttggggtggagattttcccgttctttactgagttaactggtcttttgttgaatgagttagctcagaattcagggcctagtttctgtgactttcagaaagttt

SEQ ID NO: 137554 - DNA, 285 bp, Arabidopsis thaliana
accttcggggttcccctcgcccttaacggttgccttgcaaggaattcacttggggttccccctcagctacagaacgagtgtaacctcgacaacctaaatgttctccaagccaccgaaactatcaagagtgaagccggtcagatcgagtactgggaccacaaccaccctcagctccgatgtgttggtgtttccgttgctcgttatgtaattgaacaaggcggtctttacttgcccaccttcttcacttccccaaaaatttcctacgtcgttcaaggaacgggtatc

SEQ ID NO: 137555 - DNA, 376 bp, Arabidopsis thaliana
gcaaaagatttccttcaccaaccaatgttcagaaacatccttgttacaacggagtggttaagactgatgcaaaaatagagtttctgtgtcaagatagcggtattagaggctgttggtttagatgcactgtcctggacgtatcaaggaaacaggtaaaactccagtatgatgatatagaggacgaggatggatatggaaaccttgaggaatgggtgccggcttttaaatctgctatgcctgacaagcttggtataaggttgtccaaccgcccaactatccgacctgctcctcgagatgttaaaacagcatactttgatcttacaattggtgaagctgttgatgcatggtggaatgatggttggtgggaaggtgttgt

SEQ ID NO: 137556 - DNA, 380 bp, Arabidopsis thaliana
agttcaagatcgcacggccgcccttttttttttttcaaagttgaggcagaacaatttcaaccatgaaaaaaaagcaaagcagacgaaaagcacatcatgaatatggccaagaaaataatatgagaatcagaaaaaaaaaactgaatgaggacgagtacgtaccttgtcaaggcataatccttgaagccactgatcaagcggcgtgcttccagtgtaccaatacatccacgcaaccgaggctctccaccattcactattttcttccaggtaacaaacaatggactacacaaaaagcaaaaagactggaccatcagtaagaatggacacaaaaagtatgcgcttcagattatatcacccatccataaacattcaacacaaaa

SEQ ID NO: 137557 - DNA, 370 bp, Arabidopsis thaliana
gtacacgtgatttttttttactagattagcgtgatttctcccttctcgatgatagtgatggaaccagtgaagtcttacattgagaggagaaacgatgatttttataagattctatgataataccatattactatgtcttttgtcattattcaaggattaacattggctggccatagacacgatcgaggtgtactttggcaccaaaattgggatgaggaagtccgcgatagatcatggattaactagctgatcaggatgaccatagattgcattgttacatagccggctcgaagtctttgaacaaagtcccaatcgacttatatattttatgttttcttcaatcagttagttgagacttttacacaataat

SEQ ID NO: 137558 - DNA, 384 bp, Arabidopsis thaliana
ttgaccatttgtatacatggtttgaggaaacttaatgctcgagtctttttttttttggatcaaaggttgttgaaggctttgggagcacctagtaatgcgtcgatatatattgcaggaggtgaaccatttggtggctcacgagcattagagcctctcgctaaagagttctctaatttggtgacaaaggagacattggctcataaaggcgagctcttgccttacaccaatagatcttcagctttagcagctattgactacattgtatcacttagcagcgatgtttttattccttcccatggtggaaacatggcaaaagctatgcaggtaacacagaagaatagtcttttgagattttccaaagtttctttcttaaactctgttttt

SEQ ID NO: 137559 - DNA, 342 bp, Arabidopsis thaliana
agatcaagacatctgagagagacactaccgacaattatagagaaaaaaccgcctttggctccaacaagaatgcgaatgccactcagaaggatcacaaacttcatgccccaacaacaaccatctcagggtcattctaagagattctcagacacaacattcaaagagaataataacagcaacagaagatcatcatctatggacgtgaatacactaatgaaaccaagaagaagctccatcgcattcaggccagctcctgctccatcagccattgcttcaagcaataaaaccatcatgcccagaaggagagtctcaattgcaacgctaagaccagaaccatcatca

SEQ ID NO: 137560 - DNA, 436 bp, Arabidopsis thaliana
cccacgcgaccgattgcgtctttgaattgccgtcaagtgttggtgttgatcgacatctacgcgattttttggtcttgggatatctttctcattcatacatgttgtttgtttcatccatcatgtctgagtactctgcttgttagggttagatttctcattagggattcatatgatttagtagatcggccccttgctaggttatctgtaggattcttcatctttagttgttcttaatgctagttctagagtagttaactagaatatgatctcatataataggtatacccaccataggtagttgttacaagaacttatcaaattcgtttagaatacatgtttaggtaaaagattttacggcacaccactgggaatctttcactctagacatagtgagtagcacggcacaccaccggttattctataattagggtttgag

SEQ ID NO: 137561 - DNA, 229 bp, Arabidopsis thaliana
agatcgtcctcaaggtggtgaaacagtgtgtaagtacagagggtgttgaaccggaatacattcgtagtgatattctgcccgagtttttcaggaatttctggacaaggaaaatggctctggagaggagaaactataagcagcttgttgaaactactgtggaggttgcgaacaaggttggtgttgcagatattgtgggaagagttgttgaagatctcaaggacgagagtga

SEQ ID NO: 137562 - DNA, 422 bp, Arabidopsis thaliana
aaagaagaagaggcgtttctctctctctttttgcttcagaaaaaatggggtttttcttgtgttcctcttcttcaatcttcttcaagttcggaatctctataatctttctagtttctttctctggtttaactccttcagaagcttatgatcctttggacccgagtgggaacattactgtcaaatgggatatcataacctggactggagatggctatgtggcgactgtaacggtatataattttcagcaatatcgacacattcaagctccaggttggactcttggatggtcatgggcaaagagagaggttatatggggaatgaatggaggacaaaccacagaacaaggagattgttctaaattcaaaggaaccattcctcattgctgtaaaaagacaccttctgttgttgatctcttacctgga

SEQ ID NO: 137563 - DNA, 338 bp, Arabidopsis thaliana
aagaaaaagtgactcgggacctggatgtgtatcgtaacctgctttcaaagcttgtccaagccaaggaattgcttaaggagtatgtcgagagggagaagaagaagcaaggagaaagagcccaatctcagaaggctaacgaaacaatctccaagtgtctgggagatactctatataacccatctttcttggttgaacggaaatcttagaaaatcatttgtgacttctttttttgttttcttagcaacaactatgcccaagaacatatatatctcatttctaagaacatttcagacgtgtatatgtttgctttttttcctttcaattacatgagtttacat

SEQ ID NO: 137564 - DNA, 374 bp, Arabidopsis thaliana
cttagttatctctcttttccctgcttgtaggttgccgacgattcaacaagaggttcagcagcggaaactgctatacatgggactctatcttttaatatggggagaagctgcaaacctgagatttttgccagaatgcctttgctatatatatcaccatgtatgtgaaaacatcagtcttccctatctctcttaagcaactttgtggtgtgtccttctctaaaaatatcagttcaatttagacaagggcactgtgataaaatggtgatcttggctgatacctagtaatcaactagtaaaatttgaaggcaagaaaccagtgcaaggatttagtaatacttatttctatttagagtacgagtattttgctacttgtg

SEQ ID NO: 137565 - DNA, 310 bp, Arabidopsis thaliana
gaccacgcgtcaggggaactatgcaatacaacagcaggacctgattacattccctgtctcgataatgtgcaagccattacgagtcttccgagtactaaacattacgagcatcgtgagaggcattgcccagacagcccacccacctgccttgttcctttgcctgatggatacaagcggccaattgagtggtccaaaagtcgagaaaagatctggtacaccaacgtccctcataccaagcttgctgagtataaggggcatcaaaattgggttaaagttaccggtgagtatctaacttttcctggtggaggaa

SEQ ID NO: 137566 - DNA, 417 bp, Arabidopsis thaliana
acccacgacgtcaggttgattacaaacttattctgacacaaaacataaattcgatgacagttcaaaagaagcttcggtgaaagaattgcacgatatggcggtctgtgtttttgccaagaccacacccgacaatgcagagaacaaaatgaaacaagctaacaaggagtttagttccaacacaaatgttagcccactcggcagattcttactctcaaggtttgttcgaatgatgaaaatattgatacatgaaacaatttttcctgagtttgaaatctgaatttttgagagcttcagtgtcttcttaatgaagatttgattttaaaatttcaaaatgggtttatttatgtctctctgcagatggctaggccaatcatcacgtgatctttaatcccccaccctgagacaacctacagagat

SEQ ID NO: 137567 - DNA, 336 bp, Arabidopsis thaliana
cacgcgtcagcaacaaacaaaaagaaaatggttaagctcagcaatctcctcgttgcaaccttcggggttctcctcgtccttaacggctgccttgcgaggcagtcacttggggttcctcctcagctacagaacgagtgtaacctcgacaacctagatgttctccaagccaccgaaactatcaagagtgaagccggtcagatcgagtactgggaccacaaccaccctcagctccgatgtgttggtgtttccgttgctcgttatgtaattgaacaaggcggtctttacttgcccaccttcttcacttccccaaaaatttcctacgtcgttcaaggaacg

SEQ ID NO: 137568 - DNA, 238 bp, Arabidopsis thaliana
aaacggaatcttaaaatgacaataaagtaagtcattagcaatggtcaaaagaaaaacatgcttatacagtatttggtctgtaaactacgcacgaagacgtatgaaccgggaaccgtaagcacaacattagtccactcaacgtttccccaaatttcataatcatcgccattaccgttacgtctttcaagagcaatcacctcacaccaaatatgtttatctccaaattgaccaggatgca

SEQ ID NO: 137569 - DNA, 433 bp, Arabidopsis thaliana
cccacgcgaccaaaacatagtcgttcctctgaaaaagtgggattacaatcactgatcaattagcatagaataggtccggcctgttgaaatccccaagagtacgacgtggttccgcagatggaagaatagctacaggaatctggggttggtgtcgatagacacctctgttgtgtcgctcgacaccaatcgcatcttcgttctggtcctgaaggtgtcgatcgacacctagttggtgtcgctcgacactgagccctgctgcatctctggcagctaattgtgcattgaggcgcgcctgatcctcattggcgtcctcagggtggataagtacatgatcatctaatctctgacaagcctcattgtaagcttgcccatcctcatctctcaaactccttcctcatcagctctgatggctctgtaagccattgctaatctc

SEQ ID NO: 137570 - DNA, 356 bp, Arabidopsis thaliana
agctgtattgacgtttttgagacatcaatcctacctttcaattatgaagtggagtacataccttggcctggtgcaattaactacaagaactacaacgatcttgtgtacacactgtatagccagaaagacaagtacgatgcagctgttggggatatcacgattactgataacagatctttatatgtagattttacattacctttcactgatatgggactcgcagttgttactgccaaagacaaaagcatgtggattatctttaagcctttgacacttagtctttggctaacaattgcaagtttctttatcttgacgggggctatagtttggttgatagagcggcatgataacgctga

SEQ ID NO: 137571 - DNA, 310 bp, Arabidopsis thaliana
aaccgaaaacatttagccagacaatggaaaccgcaagaatccaattcagtgcatcaatgtatgagatagtactgtagaatgtaaagtcctaaaagacaaatctgacatacactacattttgcaagtgtccaagattttcatctacagagagagcgatatatacacacagagagatttgaagatgaaaagactattgctagatgccggataaagagagaccaaaagaaaaagactacctgtgtgaatgtacttcagtgcacgcaataactgatacaggaaaaactggtaatgctctctagtcaaatcatca

SEQ ID NO: 137572 - DNA, 402 bp, Arabidopsis thaliana
aaaacaagtgtaacctcgacaacctagatgttctccaagccaccgaaactatcaagagtgaagccggtcagatcgagtactgggaccacaaccaccctcagctccgatgtgttggtgtttccgttgctcgttatgtaattgaacaaggcggtctttacttgcccaccttcttcacttccccaaaaatttcctacgtcgttcaaggaacgggtatcagcggaagagtggtccctggatgtgccgagaccttcatggactcgcagccgatgcaaggacaacaacaaggccaaccatggcaaggacgacagggacaacaaggccaaccatgggaaggacagggacaacagggacaacaaggaagacaaggccaaccatgggaaggacagggacaacagggacaac

SEQ ID NO: 137573 - DNA, 409 bp, Arabidopsis thaliana
agaaaggattttgggattaggggatcttggatgtcaggggatgggtataccggttggtaaattggcgttatattcagcacttggaggtgttcgtccttctgcgtgtttacctgtcaccattgatgtgggaacaaacaatgagaaactgttgaatgatgagttctacataggactcagacaaaagagagcaactggacaggaatatagcgaactcttgaacgaattcatgagtgctgtgaaacagaactatggggaaaatgttcttatacagttcgaagattttgctaatcataatgcctttgagttacttgcaaaataccgcgatactcatctcgtcttcaacgatgatatacaggggacagcatcagttgttttagcaagattagtttccgcacagaagttaacgaat

SEQ ID NO: 137574 - DNA, 396 bp, Arabidopsis thaliana
agaacaaaaagaaaatggttaagctcagcaatctcctcgttgcaaccttcggggttctcctcgtccttaacggctgccttgcgaggcagtcacttggggttcctcctcagctacagaacgagtgtaacctcgacaacctagatgttctccaagccaccgaaactatcaagagtgaagccggtcagatcgagtactgggaccacaaccaccctcagctccgatgtgttggtgtttccgttgctcgttatgtaattgaacaaggcggtctttacttgcccaccttcttcacttccccaaaaatttcctacgtcgttcaaggaacgggtatcagcggaagagtggtccctggatgtgccgagaccttcatggactcgcagccgatgcaaggacaacaac

SEQ ID NO: 137575 - DNA, 394 bp, Arabidopsis thaliana
aatataagaaataacaaaatggctcgagtctcttctcttctttctttcttcttaacacttttgatccttttccatggctacgcggctcaacagggtcagcagggtcagcagtttccgaacgagtgccagctcgaccagctcaatgcgctcgagccgtcacacgtactgaagagcgaggctggtcgcatcgaggtgtgggaccaccacgctcctcagctccgttgctcaggtgtctcctttgcacgttacatcatcgagtctaagggtctctacttgccctctttctttaacaccgcgaagctctctttcgtggctaagggacgaggtcttatgggaaaagtgatccctggatgcgccgaaacattccaagactcatcagagttccaaccacgct

SEQ ID NO: 137576 - DNA, 352 bp, Arabidopsis thaliana
acccacgcgtcagaggccttctagtaactccaagggtccctgagcttgtagctaagacagagcttgaaaatattgccaaaacttatgggaagttttggtgcacttggcagaccgatcgcggggataaattgccacttggtgcaccatcacttatgatgtcaccacaagacgtgaatatgggaaagatcaagccagggctattgaagaaacgtgacgatgagtatggaatctcgacggaatctttgaagacgtctcgagttggaattatgggaccggagaagaaaaattcgatggctgattattgggttcatcacggaaaaggattagcggttgacataatcgaaactgagat

SEQ ID NO: 137577 - DNA, 383 bp, Arabidopsis thaliana
acgcgtcaggttattaaaaaaaaaagacaatgtaaattcaatttgattttccattcaaagaaatataaattttgagaaagtctactacttctctgaagaaaaataactaataatctcaaataaaattggttattttcttaaaaaaccatcccataaatgcatgaaaggatgtgtacctaccaatgatcaatccaactcaatgcaattcttacaaccatttatacctcacataaccatctaaatcaaatgtttttggactcatttaactaatgatttttgaattttattccaagaatttgtgtaaaccagtaaacaccaacaaaaacgtatgtttttacaatctattttttgattgatttcttcacatggagcacatatataca

SEQ ID NO: 137578 - DNA, 258 bp, Arabidopsis thaliana
agcgaccgcaaccctagagtgttccatttggccggaaacaaccagcagggaggctttggcggttcacagcaacaacaagaacagaaaaacttgtggagcgggttcgacgcacaggtcatagctcaagcattgaaaattgacgttcagttggctcagcagcttcagaaccaacaagacagcagaggaaacatcgttcgtgttaagggacctttccaggtcgtgaggccacctctaagacagccctacgagagcgaggag

SEQ ID NO: 137579 - DNA, 403 bp, Arabidopsis thaliana
agggcaaccattaggaaaaccctaactaaattccattattaatttcttttataatccctttctcttgacattgacttctctctctcgattcttcttctccagtttcaatcaaactcaatttcttctcaacgaaccctaatttccaacaaatcggattcagtttcttcttcggagactaatcgaatcgcaatggctaagagttccttcaagatctctaaccctctcgaggcaaggatgagtgaatcttctcgaatcagagagaagtaccctgacagaattcccgtgattgtggagaaggctggacaaagtgatgttcctgacattgacaagaagaagtatcttgtaccagctgatctaacagtgggacaatttgtatacgtggttcgtaaaagaatcaagcttg

SEQ ID NO: 137580 - DNA, 332 bp, Arabidopsis thaliana
agaaattatattaactcaattcatcacagaaccaaatacgagaaagcaaatgagaattcagatgcaaattaaccccaaaacctggagctagaatgttaccttggcagcgcatttcttcaagacgccaaaagcgcggacaattggttcaggcattcgctcgcgctcaccaccgatttcgaagttctgcagcgatctctgcgtctgggctccccacaatctgagacacacaacaaataaaacactgtgaaacgtttccctcgaggataagagaaaattcgacgttgcgtaaagatcagatcccgaacttatcggaaggaacttgaatcggcccg

SEQ ID NO: 137581 - DNA, 410 bp, Arabidopsis thaliana
agtggtgcttccacagtggaacgcaaacgcgaacgccattctttacgtgacagacggggaagcccaaatccagatcgtaaacgacaatggtaacagagtgtttgacggacaagtctctcaaggacagctcatagccgtaccacaaggtttctcggtggtaaaacgcgcaacaagcaaccgattccagtgggttgagttcaaaacaaacgcaaacgcgcaaatcaacactcttgcgggacgaacctcagtcttgagaggtttaccacttgaagttataaccaatgggttccaaatctcacctgaagaagcaaggagggtcaagttcaacacgctcgagaccactttgactcacagcagtggcccagctagctacggaaggccaagggtggctgcagcttaagagcttaaaa

SEQ ID NO: 137582 - DNA, 403 bp, Arabidopsis thaliana
agaggaactgtgcttaatagtgacaacttcgacaagttaatccatgatgcatttttgttcttggggagcttctctgcctcggattattttccaaatgtcggctggatcatcgactggctcacggggttacaagggcagagagagagaagtgtgagaggtcttgacgcattctatgaacaaatgtttgatctacataaacaggggaacaaagaaggagttgaggattttgtggacttgctcttgaagttggagaaagaagaaactgttcttggatatggcaagctcacaagaaaccatatcaaagcagtcttaatgaatgttcttcttggaggcattggaacttcggctataacaatgacatgggcaatgacagaacttatgagaaacccgcgagtaatgaaga

SEQ ID NO: 137583 - DNA, 310 bp, Arabidopsis thaliana
atctgcttgacttttcttcagaggaactcacttggtctgcttctgcttctgagaatccaaaaggtaccttagaggcttaaactctagtttacaacatatatctatctctctagttttatcacatccttatagagttggaaactttgaatgcatagacctttttttaactctgatcacgaggtcaaaattactgttatgagattaatacatattttcttgggtgaaatttgaaaagatgataataaccaaatttgagtaatcgacaacttaaattaacatatcgaaacaaacaaaccggatatagatatgc

SEQ ID NO: 137584 - DNA, 340 bp, Arabidopsis thaliana
agcgtaaaggtaccgaccctgtcatagttgactttgtctctgtcgacatgaaaagcaagaaacatcctcaaagggcgaatattcgtttccggcatgccagaaaccccataatcggtgacaagttcagcagtagacatgggcaaaagggtgtttgttctcaattgtggcctgatattgacatgccatttaatggagttactggaatgcgtccagatctcatcattaacccgcatgctttcccatcaagaatgacaattgctatgcttttggaatctattgctgctaagggaggtagtttgcatggaaagtttgtagatgcaacaccgtttcgtgatgcagt

SEQ ID NO: 137585 - DNA, 398 bp, Arabidopsis thaliana
agcaaacaaaaagaaaatggttaagctcagcaatctcctcgttgcaaccttcggggttctcctcgtccttaacggctgccttgcgaggcagtcacttggggttcctcctcagctacagaacgagtgtaacctcgacaacctagatgttctccaagccaccgaaactatcaagagtgaagccggtcagatcgagtactgggaccacaaccaccctcagctccgatgtgttggtgtttccgttgctcgttatgtaattgaacaaggcggtctttacttgcccaccttcttcacttccccaaaaatttcctacgtcgttcaaggaacgggtatcagcggaagagtggtccctggatgtgccgagaccttcatggactcgcagccgatgcaaggacaacaac

SEQ ID NO: 137586 - DNA, 404 bp, Arabidopsis thaliana
agtatcactttcttcagagaatccaatagatcataagaaactgagattgagattaagaaaaaattataaaaaaaacaatgttttcgttctatgaccgagttttatggtcaaggaatccaaccaaaactaagaagaagaacaaaatgatctttaaaaaatcacagtgtttcatgagaaaacagactttctacacatgatactcatggcctcattcagcatctaatgataatttgacatctcggagaacgttttgtgagtttattaagttcctcgtagatatctgattccgaataatgttgaggacaacccatgaaactcagaatcagtttcttgaggactgctgagttttcgagaaagtaactcgctattttcatatcctgttccccccagtcaaacaatccttt

SEQ ID NO: 137587 - DNA, 412 bp, Arabidopsis thaliana
cacgcgtcaggcgcctcaaaacaaagagaagcaaacttcattttatttcttggatcaaagacactagctatgatcagcattttattaatcttcttcaaaccaccccaatacttgtcatacttgtctctcattgccttggcctttttcctcagcttttcatcagggttcttgcttaatgcgatcaaattcctttcaatagtaactatctcattatcgcacttgtaagaactcacagtcgaagatgctgaggcaactaaagttgaattgtataagacaaccacgaacttcaccaacctagctaattcatcccaatcgtctgaactaggcggccctttccttttgttcccatgcactttctctgcaaaataatcgttatacagcttatcttaagcttccattttgtcaaatgctg

SEQ ID NO: 137588 - DNA, 394 bp, Arabidopsis thaliana
aggaaataacaaaatggctcgagtctcttctcttctttctttcttcttaacacttttgatccttttccatggctacgcggctcaacagggtcagcagggtcagcagtttccgaacgagtgccagctcgaccagctcaatgcgctcgagccgtcacacgtactgaagagcgaggctggtcgcatcgaggtgtgggaccaccacgctcctcagctccgttgctcaggtgtctcctttgcacgttacatcatcgagtctaagggtctctacttgccctctttctttaacaccgcgaagctctctttcgtggctaagggacgaggtcttatgggaaaagtgatccctggatgcgccgaaacattccaagactcatcagagttccaaccacgcttcgaa

SEQ ID NO: 137589 - DNA, 298 bp, Arabidopsis thaliana
aaccctaaatttgatgtaagcagagagcgcaggtattattatataatgcaatagagactctctcattcgcagtttctctcagattctctaatttccttgtgtctcacgatttgctctcagaagaacttgagttttcgattctatgaaaaattcacaatgactagtatctatcacgatgatgacgatcatctcacggcttcaggtaaagacctgtggtcgaatttctgtgtactggttgatgcggcggttatgttatatgaagaagaagaagaagaacaacgtcgtaagattgtctctg

SEQ ID NO: 137590 - DNA, 362 bp, Arabidopsis thaliana
aatagtgggcggttggatttttatatatatgactgactaagttatggtcaatggtcaacgacgattatttctctctctttcatgctaattaacaccttcgtgaccaagtctctctttctttctctctcgtaatttagtcaaattcacgtcggtgcccaaattacctttctctataatttgttttttctagtggttattaaattgccataacgagagatttgaatagaaggttggactcggtgatcacgtgaaatcttttaccttagaataagtgatctatattatgcgccgtccattgaatacaactgtattagggcattctttagttttctttgaaatggaactatatgtgaagttatata

SEQ ID NO: 137591 - DNA, 360 bp, Arabidopsis thaliana
aacttcttggtcggtcacaatctgttctgcacgagcactgcacaatcacttggagtctgtgaatttcacatctgaaagaaatacaaactcccatagttttcaattttcacgatctccgaatttcacgactttgatacttggtttctttgcacattcacgcgacgaagatgaggctgttgaaggttgctacgtgtaacttgaaccaatgggccatggatttcgagagcaacatgaagaacatcaaggcttcgatcgctgaggcaaaggctgctggtgctgttatcaggcttggacccgagctcgaggtcactggctatggttgcgaggatcacttcttggaactcgacactgtcactcatg

SEQ ID NO: 137592 - DNA, 346 bp, Arabidopsis thaliana
aggagagattttggtaacttggaaataccagaaaggaaactattgatttgaagccatgtcagcgaataatcttttagcaacataaagcaggtataccttaacggggtcacctggaggagggcggaaaggaacctccacttccaaagggggaccaactggcctctccctgtacctagcttcaacatgttcagcttctgactcgtattgaggatcttcttcagggattatatcatcaagcaccatatcatcgggtctcagatccttctcagagccctcttcatcttcgattggcgatctctacaaaattagacatctcatcatacatacatgcaatttcatatggttt

SEQ ID NO: 137593 - DNA, 333 bp, Arabidopsis thaliana
acaaggaggacagaatggtgacgggggccaaggaggacagaagggtggcgggggccaaggaggacagaagggcggcggtggccaaggaggacagaagggcggcggtggccgcggccaaggaggaatgaagggcggcggtggcggcggccaaggaggacataagggcggcggaggtggtggtggccaaggaggacacaaaggcggtggaggtggtggcggccaaggaggacacaaaggcggtggaggtggtggacaaggaggcggtggacacaaaggcggcggtggtggccaaggaggacacaaaggcggtggaggaggtggtcatgttggtgg

SEQ ID NO: 137594 - DNA, 336 bp, Arabidopsis thaliana
accaaaagataaagaaaaacaagaaatattttgtttttcgatctgaaaaagtgaaagcttcttcaaaatctttgctttagagatcgtttggtgattttgtttctttattttttttttatagtttcttcttcttgattctttcatatggatggacatcagcatcatcaccttcaccagcttcaatatctcaacaagcatcatcttcatactcaatcgcaaacgccggaaatagcctctccggtagctgtcggggataggtttccacagtggagcgtcgaagagacaaaagagttgatagggataagaggagagctagatcaaactttcatggagaca

SEQ ID NO: 137595 - DNA, 369 bp, Arabidopsis thaliana
  unsure (1)..(369): unsure at all n locations
gaaataacaaaatggctcgagtctcttctcttctttctttcttcttaacacttttgatccttttccatggctacgcggctcaacagggtcagcagggtcagcagtttccgaacgagtgccagctcgaccagctcaatgcgctcgagccgtcacacgtactgaagagcgaggctggtcgcatcgaggtgtgggaccaccacgctcctcagctccgttgctcaggtgtctcctttgcacgttacatcatcgagtctaagggtctctacttgccctctttctttaacaccgcgaagctctctttcgtggctaagggacgaggtcttatgggaaaagtgatccctggatgcgccganacattccaagactcat

SEQ ID NO: 137596 - DNA, 390 bp, Arabidopsis thaliana
accagaaacagggatatggggatggattgattgactttataaactagtcattgattcataaagatgtatttttgttgtgtgtttttgagtgtgctaattgtgtgtctcaaaagaaggtggtggaggtcttgttttacccagacattttctgtttttgtcttttgctattgtgtttgatcaggttaccaaatccattgaaggactgcttcctttgccaaagatccataacccaaatgaccctcggagaatcgagtttaaagagcttgaagctgaaaaggcagtgatcgatgtgaaagctcacactttggtgcggaaagagctttgggctggtctcggttacttgatcctacagactgcggggttcatgaggctaacgttttgggaactctc

SEQ ID NO: 137597 - DNA, 371 bp, Arabidopsis thaliana
  unsure (1)..(371): unsure at all n locations
nagaaaacatacacaaatagcaaaacatggctaacaagctcttcctcgtctgcgcaactctcgccctctgcttcctcctcaccaacgcttccatctaccgcaccgttgtcgaattcgaagaagatgacgccagcaaccccgtaggtccaagacagagatgccagaaggagtttcagcaatcacaacacctaagagcttgccagagatggatgagcaagcaaatgaggcaaggacgtggtggtggtccttccctcgacgatgagttcgatttcgagggcccccagcagggataccagctactccagcagtgctgcaacgagcttcgccaggaagagccagtttgcgtttgccccaccttgaaacaagctgcc

SEQ ID NO: 137598 - DNA, 345 bp, Arabidopsis thaliana
agtatgctcttaagggaagtatggaaatgggaagtgcatcagtaatcggtctcggccaccttgtgggatacgcaatactgggagggttggtgagtggaggagggttaagcttcaatgcatgggtgattaagaggaaaggaccagtgattgtgtctctctttagtccaattgcaactgtggtatgtgttgttgtctctgcttttaccatggaagagagtttcaacctaggaagctttgcgggaatggcgttgatgttcggaggactctacttcgttctgtgggctaaaggaaaagaggattgtgaagaaatagatgaaatgaaacaagatgatgaagaaagtttgc

SEQ ID NO: 137599 - DNA, 401 bp, Arabidopsis thaliana
agggggtgtgaaaaagagacaaaaggagggaatttagaaatgaggtggtgaaggtatgttggattgttgtggaacgatatggtcaataaagcatatcgcattattggagagacattacatatttaccattattcatcttattatttctctgtacttaaaagaacaatgtgtttcaaaaagataaataaagtgacaagaaacctaattattagatatgggtcatttcagctccatgcacattctctttacatattttcttactatttctctataaagagattaacattctaatcaattgccaaaactatcaaagccataaaatcaactactaaatgttcatgtttctatcaatagccataatagttcgcatagtttagatatattcatgcaaccttttgtgt

SEQ ID NO: 137600 - DNA, 394 bp, Arabidopsis thaliana
cgcgtcagctttaattcgtttaattgacttttaggtatttgatattcaataggccggaaattttttaaaccaaagtctatatatataaaagtttattttttttttcataaatttacatcatcatccatattcaactttatcatcatcattaatattatgttgttgtggttaaccatctgaattattgacctactttcgtattaatcaattttaattttgtacttatcctttatcttttaagtatcattccacttatgtatatatgttatccttagaagtccattgactagctttatatcaaattgatattttccacttatgtatatatgttactaaaaaacatatggatactatcaaaaatatatatgttactaaaaactatccatattttttt

SEQ ID NO: 137601 - DNA, 362 bp, Arabidopsis thaliana
agaaacaattttctttatataggaaaactcttgaacagtctaaactctaaagattctacttcagttgaacagttgtgtagatcactcaattactcaccaataaccataaagcttctccgctatctagatcttgaatctcatcaatagctcctaaacctaggattaagctaaagtatatattataagctagtgaaattctccttgaggagatagctttgcattgcactcaatatatacacggtttagcaacgatctttcctagattctaggtacatgagatattaacaaagtcttatctaaacttgtaacaaacatatcgagacgaaatattgaatggaatattctatctcctaatatatata

SEQ ID NO: 137602 - DNA, 385 bp, Arabidopsis thaliana
  unsure (1)..(385): unsure at all n locations
agcggacaatatggaggaagatactgataatgagactcttgaagatgaagaagatgacgagagtgcaaatgagtacacagatgatgaagatgccagctggaaagttaggagagcagcggccaaatgcctagcaggattaatcgtttcgcgttctgagatgctcactaaagtatatcaagaggcctgcccgaaactaattgatagatttaaggaaagggaggaaaatgtgaagatggatgtattcaacacattcattgatctgttgcggcaaacgggaaatgttacaaaaggtcaaactgacaccgatgaatcaagtccanaatggctactgaagcaagaagtctcaaagattgtgaaatccataaataggcaactgcgcgaaaag

SEQ ID NO: 137603 - DNA, 323 bp, Arabidopsis thaliana
agcaggtctaaaactaaacaggcctaaacggctacttgttaaattgccagagcttaaagaggtcaagaaagcatgttttaggtgaggatttgtttgcttttaatctccatttttataggtaacaatgtattttcaatttgttcaactatttagcacaatacagtatagtacataggaaaaatatgcatgttatccttcattattacaagcataattcttataagtccagtaaatttttcataaaacttaaatcctcatatgactcgtttgataaatcatctttaccaactagtcttttaagtatttaacatttgcaataatcg

SEQ ID NO: 137604 - DNA, 344 bp, Arabidopsis thaliana
agaaaatcattacactcccacaaaaaaccatctttagtatgttttatcataattgtcaatcttttacctaacttgactacctctaacttcatgcaactgaactaactagtgtgttcaagataattggtgcaaattctagcaatacttggttcaatggctcttgtccatttgttctattagattaagaaatcaaagtccaattcacaattgttttaactaaattgttgtttttagataatcaatcatgactcatattataacatataatcaatgaataacaaaaattggatttgtggggataaaaaatgatgaattaggaaatgtacatgaaaatctctaaacct

SEQ ID NO: 137605 - DNA, 386 bp, Arabidopsis thaliana
agaaagaggaagaaaaatgggtcgagtctcatctattatctctttctctttgacactcttgatcctcttcaatggctacactgcccaacagtggcccaacgagtgccagctcgatcaactcaatgcgctcgaaccatcccaaatcatcaagagcgagggtggtcgcatcgaggtctgggaccaccatgcaccccagctccgttgctccggctttgcctttgagcgtttcgtcattgagcctcagggtcttttcttgcccactttcttgaacgccggcaaactcacgtttgttgttcacggaaggggtctaatgggaagagttattccgggatgcgccgagacgttcatggagtcaccggtatttggagaaggtcaaggtcagggtc

SEQ ID NO: 137606 - DNA, 360 bp, Arabidopsis thaliana
agaagaaaaatgggtcgagtctcatctattatctctttctctttgacactcttgatcctcttcaatggctacactgcccaacagtggcccaacgagtgccagctcgatcaactcaatgcgctcgaaccatcccaaatcatcaagagcgagggtggtcgcatcgaggtctgggaccaccatgcaccccagctccgttgctccggctttgcctttgagcgtttcgtcattgagcctcagggtcttttcttgcccactttcttgaacgccggcaaactcacgtttgttgttcacggaaggggtctaatgggaagagttattccgggatgcgccgagacgttcatggagtcaccggtatttgga

SEQ ID NO: 137607 - DNA, 387 bp, Arabidopsis thaliana
aggaaaataaaaatggctcgagtctcttctcttctttctttctccttaacacttttgatccttttccatggctacgcggctcaacagggtcagcagggtcagcagtttccgaacgagtgccagctcgaccagctcaatgcgctcgagccttcacacgtactgaagagcgaggctggtcgcatcgaggtgtgggaccaccacgctcctcagctccgttgctcaggtgtctcctttgcacgttacatcatcgagtctaagggtctctacttgccctctttctttaacaccgcgaagctctccttcgtggctaaaggacgaggtcttatgggaaaagtgatccctggatgcgccgaaacattccaagactcatcagagttccaaccacgc

SEQ ID NO: 137608 - DNA, 404 bp, Arabidopsis thaliana
gacccaaacgtcagttttaaatcaatcgtatcgtgattgccatggaaccattttttttattccgtaagtttggtgacaaaacattataaaagttgtttccaactacatttcagaaacattcatttaatggtacgttatttatttccacaagtatattcattacatgtggtttttttcactttattaaaatattggagaattgtaattgacaaaatttattgtggaataaaacaaaatattctacatatcaatttattgaggcgaataaacaaaaggggagcgagatggtcattggtcactatattagctaagcccaaatttgaatctaacggggattggtagatgtttcagagatgggcctacatttagcccaaaatgcggattcagatttttccccgtgacta

SEQ ID NO: 137609 - DNA, 339 bp, Arabidopsis thaliana
ccttgctcatttccttgagcatatgctattttatgcaagtgagaagtatccggaggaagatagttactccaagtatatcacagagcatggaggcagtacaattgcttatacagcctctgaacagacaaattaccatttcgatgttaatgctgactgtttcgatgaggctctggacagatttgctcagttctttatcacaccagtaatgtcagctgatgctaccatgagagagattaaggttgttgactcagataatcagaaaagacttactctcagatggttggcgaatccgacagttacagaaccatcttaccacagaatgaccatccgtatcacaaa

SEQ ID NO: 137610 - DNA, 345 bp, Arabidopsis thaliana
agagaaaacatacacaaatagcaaaacatggctaacaagctcttcctcgtctgcgcaactctcgccctctgcttcctcctcaccaacgcttccatctaccgcaccgttgtcgaattcgaagaagatgacgccagcaaccccgtaggtccaagacagagatgccagaaggagtttcagcaatcacaacacctaagagcttgccagagatggatgagcaagcaaatgaggcaaggacgtggtggtggtccttccctcgacgatgagttcgatttcgagggcccccagcagggataccagctactccagcagtgctgcaacgagcttcgccaggaagagccagtttgc

SEQ ID NO: 137611 - DNA, 347 bp, Arabidopsis thaliana
aggcactgttgagtcttttgagactgcacttgactcattggtgaggacaaaggagaccattggccgagcaactcgcttggctatggacttggcgaaatttggcgtttcggcaaaggcgatggaaattctggcccacactttggaaagtgagtcaaatttacaaaggagggtggatttatttttccttgtggattctattgctcagtgctccaaaggtttgaatggtgatgctggtggtgtttatctttcatccattcaggctatgctacctcgcctattaactgctgctgtcccagctggagctaccacacaagaaaaccgaaaacagtgcttgaaggttttgaggc

SEQ ID NO: 137612 - DNA, 373 bp, Arabidopsis thaliana
agaagacccgtttgagacaaattatgagactgttgagttacagaatcaacatgatgtactcttggaggaactggaatctggatcttcacagctatgcagtcttgaaagcgagctggagttgttgcagatggctgcggagaggttattggatgacaaaaagccgggtgggtcatatctcgaacagcttaatcaacaactagtggtcaaaaggtgtaatatcatggatcttaaaaagcaatgggacgatgtaaggctgactctggaaactaaaaagctacttctcttggaccaacttcatgtggaggagccagaggctaaagagaaattccataagttgagaaagactgaactggatttacaatctctctcatca

SEQ ID NO: 137613 - DNA, 349 bp, Arabidopsis thaliana
agaaattttcgtttagccaaggttttgtttctcttttgtgactttttgaaattaaaaccctcaagcattaccaaaaagatgatgccttaaagcaaatatgccttaactcacaagattctctgtctctctcttccctctttttcttattctttctctttcttttcttgtcctctttctcctaaactctttcgaatctcttttttcctttttctttctggcttctctatcaggaagattccgatgagaaactcgccgtctaagcacgggtcggcgggagggcattctcgtacttttacagacacaatctggtctccctttgtcaagtccggtttgggaatatctcccaaca

SEQ ID NO: 137614 - DNA, 373 bp, Arabidopsis thaliana
gaagaaactagagagggttttttgacctgattatttattttggctgactcattcttctcacatcccaacaaattttcgttgatatctgtctctgtcttcatttccgacatggaatttgttcaacatcaattcttttctttagctttatgatccctcacaaataaataatgtccctctctcaatttgcagcaaaccgctgacgatcaaaaggtgagccaagtcttttacatgtcgataattaggtttggtcaatgaaatgtttgaatgtttcattcttggtttctgataccatgagaagaagtttggtttcaacacatttttttgttgttgttgtgatatctaaattctgatcatttcaatttgatcaaatgat

SEQ ID NO: 137615 - DNA, 364 bp, Arabidopsis thaliana
gagagagagagagagagagagaaacagagctcaagatcacgagccttccttcttcatcttcttcttcatcgagagcgatcaaaggaacaaaaaggatctcaagaaacccacttgtgttgttggttagatacttcacgggtctctgaaaacgtctctttctcacaaccataacttgatcacccaatactccttttctcatcttaaaggctcaaattcatccacgtcacaccgttgttcatttcctctgatgtcttggtgtcgttagatattgtctcccaaaaaagaaatcttcttgacacagagattgacgtcgcaaagagacagaggaaagagaggaaaaatggatcgaccagcagtgagtggt

SEQ ID NO: 137616 - DNA, 397 bp, Arabidopsis thaliana
cacgcgtccgacggtgtctcctcagacatttcaatgtatgttggtgccaagagggaaaagggctataaagctatataggggtgggtgtgtgtagtgggaattttgcccgcacgcgcgcgcgcgaataagaataagaataagtaataagaataagaataagaaaaagaaaaaaaaaaaaaaaaaaaaaaactccatagagttgttttctcaatcgggtccgaggaatcgtcgaccgggtccgaggattttgccgaccaggggttgaaatcgtcgaccaggtccgagacttcatcgaccgggtccgaggaatcgtcgaccaggacgatgaatggtcgatgaaaatctatcgggttcgaggaatggtcgaccacgggttgaaatcgtcgaccaggtccga

SEQ ID NO: 137617 - DNA, 396 bp, Arabidopsis thaliana
acatataagaaataacaaaatggctcgagtctcttctcttctttctttcttcttaacacttttgattccttttcaatggctacccggctcaacagggtcagcagggtcagcagtttccgaacgagtgccagctcgaccagctcaatgcgctcgagccgtcacacgtactgaagagcgaggctggtcgcatcgaggtgtgggaccaccacgctcctcagctccgttgctcaggtgtctcctttgcacgttacatcatcgagtctaagggtctctacttgccctctttctttaacaccgcgaagctctctttcgtggctaagggacgaggtcttatgggaaaagtgatccctggatgcgccgaaacattccaagactcatcagagttccaaccacgct

SEQ ID NO: 137618 - DNA, 266 bp, Arabidopsis thaliana
taacaaccaccgaaagaatttaatcaaaattgaatgaagctttcttcctctaaactctttggccaagtccttcatcgttctaatcgattgtgataagatctttctagagatctaatcagaaccttgtgccgcggatttggagaaacatcatcatcatcgtcatagaaatcctgctctttcttcgattctgtaagagttcttcgagcagactctagattcgatttgttttttttccttttcgggtttgtttcaaatcaatctcaatt

SEQ ID NO: 137619 - DNA, 138 bp, Arabidopsis thaliana
tgtgatgcaaacagatgagatgtgatcagaagtcactaagtcaagccaagcaataacagttttggggtttctaacagtcctaagtgaacatgcagaaaacagaaacaataacagaatcactaaaatcactcgaccaca

SEQ ID NO: 137620 - DNA, 385 bp, Arabidopsis thaliana
cgcgtccgacagagtttgggtttctctccgctttagggttttctgtggaagaagaaaaaggcgggggttttctctctctttgttctgaggtttttttttttttaatgtaatcagagtaacgacattggtagtatctggggatggaggaaacgattaggaaaggttctgaagtggaagtgtcttctacagaagaaggttttgcagatgcatggttcagaggtatcctccaagaaaatcctaccaaatcaggtcgcaaaaagctccgtgttcgttacttgactctgttaaacgacgacgctttgtctcctcttatcgagaacattgaaccgaggtttattcgaccggttccgccggagaatgaatacaacggtatcgttttggagga

SEQ ID NO: 137621 - DNA, 257 bp, Arabidopsis thaliana
agaattgaaagtttagattttttgaaaaataaatgcggcgtttgtagcttcgatgtggcggttagggttgcgaggtggtggaggtggaggtgaaacgttcccggagcgacccgatgaacccgattgtatctattatttacgaaccggtgtttgcgggtacgggtctcgatgtcggttcaatcacccacgaaaccgtgctccggtaataaaaactctctctctctctctctttctctctctctccccccttccatgat

SEQ ID NO: 137622 - DNA, 333 bp, Arabidopsis thaliana
accacgtctccggtcagttatcgctactctaagcagagcacgacccggtaaccaaaactccgggctcgggtcacgggtcgtgggtacacttttcgggtctcgtcgtggtcacgtgcatttctctatccagaaagatcctaattctccaccggcgtttttaatcgaactcgctactccgattagtgggttagtcaaagaaatggcttcaggactcgttagaatcgctttggagtgtgataaggggaaagaggaagaagaaggagaagaaaaaaacggaactttacgtcacggcggaggagacaagacgaagacgacgacgacggcggcggtttc

SEQ ID NO: 137623 - DNA, 383 bp, Arabidopsis thaliana
gtgagttttgaatctgggctttgtttcttttgcttgattttgccccaggtaagcggagagggctcttatgttggggtttagtttgagattttggttggggtttatgcagtggggggcgtcctcttttctttttggcaggtacagaggaagctgcaatgacttcctcaggatgtctgggtaaatcttcagcagacaactgatcatttaactgtcctggttccaaagaagccaaaaagttttggttagatatagtggctgcttctatcatttgggaagctgtctcagccatgagtcccttagcttctccttgtgccactcttctctttctagcagcactttcagtagggtctgaacagctgatatattgaactgtaacatccctg

SEQ ID NO: 137624 - DNA, 262 bp, Arabidopsis thaliana
caagtatttgtaatgctacgaaagataaaaatcaattacttcttggtataagacgagccaaccgaccacaaactgtcatgccttcatctgttttgtcaggtgacaggatgcatttaggccttcttgctggggcagcgggtgctgccgctacaaacagccgattcaccatcttctataacccgaggtatcgtcttaagtaccttctgaatgcacttatgtgttgattctcttcgttttgcatcaaacggattcggtttttctg

SEQ ID NO: 137625 - DNA, 266 bp, Arabidopsis thaliana
caattgtcccctgagaactcaagaatactcaaatttcaggaatctaacttgactaatctgctaacaagaagtaagagatcatggactattaagacaatgtaactgaggtatatagggcaaaaacagagaaagcagttgaagaattggaaggaacacgaagactatcagtcttgatcaagacataatcttctcctttcctagattgagcagcttgtccaaatctcacaatcggtttctccattttagcagctttcgtctctctactt

SEQ ID NO: 137626 - DNA, 231 bp, Arabidopsis thaliana
ctaatatcacaaaaaaagagaatatttaactaccttacctcaaagtgtatgcttaacacaagaagaacatggcgtcttaccagaaccgtccaggacgtcaggccactgaccactacagaaaccggatccaggggcactatgacgagtaccgaaatccgatgggaggaggaggatacggaactggtggtggtggaggacctacaggtggccaaggataccgaacacgtggcc

SEQ ID NO: 137627 - DNA, 145 bp, Arabidopsis thaliana
gaagaagagactgatgatgaaagcttaatacgtgacaaagtcccaagctttttcatcaattagtatatagattagaatgttctgttttgtcgcctgttgttgactgtgttgtattgtctttagaataagggcaatttaattgatt

SEQ ID NO: 137628 - DNA, 169 bp, Arabidopsis thaliana
aaaaattgcaaacaagctcttcatagtctgcgcaactttcgccctctgcatcctcctcaccaacgcttccatctaccgcactgttgtccagttctacgaaggggagcccagcaaccccatgggcccaaaacagaaatgtcacaacgagtttcatcaatcacagcaccta

SEQ ID NO: 137629 - DNA, 206 bp, Arabidopsis thaliana
tgagtacctctacatgatagacctcaaaaaaaaactgaacactaacggcagcaagtaattgacttcagtacttcctcatataaaattattgactctagagatatagtggtgggcagaagacaaaattgtttcaaacaccgagagaaccataatcgccccttgtttcaaatagaggaggacgggttattcacatttcatttgatggt

SEQ ID NO: 137630 - DNA, 191 bp, Arabidopsis thaliana
taagtttggtcaacctaaaggtttaacaaaagtcgaatttgtggaagtataagctgttcagaattcgcttattttgaacgagtcagaactacatggtcgtcacatgggggtgcaaactcgttcaataccatatactgagtgagtttccatattacgatttgtcattactaaactttgtttaatctattttc

SEQ ID NO: 137631 - DNA, 180 bp, Arabidopsis thaliana
attcaaacttaaccaaaataccactctccatatatccaatgcaagtacctgtaccattctcgcacacaccatctccaatatatataccagcgggtacttccactgtcttcaccataccaaatcgggcgccacaatactctcacgttcatgcttcacctgttacacccacccgaacatatc

SEQ ID NO: 137632 - DNA, 246 bp, Arabidopsis thaliana
tttcaaatggcatgacataacattttgcacataaagttgttccatggattagatgtcaacatcgccggtgcttcgtcgtctcttattcgctatatttcactccccatttggttgtctacgttttgtaatatgtttcttctgtggaaacgcattgtaatacttttggattcttaacttcttctatttccccatttgctcaatcttcttattgtcttgttgtttacctttttgtgtcatcttttcttt

SEQ ID NO: 137633 - DNA, 310 bp, Arabidopsis thaliana
taacagagcggagggtaatatcatcaatagatcatggcacacgaaatgatcagagccaaaaaggaacgatgaacaagataggagatagaagaaacagcaccttcggatcctgtgggacctgttattacaggaaaattggcaaaagaggataaagaagaacacaatagtctcatgtaatcacacagagaggacattcttggtctgataaagcatcttgagagtttgtggttttgcaatatggctttggcttcttgcgtatttgagatacagacctatttctaagtaaacgggacttttaactatcattttc

SEQ ID NO: 137634 - DNA, 376 bp, Arabidopsis thaliana
gccaaattccgtagacgttaccttcgtggctaaggaatccatgattcctgaatgggagaatgaatcgcatcatcgaacaatgtattttatcaatcgtcggagaacgtctatcctagtttctgaaccgccgggatacatttctttcctggatgtcatggcaacagtggtgagcgaggttttaggctttccaacttccctgcctataggatcattattttcatgtcctgaaggatctgaaactgaaattaccgcttacctgagactatgctcttattctcttactaacaccggcacagctgatagttctgttggccaagagataatgccacaagatgctgtacaagtacagcttcaccctctgagaccattctacaaa

SEQ ID NO: 137635 - DNA, 293 bp, Arabidopsis thaliana
tcttctttctcgtgaagacaccgctctctactcgattcctatgattactctctagatccttttcaatttccccccgaaaggtttctcgattttgatgccgggaatcggagcttggagctaccggatcttatggagtgaagcccgatcatccgtttctttgttacaagttgtcgttttgtagctgcgaagattcctcggagaaggagatttggagacatcaacggcgccattctcagctcggcgatcacacggacgttctcgttccttgaatctgcaggaacttttccaggatt

SEQ ID NO: 137636 - DNA, 411 bp, Arabidopsis thaliana
aaacaaataatcgataaggttttgatatttcgaattcaaaagatcgaaaattcgcgtgtggttatttttttatttattattattattctttttgggttcggtttttcggatatataaaaagagagtagacattataggagtagagtcaaactatgatactaaatattctatggttttacacaacaggccatggcgaagttcatggggaaaatcagagagaacaaagtgaaattcgatacgaacaagatggttcttacagctggatcaacctcggctaacgagactctaatgttctgtcttgctaatcaaggagatgcctttcttatccctgcaccttattatccagggtacgtgtatttttttacactaacgtttttgaatatgttagtgttatttacaagagagactaaa

SEQ ID NO: 137637 - DNA, 369 bp, Arabidopsis thaliana
gtattagcatttctgaattccgactctgagaatcggcggttaccgggaaatatgtcggagactgatagagagcgtccgttattagcatcggaggagagagcttatgaggaaaccgagaaagttctcatagtcggaatcgacgaagaagaagacgctgattacgacgatgaccccggaaactctcctaaattctcatggaagaagctttggctattcactggacctggttttctgatgagtatcgctttcctcgatccaggtaatctcgagagcgatcttcaagctggagccatcgctggttactctttgatttggctattgatgtgggctacggcgattgggcttctgattcaacttctatctgcccgt

SEQ ID NO: 137638 - DNA, 356 bp, Arabidopsis thaliana
ggaggcaacaactatctccgcggcggagcattttccgatgaggttgatagtacctctccgtggagtaattcaaggccgtggtggtctcttcgtcgggtcgctcattccttgttgtctcttctactttctccagctctaccttaaacgacgccgtcctcctccctccgacccgacggagttaccgagaactttttcacggactaatctcttctctcgcgggaactcgatcggacgagttcgagtctcctctcgagcagttcctgtagctaaaccttccgattcgccttattacattgggttggagagagtcaaaacggatccgtacgatcggattaccaacacggatgggattattc

SEQ ID NO: 137639 - DNA, 345 bp, Arabidopsis thaliana
gaccaaaccgtcgaactgaatttgcccttaaaacatcattctttgttgtttttctaattggtattgacccaattggacaactttcaccggacatactccataactgattaaaactttcctcatatgttgtttcatttcctttacttggcctgtaaggtgagtcctgcatgtttatattaatagaattacttcttttttatacctaaaacttacaaaagaagtaaagttaaagagtagattcattacaagtggtttctggccttgtagctgaggatgatcaaatgcgggttgtatttgatacggtacacattctattacatctccgtctgggctctacagtttcac

SEQ ID NO: 137640 - DNA, 412 bp, Arabidopsis thaliana
taaacaagtacaagaacacatcgctggtgctataagcaacatcgccgccgttgaagaaatcagaacaacattagctgaagaaggagctataccggttcttatccaactcttaatctccggttcatcatcggtacaagagaaaaccgcgaatttcatctccttgatctcatcttccggtgagtattacagagatttgattgttagagaaagaggaggattacagattctgattcatttagttcaagaatcatcaaatcccgatacgatcgaacactgtttgcttgctctctctcatatctctgccatggaaacagtttctagggttttatcttcatcaacaaggttcataatccgattaggtgaattgataaaacacggaaacgtaatccttcaacagatctcaacttctctt

SEQ ID NO: 137641 - DNA, 428 bp, Arabidopsis thaliana
aataacaaaatggctcgagtctcttcacttctttctttcttcttaacacttttgatccttttccatggctacgcggctcaacagggtcagcagggtcagcagtttgcgaacgagtgccagctcgaccagctcaatgcgcgcgagccgtcacacgtactgaagagcgaggctggtcgcatcgaggtgtgggaccaccacgctcctcagctccgttgctcaggtgtctcctttgcacgttacatcatcgagtctaagggtctctacttgccctctttctttaacaccgcgaagctctctttcgtggttattggacgaggtcttatgggaaaagtgatccctggatgcgccgaaacattccaagactcatcagagttccaaccacgcttcgaaggtcaaggtcaaagccagaggttccgtgacatgcacca

SEQ ID NO: 137642 - DNA, 260 bp, Arabidopsis thaliana
ttgatattgattaggcatggagaatcgttatggaatgagaagaatttgttcacgggttgtgttgatgtgccattgactcagaaaggtgttggagaagctattgaagctgggaagaagattagtaagattcctgtagatttgattttcacttcttctttaatccgtgctcagatgactgcaatgcttgccatgactcagcatcgtcgcaagaaggttccaatcatcttgcacaacgagagtgtaaaggcgaaaacttggag

SEQ ID NO: 137643 - DNA, 405 bp, Arabidopsis thaliana
cagcctcagacttgatcaacttgcaagcaaaagagatggtgcaaaaggtggaagcaaggggtggtgagataggagatgtatgggatgatggtgcttacgacggtgttagaaaagtatacgtagggcaaggcgaagatggtatagccttcgtcaagtttgagtatgtcaatggttctcaagaggttgttggagatgaacgtgggaagaagactttgctaggagctgaggagtttgaggttgatccggatgactacatcgtatacgtggaaggttatcatgagaaagtttttggggtaacaacaaaagaaatcatctccactcttactttcaagacttataaaggcaaaacttctccgccgtttggaatcgtctcggggactaagtttgtcctccaaggtggcaaaa

SEQ ID NO: 137644 - DNA, 360 bp, Arabidopsis thaliana
gagaaagatctcgccggagatggagagtgttctcgaaccaaaacatcaaagcctcgattctctaatctaaacaaccaaactcatcaagacgacaaaaccggtcagtatcatcagaaaggcgtcgactttctcaacgtccggtccaacaatctcgatggtgggttttcttcaaaatcatcacccagatcaggaaacgagctcactcttagctatctctgtgaaaactccggtaaactcgctgaaagtcttggtcaaaaggggaaagaagtagtcaccttttctgagaattcaagctacgatgataaatgggtcgagagagatttcttcaatttgagagaaatgaatccgaattcttctaaa

SEQ ID NO: 137645 - DNA, 413 bp, Arabidopsis thaliana
aaattctctagcatagcaaagtagaagatacattaaggtaccttacttaggagataaagtgtccaagtgaggacagatccagtggtttcatgacccgctacgagcattgagagaagatcatctcgtaactgcacacttgatacctgaaaaccctcacaatgcaacatcagcttcgattatgcgataatgaaaggccaaatttgcttataaacttaaggaaaaaagtttaaacctcttctctgcttgcaagcaagaaacgcaggatacttgggtcagcatcatttacatactcctcatcattgattctttcgccttctctttcgacaatttctttacacttagcaataaggtcttcaacagtttcccttatcaaagttacagccttttcagctttcacctgtctcgggactatc

SEQ ID NO: 137646 - DNA, 374 bp, Arabidopsis thaliana
gcagcagcctctcaatggtagacataacaacaacaacgagaagcggattgagaagcagcagcctctcaatggtagacataacaacaaggagaagcagagagagaaacagcagcctctcgatgttagacataacaacaacgactctggtgagtaggtttgtgtgtcttccttccccggggaaggaagttgtattcttgttgggtctaattaccttatcaggacattgatgacattctttcttcaaattgttgatatgaatttgaagaaagcatcattcggattcgattgcctattcgaaggcagaaagatcccgaggtgatgatgaccaataaggatcaagaaaaaccaggtccttctcggggaataaagttaga

SEQ ID NO: 137647 - DNA, 328 bp, Arabidopsis thaliana
aaaatcagcatgagatgggaggatggtgacaacaactcctgtggaattccttcacgagttgttcagtatgaagcgcttgattcaacctcaaacgactcatatggagtgtggaagatagatgataaggatagtagtagcttaacacagaccttgcgcattaaatatgcaaggcaggatgttcgtctctgcatgatggtctcatttactatgcctctggaaagatatgaggggtcaggtacatcggctgttatattgaagtttgagcttttggattctccaatcatggaggatatacctgtgacacattcagatgcttgtgctgcggcag

SEQ ID NO: 137648 - DNA, 373 bp, Arabidopsis thaliana
gctgccacgtgttgatacatctgcatcgaggtttttattttcaaataattggtctcccgagatgatacagtcgctacaggcccagatattattaagcccacggtattccaacttcataatcactaggataatatacagtcactacaagcccggataatagcccaataagcttcaagatcgtttggcgatgagattttaattcggaactaagtaaccacgtgtcagtacctcgtcaaagtagctccatgcagaactgacacgcccgcgtgacactcttctccattgcctaacacgcctcgtcgttcgacacatgtctcgtttaagtttagcctctccttcatactagtctattttcattcttcataataatcac

SEQ ID NO: 137649 - DNA, 429 bp, Arabidopsis thaliana
gcgatttctccacctttccacaatcccctgggttgttccacgaccttttttctcgaaatgggtcgttcctctcgtcagattcgtatatatagcttcttccatcgattccgattcttcatcaagcagataaacaaacaaacagaaatcaaataactcactttccaatttcattcaattactgaaggtgttttagcaacaatggcgacgaaatcagataaagctattggaatcgatctcggcactacatacagctgtgtcggagtttggatgaatgatcgtgtggagattattccgaacgatcagggaaaccgtacgacgccttcgtacgtcgccttcactgatactgagcggctgatcggagacgcggcgaagaatcaagttgctttgaatcctcagaacactgtattcgatgcaaaacgtctcatcgga

SEQ ID NO: 137650 - DNA, 435 bp, Arabidopsis thaliana
gtttctctgatgagagacaacgaaattcactaagcagcaaccctaaatttacactcctgggtatgagtgatacaatgcctgagatcgtgtctcctttagtagctgaaaactctcaagaacaagaagaaagtgtgttaatttcattggatattgaagaagacaagttgtttctcttacatttcatcataggaacttactttggacaagatttaagaaaacaacatcatcgtccaaagcaatcagcttttcagattcaagcgttgaagaatgttgtggtagatgagttaagtggctcacttatgaagagagctgagctagaacgtgtgtattatcacattattagaaatgttgatccgtctctagtcatgaagccgaaaaagttacgtgaatatttcaatgcgaaacgcaatgattcgaacagggattaccctcttt

SEQ ID NO: 137651 - DNA, 301 bp, Arabidopsis thaliana
ctgaagtgacgggcagtgttcccttagataatcaaacccatctgacctcataacagctgcatcaagaaaaatgtttatgcaatgtaagtttggtgtgaaatcaatttcagtgatgagcctgtcagaaaagatcattaccgatgagattttctgctgcgaatttcagacaaacggatttcaaggcggaagcattgtaacggtcagcaagcgccaaaatatttgcaacggaatctactgatatatccttgcagagcactgactcgcacattagacttagtctaggcaacttgtatttatcagc

SEQ ID NO: 137652 - DNA, 422 bp, Arabidopsis thaliana
ataatatcccacatcgctttaaaaaattagacaatagtttagagtcatactataaaaaaggccaaaatgattatgcctacgaataaacaagaaacttgagttctcaaacgtccaaactaaaagtgttcggtttaatccggttctttatttcaaagaatggaaacttttaaaatgtttcaaaatattataaatatttaacctttattaaagtgaaataaatttaaacattataaatatttaaattatattacgggtgaactcctagaattgatgggtttaggtcgataataataagagactgtatattgcgggtgaaaacctagaattagtgatcaaaatataattatacaatctttaacactacacaaaacaaacaatattaccaaaacaaatacaacttttttaaaacgcatctcgattct

SEQ ID NO: 137653 - DNA, 418 bp, Arabidopsis thaliana
ctcccttactaaatttccttctctaatctctactttgtccaaaagcatttaactttaacgggaaaaatcttatatttgtttcctcctggatctctctctctatatctgcagattcacactacagctgatttagatctatttcgtaagtgggtctttcaaagtcgtctcctttgatctactttgattcaagggtcgttgatttggtgataagtcagtagaaatggataaggagaaatctccagcacctccttgtggaggtcttcctcctccatctccatcaggtcgatgctctgcattctcagaagctggtcccattggtcatggttcagatgctaatcgaatgagtcatgatattagccgtatgcttgataacccacctaagaagattggacatcggcgagctcattctgaaatactt

SEQ ID NO: 137654 - DNA, 168 bp, Arabidopsis thaliana
gagtaaacagaattccatactcgatttcagagatacatatataattctgtggggagccgggttcaatgaaagtcgtatgtacggtttggagggagatctttcatatctttcgagatccaccctacaatatggggtcaaaaagccaaaataaaagatttgagcccttat

SEQ ID NO: 137655 - DNA, 428 bp, Arabidopsis thaliana
  unsure (1)..(428): unsure at all n locations
acggtcttcacttcatatggtgcaactctttaccagatgtttattttgttcaggacatccggcaatcctgatgtctggattcctgcatacaagtcttctcgctggtcttcggtgttcttcgtgctctacgtgctaattggcgtctactttgtcacaaacttgattcttgccgttgtttatgacagtttcaaagaacagctcgcaaagcaagtatctggaatggatcaaatgaagagaagaatgttggagaaagcctttggtcttatagactcagacaaaaacggggagattgataagaaccaatgcattaagctctttgaacagttgactaattacaggacgttgccgaagatatcaaaagaagaattcggattgatatttgatgagcttgacgatactcgtgactntaagataaacaaggatgagtt

SEQ ID NO: 137656 - DNA, 352 bp, Arabidopsis thaliana
gcccacgcgtcgggaccgtgggcttcatctattatctattttctttagttattcactagagcggtatgatctggaagtcgatctgggcaagtgttcggatctattatgacatatccatagggtgctcaacggacccttttttataattaaaaaaagttttagcgcctttacattggtacacagagagctttttttataacctaatcgagtgtattcatatttcaattattaagttccgaaatgtagcctattttttttatagataatattatcctatttcaataaatgcttattagtcattactaagaaaaagtctagtattgatatttagtcattttgaaatatcttttat

SEQ ID NO: 137657 - DNA, 423 bp, Arabidopsis thaliana
atctcatcgatatcatatataacgtatggaattttcacatgattttgtcaccttatggttgtctccattttcttttgttcataatctttcattcttgatttagagcgagttttgatggtatttttaacatgtatttataggctcttacgaagagatacgtcggagaaggaagactagaaaatccgcctttcaagtttgagaacttaacagaattcaagatttcctttataactccaacattttgcactctatttgacatcgctgaattgctcaaagagtgccctaaactcaaacaggttgtgatcgatgtaagtctctctctctctctctccctccttgtccctccctcactgcttccttatcgtctacatataagttcactaaaacttttggttgctatgtgtagattcagaatttcacatt

SEQ ID NO: 137658 - DNA, 365 bp, Arabidopsis thaliana
aaaaaaactctactctcggtggcaccagatcactcctccttctctcttctcctaccgttttcacattctctccttcttcttctcgtgagacttcgagtgagagactctttattcattagatcgaggcagggatgttcagatcgccgacttcaggcactactgcatcaccatctgcaccgtgtccttgtacagactcgacaaccaccactcctcctccagcagcctcttgtcctccttggaccacaactccttcttctcctcctccgtcgccggcatctatttcaacctctcctcctccttcttgtgctttacctacttctcttcctcctccatctcctcctggatctttaactcctcctcttcct

SEQ ID NO: 137659 - DNA, 423 bp, Arabidopsis thaliana
aagaatctgaattttttctttttggcgactttggagtctcggtgaagccagagaacatggtcttctgtctgctgctacgtgtgccggttttatgccggctgctttgagtaaggttagatgatttcttagaggaattcgtcactgatccgacaagcttctgttgtgttctagccttcattttctgaagcaactcgtttggttcagggtaacgaactaatgcaactcgccgagtaatcttcccaactatcataaaacgaacaacaacagaagaatcattattaacgaaacaggtggtaaaacaaaactgtgtaaactgaacgaccaaaacctaaacaagacacaactgtaaagtaatgggaatataccaatcattgattcttcagaaggtataatcaactctgcaccagcatcttgagaatgaaa

SEQ ID NO: 137660 - DNA, 423 bp, Arabidopsis thaliana
gtcggatccagtttcatcgtatcaacattaagcatgattctagactcgaaggactgatcgggatggcagatctgacgataaatctagctgcgatctgtactcccgcagattacaatacgcgtcctcttgacactatctacagcaatttcattgatgctctcccagtggttaagtactgctcagagaacaacaagcgtctgattcacttttccacttgtgaagtgtatggaaaaactataggaagctttcttccaaaggatcatcctctgcgtcaagatcctgaattttatgtactcaaagaagatatatccccttgcatctttggttcaattgagaagcagaggtggtcatatgcttgtgcaaagcaacttatagagagacttgtttacgctgagggtgctgagaatggactcgagttcacca

SEQ ID NO: 137661 - DNA, 420 bp, Arabidopsis thaliana
actcaagcagccattacatatgttgatgtctacactgcgaaatatgaaatgatgagcaatcccaagaaactaggatttgcaaaccccttgaaggtatgttgcggctaccatgagaagtatgatcacatctggtgtggaaacaaagggaaagtgaacaataccgaaatctacggtggctcttgtcccaacccggcaatggctgtgagctgggatggagttcactatacggaagctgcaaacaagcatgtggctgaccgtactctaaatggtttgctcacagaccctccagttccaataacccgagcttgttatagacagtgagatttagtagaagcgctagatgaaccgaaataaagatttgatccttagactcttagggcaataatgtaagtgttttaaggaacaatcaatgatctatgc

SEQ ID NO: 137662 - DNA, 432 bp, Arabidopsis thaliana
gtcttttcctcttaattttttctaggaaaattcttaaatccatctccgcgatacgaacagagagaagaagacttagaaaaatggctgttcaacctacaagaataggtctagctggacttgctgtgatgggtcagaacctagctctcaacattgcagagaaaggcttcccaatctctgtttacaacagaactacttccaaagttgatgagaccgtcgaacgagccaaaaaggaaggcaatcttcctctttacggcttccatgaccccgagtcttttgtcaagtccattcagaagccacgcgttattatcatgcttgttaaggctggttctcccgttgaccagaccatcaagaccctctctgcttatttggagaaaggtgactgtattgtcgatggtggtaatgaatggtatgagaacactgagaggagagaaa

SEQ ID NO: 137663 - DNA, 419 bp, Arabidopsis thaliana
gctcttcacagccattcaatctcataagacatattgccggagaaactctctcggggggtcgcttcttctgcattttctgcttcccaatggcttccagaattgctgattctctcttcgccttcacgggcccacagcaatgtcttcctagggttcctaagcttgctgcttcttctgctcgtgtttctcctggtgtatatgctgtgaagccgattgatcttctgttaaaaggacgaactcatcgaagtagaagatgtgtagctcctgtgaaaaggagaattggatgtatcaaagcggtggctgctccagttgcaccgccttcagctgacagtgcagaagacagggaacagttagcagaaagctatggattcagacaaattggagaagatcttcctgagaatgtcaccttaaaagatatcatg

SEQ ID NO: 137664 - DNA, 120 bp, Arabidopsis thaliana
ggacaattacgacgacagcaaaaaaataatatgtgtggacacacaatgacagactgacattgaactagcttgaaataaatttatactaaagagtagggaatatataatcagtaaatagaa

SEQ ID NO: 137665 - DNA, 273 bp, Arabidopsis thaliana
cggacgcgtgggcggacgcgtgggtgggtttgctgcaaaacatagggtaatgatgcgtcatcaagttcacctatatcatagatttattcaatcttcatgtttagcttgttcttaattatgtatattaatggtcatatgtagctaaggaactatgaacacacttttaaatgggttgataaagctttgctcaatgagatcgaaacattgacagacaaaacacgtgaatttgagcaagatcttaaagagcttagaacagagaggatggtgtttgaa

SEQ ID NO: 137666 - DNA, 422 bp, Arabidopsis thaliana
ctcttatgtataagtacattatgtgacccttcaattgcagctaattctgatgaaaaatgggggaaaaattatctattacggacctcttggacaacattcaagcaaagttattgaatactttatggtcagtttctatataatactgaaactgttgcaaaaaaagtgtggtctcttctctacttacaaattattacaataattttcaactttagaggattcatggagttccaaaactgaaagaaaactctaacccagccacttggatacttgacattacttctaaatcatcagaagacaaacttggagttgatttggcacaaatgtacgaggaatcgactttgtttaagtaagtctaaacacaagtatcacttaatactttggatgtttgcctgaaactgattctgctatttgcttttagggag

SEQ ID NO: 137667 - DNA, 425 bp, Arabidopsis thaliana
aaacagggcagttattcagtcttgatgctgcaaagaagaaggctgtggagtctgaggctgagggcaacgaagaattgatcttctccctaaacatactggtccttggaaaagccggggtgggaaaaagtgctactataaattccattttgggaaaccagattgcgtccattgatgcttttgggctctcaaccacttcggttagagaaatttctggaacggcgaatggtgtcaagattacctttattgatactccgggtttgaagtctgctgcgatggatcaaagtacaaatgcaaaaatgttgtcctctgtaaagaaggtaatgaagaagtgtccccctgatattgtactatatgtagatcgtcttgacacccagaccagggacttgaacaatttgcccttgctaaggacgattactgcttctctt

SEQ ID NO: 137668 - DNA, 426 bp, Arabidopsis thaliana
aaaagaaaatggttaagctcagcaatctcctcgttgcaaccttcggggttctcctcgtcctgaacgggtgccttgcgaggcagtcacttggggttcctcctcagctacagaacgagtgtaacctcgacaacctagatgttctccaagccaccgaaactatcaagagtgaagccggtcagatcgagtactgggaccacaaccaccctcagctccgatgtgttggtgtttccgttgctcgttatgtaattgaacaaggcggtctttacttgcccaccttcttcacttccccaaaaatttcctacgtcgttcaaggaacgggtatcagcggaagagtggtccctggatgtgccgagaccttcatggactcgcagccgatgcaaggacaacaacaaggccaaccatggcaaggacgacagggacaacaag

SEQ ID NO: 137669 - DNA, 388 bp, Arabidopsis thaliana
aacttgtataccctctacaagattccgtgaagcaattttctcaaggatggcttgaaaagggtaagttacgacatggtatcaagtcttttcgtcgttttggagagagtggttctgttgatacacatgacatggaaaagaagctggaagttatcagggaaaaaatagatcaatttccattgaaagatgtttttaatatggacgaaactggtttgttttacaagttacaagctgatcattctcttgctacgaaacaacttgaaggaagaaaacaagataaagaaaggttgacagttgttatttgctgcaatgcggatggctctgaaaaagttcctttgtggattattggaaaatatgcaaaaccacgttggtttaagaatgtcaacatgag

SEQ ID NO: 137670 - DNA, 339 bp, Arabidopsis thaliana
cggacgcgtgggaaagaatgtggtcaacttacaatcaaagagacatgagtccagagaaagtgactaaccaggaacagatggatgaaaatatccaaagcatcgacggcctattcccaatcttcttttaagatccaagaggttgctgattggatgcaccgccttataaataatgcgttattagacaaaacttttaacattctgaaatagctgagattactataatggagactagtactgcatacctcatatgcaacaattttctcaagcaatgaagcaggatcatcccaagtaatttgatgaagctctaaagtggcaggactaaaccacataccgagtttc

SEQ ID NO: 137671 - DNA, 463 bp, Arabidopsis thaliana
caaaaccctaaaaataccgtgattaagataaaaagcaaaacaaaaccctaaaaatagaaattacaatacccaataaagttaatagcgactttaatcggtagagatttcgtcttcctccaccagcttctgttgttcttaatcactagatcccttgtttttgacgtgacgaaaagcctgagattgagatttgtgtactatggtagaagaataaatttggtgaaaccttcaccggatatctaccttgagaagaaggatgggtcctggagaaatgtcgcttcgttgaatataagaaacttaagaaagtgttgaagaagtgcaagacatgtaactctacaaaatctgatgatggacaaatcatcccatctgctacttcttcatctttgtctgattcatgcgaatgcaaagcttgcccttggtgtgatcagatgttcttcgaggagctgatgaaagaagctactgacat

SEQ ID NO: 137672 - DNA, 227 bp, Arabidopsis thaliana
ccgtaacaaagaaagcatggagcctttgcttgagtttctccgcactcacaaacatgatggccgtcctatgatgctgaatgatcgaatacagaatatccccatacttcagggagctttggcaagagcagaggagttcctttctaaacttcctctggcaacaccatactctgaattcgaatttgaactacaagggatgggatttgaaaggcgatggggtgacacagcac

SEQ ID NO: 137673 - DNA, 318 bp, Arabidopsis thaliana
cgccgataggattcaagaggaaaaatacattattttgggaatacaaaaccacataaatattgaagaagctttataatataaccaagtttggttgatatatagtttggggttcactttattttctgctaaattgatgagataataaaatatacaaaccaacacccaaccgaacacataagattgaagaatcaaaagttggagacattggcgcgatcaaagaaaagaccagatgggtctccattagggaccaaagccagtttcactggactcgctgcaccttcttcaacgctcaagatcccagtgttgaaattgatttct

SEQ ID NO: 137674 - DNA, 231 bp, Arabidopsis thaliana
cggacgcgtgggcggacgcgtgggcggacgcgtgggtaccgtcaagaatttttgactatcgcatgggaggaggttcatcttcgaagcattttccctttccaatatttatccattggagcttatctaattccttttatcgaacatagtgctgctaatcgagctctaatgagttctaatatgcaacgtcgagcagttccactttctcggaccgaaaagtgcattgctggaact

SEQ ID NO: 137675 - DNA, 435 bp, Arabidopsis thaliana
  unsure (1)..(435): unsure at all n locations
cttcagatgactttctcgcttaataaaaaaacactaacccaatcaaatccactttaatccttccctctgtcgcgtccgattctccgatggctttaacggaggacaaatcagattccgatggtcgacgttggggcaaattcaaacttccatttcgaaactctaattcccaagctccttcagcctcctcgtcctcttccatggctacttcttcttcttctgtaacatcttctcatctaaatcaaaattacattcatcaatcttggcattttcaatatcacggtcctcctgtcgtcgaaagattgggtcaaaaccatcatcaatccgccgncacgatcccttctatgtcatctgtcgcgagatcgcttcttccaacaaaacgccgattaaagcttgatccttcagcaaaactttacttcccttatgagcctgggaagc

SEQ ID NO: 137676 - DNA, 334 bp, Arabidopsis thaliana
  unsure (1)..(334): unsure at all n locations
tcgattgtgatcaagcgtgcgatccaaaggacaagaaagcatgcgacaatggatgtggcggnggactgatgacaaatgcctacgagtatttgatggaggcaggaggattagaagaagaaagatcatatccttacactggtaaacgaggccattgcaagtttgatcctgagaaggttgcggtaagagtactgaacttcacgactataccactggatgagaaccaaatcgcagcaaacttagttcggcatggtcccttagcagtgggattaaacgccgtgttcatgcaaacatatataggaggagtgtcatgtccgcttatatgcagcaagcgaaa

SEQ ID NO: 137677 - DNA, 422 bp, Arabidopsis thaliana
tgcatattgtgctacgaggtagataccacaaaatacaaagtaaaagcgtcctattgaatatttagagagtcatacaatttggtgatagagtatgacggttgtattttatcattatcttaggaggagccaattgataagagcaagcactggggtgatttagaggaagaggaagaagaagaggaggaggaagaagaggaacaagaagaggagatggatgaagaggaactagaagacggcactgaatctgttgatacactgtcaaggtattgttatcactatgcatttatgaggtgtatactatttatttgtttgcttatcagtataatctaagtataaagctgatttgtgattttccccttctttcagcactcctactggtatagagacaccggatgcaattgaacttcgtaaggatcagagaa

SEQ ID NO: 137678 - DNA, 352 bp, Arabidopsis thaliana
gttattatacccttatagtttcatctttttcgcagagaaccaccgtagagttagatacattatgaaaagcaccgcaatagttttaggatctgcatatcagaattcatgatattgggcttgcccaataagcccacggacatctttttgtggctattgcatgatgtttggttactaaaatcccattcctaagttttaagttttaacgaacgatgcagttttaagttggaaaaagggcattttttttaatcaagcaatatactgataaagagttacaaaagatgcgcggtaaaaatcatcgatcttggaagtagttgtttccgctctgataacttgtgcttgtatgtacaatcac

SEQ ID NO: 137679 - DNA, 328 bp, Arabidopsis thaliana
  unsure (1)..(328): unsure at all n locations
gtagcatatgaattttagaagtccctatagttcttgaaaaaaaatcttagatacatgttgtcagctggttttgctcaatagtcagcttaatccacttttatctgtaggtagttgaggtaaatgttagagttgacgagcgaggtgagaacaatgtccacaacaatgcgttttatgcggaagagaagttacttaaatctgaggcagtggcgatgcgtgactgtgaccctctttctgctcgccattggattgtaagcaaaaaccgtaccttgcatgttctcgtccatttattgcatgtttaactntcacattgtcagtgctcgtacccgtc

SEQ ID NO: 137680 - DNA, 377 bp, Arabidopsis thaliana
tgactttgtttctgctttatttcagactattggttatttgttttgaaacttgttgcacttattttcctatgctttgttggaactattgatgtgtgttttagtgatttaacagtctaactggaggatccatgtgaaaacactaaccaaggctctacaacaatgagcagaattcacaaagcaatgcaaaacgaccagagtgtcgatcaacaccatcatggtatcgatcgacactactctcaggtggcaactcacgttttctaactttttaacttttgattatttctctttcgattcctctagcttaataactctggggacaatgttatctaagtctaggggattcaattactaactacatcttttcttttctatgagtc

SEQ ID NO: 137681 - DNA, 121 bp, Arabidopsis thaliana
ggaaccagacacgaatcccattcccaccgatttcttagcttcttccttcaatccgctctttccctctccattagattctgtttcctctttcaatttcttctgcatgcttctcgattctctc

SEQ ID NO: 137682 - DNA, 352 bp, Arabidopsis thaliana
  unsure (1)..(352): unsure at all n locations
ctgcgttatacaactcattaatggcctctttgaagttgaagaaaagggataatggcgctgaacctgacaagaaaaagctggtcatcgccggaattcgccaccagttactccttctccttcgccgccgtcaccgtctatttccgctggtatctgccgtctccggctgtctcctcctcatcctcttctcattctccaccctctctcctcctccattgatccatcataacaatcaagtggccgtcgaacccaatccaaccactccatttcgtgtacccgtacgtaaactctnttttgtttcattgaggttttacacaaactttccaggtcattcatgatcattaatgcgtgtcac

SEQ ID NO: 137683 - DNA, 286 bp, Arabidopsis thaliana
aagaaaacaggcgatttgcgagggaaatttgcggtggaacaaatccctcgcaaattgctacggatttgcgagatgtttgcgagggaagaaggcaacctcgctacaccctcgcaaaaattgcgacgaacacttccttcgcaaatttgcgagacgattgcgatgaaactgcagggaaagcatcattcctcgcaaaaacgttgcaaatttgcaagggagttacaggtaacttgtctcccccgcaaattgcgacgaatttgctacgcccatttattctgtcgcaactatt

SEQ ID NO: 137684 - DNA, 333 bp, Arabidopsis thaliana
agcagatataatccaaccacatgatgtgagagcactttgctctgttttagtcactgtagccggagaagcagcaaagacatcaacagataaaagaaatgaaatagaaaatcgggtggacgatcaaacagaaacttctttagcttcttctgcacaagatcagcctcaaggcaataacaatgcagctgatgtggagatggttgcaactgatcataatcaagctgataagtctggaccagaggaatccaattcagatggtgttgatgcctctaaagtgaccccgctatctccagcaactttggctttgatgtgcgatgaacaagacactatcttcat

SEQ ID NO: 137685 - DNA, 308 bp, Arabidopsis thaliana
ctctcctcacctatttgatggcattagttttgtttacgattttaaaattacaggtcgacttcacttaaaaggaagagaaaactttcgtttatgttattacatcgtattaacgcggttgagtttacaacatcaaaagtgttaatatataaaaactcatcgtacaaccctatctatacggctctcccatatttaattaacaaaaatgaaaactaatatatagtacaaaatatgtttattcgatacatcggcaaggcaagtacaatcatataattatagaaatcaattttatatttaaaaaacataaataa

SEQ ID NO: 137686 - DNA, 221 bp, Arabidopsis thaliana
actagttctagatcgcgagcagccgccctttttttttttttttgacaatatgaaacctctggacaaagggagaaaaaaaggagaaattcttgaaattcataacagacaagcaggcactcaaagacaacttacaatcccacaatcctcagatcagtgatatttggacaaactgacaacgcatcgcataaggacctgtattttataggtctgagattgtaaag

SEQ ID NO: 137687 - DNA, 350 bp, Arabidopsis thaliana
gccaaaaccatcggtgtctatttgattgaacattgctacatccaaatccaagccttcgttgctgcattggtctactattctcacagttactgcagcatttgttcttgtgttcttcacctgaatccatttatacccaccggttaatcacaatttttaccggctatacatcttttgaaatatttcactaacacgttgacgttggtaaatggtaacaaattttatcttgtattcgtcttaattccaacactttctatatgatctccttttgcacaaacatacttatataaagatttgagaaaaagataattaattaacttacccttaaacacttgccgcaagaagcttgacca

SEQ ID NO: 137688 - DNA, 204 bp, Arabidopsis thaliana
cttcaagcttgctaatgaaggtcgtctaaagcctagagtctgaagttaagagagtttcatttctcagtttgtttgttggtttatatcaaaaacaatcttaattaattatcttgtcatttgtgttgctcagtagaatttgaagtgtcctatagtctctagtaatatttatgatggatacttccttttatttaatgttgttgtttc

SEQ ID NO: 137689 - DNA, 194 bp, Arabidopsis thaliana
tcttaagccgttcttctattttcttgagattctctctagtgaatttgagctcttcttggttagagagcttgaggacgtttttaattgtggagagaggagtttcctgagttttggttaatctgatacgttcaagaacacttaacacttggggtacactctctttcgttgaatcttcaccgttggatccatttccc

SEQ ID NO: 137690 - DNA, 413 bp, Arabidopsis thaliana
cgtctttattttcgctgtccctgatcattcgccggagttatcgttaagagactgagattcaatcatcagagttcaatggatgtccccttaccagtcgagaagttatcttatggatcaaacactgaggacaaaacttgtgtagtgcttgtggcaactgggagtttcaatcctcctactttcatgcatttacgcatgtttgagctggcgagggataatttacactcaaaaggatttcatgttcttggaagctatatgtctcctgttaatgatgcatataagaagaagattctgtgtagggacttttatctgcagaacatcgtttagagatgtgtaatctggcctgtcataactctgactttgtaatggatgatccgtgggaggcatctcaaagcagctaccaacgaactttggcg

SEQ ID NO: 137691 - DNA, 408 bp, Arabidopsis thaliana
catattttgggatatattcaattaattatttaattttaatcagtattggtaatatttttaaacaaaaattataacaactttagtttttgttaaaaatcatctaaacctaaaatcatttacagaaactgaactaaccctataatattttagcctagtgaccaatactaacatccaccttgcatcgaagtactgtatcaaaccaaatctaatattgaaatggtcaaggagaatccatttattagtggaccttcataatacaacaaagaaagaaagaaaacgaaactcaaagagacaaattaaaagagtcaaagttcaaaatatgtactctttattttattgtgtttaataactttgtatttattataaaccaatccatatatatatacacatagaccatccaccattttc

SEQ ID NO: 137692 - DNA, 134 bp, Arabidopsis thaliana
ctctgattctcgtatagacacacacatacctatacatacacactttaacactgatatctgtagagtatagccatgggagaaggagaagcataagcagagcacgcagccaaagcagatcacaagaacgctccctc

SEQ ID NO: 137693 - DNA, 356 bp, Arabidopsis thaliana
aggcactgatgttgcaatcaaaaggatcaatgatcgatgttttgctggcaaaccatctgagcaagaacgaatgatcgatgacttttggaatgaggcacagaacctagctggcttgcaccatcctaacgtcgttgctttttatggggttgtgctggattcacctggaggttctgtggcaacagttacagagtatatggtcaatggttctttacgaaatgcgttgcagaagaatgttaggaattttgataggtgcaagcgtcaactgatcgcgatggacattgcttttgggatggagtatttgcatggaaagaagatagtacactttgatcttaaaagtgacaacctgctcgtcaatc

SEQ ID NO: 137694 - DNA, 258 bp, Arabidopsis thaliana
aatgtgtctcttctcatcggagcaattctctcatggggtgttatgtggcctctcattggtgcccaaaaaggcaaatggtatgctgctgatctctcatcaaccagtctccatggtcttcaaggctacagggtgtttatagccatagctatgatcctcggtgatggtctctacaacttcatcaaaatcttaggccgcactgtcttcggtctatacaagcaattcaagaacaaagatgttcttactatcaacgaccataca

SEQ ID NO: 137695 - DNA, 426 bp, Arabidopsis thaliana
ggatccgacgcgtagatggctccgtgtacggcggtgctttgacgacggagctaaatcggagcctccgtgtcgtttagcaccaccgattatggagacacacgcacctatgtttctcctttttgttgacctcaaaacaaagtacacaaaaaaaaacagagcaaaaacaaaatctgtgtctttctctatctttttcttctagggtttgttcaaaagctttttcaggggtttcgctgtgaaatccaaaaatgttgtttctatgaaatcttcttctttgaagaaaggaagaagaaagagacaacaaaacctaaaaatggagtctttgattggctaattttgccgcgctgaattttcgttgtggttagtttgaagaatctttgatgtcaattagatattaaacaatttttttgaagcttattattctacaca

SEQ ID NO: 137696 - DNA, 165 bp, Arabidopsis thaliana
ctgaaacatgctgacatggctgcaaaacttgctgtagtggagtatgatacaaagaatttaggacaaccgatattaactgtcgaagatgcaggtaaaagatctagctttttcgaggatcattcgatgttttacccctaaccagttggtgatgttataaaaggaatg

SEQ ID NO: 137697 - DNA, 374 bp, Arabidopsis thaliana
cataaatcatatcggcccatgaaaccaagtgtgtgtacttatgtctgtactctttgaccatttcactttcagtgtgattcatgcgtctatagattcacactcgggatttcattcaaagtccatagataatttaaagaatcttaaactaaaagttgacaaaacaaagcgataactagagaacagagaaggtcagatagaaagctaaccagtaactaaaccaaattaaattttaacagatatcttatgatcttggaataggccactacctctcagtttagcaaagcagatgtcatcaaagtttccttgccgatctggcatgatactcatgtttcatgaggttggctcttaacagcatctgcctgacatctctatcg

SEQ ID NO: 137698 - DNA, 376 bp, Arabidopsis thaliana
ggaagagaagaccgaggatagattctgaccaagaaacataacttcctcctctgcattatccctgtcggtgaaccctagtttcggctcggcctgttttgagactaagcaaccgtgatcagacgatggacggctaagattggcattgagaagattgacggtggtgatgtcgtgaatgctaggccgtcgtttgtctttcgcaccggaaagctgtctttggtagtacttttgggcatgacttgcaacctgagttggtgtttttgatcccacaaagttcctcgatatgtttctccaatctcctttcccatacttgagaagccctaacaagaatctcctgcagaaaacaattaaacaaggtctcagcaaaccaagaaaacaa

SEQ ID NO: 137699 - DNA, 389 bp, Arabidopsis thaliana
gaggaaccgttattcaacatgagctccgggcgtttagaggcatcactagacagagtagaggccattgtaacccattcagattatctatagccaatccgtacctttcgtgtgcaaacgaggacgagatcttgcattatcagaaggcaaacatgtgaaagcacaagcactttggtgttcacaaccaaaacataagaatgtccataagattttgcttcagagagatatgctgaaagcacaagcactagtgggtagtttcatcagttattatactatctggtaatcactagtttgatggacgttcatacaatgcatctaaagaaatgtataatcgttggatcgttgatacaagttaggttagataatgtatatgccaaatctagtatatggca

SEQ ID NO: 137700 - DNA, 374 bp, Arabidopsis thaliana
acccaaggaaaatgggaacaaatggagcttgaatccgtcttcactgacaccattgatcttcgttaggttgcagagcctatcgaattcatcaaggtggtcgagtggatcctccattggcaaaccatggaatttgttcccctgaatcatcgagatgagaccactcttaatctcgaagttgttattctggatagcaggaggtgcgattcccttcctctgacggtgatcacgtggtgcatctccagcaccaatgttggcatggccattttgctgattctgttcttcagccataacgagtggttgctgaggtacagggttgactgtggttctcctttttctgatttcgcgggctgtgcggttgatattgtcgttgaaaa

SEQ ID NO: 137701 - DNA, 241 bp, Arabidopsis thaliana
ttctccattaactattcatcgaaattcgtattcccctcaaataatatcaactttactcttattttgagtcgtaaaactaatcttaactgtttcttaaatagtgagtttgatttcgtcgtatgtcgtatcctaaatctatactttttttttcttttaaaatgaatattaccaccatttctttataaaccgttggcttcatatcttaatgactttgatcaaaaaagaaaaatatacccacaat

SEQ ID NO: 137702 - DNA, 356 bp, Arabidopsis thaliana
caactatttcgccattgattgcccgcggtcattaaatcaaagataagcatatgaaagaaattcaatgggagattcctctactttctcctgaggaagctaatcttgccatactactcattcactctctttcgtattatcctgccaatgactatgttagtacccgaagctgagctttccgcttgggttgcttgctacatacctgccacaatgtctgtcctcaacatccttcccgccccgaagtcgtttccgtttatcgtcccgtaccttctctttgagaacacaatgtctgtgactaagttcaacgcaatggtctcaggtttgattcagctaggaagtgcttatgaatgggttgttac

SEQ ID NO: 137703 - DNA, 180 bp, Arabidopsis thaliana
gtttaattttcggggcaacatggagtttccaaatcgcttgttttacttcagtcgatccaggtgggggttgtattgcctcctcctcaagaagatcctcatgtgttgcaacccaataacccgagcgaactgtatattcggcattttgagtgtaatcccattcaaacgtatcctcttccgcat

SEQ ID NO: 137704 - DNA, 412 bp, Arabidopsis thaliana
gttggatacacataaatgattttagaaagttaagatatctggattcacataggacatacagctatcatggtcaaatacataccacgtcccaacaatatgcgcaagaatcaccagctgctgtaaatacacttcctgactatcaaaacgaaagaagtgagagagggtgaaacagttatcctgtgagactgtctaaccaagcaatgaaacttaaatacaattccaacctgaggatcaacagacatggcattgatctcaggcatcggtgaaagcgcaccccaaggacctctataagaaaaagaatggtgattatacacacaactattacgaacactgacatttgaacccacaattatagcattttcagtaacagagttatcaagtagaataaaaaatgaacaaaactcatactcac

SEQ ID NO: 137705 - DNA, 336 bp, Arabidopsis thaliana
ctactttcttgtacaaatagaattgtggcttaaacataaacaaatgtcaaattaccttcatttgtgtattcttgtttcactgtttgcaaaattatgaaaggaccatccctatttctctacagaaaaaataacttaatagtccattacgacatgaatctcggttctttgagatcataccgggaaatgtttttcaacatcatcattcacaagatagagcttaaggagcatccaaagaaatcgcaacaatcttccaatctagctctccttcatcaatcatagccaaaagcagctaaaggcttaacctttagaacgtcaccaatctcaacaacatcaact

SEQ ID NO: 137706 - DNA, 406 bp, Arabidopsis thaliana
gagaattattgtgtacagctatatcatcttctcaatgaccggggaatttcagagattcaagttgggtagagataccatcaaccaggagatgagatcacagttgtggtgacagcggttgctctctccctggatggctcagtgatgagtacaaccgaggtgaaacttccggaagatggaataggaggcttagtgtccctcaagttttgggcgtctgaaccagacagcaaaactttcaccttatccacaatcgtatatgaacctcatagggatgccggtgtctcagccattgtgttccaccctacccgctccatggcagtgagtacatcattcggtggtgacttcaagatttgggtatgcaacagtgacaagaaccagacggataaagactctagctggatatgtcacg

SEQ ID NO: 137707 - DNA, 365 bp, Arabidopsis thaliana
gttttcttcttccaattttggatctctcttccttttgatctgattcgttacttgctctatgttggttcaattttgaattcttttgatttttgattgtgtgggggagatggggcaatgttacgggaaggttaatcagagtaagctaaatggggaagaagaagctaacacgactacttatgttgtttccggcgacgggaatcagattcagcctctaactccggttaattacggtcgagctaagaacactccagctaggtcatcgaatccgagtccttggcctagtcctttccctcacggatcagcgagtcctcttccttctggtgtttctccttctccggcctgaactttcacttcgaggaggtttt

SEQ ID NO: 137708 - DNA, 295 bp, Arabidopsis thaliana
gttgtatactcctatgaaaaaaacaaaaatttcaattttcaaattctgaaaaacaaacaaacatagttttaagctttttatgtctcttcaacatatgaatcaagtatgcatgtgaaagaacaaaatcaaagataataactccaatataacatattctaaagaatctaaaatgactttaacttctccagaattagcaccttttaactcttttcacttttgtttttaacgactcaatagatgttcataaagcaaaatattagcttctaaaacttataaaggctatatagatcttact

SEQ ID NO: 137709 - DNA, 402 bp, Arabidopsis thaliana
atttttgtttattataataggaggtgaataaaaggattcacccctataaatgaatctgagtattgttgaaaaaaacgcaaatagagtaacagaagttgcataatgttttagcaaaaactactccttacatctccataagaataacaaagatattattaaaaaaaatcaagcagaagcaaataaaaaaaaagaggattatgtaaaaaagggaaatgatcatcttcattagcttccctttcggctccatggaggaaaacagcaaccctacacataacaacgtcaattgtaaaaaaagaggatttatgaaagaaagggaaatgatattttggttatctaccttgggactagaaggtaatggttgatgatgttggtcgatgatgggtcgagtcggggtgctatgat

SEQ ID NO: 137710 - DNA, 387 bp, Arabidopsis thaliana
caaaacatcatttaccttcttttagatttgttgttttttaatcagttgaatcggaataaaatatcgcatcagagatgagtaacgagcttctcaccatcgatcctgtcgaccttcaattcccttttgaattgaagaagcagatctcttgttctctctatttgggtaacaagaccgataattatgtcgccttcaaggttaagacgacgaatccaaagaagtactgcgttaggcctaatactggtgttgttcatcccagatcctcttctgaagttttagtgaccatgcaagctcaaaaggaagctcctgctgatctgcagtgtaaagataagttcttgcttcaatgtgtagtcgctagtcccggagccacccccaaggatgttacacatg

SEQ ID NO: 137711 - DNA, 311 bp, Arabidopsis thaliana
ctccttcctcggctgtaacaagatagagaagaagatgaatatggaagtggatacagtaacaaggaagcctcgtatcttactagctgcaagtggaagtgtggcttcaattaagttcagtaatctctgccattgtttctcagaatgggctgaagtcaaagccgtcgcttcaaaatcatctctcaatttcgttgataaaccttctctacctcagaatgtgactctctatacagatgaagatgaatggtctagctggaacaagattggtgatcccgttcttcatatcgagctcagacgctgggctgatgttatga

SEQ ID NO: 137712 - DNA, 384 bp, Arabidopsis thaliana
  unsure (1)..(384): unsure at all n locations
gaaagaaagcccacccgggaatctccgacccgaccgagaaatgggatcgtcagcgaatacagaaaccaacggcaacgcaccgccaccgtcgtcgaatcaaaagcctccggctacgaacggcgttgatgggtctcatcctcctcctcctcctttaactcctgatcaagctattatagagtcggatccgtcgaagaagaggaaaatggggatgcttcctctagaagtgggtactcgtgtgatgtgtcggtggagagacgggaaacaccatccggtgaaagtaattgagcgccggcggatacataacggcggtcaaaatgattacgagtattacgttcattacactgagtttaatangaggctggatgaatggactcagctggacca

SEQ ID NO: 137713 - DNA, 396 bp, Arabidopsis thaliana
ctaatctatcacaaacccttccacattgcttttgtcagtctgtaaaattctctttgaatcagtgaatcactcacttaaatccaaaacagtttttttttctttctttctttatttgcttgttgtggaatcaatagctgtctccgggaaaattcgttttttttctccttcgggatctctttttttttttttttggttttatttaataattatccccgagccaacatttattgtcgattcggtttatttcgtctccttcgtcttccactcttactagtgcatgctctgaatctgtatgtaatgggagttcaacagtctggatccattatcctagccgggtcgggtcaaggtctttgagtaagagagacaattcgttttgattcggtgtagaagacatca

SEQ ID NO: 137714 - DNA, 426 bp, Arabidopsis thaliana
cccacgcgtccgcccacgcgtccgcccacgcgtccggctttctctgcccttcaatggattgcctctggaacaaacagcaccattgccctcagtgtgggaacaaggtacttttatatgtcttcttcatgcctgctactcgtgtgcgttttttttttctctgtatggaagattgtttcattcatatgattgatttgtttacaggttgctgactttgagaaatcagatccctgcctggtgatggatccgccacagtggaagcaacctagtttcgcactcccagcatgataagatgcattcttttctcttgtgattaatattgcttgtgaagttgagtcgttctgttgcatgtactggaaaaaaactaagatccagaataaccctatagaatgtgtgagaaatgaaatatttattcttctgtatcgtttc

SEQ ID NO: 137715 - DNA, 425 bp, Arabidopsis thaliana
attcgctgtttgaccaaaaaataaaaaattattgtttcgctgagaaatgtatagataattatattatacgttagattggtaactaccaaaaatattactatatgttagattggtcacaaaataagaaaagaaaggtagtgtatatcaatttattaatgacgtatttaataaagttggtctcaagcgaaatgaattgttctttactgctacaaggcatataatcctgtaaagaaaatctgggtggtcgaattgttcttttccctttttctaatttcaacatcaaaagttgttccaccagaagaatttgttctctgcagcagtaaagatcgatccgttcttgcttacaagcagaaaaatcatatcgacagagagagatgagacagaactcagcaactggtggtctttcatggcggcgtttactgttc

SEQ ID NO: 137716 - DNA, 365 bp, Arabidopsis thaliana
attgcattcagttcctccatgacaagacgattctcgtcaccggtgttcccggtttcctcgccaaagtgtttgtggagaaaatattgaggattcaaccaaaggtaaagaagcttttccttcttttgagagcagcagacaatgaatcagccatgcaacggtttcacagtgaggttttggagaaagatctttttagagtgttgaaaaacgctttaggtgatgagaatctgaaagctttcataacagaaaaagtcgtacctattcccggtgatatatccgttgataatttgggagtgaagggttctgatctcttacaacatatgtggaatgagattgatatcattgtcaatgtagccgccacaacgaac

SEQ ID NO: 137717 - DNA, 283 bp, Arabidopsis thaliana
tcttttgcggaaactttgagtatgatgcccgtgagagtgatcttgagcggcttttcagaaagtacggcaaggttgacagggttgacatgaaagctggtaagtcttggatcatgtttttccttagacatgcgcttagtttttctgtttggttgaattgaaatggataaagaagtctcgtaaaccactaccaatccgatgagcaacaagcgaaattcagtcaaatgcagtgttcttaacatccacttacgtgcgttcattccatgagactctctggaggactgtc

SEQ ID NO: 137718 - DNA, 350 bp, Arabidopsis thaliana
taaggtggtgaggggtaagcggtttacaaaagaagaagatgagatggtaaagaatgctgtattagaatacattgataaccatgctttaggagatgaggggataaagatggttatggaatgcaaggcatacccacaacttaaaggctgttggaaagaaattacatctgctttaccttggaggacttataatagtgtgtatcatcgtgcacatactatatttgaagcaggatctcaggggatatggacgaaagaggatattgaactcgttatggagtttcaaaagacacacgggaatgattggaaaacacttgcagatgcaatgggtaagcacaggaagcatgtgaaagacg

SEQ ID NO: 137719 - DNA, 431 bp, Arabidopsis thaliana
gcggctgggtttatatcattgcttggttgttctgatgatgacataaaagaacttctgcagctgtcgcaggagttcactttagtgcggtacccagaccaggttgcccttgaaaggcttttccgagttgaagatattagagttggggctacttctcgaaaggcgattcccttactagttgaacttcttaaaccaattccagaccgccccggtgctcctctactttcacttaatcttctaactcagcttgctggggactgtccacaaaatatgattgtcatggtagagtcaggtgctcttgagggtctctcgaaatatctttcccttggacctcaggacgagcaagaggaagctgcaacaggtcttttaggcatcttatttagcagtgctgaaattcgaaggcatgagtcagcatttggcgcggtcagccaact

SEQ ID NO: 137720 - DNA, 416 bp, Arabidopsis thaliana
  unsure (1)..(416): unsure at all n locations
cggacgcgtgggatctctacaaagcttaacttacaagctgattcaagcaaagagtcagaggatttcttgtactctttcaaggcgcaacaccttccaccgattgtgttgaaatgtttattaccaaaagcttatccgagccacttaccgccttatttcttaataagtgttcagtggatgaatcctgataagatttcaagtctctgctctaagctggactcgttatggagtgaacagccagggcaagaagtcttgtaccagtggacagattggctacagaactcgtcgatttctcatcttggttttgataatgagattgttcttggtccttatggtgttacatgttccagagataagcgtgctgtgtctggaagtcgttctccggattcagatattccttatattangagttatgacga

SEQ ID NO: 137721 - DNA, 391 bp, Arabidopsis thaliana
cccacgcgtccgggtgaacaaccaagtggctttcacgacagatccaagggcggggagatcttcccagtattgtactgatgttgcaaaggctttgagtgctcccatctttcatgttaatggggatgatgttgaggctgttgttcatgcctgcgagcttgctgctgagtggcgtcagacttttcattctgatgttgtcgttgatttggtttgctaccgtaggttcgggcataatgagatagatgaaccatctttcactcagccaaaaatgtacaaggttatcaaaaatcatccttcaacccttcagatctaccacaaaaagctcttggaatgcggtgaagtatcacaacaggatattgaccggatacaggaaaaggttaacaccatcctcaat

SEQ ID NO: 137722 - DNA, 383 bp, Arabidopsis thaliana
accagatctagtggaagctatgtagtctcgattctgtcttaggctaatattaggttgcctttggttgggtaatttagtctctgctcatagtttgtccttggttttgctaagtcttggctcgtttgtgttaattttcctagttttaggtttgttttgttgcgtttaaccaattgaattagctaagctcagagatccttcttggtttgtgttttgcgcaagtcagtttctctctggttatggaattgcctttatgtcctttgctcttctgctttgctgggtcctcttgggcgtttggtggttttgtttttggctaggttacgggttgtgcttgtcttttggatggtgtttcgttgcagcgtcatctacaagctcctttctagctt

SEQ ID NO: 137723 - DNA, 327 bp, Arabidopsis thaliana
cccacgcgtccgtgacatcctcgccgttgaagtctggcaggaggattgcaaagagtggagacgtatgagaagagtgtttggagcggttcatgatttgcagaatccacctagaggcactctcacattgaggttcttagtctacggaagcgcaggaatcaattggatccaatcgccaaacgctattcccgctgattggactgccggagccacctacgactccaacattctacttacttaattgattcacttttcatcagtgtgtttttatcatatagtatttattatggtttctgtatgcaatggctaatatatttaaataatgccctc

SEQ ID NO: 137724 - DNA, 186 bp, Arabidopsis thaliana
cccacgcgtcagcgaagcttagattgcagcccgattttcacggcgattttcgcggacatgccagtcatgctatcagtccagagtttaaagcagtgtgagaacctggtgagagttgttgtgtgagttcacatgtcaccgcacacgaatctggatatgtgactggagaactgtgaaaaattcggggac

SEQ ID NO: 137725 - DNA, 368 bp, Arabidopsis thaliana
cccacgcgtccggagctcggatggggatgaagctttgcaggagcttttatgactcatggattcagatcctggttgatggagaaccaagttaaagctgatgagcatgtggttacagtaaagattgcctaagtgaaaagaaaggagaattgagtcttcatcttcaatagaccaaggttagtaagcgtgaggaattgcgtgcaatattttgttcgtgtgtgaagttcaaagaaaacgtttttggcaagatcagatgaaaacatgccgtcttagtctatatggcggggcagttgctcacgtttagttgtctccctcgtttgggttgtcgtctccctcgtttgggcttaagcttctcttcctcgactatatta

SEQ ID NO: 137726 - DNA, 348 bp, Arabidopsis thaliana
ctgagagctaaaggagagacatacgaagagattgtggggttagctagggcaatgatgaagcatgccaggaaagtggaaggattagttgatgctgtggacatagttggaacaggtggtgatggagcaaacacagtcaatatatcaactggatcttcaatacttgctgcagcttgtggtgcaaaagtagcaaagcaagggaatcgttcaagttcttctgcttgtggaagtgctgatgtactagaggcactaggagtggttctggacttgggaccagagggcattaaaagatgtgttgaagaaggggggatcggttttatgatgtcaccaatgtatcatccagctatgaag

SEQ ID NO: 137727 - DNA, 291 bp, Arabidopsis thaliana
ggagaagaagccagaaacaccagttttacctgagtgttgcagcacggataaatttcggggctgaaagtgaagcttctgtgaggtacccggatgatccgtatgatagaatatgggaatctgatttgcaaaagaagcctaattatcttgtggatgttgctgctgggactgtgcgagtgtcgactacattgccaatcgaaagcagggtcgatgacagaccgcctcagaaggttatgcagacggctgtggttggaacaaacgggtccttaacttacagaatgaacctagatggct

SEQ ID NO: 137728 - DNA, 421 bp, Arabidopsis thaliana
cccacgcgtccgtctgaatcttctacttctccttctactatctccccacttcttgataccttgtaatccatttcagcgattagatataatcaaaactttttcaacttgtagtggccaaattttttgtttaatggttgtaaagatatcgaaaaagttttttgatgttaaagataaagaaaaaattgatttaccacctggtttcagatttcacccaactgatgaagaacttataacacactatctaagaccaaaggttgtaaactcttttttctctgctatagctattggtgaagttgatctcaacaaagtcgagccttgggacttgccttggaaggctaagcttggggaaaaagagtggtacttcttttgcgtaagagaccgaaaatacccgactggtttaagaacgaatcgtgctactaaa

SEQ ID NO: 137729 - DNA, 342 bp, Arabidopsis thaliana
cttatacaactgtattacctaccgttacacttcaccagcagttgacctcaatagagtcaagctggataatcggagggctcttgcttgcttcacagtattttcttatatccgtctggtatattcttcagactcgtgtcatggaggtttaccctgaagagataaccgtagtcttcttctacaatttatttgcaacactaatctcagtaccagtatgtctttttgcggagagcaacttgacttcttgggtgcttaaaccagacatttccctcgctgcaatcatatactcgggagtcttcgtttcattattcagcgcgcttacccacacatggggtctgcatctga

SEQ ID NO: 137730 - DNA, 405 bp, Arabidopsis thaliana
gatatctgaaacgtgtctctttgactgacttcaatcttctttatcacttaccgtttctgggttttatgaagcaactgagctaatagaaagcttcttcttagactcggaagaagataaaaaacagaatctttattgtttaaagcttccaaattcgagaagagaatttgaaacgaccaagttcaggatattcgtttcttcgtctactttggtctcttcctcttctctttcgaaaagggtttattctgtcttaaaagaaacctttttgagagggtaaaaaaagcttcaattttcagagaaacacaaaaggcagagacagagaaaaagatatcatcgaattcatgaaacagggttcaatgaatagatcgtgtctctgtaatgtcgtaatcaccactgctctgatttgtg

SEQ ID NO: 137731 - DNA, 193 bp, Arabidopsis thaliana
cactactggttccaagatttgtgtcctcagtcaatcttactataagcagctctgagtccacagggtcgtagtatgctcacgtacgttactatgtacatgtaacaaagatatgtggtcactatacatatggttcatgagtgacgactgtataaatacttgtttaaattataatcttttgggtcaaattgagaat

SEQ ID NO: 137732 - DNA, 334 bp, Arabidopsis thaliana
  unsure (1)..(334): unsure at all n locations
agacactaagcagttgattgcttatgctcgtgctaataataaggttattattggaccagctactgttggaggcgttcaagctggagcctttaaaattggtgacacagctggaactattgacaatatcatccaatgcaagttgtacaggcctggatctgttggctttgtctcaaaatctggtggcatgtctaatgaaatgtacaataccattgcccgtgtgacagatgggatctatgaaggcattgctattggtggggatgtgttcccgggctcaactttatctgaccatatcctgcggtttaacaacatcncacagattaagatggtggttgta

SEQ ID NO: 137733 - DNA, 383 bp, Arabidopsis thaliana
gagaaaacaaatacataatcggagaaatacagattacagagagcgagagagatcgacggcgaagctctttacccggaaaccattgaaatcggacggtttagtgaaaatggaggatcaagttgggtttgggttccgtccgaacgacgaggagctcgttggtcactatctccgtaacaaaatcgaaggaaacactagccgcgacgttgaagtagccatcagcgaggtcaacatctgtagctacgatccttggaacttgcgcttccagtcaaagtacaaatcgagagatgctatgtggtacttcttctctcgtagagaaaacaacaaagggaatcgacagagcaggacaacggtttctggtaaatggaagcttaccggagaatctg

SEQ ID NO: 137734 - DNA, 244 bp, Arabidopsis thaliana
agcaacgataccaatggaaaaaagagagagctaaaaacaaccttaaatacttattagaagctccaacggtcgagttgttgctgttacactttccgcttgatttagaacttgtaggtctctttggaatgttataaaaaggacctcttcggcttttttgtattaatcaacagctacgtacaaataagccgaagaggtcctttttatacgtagctgttgattaatacaaaaagagaactcttctcgc

SEQ ID NO: 137735 - DNA, 398 bp, Arabidopsis thaliana
ggcgggtgctgcagctgcttcgtatcctgctggtggagctgctttgaaatcttcaagtggaactgcttcgaagcccaaagagacgaagaagaggaaacaggaagaaccatctacgcaaaagggtgcaaggaaaagcaaaatagatgaggaaactaagaggaatgacgaggagactgagaatgacaacacggaagaagagaatggaaacgatgaggaggatgagaatggaaacgatgaggaagatgagaatgacgatgaaaatacagaagagaatgggaatgatgaggagaacgacgatgaaaatacggaagagaatgggaatgatgaggagaacgagaaggaggatgaggaaaacagcatggaagagaatgggaatgagagcgaagagagcgggaatg

SEQ ID NO: 137736 - DNA, 341 bp, Arabidopsis thaliana
cccacgcgtccgccaaaaggaagtctttacgacgttctccacggtgttagcccgaaagaaaatgtgctagactggtctgcacggtacaatgtagcacttggtgtcgctcatggactagcctatctacactatgactgccatcccccgattgttcaccgtgacatcaaaccagagaacatactcatggactcagatttggagcctcacattggggatttcggtttggctcgccttcttgatgactcaacggtttcaactgcaactgttacaggcaccaccggctacattgcaccagaaaacgctttcaaaaccgtgaggggaagagaatcagacgtttacag

SEQ ID NO: 137737 - DNA, 421 bp, Arabidopsis thaliana
cccacgcgtccgttcaccaccagcttctcaaagctttagcctcgagagcaaaattctctcaagctttagccatgtctgcctctgcttcttccctctctgctttcaatcctaaatcccttcctctctgcgtctccagacccgcttccgtctccgtcttacctccttccctctccttcaaacttcactccgaccacctcgtctctatcttcgcttcctccgccctcaaatgctcatcccccgccgagtacccgtcgcgtttcgttagaaacgttgctgtatcttcggattttgaggtggaggaagatgatatgttcgctgacggtgacgattcagcgcctgtggagcgtaactccttctctcctgaccttaagctctttgttggtaacctttcttttaacgttgatagcgctcagcttgctca

SEQ ID NO: 137738 - DNA, 337 bp, Arabidopsis thaliana
ggacttgtctccaatatccatcactcagcccaagaacagaagcccggtctatgagccattgctatcagattctccaaacgcaacacgacgctcatttggccctggaactccattcgagtttttccaatcacagtcaagattatcatcatcctctggttataccagaaactgcaaagacaactaaaaagctttttaattttttttgtttctttcaaatttttacggttccgtgacgtttgtgacttttctgatctcaatggtaaatgcagtccaagtcgcgggtattaacaagaacttgatttatacagcagccaagaaaacacattgtcttgtctgc

SEQ ID NO: 137739 - DNA, 323 bp, Arabidopsis thaliana
gaagtggttgattaaataaaaatggagataacaaacgtgatggaatatgagaagatcgcaaaggagaaattaccacagatggtttatgattactatgcatctggtgctgaagatcaatggactcttcaagagaatcgaaacgctttctctaggattctatttaggcctcggattcttatcgatgtaagcaagattgatgtgagcacaacggttttagggtttaatatttctatgccaattatgattgctcctactgcaatgcagaaaatggctcatcctgatggcgagcttgcaaccgcgagagctacttctgctgctggaac

SEQ ID NO: 137740 - DNA, 395 bp, Arabidopsis thaliana
tttatttattaaccagccctctctcttcttccccaaatctccattttctctgcaaatcccaaatccatcacaaaccctaattttagtctctcaaaatctccaccgtttctaccaccgtcaatgtggcggccgtggcgtaaatcgtcggttaagattcacgacacatactctccaaccaccgcttccttcaaagacattcaccatctctgctccgacgactcaccttccttcccttcttctccctctccatctccaaaaaccgcttctagagtcttccaccgagtccgtgcagctaatttgatcctcaaatcgtggccaactcgtcaatctaatcacctcctccgcgcagattccgaacctatcaatctaagccggaatcaagatccagaatcaga

SEQ ID NO: 137741 - DNA, 429 bp, Arabidopsis thaliana
ccaaaggctatcatcggaaactgagggaacagagatcattcatcgccgcggttgatatagagaaagatggggaagacaattcaagtgtttggattccctaatggtgtgagcgcagaagaagttaagaagtttcttgaaagactcactggttcaggcactgtttacgcaatcaaagttagacaaccaaagaaaggtggtccaagagtctatgccattgttcaattcacatctgagagacatacgaggctgatcatcactgcggcagcagaacgtctttactatggaagatcttatctcaaggcttttgaagttgaacaagacattgttccaaagccaagagcttcattacacaccatctctggtttaaagatgttctttggatgtcaagtctcgactaagaagtttttagctctatggagtgctcaagat

SEQ ID NO: 137742 - DNA, 203 bp, Arabidopsis thaliana
attttgcaaaggttgaaaagcgtgttagaacaactggtggtggtagcacaggaacggttaggaatctgcgtatcagagaagacactgcaaaatacctgttgaacctcgatgtcaactcagctcattatgaccctaaaactcgttctatgcgtgaagacccacttccagatgcagatccaaatgacaagttttatctgggagat

SEQ ID NO: 137743 - DNA, 227 bp, Arabidopsis thaliana
tttgaccggttactgtttgtactccatgggctgttaagcaatcaccagccaaaatggctaaagccaaggccttcctctaatgaatcatccagagactttaccttgtttgatcgcgatgcagcagatagcttacagaatgagctttcgcggatgcagttaccagacaccattagatggcggatccaagcagcgatgccaatcctccttccttctctacgctgttctct

SEQ ID NO: 137744 - DNA, 363 bp, Arabidopsis thaliana
agaaattatgaacgcaaattcaaattcaactatgatcgaattctaaacacaattatgaagtaacgacgatgaactcgaggctttgtcatttggggacttcgatggatacgattcgctgcgattccgatatcttctgatctcctacttcctcttgtacactgggaagacacgattcgggtatctgtaacagtaacttgaatctggtaagatatggacaaaatcaatggattgcctgatgatttgctggtgaagattttatcgtatgttccaacggatattgctgtatccactagcattttgtctaagcgatgggagtttctttggatgtggttgcctaatctcgactacacttctcggtggtgt

SEQ ID NO: 137745 - DNA, 378 bp, Arabidopsis thaliana
  unsure (1)..(378): unsure at all n locations
gtgtatgcattcggcgttgttctcctcgagttactttcgggaagaaaaccgattagcagcggatgtccaaagggacaagagagtctagtcatgtgggccaaaccaattctagatgatggaaagtattctcagttattagacccgagtttgcgggataacaacaacaataatgatgaccaaatgcagaggatggcgttagctgctactctttgtattcgacgtagtcctcaagctagaccgaaaatgagcatcgtattaaagctacttaaaggtgatgaagacacgcttgagtgggcaatgcagcaagtgaatagttcatcagaggagtcagagatgctcanagatgagcaatgccaaagatctaacttgcaatcacac

SEQ ID NO: 137746 - DNA, 230 bp, Arabidopsis thaliana
  unsure (1)..(230): unsure at all n locations
gagagtgatgtgattatttgaagctggacagacactaacacaagaagctgaaaatganaagccaaaaaatccctcagatttgatgctttgcttcaaaccgcttgtttgaatttgcaaatctctcacacatgtattagtaatttaatcagcgagtgaaataatagagtttcagaagagtaaaatgcatgtgaatagatctgattatttatggtaatgtgagcattagagtt

SEQ ID NO: 137747 - DNA, 368 bp, Arabidopsis thaliana
attagcctaccctttttccttcctcctctccgattcttcctccgtcagtaaaagaaaatcaaaatggcttcacacattgttggatacccacgtatgggccctaagagagagctcaagtttgcattggaatctttctgggatggtaagagcagaagaagctcaatctcccaatcctaccaaccacaaccattggatccttcccacagactgtagagctcaggagagttcgtcgtgagtacaaggccaaaaaggtctcagaggaggactacgttaaagccatcaaggaagagatcaagaaagttgttgacctccaagaggaacttgacatcgatgttcttgtccacggagagccagagagaaacgacatg

SEQ ID NO: 137748 - DNA, 279 bp, Arabidopsis thaliana
atcattatcctcggcgtattcataccctgggcaggatctcctttattcccgtctccaaacaaactctctccttctcatcccaaatggcgcgactattccctccctcaaggtgtcaaattcgtaactaagaacgggactgtgatcgtatgcgccgttagctatccttacatgccgtttctcaacaattggttgattaatgtttctaaacagaagcatcaggatcaagttcacgtcatcgctgaggattacgctactcgctataaagttaactacaaatgg

SEQ ID NO: 137749 - DNA, 273 bp, Arabidopsis thaliana
  unsure (1)..(273): unsure at all n locations
aaaaaatccgcaaagtcgtcaaatttcacagcttgattctctctcaacccaaccacacaatcgcaatctctcttctagacacgctcgctcgtcgtctaggtctcggcttcaagcaacacgaaccaggtgcttttctcctcaagttcccacacgtgtttgagatatacgagcacccagttcaaagaatcctctattgtcgattaacccgtaaagctttggatcaaatccgtcacgaacacgaagctgttctcgaccaaatacncgacgccgtga

SEQ ID NO: 137750 - DNA, 274 bp, Arabidopsis thaliana
agacaattacatgagagacgtcgcctgagtatggcttatgatgtggctaagggaatgaattatcttcacaatcgcaatcctccaattgtgcatatagatctaaaatctccaaacttattggatgagaaaagatatacagtcaaggtttgtgattttggtctctcgcgactgatggccatcacgtgtcattcctcgaagtcagcagctggaacccccgagtggatggcaccagaagtcctgcgagatgagccgtctaatgaaaagtcagatgtgt

SEQ ID NO: 137751 - DNA, 287 bp, Arabidopsis thaliana
agatagttctagatcgcgagcggccgtcctttttttttttttttttcaaaggtcttcaggctaaactttctgaacaggaaggtattaattcaaagcttgcggaagaactcaaggagaaggaacttctggaatccttatcaaaagaccaagaagagaagctgagaactgcaaatgagaagttggctgaagttttgaaagaaaaagaagcgcttgaagcaaatgtagcagaggtcacaagtaatgtagcaacagtaacagaggtctgcaatgaactagaagagaaactg

SEQ ID NO: 137752 - DNA, 231 bp, Arabidopsis thaliana
  unsure (1)..(231): unsure at all n locations
aacatanaccctacacatcgtacaaaggtgaagagaaggcggcagctttaccagcttaacagtggctgaagaacacgagatcgtcgattccctgtcagcggaagtgaacccagaccagaaagtggacatggaagtcgaaaccgcgaccccgaaagccgagaccggcgatgagaaacgtgagagagaggacacagacgaacaagagaacggaggtgaatcgaacaagcagaa

SEQ ID NO: 137753 - DNA, 243 bp, Arabidopsis thaliana
atgcttttcatgcagcaagccatcaaagggctagttgatgaattccgcattcctgaacgagaaaatcagaagctgaaggagttcataccttcctggaggtttgctaatgggatgtttgctctggttctctcctttggacttcatctgactggacttagaatcagaaatgccagatcatggcggtacggaactggctggctcagaagcttaatatctgactatggtgtaacactcatggtgctc

SEQ ID NO: 137754 - DNA, 400 bp, Arabidopsis thaliana
  unsure (1)..(400): unsure at all n locations
cccacgcgtccgcccacgcgtccgcccacgcgtccggtttgacttgctaatggctcctcctccggcgaagatgcaagagatccaccaattcctctcctccgcactcacccagcgtggcccttccgctcttccatacgccgagaacaccaagtcgctaatccgtcaacacctcctcaacctaatctcttcctacacttccctcgaccccaaaacggcaacgtttacacacaacgatggccgatccgtgattctcctccaagccgacggtacaatcccgatgcctttccaaggcgtcagctacaacatccccgtcgtgatctggctcctcgaatcttaccctcagtatcctccttgcgtttacgtgaatcctacacgcgacatgatcatcanacgacctcac

SEQ ID NO: 137755 - DNA, 424 bp, Arabidopsis thaliana
tctctatctcacaataaagacaacttctctcttttaatgtctctctgtccctctctcttcttcttcatcttctaacaccaattcaagaaagaaggaagcttaagaagagtctatcatcaatcaatggagtttcatcttgaacatcctctctcacattcttcactccacaataacttcaacgacgacacagactatgaaactttaccacactctctcttcctcgtcgagtttcaacacatgccttcttctcattacttccatagcctcaagtcctctgcttttcttctctctaatcgaaaccaagccatttcttcaatcactcagtattcaagaaaattcgacgacccatctctgacgtatcttgctgtgaattatctagacaggttcttgtctagcgaagatatgccgcagtcaaagccctgga

SEQ ID NO: 137756 - DNA, 314 bp, Arabidopsis thaliana
agctggtcctgctgaagtaactgaactaactgggccggatgtcatggaagataagtgtggttctgctgctatttgttttgtttctttcttacctgacattttggactcaaaagctgaaggaaggaacaagtatctagagatgttattatcagttgcagacaagtttaagaaagacccttacggctttgtgtgggtggctgctgggaagcaacctgatttggagaagcgtgttggtgttggaggatatggttatccagcaatggtagccttaaacgcaaagaaaggagcttatgctccacttaaaagcggttttg

SEQ ID NO: 137757 - DNA, 406 bp, Arabidopsis thaliana
atttcgaaaccctagtcgatttcgagatccaaccaactctgctccttatctcagcttgttgaatttgcgaagtatgggagacgctagagacaacgaagcctacgaggaggagctcttggactatgaagaagaagacgagaaggtcccagattctggaaacaaagttaacggtgaagccgtgaaaaaagggtacgtgggaatacacagttctggattcagagacttccttttaaaaccggagcttctcagagctattgttgactctggatttgaacatccatctgaagtgcaacatgaatgtatccctcaagctatcttgggcatggatgtcatctgccaagcaaagtctggtatggggaagactgctgtgtatgtcctgtctactctacaacagattgaaccatct

SEQ ID NO: 137758 - DNA, 409 bp, Arabidopsis thaliana
acggggtcgttattacaagcatttaatgcttggctacagaacataggcagtttcacacaggttttgttttcacaggaacgtcgatgaaatctcggtatcttgtgcacgtacacatgtcggactcaggttttaccgtgaagtagaaaacataaaggggcgttgtttttgttgccgtcaaggtctgacttttagtaaaatcacattaagaagagacgtcggagggaaaaacctccagctacagaacggtgtaatcgtgtaagtgggaatacattgccatgagaacgtctttctcttcagacgctgtatataaagcgcatgttgctgtgtttatgtcgatttttttcaagtaaaattataagtcaaagaattcaattattcactgtattgtctacctttccaagccgaaaag

SEQ ID NO: 137759 - DNA, 412 bp, Arabidopsis thaliana
ccaaaagcaactatctctatctccttcatcgggcgacttcgtcttcttcttcgttcgctgtcagatttttttttaccaaattaacaatttttgagtctccgttgcctctctcagttgaagcgtcttccttctctctatcgaatgatggaggccaaaccaaaaaggaggattgttacagagaatggagatacaggtgaagatttagttcttgcaacattgattggaaacggtgatgatgtaggtcctctcgttaggcatgctttcgaaatggggaggcctgagcctctcgttcatcagctcaaaaatgtggcgaggaagaaggaagctgaaattgaggatctatgcaagactcactatgaagaatttattgttgcagttgatgagcttcgtggtgtgttagttgacgctgaag

SEQ ID NO: 137760 - DNA, 380 bp, Arabidopsis thaliana
cccacgcgtccgctaatttctaatggtacttcttccttcgatgacgtcgcttcttctggtgttcctcttcctctacggcttttctccggttatctccgacggctccgatcaccgttacaaggtcggtgatgatgttcctctttacgctaacaaagtcggaccgtttcataatcccagtgaaacatatcgatactttgatcttccgttctgttcatcagctcctgttaaggagaagaaggaggctctaggggaagttcttaatggagatcgattagtcagtgcaccttacaaacttgagtttttgggtgagaagaactctgaagttgcatgtagaaagaggttgagtagagaagacgttgctaagtttcgtgatgtgattg

SEQ ID NO: 137761 - DNA, 368 bp, Arabidopsis thaliana
gagaaaaggtagacggatttaaacaaggcgacgtcgttttgccagtgtttcatcctcaatgtgaagaatgcaaagagtgcatatctccaaagagcaactggtgcacaaaatatacaaacgattatttatcaaacacaagacgatatggaatgacttcaagattcaaggactctcgtggagaagatattcaccatttcatctttgtctcaagttttactgaatataccgttgtagatatcgcacatctcgtcaaaatatctcctgaaattcccgttgatatagcggccttgctcagctgcagtgttgccacaggacttggagctgcgtggaaagtggctgacgtagaggaaggttccactgtcgttatc

SEQ ID NO: 137762 - DNA, 372 bp, Arabidopsis thaliana
ccctcgcaaggccttataaggaaaggctcgtcaccttattggagaagcggtccatgggcgggaacaaggttcactgggataccagaaatggatgcatcgtatgtgaatccattgggaatggtccaagatgaagtcaacggcacaggagttttcgctttttgtgttctgagaaatttcaatttgtcatacatcaagctaacgccagaaggatcattgaggattacacggaataatggaaccgactggatcaagcactttgagggtccgctaacctcgtgtgatctatatggtagatgtggaccttttggcttgtgtgtgagatccggtactccaatgtgccaatgcttaaaagggttcgaaccaaaatcagat

SEQ ID NO: 137763 - DNA, 383 bp, Arabidopsis thaliana
aatcgattctctggtttagacaaaacagcaatcgagtctcttcctctgtttagattctctgctttgaaaggatcaaaacaaggtcttgattgttctgtctgtttgtctaaattcgaaagtgttgagattcttagattgttgcctaagtgtagacacgctttccacatcggatgtatcgatcagtggcttgagcaacacgcaacttgtcctctttgcagagatagagtctcaatggaagaagattcctctgttctcactaacggaaacagtttcaggttcttgaatcagtctgagattagagaagattcgagcttggagctttacatcgagagagaagaagaagaagaaagaatacacagagaagaacttagtgggtcgtcgag

SEQ ID NO: 137764 - DNA, 395 bp, Arabidopsis thaliana
accacgcgtccgcggacgcgtggggccgctgttaacggagagttatggatctggtggatcttcttcgccgttgtcggagctgacgtttggtgatacggaggaggagattcagccgccgtggaacgagaacgcgttggagaagtatccgtcgtacgagatcgattgggattcgattcttcagtgttcgagtcttgtaaattagatgttgccataggggtattttagggactttagagctctctgcgatggagtttttggtcattgcagagattttattattattaagggggtttgttatgttaatatcaaataagtttatctactttgatgttaattagtgttaatctctgcgtcggtccaagctgtttttttttggcatgcttcgaccgtgtgag

SEQ ID NO: 137765 - DNA, 410 bp, Arabidopsis thaliana
gacgtctcgacggccgaatctcgcaagcctcagacgtgaacttgcccggaccaagcgactccgttgctaagcagaagcaagacttcgctgctaaaactctcaacacattagacctcgtgactcttgttggcggacacacaataggaactgctggctgcggtctagtaaggggaaggttcgttaacttcaacggcacaggacaacctgacccatcaatcgacccgagttttgtgccgctgattctggctcagtgccctcaaaatggaggcacccgagtggagttagacgagggaagtgttgacaagtttgacacatcgttcctaaggaaggtgacgtcaagtcgcgtggttctccaatccgatctagtcctatggaaggatcccgagacccgagccatcattgaacgttta

SEQ ID NO: 137766 - DNA, 407 bp, Arabidopsis thaliana
atcgtggagtaaaggaagagactttggtgttgccctcgatttctagtgatgaattcgatgagtttaggtcgattgttcgatgtcctaatgctcctttgaactattcttcatctgttgatttgcaattccgtggagatttggtgaagaagaagatgaagaaacagagccgtcgtgttcataattgggaaaaggttggttatgaggcggtgattgacggcgacacggtggttgtgtttgttaaaggattgactcgaagacctcacaaggaatcagatccttcttactataagtgtcaatttgagattgagaattcggaggagaaagaggtgactcaagctattgctgctgcgcaagaagttgtgaggtgtggtttgcctgagagtttgaagctaaatccagagatgatg

SEQ ID NO: 137767 - DNA, 403 bp, Arabidopsis thaliana
  unsure (1)..(403): unsure at all n locations
caagactgtccaagaggtggttgcagccggtcaaggactaccggagagatatctccatgcaccaaccggcgaaggcgaaagtcaaccacttaacggtgcggtgccggagatggatattccggccatcgatctcagtcttctcttctcttcctctgtagacggtcaagaagagatgaagaaacttcactcagcactctctacatggggcgttgttcagcttttcttgacaagatttacaagctaaccaagcagttctttgcgcttccgaccgaagagaaacacaagtgtgctagagagacaggtaatatccaaggatatggtaacgatatgattctgtctgataatcaagttcttgattggatcgaccgtntgtttctcactacttaccctgaagataagcgtc

SEQ ID NO: 137768 - DNA, 237 bp, Arabidopsis thaliana
gtttttagaaagaaaaaacagattaaatctgagagagaaaaatataattttagctgacatggatcgttatgtacatattattacataaccggagatctgaacttttgttgtgtgcttttaattttttgcgacttggtttcaccccatgttgtttctctatttttttactactttttttttttttgttcttccaaattttcaatcaataatttggtaatcttcagaattatcttgtcc

SEQ ID NO: 137769 - DNA, 425 bp, Arabidopsis thaliana
gatggccttatctgcaatcggtttcgaaggttacgagaaacggctcgaggtgactttctttgagccaagcatctttcaagactccaagggactgggactccgtgctctgaccaagtcccagcttgatgaaattcttacacctgctgcatgcacgatcgtttcatctctctccaacgatcaattggactcttacgtactctctgagtccagcttctttgtctacccctacaaagtcatcatcaagacttgcggtaccactaagctcctcctctctatcccaccacttctaaagctggctggtgagctctctctgagtgtcaagtctgtgaagtacactcgcggctccttcctctgccccggaggctagccttttcctcaccgcagcttctctgaagaagtctctgttcttgatgggcactttactc

SEQ ID NO: 137770 - DNA, 121 bp, Arabidopsis thaliana
cggacgcgtgggcggacacgtgggctttgggaagcatctaaaatacggtgttcattgatgcttccatcgagatcgacaaaagctaagatcgttgcgttttgaaacgatggcggaagaacat

SEQ ID NO: 137771 - DNA, 391 bp, Arabidopsis thaliana
gttggtgactcagctcatacagttcacccgttggctggtcaaggagtaaatctaggatttgcagatgcgtgtgctctctccaaagctatagcagagggcattgctcttggtactgatataggcgaggcgaatctgctcaaacgttatgaagcagagagaaaacctgcaaatatagcaatgatggcggttttagacggaatccagaagatctactcgttggatttcggaccgctgaatgctctaagagcagctgcattccacggggctcactacatttcgccgcttaaaaagcgtatcatatcttatgcttcaggagagcaatctttgccgctattttcttgaagaatgcgaaggattgttcgctttgttctcaaaatactctgcatcatct

SEQ ID NO: 137772 - DNA, 412 bp, Arabidopsis thaliana
cacaaacatttttcttgaattcagagtttttctgatcaaaagctccctctctctctcaccatggatccgagactacaacatgctgctgaaaccggaagcatcaatgacttttatgctctgattgaggagaatccttacattcttgataacatcaatgccgtgccatttgttaacactccgctccatgtagctgcagcttctgacaacattccatttgccatggagatgctgaatcttaagccatcgtttgccagaaagctgaacacaagtggctacagtccattgcatcttgctgtggaaaaagatcatagagagtttataacatggctgctttggcgtgatcccggacttgttcgcgttaaagggagagaaggaatcacacctttccatctcttagcgattagaggagacg

SEQ ID NO: 137773 - DNA, 179 bp, Arabidopsis thaliana
ctttctttgaattagtgggaccatgaataaccggacctgtgacacttaaaagcgctaaaggtggtagctcaattgatttggcttcacaataatggacttaacatgttggactcaaaggagaagacacacgtttgggaactgtatattcttctgaatgggtttcaaagtcacctttgcct

SEQ ID NO: 137774 - DNA, 358 bp, Arabidopsis thaliana
ctttcttaagtaaacaaatctttagagagagtggaaaaaatgaattcgaagatcatcgaagctttcttcatcgttgctctcttcactacctcatgcctcgctcaagctccagctccttctccaaccaccaccgtcactcctcctcccgttgccactccaccacccgccgcaactcccgctccgaccaccactccaccacctgccgtctcccctgcccccacctcttctcctccgtcttcagctccttctccgtcgtctgatgcccctaccgcttctccacctgcaccggaaggtcccggagttagccccggcgaactagccccgacaccttccgatgcttccgctcctccacctaacg

SEQ ID NO: 137775 - DNA, 353 bp, Arabidopsis thaliana
attttaatgctttgtcctacaaatttattgctgtacttgttgcgagttttgcattagcacgtaacatgcaaagatcagagattgataggcgtatgcaagatgatatcatagcggcaaaccgtctatgcttgggaagccgtgcttggcgaaaactaattcgttacttggcagagatgcgatgcttttttgggccttttggagatggaatatgcagtcctgaacgcgttttctggaaacttgattctatggaaagcttttcgaggatgagacagtctataaggaggaattattctgggactgatcatcacggggcagcagcagattatgacgatcagacagaaacaaaaagtgat

SEQ ID NO: 137776 - DNA, 234 bp, Arabidopsis thaliana
ggttttgctacacactggagcacgcaaaactggctatcgaaaaccacacccacatactcaacttcagggcattcaaggccaatcacaagaatagtcaggggatcaacgttaagaacatcggaagcagaagactatacaagtccaccgtgactaatgccaatgctacgacggagttacctcaacccttgttccatccatgtctattcaaacaaaaacgagtgcaatttgttctgt

SEQ ID NO: 137777 - DNA, 377 bp, Arabidopsis thaliana
gatggctctaacttctcagatgtgcagaggtctgtttctggcagtggagttgcatcctcatattctaaggctaacaacaatgtacctgcgactaggaatcaaaactctagctccaattcgcattacacgagtatgtaccagcctgcatccatgacaggttatgcagctcagggttactacgacagagtgtctccaaacaagtcatatggtcagtatggtagcacggtgaggtctggtatgggttatggttcttctggatatggttcaagaacaaatgaaagaggatggctcaatacagacaacatatatagaagccggggaaggggtaacagttacttctatggaaatgagaacattgatggcttgaatgaactaaa

SEQ ID NO: 137778 - DNA, 305 bp, Arabidopsis thaliana
ctcttctccgttcatcttccggtagatctgccgccaaattagtcaaccgaaaccccaggcttccttctccttcacccgcgcgtcacgccgctccatgtagctacctcctcggccgcgtcgccgagtatgcgacctcttcaccggcaagctctgctgcgccatcctctgctcctgctaaggatgaggggaaaaagacctatgattacggtggcaaaggtgcgatcgggcgtgtttgtcaggtcatcggtgccattgtcgatgtgagattcgaggatcaggaaggattgcctccgatcatgacatct

SEQ ID NO: 137779 - DNA, 391 bp, Arabidopsis thaliana
cccacgcgtccgcagattctgaaaacaaagttatgtcctaacaagacgacgaatccgatgtggaacgaagatcttgtttttgtagctgcagagccatttgaagaacagttcttcttgacggtcgaaaacaaggtgacaccagctaaagatgaagtcatggggaggctgatctcacctttgagcgtatttgagaaaaggttagatcacagagctgttcattccaaatggtacaacctcgaaaagtttgggtttggggctctggaaggagacaagagacacgagctcaagttctccagccgaatccacctacgagtttgccttgaaggaggttaccatgtaatggacgagtcaactctgtacatcagtgacgtgaaacctacggcaaggcaac

SEQ ID NO: 137780 - DNA, 304 bp, Arabidopsis thaliana
cacaaatcttctttatttgttattctcaatccttccttcatccccaggtttctttcgattcgttgagtcattcaatttttccatcactgggtttttctctctgaatccgatcggagaatccagtcgattactaatctagcgctctctttttttctactcgatgacttatcacgaagaagacgatacagtttctgaatttcgagttagagttgaagaagatggagttgataaattaggtcattatgttaaacttactgaagatttcgaagtacatcgacaagaaacagaacaagaatcttcatca

SEQ ID NO: 137781 - DNA, 298 bp, Arabidopsis thaliana
ggaacttgaaaagagtgattgtgcagccttgcgtaacaatcttgtagtagcgatgacagacttttgtgttcactatacagccatgattgagtgttacataccgaagattacgaaacgtcttcgggatccttgtgaagttgttagaaggcaaaccttcatacttctctcaaggttactacagagagactacgtgaaatggagaggagttctcttccttcgattccttctatcgctagtggatgaatctgaaaagatacgtcgacttgcagactttttatttggcagcatccttaaagta

SEQ ID NO: 137782 - DNA, 376 bp, Arabidopsis thaliana
aacaaaactcaaaacccaacaattaaagaaacaacatttcaatatacagatttacttccttttacagattttcctaaaaaaccgaaattgaaacaaacaaaaccaaaagacgttaccttttttccattgattcctcaattctctaaacaaatgagttaatcttccatggctgccatgttgatgcagccatggccaccgtttcttcctcatctaaccctagttttcttaaccctaatcctctttttccctaatcaatccttttctcaatccgattctcctcgaaacatcgaaacatttttcccaaatgacacaatcacccctccagttcaatctccggttctatcgccgccgcaaaacccatcatcttcgtcatcgg

SEQ ID NO: 137783 - DNA, 273 bp, Arabidopsis thaliana
gattactcagcgatatgcgattaaaagcttcaaatttgcagaaacccatcttcttcagctcctactctgcccatgatattctcagagcgtctttcattgagaagtttctggtctccagaatcctttttgtgcacttaagattccttcttggtgtttggagaaagttaagtgaacatcccagtgcagtgacttcaacatgttctcaacttctcttatcacatttgattcgtcacgaactattagtttacctcctggtcttactattctatccac

SEQ ID NO: 137784 - DNA, 233 bp, Arabidopsis thaliana
cccacgcgtccgagggaagtgagagattcacaggcgaaggcaagaggagttccgtacaagaaaagaaaaaccctaattccgccgccggcaaaagggtttctctccggcaatcctccgttctcctcctaacccgccagcgttaatccggtacgagtcacagaaacgatcagactgtgacacgttttgtcaatacctgcgtaagcaatagccaccggttcacatctcgcattgtg

SEQ ID NO: 137785 - DNA, 189 bp, Arabidopsis thaliana
gccaaaaggaagtgtgtctatcttctgttcctctccctctgaaaacttattcctttcgtttcaacttcctagtcgtcttacttcacataacatctctctttgtttaggatctcttcttcccacgattacaaaatcatgtccggtgggttttccccgatcgtgggtcggatctgattcatcggaagcaac

SEQ ID NO: 137786 - DNA, 357 bp, Arabidopsis thaliana
cccacgcgtccgcgcagacttcgcactcacacactcacttccattgctccaaaaaaacattgtatctacttcacttgctgtagagatatggtatcaagatcttattcaaacctcttggatcttgcttctggtaacttccattcgttttctcgagaaaagaagaggtttccaagagtagcaactgtcactggtgtcttatctgagctagatgatgataacaacagcaacagtgtctgctctgatgctccttcttccgtcacacaagatcgaatcatcatcgttggaaaccagcttcctattaaatcacatcggaactctgctggtaaattgagttttagttgggacaatgactcgctt

SEQ ID NO: 137787 - DNA, 359 bp, Arabidopsis thaliana
attctcctctgaatcaacctctaagttgctgttgaatgagaaagctttgatgtgagcgagcctgagagtgtaacaaaggactgatgatgaagattattgcggcgtttctcttcctcttggtcacgacttttgtttcccgttgtttgtctgcagacatagaatcggacaagcaagcactgcttgagtttgcatctcctgttcctcacagtcgcaaactcaactggaactccactattccaatctgtgcctcttggactggtatcacctgcgccaagaacaacgcccgtgtaaccgcactccgtttgcctggatctggactttatggacctttaacagagaaaacatttgagaagcttgat

SEQ ID NO: 137788 - DNA, 362 bp, Arabidopsis thaliana
  unsure (1)..(362): unsure at all n locations
aatcaaatcaccatggctttagcttggtgcgttgtacgcaggtcagcatctaagtttgcttccgtttatggtggccgagtccgatctatctccgccgttgcgaaccgcgcctctctagctcgcaacccatcttcaattcgtccattcgtctctcgcgccttaaattactcgacggctattgatcgaattagctccgagcaaacgcttatccgagttattgactccgaaatcaactctgctttgcaatccgataatatcgattcggatgaagagatgactccangaagctttccttttagaattgaagacaaacctggaaatcagaatgttacattgactagagactacaatggggaacatat

SEQ ID NO: 137789 - DNA, 358 bp, Arabidopsis thaliana
gtcaatttgtagaagcaatctcactttttccctttctctgtacatcatcatccttcaagctcggagctctctcttcccgccggcgatctcctccgcttctctccgattttaagtcgatcgaatggggaaaatcaagaaagtgaatcaaaggggtcatattgctacaccgtatccatcaccatgttgtaagaaagaatgggctggctcaacctgtccagtatgcttggagtctccacacaatgcggttcttctcctgtgttcgtcttatcacaaaggatgccgtccttacatgtgtgctacaagcagccgttttgccaactgccttgatcaatacaggaaatcctacggtaacgaaaac

SEQ ID NO: 137790 - DNA, 421 bp, Arabidopsis thaliana
cggacgcgtgggggaaaagagagagatgaggaagttgaatccgcttctgaaacgaggcttgaaggctattgaaaatggtgatttgttgaagatcctccaaagtgaaattcgtcacgaaatctcccatcctcgtttccagggcgttgagaccggttctctaggagatttcaaattggattgggattcaccggaaagccaagatattgttctgaagagacagtttgattcaggcgagaaggttgtggtctctgctttattgcaaccagaacctatagaactagaagatgatttagtgtttcctaaggaagctcatgccaaagtttgtatcaaaaagcctggtctcagctctatcttgcagtttcattgccgggtttacgaatcaggatctggatcttctcatttcgacatcgagagcgcctac

SEQ ID NO: 137791 - DNA, 292 bp, Arabidopsis thaliana
gaccacgcgtccatctagatcgcgagcggccgcccttttttttttttttttttttttttttttttttttttttttttttttttttttttttttttttttttttttttttttaacccatctaagaggtcgctcttgccatttcgctcatcttcaaaagcttattcattcatcaaatttggggcaagtctgaaccatcaatcatctttttaaccctttttaatttaatttcccttttcttatttccttggtgttaccgatttcaatgtccgtgtaatcgaaacttgctttcttt

SEQ ID NO: 137792 - DNA, 291 bp, Arabidopsis thaliana
agtttcccatttgatgatcataattgcccgccaatccatttggtcacctcattctgccaaagtgcatattcatggttaaaggaggacattgagaacgttgtggttgttcactgtaaggctggcatggcaaggacagggcttatgatatgcagtcttctgttgtatctgaagttctttcccactgccgaagagtgtatggacttctacaaccagaaacgatgtgtggatggaaaaggacttgtgctacccagccaaattagatatgtgaaatactttgaaagaattttgacc

SEQ ID NO: 137793 - DNA, 391 bp, Arabidopsis thaliana
cagctatccggcctgtttcagaggatgatacagtagtagaagagctatcaattgttcctagcggttcagatccgtctgcttctactaaagaatacatctgtgagtcgcaaacactcgttgaccggaaaagacactgtgagaacgaagctgtggaggaaccagagccaaaacgaagactgaaaaaagataactcacagagttcagattctgtctccaaacctggaaagaaaaacaaattcgtagtacacgcagctggtgatgttggtatctgtggtgatggatacaggtggcgtaaatacgggcagaaaatggtgaaaggaaatcctcatcccaaggaactactacgatgcacttcagcgggatgtccagttcgtaaacacattgagacagc

SEQ ID NO: 137794 - DNA, 415 bp, Arabidopsis thaliana
cccacgcgtccgcacgcatcgacgttacgccaccatctaatctctttaaacctccgtcagctggtttatctcgccggtctcgtttacttcaaacaagggtttatggtttcatctaccactttctaccaatgcaaagcttgtaactttgaggtatacatggctgcttctgatcaacaccggtctcgccgtcacgacgagagctcttcaagacccaacaagaagaagaaggtaagcagaaacccagaaacaaatctcctcttcaatctcaattcatgctccaagtccaaggacctctcagctgcattagcactttatgatgcagccatcacttccagtgaagtacgtctcagccagcaacattttcaaacgcttctgtacctatgctcagcttccattactgacatatctcttcaat

SEQ ID NO: 137795 - DNA, 345 bp, Arabidopsis thaliana
agctgaaagaatcaagtgctgcagaactcaagctatcttcagcaatcattatggccggagtgttatgtttcctagctgccttaatctcgagcgcatgtggaatcggcggtggaggtttattcattcctatcatgactatagttgcaggggttgacttgaaaaccgcgtcaagcttctctgcttttatggtaaccgggggatcaattgctaatgtaatcagcaatctctttggtggtaaagcattgcttgattacgacttagccttgcttcttgagccttgtatgcttttaggagtaagtattggtgttatctgcaacagagttttgcctgaatggctcatcactg

SEQ ID NO: 137796 - DNA, 382 bp, Arabidopsis thaliana
atttggccaacgaaattactactcaagcaaagcctgtgaatagaattggttttattggtcttggagcaatgggttttggcatggcagcacacctgttgaaatcaaatttttctgtctgtggttatgacgtatacaagccaacacttgtcagatttgagaatgccgggggattggcggcaaattctccagctgaagtgacgaaagatgtagatgttcttgtaattatggtaacaaacgaggttcaggctgaggatgtcttgtatggacatcttggagcggttgaagctataccatctggagcaactgttgtacttgcgtcaacagtatctcccgcgtttgttagccaacttgaaaggcgtctagaaaatgagggaaaagacct

SEQ ID NO: 137797 - DNA, 130 bp, Arabidopsis thaliana
gtgaaaaggctggactttatatccaatccttgaagcagtactcagagttacctgatataaaacgtgtaattgtaaacacacatgctatcgagccacaagctcttgttgagttttttggcactctttctaa

SEQ ID NO: 137798 - DNA, 235 bp, Arabidopsis thaliana
gaagctcttgaaatttccatctcttcttcgtatgcttgagctttatgttttgagagcatagaaaaaggacgatgcgtcaaataatcattcactgtagttgttaacttcaagagctttagtggcgaggttctgcctgcttgctacaatgggttacgcccagctagttattggtctagcaggcagtggaaagtcaacttattgctcgtctttgtatgaacattgtgaaactatcggt

SEQ ID NO: 137799 - DNA, 400 bp, Arabidopsis thaliana
cccaaaatggtggatttggtactactggatctgccctgttgcatggaccgtgtatggattgatagtgtcgcagtacggtgatgtggagacacgtatccaagtccttggtggtgctcctgacttaaccgtcaagcaatacattgaggaccattatggtttccaatctgactttatgggaccagtggcggctgtactcatcgctttcaccgtcttcttcgccttcatcttcgccttctgcatcagaactctcaacttccagaccagataaaaccatctctcaaacaacaaagtctctttctttttttgtatcctctgtgttgtttatatgcactataagctttgtatgttctaaatatgtattgtagtgtcataacgaaatttttttgaatatttttattaa

SEQ ID NO: 137800 - DNA, 414 bp, Arabidopsis thaliana
ctctgcctcctttcggattcaaatctcagatctagctcaaccatggcgttgctcgtcgagaagacctcaagtggccgtgaatacaaggtcaaagacatgtctcaagccgatttcggtcgtctcgaactcgagctcgccgaagttgagatgcctggactcatggcttgtcgtaccgaattcggaccttctcagccattcaaaggcgctagaatcaccggatctcttcacatgaccatccaaaccgccgtactcatcgaaaccctaactgctctcggtgctgaagtcagatggtgttcctgcaacatcttttccactcaagaccacgccgccgcagccatcgctcgtgactccgccgctgttttcgcctggaaaggtgagactcttcaggagtactggtggtgtaccgagcgtgct

SEQ ID NO: 137801 - DNA, 422 bp, Arabidopsis thaliana
  unsure (1)..(422): unsure at all n locations
caaatttttcagcagcgaaaatggcaaacatcagcgtagtgacgacagcgactaacaaccaggtgattctccgtaactacgtgagtggattccctaaagaatccgacctctacatcgccgcaaccaccgttgacttacgtgtacctcccggatccatggcggttctagtcaagaatctctacttatcttgcgatcctttcagccgcattcgcatggaaaaacccgacccttcgtcacctgcttccgtcgctcgcgcttactctatcggcaagccaatctctggatttggagtggctaaagcaatagattcatgtcatccanattacaaaacaggagatttactttggggaagagttggatgggaagagtatagtgttattactccaactccttcttcacatttcaagattcatcacactgat

SEQ ID NO: 137802 - DNA, 349 bp, Arabidopsis thaliana
aaaaaaactgatttgtttactctgttaatcagagaactttctctgagaaaataacaggaattcagttagttcttagttcctatcaatcaccagctgaataaattcgtttttaaaagagaacgaagaaattcaaaaaacccaattctgctttttcccgataacttcgatcgtcttcgcttgggttttgtgtaatttgagtctgtgaattgaaccgagccccaccaaagtaaatgctccataacgttgaaaacattttcttctttatacaagaatttcaaattgtttcactttctccataggggtttttggggttctctgtttttctttgacgaattttgattttgcaaat

SEQ ID NO: 137803 - DNA, 204 bp, Arabidopsis thaliana
acgcccacgcgtccggtctgtgtctttcggtagaaatctgaggaataaatatttgaatctaaagaggatagagaggaaagtaaaaaagcaaaatcgaagttttgtgcaatttgctgggatcatagagcaattttcatttcgttattcgttgaaagtgtgaagcattttagagtcagtgagaagtgttaatggcgggttacagag

SEQ ID NO: 137804 - DNA, 365 bp, Arabidopsis thaliana
aacagcttcaatactatgccagtctccttcgaaaacccagctcggagtcctttacacggccataactctagcctctataggaacaggtgggacacggttcacattagcaactgctggtgcgaaccagtatgaaaaaactaaagaccaaggaagctttttcaactggtttttcttcacaacatatctagccggagctataagtgcaaccgccattgtctacaccgaagacaatatcagctggacccttgggtttggtctgtctgtagccgctaatttcttcagttttttggttttcgtctcggggaaaagattctacaagcatgacaagcctttgggaagtcccttcacaagtctactatgcgtca

SEQ ID NO: 137805 - DNA, 342 bp, Arabidopsis thaliana
  unsure (1)..(342): unsure at all n locations
cactacacttcctaagcctggtggtggtgaattcggaaagttctataccttacctgctccttaacgatccacgagttgataaacttccttactctattangattctgcttgaatctgcgattcgtaattgtgataactttcaagttactaaggaagatgttgagaagattattgactgggaaaagacatctcctaaacaagtagagattccttttaaaccagctcgtgttcttcttcaggactttacgggagtcccagctgttgttgaccttgcttgtatgcgtgatgcgatgaataagctgggaagtgattccaacaaaatcaatcccttggttccggtgg

SEQ ID NO: 137806 - DNA, 297 bp, Arabidopsis thaliana
aggaagaagacgatcttcgatccagagttgagcttctcttctgccatcgtcttcttcctcgatctcggtcaattacgcattctctgatctgatttgtgagatctctcgtcggatcaccgttttttacatcgtcgccgacaacacttaggagtaattggatccagcagaaatgtcgataaacatgaaaacatttactcaagctctagctagaacggctgctgtgattgagaagacggttcataccacagtacaggaagttacgggaccaaaggctcttcaggattacgagctacttga

SEQ ID NO: 137807 - DNA, 357 bp, Arabidopsis thaliana
aactactcgtttcatatctccgtctccggctcgatccgccaagtagagtaagcagcacatcatctgcactgcagcaatgactaaaaagaagaatcctaatgttttcttggatgtatcaattggtggggatcccgttcaacggattgtcattgagctttttgctgatgttgtccccaagacagcggaaaacttccgtgccctctgcacaggtgaggcgggcgttggaaagtccactgggaagcctctacatttcaaaggatcatctttccatcgggttatcaaaggattcatggctcagggtggtgatttttccaatgggaatggcactggtggggagagcatctatggtgggaagtt

SEQ ID NO: 137808 - DNA, 230 bp, Arabidopsis thaliana
gctttctcgaaaagaaatagaaacaaaacaactcaagcttctattacgtaatctgtttccgcgattatcttctctttttgtattcttgttttcggatggttgaatcgagaagagaaacaaattcggcattccgctctgtttttgtttctcttcttcaaatgtaatgatttagaaaagacgtatgttgcaatttaaggcttcacttgctaataaaatgataaggtttttcc

SEQ ID NO: 137809 - DNA, 230 bp, Arabidopsis thaliana
acactcagcgagaaggagagctattcatagaaaaagcggaagtgaaaaagctagcgtcttttttaaagcaggcctcagaggatgctaagaaacttgtcgacgaggaaagagcgtttgcacgtgctgagattgaaagtgcaagagcagctgtacaaagagttgaagaagccctgcgagaacatgaacagatgtctcgtgcctctgggaaacaagacatggaagatctaatg

SEQ ID NO: 137810 - DNA, 385 bp, Arabidopsis thaliana
acccacgcgaccgaccacgcgtccgcgatctttcacatcttgacaaatcgaagaatcgctctcatcaacaaagtacttcttgaaaagaggaagcaaattgcgagttctaagcctacaggtagtgaaggattgaaatgtgccattgatcacatccttgaagctgagcagaagggagaaatcaacgaggacaatgttctttacatcgtcgagaacatcaatgtcgccgcgattgagacaacattgtggtctatcgagtggggaattgcagagctagtgaaccatcctgaaatccagagtaagctaaggaacgaactcgacacagttcttggaccgggtgtgcaagtcaccgagcctgatcttcacaaacttccataccttcaagctg

SEQ ID NO: 137811 - DNA, 337 bp, Arabidopsis thaliana
acgatcctctctgacgtaaccctaaagtcatctctctctcattcatcgtacaatcatcatctacatgtattaccaatgcagctccagttttgtcttacatgtaaatgacggtgtgtgtatccttcacttaatttctctaattcagatttttttcaccttaaattaatttaattgagttattgtacatctctcaagctaagattctggttttgtgagttgagtggatgagaagaggagagattaactaaattagggtttcaattgtttacattttgtttgctttttatctcaagtaatggatcatgtctctcgctcacttcctctaccttttcactca

SEQ ID NO: 137812 - DNA, 426 bp, Arabidopsis thaliana
aagagacctttcatcttgaatcttgattgtgatcattacataaataacagcaaagccttaagagaagcaatgtgcttcctgatggacccaaacctcgggaagcaagtttgtgtatgttcagttcccacaaagatttgatggtatcgataagaacgatagatatgctaatcgtaataccgtgttctttgatattaacttgagaggtttagatgggattcaaggacctgtatatgtcggaactggatgtgttttcaacagaacagcattatacggttatgaacctccaataaaagtaaaacacaagaagccaagtcttttatctaagctctgtggtggatcaagaaagaagaattccaaagctaagaaagagtcggacaaaaagaaatcaggcaggcatactgactcaactgttcctgtattcaacct

SEQ ID NO: 137813 - DNA, 282 bp, Arabidopsis thaliana
acagcttcttttgcccgatattcaaatataaaaatgcttaaacagttaggctcacgagactgaaggaaggaagagaagagaagagaagagagggaatgagaggacagccaaattggttcaaaaagaaaaccaaataggctttgccttttaccttattagcttttgtttttctttcttaattctgtgtttttttttttttgccccttgtatggggtttatgtttgtgtacatagagccccaaagtgtaaatgctcttttctgttaaaataattattatgtcct

SEQ ID NO: 137814 - DNA, 414 bp, Arabidopsis thaliana
atcatctccttcgtgttcgagatttgatatcgactaatcgaatcagaggataagagaatggctcacagaatactgagagatcatgaagccgatggatgggaacgctccgatttcccaatcatctgcgaatcttgtctcggtgacaacccctacgtgcgaatgaccaaagcgaattatgataaggaatgcaagatatgtacacgacctttcacggtgtttaagtggcgacctggccgggatgctagatacaagaaaaccgaaatttgtcagacttgctgcaagttgaaaaatgtttgtcaagtctgtcttctggatcttgagtatggtcttccagttcaagtaagagacacagcactcaacattagtactcatgactctatccctaaaagtgatgtcaacagagagtattttgct

SEQ ID NO: 137815 - DNA, 367 bp, Arabidopsis thaliana
ggggcttttgtttagaagcaaaaaagaaatccaagtcagatggaaatggatcatctgaagaaggtatgtcgaaaaaggagattgctcttcagcaagcacttgatcagattaccagttcatttggcaaagggtccataatgtatctcggtcgtgctgtttctcctagaaatgtcccggttttctctaccggatcttttgcccttgatgtagctttgggagttggtggccttcctaaggggcgtgttgtggagatatatggtcctgaagcatcgggaaagacaacacttgctcttcatgttattgcagaagcacaaaaacaaggaggaacctgtgtctttgtagatgctgagcatgctcttgattcgtc

SEQ ID NO: 137816 - DNA, 211 bp, Arabidopsis thaliana
atcacgtggcgtcaggctcttgtccgagaccaacccgctcacgggagaccaaggggagatcaggaaggattgtcgttatgtgaactaatattgatggtccttgcataaaggatatatattgtggaaaagtaataataataatatatatgtgtatgaatgtctgtcaatgttttggattcaataagaagaaataccaaaaccgttgtggatc

SEQ ID NO: 137817 - DNA, 323 bp, Arabidopsis thaliana
cgtccgagatgaatatctcccacctctggatatgtctcgacagcctcccactcaagagttagttgcaaaggatttgcatgcaaatgagtggcgattcagacatatattccggggtcaaccacggaggcatttgctacagagtgggtggagtgtgtttgttagctccaaaaggctagttgcaggcgatgcgtttatatttctaaggggcgagaatggagaattaagagttggtgtaaggcgtgcgatgcgacaacaaggaaacgtgccgtcttctgttatatctagccatagcatgcatcttggagtactggccaccgcatggc

SEQ ID NO: 137818 - DNA, 415 bp, Arabidopsis thaliana
  unsure (1)..(415): unsure at all n locations
atccgagacgtggtaggaggattggtcgggggatactacgacggaggaagcaacgtcaagtttcattttccgatggcattctcaatgacaatgctaagttggagtctcattgagtatagccacaaatacaaagccatcgatgagtatgatcacatgagagatgttctcaaatggggcactgattatcttcttctcactttcaacaattctgctactcgccttgatcatatctacactcaggttggtgggggactaagagactcagaatcaccagatgatatctactgttggcaaaaaccagaagacatgtcctacgaccgtcncgtcctctcttccacttcggccgctgaccttggcgcagaagtttctgcagccttagctgctgcttcaatcgtattcactgacaaaccggact

SEQ ID NO: 137819 - DNA, 299 bp, Arabidopsis thaliana
cggacgcgtgggcggacgcgtgggactgcgtcagctcaagcaaatagctcaggaggttactcagactaatagtagtgttaatgggtggggacggcgtcctgctgccttaagagctctcagccagaggctaagcagaggcttcaatgaagctgtaaatggtttcactgatgaaggatggtcagtgataggagatagcatggatgatgtcacaatcactgtaaactcttctccagacaagctaatgggtctaaatcttacatttgccaatggctttgctcctgtaagcaatgttgttttat

SEQ ID NO: 137820 - DNA, 229 bp, Arabidopsis thaliana
tcaatgaccccttggccacggcatcgacgatcgataaagatggttggcttcacactggagacgtcggatttatcgatgatgacgacgagcttttcattgtggatagattgaaagaactcatcaagtacaaaggatttcaagtggctccagctgagctagagtctctcctcagaggtcatcgagaaatcaatgatgttgctgtcgtcgccatgaaggaagaagatgctgg

SEQ ID NO: 137821 - DNA, 313 bp, Arabidopsis thaliana
  unsure (1)..(313): unsure at all n locations
aaaaatccatgaagaaaggatcactggctgccgaatcaaaacatgtgaagtcagttgtgaaaattgaagattctactgatgatgataatgaagaattcggctatgtgagtagcagtgactcggatatggttacaccgctttcgcggatgcatatgaagggcaagaaaagagatttaattgttgacactgatgaagagaagacctcaaagaagaaagcaaagaagcacaagaagtctctcccgaattcagatatcaaatataagcaaacaagtgcactacttgatgaactggaaccatcanagccgtctgacag

SEQ ID NO: 137822 - DNA, 379 bp, Arabidopsis thaliana
aaaaagagacctacgagccttgggtcgaactagcagagaggtttcctgaagctaagggtattttggttaattcatacacagctctcgagccaaacggttttaaatatttcgatcgttgtccggataactacccaaccatttacccaatcgggccgatattatgctccaacgaccgtccgaatttggactcatcggaacgagatcggatcataacttggctagatgaccaacccgagtcatcggtcgtgttcctctgtttcgggagcttgaagaatctcagcgctactcagatcaacgagatagctcaagccttagagatcgttgactgcaaattcatctggtcgtttcgaaccaacccgaatgagtacgcgagccctta

SEQ ID NO: 137823 - DNA, 148 bp, Arabidopsis thaliana
ccagcatcctctctatatctctctcgaggtacgcttcgagctcgtttatactagttttagtcgcttttgaatccaagaccattgtaaaggagccgagtttttttccaactgtactctacaggattgtgagatttcaaaactttttgat

SEQ ID NO: 137824 - DNA, 456 bp, Arabidopsis thaliana
  unsure (1)..(456): unsure at all n locations
caaaactaaagctttcttcaatggaagaagaaacccacgacggatctctcgatctccaagagattcgcaggcgcgtgaaagagctcgatttctttccccggaattgcagagaagagcctgtagaatcgtgtagttccgattacgagactctggtggttcaagattttgttcttcagtttgaaccaaaggtgaaagagattgttgaagaatacggcgatgttgatttattggatgttgaagattcagatgcttacttggagtacttgagaaatgagcttcagtctgtggaggctgaaagtgccaaagtttctgaagaaattgaacgtctttctcagtctcatgcncaagattctagtaggttgcanagggatcttgaaggtcttttactgtcactggattctatgtcatctcaggatgtggagaagtcannagagaatcaaccatctagcagctcaa

SEQ ID NO: 137825 - DNA, 422 bp, Arabidopsis thaliana
cataccttcaataagtaactctacactgaatcaactcctctgatttctcgataaaaatctagaggcaagattccccacggaattaaggtttctttgttaacctctccattgaagatatgggggaactaaacggagtcatcattccgactatagacttggaagaggtttctgataagattctgaatcagaaaatccgtgaagccagtgagagatggggatgtttcagggtgataaaccatggagtttcattgtctttgatggctgagatgaagaagactgttattgatctctttcaacgtccatacgaggtgaaagtgcgtaacaccgatgtgctcctagggagtggttacagagctccaaacgaaatcaatccttactatgaagcattatgtctctatgacatggcttctcctcatgctgtc

SEQ ID NO: 137826 - DNA, 435 bp, Arabidopsis thaliana
cagatgtacgctcttctcttccttatatcttccgcttcacttcacaccaaaatcaccacctctcacaaaccctagttcctcctctctctcatttctcggagatattcaccagagcaataaccatggacgctaaagaaacctctgccaccgatttgaaaagaccgagagaagaggatgataacggcggcgccgctaccatggagacggagaacggagatcagaaaaaggaacctgcttgtttctccactgttattcctgggtggttctctgaaatgagtcctatgtggccaggagaggcacactcattgaaggttgagaaagttttgtttcaagggaaatcagattatcaggatgttattgttttccagtctgcaacatatggaaaagttttggttttggatggagtaatccaacttacggagagagatgaatgtg

SEQ ID NO: 137827 - DNA, 445 bp, Arabidopsis thaliana
cacagactgagtagtcaccaagtgaatatgcttctttcatccctatggatccaagcaacttctaccgacaatacccctgaaaattttgaggccatggccagcacatatcaaatcactttactgttttcactagcaaagagatcaaatcacatggctctggtgcagtgttttcagctggcattctctcttcgaaatctctcattgaatcaagatggatgtatgcagcactctcgtagaagatctatcttcacttttgcatcatatatgctcattttcggtgccaagatttccaatattctggagctagttccaattatcaaagaatctttaactgcccaaatggttgatccttatcttgtgctggaaggagatatcagactgcgtgctgtatgttctggatttccacaggaagaaacgtatggatctgacaaagatgatagtgctg

SEQ ID NO: 137828 - DNA, 370 bp, Arabidopsis thaliana
  unsure (1)..(370): unsure at all n locations
agcagtattggtctacgggtcggccaccgtattgattattagattgctattattatatatacatgatcaatggaatatatacatatatagctatgtatttgtatatatgtagctatttactaatagatcttacatatatataaagcaagctaacatggaatcattaaaaggaggtctacgaagtatgacgtgaagttgaagacggcgataatattgaagatcaacaattcagtagatggttttcaggttcttctttgttttttttgtttcctttgggttcgttttagtggtagatcnttttttttttttaatgtttgattatgtgaggttaatttaagttgttatttactttattgagatttctttgatg

SEQ ID NO: 137829 - DNA, 308 bp, Arabidopsis thaliana
  unsure (1)..(308): unsure at all n locations
atggagctcatcaccagactcggctaatgctaatttaaatcgaggagggaagaaagggtgcatanagtggccaagaggggcacataagaacagcttgaagacaaagctcatagaagcacaaatcgagagccaaaaggttcagctgaagcatgtccttgagcataagatctaggccacaacatattccaaaactaccagtcctangccattctactaatctttgtggctgagcagcagaactggatttttgatcccgttctcctgctattgccattgtcgcatgatctagcgctggtcaaaccaatcaa

SEQ ID NO: 137830 - DNA, 302 bp, Arabidopsis thaliana
tttgtcaacatgaaaacatccaaaaagaaatcgaaacaaaaaacagaagaaaattaggattggacaatggagctttcaaatttggcaaaagcaggattgttttaaattattttaatattgggttaacgtctttttttgtttgtttccctctattagctaagttttggtttagactttagatcgaattgtggagtttttagtttttgactttgtttacatcagcttttgtttatatataataaaaaactaaacttatacaaaaacaacaaaaacaaaaaaaaaaaaaaaagggcggccgctct

SEQ ID NO: 137831 - DNA, 339 bp, Arabidopsis thaliana
atttaatttcgatggatgttgatgagccaactactaaagtgaagggtaaatcaaaagttggtgagccggagaaagcagaacttgggtctgaaaaatctgaagaattggccagggtaacttttattttgaagttgttgagtgatattgttctcatgtacctacatggtaccagtgtcatactgagacgggatacagaaatatctcaacttcgagggtccaatctacctgatgattcacctggaaatggagggttaatttaccatgtcattcatcgattgcttcctatatctctcgaaaagtttgttggacctgaagaatggaaggagaaactgtctgaaa

SEQ ID NO: 137832 - DNA, 391 bp, Arabidopsis thaliana
aatacgaatcatcagaaaatggatttcgagcttagatcagcgaaagagaagcttgaaagagagcagagagagaggaagcaaagagcgaaactgaaactcgaacgcgagaagaaatcagaggaagctgcgattaagcaacgcgaagccattgaagctgctcaaagagctagaagacttgacgccatcgaagcccagattaaggctgatcaacatatgcaagagagtttagtatctggagatggaatagtgtttgaacgagtcttccaagctgtttcttttcaaggaaatggagataagattaaactaccaccatcatgttttactgagttgtctgatcaaggagctttcgataaaggtcctttgtattttgagctctctgttgttgaccatc

SEQ ID NO: 137833 - DNA, 242 bp, Arabidopsis thaliana
cgcgtccgatcatctagtcgtcggtgtcgccgcctttctccgccgtctgaaatcgtccttgttcgattttccgaagacgaagcaggagaagatatgtctgggaggttgctgaagaaggttctccaggaacatgaagattcgaaacttcataaacatcacgaagaataagaagaagaggacgaataagaatcatgagcccgttcttcgattaatccattcgatctcttgaacgatggtgatga

SEQ ID NO: 137834 - DNA, 317 bp, Arabidopsis thaliana
gggcaagaagatatgttgcagcagcagattttacagcagttgatccagcgtcaggaccccacggggaggaatccgcagatgcaagctttgcttcagcagcagagactgaggcaacatcagcagatgcttcaatccatgtcaccctctcagagactccaacttcagcaacagcagcagctgagacagcagttacagcaacaaggaacccaacagattcctcctaatgtacgtccttatgaagttggcgtctgtgctcggaaattgatgatgtacttgtatcatctgcagcaacggcctgctgaaaattgcattaccta

SEQ ID NO: 137835 - DNA, 321 bp, Arabidopsis thaliana
ttgatgagtccaagagagcaagtctcggaaagtgttcaagaatgctcaagcgccatctcacggattctgaacttcgacaagtcatgaatgccgagatcacctgcaaggcgaatcaattgccttcacgacttatcattgtcaatgacaagcctttaagtgaagatgagctttacacgttgcagacatgtccaaatccacccaagaagctaaaacccggacactattggtatgataaggttgctggctactggggaaagataggagagaaacctagtcagattataagtcctaacaacagcataggaggatacatcagtgaga

SEQ ID NO: 137836 - DNA, 291 bp, Arabidopsis thaliana
agatatttcaaactacaatcagctcgagacccaagacgaggctcaggaagaaaccggatggaagcttgtacatggagatgtctttaggacgcccatgaactctgggttactgtgtgtttatgtcggcacaggtgttcagattttcggtatgactcttgtgacaatgatctttgcattgctgggcttcttatctccatccaacagaggagggctcacgactgccatggttctcttatgggtattcatgggcatatttgctggttactcatcttctcgtcttcacaaaatgtt

SEQ ID NO: 137837 - DNA, 367 bp, Arabidopsis thaliana
ccttaagccttgggaaacaaaacaaaaacttgcttgggctgctgcaaaacatggtggagtagtatacattctggaacttttattgcctttgcaaaaagaaattcccttgcagcaaagagctgcagcggcttctttgttggggaagctcgtcgcacaaccaatgcatgggcctagagttgctatcacacttgtgagattccttcctgacggtcttgtatctataattcgtgatggacctggggaggctgttgtccatgcacttgagcggaccactgagactccagaacttgtgtggacaccagcaatggcagcatctttatccgcacagattgcaaccatggcatcagatatttatcgtgaacaacag

SEQ ID NO: 137838 - DNA, 394 bp, Arabidopsis thaliana
tttctgtacaacggtacagggacatgggttccgcagagaaaatgaacccctttgcagagcaagaagcttgggaggaccatcagattgaaaacgcagcattaaaatttggtgcaaagaataaggaggtctcagacaattacgagtttgtatttgaagaccaaatagacttcataaaggcatctgtgttggctggtgataattatgaagatgaaatgcatgctaaaccatctcaagattctgctgggaaatcggcttttcatatgcttcaggaggatagaaaagctctgccaatttatacatatcgtgatcaacttcttaatgctgtgaaagatcatcaggttcttatcattgtgggggaacgggttctggcaagactacacagataccccaatat

SEQ ID NO: 137839 - DNA, 388 bp, Arabidopsis thaliana
agcatctccgttgaagctttccacaaatctcaaatttgtttggagactctcaaatgtatccttctctcgacgatgatttcgtctctgatttgttttgcttcgatcaaagactgatcaagaggatacctttccagattttgtgtcatatggtgtgaatttgcagcaggagccagatgaagtctttagtattggagcttctcaattggatttgtcctcgtataatggagttttgtcgctagagccagaacaggtggggcaacaagattgtgaagttgtgcaggaagaagaagtagagatcaattctggttcatctggtggagctgttaaggaagaacaggaacatttagatgacgattgctccagaaagcgggcaaagactggatcgtgt

SEQ ID NO: 137840 - DNA, 270 bp, Arabidopsis thaliana
cactgattgtaatcacagtggctatgaactttcaagtggaaccaccggagaagaagaaggcgaagaactcgtctccagcacattcacctccgtcgtcgtcatctccgtcgctttctctacttccataagaaatcgtcgtgcactgcttagctcggatctcaagattgtactacccaacgctctcactcgtttcgaaaagcttccgctcaattctctcttccacggagctctacgcaaccagatctcacctcggaatcactgatcagtgtg

SEQ ID NO: 137841 - DNA, 307 bp, Arabidopsis thaliana
aaaagatgggaaacatttgcacagaggaaacaagcctacgaccctctagcgattctatcacctggccaaagaatattccaaaagacaacaggaaaattatctcccatccaactcgcaaagtcaaatgcaacaggaagtcctcaaatgtaccattacgcatcaatactgcctaaacctagaactgtataaaagtttcctgtgtccgtccttgtaaccgctcaggctatgcagcattaaagtgaaaaattctttcttttttgtttcttttggtgaacaacaaattttacagtctgaaacagattgggac

SEQ ID NO: 137842 - DNA, 211 bp, Arabidopsis thaliana
cttgttcgtttccagagcacagaacagacaagataagctacgaaaattctgtatctggaatctgtacacgttgtgttctacaaattgattcagagagcttctttttgcattgcttctcccaacatcaccaccgctttgcctctgtctgttccggtaccggttccggttgtttcttctgatgagattcctttcatgtcagaggaaattatct

SEQ ID NO: 137843 - DNA, 435 bp, Arabidopsis thaliana
aaatcttcttggccatgggacttttggtcaggttgctaaatgctgggttcctgatacgagacagctttgttgctgtaaaagtaataaaaaaccagcttgcatactatcagcaggcattggttgaagtatctattttgacaacgctaaacaagaagtatgatcctgaggataagaaccatatcgttcgcatatacgactacttcttacatcaaagtcatttgtgcatatgctttgaacttctagacatgaatctgtatgagctcatgaagataaatcaattcagatgcctatcattaagcatagtcaagctcttctctaagcagatcttacgtgggttggctcttttgaaatatgctggcataatcgagtgtgatctgaagccagagaatattcgtctgtgcgcgagtgtgtagccgactgaaattaagatgattg

SEQ ID NO: 137844 - DNA, 407 bp, Arabidopsis thaliana
cacgtcttcgtcttcttcttcttcaacgttcctctccaaaatcctcagaccaagaaatcagcatggccgtcgatctaatgcgtttccctaagatagatgatcaaacggctattcaggaagctgcatcgcaaggtttacaaagtatggaacatctgatccgtgtcctctctaaccgtcccgaacaacaacacaacgttgactgctccgagatcactgacttcaccgtttctaaattcaaaaccgtcatttctctccttaaccgtactggtcacgctcggttcagacgcggaccggttcactccacttcctctgccgcatctcagaaactacagagtcagatcgttaaaaatactcaacctgaggctccgatagtgagaacaactacgattcaccctcaaatcgttcct

SEQ ID NO: 137845 - DNA, 254 bp, Arabidopsis thaliana
gggtccacccagtcgtccggaatcaatccatctctccggttccattcactatccaccaggcacccctgaaatgtgtcctagcctaatacactaagccaacaacagatgcatctacgttacttacacttatgttttttggaaaggccatgaaccttctcctgcacaatattattttagatacatgtatgatttggttaagttcatcaagttggtgcaccaagctagtctctatgttaatcacagaatttgccctt

SEQ ID NO: 137846 - DNA, 376 bp, Arabidopsis thaliana
ctcattccaaaaaaatggggtctcgctctcaaaacctctcctttctcgtcctcctcctccgtggcttcgttgccgtctcctatgcttgcgactgtacccctcctaaaccatcaccagcacctcacaaaccaccaaaacatccagtcaaaccgcctaaacctcctgccgtcaaaccacctaaaccaccggcagtaaaaccacctactccaaaacctcccaccgtgaaaccccatcctaaaccaccaaccgtcaaaccccatcctaaaccaccaaccgtcaaaccccaccctaagccacccacgaccaaacctcctccgtctactccgaaaccaccccatcacaagcctccgactacaccatgcccaccaccaacacc

SEQ ID NO: 137847 - DNA, 486 bp, Arabidopsis thaliana
tttgggctgcattatgtgcttgtgacttccactcgaatatcgacgtcggaatcacgctcttacccgaatatggcgaagcccgcgctccggatgacggcggcgaggcggactccgactccggaaatcatgaaaggccctcagacactaaaccaataagagataacaatactatcatcgggaaaacccactagtacgccaccgtcaaagagaggaaaggagaccacccgggaaagatcgcctaggccgccttctacgctatcgacgtaacctaagaccggactgagagagccgtggccaccttcgccgacggagaagaggacttcgtcgacgcccgtgccaccgaaccaggcggaataacaggcgacaccgaacttgtgttccccactgaggtgtccggctaacctctccattgcgcaggtttagggaaccctcgctcggcttacgctagttctgcgttcgcgtccaacgccgccggcgaatagaaaa

SEQ ID NO: 137848 - DNA, 303 bp, Arabidopsis thaliana
gctccgacaccattgacaacgtcaaggccaagatccaggacaaggaaggtattcctccggagcagcagcgtctcatcttcgctggaaagcagcttgaggatggacgtactttggccgactacaacatccagaaggagtctactcttcacttggtcctgcgtcttcgtggtggtttctaaatctcgtctctgttatgcttaagaagttcaatgtttcgtttcatgtaaaactttggtggtttgtgttttggggccttgtataatccctgatgaataagtgttctactatgtttccgttcctgtt

SEQ ID NO: 137849 - DNA, 542 bp, Arabidopsis thaliana
ctgactcctcctcgattccttcttctcaaactgactgcactcttccttctttcttctgctgactgaaaattagggtttagggtttttgattttcgttctctattagtttctccccctcactctcatggcgatgaattttcaatttatgtgagattttattccacaatcggaataattttcctggcaatggcgacgaccaatgctccacctgagctagcttcaggaaacccttgctgcctcgcttggcaagggaagtacataggaatgaagaagaggcgagatgcttttaaagaaggagtaactcttctccagaaggctatagaaaatgttaatgctgaaaaatccaatctcgagagaaaatttggggagatggcgactgacggagatactaaggaaaatggttcaactgtgaaagcatctttggagaaagaaatatctcgtttgaagtttgagatagtgtctttgcaacaaaaactggagcggaaccttaaagaaaaaagtgaagaaacaaagcttcttcaggatcaagcttctggtcgaga

SEQ ID NO: 137850 - DNA, 589 bp, Arabidopsis thaliana
cagaatcataaccatgactataaccagaaccataactataaccaaaaccatagctataaccggaaccaaaaccatcaaggcaacaaccccaagaagatgcatcgtcaaccatcttcgtccgattctgagaacataatgagcacacgagtcatcaccattgcaggtgaaaacaaaggtgcagtaatggagatcctacgatctcctcaaggcaacaaaaccggtggttcaggaacacattcctctagggtttcacacggcaccggagagaaaggacggagacttcaaagcagcagcagtagcagcagcgacgaaggagaaggtaagaagaaaacgacgaagaacgtccctaacaaaggcaatagtaacctcccaatgaaagcttttatgaatagtaacgttcagatgataaacaactccattgtctacaactcgacggcatctcatcatgatcccggcgttcatcttaaaatctcccggaaacctggctccgacaatggttttcatgtcagtgattacggtaataatggcggatacaccaactgatgaaagaagaaaaaaaactaaactaaaataaaaaaaaaggttttgg

SEQ ID NO: 137851 - DNA, 492 bp, Arabidopsis thaliana
tttgggctgctttatgtgcttggtgagatctcttatgaaaaacggtccgcagatctccccgggtcctcagggccgtccgctactcaaggactcttgccgtctaatgagggcccctccttgcggccccgaaggacccgaaacacgtcgacctatacgaacgggcgaagaccgatgggaacaaagtaattcccggcacaatggactatgtgtaggattacccaggagacgcggctcacgcggagccattcgacgcaggatacctggcgctataagggaagagccccggagtagccgaaagcgcgaaagtaatcagtgacactaacctcttagctctgggcaaggcggccgaagctaacgaggagtcgattgagcttttcggaccggcgaatctcagtttgcacgaataaggacggactacaaaagccgagtcgagcgacgtaggtgaggtagagaagtcgacggacctagataagcatctcaagcctcgtgaag

SEQ ID NO: 137852 - DNA, 330 bp, Arabidopsis thaliana
aatgaaagagactttgatgggacttggagaagagaaaagagaagcgataaggcaattatgtgtttggatcgatcaccatagaagtcgttgtgaatatcttgaggaggttttgtctaagaccgttgtggctcgaggccaaagaagagtgtcgcagcgaacttaaggactcagtgccatggttttggactctggtcaatcaagaagctggtggagaggtatttttggttggggacttttggtgtacttgtgttcgattttgttgcacttttatatgtttgttaacttttgttgtattttgtaagtcaaaatttttggtttattgtgggcaaa

SEQ ID NO: 137853 - DNA, 428 bp, Arabidopsis thaliana
agatgaagtcaaatccctagattgacttgctcaacggcgatttcatctcgataattagccaatgtcttcaccggagaggaagaggaagagggtgacgtcgacgaagaatccagcggttaagaagaagaagaagatttcaccggtgccgacgccgataccgtcacttcctgatgatttgcttgtaagtatcttcgcacgagtctccagattgtattatccgattctctctcttgtctccaagagctttagatctctcctccgttcaccggagctttacgagacacggtcactattaggccgaaccgagagttgtctgtatttgtgtttacaggagggaaatcctgattcgaaccctctctggttcactctctgcatgaaacctgacagaaccctaaaaaatggcaagaagaagaagaagaagaagatgt

SEQ ID NO: 137854 - DNA, 271 bp, Arabidopsis thaliana
agataaaattctggggcaagaagaaaaattcttctggagaaggttcactctgatttggaggccagtttattatctctcagacactgatgagattgtttgatactcttttaggagtaacagaaaaaaaaacgtttggtttggtatgatggatttattgatatttttcggaaacccaaccccccaagtacagtttttcggggtttgttggtcgagcaactttggattactggttttctttttggtctttttttttgtaatatgatcgactacc

SEQ ID NO: 137855 - DNA, 284 bp, Arabidopsis thaliana
aacagcgtccggataaacatgccataggctgcagatgggtttataaagtgaagttaaacgcagatggaagtttagagcgttacaaggcacggttagttgccaagggttacacacagcaggagggtgttgactttgttgacactttttccccaatggcaaagatgactattgtcaaaacattgttggttgttgcagcagcaaagaaatggagtttgcatcagttggatatatcgaatgcctttttatatggcgaccttgaagaagaaatttatatgactcttcct

SEQ ID NO: 137856 - DNA, 372 bp, Arabidopsis thaliana
gtatccgctcgcatggtcatggcagcaatggcggcggaagatgaagttgcaaaaattgcgtgagtttgtacgttcagaatatgatcactcctgtttacgctcctgtcgctcccgagctttatacgagggtctgaaggtcgctgcaacctccgatttgatgcttgcgtatctggatttcttccttggtggggatgaaaaaaggacagaccttccacctcgacttcaccaaaggtttccaatgcccatattgtttggtggtgatggcagttacatggctcctttctcacttcaaaatgacaacattcttaccagtctgatgagtcagcttggttcgcctactacttggtatagactggtggctggtgtaaatgc

SEQ ID NO: 137857 - DNA, 322 bp, Arabidopsis thaliana
  unsure (1)..(322): unsure at all n locations
aaagtctctgtcttcgtctccttctttcttcttctctctgtcatcattttgcttttttttcttctcctacatgccctagattttgggtttctgaaataaaaaatggctcacaggangactttcacttccagaaaccgtagcgtttctctctcaaacccatctttctccattgacggatttgacaactcaactgtgactttaggctacacgggtcctcttcgaacccagagaataagacctcctttagtgcaaatgagtggtcctattcactctactcgcagaacagaacctctcttctctccttctcctcaagaatctcctg

SEQ ID NO: 137858 - DNA, 327 bp, Arabidopsis thaliana
agaagaagaagaagatggtgaagaagagagttaatgcaactgcaagaagatagtaactaatcagcaccgtccatttttgtcatctaattctttcttacttggccgcaacttccaaccacatcacacactctttctattcccttatatattcccatctcaaaagttcttggagacacataaacattaaaaaaagaaaaagaaaaaaactataaacataaacgccaatcgcaactttcttgtctttcaatgggagagaaaggtttgaagcggtctggtgttgcggtggtggttgcattactagccatggttcatgtctctgtttcagtt

SEQ ID NO: 137859 - DNA, 159 bp, Arabidopsis thaliana
ataaatctcatcattatccttctttctctccatggcagaaactcctcaaccgtatctcatcttcgtcttcttcgtcttcactctaaccgttgctacacaaaccaccggttcggttaagtgcaaaacaagtttgcaccgttacccgtttggtttctccga

SEQ ID NO: 137860 - DNA, 225 bp, Arabidopsis thaliana
acgcgtccgatattgtttaagtaggtagattcaaggccatgacaacagaatatcaacctagctagtttgatatattctgatgaaattagtttgcctagctaggattattattttgtgttgtgagttttcagggtgtgcaaacgcaaaataaaataaaaattgtgaccatattctacaaaacagattatatcaaaaacatgaataatcatttaatatattattgag

SEQ ID NO: 137861 - DNA, 116 bp, Arabidopsis thaliana
agatttgtgtgttttttctggtatgatcagtgtgtcactgtcatgtgttttttgctttgtttaaggattatgcttgtgtataaatgaattatataaaacccgctttgtgtttatgg

SEQ ID NO: 137862 - DNA, 308 bp, Arabidopsis thaliana
tatcggatcagtgacttctgcaaaccgtctagacccattttttgtttatctctggacacagagatcgcaaattcttttttcttaaatggaaggttccatgaacaagcgaggatacgaatgcagtcaagaggatactgacaagctgccagaatcaaagagacaaaaagtgcctgctttagcaagtgttattgtggaagctgtcaaagtagatagtctgcagaggctttgctcgtctttggagccgttgtttcgcagaattgttagcgaagaagtggaacgagccttatcaaggttgggaaacgcaaagt

SEQ ID NO: 137863 - DNA, 305 bp, Arabidopsis thaliana
cagacgcgtgggattacataaacgataggttagacaagaggacatggacttatatatttggggcttgctgtgccacgaccgttttcataccatctttccacaattaccgtatttggtctttcctcggccttggcatgaccacctacaccgcttggtacctcaccatcgcctcttttctccatggtcaggcggagggtgtgacacattccggtccaaccaagcttgtgttgtactttaccggagccaccaacatcctctataccttcggtggacacgctgtgaccgtggaaataatgcatgcgatg

SEQ ID NO: 137864 - DNA, 369 bp, Arabidopsis thaliana
accacgcgtccgagcgctttttcatcttcctttgttctgggtttctctccaaaaatcgccggagaaattcaaatcgtcatctctaattcgtcggagaatccaccgttaggtagataaacacggtttgtttctgaaattagggtacgaaaaaatgcccttgtttatgcctgacgaagagctggcgcggctatctagcgacgccgcgtcggtggttgcggagagagccgacgagtacatacgaaagatatacgccgagctggatagtgttcgagccaaagctgacgctgcttccatcacggcggagcagacgtgttcgcttctcgagcagaagtacctctcgctgtctcaggatttcccttcccttgaatc

SEQ ID NO: 137865 - DNA, 343 bp, Arabidopsis thaliana
agcccacgcgtccgggcggatcatcggtttcgaggttagactcgttccggaggattttgacaagggaaagatcttcgaacaggcgggatcattctcgcgttgaccaagatcgtgaattggatattgaaagacagtgaattcagtatatagtatatacacacatacgccggttaaaaaaaaaaaagtataaacacacatgcatccataattaatccttaattcatgaaccataatacttcttcttccttttaactttttattcttgtactgaaatcttttgtatgtgtaaatatgaatggcacactttttgtatgttacagtaattacaaaaacattgttgctt

SEQ ID NO: 137866 - DNA, 296 bp, Arabidopsis thaliana
cacacgagtccgcccacgggtccgcccacgcgtccgcgcgtttcttctcctagggttagggttcgacgaacgcagctgttccacgcgtttagtttcaattctccatcgaagaagccagaatccgattcctaaagagcttacatttgttactcaactttaaagttttgacgctagagattactatcctcttgctgggaactcaacgtgaccagactgtgtttgaaagatagcaatggctggagtattagctggggattgttcattcggtgagagtggtgtttcatcttactccagga

SEQ ID NO: 137867 - DNA, 317 bp, Arabidopsis thaliana
cagacgcgtgggcaagttgcgaacatgtatctctggcctaagacccttgtagttccaatccttgaccctgcaaaggcgttcagaaggcctgttggaattgtccatgtgaaagttgtgagggctgtggggctgaggaaaaaagatctgatgggcggggcagatccattcgtgaaaatcaagctctctgaagataagattccttctaagaagacaacagttaaacacaagaatttgaatcctgaatggaatgaggagttcaaattctcggtcagagatccccagactcaggttctagagttcagtgtgtatgactggga

SEQ ID NO: 137868 - DNA, 353 bp, Arabidopsis thaliana
accacgcgtccggtcatctcttttctcgtattgcaaattttaagtttgttcttgtttattctcttgagtgaattagaggtatgttttgagtgttctcatatggagtgtgttggagataggagcttcgatccaagcaaaggggaaaagtgttggcttcatgaggcttcgatgcagccttaaacgctaaaatccaggccaagcaagatggagatagagagagatgatgggcaaatcaggttcgcagcagctgctgatggatgagaagatatatgttgcagtggggagtgacttggggaacaagtccactcttgtttgggcgatacagaacactggaggcaaggagttctgtatcg

SEQ ID NO: 137869 - DNA, 428 bp, Arabidopsis thaliana
  unsure (1)..(428): unsure at all n locations
cactattttcacattctcttctctctcgatatcatctaaatctctctcgatctcaatttcgcaaaatggctgacaagaagatcagaatcggaatcaacggtttcggaagaatcggtcgtttggttgctagagttgttcttcagagggatgatgttgagctcgtcgctgttaacgatcctttcatcaccaccgagtacatgacatacatgtttaagtatgacagtgttcacggtcagtggaagcaccatgagcttaaggtgaaggatgacaaaactcttctcttcggtgagaagccagtcactgttttcggcatcaggaaccctgaggacatcncatggggtgaggctggagctgactttgttgttgagtctactggtgtcttcactgacanagacaaggctgctgctcacttgaagggtggtgctaaa

SEQ ID NO: 137870 - DNA, 320 bp, Arabidopsis thaliana
cacacgcatccgcgcatctacaatggcatcgatgatgcaaccgcagatcatactgctgaaggaagggacggacacatctcagggcaaagcgcaactagtaagcaacatcaacgcttgcactgctgttggagatgtagttcgaaccacgctcgggccacgagggatggacaaactcattcacgacgataaaggatccgtcaccatttctaacgatggtgctaccatcatgaagctcctcgacattgttcatcctgctgctaagatcctcgtcgatatcgccaaatcccaagactccgaggtgggtgatgggacaactacag

SEQ ID NO: 137871 - DNA, 367 bp, Arabidopsis thaliana
caaaccctaaaattctcctccgtcactgtcgacgaccactgcgtttcacactactctctctctcgctctctccaccgttaaacttcaatacccatttgtcatttcccccaaatctctccgatttcttaaatctaatttggatttactttgcctgtaaaaccattcgcattgttacgcatccgattttgcagttcgaaactcgagttcaacttcaatttgaggtagatttcgagaaaaagctgaagaatttcggaacaactaagattttaacggtggaattggggagtcttgaagcttatttttcctcctggtctcttttttcttatgtggtggtgcttgagagggtttttgtatgatataaatgctc

SEQ ID NO: 137872 - DNA, 358 bp, Arabidopsis thaliana
  unsure (1)..(358): unsure at all n locations
aaccggtgatcgtctttcctttacctcgccgaccttctccgtcttctcaattacgatctatcatcaccagaatccgttttctctcttttaactccgatacaaaacttccgataatccgaaataaacgttacgaatttcagactcttttttccagtttctgtttgaattcgatttcgaaggattagattctccgttctactgagacgttagaagaattgtggctgttgtcgactgcaaggagagcgcttactttaattgctgatttcatgagacgagatggctttctttaggaactactcaaacgatactgtgtcacataatgttcttgatgaaaatgaggagcggcanaatgctgcta

SEQ ID NO: 137873 - DNA, 344 bp, Arabidopsis thaliana
cgcgtccgattttcacctttcctcagctcacggtgagtctctggaacggattgtactaatctcattattttcccggtttcagaacgatttctggaacattcattccacactctgagaagaaacatgagtcacccgagaaatgcagatgatatattttctgagttctttggggtctctagaccttctggtccttctggtcccagaaatgcggatgatatatattctgagttctttggggtctctagcccttctggtccaagaaataaggatgatatattttctgagttctttgaggtctctaacccttctggtccgagagataaggatgatatatctgctgagta

SEQ ID NO: 137874 - DNA, 425 bp, Arabidopsis thaliana
cgagattcagctgtaaaaccctaactagcgccatagccaaggaagctttcctcagatcgtctctccgaaattttccggttaatcgtcagttaaggggaaaattaggctatggcgatgttaggtgcacagcaagttccagcagcagcttgtactccagatatggttgggaatgcttttgtgccccagtattatcacatattgcatcaatcacctgagcatgttcacagattttaccaagagattagcaagttaggtcgtcctgaagagaatggtttaatgagcatcacttctaccttgcaagctattgacaagaagataatggcgcttggttacggtgtaatcagtgcagagatagctactgtggacacacaagaatctcatggaggtggttatattgtactggtgactgggtatttgacgggaaa

SEQ ID NO: 137875 - DNA, 207 bp, Arabidopsis thaliana
ggcacctgcagtttactaagaagcatatcacgaactggatgacatatactcgttcggtatgtgtattttggagatggttacgtttgattacccgtacactgagtgtagtcatcctgcgcagatctacacgatagttatctcggggaagacaccggctgcattgtacaaagtgacagaccccgacgttaagtgtttcattgagaaatg

SEQ ID NO: 137876 - DNA, 342 bp, Arabidopsis thaliana
caaacgcgtgggggctgttacgtgtgccaaaaatctcagcaagtttgagaatcggcaactaatgcttccaagttagcttttgaaaaatatgtcttctcgaaaacctccaagaccaatgctcgcacagaagctgagatcacactgttggagagtaatattgttgtctataagtttgcccaggacctgcatttctttgttactggaggtgaaaatgaaaacgagctcgtcttatcatctgttcttcaaggcttttttgatgctgttgcgttacttctgaggaacaatgttgaaaagatggaagcccttgaaaacttggatctcatctttttgtgccttgatgag

SEQ ID NO: 137877 - DNA, 406 bp, Arabidopsis thaliana
  unsure (1)..(406): unsure at all n locations
cacgcgtccgcacacacgtccggtaacggatctgtacttaatggtcacttgagacttcncttaggctaccaaatggacgcttcttacttctatcttaagctaagatggaacataccctgtggaccaaacagtgtgattacattcccgggagctgtttggttaaagccatggtactggtggtcatggcctgttcttccactangtttctcatggcacgagcagcgtcgcgccactatagggtactcagccgaaatgcctttggttataatccaagcaatgttttaccttggaatcatagtggttacacgactagctcgtcctaacataaccaagctatgttatcgccgctctgaccgcaacttaacaacgattcaagctggttttaagttgatcgcgcttctctctg

SEQ ID NO: 137878 - DNA, 355 bp, Arabidopsis thaliana
gcgtccgcaagaattgacagcaattgtggagcagttgcatgcaacaagagcaacagcgaaagagagggaggagaacctgcaaaaaagtattaacgaggaagcgcgtacaacgccccattctacaccacaaacggtggtgctccagtctccaacaacatctcttccctcaccatcggagaaagaggtccggttcttcttgaggattatcatttgatcgagaaggttgctaatttcaccagagagaggatccctgagagagtggttcatgctagaggaatcagtgctaagggtttctttgaagtcacccatgacatttcaaacctcacttgtgctgattttctcagagcccctggtg

SEQ ID NO: 137879 - DNA, 279 bp, Arabidopsis thaliana
  unsure (1)..(279): unsure at all n locations
aggtagaagctcttcgaagtaagattcttggtcagatgtggtgtatttgttgatagcttggctaccaataatgttattaagattcaaagtagtagttgcaaatttcgtcttaggttatagatccgtttttttttatataattaatatcgagatatacagagggaattttgtcagatatagtcacatactcatatatagttctcctctaaagtacattattgtgtctcagacctttgttgtataatanactgttggtttaaattaatatattaaagtata

SEQ ID NO: 137880 - DNA, 390 bp, Arabidopsis thaliana
cctctgactggaaaaagcttcctcagatcgtttcatcgtccaagcggaagaagcgtctccttcaatcaccgtggacacctccgagactgtctccgattgaatgggaattgaagacatgcattcaaaatctgacagtggtgggaacaaggttgattcagaggttcatggtacagtatcgtcgtcgataaatagtttaaacccttggcatcgtgctgctgctgcttgcaatgcaaattctagtgtggaagctggagataaatcttctaagtcaatagcattagcattggaatcaaacggttccaaatcaccatccaatagagataatactgttaacaaggaatcacaagtcacaacgtctccacaatcagctggagattatagtgataaaaa

SEQ ID NO: 137881 - DNA, 305 bp, Arabidopsis thaliana
ccggacgatccggcgactaaatcctactgagagaataatccggtcgctcagagagagaaagggtttcgagttttctggtgtgtcgccgatcagttttcagttaccaactggcttatttgtgctttgatctgaggcgaatgtttgagttctaaggagtgtatcgtttaatcatcgagctctgttttccttcattcacgaggaagctctacggctttttcggtggatcaagacgcacggatggaggattatcacgtgtataagatctaacaggaatttgcggaattttgattatatcagtgagtaga

SEQ ID NO: 137882 - DNA, 383 bp, Arabidopsis thaliana
gtctctgaaccgctttcttagcaccgggaacttccatttcctccagagattgaagataacgatcagctcctaaaccaatcaacttcgtcctcgccgcataacttccacctgataaaatcgccgtcacaaccatcaccggaagctctttattattcatcctctcattcctcggatccaacatttgcaccaatcgaatcacactcttctcatctctcatcaactccttccgatttgatctaacggtcaacaacgacttcgccgcctccgtcgccgcttcttgtaaccccgccggtttcggcgattccattaaccgaatcaacgagcttaaacaatcagcgacggctcgtttgttaccgtcgctgattgttaaattcgataaaaga

SEQ ID NO: 137883 - DNA, 330 bp, Arabidopsis thaliana
gtccgatcggaatcactcagagaaacagagaagacgatagatagagaaaaaaaaaaaatggcgttggctcttcgtagactctcctcttccgttaagaaaccgatctcgcttctctcctctaatggcggttcactccgtttcatgtcgtctttatcaaccgcagctatggcggaatcggagaaatctcgttctagttggattaagcaattgaatgcatctctagatgaaatcgatcctgaagttgcggatattatcgaattacagaaggctatacaatggaagggatttgaacttataccgtcagagaatttcacttctctatctgtgatg

SEQ ID NO: 137884 - DNA, 410 bp, Arabidopsis thaliana
actgaccttcttccactgtcatattctcttcaggcgacttctcattgacctctcctaacgactctctctgttctttggccatggtgttggtttataatcaagctctcttgctcgcattcttcgcattgcttggattccagtactttcctttactcaccgaagcaggttgtccattggactttacttcatctaacttcactctagtggcttccgtatgctcgaacaacaccgagagagctaaatgctgccgctacatgaatgctttcgttgcaatatctgtcgcccgctatgcaaactacacagctgatcttggagttacatcagatttgactgaaatctgtatcactactatctctagaacaatggagctttatggaatcccaagaaatgctaccatcttctgtggatta

SEQ ID NO: 137885 - DNA, 358 bp, Arabidopsis thaliana
agtctctctctctctattgttgctctctctctcgctttttatgtgactttcagatccgccgagtcttctttttgtggaatcttttcaaggagctcagtattctatatacacctctctttgtttgatcgatttcacaaaccctagcttcggcgatcttaaatctgcaaaaaatctatggcgtcttctcctggtccttttcttcacaaccagtacgatcagcagcactacgctccgcctggtatctccgctcaaccatctccggtgactcagcagcaacaggatgtgtcttcctcttccgccgcgactaacttgcatcctcagagaacgctgtcttatcccacgccacctctcaatctac

SEQ ID NO: 137886 - DNA, 298 bp, Arabidopsis thaliana
tgaaaatccccgaggttgagactcgtttcgttgatcgagttatttcagaaaacagagagaagcctctgcttttgccggttcggagcttgaattattctcgtgtttcggattcatccggcgataattccggtcgatgggagaaagtgagatgtaagacagaacttctgagtactcttggtgatgataatagtgatgtgcttccttctccgattccatggaggtcaaaatcatcgtcatcatcatcatcatcatcaaaggatgttgaatctctaccgtccgttaagaatctgactacagt

SEQ ID NO: 137887 - DNA, 373 bp, Arabidopsis thaliana
aaaaaaaaaaaaacttttgtctttcccttaatttctctaattttccctcgatttctctggcatcaacagtctcattctcattgatctttcttttttgtagcgagaaagatcgatttttttcggttcgttctcttctgggttacgaatcaaagagctacacagacacagacacacactgtttcctgtttctccccggattgcaaacagaactagggtttgttttcacaaattttggatcttttttttgaagaaaagaacaaaatttggatgaaaggaaaccagaaagactcgtcggaaaaaccgatatgggatcggagctcatcaagtacatctatacccggaatgtggtctttaacccgacccggtccaaaac

SEQ ID NO: 137888 - DNA, 189 bp, Arabidopsis thaliana
atcagttccggaggctgaacggattgctccttcaatttctggggttgtaccggcctctaatgatgatgactcattggtcatcatgggcattcatgggttagtgtctccactaaaagcctttggctacacagttgaagccttggcgatgttgctgcttccgattgctacagatggctctgaatcacttgg

SEQ ID NO: 137889 - DNA, 259 bp, Arabidopsis thaliana
atcagtgtgtatttcccgagggtttatgatatcaaacacttgatgaagttctgtaataatcttcatggaggtctgaataaattggcagtgctgcttgatgttgagagagttgggatttgtcactaggccggatcggataccttgttaacgtcgtgtacattcatgaagctgtaggacaatttcttcagtggttcaatggagaagtagtctggtgttttgtatggtttaagtgttgagaatggtcagattgttcattgat

SEQ ID NO: 137890 - DNA, 415 bp, Arabidopsis thaliana
aagaagccaaaacgtcaagatgctaacaacccttgtagtctaaccactcccaagatttaagaattttcttacttttgttctagttttgttgagaaaaagatgcatccgatcttcgatgccatccttcaaaatgaccttccagcttttcttggtttggtggaagcgagagaatcttccctggaggagagaagcgaggaacagaacaccaacaacacggttttgcacgtagctgcaaagctcggtcaccgagaactggtcgccaagattattgagctccgaccttcccttctctcttcccgtaacgcgtacggagacacacctttgcatcttgctgctcttcttggagacgtaaacatagttatgcagatgttagacactggattggaactatattccgcacgcaataacaagaacc

SEQ ID NO: 137891 - DNA, 241 bp, Arabidopsis thaliana
atgctctcttttccactatcgccatgattgctcatacgtgcattgaatgatctgatccacactctaaaaaattgggctttcatcagtacccgaggtaatggcaccgtggtccggcacttgcatgagacgtcgagtgatattctctgtggtttcagcatcattagtgtgtggacctgctctttactggaaattgtatactggtttcgttggttctgctcgtaacacgatctctatttgtcct

SEQ ID NO: 137892 - DNA, 421 bp, Arabidopsis thaliana
agtttcatcttgttgcttcggagcgagcgagaattatcgtcggagaatttatcgtctctctctctgaaaattctgatcggtgaagaatcgtcggatcgaaagttcgtttatcttctcgtttacgtttccgtgatttaaatcctttggggtttttttttcttgatttcagaagaagaagagaagaaacaatccgtaatctagacccttgaattgacctaataataggatacatatgatgactatgaagcagtctttgagtggcagggttcttaggggggtctttggtatctatctgtaggagggcttttaggtgctgtttcgggagattaaagccagattcaaggtgagtctgagagcttggttcttgtatcttcttgtttaccaatgggaatctaggtcactgagaaaccatccttcttgt

SEQ ID NO: 137893 - DNA, 254 bp, Arabidopsis thaliana
tgcaaagaattggcagcgacaataacaatgtggaacaacggcctcagattatatatgaggacgatgaaggtgataaggttttgattacatcggatagcgatttggttggtgctgttactcttgctaggtctacaggacaaaaggttttgaggctgcatctggacttcactgagtcaacaaggagcttgagctcagaaaccacccaactcaagaaaggtgattctcgagacagaggaagcggatgggtttcatgg

SEQ ID NO: 137894 - DNA, 300 bp, Arabidopsis thaliana
aagaacaacttcttcaggttctataaagagattccgaagaagaatcttttccagaaacagtgtaagtcttatcttcttctttaggctttaagatgactgctgaagttaaggttgaggagaaacaggtggagtcagaggttgttattgctcctgctgttgttcctgaggagactactgttaaggctgttgtggaagagactaaggttgaagaagatgagagcaagcctgagggtgtggagaagagtgcttccttcaaagaagagagtgatttctttgctgatttgaaagaatctgagaaaa

SEQ ID NO: 137895 - DNA, 333 bp, Arabidopsis thaliana
atccatttcttgttcctttgtgtcgccggagatatatatcttcgacatcggtgaagaatggggtaccgtcgttttaccgatggttggccgagaagtatcctcttttagtggcggatgttatcgaggaagagcctgttgaaatcgaaggcatcaagattcctgtggatactagtaaacctaaccctaacaacctcgaatacgataatctttatctcgacatgaacgggattatccatccttgctttcaccccgaagataggccatctccaactacctttgaggaggtgtttcagtgtatgtttgattacattgataggcttttcgtgatggtac

SEQ ID NO: 137896 - DNA, 329 bp, Arabidopsis thaliana
acggacgcgtccgcccacgcgtccgaacagagcaatctctaaaaaatctcaagaaacctcactaaaatgggttcaacggcagagacacaattaactccggtgcaagtcaccgacgacgaagctgccctcttcgccatgcaactagccagtgcttccgttcttccgatggctttaaaatccgccttagagcttgaccttcttgagattatggccaagaatggatctcccatgtctcctaccgagatcgcttctaaacttccgaccaaaaatcctgaagctccggtcatgctcgaccgtatcctccgtcttcttacgtcatactccgtctt

SEQ ID NO: 137897 - DNA, 318 bp, Arabidopsis thaliana
ctcttttcatttctctctgatttctcgatctctccgtccaactatgtctgccttcacaagcaaattcgccgatgagttgatcgccaacgctgcctacatcggcacacctggaaaaggtattttggctgctgatgagtccactggtaccattggaaagcgtcttgcgagcatcaacgtcgagaacgttgagaccaacagacgtaacctccgtgagcttctcttcaccgcccctggtgctcttccatgcctcagtggtgtcatccttttcgaagagactctgtaccaaaagagttccgatggtaagcttttcgttgatat

SEQ ID NO: 137898 - DNA, 195 bp, Arabidopsis thaliana
accacccacgcgtccgctccagcatatggttatggagattctactatgtagagcgttccaaaaggaatggctgttgtcactattgttttcgctgcacttggattcatgtcgcctgcctcaagaggaatgctactaaccgggatgattattctctaccttttcttgggtattgttgctgggtacgctggtgttcgg

SEQ ID NO: 137899 - DNA, 335 bp, Arabidopsis thaliana
atcaacccaagaagacaaaaacacagagagagaaagagagagaaatggcgacgacaacaacagaagcaacgaagacatcatcgaccaatggagaagatcagaagcagtctcagaatcttcgacatcaagaagttggtcacaagagtctcttacagagcgatgatctctaccagtatatactggagacaagtgtgtatcctagagaaccagaatcaatgaaggaactcagggaagtgacagcaaaacatccatggaacataatgaccacatcagctgatgaaggacagttcttaaacatgcttatcaagctcgttaacgccaagaacacaatggag

SEQ ID NO: 137900 - DNA, 93 bp, Arabidopsis thaliana
aataagctgagatttatgtgaataattgggagattatcccataaaaggttccaaataaagacaaatttcaaataaaacctgttagtccaagtt

SEQ ID NO: 137901 - DNA, 220 bp, Arabidopsis thaliana
acggacgcgtgggatgaaagcaaacctgaaagacgtcccacaaaacacatgcccactccagctcaatggactaacgcattcaatcctgcattttcgtattatgtctactattgttatgctaacctctatgtgttaaataagcttcgagagtcaaagggcatgactactatcacgctacgaccacattctggagaggctggtgacattgaccacttggctg

SEQ ID NO: 137902 - DNA, 366 bp, Arabidopsis thaliana
agtttctgaatgtgaagcttgaggagagttctatatccttttgaattgctgtaatttggatcttacatagacgagagcagtccttctggatctacgcggtttaggcgggaggaggttttggtattgggaatgcgtttttgagctgatcttatacgtctattcaggtttagctcagtctagaattggttggcttgggaaaggtcgatgaagaacgggatggctgagtgcagcgtatgtcgttcaaggttggtttctcccagtagcaaagctatttcaagggcttatgacaactacaactacaagattagagtatcctcaaaacaacgagctctcaatgtctttttggtagtcggtgactgcatgcta

SEQ ID NO: 137903 - DNA, 267 bp, Arabidopsis thaliana
accacgcgtccgcggacgcgtgggcaaacttggatctcgcaccagtttctttgtttcagaatgtgattttgaggatcttgagaatttcaacttcattgtctgttagtctctcttgtgaatttctttggagatgaaaagattcgagaggccaagaacttcgattcactcgcagccaaggaccagtaccagttcaggtaagaaagatcagaagccgcgtagtagtagtagtaaaggatctggtgtgaaaccgttgaatgcggctcagct

SEQ ID NO: 137904 - DNA, 296 bp, Arabidopsis thaliana
aaaaagaagaaagatagagaacaaaaatgggaggcaaaggtgtgatgatggtggcgatactttgcctttgggcactctctgcaacatctgaagcagtaacagaggctgagccaggtttgatgatgaacttctacaaggacacgtgtcctcaggccgaagacatcgtccgtgaacaagtcaaactcctctacaaacgccacaagaacaccgctttctcttggctccgtaacatcttccatgactgcgccgttgagtcatgtgatgcgtcgcttttgctggattcgacaagaagagag

SEQ ID NO: 137905 - DNA, 410 bp, Arabidopsis thaliana
aaaaccttttttccctcttcatgcttagcctatcatgagcaacatccctagatctctcaccgactcagatctttctctatttactctcataatctcttctgctgttgatccttggcctttttctatcaccgttttttagcatcaacaaaactcaccggaaaatctctaacaaccaccaccgtttaacacttctcttcctcctcgtcgatcgtttttaaaccaatctttgtgtttcttgtttggtttttcggtgaaaaagattccttcttcttaatgggttttgaagaaaaccaaaaacagagtccaaaacagagtccgaatcatatcaagcatatggtgttcaagttccacttccatgttcctcatctccacatactccctcatcatcaccaccaccaccaccatgatgt

SEQ ID NO: 137906 - DNA, 392 bp, Arabidopsis thaliana
accacccacgcgtccgcccacgcgtccgcccacgcgtccgcccacgcgtccgcccacgcgtccgctctttttcaattcctcccatcaatcttcttcatttgttcttctgttggtggtggtgatctagttttcaaagaatcgattttgccaagtgggttcttcttgataacctttcttcttctttgaaatgggttcttctgtggagcagaacattcttgttactggtggtgctggctttatcgggacgcatactgttgttcaacttctcaaagatggttttaaggtttcgatcatcgataattttgataactctgttatcgaagctgttgatagagttacggagcttgttggtcctgatctctccaagaagctcgacttcaatctgggtgatc

SEQ ID NO: 137907 - DNA, 382 bp, Arabidopsis thaliana
agtgggaacaaatgacacaagtgtgtcctcgctgtgtaacggcatcatctcacattcagaagaccctgaatacgaaaaagaatcatcattgtcagcatccgtaccagtctctgaagaaggaaaggaagttgacgtaaaggttgatacagtagattctgaatcaaaccgttctattgacatggaacatgattctggaacagatcatcaagaagaagaagcaaatgggaaagaagatccaacggttgaaaatctggctgttgattcttcttgtttggacattactactccatctccatctgctgctacagagttcatacctcaagagaacgaacgttcaagacacgagtccaaacctctggagaaagaacattcagacaccgag

SEQ ID NO: 137908 - DNA, 295 bp, Arabidopsis thaliana
aaagaagaaagatagagaaaaaaaatgggaggcaaaggtgtgatgatggtggcgatactttgcctttgggcactctctgcaacatctgaagcagtaacagaggctgagccaggtttgatgatgaacttctacaaggacacgtgtcctcaggccgaagacatcgtccgtgaacaagtcaaactcctctacaaacgccacaagaacaccgctttctcttggctccgtaacatcttccatgactgcgccgttgagtcatgtgatgcgtcgcttttgctggattcgacaagaagagagc

SEQ ID NO: 137909 - DNA, 256 bp, Arabidopsis thaliana
  unsure (1)..(256): unsure at all n locations
ggtgaaactgaattcttcacngagtatggagaatctaacaggtatcagattcaagaggttgttggcaaaggaagttatggtgttgtggcttctgctgttgactcacacactggcgagagagttgcgatcaagaagatcaacgatgtgtttgagcatgtctccgatgctactaagattctcacagagatcaaattgcatcggttgcttcgtcatcctgatgttgtggagattaagcacatcatgttacctccttctc

SEQ ID NO: 137910 - DNA, 183 bp, Arabidopsis thaliana
agcgagttcgtcgtcaatttggtaaaaccgtcgtactaatcgccgatgagcgggtttgcctcacaggttccatccatggcgcttcttgggtctggactcaccggcgaggtactcttccattagtttgactgacgtttccgattgtacggcttttgttccgatgcgtgatttggggattcgtga

SEQ ID NO: 137911 - DNA, 328 bp, Arabidopsis thaliana
aaatgaatgtcatactcagattactgtaacttaacaggaacaatataagaccgaaagagaatcagactattctgaaaataagaataagttgactatgaatatgatgaactgatttaatcgtatatggagaaacgttttaaaggcaaacctatttggaaaaacacttgactgctgtagcaactgatcgaacattgtaagcgattataccgttacttatatctcatttttacttatgatagaagaaaactataaagacttacaggctttgaagtctttaaggaacaacattgctacaatgtggaagagggatcacattttccttactcat

SEQ ID NO: 137912 - DNA, 312 bp, Arabidopsis thaliana
  unsure (1)..(312): unsure at all n locations
aacacgcgtccgaaaagaagagggaatttaaaagggggaacaaattccctccaaatgattgggccataaaccagagacaaggctcaagccaactctgcttctatctatctctcactctactcataaaaatctccatatacgcttcttcttcgttctctgatttgctggtgcgcttctccgtcatcgttcgccgatcatagtcgatcccgccgcttccagatgcttattccttggcctgatgggacacaagtgatatcagtgttaccgttgatagagtggtgttttggttctgtnttggtgtgagcgtatgcc

SEQ ID NO: 137913 - DNA, 284 bp, Arabidopsis thaliana
acagagctgcatcacaaacgaggaacatcaaaatatcggtagacaagacgagtattcaatcaagatccaaatcagcgaaacagagaacacaaggatacacatcaaaggatgaaagaacttgcaagaaatcttgtgactctcgtgtgttggttgatgtacttattacatagacaaaaaacgtgagaaactttatgagattattgattctttaaggataatctcaagtagctttcacttcaaggaagagcaaaggtacacacacagtagcgaataatcacaggatc

SEQ ID NO: 137914 - DNA, 283 bp, Arabidopsis thaliana
acacatggagaaaggattttggtactgacaccattttcgaggattttgaatttgaagagtttgatgaagttctgaaatactaccctcatggttatcatggtgttgataaagaaggaaggcctgtttacattgaaagattaggactacttgatccggccaagctcatgcaagtcactacagtggaaagattcataaggtatcatgttcgagagtttgagaaaactgtcaacataaagcttccagcttgctgcattgctgctaagagacatattgactctagcac

SEQ ID NO: 137915 - DNA, 202 bp, Arabidopsis thaliana
taaatatcaacgagttgctttgcataagattggtcggtggggagctcaaatggtgcaacttcatggaaacatgggttgtgacaagggagccgtacaatggaagggaatcggaagctgcgtccttaattgagcctcatgcatcacgaatgagtcccgaagcacctaatgttaagctcgatctcaacttgggaatctctctttc

SEQ ID NO: 137916 - DNA, 463 bp, Arabidopsis thaliana
ccggggccacccacgcgtccgaaaaaaagcgtattcctcgtgagcactaacttctcactcattcttcttcttcagctgaatccaaatacccatttccatttttaaccgtggttggattgttttgagagttgaaggaagaagatgacgtctgacggagcaacgtcgacgtcagctgcagctgcagcagcagcgatggcgacgaggaggaaaccgtcgtggagagagagggagaacaatcggagaagagagcggcggagaagagctgttgcggcgaagatttatactggtcttagagctcaaggtaactacaatcttccaaaacattgtgacaacaatgaggttcttaaggctctttgttctgaagctggttgggttgttgaagaagacggaactacttatcgcaagggacacaagcctctacctggtgacatggctggatcatcttctcgagcaactccttact

SEQ ID NO: 137917 - DNA, 351 bp, Arabidopsis thaliana
aaaaaagtaaagagatgaagacagcagagctcatattcgttcctctgccggagaccggccatctcttgtcaacgatcgagtttggaaagcgtctactcaatctagaccgtcggaggtctatgattacaatcctctccatgaatcttccttacgctcctcacgccgacgcttctcttgcttcgctaacagcctccgagcctggtatccgaatcatcagtctcccggagatccacgatccacctccgatcaagcttcttgacacttcctccgagacttacatcctcgatttcatccataaaaacataccttgtctcagaaaaacatccaggatttagtctcatcatcatcatc

SEQ ID NO: 137918 - DNA, 444 bp, Arabidopsis thaliana
aacaaagcctctctaaataaaaacaaaaagctaactgaataagaagaagtagtgatgcatatcacaaaaccacacgccgccatgttttccagtcccggaatgggccatgtcatcccggtgatcgagcttggaaagcgtctctccgctaacaacggcttccacgtcaccgtcttcgtcctcgaaaccgacgcagcctccgctcaatccaagttcctaaactcaaccggcgtcgacatcgtcaaacttccatcgccggacatttatggtttagtggaccccgacgaccatgtagtgaccaagatcggagtcattatgcgtgcagcagttccagccctccgatccaagatcgctgccatgcatcaaaagccaacggctctgatcgttgacttgtttggcacagatgcgttatgtctcgcaaaggaatttaacatgttgagttatgtg

SEQ ID NO: 137919 - DNA, 217 bp, Arabidopsis thaliana
ccacgcgtccgcataaatctacgaatgaaaagttcactcattattttttcccactcttactctgttctcgctacagaacctcctgggaaaacacctgagaaaacttgatccacccgatttccccaaatcttcacaatttccggaaactctcccgatcgtgaaccagataagtgaggttccaaatggggtctgtatcgggtcaaaccccagttacaac

SEQ ID NO: 137920 - DNA, 322 bp, Arabidopsis thaliana
gtaaaacctccaaatcgtgaggaaatccagagttccatcagatctaactctcttagatctgattatcatggattactctttccttctaatcattctcttactcacaatctctacttcatgttgtgctgctccttcttcttatgtggaagaacaattgagagacagaatcagtaacttacctggacaacctagtaatgtcgattttagacagtactcaggctatgtcactgtgcatgaagaacgtggaagagctttgttctactggttggtcgagtctccgttggcccgtgacccaaagtctagacctttggttctgtggctc

SEQ ID NO: 137921 - DNA, 339 bp, Arabidopsis thaliana
caaatcttcaccacagacgatgaagcatttgagtattacagtacattcgctagaaagagtggtttctcgattcgtaaagcacgatctacagagagtcagaatctacgtgtttatagaagagatttcgtttgttatcgttctggttttaatcaacctatgaagaaagctaatgtagagcatccaagagagcgtaagtctgttagatgtggttgtgatggtaagttgtatttgactaaagaagttgttgatggtgttagtcattggtatgtctcacagtttagtaatgttcataatcatgagcttttggaagatgatcaagttaggttgcttcctgcttat

SEQ ID NO: 137922 - DNA, 162 bp, Arabidopsis thaliana
cacaagcgtcaggccagaggaagttgtgggaactgattttgcaaaaggaatacccaatcatgatgttcacatcgagtttggtgaccaaattcggagtggtgtcactgacgttcctggagaggatgcgtactatctcgaaccgagattgtttgggaagataat

SEQ ID NO: 137923 - DNA, 134 bp, Arabidopsis thaliana
gaaatatggaagcccttgattttgcccactgcagtcatatcgctccaatccctctctataatccaatgtgcgaaatttcaccagttctaggttttgttgctgaccgatcagtcctttactcaatggcaatggct

SEQ ID NO: 137924 - DNA, 379 bp, Arabidopsis thaliana
agctgaattacatatgcttgcgtatacttggagtaggtcccgatggaggactagaaaacgcatgcaaacgggccaggcaatggattcttagccatggcggtgtgatttatattccttgttggggaaaagtttggctctcggtacttggaatctatgattggtctggagtcaacccgatgcctcccgagatttggttgctaccttatttcctaccaattcacctagggaaagcttttagctatacccggataacatatatgcccatctcttatctatatggcaaaaaattcgtgggtcaaattacacctcttattatgcaactacgtgaagaactacacttacaaccttatgaagaaatcaactggaacaaagcgcgaca

SEQ ID NO: 137925 - DNA, 135 bp, Arabidopsis thaliana
acgcgtccgcaaagattaacttcgtaaatagaaggttacatttagatccttccttttgtcttttcccttgttgagatttttgatattgacaaatttgtacattggagtaataatgaaaatacaaattttggcctc

SEQ ID NO: 137926 - DNA, 406 bp, Arabidopsis thaliana
aaacgactttgaagagtcaaggcgaaacaactaaaaaatctcataaataatagagagaaaagattcatcatcaccaaaagatcataaaagaagtaaagaagaagaacttctctgcatcaatggcgatctccaagctccatctactcttccttctctcagtctttctctcccttcatcctcttgttctttccgacaccgccgatgaagaagatgttcttcttacaggcatcaacagttacagagcatcactaaacctaacaaccttaatacacaaccacaacgcagaatgtctagcagacgaaatcgcagaccaattcaagaaccaaccttgcacaaacaccactggctcagcctctgtccctggaaccacacctggattcccaaacttgcctaacctcctctcaaa

SEQ ID NO: 137927 - DNA, 353 bp, Arabidopsis thaliana
cttccctctttcgttttctcgcgactctctagggttagggtttgttgattttcatgcgttattcttcatcttcttctgcaattcgcaactagagaagctaattccattgaagttaaggtggggataatttttggttttagaagatactaatggctggagtactaactggggaatgttcttacagtgagagtggcatttcatcagactcaaagaattcccatgaaaatgcaagaatgaggtttcccgctggtattttgggagataagagatagaagagaattcaccgtcaatgttggatggtactgacttattgaaggaaacatacctccgcaaatcctactgtacatttttgc

SEQ ID NO: 137928 - DNA, 400 bp, Arabidopsis thaliana
gggtccacccaaacgtccggatctgtttctccctctctctaaatgatggcaaacaactgtaatttagtcagtgttctatgtgtaattttggtattgaccctctttcacaaccccatcactgtcgccggacagaatagtccggtggtcgccttgttcacctttggtgactccaacttcgacgccggaaacaaacagactctcaccaaaaccttagtcgctcaaggtttctggccgtacggaaaatctcgagatgatcccaacggcaaattctccgacggcctcatcactccggacttcctcgctaaattcatgaagattccgctcgcgatcgcgccggcgcttcaaccgaacgtcaatgtctcacgtggagctagtttcgccgtcgaaggtgctactctac

SEQ ID NO: 137929 - DNA, 221 bp, Arabidopsis thaliana
gtccaggagaagaacaatatcacaactatccaaatatcgtcatagtagcagccatgacttcaaattcagtccgtgaaattcgtgagggagaaatcgatggtaacacatttctcatatacactttgttatctcaaaccgagaacccttcttcccgtgaagcaactgttgattccgatggaaggactgtggacgacctctctgttgatcctctgatcctctgt

SEQ ID NO: 137930 - DNA, 391 bp, Arabidopsis thaliana
actaaacttcattcatagatctttgaaatgatgagctatcactacataaacaccttatgcattgtaatttctctcttgtcttgtctcttcatcacctcttcttttgcaggaccagttccaaaccaggaaaatggatctcagaaaattttccccactcagatatcatcacgtgatagtaaggtttctctatcgagcacggtgaagggtctgagagaacgtcctccatcgtcttactctctcaagatggagtctttcaacacactcatgaagtctgtttacactgagagatacgaatctcgtccttttagggtcggtagatacaactggacgcatgttgtgtatccgaagggaaacaagaacgataacggtacagggcacatttcgctatacg

SEQ ID NO: 137931 - DNA, 127 bp, Arabidopsis thaliana
gtccgcacggtgactctatcacccttgctgtctcgtcgatataaacttgcacgtctccgctgattaaaagcacaaaacgcacacgccaacggcgatccaaattccgagacagacaaccaaattttcc

SEQ ID NO: 137932 - DNA, 298 bp, Arabidopsis thaliana
catttgcaagacaacgtataattaagaattagaagtggtttaggagaggagagagaagagagagatggaggaatatagacttggagagctgagacacttgctgacaacggttttcctgtcgggattctccgagttcttggtgaagccagtgatgactgacgtcaccgtcgccgcggtttgctccggcctaaacgaaacatgttctctcgccgtctatctcaccggagtagaacaagtgacggtaggactggggacaatggtaatgatgccggtgatcgggaatctatccgatagatat

SEQ ID NO: 137933 - DNA, 317 bp, Arabidopsis thaliana
cgaatttcttcattgctaaaaactctcactttctgcaatttcgtctgcttgtttcactcacaagaatttcacatttttttcaaaaataaacactgcttaatgcggattggttgttcacaaaaggaccaaaaaatcgtagaagtttggattgatttcactatggaggaagtagcagctaaggttgaggaagaaactgtggaaaccaatgtagatgcagtgaaagaggacaatgcaactatagctaatgaaagcagaagcccagagagtgtttctgcagtgtctgtggtgtcaaatcgagctgcttctactaaaaagaa

SEQ ID NO: 137934 - DNA, 408 bp, Arabidopsis thaliana
gttccctgagagagagagagagacaacaccttcgcattcgctaactttctctgtaaccgccatgggtattaagggtttaacgaagcttttagccgacaatgcgcctagttgtatgaaagaacagaaattcgagagctattttggtcggaaaatcgctgttgatgctagcatgagcatttaccaattcctcattgttgttggaagaactgggactgaaatgctcactaatgaagctggtgaagtcactagtcatttacaagggatgtttaatcgaacgattcgtcttcttgaagctggaattaagcctgtctatgttttcgatgggaagcccccggagttaaagagacaggaactggctaaacgttactccaagagagctgatgcaactgcagatttgactggtgcaat

SEQ ID NO: 137935 - DNA, 335 bp, Arabidopsis thaliana
tcgaccagtgaaagctcctatctcttcctgaggcattgtgatctcttgttaaaatggctagtactctgaggaacattcatggtaagagatctaatttgcaatctgagtttactggaaatggaggaagtaagagaagaaatcttcatgatgaaacagatcaaaatgttattgcttcagaagacactgtataccgctacttgtgtcccgtgaaaaagaccgggagcattatcgggaaaggcggcgagattgctaagcagataaggtctgagactaaatcaaacatgaggataaacgaggctttacctgggttgtgacgagcgtgttgttaccatgta

SEQ ID NO: 137936 - DNA, 409 bp, Arabidopsis thaliana
  unsure (1)..(409): unsure at all n locations
gaccaacagtgttcctgtaggaagcggcaaacttgcagctctgttctcttgaaatggagaaaacagtgagatgtgttcggtggggttatgaggttaatacctcttctgatgcttgcatcgacgcaattaactcctattttcaacaggttcttagttatgggaggaagaggaaagtgattctagaagcaccactctacgataaagattgtgttttgggcagcattttagctgctcatttcctttcttcatctgatccttctagagctaattcctatgttgaagctgcggcatctaatctcgaacaatctacaccttatgagaaagcggtttacgaggctgttacttacctaatctctgaggatanggatgacgacttggcttttgaaatgcacaccaagctacttaaaag

SEQ ID NO: 137937 - DNA, 428 bp, Arabidopsis thaliana
gtgagtctgatgaagagagatttatcacagacgcagagagagatggttctggctccgttcttggctttcagctcactcctcctggtgatcaacaaacagttagcactagcacaggagaaattacacatcatgaagagaagaaagaggctattgatcaaattgtaatggctgactttggcgtacctggaaatagagctgttgaagaaggagctgcagaggttgggattccgagtggaaaagctgaagttgtagtgtttgatgacgcggtgcacagtttccggaacgtattccagaaccaagttgagataaagctcatctttttcggttgtagagaagaaacaatgtttcaaagacacaacatttggatggtcaagtagcctcattgtttgaagctcacgattcttgtacctccgatcttgtagaacttt

SEQ ID NO: 137938 - DNA, 425 bp, Arabidopsis thaliana
caaaactgaatcaaaccccatggcatttacttttcctccttcgtatcgcacgctagtcgggttatattatatatttacacttatgcacacggctgtctcaacaccacccgatgatcctgtcaaatgtgtgtcaggaaacacgaactgtacagtcactaactcatacggagccttcccagacaggtccacatgtcgagccgccaacgtggcatacccaaaaactgaagccgagcttgtctctgtcgtggctgcagccactcaagccggacggaaaatgcgtgtaacaactcgatattcccatagcattactaagctcgtgtgtaccgacggaaccgaaggtttgttcataagcacaaagtttctaaaccatacggtacaagccgatgcaacagccatgaccatgacggttgagagtggcatgacgc

SEQ ID NO: 137939 - DNA, 431 bp, Arabidopsis thaliana
caaaaatcactaaacctatcttcttaaccaaaagatcaatagattacaaaaatgcagggagctctgtttatcaaaccaactattcttcttcctcttccttcttcagtttcttctccaaaactcacttttcttcttcctcacgcaaccaaagcttcaagactctcatctctcagatcaaacaactcatcatcatcatcatccttaacgtctgaccctaacaccgtcgactataactcctccatcctttctgtttttccagctgaagcatgcgaagtaatcagtggatacgcttgttctgctgatatttaccctgaagtcaagctcgatacaaagcccgtctcacgtcccgtggcttcagagcccgttgacagagaatacgaagagtataacagccccaaaacggttttccgtgaagaggcctgcgatgatct

SEQ ID NO: 137940 - DNA, 430 bp, Arabidopsis thaliana
caaatcctcaactccttcttcttcactaatagtataccacaaaacctcaaaattgtaatttattagattatcgtgatggccttagctaaagagttaatgggttatcctctcatcacagaaaggtcatcacttgtctcgtcggcgtcgcatttcaagaagaggacacagtcaacacagttctcgatcaacccttttgaccggagaccaagaaaaaccaaatccggcgtcgttgcagccatcagcgaggatttggtcaaaacgctgcgtttttccacaacgaccggagacagaaagagcgaagaggaggagaaagcggcggtgaagttcaaggtgagagctgtggttactgtgaggaacaagaacaaggaggatttgaaagagactcttgttaagcatttggatgcttttgctgataaaattggtcgaaaca

SEQ ID NO: 137941 - DNA, 443 bp, Arabidopsis thaliana
cacaaattggacagaacatatcaagcatgtaatatacagaagccgacaaattgcaaaatttacctaaaccccatcttacaccaccgtcagattctgatgtaagtattatcaaagctcaagaacaatcacatcatcagaatctaacttatatatcaaaggtccagaattttctccattgaagctggattctaaggaaagttatcaaaagttttgagagctttggatagtgaagctcaaagaactaaacaatgggcttcagagtttgtgttattgtcgtcttcttgggttgtcttcttctagtccctgagaaaacaatggctcaagaaatgaaacgtgcatcgatcgttatccaaggagctcgacgagtttgtgagaccgatgagaactttgtctgtgcgacattggactggtggcctcatgacaagtgcaactatgaccaatgt

SEQ ID NO: 137942 - DNA, 381 bp, Arabidopsis thaliana
cagacgcgtgggtgcgacctcagaatcagtttctaaagtccatgtattttcctctgacaatacttttagcaaggctctagcaaatgctagagatgttgaatttgaccgctcagatgtggagggaaatgcccaccctgctggtccacatgttcggataccatttgcttcactatttgatactctcggcatgtttttagctgatgagggcgccgtcttgctcctctactcattgttgcaagggaattccgactttaaggagtatgtgttggtgcgaactgatttggatactttgttgatgcccatcctggagacgctgtataacgcttcaaagagaacatcatctaatcaaatatacatgatgctaattgtacttctcatact

SEQ ID NO: 137943 - DNA, 429 bp, Arabidopsis thaliana
agagaacataaggaaaagctacaaaggcgtgactgtgcttaaagatgtgacatgggaagtgaagagaggtgagaaagtagggttagttggtgtgaacggagctgggaagacgactcagctcaggattatcactggtcaagaagagcctgattctggtaacgtaatcaaggccaaacccaatatgaaagtagctttcttgagccaggaatttgaggtttcgatgagtaagactgtgagggaagagttcatgactgctttcaaggaagagatggagattactgagaagcttgagaaagttcagaaggctattgagggatctgttgatgatttggatcttatgggaaggttattagatgaatttgatttgttgcagagacgagctcaggctgtgaatttagattccgttgatgctaagattagtaagttgat

SEQ ID NO: 137944 - DNA, 384 bp, Arabidopsis thaliana
gaaagagaagaacttgaaactcaccaaaaacattgatcattatacacaatcgtgatggagagttcttcgaattccgaccaaaatgagggaactccgacgagctctgtttcttcgccgtaccggagaacatactcagatatccccggattatctcaccggttcgacgttcagagcttttataaccggccgtcaaacactaacgctgttgtcttgagtggccatgaagaagatgtctccgaagacgccgaggaaccaaaagatgatgtcgtcaacgacgtccacggagatggagacgaagaagacagcgacattgattctgcagaagatgcagagctagagatgatgagggaaagatttgcgaagctgttgcttggtgaagacatg

SEQ ID NO: 137945 - DNA, 400 bp, Arabidopsis thaliana
aaagatttacaagcatcccaaagaagaacgaatcgcgagaacatggggaaccacggctcgtgggcttccttatgcggaagaagcaatcaccaaagctggaaactggttgattggaggtgatttacaagttttggagccgatcaagtacaatgatggtttagaccggtttcgtttatctccgtcgcagctgcgggaggagtttataaggcgcggtgcggacgcggttttcgcgttccagcttaggaacccggtgcataatggtcatgcgcttcttatgacggatactcgtagaagacttcttgagatgggttacaaaaaccctgtcttgttgttgaatccacttggtgggtttactaaggctgatgatgtacctctcagctggcgtatgagacagcacgag

SEQ ID NO: 137946 - DNA, 359 bp, Arabidopsis thaliana
acactctccaccaccacccaagaagcactacgtgtacaaatctccccctcctccagtcaagcactactctcccccaccggtttaccattccccaccaccaccaaagaaacattacgtatacaagtcccctcctcctccggttaagcactactctcccccaccggtttaccactcaccaccaccaccaaagaaacattacgtatacaagtctcctcctcctccggttaagcactactctccaccacaccatccttacctctacaaatctcctcctcctccataccactattagatatctctatcacggagaacacgatgtacacaagaagacaaagacaagacgaaaccagtactggtga

SEQ ID NO: 137947 - DNA, 397 bp, Arabidopsis thaliana
ggtcgagcacgcgtccggattactttctcaagactttcaatagtactcagttccccatttgataagctccttaacatgagtgagctcaccagcagcttcgtatttagcactatattcaatggggaactgattactttctcaagactttcaatagtactgctgattccattgatgatcttgtgtcacaggttggatcagggaatactgatgatggaaatacagatcctaatgaccattactgttggatgcgacctgaggatatggactataaaaggcccgtgactacttgtaatggtggatgttcggatctcgctgcagagatggcagctgctctggcttcagcatctattgtattcaaggataacaaggaatattctaaaaagcttgtccatggtgc

SEQ ID NO: 137948 - DNA, 330 bp, Arabidopsis thaliana
agcgactcactcagatctatacaccttcttcttcttcttcttcgtcctcttcctcttcgcttcgttcgtaaactcatctgatctgtgagtgccattatcgttgagagattatgttgacaaagttcgaaaccaaaagtaacagagttaagggactgagttttcaccctaaacgaccatggattctcgcgagtttgcacagtggcgtgatccagctctgggattatcgtatgggtactttgatcgatagattcgacgaacacgaaggacctgtacgtggtgttcatttccacaattctcagcctctcttcgtctccggaggggatgattaca

SEQ ID NO: 137949 - DNA, 351 bp, Arabidopsis thaliana
atcaaattgttaaagcaactggagttgttacaaagactgcttgggctggagctgcttataatcttttgctatacatgctggctagtcatgtgcttggtgcagcctggtatatattatcggttgatagatatacatcgtgctggaaatcaagatgcaatggtgaagctggccaagttaattgtcagctatattacttagactgtgattcaatgtatgacaataatcagatgacttgggcaaatgtcacaaaagtgtttaaactctgtgatgcacggaatggcgagttcaagtatgggatctttgggaatgcaatcacgaaaaacgttgtgtcttcacagttcttcgagagat

SEQ ID NO: 137950 - DNA, 352 bp, Arabidopsis thaliana
accacgcgtccgcggacgcgtgggttcatgtgcaaggaatcccgggtggggatccgtctctttttgatggattgtcgtcggttttctcccgggagctgtggaagtgtagtggttatgtgcctaagaagtttaaccttaagtatagagagtttccttgctgggatgagcaagagaaggatgaagacggtgcaggggttttgttttcgatgtcgaaggagaatgtgattgctgctcctgttagtactttggttggaatgaggaggagtcttgatggtaaaggaggaaccaatgacgtgaagcttggttgtgactctggtgaaacggatagaaaacattctcagggtgctattaa

SEQ ID NO: 137951 - DNA, 340 bp, Arabidopsis thaliana
accaaaaccccaaaaccaactaaaactgaaaaaacaaacgttgactttttgactaaccaccatcctccgccgtaaatcatgatcgccgccgtttacactctcttcttcttcttcctcttaatctcctctgtttattccaaagccacgatttcaatctctccccaaaccttaaaccgatccggcgacatagtcgtgatcaaatggtccggcgtcgaatcaccgtccgatctcgactggttaggaatctactcgccaccggactctcctcacgatcacttcatcggctacaaattcctctccgattcacccacgtggcaatccgggtcgggttcgatttcac

SEQ ID NO: 137952 - DNA, 342 bp, Arabidopsis thaliana
caaagagtggctgcttatgcagcgaaacgcgttcttctatgttttcaagactgtccagatcgtcatcattgctgcaatcacgtctacactcttcctgagaaccgaaatgaacacaagaaacgagggtgatgctaatctctacataggagcattgctatttggaatgatcatcaacatgtttaatgggtttgcggagatggctatgatggtttcaagactccctgtgttctacaaacagagggatctcttgttttatccatcctggaccttctcacttcccactttcttgcttgggattccaagctcaatattagaatcgacggcttggatggtggtgactta

SEQ ID NO: 137953 - DNA, 238 bp, Arabidopsis thaliana
accacgcgtccggtcagccgggaagtgcctttttgccagcccactactgaagagtatcagaactgaagtatccttctcattccggtgaagaagaattataatcagcctgaatctttttacttatcgttatctctggtgttgttttaagtttttagttggacacaatcagtattctgaatctttttgtgactcttttgtttaagctctgaaatgattttgttccttcgttcttggccat

SEQ ID NO: 137954 - DNA, 141 bp, Arabidopsis thaliana
aaatgatttggctgttcgtaactttcttctctccctccagaatctcctcttttctcttttgtattgttgtctcttgtaatgtttttcttcttcggttttggctatacaacaacttgcttaggaaaagttttaacatttgtg

SEQ ID NO: 137955 - DNA, 221 bp, Arabidopsis thaliana
cagacgcgtgggcggacgcgtgggagaaaagttgctggaaacattgagactaaccttaggatagtaggagccaccgcaattgaagacaaattgcagcgtggtgtccctgaagcaatagaatctttgaggattgcagggataaaagtctgggtcttgactggtgacaaccaagaaactgccatatccattggcttctcatcgaggcttctgacaagaaacat

SEQ ID NO: 137956 - DNA, 379 bp, Arabidopsis thaliana
attcggtggccaatacgcatcgcttatgagagaaatcactgagaaatctgtaagcggtggatttttaagagttacggcagtggtggcggaggagtgcgccgtagagacgcgactagtgaaagaaaacctaactcaattcgcggcggagatgaaaattcgtttccagattgagtttgtgctgatgaagacttttgagatgttatctttcaaagcgattaggtttgttgaggaggagcttacatcggaactccctcaccgtttctcggcaaaaaaactcaaacctttctctctaacttcaccgattttgagttttaaaccaacggttaagctcaattccagttgtcgcgctcaattgatcgatacggttcacaatctcttc

SEQ ID NO: 137957 - DNA, 361 bp, Arabidopsis thaliana
agagattctttcgccgatttcgcaaaaaccctatggagctcctccgatccaacttgtctagggttcagatccctgaacctactcatcgcatctacaagcatgagtgttgcatctccttcgatactccgagatccgaaggaggattgttcgttgatatgaatagttttcttgctttcgggaaggattatgtttcttggaactatgagaagactggaaaccctgtttatcttcatattaagcagactaggaagtctattcccgaggatcggcctctcaagaaaccgactctgctcgctataggtgttgatggaggctttgataacaatgagccagagtacgaggagtcttatagcatagtcat

SEQ ID NO: 137958 - DNA, 391 bp, Arabidopsis thaliana
accacacagacacaaaaacaatggctaaacccacatcacgaaatgaccgatttgcccttttcttcataaccctaattttcctgatcctaaccgtttccaaaccggtcgcctctcaaaactgtggctgcgcctctgacttctgttgcagcaaatatggctactgtggtacgaccgatgagttctgcggcgagggctgccaggcacgaccttgccggagcagtggatgcggtggagatcctgctgtttcacgagaaggaacggtgacacctgacttctttaactctatactaaaccaaagaggtgattgtcctggcaaaggattctacactcacgacaccttcatggccgcagctaattcttaccctagcttcggtgcttccatctccaaacg

SEQ ID NO: 137959 - DNA, 211 bp, Arabidopsis thaliana
aagaaggaagaggaacacaagaaacacgttgacgagcacaagagtggtgagcacaaagaaggtattgttgacaagatcaaagacaagatccacggtggtgaaggtaaaagccacgacggagaaggcaaaagccacgacggtgagaagaaaaagaagaaggacaagaaggagaagaaacatcatgatgatggtcaccacaagagcagcagtg

SEQ ID NO: 137960 - DNA, 393 bp, Arabidopsis thaliana
acccacgcgaccacccacgcgtccgcggacgcgtgggtcggattctgtttgggaaaagaagcttccggagaattatcaggatctgcttgatttattgccgccggagaggtatcatagtctcgcgaagaaagatatcttcgctgtgctttctcgtccaattccttttgatgatgataataaggaagtatggattgatatagttacaggacgagtttgtatggcgatttctgctagaggaatgtctattactggaattgaagaccggagatattggaactggattccaacggaagaatctaggttccatgttgtagcctacttacagcagatttggtggtttgaagttgatggaacagtgagattccatctcgcacctggtgtatactctctatc

SEQ ID NO: 137961 - DNA, 434 bp, Arabidopsis thaliana
accacccacacacaccttaaacctcgcatctttgagctcaacagcctttactttaaactaacactctcaagatgcgtgaaattgttcatatccaagctggtcaatgtggtaaccaaattggtgccaaattttgggaagtcatctgtgatgaacatggtgtagacccaactggtacatatcatggagattcagatcttcaattagaacgtattaacgtttattacaatgaagcaactggtggacgttatgttccccgtgctattttgatggatttggaacctggtactatggactcagtccgtgccggtccattcggtcaaatcttccgtcctgataactttgtctttggacaatctggggctggtaacaattgggctaaaggtcactacactgaaggtgctgaacttattgattcagtacttgatgttgtccgc

SEQ ID NO: 137962 - DNA, 318 bp, Arabidopsis thaliana
aagatgatgtatacattgcacctgctcaggttgttactcaagctgcttttgtaccggaagctccattaaccaccacagattatccagcaatgccagttgcttagagagccttttcgttttctggtttaaaacccaatggggatggttctttttttgggacagtactagttttctcatgttattctaagttaatacttaaagttctggaggttgaattacatcaaggatatgaatgtatgtttttcgttatcttttgtttaaattttatttatctattaacgatttgtctttttttaattagaaaatttgtgtttatcg

SEQ ID NO: 137963 - DNA, 365 bp, Arabidopsis thaliana
ccgggctacacaagatgtttcaccatctccatctgcgccacttgcaaactctcccattccaagaaactctcattcttctgttcctttagttgttggctgcgtaggcggtgctttttttcttctccttgtagctaccggtctctactttttcacaagtaaggccgggaaaactgtgaatccttggcgtactggtcttagtggacaacttcagaaagtattcgttactgatctgagattgaagctgcatgtgaagattttagtaatgtcattggatcttgtcccattgggaagttgttcaaaggaacattatcaagtggagtggagattgctgttgcttcttttgctactactactgccaaagactg

SEQ ID NO: 137964 - DNA, 393 bp, Arabidopsis thaliana
agtcaatcattaccaacctctgcgggcaaagatggaattcgagaagatcaaggtgatcaatcccgttgttgaaatggatggagacgaaatgactcgagttatctggaaattcatcaaagacaagcttattttccctttcctggagctggatatcaaatactttgatcttggactgcctaaccgcgatttcactgatgataaggtataatgtggctattaagtgtgcgacgattactccggatgaagctcgtgttagggagttcggcttaaagaaaatgtggaggagtcctaatggaactataaggaacattttaaacggcacagttttcagggaacctatcatttgcagaaacatccctcgtcttgttccaggatggacgaagccaatctgta

SEQ ID NO: 137965 - DNA, 352 bp, Arabidopsis thaliana
cgtgggcggacgcgtgggcggacgcgtgggctcctgagaaccagcaccaaaggagtgataacattggtccacctccacctaatcgacaaagaaggaataatgcttctggaactctgccagataatcgccaaagagttgcatctaggacgcggcctgtgaatcaggggaaaagggtagcgaaggaggataatgttgtgttgacagacccaaacttgcctcaacttgttcaagagttacaggagaagcttgtcaagagttctattgagtgtatgatttgttatgacaaggttgggaggtctgccaatatctggtcatgctccagctgttattccatcttccatatcaactgtat

SEQ ID NO: 137966 - DNA, 410 bp, Arabidopsis thaliana
atgttattgtggatacatatgaaagggattattctccgacttttggtcagcctgcttcttatctacgtgcaagaggagctcggtctgagcttggagaatttgtggagtatgatcttgacaatgaggatgaagactggctttatgagtttgataaggataagaaagaacttccacctgaaaagcttgagatcatcatttttaaactagaggtgttggatcacaagacgcgggaaagagcaggagttattacacctactctcggctctccagttcctgtgcttttgcagtttgatgctgcttctgatgtgctgcaagtactgtccattaattatggaaccttccaggcgatcttcaactactggaaagaaaagcgtaaaagatggcagaagcctatcttacggcgtttacag

SEQ ID NO: 137967 - DNA, 247 bp, Arabidopsis thaliana
acccggtatgatccaagtcttcctcggccacagcggaggatttgatgtcgaagggcatgagcttcctcggcttgtgtacgtgtcccgtgagaagcgtcctggttttcaacaccacaagaaagctggcgccatgaatgccctgcaaggccgtgagggaagcaatgtgttttttgatggatcctcagattggaaagaaggtctgctatgttcagttccctcaaaggtttgatggcattgacacaaacga

SEQ ID NO: 137968 - DNA, 283 bp, Arabidopsis thaliana
accacattttcacaaactgcaacaaattggatcaagttgcagaaagtaacatcatatctttcacttggaggaaaagccagatgatgtcagatgctctgaatcgctacaatgggggatttgttttggaatctttggtcagcacttgctttcctggatgtgaagtacctgcatcattcgatcaccaagcctatggagcattgttacagacgaaattacctcggcactggtgtgatagtaagcttactgggatagctttatgcgctgttatattgtttccggacta

SEQ ID NO: 137969 - DNA, 312 bp, Arabidopsis thaliana
aaccagggtaagcgtctaaattcggatttttgctctaaacccgatcagactcggaatgtgagtttaaatgggtcatcgttgaaattggaggaatcttacgagattgtgagaatcgaagaagagtatgggaattgggttcctttgacttataaacctaaacaacctttgtggaagcatttgtctgaagaatcatttcgctctgatttagatcacagcattgtctcatcctagaagaaagctttgtcttctaagctattaagcaatcatagtaatactagaaaacctcatagatgcacaaagtcgctctcttgt

SEQ ID NO: 137970 - DNA, 376 bp, Arabidopsis thaliana
atcaaggtatctttgaggtgaaggcaactgctggtgacacccatcttggtggggaagattttgacaacagaatggttaaccactttgtccaagagttcaagaggaagagtaagaaggatatcaccggtaacccaagagctcttaggaggttgagaacttcctgtgagagagcgaagaggactctttcttccactgctcagaccaccatcgagattgactctctatacgagggtatcgacttctactccaccatcacccgtgctagatttgaggagctcaacatggatctcttcaggaagtgtatggagccagttgagaagtgtcttcgtgatgctaagatggacaagagcactgttcatgatgttgtccttgttgg

SEQ ID NO: 137971 - DNA, 386 bp, Arabidopsis thaliana
atccagccagggtaaggggaggaacagtcggaagagcaaagaagggaccagaacttaaacttggagacataaccatcgtcaaggatgcgattacgcctggaagttacttcggaaacgagattcctgatagcatagcgatcatcaaatgtcaccaggacgaagtgttggtgctgcccgaaactgctaaagtgcttgcgtattccaagaactacgaggtggagatgtattcgattgaggatcatttgttctgtatccaaggacatcctgagtataacaaagagattctcttcgagattgttgatcgtgttcttgctctaggctacgtcaaggttggttttatttctcttttctcttaaccttgatcaatttacagacaacaataacat

SEQ ID NO: 137972 - DNA, 398 bp, Arabidopsis thaliana
acgagttcttctctataccatatccattgtttgctagctcagcatacgattgccgtgatgtctcttgcagtgaggctactacaattggtctgatcaaaacccgagacacttatccatttggtgtggatcctgtgtggcatggtacccgcagtgagctaccattcctaaattcgcttaagatgaaaatgtcaattcttattggagttgcacaaatgaacctcggaatcataatgagcttctttaatgcaaaattcttcaaaagtgctgtaaacatatggttccagttcgttccccagatgatattcttgaactgcttgtttggctatctttcggtcctcatcatcataaagtggtgcactggttctcaagcagatttatatcacgtaatgatctacatg

SEQ ID NO: 137973 - DNA, 424 bp, Arabidopsis thaliana
accaggaagctggtgatgtacagcctaattcttttgttttcagtagactcttagctggttttcgcgatagaggtgaatggcagaagacatttcaagttcttaaagagatgaagagtatcggtgttaagcccgatagacagttttataacgtggtgatcgatacctttgggaagtttaattgtcttgatcatgccatgacgactttcgatagaatgttaagcgaaggtattgaaccagatagggtgacttggaatacgcttattgattgtcattgtaagcatggtcggcatatcgtagcggaagagatgttcgaggcgatggagaggcgagggtgtttgccttgtgctacaacttataacattatgatcaatagttatggtgatcaagaaagatgggatgatatgaaaagattgttgggaaagat

SEQ ID NO: 137974 - DNA, 356 bp, Arabidopsis thaliana
cccacgcgtccgcggacgcgtgggcggacgcgtgggtgattgttcccaacacgaaacatctcgaggaagcagcctccaaagcaggtgtatcgaattcagatatcaaacagatgtgtgaagatcagaaacttgagaaagtggtgttacaagagctagaggctattgcagcaaccaacaaattacagaaatgggaaattcctgctgccgtcaagttgttcgcagagccatggacacctgacaatggaatgctcacagaagccatgaaattgaaacgtcatgagattggcaagaagtttgcaccagagattgaacgattgttgaagaacatacaatagagagacacgaggagaaggaca

SEQ ID NO: 137975 - DNA, 386 bp, Arabidopsis thaliana
gaagtttaggagaggaagagagatggaggtatttagacttggagagctgagacacctactggtgacggttttcttgtcggggctcgccgaatacttgataaggccagtgatgactgacgtcaccgtagccgcggtttgctccggcctagacgattcatgttctttggccgtctatctcaccggagtacaacaagtggtaaccatatctacttatatatatacacatacatgcatataatattaaatctgttattgtttttacgctttaactaatctcttttcgttgggtgttgattactctttaaactttttatctttttatctgatggtgaaaatgatataaagaaaagacggtaggaatggggacaatggtaatgatgccagtg

SEQ ID NO: 137976 - DNA, 211 bp, Arabidopsis thaliana
agagagaatgttagagagacagtctctgagagacactccaagagacaatcgctcgtcgtcggtattcacgcgtctgtgactccgttagtgcctaggctagcgaggacagtgagagagacagagagagagctttggagttgtcgtagctctagatctgtcgcaatttgaggtgcaattggtggttttatcgtttgattcaacggttgatcct

SEQ ID NO: 137977 - DNA, 365 bp, Arabidopsis thaliana
aaaagaaagcaatttgtcttcaaaacatatttctctctctaaaacctctttttcataaaaggttgcgtcatctatacgaatccatacgtctctttgcttttctccgatcggtcttcttttctcatcgccggaacgctttggtttaatggggcacagacattttcttggttcaacccagttttttgatgatgaacatgatcaaggctggaatcatacacacccagaacatccatattcgagtcaagcaacatctgggaccagtgagaacagatcacatgtttatccatcagaaaacatgttgaatgaaggaatgccagtgtcttctcattggaactcttctccaggaccaaatgcttatactgact

SEQ ID NO: 137978 - DNA, 406 bp, Arabidopsis thaliana
aaaaaaaccttcgtgtgcgtctctcgtcctctaaattgtcgaaaatgctggctaggctcgctgcgaagcgtcttctcgagatccgtcaagttttccgtcaaccaacctctcaggtgactcgtagcttatcgacggccttaaactaccatctggattctcctgataacaaacccgatcttccatgggagttttcagaggctaaccaatctaagaatcggctattctggaactgatttaagggagagacttagagtgaacgacccaaatggccaacagatttgaatctgctagtgtggcagaaagactgtccagaaattagtaaaccggtttcattgtagtttaaatcctaatactttcttgtgcatttagttccagtttactgtatctttcatttctggctacagta

SEQ ID NO: 137979 - DNA, 403 bp, Arabidopsis thaliana
agacactgttctctagttcccatcgacgttcttgatcctctctggttcgcacccgtgtttttaatcaattctggttcgcataggtgactccggtactgtttcttcgtcgatagccttttcctatggccacaacagaagatactccagcttctgctggtccaagatatgctccagaggacccaactcttccccaaccatggaagggacttattgatggaagcacaggaattctctattactggaatcctgaaaccaatgtcactcagtatgaaagaccttctgcgcctcctccccactctgccacaacaccgaagctagctcagattcctgtaccctcttcaggacaaggtcaccaagctcagcatgaacaagcaaaaccagttggtcatgtgtctcagcagca

SEQ ID NO: 137980 - DNA, 380 bp, Arabidopsis thaliana
acgcgtccagatgtttattgttagtgggagaggtagagagtctctgagcaattggctatctccttgtgaaaatcttggaatagcagctgaacatggatacttcattagatggaagagcaaagatgagtgggagacttgttattcgcctacggatacagagtggaggtcaatggtggaaccggttatgagatcgtatatggaggcaacagatgggacgagtatagagtttaaagaaagtgctttggtgtggcaccatcaagacgcagatcctgactttggatcatgtcaagctaaggagatgcttgatcatctagagagtgttctcgccaatgagcctgtggttgtcaagagaggtcaacacatcgttgaagtcaaaccac

SEQ ID NO: 137981 - DNA, 372 bp, Arabidopsis thaliana
agttgtaacaacggtgaagcgtggaccgagtattggacagactgtaagaaacttggttagagaaggtggatggacggcttgttatagaggattgggaccaagatgtgcttcaatgtcaatgtctgcaacaactatgatcactacctacgagttcttgaaacggctttctgctaagaaccatgacgggttttattctaaatcatagtgataacaactgggaatccacatagaagaatcttttatggaaatgtctctagttttcttacttatcttgttctttatctagctcttctgctatttcatttgtttccagtcatatgtaaggaatgtgttaaattcagttgtttttaaataaataaatgttctttccac

SEQ ID NO: 137982 - DNA, 312 bp, Arabidopsis thaliana
ttagggattatgggcaggcagcaagtgatatggagagatatgttaatattctaaccaagcaaatggaagagaagacctctggaagccttgacagatctactagtatgtccaatgacataagacaagctcgtatacgactttctgaactggaagagaaatcaaggaaagaaaattcattggatatgtacctcgtcttgggtgttgtaccatcatgctcggcttcagatatcagaaaggcatataggaaggccgcactcaaacatcatcccgacaaggctggtcagtctttgacaagaaacgagactaaagatg

SEQ ID NO: 137983 - DNA, 378 bp, Arabidopsis thaliana
aaaaaaaaatagtgaagacgacgaacctttgaggacactcttcggtttctccaatccttcatatgatgtccgacggaggagcaccgtcgagatacgtgaagttgacgaaggaacaagctccggtcgatgagattcatcccggtgaactcaatcagcccattgaagtttctcatctagctgttcacaaatgcaatgagtgtggccaacctttgcctgagaattttgaagctcctgctgatgagccctggactaccggaatattcggctgcactgaggacatgaatagtttttggctgggacttttctgcccaagtgttctatttggacgtgtctatgaaactctgagtgatgaggaaacctcgtggaagaaagcatgta

SEQ ID NO: 137984 - DNA, 376 bp, Arabidopsis thaliana
aaaaaagtaaaacatcatatagatgatctataaaaatggaacgagacggatcatatgcaaaccataaaattaaactatctgccaaacacttaaaaaatcaactctagagatgggacttgagacaaaaccaaacctctcctttgtactcatcatcctactactcggcttctttgcagtctcttacgcttccgttcctcggaaactaaatccacatcaacgcatcggtttcttgaagcccttcccgaaagtcttcaccttcaagcccttaccaaaagtcttccccttcaagccctcaccgaaagccttcctccccaagccgatcccggttactccaaaaccagtcccagttaagcgaccacgaccaccaactcctgag

SEQ ID NO: 137985 - DNA, 341 bp, Arabidopsis thaliana
gtttttggacggattagcgagaactgtatcgacgaagaaaggtaaaaaactatcggaagatgaagatggagggagagagatcgcaaaatcgatgattaaagattcgaagaagaactcgacgttgctcggtacttcaggctttgttagctccgaaagttctaagaggtttacctctatttgttctaatagaggtgagaaaggaatcaaccaagatcgtgcaattgtttgggagggatttgggtgccaagaagacataacattttgtgggatgtttgatggacatggaccatggggacatgtgatagccaaaagagtaaaaaaatcatttccatcttctctgc

SEQ ID NO: 137986 - DNA, 398 bp, Arabidopsis thaliana
ggctgttacagtacttccttccgtctccggtctctctgccgtcgcatcttcatcgaacctacgacgtctgacctccgcctcgaaccatcgactcacggcgataaaatccgtaacatctacttcttctcctcctaccccttctagtggtgttcaacggagacggaagaataatgatgaaaacagagccacggtggcgaaggtggtggagaatccgtattcgaaagtggaggcggcgcgtccggatttgcaaaagaggttgtcagattttttggaagaagctagagagttcgtcggagatggaggaggtccacctcgttggttctctccattggagtgtggcgctcaagctacaaactctcctcttctcctatacttacctgggattgatggaactggac

SEQ ID NO: 137987 - DNA, 376 bp, Arabidopsis thaliana
acagggaaatttacttccagctcgtcctgctcctccgcctccacctcctttatatagttccctcacttgattttttttttatagcctttcattttgcaaacatcttcagggaactgagctaatacttttttttttcctgatattttcttgaaaagcctttcttcatgctgcaattatgaatgattatcagaataccacaaagcatactttattaatacatcaaaacagaacttgagtagtgggaaatgagaaatagactaaatgcagtaaagccagtgaattcacaataacattttcatttccattactgaatacattttattcagtcatctgtgacgttaatgtacctgacatgaattatgttattttgaacatg

SEQ ID NO: 137988 - DNA, 388 bp, Arabidopsis thaliana
aaacaaaagaagaaacacgagtggaagcttttaaacaaaattaaaaaagagagagagaaatggcgacgtcgggaacatacgtgacgcaggtgccgttaaaaggaacggtggagaaacacttcaagaggtacaggaacgagaactatctcttccctgacactatcggccaccacatccaaagtgttactgttcacgatggcgaatgggacactcaaggaggcatcaagatttggaactacacactcggaggtatacctttctttatatattagacaattatctaaactttgagtatggggcatgggttgatacccaacattaatttgcaaaaaaatatatatgtgatcataatatcatgcatattcatccttatgaggccatctccatc

SEQ ID NO: 137989 - DNA, 360 bp, Arabidopsis thaliana
accaaatctctatctctctccattagagcttgaagcagccatagcctaacaaaaccttcaacaatggcttcaatggctgccgtcttaagcaaaactccattcctctctcaaccactaaccaaatcatctccaaactccgatctccccttcgccgcggtttccttcccttccaaatccctacgccgccgcgtaggatcaatccgagccggattaatcgctcccgacggtggtaagcttgtagagctcatcgtggaagagccaaagcggcgagagaagaaacacgaggcggcggatttgccacgtgttgagctgacggcgattgacttgcaatggatgcatgtattaagcgaaggctgggca

SEQ ID NO: 137990 - DNA, 383 bp, Arabidopsis thaliana
aaaaccatccgaagatattgaagacgatgacgacaaatctcagcctcactctggtggcggcgtcgatagtgctggaaagatatttgttggaggtttagccagggagacaacttcagctgaattcctcaagcattttgggaaatatggagagatcactgattctgtgattatgaaggataggaaaactggacagcctcggggatttgggtttgtcacatatgctgattcctctgtggtcgacaaagttatccaagacaatcacattataattggcaagcaggttgaaattaagcggacgataccaagaggatccatgagctctaacgatttcaaaaccaagaagatatttgttggtggaattccttcatctgtggatgatgatg

SEQ ID NO: 137991 - DNA, 103 bp, Arabidopsis thaliana
acccacgcgtcaggaagattgttcttggagacacaaggagcacacatgatgacgacgtttgcttgtttgcacctctttaccatgttcttgtttaccttgctct

SEQ ID NO: 137992 - DNA, 415 bp, Arabidopsis thaliana
atggaaagttttggccaatagttcacagctatactatcttctctttggtactaatgcacattattgcagtcggattattcgggcttaaagagcttccagtggcatcttctttaacaattccccttccggttctcacggtccttttcagcatttactgccaaagacggtttttaccaaatttcaaatcttatcctacccagtgtctggtaaacaaagataaagcagacgagagagagcaaaacatgtctgaattctattcggaactcgttgttgcttaccgagatcctgcactttcggcatcacaggactcgagagatatctcaccttgagatcacctttttacttgagctattgaagtttgcttatgttgaagctgttggtttactatacctggtgcaatccatgaaagaacaca

SEQ ID NO: 137993 - DNA, 322 bp, Arabidopsis thaliana
acacccacgcgtccgcccacgcgtccgcccacgcgtccggaaagaggaagactttgactcgtcttcttcctctcttcttctctctctatcactgcatttgtttttcctcagagcgaaccttgagatttgattagatggggaattgttgtggcaatccgagttcggctacgaaccagagtaaacaagggaaacccaagaacaaaaacaatcctttttacagcaatgaatacgctacaacagatagatctggagctggttttaagctctctgtgctgaaagatcctacaggacatgatatatccttgcagtatgatcttggacg

SEQ ID NO: 137994 - DNA, 332 bp, Arabidopsis thaliana
acagaagaatcttgcatctgaaggcgactcaaataaccccggttcattggctggtaagaagattctcatcccaggttctggacaggagattcccgctaagaccagcacttgttgtacttcttcttgatctgtctcctactcaagcaagattcattttttttcctcctgaaatttgtgatagagaatgctactttcattgtatattctttttcgaatctggcttgtttgctagttcattaaacattggtgtgcaattggacaccgatagaaagtattggaacaaatagcttttgaatgaaatatgaaacaaacagtctttgagagttaacgtc

SEQ ID NO: 137995 - DNA, 340 bp, Arabidopsis thaliana
acccacgcgtccggtagtaataatggtaacgaagaagatgatcaacaagaggaagaagaaacggatcttctgaaacgatccggttcaagtgcaagtaccggttcagcgacggttcgattaccaaccggaagaggtagttacagtagatccaccagtagtatacgcgagatcgagctgattccgatcgaatcggtgattcatctgagctggattgctcggcgaatggtctccgccggttatctccgtgaatgtattcaagtctacggaagcgttcgcaaatccgccgtcgattcaagtttccgacggttagggatcgagaaactcagcatcggagatgttc

SEQ ID NO: 137996 - DNA, 357 bp, Arabidopsis thaliana
acacggacgcgtgggcggacgcgtgggttccgcatctcttttcatttctctctgatttctcgatctctccgtccaactatgtctgccttcacaagcaaattcgccgatgagttgatcgccaacgctgcctacatcggcacacctggaaaaggtattttggctgctgatgagtccactggtaccattggaaagcgtcttgcgagcatcaacgtcgagaacgttgagaccaacagacgtaacctccgtgagcttctcttcaccgcccctggtgctcttccatgcctcagtggtgtcatccttttcgaagagactctgtaccaaaagagttccgatggtaagcttttcgttgatatcttg

SEQ ID NO: 137997 - DNA, 387 bp, Arabidopsis thaliana
  unsure (1)..(387): unsure at all n locations
actagagtcttcgtttgagaatgagacaagattaggttacggtttagcataggattccaaattcattttcaatcccaaaaatacgattattcaggatatgggcaatcttctggtaagccaagcgagcaagatacgtacgcagacatagaagcagcttacaattggctaagacagacctacggtacaaaagatgaacgtatcattttgtatggacaatccgttggaagtggaccgtcgcttgagcttgcttctcgtcttccacgtctccgagcacttgttctccatagtcctttcttgtctggtctacgtgttatgtaccctgtcaagcactccttcncgttcgacatttacaagaatattgacaaaattcatctcgtggagtgtcct

SEQ ID NO: 137998 - DNA, 366 bp, Arabidopsis thaliana
acccacgcgtacaccaagatggggaaactgaaaaagcggattcgtccttgtgatattacaatcaacattggtaaagaggcgcctattccagaatgccctatccctggtgaaagatggagagaagttaagcatgacaatactgttacctggcttgctttttggagtgatcctatcaatccataagagttcaagtatgtattcttggcagctagcagttcgttgaaaggacatagcgacacagagaagtatgagaaagcgaggaagctacataaccatatagggagtattagagcagcatacaccatagattttaataacaaggatgtaacaaagcggcagatagcagtggcaacatatctcatcgat

SEQ ID NO: 137999 - DNA, 296 bp, Arabidopsis thaliana
caattaacttttttccgggaagatctcaccggatgaaaagctagctagggtttctccaccgtgaagattctagaagcgagaatttggaatttgctaattaagaagatgtgttacgatctttcttaagtaaaaaagcattgaaattgacgaatttagggttgtgaaaaatatggatttggattcttcaatggtaccagagaatgatcaagatcctattgctacgtctgagaatcaatctcctatggaggagaaagaagaagcgtctgaacaacaaaccggatacgaatccgaatcgg

SEQ ID NO: 138000 - DNA, 399 bp, Arabidopsis thaliana
atccacccacgcgtccggtcgatttatttattcctctccaaagcaaaagcttcttcgatcgtccttgtctcgttttcaattctaaatgttttgtgcagaaaaatcatgactttggcttctccacgagtttcaaattcaaagacgactgtgttgttgtttcctcgaaaagtttcttcaattgcatttgctattggtggattaacttctttcgtcatcttcgcttctctgcttcttttcacgtatcccattggttcctctgttactgactatttctacagaacagagaccactcaaaacgtccagtttcaccatagtatccatgatcctgatcgtaacccatctcctgtttctagctcagagtcaccaccagtattgacacaagatagtgatgataaagtg

SEQ ID NO: 138001 - DNA, 199 bp, Arabidopsis thaliana
taaagcctgagatcaccgaattctgatcagcaactatgcattcaggtcatctccatctcgatgaaccgatcacgatgacttcactcctcgaaacttctaaatcatctggcgtcccggctttgactaatattgttgggactcaatgtccgcattctcgatccgtcgaggtgattactggctgtctcaaagctggaatctc

SEQ ID NO: 138002 - DNA, 183 bp, Arabidopsis thaliana
ttcggtcgaatcccagtatagaccaacgaggaagaagacgaagaagcagtctctcaaacttcttctctagatccgaatctcactctcatttctccgatctctctatgtgcatgacctacaatttcgcatctcttttgatcttgatctctgtttctctccttctactgaatctcgtgttttgag

SEQ ID NO: 138003 - DNA, 294 bp, Arabidopsis thaliana
taatgatcttcgtctccaatggcgatatcagtacaacacgtcgtcgttttactcctctccactctcctcatcgccatcaccttcttcctcttcacctccgataacgccagattccctttcccttctctctccaccaccgattactacacaccaatcccaaaatctccaattcctcaccgaatcgtcgacgtttcttcagatcaaactccacagaagatgaagctaaacacttccctcgaggtgggagagctgaaatgggatctatgtaaaggtgcagaatctgttgattacata

SEQ ID NO: 138004 - DNA, 261 bp, Arabidopsis thaliana
gtagctaatgagcaacatgaagagaatcatcatcagcatgaatcttcgaggaggaagagattgatgaagaagttgaagaaatgggttgaaggaaatgagaaaggaaaatcaaaagcagaagaagcagaagaagcggaaggcactatttgacagtggaacctgaagaagaacgaacatttcattcaagaaggtcttgttctagtgtgtaatagcattgctttacaaaagaagcatgttcatgaattattcatcatttctcca

SEQ ID NO: 138005 - DNA, 377 bp, Arabidopsis thaliana
tgtggaatcagaaggagaaagagagtttgaacattgagaggtactcagattcgttgaagccgaagatgaagtctaataagaatggatctttctttgattttcttgttcttagacctgataacttccctaaagaacttcttggagatactcgaagagaacaacggcctgtgaagagagctaaatggagtcaagaagctgatttgcagaaattggatgtgtttgagaagcttgaagctaagtttaaggttgaaggcaaggaagagaaagaagaaggggaagatgatgaagaagttgtggaatcagaatgagaagaatctgataacggagattatgatcagaatcaagactttgatgatgatgacgacgattataataac

SEQ ID NO: 138006 - DNA, 313 bp, Arabidopsis thaliana
gaagccacggtgctcatgtctctcctccagcctgctcctgagacttttgatttattcgatgatatcgtcttggtgtcggaaggtcagatcgtgtaccaaggaccgagagacaacattcttgagttctttgagagctttgggttcaagtgtcctgagagaaaaggaacagctgatttcctgcaagaggttacttccaagaaagatcaagaacagtactgggtgaacccgaacagaccttatcactacattccggtttcagagtttgccagtagatacaagagtttccatgttgggacgaagatgtctaacgaac

SEQ ID NO: 138007 - DNA, 342 bp, Arabidopsis thaliana
aaaatcagaattacaaacaaaaatggttttgcaaaagcttcctctcattgggctgcttttgctcctgaccatcgtcgcctctccagcaaatgcagatggacctgtttgcccgccgtcgaacaaactaagccgggcaagtttccctgaaggttttttatttggcacggctactgcggcataccaggtcgaaggtgcgattaatgaaacttgtcgtggaccagccttatgggacatctactgtagaagatatccagagaggtgcaataacgataacggcgatgtggccgttgatttcttccatcgttataaggaagatatccaactaatgaggaatctaaacac

SEQ ID NO: 138008 - DNA, 313 bp, Arabidopsis thaliana
gataagacagagggtcgttgtcctgcatgtcgtacccgttatgataaggaaaagattgtatggatgacagtcagctgtgaaaggttggttgctgaattttacattgaccggaaaaagtcacagaaggcgaagcctaaacctgcggagggaaggaaagatctaactggtgtgagagttattcagagaaacttggtttacgttatgagcttgccttttgacctgccagatgaagatatgtttcagcgaagagaatactttggtcaatatgggaaagtcgtcaaagtagcaatgtctcggactgcagctggggctg

SEQ ID NO: 138009 - DNA, 201 bp, Arabidopsis thaliana
ataagatatttcgatgaagaatcgttctttagggttttgggcgatcggggttttgctcatcggaagcttgatcggagctacggaaggctcgattcatgagtacaacaacgaacagttcactgcaaaattcaatgctcgcttcttccatggtggtagcgaacgtctttacgcttccaaatctcaagatctaaactcttcttc

SEQ ID NO: 138010 - DNA, 329 bp, Arabidopsis thaliana
accaaaaaaagatgcagatcttcgtgaaaaccctaacggggaagacgatcactctcgaggtcgagtcctctgacaccatcgacaatgtcaaggccaagatccaagacaaggaaggaatcccaccggaccagcagcgattgattttcgccggaaagcagctcgaagacggacgtaccttagccgattacaacatccagaaggaatcaacgcttcaccttgtccttcgtctccgtggaggtgctaagaagaggaagaagaagacctacaccaagcctaagaagatcaagcacaagcacaagaaggtcaagctcgctgttcttcagttctac

SEQ ID NO: 138011 - DNA, 345 bp, Arabidopsis thaliana
gaaaaaaaccctatgttattccagtcggtggatcgaactctttgggaacttggggttatatagaagcagcaagggaaattgaggagcagctgaattatagacccgatgacctgaaatttgatgatattgtggtagcatgtggcagtggtggtacaattgctggtatttcattggggtcttggttgggagctctaaaagccaaggttcatgctttctcggtttgcgatgatcctgattacttctatgactttgtccaagggcttctggatggacttcacgctggtgttaactctcgtgatatcgtcaacatccacaatgccaaaggaaaaggatatgccatgaaca

SEQ ID NO: 138012 - DNA, 330 bp, Arabidopsis thaliana
cccacgcaaccagagaaaaggaaaacaatctctctttctgtgacctttcgcaacttgtcaaagcaccacgaccttctctctacggagttgagatcaatccccccaaatctcggtgtggttcctctagggtttttgatcggaatcggaatcgataatctaaccggcatgaggccaatcctattgccggatccacccagtctatctaccggcgtccctgatattttcgaacaaggcggttcccataacgtcgtcagacgcgccgtcgtcatcggaaacggtttccctggctccgagaatcagtgtatcggtctcgttcgtgcgctcggctta

SEQ ID NO: 138013 - DNA, 358 bp, Arabidopsis thaliana
aaaacacatggtgatttcttgagactggaacatacggagggatacatgaagttatctgccaagacaaagacgtttttcgctaccgctgtttccttgtgggatgcagaattctacatcaaagttgacgatgacgttcatgtgaatcttgcctccctcaagaaggctttatccgcacaccaaaacaagcctcgggtttatgttggttgcatgaagtctggtcccgtcctagccagaaagtaagtaaaaaccctactaaggtgagcattttttaggtacttaaacagcgtaagagcatcaacctttccggactttctatacttctggcaaaaaaaaaaacaggagtgtgaagtaccatgag

SEQ ID NO: 138014 - DNA, 220 bp, Arabidopsis thaliana
ggagttagcatgctacgaattccacaccagagaacattcacataatatagatactagaaaggctgtgcagacagtaataattcttgcacatgcacacgaaaccatcacgataacaggaaacattgatacagtcagtactcagtaatttgagggcacctacagtaacgcaagtaatactacacatggtagacgttccactgcgtaatgatgaaacatcatc

SEQ ID NO: 138015 - DNA, 343 bp, Arabidopsis thaliana
agaaaaatgtataaatcaccattaacgttgctcacacttcttactatttgttttggattcttcgatctcagcagtgctctttatggatcttcgtcacctgtggttcagctcactgcttctaactttaagtccaaggttcttaattcaaatggagttgttttggtagagttctttgcaccatggtgtggtcattgcaaagctctaacacctacatgggagaaagtggctaatattctgaaaggagttgctactgtggctgcaattgatgcagatgctcatcagtctgccgcgcaggattatggtattaaaggtttcccaacaattaatgtttttgttcctggaa

SEQ ID NO: 138016 - DNA, 384 bp, Arabidopsis thaliana
  unsure (1)..(384): unsure at all n locations
agctgttgccattcaaggagacactaatggtgctcttactttgaatcttaatggtgaaagtgatggcctttttcctgccaagaagaccaaatccggagccgtttgtcaggtcgaaaactgtgaagctgatcttagtaaagttaaggattatcatagacgccataaggtctgtgagatgcattccaaggctactagtgccactgtcggaggtatcttgcagcgcttttgtcagcaatgtagtaggttccatcttcttcaggagtttgatgaaggaaagagaagttgtcgtagacgtttggctggccataataaacgtcggaggaaaacaaatcncgaacctggcgctaacgggaatcctagtgatgatcactcaagcaactatct

SEQ ID NO: 138017 - DNA, 341 bp, Arabidopsis thaliana
acggacgcgtggggttctagatcgcgagcggccgccctttttttttttttttttgggatccatacaacaacaactttaatatacatttcacattaattgtcaaacagataagaaaagatcatacgaaaatagagcagctgattttagcaatcaaatttagaacaatcaatctgcagaacattagacaacaaacaaacaaacaaactttaaacttgttctttcactctaaaacctgttcttctccttgcagttgcttctcaccatttttcttgtttttctcattcaccaaagttagtcaaaacgaaactacaactacgcgaagcttcactcctccacaacac

SEQ ID NO: 138018 - DNA, 351 bp, Arabidopsis thaliana
agacagcgaagatgattttgttgccatacgtcctgagtggaccactgttgatcggattcttgcctgcagagaggaagatggggagctggaatatcttgtcaaatataaagagctatcctatgatgaatgttattgggagtcagaatcagacatctcaaccttccagaatgaaattcaaaggttcaaggatgtaaattctagaactcgcagaagtaaagatgttgaccataaaagaaatcccagagactttcaacagtttgatcatactcctgaattcctcaaaggcttgttacatccataccagcttgagggacttaattttttgcggttctcgtggtcaaaacagacgca

SEQ ID NO: 138019 - DNA, 367 bp, Arabidopsis thaliana
acaaagttgcgatgatacttaaagatccgggtatgcggagtgtcttctcaagaaacggacaggttttgaaaaccggtgagacttgctataacccggagctagctcagagtcttgagactatttctgagcaaggcccgggagcgttctacaacgggacagtaggcgagaagcttgttaaagatgtgaagaaggcgggagggatcataacgatggatgatctaagaagttataaggtccgagttaccgatgcaatgtctgtggatgttatgggttatacggttcatggaatgccgcctccttcgggcggtacagtcggtttttcgatggttatgaatatcttggatagttactcgaatctttacactgc

SEQ ID NO: 138020 - DNA, 286 bp, Arabidopsis thaliana
gttatatcatctccctcttacatatacataaaacatcataccaaaaaaaaacaagagttcaaaggcaaatcacaaaatacgatacgaaaattatgggattttgtttttgtttatcctcaggaggatcaacagataaaagtcagatttatcagataactgattatggacaacaaaatgcagttttaaactctgaccaccatgttgttcctcaaaacttgggctctgtctcttcgttaaccggaggcaacggcttgaaccaagatgctgccattctccacctgggata

SEQ ID NO: 138021 - DNA, 463 bp, Arabidopsis thaliana
caaaataggaagaaagaagagtcaagtcactaaaataactttcacagtctttgattcgaagatctttgtcgccgagagatatccactctgatttgagttctgaactattctctggaggaggttgaggtctgaaatcatggaacaacttggttagagtgtggaattttagctgatttgatctttgattcatctgtgatcataataactatgaagatggacaaaaagactatagtttggtttagaagagacctaaggattgaggataatcctgcattagcagcagctgctcacgaaggatctgtttttcctgtcttcatttggtgtcctgaagaagaaggacagttttatcctggaagagcttcaagatggtggatgaaacaatcacttgctcacttatctcaatccttgaaggctcttggatctgacctcactttaatcaaaacccacaacacgatttcagcga

SEQ ID NO: 138022 - DNA, 381 bp, Arabidopsis thaliana
aaaagcttcaatcagtgagctgcgttttttattctctgcttcatccagatctacatttctctgtttcagcctctattgctctgtttaacaagttctcaacggccggaatcgtcgccgggattctcgccaccggagttattgtgaaacggtgaaaatgggtttttgattttactggttacttcattgttcagtgcaaagtttggattgatttcactatggaggaagtagcagctaaggttgaggaagaaactgtggaaaccaatgtagatgcagtgaaagaggacaatgcaactatagctaatgaaagcagaagcccagagagtgtttctgcagtgtctgtggtgtcaaatcgagctgcttctactaaaaagaaaccagtta

SEQ ID NO: 138023 - DNA, 444 bp, Arabidopsis thaliana
acaaaagtcgctttgttcaaacactcgtttacgcgtagccgacataaattttccaaaaacccatatccgaaaaagtcgatatatttattgaatttttggaaccaaggagacgaagaatttacacggtttttgaagaagaagaagaagatgaagtataagcgtaagctaagtctctctgttgtcttcctctttgtcttctatctcgctgcggtgacttcagatctagagtctgaccggagagctttacgcgctgttcgtaacagtgtccgtggccgtcctttgctatggaacatgagtgcttcgtctccttgtaattggcaccgagtccactgcgatgcgggtcgggtcacggctctccgattacccggatctggtttattcggttcattaccaatcggtggtattggtaatctaatccagcttaagactctttctctccggttc

SEQ ID NO: 138024 - DNA, 264 bp, Arabidopsis thaliana
cggacgcgtgggtgatccgtcagcaatgcttgatctttaaatttactgatatctgaagatcgacttagggttctgatctacatgatatttatttgtttgggcttttattcagcagctcgatcttgggctgaagctatggctcatagtacttgggaagctgacaagatgcttgatgtttacatatatgattagttggtgaagaagatccttcacaataccgctaagtcctttatgactgaagggatggtttcccctgattcactt

SEQ ID NO: 138025 - DNA, 407 bp, Arabidopsis thaliana
cgtaagtgaagtcttagcgataagctttgtttcttcttcttcttcttctttacccatggatttttaacgaacaagagaagagaagaaccaagttttcttcgaaaggattgaactttgtttctttctcttcagctacaacaaccaaaaaatgatcaagctttgcttcatgacttctcatggttattcaatccctggccttggtcttcctcaagacctctgcaacaccgaaatcatcaagaatagccggtctcatctggtgaatcccggagcaagacaagagatcatacctgcaagctccttcaatctgaatacagaactcttggaaccatggaaaccggtttcttcatttagccaattcgtggagattgattcagccatgatgaaacctctgctcatggatgttcatg

SEQ ID NO: 138026 - DNA, 285 bp, Arabidopsis thaliana
ctttgatgggattcagcttgttttctcaaatgttagttttttcttcatttgttatgcagcaagtattaaaaagcggcttggatgctaactgcaaactaatgggggatcttgtcaagagacagttttgattgttgatgtacatcaaagcaatcatgaacagacacaggcttctctcagcggcaacagatgaatgcaataaaaaacttggtcaagcttgctcttcttctttatctccagtccataactttctgaatgtccagccagaacaccggaaaactcctttca

SEQ ID NO: 138027 - DNA, 373 bp, Arabidopsis thaliana
gagtaatagtgttagggatgaatcaaacatgtatgggggatctgaatgggaccaaaacaggcggatgaatggccggggctgggaatctggtgcagatgaatggaaaagtcgacatggagatgcgagcatggaagtctcatcaatgtctgttaaagatgataactcagctcatgttgctgatgatgagtctcttggcggccaaacaagccactctgataataacagggcacaaagcgttgaatctgggtcgaatctaacatctccagcaaaagaactgcatgcaagttctcctaaaacgatggatgaagttgcagctgacgatcctgtttcagaaacaattgagagcactgaacgttactgccggcattatctc

SEQ ID NO: 138028 - DNA, 309 bp, Arabidopsis thaliana
gatgtatttgattactctgacgaggatgaccgtgttgaagaggagtcgaagaaactccttcgcaaattcgattccccagttactaaaaaacaccactgcgccatcgataagtatgaattccttcgatgctttgcgaaggatacccaaagcgagagtaaagtattgcaacacattgttattgatgttgaagtcccagtaaaagaagaaccgtcaagatgtgaactcagcggagatggaaatagtgacctgattgatgttatctccaatggctctcatagaacgattggaatcgattcattaacgtcatca

SEQ ID NO: 138029 - DNA, 206 bp, Arabidopsis thaliana
acagcccacgcgtccgcccacgcgtccgcccacgcgtccgagttccctcaacgttttgacggtattgatttgcacgatcgatatgccaacaggaatatggtctttttcgatattaacatgacggggttggatggtatccagggtccagtatatgtgggtactggttgttgttttagtaagcacgctctatatgggtaggatcctgt

SEQ ID NO: 138030 - DNA, 306 bp, Arabidopsis thaliana
gaccagtcttcgtgtgctcgtaattggcgattctcaaattcgatctccgtacaaacaatggccgaaacctcgaagcaagtcaacggcgacgatgcccaggatcttcactcgcttctttcttctccggcgagggatttcctcgttcgtaatgacggcgaacaggtgaaagttgacagcttgttagggaagaagattggattgtatttttcagctgcttggtgtggaccgtgtcagcggtttactccacagctggtggaagtctacaacgagctctcttcgaaagttggttttgagattgtgtttgtg

SEQ ID NO: 138031 - DNA, 309 bp, Arabidopsis thaliana
tctcgattggctcatcactctattctcaatcgctactctccctaacactctcgttatgggcatacctttgcttcaggccatgtatggagattacactcaaaccctcatggtccaactcgttgttcttcaatgcatcatttggtatactctgctactattcctctttgaactccgagcagcgaggttgcttatccgagcagagtttccgggtcaagcagccggatcaatcgccaagatccaagtcgacgatgacgtcatttccttagacggcatggatccgctccgtacagaaactgaaaccgatgttaa

SEQ ID NO: 138032 - DNA, 353 bp, Arabidopsis thaliana
cgttacttgggagtaaagaaacggcgtcaggaggtcaaatatgcggaaacatgacgtctggaggaacagaaagtatagtgttggctgtgaagtcatctcgtgactatatgaagtacaagaagggaatcacacggccagaaatgattatacctgagtcgggtcattcggcttatgataaggcggcccagtattttaaaatcaagttgtggcgagttccagttgacaaagacttccgagctgatgtgaaggcaacaaggcggcatattaacagaaacaccatcatgattgttggatcagcaccaggattccctcatggcatcattgatcctatcgaggagcttggtcaactggct

SEQ ID NO: 138033 - DNA, 255 bp, Arabidopsis thaliana
agaagacgctcaaagagcaatcaacaaattgaatggttatggttatgataacctcatcctcagggttgaatgggcaactccaagaccaacctagaaagaaatgtctgatgttgagaccttaaaactcttctcattctcgtctttcttgttatggatttttgtttatcgaccagtttgtttgttggtttggtttctgtatgaatagatgagaatttgttcaatttctctttaatacataaggcatgctttttaaaa

SEQ ID NO: 138034 - DNA, 313 bp, Arabidopsis thaliana
caaaaaagctgctagaggaagaagacgattcacttctttcccgccactttcactatcttctccggtggtgagcaaagatgttgtgggtcgacaagtacaggccgaaatcactcgacaaggtcatagttcatgaagatatcgcccaaaaactcaagaaattggtttccgagcaagattgtccacatttgctcttttatgggccgtcaggttctggtaagaaaaccctaattatggctcttctcaagcagatatatggggccagtgcagagaaggtgaaagtggagaacagggcatggaaagttgatgctgggag

SEQ ID NO: 138035 - DNA, 359 bp, Arabidopsis thaliana
  unsure (1)..(359): unsure at all n locations
cacgtgtacgcaggctgctgaaaagcttagaattacctccaaggagctggtcaagcttaatgtagctgatggaatcattcctgtaactgatcctacctctaatctatctgtttcctcttacacttcttttctcactttggatcactgagtaactctcacatgttgtacaggaaccgcttggaggggcccatgccgatccttcatggacgtcgcagcaaataaagattgctatcaatgaaaacatgaatgtaggcatagttgttcttctcaacgctggatgtggatctaaaagagttctaacttttttttgggaacttgtangaattcggaaaaatgagtggggaggagctcctgaaaca

SEQ ID NO: 138036 - DNA, 296 bp, Arabidopsis thaliana
gaggttgctactgacgccggagaagagagatggcgagatcgtgctctatctggacacctgttttgatctcactttcaccagtgaccggagaatcacctaaaatttcacggtgccgggtgattttagccacaagtataggatctcctcagcctttacttgacgcacagatcaaggaacctcagaagcttcaagtccttgattccaaagatgtttccagaagaaacactatgctgtatctagctgctggatttcttggagggatcaactttctcaatggtgaagccgcagaagctcga

SEQ ID NO: 138037 - DNA, 363 bp, Arabidopsis thaliana
cttcatcttctcctctttagcctttcgacaaaacacaacccacgagttaacttccatggccacgcagacaccaaccagcgtcgacagacatagacagtaaccgagctttgcgtacgaccttccttcccttaaaacctcaaacccttggaacacattcaccacgcccatcaccacacacgcgtacccgacaaaatgatggtaagacttccagtacctccggaacttattggtcgtctttggtctgaacagcaaagccagtgtttgcagcgccgctgctgtgaaagtagctatcccgaggctccgatgtaacccataggtcactccaggggaattatggccgagcacgattccaatggagaagcc

SEQ ID NO: 138038 - DNA, 320 bp, Arabidopsis thaliana
gttaggtagtagggaaaccaaacttacttttgatgaatcattacttctgtaaatgaaaatgccagcttttgatcagatgtttcagacatttggtccatttgggaaagtacttctttctctcgaacctactaaatataaagataagacctcacatgtttttgattttctaaaatagggggaaaaagtacaagacttttcaagctatgtccttgattaagtctagtgatatcttcaataagaaatgttttgagaacaccattgggatctaaatttgatctctgatgatttactttaatgttccaattatatatgtttttgac

SEQ ID NO: 138039 - DNA, 378 bp, Arabidopsis thaliana
cttggagcgacctcgggttgtgtttttgggatcattacttggctaactaccgcaaagacacagtacggacgcgttgatcttgatagcaccgggaaaaatggccctatgttagctggtaacctcgttgcgattctaacaggggggttgatccatgcggtgtgtagtctagtccggccacagaattacgattggtcgacgacgagggagatcaaagtagtggaagcgtatgcttcaggggacgaagatgttgatgttcctgccgaagagctaagagaagagaagctgagaagagccaaagcttggattgtgaaatggggtcttgtcttcactatcctcattgttgtcatttggccagttctctctcttccagctcgcgta

SEQ ID NO: 138040 - DNA, 317 bp, Arabidopsis thaliana
cccacgcgtccgcttagggctggacaaatggcagacttggatactagaagaactgaaatcttgggaagatcggcgagcattatccaaagaaaagtgcgatcatatcttgcgcagaaaacttttatccaactgcgtatttctgctacacaaatccaagcagtttgtagaggttatcttgctagaagtatatacgaaggcatgcgcagggaagctgctgctttgaaaatccagagagacttgcgtaagtttctggccaggaaagcttacactgagctattttctgctactattttaattcaagcgggtatgcgtggtat

SEQ ID NO: 138041 - DNA, 350 bp, Arabidopsis thaliana
cccacgcgtccgcggacgcgtgggagcagctgcaaacatggcaagaggattgaagaagcatctaaagaggctcaatgctcctaagcattggatgcttgacaaacttggtggtgccttcgctcccaaaccatcttctggacctcacaagtcgagggagtgtcttcctcttgtcctgatcatcaggaacaggttgaagtatgctttgacttaccgtgaagttatctctatcttgatgcaaaggcatatccaagttgatggcaaagtcaggactgacaagacttaccctgctggtttcatggatgttgtatccatccccaagaccaatgagaacttccgtcttctctacgaca

SEQ ID NO: 138042 - DNA, 378 bp, Arabidopsis thaliana
ggaaaaaattggattaaggtgaaaatcgctttctctgaaaatcaaagacgaacgagtaagagagaagtagtagacgagaagacaacaacaaaaatttgagagagagagagagagatcttttgattcaagtcaaacactactcagaagttttctcatcggtatcgagagagatccatcggattctatcatcggatgttatatctgttcgtcggtggttatcggaggatatgctccgtggttggttcgggggtgttagtggccggtgaggcagatggtgatgatggtggcggttgatgatcgacaaaattagaaagcgtgttttcttatttgtttcgttttgagtttgtctcttaggtgttttggtagtagaagatgatg

SEQ ID NO: 138043 - DNA, 317 bp, Arabidopsis thaliana
cgtgatccaagttattgtgtattgtcactgaatttttcagcttggtctggtgatcgatttgacaaacacaactcgttactattctacgacagacttgaagaaagaaggcattaagcatgtgaagattgcatgcaagggtcgtgatgcagtgccagataatgtgtctgtcaacgcatttgtcaatgaggttaatcagtttgtcctaaatctaaaacactcgaaaaagtatattctcgtccattgtacacatggacataatcggacagggttcatgatagttcattatctcatgcgatctgggccaatgaatgttacac

SEQ ID NO: 138044 - DNA, 298 bp, Arabidopsis thaliana
aaactctgtaagcacttcgcgatgtctctctcattatgattctcctgtcttgcaagtaaattggaagtccctctgttgtggaagataacaggcaagtgaggataaaggcgaagaaaccggttcacaatactttcgcttcattcatttgatttccaaagttcaactaaatcgaccccagtataataccggcagtggaagcttgtaaggctctggttgtgaacaattgcttggttctgaagatgtacttgcaagatcattgcccgagtagctgcacttcatcgaacactgagttgctgtg

SEQ ID NO: 138045 - DNA, 148 bp, Arabidopsis thaliana
cacgatctgatacgactctacattttcatttctctcagacgctactccagaatcagattaacgtctgatgtcctcattcacgtcactttactctcgattcttagagattcaattctgtgtcgtctcaattctaactgggctttccgaa

SEQ ID NO: 138046 - DNA, 111 bp, Arabidopsis thaliana
ataaaaatggggttgacaatctatgctcccttattcgcttcttcaatgagacccgtcgcgacatcggcgcataagggaataccattcgatacagtcaatgtcgatcgcatg

SEQ ID NO: 138047 - DNA, 369 bp, Arabidopsis thaliana
caccaatcacacttctcaaaaaagatcagagatttctagatccttcttcttctcctgcaaattcatctacctgaatcttccaactttataaatcgatcatgatctccgtcgtaatcatcgctgagttactagtagagtacacgacggctctcgcgaaactaaccgccgggattcttccatcgagacggcgaggcgatagtaacgttgtacggattggtggtttctctctgccttgtccttctccgtcgagtagtagaggttgcaaaggaggagaagaagaagaataagaagaagagaaagcatgatgaagaagaaacaacggagacaccagccaagaagaaggataagaaagagaagatcaagaagagt

SEQ ID NO: 138048 - DNA, 263 bp, Arabidopsis thaliana
aatttcgaaccgtctgttcttagcaatatattttttctccataaataattctcagtttgattttcttcttccagctcttaagtatatttctttgttgttatttatcttttgatcctttaatcacatctttgtttatctttaatcaatacccacaatttatatgggttcttgaaaatctagaataaataaaggattcataacataaatatacagatagagaagctaatggtcttaaatatggagtctaccggagaagctgttag

SEQ ID NO: 138049 - DNA, 334 bp, Arabidopsis thaliana
aaacgacacatgaccctgagatattgtctccagaataacatttttattagctgacaatgggtttgaagtgcaagacttatgttcctgtatggagacgtgggatctaccaaggacatgattccgaccatgcatcttcactggaacatgcatcatccgctacaggttgtgatcaaaacgtttacacctgatgacgtgaacgacattgctgttgagttaccgaggttgaccggaaggattgtgcgtgatgtacatgaaggtaacacgattattatgtacatacggaagaactacgtgcaacctcctactgatctcatgtcaccgaggattactcttc

SEQ ID NO: 138050 - DNA, 244 bp, Arabidopsis thaliana
gcgtcttcatattgccgacatgttttttttttttttgctaatttctgtaggcagtttagtaatgagactgtagactcttaacattctgtttttgacaatattcactcaggtaattctgcaccatcggatggataaaagaagttgaatcacttcaccagggcaataggaatggaccagatttgcttgaaaacaaagggctgtaaagtactggaatttcagatgctgcatcacaacagatttctga

SEQ ID NO: 138051 - DNA, 343 bp, Arabidopsis thaliana
ggaaaaattacatctccgcccaccgccgtcggaataatccatgttatctgatcggcggggtcttccattgtcgcgtcggaaattattctctgtaattactgtcacgtttcgtctctcattgagggaatatttgcagatcgatctatcgtcgatttagatctggcgttcctagggttcatcgacgctggagattcatggtctctggtgattgcattttcgaatttttgctgaaattggggaaaattttaggtgctgtgtatatggatacaggtgggatgagatctggtgaatctccagtggtattgattaagaagagaagttcatctggttgcttaattgtgaa

SEQ ID NO: 138052 - DNA, 424 bp, Arabidopsis thaliana
cccacgcgtccgcggcgacgaagctctctctcgactcctacttctgtggatcacatcttttgttttctggagaaaaaaggctcgtcgaagcaagtaagtgaacagtcatgaactcggcaagcgtttccggtgaatcctctctctccgatatgattcagacagttcatttttcctctggaaaccctagaatcggcgagactcgcggtgtcatgcatctaatttccgacaatgctgtttcgtcatcttcttcttcctcctcctcgaatctccctattggaaggaaccctctcgtttgcgttcttggggtgcccaaccacatgacatatgcagatttttgccagttctgcggctccttcattcagcacatactggatatgcgaaccgtcaggaatgatgacattgaaaatagatacagcattttgat

SEQ ID NO: 138053 - DNA, 362 bp, Arabidopsis thaliana
  unsure (1)..(362): unsure at all n locations
cagataagaactgggtggagttgaagggtaaatttgtaatccatggttcgccatcgagagtaatactataccttgaaggtccacctccacgagctgacattcttctcaacagtttagttgttcaacatgctaaaaggaatcgtccatcgcctcctcctttctacgagaatcctggtttcggagtcaatatagtcgaaaacagtgaagttttagatgggggaactaaaccatggttcactctagggaactgcaagttgagtgttggacaaggcgctccgcgcactctgcctccaatggcgagagacacgctaggtcctcacanacctctaggtggaaactacatcgttgtgactaacagaacg

SEQ ID NO: 138054 - DNA, 323 bp, Arabidopsis thaliana
gaagattgagctcgtgttcataccttcgccgggaatcggccatctccgggcaaccgtgaagcgagcaaagcaactcatcggcagcgaataacattttttcaatcaccgtaatcatcatcccttctagaaacgacgccggtgatgcaaccgcctatatcgcatccctcgttgcagagtctcaagatcgcctccgctacgagcccatctccgtcgaaatgcaatcaccaaccgcaaatcttgagccgtctcaagtctacatcgagaaacaaattccacaagtgagagacatcgtctccagaatcatcaatccaacaagaaaactc

SEQ ID NO: 138055 - DNA, 291 bp, Arabidopsis thaliana
caaaagttttctgttttaacttttcctctgtttttgatttttctctctgaatctctccttcatttccccgggaaatagtaccagaaaggttatcatcgatcaaactcttcttggtggattcttcagagatgggtttagtcaacgggagagcttcgttgacctttctcctcgcggcgttgaccatcatcgctatggtcgtcgaggctaggtttgtggtggagaaagaaagcataagcgtgctgaatccagaggagatgaggtcgaagcacgacggctcgatagccaatttcg

SEQ ID NO: 138056 - DNA, 397 bp, Arabidopsis thaliana
aatcttcttcttctctctctctccctcttcctctgtcacacagatattgacaaaaacaaaaagaatgagtcaatcaaatcgtgtcagagacgaagttacattacctttactccaaaaaacctctcatctgaaaaatcactcctctgttctctctgttttcctaaatgaagcaatctcaatctgcaaaatctcttacccattggtcctcactggtctcttcctctacgttcgctccttcgtctctctgtctttcctcggtggtctcggtgacgccactctcgccggtggctccctcgccgccgcatttgcaaacatcaccggatactctcttttctccggtttaaccatgggcgttgagtctatctgttcacaagcctttggagccagacgctataac

SEQ ID NO: 138057 - DNA, 368 bp, Arabidopsis thaliana
agcaccaacacttggtgctcctttgcttagaatgttcttccacgactgcttcgttcggggatgtgacggatcagttttgttagataaaccaaacaatcaaggtgagaagagtgcagttcctaacctaagtcttcgagggtttggcatcatagacgattccaaggcggctctagaaaaagtgtgtccgggaattgtttcttgctctgatatcttggcacttgtcgctagagacgcaatggttgcacttgaaggaccatcatgggaagttgaaaggtccaatggctactccaattgggaaaggtcaccgttctttgaacctgactcttaggaaagagcttaatctatatgccaatgttagaccttgttac

SEQ ID NO: 138058 - DNA, 368 bp, Arabidopsis thaliana
ttcttctccggctaaatcatgtttcgtcgtttaactctccggcaagcaaccgccgtcgccgcggaatcgaagattgcttgtcagcatactgttcatggattcgaacagcgaagaggattacacagtaggaatgagaaggcaatggagtatgtagccaaaggatggagcgcgattaaagaagtagagagagttatcgattactgtgaactcaatgatcgtcgtcttattcctctcctcaggggagctaaagagaactttgaacttgctctggaagctgataatttgaacactcatgctatgtattggctttccaagttgcacctgaagtaccatgttcctggagcttgtaaagctgtgggagctgcttt

SEQ ID NO: 138059 - DNA, 358 bp, Arabidopsis thaliana
gatttcatattactggtcatgcatataacttaaataccttgacagaggttcaaaacaataccctcaatgaccttgcagacttgggattagtcaagcttcaacagggaaggaaagacagttggtttattcctactaaactggctacaaatttatcagtcagtctggcagattcatcagcgcgaaaagagggatttgtcgtgatggaaacaaacttcacaatgtatgcgtactccacatctaagttacagtgtgaaattttacgactatttgcgaggatagagtaccaacttccaaaccttattgcttgtgccattacaaaggaaagtttgtacaatgcatttgacaatggcatcacatc

SEQ ID NO: 138060 - DNA, 379 bp, Arabidopsis thaliana
caggttccaaggaaaatggttctgaggtttttgttaagacggagaagaaagatgagacagagcatcatcatcatcatagctatgctcctcctcccaacagattaactggtaagaaaagccattggcgcgacgaagatgaagatttcgttgaagaaagaagtaacaagcaatcagctgtttatgttgaggaaagcgagctttctgaaatgtttgataagatcttggtatgtggccctgggaaacctgtatgcattcttaaccagaactttcctacagaatccgctaaagtcgtgaccgcacagtcaaatggagcaaagattcgtgggaagaaatcaacttctactagtcatagtaacgattctaagaaagaaactgctga

SEQ ID NO: 138061 - DNA, 344 bp, Arabidopsis thaliana
cttgttgctcaacatcgaaatctcgacaacatcactcaaatcttcagcttcaactacaaatctcttactccttacgctggactaaacgatacggcgatgttatggggagtgaagttctacaacgccagcgcagtgagtgactcgtcatcatgggatggcgtcatcaaggatttggatccgtaaagagcaatcatccttcacatttcagaaaggttgggcttttccacgatcgatttacgttaatggggacaattgcttcatgcctcctccagactcgtacccttttcttcccaacggtggttcccggtcacaattctcattcgtcgccgccgtgctcctccctc

SEQ ID NO: 138062 - DNA, 358 bp, Arabidopsis thaliana
atcgtaggcagataacaacatgggaagcggtgggaacgaacaaagaatcaccgaaaaatatcaaggcaaagagtttcaaatttcgtgaattagcaaccgctacaaatagtttcaggcaagagttcttgatcggagaaggagggtttgggagggtttacaaaggaaagatggagaagacaggacaggtaaaaataaagtggtagctgtgaagcaacttgaccgtaatggattacaagggaatagagagtttctggtagagatcttcaggttaagtcttcttcatcatcccaaccttgccaatctcattggatattgccttgatggagaccagagacttcttgttcacgagttcatgcct

SEQ ID NO: 138063 - DNA, 337 bp, Arabidopsis thaliana
cagacgcgtgggcgtggtggaaacaatagggattcaaggaacagtgatggtcctgccaatgaaaacggatatggtggaggctacagacgctcataagaaggagatggagctagacgtggtgggcctgttggtggataccgtggtgatcgccgtggaagctacagcaatggtggtgattcaggtgactctgaaagaccacgcaagaactatgaccgtcacagtagaacagcgtacgggaatgacgataaacgtgatggagctggccgtgcgaattggggaaccactcaggatgatattactccggtgactgaagaatccacagctgttgtggacaaga

SEQ ID NO: 138064 - DNA, 381 bp, Arabidopsis thaliana
cctatctctttttgcccctttcctctctctgttcacaagtcatcttcttccttcctctgaatcttgttccgttttgctctctctacttgagtcacccactctgtttctcgattagtacgttgaaaactcactttggttttgtgttgaatcctctttagtctgtttttcgatgtcgagtctcttacccattggtcctcactggtctcttcctctacgttcgctccttcgtctctctgtctttcctcggtggtctcggtgaggccactctcgccggtggctccctcgccgccgcatttgcaaacatcaccggatactctcttttctccggtttaaccatgggcgttgagtctatctgttcacaagcctttggagccagacgct

SEQ ID NO: 138065 - DNA, 264 bp, Arabidopsis thaliana
tttttgtttttctgggtttttattggctttcttctgcaaaaaccataactttattttttcagggtttttcttcgtacagaagcttcgcaaaacccaattttttgtagaagctcaattagtagcaaacaatgaataacacactcttaaactcactttcacaaagtctctgagtcttgtgacaatttgttgaatgcagaacctagggtgttttagataaaaaagatggggaagcaaggtccgtgctatcactgtggagttacaagt

SEQ ID NO: 138066 - DNA, 394 bp, Arabidopsis thaliana
agcttttgttggtgggattttttgaggatggtgattgctgcagctgtcatcgtgcctttgggccttctcttcttcatatctggtctcgctgtcaatctctttcaggcagtttgctatgtactcattcgaccactgtctaagaacacatacagaaaaattaaccgtcgtcttcagcgattccgatctcaagcaacactcagttaaaaacttcgtcgtcgtcgtcttgccacagccgtttctgcaaagagaatcccggaacaatcgccggagtagtaaccgccggagctttcttcttagcactattcgccggagctttattctgggtttactccaaaaagttcaaacgtgtcgagagatctgattcattcgcatctgagatcatcaaagctccgaa

SEQ ID NO: 138067 - DNA, 208 bp, Arabidopsis thaliana
gctgcttgtgatgatggttgtgtgagactgtaccgtatctctaatttagaaaagttaacttactatagatcattgcctagggtcagtggacgtgctttaagtgtaacatggagtccagatgcaaaaaggatcttttcggggagcagtgatgggctgataagatgctgggacgctacctcgtgtcatgaggtatacagaattacagctg

SEQ ID NO: 138068 - DNA, 191 bp, Arabidopsis thaliana
aaagaaagagactgaatcaatcaacggaccttgaagtcaataagctcagcagttttcttgaagaagtaggcagatgtgttgactacaggagtagtgatagcatccgtcactataccacggcctaatctttcacctgtgtaaaacctaatttatcaatctccaacaacaagatcagatatgaaatgactgaa

SEQ ID NO: 138069 - DNA, 424 bp, Arabidopsis thaliana
ggcgggaccgatccgccattaatgctaccacccaactacaaggcttttctcacacactctcttctctcaatctcttggctcagaacaaagaagataaaaaaaaaagtgtgatatattgtgagaagattgcagaagcgtgtccaacttggttccctctctctctgaaattactcaatcatggggatttgcttgagtgctcaggtcaaagctgagagctcaggagcgagtacgaagtatgacgccaaagatataggaagtcttgggagcaaggcttcgtctgtgtctgtaagaccaagccctcgaactgagggtgagatcttacagtctccaaatctcaagagttttagctttgctgagcttaaatcagcaaccaggaattttagaccagacagtgtgcttggtgaaggtggattcggttgtgttt

SEQ ID NO: 138070 - DNA, 422 bp, Arabidopsis thaliana
cacacgcgtccggccacgcgttccgaaaatgtttaactatgtgattattcttcctttagctctcttcctcttggcttacaaattcttctttacatctaaaaagcagcgttactatctccctccctctccatcttactctctcccaatcctcggccaccacctcctcatcaaaccgccggttcaccgtctcttccaccgcctttccaatatccatggcccaatcttctacctccgacttggttcccgccgtgccgtcgtcatatcttcctcctcgctggcaagagaatgcttcacaggtcaaaacgatgtcattgtatcaaaccgccctcgttttctaacctccaaatacattgcttacaactacacaaccatcgcaacaacatcttacggtgaccactggcgtaacctccgccgcatttgct

SEQ ID NO: 138071 - DNA, 259 bp, Arabidopsis thaliana
aaatccaagacgccaactcgctaagctcttcgatgtgtcgcttaagttaacggttcctgatgaacctaatgttgagcccttgatcgagcctggcaaatttggagattaccaatgtgacaatgcaatgggactatggtctctaattaaaggaaagggtacgcagttccgtggtcctcccgctgttggacaggctcttattcagagtctccctacttctgagatggtggaatcatgctctatagctggtcctggatttgtt

SEQ ID NO: 138072 - DNA, 402 bp, Arabidopsis thaliana
cggacgcgtggggacccacgcgtccgcccacgcgtccgcggacgcgtgggctacagtaaacaaaaaatggcaatgaatggtttgtccaagatggctgtagccgccgcaactgctcttctcctagttctgaccattgtcccgggcgcagtagctgtgacttacactattgaatggaccactggtgtggactactcaggttgggctaccggaaagactttcagggttggtgacattctagagttcaagtatggttcttcccacacggtggatgtggttgacaaagccggatatgatggctgcgacgcctcctcctcgactgagaaccattccgatggagacaccaaaatcgatcttaagactgtaggaataaactatttcatctgttctacacctggtcactgc

SEQ ID NO: 138073 - DNA, 415 bp, Arabidopsis thaliana
gaaatttggtatgggcaacttctaagcacgacgtgtatcttatgtcaaattttctggttacacattattcttctctaacgtctggaaagcatgaagttctcagtgtccgtggtcatgttgcgccatctgagaaacatcctggaagttgacttgagggatttacgcagactcaagtaagtacacttgcagtaaaagatgactttctggttgctggcgggtttcaaggagaacttatttgcaagcatcttgatagaccgggtgtcagcttttgctctcgtatgacttatgatgataatgctataaccaatgctattgagatctacaacagacccagtggtgcacttcattttactgcgtcaaataatgactgtggagttagagactttgacatggagagataccagcttgttaagca

SEQ ID NO: 138074 - DNA, 200 bp, Arabidopsis thaliana
atttctctttctttttcctctttctccattgcttgttgattgatgatcttgaagcaaggattatgaaggtccttcacagatttctgttggaggatatgcccaaagaaaccttttccgactccccccggaaaaataattgcatccaagagttgaaaactctaggatactgttcatcctaatgtcctgacgaatgtccttcc

SEQ ID NO: 138075 - DNA, 225 bp, Arabidopsis thaliana
acttcatgttttgcttacagtaaatgtagccaagttcaatggtttcgattagaaaatgtgacggttttagttaggagctctgaatttgggtttagagtttagtttcaaatggaatttgggtttgtaagataaaggagcttgagtttacactctctgcctttatgtgggattaagtcttctagtttcagagggaccttcaaagtcaaatctcaaaggacaggagat

SEQ ID NO: 138076 - DNA, 394 bp, Arabidopsis thaliana
gttggaagtcaatgatttctcatcattcaataacaacagacgtggtattgcagaggctgttagccactcgacttctaagtttagttcatcaatctcaattctggattcaaatcatctagcttctcgttcgttccagaaccgggaaacttcttgtgggatggattcaaaaactggatcctcctttgaaataggtagtgatagattgcatcttccaaatggattttctgagaaagctatgtccaatatggagcattcattatttgctaatgaaggcagaagcaacattcagaatacagaggatgatatcatttcaaacattttagactttgatccctgggatgaatcgttgacttcgcaacacaattttgcaaaattacttggtcagagtgatcat

SEQ ID NO: 138077 - DNA, 369 bp, Arabidopsis thaliana
gacgaaacgcgggaaaatgaatcaagtttcgtccttaaagctatcaattttctatgggaatctgatcaaataggttatcgtcatgtttggcctgaatttgagtttaattggcaaattgtattgggaacacttgttggattctttggagctgcgtttggtagtgtaggtggtgttggtggtggtgggattttcgtacctatgcttagtttgattattgggtttgatcctaaatcagctacagctatttcaaaatgtatgattatgggtgcttctgtgtccactgtgtattacaatcttagattgaggcatccaacacttgacatgcctatcattgattatgatctcgctttactgatccagcctatgctt

SEQ ID NO: 138078 - DNA, 410 bp, Arabidopsis thaliana
tctcaatctctctcagatctgaatccatccatcaccgatctctaatggcggcaccaccagcatcatcctcggcgagggaagagttcgtgtacctcgcaaagctcgcagagcaagcggaacgttacgaagaaatggttgaattcatggaaaaagtcgctgaagccgttgacaaagacgaactcaccgtcgaagaacgtaatctcctctccgtcgcttacaaaaacgtaatcggcgctcgtcgtgcttcctggagaatcatctcttccattgaacaaaaagaagagagtcgtggtaacgatgaccatgtgaccacgatccgtgattacagaagcaagatcgaatctgagttatcgaaaatctgtgacggtattcttaagcttcttgatactagacttgttcctgcttctgct

SEQ ID NO: 138079 - DNA, 392 bp, Arabidopsis thaliana
gtttcctcatcttcaaaacattgtactagtctcaatctccaactgttttaaatgggaatttcgaaaaaatctcaagttagcagagaattagacaccgatggaaaaaagtttatcttcgccaaaacatcgattcgggcttcactaaagccggtgaagacgaaactcattaagcctgagagagaatcagaagatggaatttgtatcactcccacggcgagaggagcaaagactccggagtgtccggcggctccaaggaaacgcccaccggtgttgaaatgtcagaacaatattcgtatagagtactttgtgcctccttcagatttcgagttggtgtttatacaacgccgttaatgtaaaaagatataaaaagagtttctgagtttggtttttac

SEQ ID NO: 138080 - DNA, 372 bp, Arabidopsis thaliana
catgtgagcgaaaatggtgaaagcaactaaggtaattaagaagatcgcagatctcaaaccggacggtgtcacagtcgtgactcgtgaagtctgggcggagaatctcgaatcagaatttgaactaatcagcgaattcatcgacgattatcgatttatctcaatggacacacaatttcacggggaaaattacaaatccgatccctggtttaaggattcactctatcaatatcggcaacactgcaatcctgaatctgcttccactccttcacggaaacgttggattgatctttaccaaaggtgacctcaacgaagtgagcgatgaggttgctaagtacaaggttggtgcccctgctcatgtgggtttggtggctc

SEQ ID NO: 138081 - DNA, 170 bp, Arabidopsis thaliana
aatttcttttgtttttgttaaccggatagttttccggtgagtcaccttcccgtttacttcgggctttcgtccgacatcttctagctacgttagtggagatggttggcgttttgtatggcatcgttggctaacttatcgacgttggccagcttccgtaaggcagcgttggg

SEQ ID NO: 138082 - DNA, 393 bp, Arabidopsis thaliana
cccacgcgtccggaagctacaaaagacgcacacgcggtttgcgttttgactgagtgggacgagtttaagtcgttagattaccagaagatcttcgacaacatgcagaaaccggcttttatcttcgacggaagaaacattatgaatgttaacaagttaagagagattggtttcattgtttactccattggtaagccacttgacccatggctcaaggacatgcctgcctttgtctaatcacaaggcaaaacctggttgattcttgtttcttactttcattgtttgtgcttttttgctttcgctttcatataaattttagtctcaagattcgatttgtgaagtcttgaagagttgtttcttacattttacaatgtgtttcttatgctaagctcttat

SEQ ID NO: 138083 - DNA, 315 bp, Arabidopsis thaliana
gtctccctccatcatgctatggatcgtcagccggagagggagaatgatgaactaccatctccggcgataatttccgaccgagttctggtaaatggtgttgtcaccccgttaacgttgaccgccgagggaaagctacgatcgacggaatctggacggcggaaatcgacgttggcaaaagaaatcctgagtttcgtcgtggaaggtaacaaggttagagtaaagaccttggttgagaaaggaggaggaatttgctgtaaaggaagtgctggagattatgcaaggaacgatttcgttttcgagcctctctctgatgaa

SEQ ID NO: 138084 - DNA, 402 bp, Arabidopsis thaliana
aatatttcgtaaaaaaaaattctccgtttagacattattgttcgttggtcactttcatctctcttatccctttgcttttccattgattcagctcaaaaaaaaacaaaaaagtctcatcgttttctctggatctgaccgaaagatcattcctttctaagatactaaagtaggtttgagtgatcagaatcaattagagtgtgtataagaggaagagaaagagaaaacagcatgtgtattgccgtataccgtaaagttttgagcttgaatctgtattgccgtgtgatactgtagattgtttcacctttgaagcaacaccttcaagagtcaaatccttttctttcttattcatcttcccttctttttcggtatattataaacacttttgaaaatgggatcacaaca

SEQ ID NO: 138085 - DNA, 387 bp, Arabidopsis thaliana
gataagccggcgagttcatggaacaagttttattactattccaaaactctcaggtttctctattgtatctcccaaacaagttgaggtagagtatgcagatggaaccaagttcaatttttcatcagagtttctgagaattcatagtccagctgctgatggaaaagtcagatcaatcggtggtgaaaaggtgatatctggaaggcggtatgtaggaatcatgtctgcagaaccggttggaaactacggggtaaggtacttacaaatactgcaaggtcattatgagttagccatcatgaagattcagatacctaagtttattgttttgcttataacttaatgcggttgggggctaaatcttttttgaggattcaggttagtgtttgatga

SEQ ID NO: 138086 - DNA, 124 bp, Arabidopsis thaliana
tctctcttgagttgaagaaatgaagcacaacaatgttatccccaatggtcacttcaaaaagcactggcagaattatgtcaagacatggttcaaccagcctgccaggaaaaccagaagaagaatt

SEQ ID NO: 138087 - DNA, 113 bp, Arabidopsis thaliana
gtctttccaaagctttctggtgctcgtatagtacgcatagcagtccaccccaacgctatgaagatgggatatgggtctgctgcggttgaactcttgaccagatactttgaggg

SEQ ID NO: 138088 - DNA, 381 bp, Arabidopsis thaliana
gtgaaacagcagcggttgttgagggcggagatgggcagcagcaacgacaagctggtgggtttgggcagacaattaccggaatcataagaatcgccgtcttctgttactttgcttctaagttcttttctcccaaacaaaaacctgcggatccttccaagcctactcatctcatgtccaatctatttcagaggggcgagcccatagtaatcttctggttaattgtgttgattacttgcttattcgttaatatatgcaatttcattcgtttctctcttcttccaaaacaaaaaaaaaaacgtttctttttggttcgaaacttcgaatcagagtttttcaacttctgggtggtttagggtttttccgttttgtgtttttgtttgt

SEQ ID NO: 138089 - DNA, 274 bp, Arabidopsis thaliana
aacagacccagaaaccttaaagattcagacaaagggacgaccttttttccgatcttatcgatttttgaatgagattagaagagcctatcttctaagtttttctttgatatctttttctctttgatcgatggatgagtcggtcgctaatctacaatcaagccagttgcttggttcagttccggctgtgatcagcgacgacaagagaaggacatgtgtaccaatagcaagcgtcaatgaaagtccgtctgcaatcatgcagataatttcaccgaat

SEQ ID NO: 138090 - DNA, 380 bp, Arabidopsis thaliana
ttccagtcgtctttgttcccttattgatagaataatcaaaaatccgagtcggagacgacgaagacccgagttccagctattaactatgcagataccatcaagagagcatagtttcattctatttctcttcatatctgcttttgtaattggtgctgcgtctgtacctgtacctgattctaattgctacgctctcgacaattcaagtcgtcttgtcgattttagcagctggatcggtcatccatttgaatatgatggcaaggaatttgatttggtggttagattttgcaaggatgtggaaacaagagggcaggcgggatatgttgattttggacgatttgacccgttaagctactttgtttctagttctgaaaatttcgatt

SEQ ID NO: 138091 - DNA, 339 bp, Arabidopsis thaliana
cagaagggtggtccgagtggaccgggacttttgcgttgaacactctgacttacagagagtattcgaacacaggagcaggggctggaactgcaaatagagtgaagtggaggggctttaaggtaattacggctgctgctgaagctcaaaaatatacggctggtcagtttattggtggtggaggctggttatcgtcgaccggtttccccttctcgctcggtctttgagagattgttgtgtaatgtgttcctacgtattgttggctacaaaaattattgattaatattgtatgaagcaaatcgtgttgtcctctttgttttgtttgggttgtgtactttctct

SEQ ID NO: 138092 - DNA, 383 bp, Arabidopsis thaliana
cgctcgatccttctcactaaagcgatcgtaccgatcttaatatctttagcgagcgagagagagagagatagaaatcctgagaggaaagagaggatggagatcgaaaaaagcaataacggtggttcgaacccatctgcaggagaagaatttaaggatatgattaagggagtgactaagttcttgatgatggtgattttccttggaaccatcatgctttggatcatgatgccaacactaacctatcgaaccaagtggttgccacatctgcgtatcaagtttggaacatccacttattttggtgccacagggacgacgcttttcatgtatatgttcccaatgatggtcgtagcttgtttgggatgtgtctatcttcacttcaagaa

SEQ ID NO: 138093 - DNA, 409 bp, Arabidopsis thaliana
agaatttgttaaatttttcttctctcgataataaaaacaacaaatgatcgttgatcgtttttctctagattcgattccgattccaaagaactagtctccggcgtgtaatctctgatcgttgaagatccaagctacgccgcatcttactcgccggcggcttgaatcatggctgataggagaaacaggtgtaaccagatcctccttttagcataccagagttttggcttagtgtttggagatttgagtatttctcctctctatgtgtataaatgtacattctacggaggattgagacatcaccaaacagaagatacgatatttggcgcgttttctttgatattttggaccatcactctcctttcactcatcaagtacatggtttttgtgttaagtgcagatgacaatggtg

SEQ ID NO: 138094 - DNA, 424 bp, Arabidopsis thaliana
cggacgcgtgggtctcactaccacgagctcttcatctccacttccttctccgacaacgcttccgtcgctctaaacctccacaccctcacgcgccgccctcatgtagccggtacagtggccaacgctgaagcagcggaatatgttcgctctgttttcacctcctctgctctcaaatcacacgtcgttgcttaccaagtgtctctaacttacccagttcatcgctctttggtactaacgccgacagactctgcaaagccaatcactttcttgctggaacatgaaaaactcggagacaatccttatgctaatgaagtgatgcctacttttcatggatacgctaagtcaggtaacgtttcaggtccagtggtttatgcaaactatggacgagtggaagatttcgtgagactcaagaaagatatgggcg

SEQ ID NO: 138095 - DNA, 173 bp, Arabidopsis thaliana
ctcagagacaagcaaccgcataactaaggttgctagccaagcacaacatggataatcggatagtcattgggaactctggagcaatcgtcttattggtggaactactttacgcaactgactcagctacacatgaaaacgctgttaccgcacttctcaacttatctatcagtgac

SEQ ID NO: 138096 - DNA, 321 bp, Arabidopsis thaliana
agctttctttggagccggtagttgttaactccaaagctaaagtacctctggtggttaaagatatgattcagtctgcttctgatggacttaatagtgggaattctccggtcaggtcaagctaatgtacgggaggatcttatttcatgcagggtccatctggcaacaaatttgtgggtgtgtttaagctaatacatgaggaatcactggctgagaacaatcctcacggtttaccactttcgccagacggtgaaggtcttgataaaggaacaaaggttggagaaggtgcattaagggaagtcgctgcatacattttggatcatc

SEQ ID NO: 138097 - DNA, 418 bp, Arabidopsis thaliana
gtaaaaagaagaatcgccattgagattgtcccaaaacctccaaaggaaacacacgtttgtctttgctctgaggtatcttcgacgggacgttgaagcgagcaagatacgacacgaaatcgatctcccccttgcgttttccatctccgtcgtctgctgaaaccatttgatcgatctctcagataaggttctcaggatttaggttgcttctatgagaaggacacgttgcagttggtgcttcatgtctaggtaatgaaggctttatgtgatagatttgttcctcaacaatgttcttcatcaagcaagagtgatacgcatgataaatcccctttagtttcagattctggacctagtgataataagtccaagtttaccttatggtcaaacgtgtttacgtcttcttcctcagtttctcaaccgt

SEQ ID NO: 138098 - DNA, 279 bp, Arabidopsis thaliana
cggacgcgtggggggtggttaactccaactcgctgctacatgatgtggtcgaaatcgttgactttgtcagctctatgtaacataacgttgtctcgatatatgtggcaaccaaaaatatgttttatgaaataaagtgttctcaaaatgtttatgaagaacatttcgtcttaaatcttttctgtccttcatgtttttcttattactttttcaaagtaatctatctaccctcgattgatggaaaatagaactgaaacgaatagcatggttaatttacttaag

SEQ ID NO: 138099 - DNA, 250 bp, Arabidopsis thaliana
ataaattcagcgtctgagagacgagagactacatcaatctgcataaaattgcagacgacgaaagacggagactgataagaagcgatgcatctgtacaatgaatgggtaccgccgcctgtatcggtcgagacgatcaatgagaaagagtccttcgcgcgtgtcgtgagatgcgtcaacgagttgcaccgacccgatgatccagagtctgtttacgccactcttaaatggatctccgttatcgaactctttg

SEQ ID NO: 138100 - DNA, 265 bp, Arabidopsis thaliana
aaagactgtccgtgcttgccaaacgagctgtacaagctgcacaagctgctgttttgcaccataagaaaccaatttcaagtgtacaggctggtataacaggtggatcaacactgagctcacaggctgtgcagaagcaagaagtatcaactgcaaccactaaaagttacatcttcaaagcaggtgatccagtaacgtttttaagcccttcaacttcatctctggcttctctccgagcaccacctaggggaccggcaacacgttttca

SEQ ID NO: 138101 - DNA, 398 bp, Arabidopsis thaliana
  unsure (1)..(398): unsure at all n locations
acatttttgatagctcaagcacttgattctttccaaaggggtttcctgagatcacaaaggccaagtaacaatggcgaaaggagttgcagttttgaacagcagtgagggtgttacggggactatctttttcacccaggaaggcgatggtgtgaccactgtgagtggaacagtttctggccttaagcctggtcttcatggtttccatgtccatgctcttggtgacaccactaacggttgcatgtctactggtccacatttcaaccccgatggtaaaacacacggtgcccctgaggatgctaatcgacatgctggtgatctangaaacatcactgttggagatgatggaactgccaccttcacaatcactgattgccagattcctcttactggaccaaact

SEQ ID NO: 138102 - DNA, 168 bp, Arabidopsis thaliana
aaaagaagcttgctatcttcacagcacttgccttttcccagaagctctcaggactatctccggaaacggtcttccagccattgctcaaggataatcttgttgccaacgggatagtgctctccttcgtaacacacttcttctaggagtatctggtttacaacagtcttg

SEQ ID NO: 138103 - DNA, 419 bp, Arabidopsis thaliana
tctcaagttagttcaattcagaatctttgagtttgaacttttttttgttgggagaaagagagaaatgtcaatagagaaaccattcttcggtgatgacagcaacagaggagtaagtatcaatggtggtcgttatgtgcagtataatgtctatggaaatctctttgaagtttctaaaaagtatgttcctcctcttcgtcctatcggcagaggcgcttctggcatcgtctgtgctgcatggaattcggagacgggtgaggaagtagcgatcaagaagattggtaatgcatttggcaacattatcgacgctaagagaactttgagagagattaagcttcttaagcatatggatcatgacaatgtcattgccattatagacataataagaccacctcagccagacaacttcaatgatgttcaca

SEQ ID NO: 138104 - DNA, 403 bp, Arabidopsis thaliana
atctttctaacacacaaactcacatagaattcaagaaagagagaacgagggagagatgggtgaggatatgcgaggagtgaaagtagtctcaaaatggccaccgatgatagttatggtgacatcacaagtagcgatgggttcggtgaatgcacttgtgaagaaagctcttgatgttggtgtgaaccatatgatcattggaaaataataccgaaaataacgtttaggctaatggtcgatcatttcatcagtggtttgctcggggcgagtttgatgcaatttttctatttgcttggtctgtcctacacgtcagcaactgttgcgtgtgctttggtaagcttgatgcctgcaatcacctttgctttcgctcttattttgagaactgagaagataacagatctaaaga

SEQ ID NO: 138105 - DNA, 379 bp, Arabidopsis thaliana
accacgcgtccgcccacgcgtccgtgtcacttacattctctaaggctgtatttcttggaaacggtctggtggctatcctttcgggattgtttggcaatcttcttgttgacactttttcctttggtcctgttgctccctttgacgccgctgcgtgctttcttgcaattggaatggcgatcatattgggaacatggtctgagaattttggagatccatctgacagcaaagacttgctgactcagttcaaagttgctgccatagcaattgcttcagatgaaaagattgcattgctgggcgctattcagtctctattcgaagcctcgatgtacacctttgttttcctctggacaccagctcttagcccaaacgatgaagaaat

SEQ ID NO: 138106 - DNA, 417 bp, Arabidopsis thaliana
  unsure (1)..(417): unsure at all n locations
gtttacctctgtctggagtctggccattgggattaaactaacttctcattctcattccaccttcttcttctttgttcttgtgtgctactaaaaatcaagaaagcacaaggagacaaataaacctatccatttcattaccaaacaagccgtacattctctagttatggcttcttcttcttcttcttcttcaactacttcaaccatcacatccaaatttattgggcttatgcttcttctctctcttcaactagacttattactcggatcagctattcatcttaaaaaccaaacttcattcagacccaacagggagattcagaagcttagaagagtggaagcatatctcagcanaatcaacagaccttccatcaaaacaatccacagcccagacggagatgtaatagaatgtgtaccgtc

SEQ ID NO: 138107 - DNA, 393 bp, Arabidopsis thaliana
ttattctctcattctttcttcttcattattcatttctctcgttattcgtttcgtattttgtttgtgtttatgattttacctccttagttgctgtgagatcaagaagtggtgaaagaaaagttactaaatctggatgttatttgattgtcgtcgttggtcttgagctatgaggagcgttaataatagtagtgtcgacaccgtgaacgccgccgcttccgccatcgtctccgctgagtctagaacacaaccgtcgtcggttcagaaaaaaaggggaagctggtggagcttgtactggtgttttggatccaagaagaacaataaaaggataggccacgcggtgcttgtacccgaaccagctgcatcaggagctgcggtggctccagtccaaaactc

SEQ ID NO: 138108 - DNA, 223 bp, Arabidopsis thaliana
accacgcgtccgcggaaagccggtaccggtcaatgcagatgagagtgaagaaagttcaaaagcattttctgtggcatgctaagccagagaagtatgatatgtttcacatgattcttcattcaatttggtataaccgagttttccaaatttctgtttaaaaattttgttcaacaattcaatgtacattttttacagataaaatttctgagtaaactcaatttac

SEQ ID NO: 138109 - DNA, 325 bp, Arabidopsis thaliana
aggcaatcttctgatgcttcagtccaatcaaacacacaatggccggaacagtctgaggagctattgggactgattgtgaattcacttaagacccttgatgcggctgttccacaaggttgtccagagcctagacgacgaccacactctgctcaaaagattgctcttgttttagacagagcacccaaacatttgcaaccagatttagttagtctggttcccaaactggttgagcattcagagcacccactggcagctttagcacttatagaaccgcttcaaaagcctgaagctgaaccagcgttgcctgaaccagtatacaatgctc

SEQ ID NO: 138110 - DNA, 399 bp, Arabidopsis thaliana
cggacgcgtgggtcaatttcggttccactttcctttcgtttgcaaaaacccatcccatcaaaaataaacaagagggcctaaagaagaatcctaaagactttacgggtcttgtttaggataaaagaaatgcctgccggtggattcgtcgttcggggatggccaaaaggcttatcccggcaaactcactccctttgttctcttcacttgcgttgttgctgccatgggcggtctcatcttcggatacgatatcggaatctccggtggtgtgacgtctatgccgtctttcctcaagcgattcttcccgtcggtgtatcggaaacaacaagaggacgcgtcaacgaaccagtactgtcagtacgatagcccgacgctaacgatgttcacatcgtctctatatct

SEQ ID NO: 138111 - DNA, 294 bp, Arabidopsis thaliana
cggacgcgtgggcggacgcgtgggctcgcatgtgccttcgaggtgctggtgcgggtgacgactcagatgcggcgcacaatgcgtgctccgatgcggcgttgctcttaacaaagttggctctagcaagacagagctccgataacgtgagcgtcgttgtggttgacttgaggaagaggaggaataatcaagcgtcgtcttaataattagtgttataattagtagtagtattagaataattgttacatagcctaattgtaattgtattctttttatttttctattttagtttttctc

SEQ ID NO: 138112 - DNA, 380 bp, Arabidopsis thaliana
ctcttcttctcaatctctctctctccctctcaacctctcaccatggtagctcaagctcctcatgatgatcatgatgatgagaaattagcagcagcgagacaaaaagagatcgaagattggttaccaattacttcatcaagaaatgcaaagtggtggtactctgcttttcacaatgtcaccgccatggtcggtgccggagttcttggactcccttacgccatgtctcagctcggatggggaccgggaattgcagtgttggttttgtcatgggtcataacactatacacattatggcaaatggtggaaatgcatgaaatggttcctggaaagcgttttgatcgttaccatgagctcggacaacacgcgtttggagaaaaact

SEQ ID NO: 138113 - DNA, 417 bp, Arabidopsis thaliana
aggacgcgtgggcttttggaagagacattgttgatgctcactacaaagcctctttgtatgctggaatcaacatcagtgggatcaatggagaagtcatgccgggacaatgggagttccaagtcggcccatcggtcggtatctcagctgctgatgaaatatggatcgctcgttacattttggagaggatcacagagattgctggtgtggttgtatcttttgacccaaaacctattcctggtgactggaatggagctggtgctcacaccaattacagtactaaatcaatgagggaagaaggaggatacgagataatcaagaaggcgatcgagaagcttggcttgagacacaaggaacacatttccgcttacggtgaaggaaacgagcgtcgtctcacgggacaccatgaaactgctgaca

SEQ ID NO: 138114 - DNA, 312 bp, Arabidopsis thaliana
aattgacagaagaacgtcccgggacaaacaacgctactgttactgctctcatttcactgaaatggaaggaattgagtgaagaagagaagcaagtttacaacggaaaggccgcaaaactgatggaagcatacaaaaaggaagtggaagcttacaacaagaagtctgcggctactaccagtagctagataaatctctcttagtattgaaatcatgttcaagtcctgttgaacattccttattatgcatcgttagattactctaagtacttttatgttttaactctcgctgatcattacttactagttactatct

SEQ ID NO: 138115 - DNA, 401 bp, Arabidopsis thaliana
aaagaaactaggaagaggagtaaataatatttgttttaaagaaatgattctccacaaaatggcgttcttggccgttattctcttcttcttgataagcagcagcagcgtttgcgttcatagccgtgaaacgtttgcttgcgatacaaaggacgcagcaacagctacactgagattctgccagctttcagttcctataccggagagagtcagagatttgatcggacggttgacattggccgagaaagtgagcttgttagggaacactgcggcggcgataccacgtctaggaatcaaagggtacgagtggtggtcggaggctttacacggcgtttcaaatgtgggacccggtactaagttcggtggggtttaccctgcagccaccagtttccctcaagtcatca

SEQ ID NO: 138116 - DNA, 321 bp, Arabidopsis thaliana
cacaaaccaaaaacatatagacagaaagccaacccaaaagactttaccatggaatcacacaacgtgtgcaacagcatgaacctatacatggagatggatcaagaaaaggcgttcgactactccaaaagagctcaatggcgaagagccgccgtgcttggtgccaacgacggtcttgtctcgacggcttcacttatgatgggtgtcggtgcggtaaagcaagacgtcaaagtcatgatcttaactggtttcgccggtttggtcgccggagcttgtagcatcgccatcggagagtttgtctccgtttactctcagtacgacatc

SEQ ID NO: 138117 - DNA, 154 bp, Arabidopsis thaliana
accacgcgtccggaaaatagtttcttaagagattttattgtcttgcccttacaactacgaaacacattattataaagccaactagggaaaacagaggtacttcaagtaagggcaagacaataaaatctcttaagaaaatagtttctaatccatt

SEQ ID NO: 138118 - DNA, 401 bp, Arabidopsis thaliana
ggaacacaaccatcccaaccaagaaggaacaagtcttctccacctactcagacaaccaacccggtgtgttgatccaggtgtacgaaggagagagagccagaaccaaggacaacaaccttcttggtaaatttgagctctccggaattcctccagctcctcgtggtgtcccccagatcacagtctgctttgacattgatgccaatggtatcctcaatgtctctgctgaggacaagaccaccggacagaagaacaagatcaccatcaccaatgacaagggtcgtctctccaaggatgagattgagaagatggttcaagaggctgagaagtacaagtccgaagacgaggagcacaagaagaaggttgaagccaagaacgctctcgagaactacgcttacaacatg

SEQ ID NO: 138119 - DNA, 402 bp, Arabidopsis thaliana
aaaagttccattctttttcacaaagccattgtgctgttttctccatttggatcaaaatggttgctgagaacaataaaaacaaggacgtaacactctctgcatcaatggacaacaacaacaacaacatcaaaggaactaacattcatcttgaggttcatcaaaaggaaccagctttggtcaaacctgaatccgagacacgaaagggcctttacttcttgtcgaatcttgaccagaacatcgccgtgattgttcgtacaatctactgtttcaaatccgaggagagagggaacgaggaagcagtccaagtgatcaagaaagctctgagtcaagttcttgttcattactatcctctcgctggacgcctcaccatcagtcctgaaggtaaactcacagttgactgta

SEQ ID NO: 138120 - DNA, 386 bp, Arabidopsis thaliana
atctgtaaaccttttcttcttcttcttcttcaatgcctccctaaaaccctagactcagaattctcaaaggcgacacctttaacctcctccactctgtttctttctccaacaaaaaatgtcaaattcccatttgggtactctctgtttcatcatctctttactgggtttggccaatttctcactttctcaaaccggtctcgatgattcgactatgcaatctctcaaatcaagtctgaatcttacatcagacgtcgattggtctaaccctaacccttgtaaatggcaatctgttcaatgcgatggaagtaatcgtgttactaagattcagcttaaacaaaaagggattcgtggaactcttcctactaatcttcagagtctctctgaat

SEQ ID NO: 138121 - DNA, 386 bp, Arabidopsis thaliana
ttcaacgatagcgttgtgctctggagaagtgtttgatcgcagaaaagcttcgttctttgtagtctacaggcgtggaaggaatggcaaaaagctcgttctctcctcctactacaagtcctgtcgctcacacaacaaggcgagatggccttatctgcaatcggtttcgaaggttacgagaaacggctcgaggtgactttctttgagccaagcatctttcaagactccaagggactgggactccgtgctctgaccaagtcccagcttgatgaaattcttacacctgctgcatgcacgatcgtttcatctctctccaacgatcaattggactcttacgtactctctgagtccagcttctttgtctacccctacaaagtcatcatcaagac

SEQ ID NO: 138122 - DNA, 416 bp, Arabidopsis thaliana
aaagagagagagagcgatagtgagatttagatcaacagatttgaatcgatttctgaaaacatgcagtacaagaatctggggaaatcgggtttaaaagtgagcacgctctcgttcggagcgtgggttacgttcgggaaccagctcgatgtgaaagaagcgaaatcgattcttcagtgttgtcgtgatcatggagtcaatttcttcgataacgctgaggtttacgctaatggtcgcgctgaggagattatgggtcaagcgattcgtgaactgggttggcgtcgatccgatatcgtcatctctaccaagatcttctggggtggtcctggtcctaacgataagggtttatctaggaaacatatcgttgaaggcactaaagcttctctcaaacgacttgatatggattacgttgatgtgct

SEQ ID NO: 138123 - DNA, 382 bp, Arabidopsis thaliana
ctttttgactttccaactactccttcttctacttcgtgtttcatcggaatctccatggatcgtcgccggagatgtgtctcgaatcccgatcaatttcctcgaattagcaaagagcccggaggttttcgattcaatggtgagaatcagaaggaaaatccacgagaatcctgagctgggatacgaggaattcgaaactagtaagttcattaggtcggagcttgaccttatcggagttaagtataggtttccggtagctatcaccggtattatcggatatatcggtaccggagaaccaccattcgtcgctctaagagcagatatggatgctttgcctattcaggtctagtaccaattcacagaactctcatcgattagttacatt

SEQ ID NO: 138124 - DNA, 383 bp, Arabidopsis thaliana
cccacgcgtccgcttaagtagaaagagtgaaacatggctaatcacaaaaatctcttctttctatgtttcttaataggtttagggttatgttctgctagacgagcactactctcctcctctgaatccgaggctgaagtcgctgcctatggcgtgaatagtggtttaagtgctggtcttggtgttggtaggtggtggccctggaggaggctacggaggtggaagcggtgaaggtggtggagctggatacggaggcggagaagctggtgggcatggcggaggtggaggaggcggagcaagcggcggtggaggtggtggtggtggtgcacatggtggaggatacggtggtggacaaggtgctggtgctggaggaggatatggaggtg

SEQ ID NO: 138125 - DNA, 410 bp, Arabidopsis thaliana
aaagactcgtgcccctgaaaattacttctacaggcttctcaagcttaattcaccggaatggccttactcaatcatgggagcagtaggctcaattctttctggtttcattggtcctacatttgctattgtgatgagcaacatgatcgaagtcttctactacacagactatgattcaatggaaaggaaaacaaaagagtatgtcttcatctacattggtgctggtctctatgctgtgggtgcttatttgatccaacattacttctttagcatcatgggagaaaacctcacaacaagagtaagaagaatgatgctctcagctatcttgagaaacgaagttggttggttcgatgaggatgaacacaactcaagcctgatcgctgcacgtttagctactgatgcagcagatgtta

SEQ ID NO: 138126 - DNA, 401 bp, Arabidopsis thaliana
cttctctgcaaaatcgactaaagttttgagtttcttcaccgtacgattaaccggagatggagtcttctcccgatccaggagagttgattaagtcgtctcagccgagtttctttgagtttcagaagcaggcgtctctaatgacgagctgcaatcttctatggaaagagctctctgagcatttcacttccatggagcaaaacctgatgaagaaatctgaagctctgagacagatgattgaaaccctagataatcaaacgcagagctcgattgagttactcaagcatcgtgaggtgactatagaccacagcgtcgagatcgcggaggggaaagttgaggaacgcgttagagcggcgttggattcgctggagaaagctagagactgtggtgatgaagataccgga

SEQ ID NO: 138127 - DNA, 368 bp, Arabidopsis thaliana
gggagattatgcgcagttttggtcttactgacagtgagattgcaaatttccgagagccttctgaatggttgtattactttccccctttggctgttgaagatctaagggcatatggattgggttgtgattggagacgctcgtttgtgaccactgatgttaatccctttttcgatgcctttgtgaggtggcagatgaggaagttgaaatctatgggaaagattgttaaagaccgcaggtacactatattctcacctttagatggccagccttgtgctgatcacgaccgtgctactggggaaggtgttcagcctcaagagtatacactcataaagatggaagtagtcaagccattccctctgaaactgggt

SEQ ID NO: 138128 - DNA, 346 bp, Arabidopsis thaliana
gaagaagcaaagaagcactgataaatctctgcaactcaacaaatttctgagattagctatggaaggttcttcatcttcgtcttcgttaatttccaaatcggacgctgagttggaggaaatgctcgatcggatgctgacgagactcgctctttgcgacgactccaagctcgaatccctagtctctaacctccttcctcttaccatatcttctctttcttctcaatctcccgttgttcgcaacaaggttcttgagatattgagtcatgttaacaagagagtgaagcatcagcatgaaattggtttgcctttattggctttatggaaattgtacacagatcctgctgct

SEQ ID NO: 138129 - DNA, 272 bp, Arabidopsis thaliana
gttaaaagtttctaagttcatcaatggagaaatcaatggagaaaagcgtgagctctgctgcttctggtaattcaataaactcgaagctgaggtatcctctcagatcggctcttagattcaatgaagggaagcctcctgttcctgatttctctgcttcttctatgcccataagggcacgagttgtatctgctgttagtcagagtacaacagttcttgaattgtctgggaagaagagtgttgatcgaaccaagctaccaccaataagactttcg

SEQ ID NO: 138130 - DNA, 417 bp, Arabidopsis thaliana
aaaaaaaaaaaacttctttttatgttttgtttgtttctattccgatcttatcctacgccgtcactctcctcccggtgcgcacattagcaacactactcccgacgaatggagacgacgacgccgcagtcaaaatcaagtgtgtcccaccgaccgccgttgggaagagaagactggtggagtgaggaagcgacggcgacgctggtagaagcctggggcaatcgttacgtcaagctgaaccacggaaatctccggcagaatgactggaaagacgtcgccgacgccgttaactctagacacggtgataacagccgtaagaagaccgacttacagtgtaagaaccgggtcgatactttgaagaagaagtacagaacagagaaagctaaactctcgccgtcgacttggcgtttctataaccgc

SEQ ID NO: 138131 - DNA, 337 bp, Arabidopsis thaliana
aggacgcgtgggggacatttcataatctctcactttgtgcgagtgtttttttttccgagatccaaaatcttctaacggatccaaagctttgttactccgtggatctcctaccttgagcacctgaaaagatggacaaatctagtaccatgcttgttcactatgacaaagggactccagcagttgctaatgagattaaagaagctctcgaaggaaatgatgttgaagctaaagttgatgccatgaagaaggcaattatgcttttgctgaatggtgaaaccattcctcagcttttcattaccattataagatatgtgctgccttctgaagaccacaccat

SEQ ID NO: 138132 - DNA, 326 bp, Arabidopsis thaliana
cgcgtttctccatcaagaagaagacacagagaacacagttctccatcaacccttttgatccgagacctatgagagccgttaactcaagcggcgttgtaacggccatcagcgaggatttggttaaaacgctgcgtattagcactgtcggtagaaaacaagagaaggaggaagaagaggagaagtcggtgaagtttaaggtgagagcagttgcgacggtgaggaacaataacaaagaggattttaaagaaactttggttaagcatttggatgcttttactgataaaattggtagaaacgttgtcttggcgcttatgagtacccaagtt

SEQ ID NO: 138133 - DNA, 393 bp, Arabidopsis thaliana
caaaaattcgagacctcctctccacttcgaaatttcatttttttttttctcaacagagtaaatttggctcttatgcacctgtcgtgtgaatcctgatctcgctttagattgtggaagccttcgacacatttcccattttgaatttgtcttcttcttcttcttcctttagtttttggggatatttcaccatcctcgttgaaatcagtgtgattcttcttcgtatacaatgacgaaattgagatcgaaatggttaggtttaagatctgtaaccatcttcttaatcaatttctctctagcttttgctttcgtttccgctgagagaagaggaaaatctctgaggttaagtacagacgaaacgcgggaaaatgaatcaagtttcttccttaaagctat

SEQ ID NO: 138134 - DNA, 411 bp, Arabidopsis thaliana
ctaggaaaattctcaaatccatctccgcgatacgaacagagagaagaagacttagaaaaatggctgttcaacctacaagaataggtctagctggacttgctgtgatgggtcagaacctagctctcaacattgcagagaaaggcttcccaatctctgtttacaacagaactacttccaaagttgatgagaccgtcgaacgagccaaaaaggaaggcaatcttcctctttacggcttccatgaccccgagtcttttgtcaagtccattcagaagccacgcgttattatcatgcttgttaaggctggttctcccgttgaccagaccatcaagaccctctctgcttatttggagaaaggtgactgtattgtcgatggtggtaatgaatggtatgagaacactgagaggagagaaa

SEQ ID NO: 138135 - DNA, 424 bp, Arabidopsis thaliana
  unsure (1)..(424): unsure at all n locations
ggacagcatcaggaggtgatccttgtggccaaaactggaaaggcataacttgctctggctctcgagttacacaaataaagttaccaagtcttggactttctggatcacttggattcatgcttgataaattgacttctgttactgagtttgatatgagcaacaataaccttggaggcgatttgccttatcagcttcctccaaacttggagcgattgaatcttgctaataaccagttcactggatctgctcaatattccatttctatgatggctcctcttaagtacctcaaccttgctcacaaccagttgaagcagctagctattgacttcacaaaactcacctctctctctatattggacctctcttccaatgcttttatanggtctctcccaaacacttgtagctctcttacgagtgcaaaatc

SEQ ID NO: 138136 - DNA, 52 bp, Arabidopsis thaliana
atgtcaatgtatatgaaacattctttgggaacacgaacttaacaatttattt

SEQ ID NO: 138137 - DNA, 434 bp, Arabidopsis thaliana
  unsure (1)..(434): unsure at all n locations
ctgttcttctcattggccgccatggtgaagtactctcaagagcccgataatatcaccaaatcttgcaaggcgagaggagccgatctcagggtccacttcaagaacactagagaaacagcgcacgccataaggaagctaccattgaacaaggccaaaaggtacttggaagatgtcatagctcacaagcaagctatccccttcacccgtttctgtcgtggtgttggtcgtaccgctcaggcaaagaacaggcattcgaacggacaaggtcgctggcctgctaaatctgctcaattcgttcttgatcttctcaagaatgctgagagcaatgctgaggtcaaaggtttggatgtcgatgcccttttcatttctcacatccaagtgaaccaagcagcanaacagaggagaaggacatatcgtgctcatggaagaatcaa

SEQ ID NO: 138138 - DNA, 338 bp, Arabidopsis thaliana
cagcattctgaccctagacacagagtcctccggtcttctgataaacccccatgtggaaggccaagacatgcttccgtcagatttacttgaccgtactaatacggcggtactcgagagtcgctccgccgccgtcttcggtgatccgcgtgacaaacaacgtagcacacctgggaccaccgaagcaaggaccactgccacgtcagctgatatccctgccgccatttcccggtcatccattacctggcaaaaacgccggagctgacggcgacgatggagatagcggcggccacgtcacagctataagctgggtcaagtactattttgaagaaatctatgat

SEQ ID NO: 138139 - DNA, 342 bp, Arabidopsis thaliana
gcaatcctctttctctctctctctctctttcccaatcattaacacaaaaaattatggagcacaacaaggttgatacagaacctcaagattcatatgatgatcaacaaaaatgggttctcgattcttcgaccgatagtagaggagagattccgcttcgggctcaaaccggagcttggagagctgcactcttcatcattggtatcgaattcagcgagaggctaagttactttgggatctccacgaacttagtggtctacttgactaccattcttcaccaagatctcaagatggctgtaaaaaatacgaactactggtctggtgtcactactttgatgcctcttc

SEQ ID NO: 138140 - DNA, 336 bp, Arabidopsis thaliana
caatgattgtgatctagaggccccaaacttgtttgagcgcatggtaacaactttgtctaaaattgctcaagggtctcagagtgctgatccaaatcctgccatggcttcgcagacagcttcggttaaaggttcatcccttcagtgcctggtcaacgttcttaaatcactagttgattgggagaaaataacgagagaggcagaatataatacaagaaatgcacacgaggactctgcttctactggagagccaattgaaaccataagcagggaatatgtcccaagcaactttgagaacgctaaagctcataaatccacaatggaagctgccatctccga

SEQ ID NO: 138141 - DNA, 430 bp, Arabidopsis thaliana
cggcgacttgacagagaagaacaaggaagaagactaagagagaaagtaagagataatccaggagattcattctccgttttgaatcttcctcaatctcatcttcttccgctctttctttccaagctcataaaaaatggctgaggctgatgatattcaaccaatcgtgtgtgacaatggtaccggtatggtgaaggctggatttgcaggagatgatgctcccagggctgtttttcccagtgttgttggtaggccaagacatcatggtgtcatggttgggatgaaccagaaggatgcatatgttggtgatgaagcacaatccaagagaggtattcttaccttgaagtatcctattgagcatggtgttgttagcaactgggatgatatggaaaagatctggcatcacactttctacaatgagcttcgtattgct

SEQ ID NO: 138142 - DNA, 362 bp, Arabidopsis thaliana
cgaggatctcgctacgaaacagaagtatctccgaaatgcaatcgaatctgctagaaaagctgtggagctgtctcctaactcgattgagtttgggcatttttatgccaacttgctttatgaggctgctaacgaagggaagagagagtacgaggaggttgtgcaagagtgccaccgtgctctctccatcgaatatccgattgatcctgctagagagagtcttcaggatgagactcagctgaagatattgacacctgaggctcgtattgctcatttccaggatgagctcaggtcactgatacagaagtctaacatttattcattgtccacttggatgcagaccttgggaaatggtgaagagaaat

SEQ ID NO: 138143 - DNA, 314 bp, Arabidopsis thaliana
gttttgagacacaccattttcactctgactctacaggtttcacgaaacggataatagacgtcaatggccggatcatctcagggacgatcacatctccgagttcaaggtagctttcagcttattccacaacgatggcgatggctgcattaccaccacggacctgggtactgtcatgcgttcccttggacacaacccaaccgaatcagagcatcaagacatgatcaacgaagtggatgctgatggtaacggtagcattgatttcccagacttcttgaaccttatggctcgtaagattaacgacaccgactctgagg

SEQ ID NO: 138144 - DNA, 306 bp, Arabidopsis thaliana
ctagccgccttattcgtcttcttcgttctctagttttttcctcagtctctgttctcagatcccatgtagtttcgaaatcttccgataaacatgtcgggtaaaggagaaggaccaactatcggtatcgatcatggtaccacttactcatgcgtcggactatggcaacacgaccgtgtctgagatcattgctaaagatcaatgaaacagaatcacgccatcggacgtcgccttcaacgactccgaaacgttgattcgtgactcatctaacaatcacgtcgccatcaaccacgtaaacaccgttttcga

SEQ ID NO: 138145 - DNA, 404 bp, Arabidopsis thaliana
cacaaacacacacaccataaaaaaacacagaccttaaaaaaataaaaatggttgatatggattggtagaggaagatggcatcatcagatttaccaaactcacctaagctttcttcaaagcttcacgtaactattccatcaccgttcaaaatcgtccctgtttcatctccgatctcatgttcagcacctgctctttgctctgcttacgagctttaccttcgtctccctgagctaagaaagctctggtcatctcgtgattttcctcaatggacatcagagccgattctcaaaccagctcttcatgctttggagatcagtttcagattagttttcgccgtttgttctgatactagaccgtacatcaaccaccgtgaatggaaccggaggctagattctctcatcacg

SEQ ID NO: 138146 - DNA, 242 bp, Arabidopsis thaliana
gagagacaagtcttgggaagttttctctgtttcacactttggagacgaaaccttaaaggcttaaaactgagaaaaacaaagccgttggcttttgtaagccgctcgttcttcgagacagaacacactagactctttctcgctcactcactcttcatctcttttcttctttctctctctcctaaaaatccgacgaaattatgagtcactttaccttttaatcaggaatatccctgtttcaccct

SEQ ID NO: 138147 - DNA, 280 bp, Arabidopsis thaliana
gggaaacatggttgaatgatattgatgatgctaaggagaagagtatcatgtttatgcatgataatcgaagtgattacagacctccaaactcattaactggtgtcttcagtgatgatgttagcagtgatgataatgattctgatttgctaactccaaaaacaaactctattcaaacttcgagcacttgtgatagttttggtagctcaaatcatcgcatagaccagatcaaagacctgcaagaatctcctacctcaacaatcaacttagtgtcactaactca

SEQ ID NO: 138148 - DNA, 365 bp, Arabidopsis thaliana
cggatttcgattcccgaggctcgaaaaaaccctaaatctcttctccgttcactcatccaaccgaagatgcgtgagattcttcacatccagggtggtcaatgcggtaaccagatcggcgccaagttctgggaagtggtttgcgccgagcacggcatcgatccaaccggaaggtacaccggagactcagatctgcaacttgagcgcatcaacgtttactacaatgaagcgagttgcggtagattcgttcctcgtgcagtgctcatggatttggagcctgggactatggatagtctcagatctggaccgtacggtcagacctttcgacctgataacttcgtctttggcaaatccggtgctggtaacaa

SEQ ID NO: 138149 - DNA, 359 bp, Arabidopsis thaliana
gagagatatactttcttttgaggatcagatcgtgacagggtttagctcaaggagagggtgagaaaaagaagaagaaggtgagaaaagtgaaggcaaggctttgaggatgtcttttacaggaactcaacagaaatgcaaggcttgtgagaagactgtttatgctgttgagcttctctctgctgatggagttggatatcacaagtcttgcttcaaatgcactcactgcaaaagcaggcttcagctgagtagttactcatcaatggaaggtgttttgtactgtaagcctcattttgagcagctctttaaggagagtggtagtttcaacaagaactttcagtcaccctgcaaaatcggctgac

SEQ ID NO: 138150 - DNA, 363 bp, Arabidopsis thaliana
gttgagattcctccccaacaacaacaatgaagcgtagcttgggttcaaattcttcaaacaatagtggcagtggaagtaacaagaagtctaagaagaataataatccgagcaatcagaaaaccctaggcgcggcatggggcgctgcttcttctcgttcttctttccggtcttctcctttctccgatttcggaagttacatggaagtgaaaaataggaaacttcagaaccaatttgagactgaggcttctgctgcttctcgtggtgtttcgggttctgagaaacttattttccaaggggtttcaatctttgtggatgggttcactattccttctcatcaggagttgaaagggatacatgatgaag

SEQ ID NO: 138151 - DNA, 290 bp, Arabidopsis thaliana
cgctcttcgatagaggtgcccaagaagcttctcttctctctctctctctctcttcaatgccctcctctgctactagcacatatctcctctctttaaaacaagtctctctcacagcttcttcaccactccttctccagctcaaagaccgtttctttcaccagccaaagctccttaacatgggattctcaactgggaaaagaaaatcacgagatgaagaagaagatagagtgagcttcttcgcttctgaattccccatggatgacctcaacgatgacgttctcgagagagtc

SEQ ID NO: 138152 - DNA, 403 bp, Arabidopsis thaliana
cttcgttctctagttttttcctcagtctctgttcttagatcccttgtagtttccaaatcttccgataaaaatgtcgggtaaaggagaaggaccagctatcggtatcgatcttggtaccacttactcttgcgtcggagtatggcaacacgaccgtgttgagatcattgctaatgatcaaggaaacagaaccacgccatcttacgttgctttcaccgactccgagaggttgatcggtgacgcagctaagaatcaggtcgccatgaaccccgttaacaccgttttcgacgctaagaggttgatcggtcgtcgtttctctgacagctctgttcagagtgacatgaaattgtggccattcaagattcaagccggacctgccgataagccaatgatctacgtcgaatac

SEQ ID NO: 138153 - DNA, 409 bp, Arabidopsis thaliana
caatcacacaacacctctcttcaatagcaataaccatggctcacactctcggtctcactcaacccaactccactgagcctcacaagatctcgttcactgcgaaggagatcgatgtaattgaatggaaaggagacatactcgtagttggtgtgacagagaaggacttagccaaagacggtaactcaaagtttgagaatccgatcttgagcaaggtcgatgctcacttaagtggacttttagctcaagtctcttccgaggaagatttcactgggaaacctggtcaatcgactgttctcaggcttccgggtttaggatcaaagagaatcgctttgatcggtcttggacagtctgtttcgtctccggtggcttttcatagccttggtgaagctgtagctacagtttcaaaagc

SEQ ID NO: 138154 - DNA, 404 bp, Arabidopsis thaliana
aagatggcggcgtttttgcaaactaacatccgtctggagatcataccgggaagatacagttctctcaccgatcataagtttcgtgcgccgtatcgaattaggtgcgccgccgcttcaccggtgaaaaaacggtataacatcactctgcttcccggcgatggtatcggtccagaagttatatctgttgctaagaatgtgcttcagaaagctggatttctccaaggactagagtttgatttccaggagatgcctttcggcggagcagctttggatttggtcggagttccattgccggaggaaacttccactgctgctaaacagtctgatgccattcttcttggagctatcggagggtacaaatgggacaagaatgagaaacatctgagacctgagatgggtctgct

SEQ ID NO: 138155 - DNA, 382 bp, Arabidopsis thaliana
gagggattcagatctatacgacgaaactgaatctcaccgtcttcttcttcttcttcttcttctagacgatccttgtgtttctcttgctctcgcatccacgcttctctggtaatgctactgatcgtcaccgtgaagctgagcttgatcgcttccccttgtgaactgatctgatctgagagttgtttctgtttcgtaatctgtgaatatgctgaccaagttcgagaccaagagtaaccgagttaagggtctgagtttccaccctaaacgaccatggattctcgcgagtttacacagtggtgtgatccagctctgggattatcgtatgggtactttgatcgacagatttgatgagcacgaaggacctgttcgtggtgttcatttc

SEQ ID NO: 138156 - DNA, 409 bp, Arabidopsis thaliana
cccacgcgtccgcttattaagaaagaccaacacagacacggaagaagtagcttggttcttctctttgtgaaggtgaatgcgggagatggggactggagattctgcttcgagactgattctctggttctgcttagggtttttgattctaggtgttggatttgtgcaatgtggagttacttatgaccggaaagcacttctcattaatggacagagacgaatcctcttctctggctccatacattaccctcgaagcactcctgatatgtgggaagatttgattcagaaggcgaaagatggaggcattgatgtgattgagacgtatgtgttctggaatcttcatgagccttctcctggaaaatacgattttgaagggagaaatgatttggtgagattcgtgaagacgattcac

SEQ ID NO: 138157 - DNA, 375 bp, Arabidopsis thaliana
ctgagatcggaaacgacaaacctaattttcccgaagaatcgagaccattatgtggaggagaatcgtttcatcgcatcttaaatccatctccgccgtcgggtcatgcgcggctccgtcgtgcatgcacgccttcacagactcgatgcaactttcactatctactactaaactggtgatcgtttcatattcctccatattctctcgtttaatcggctccgctgcagcggatactgctgtgaagaagcgtgttgaagatgtgatgcctattgcaaccggtcacgagaaagaggaactacaagccgaattggaggggatgaagctggacgatatatactttcctgaagggccttttggaacaaaggaagctcctgctgt

SEQ ID NO: 138158 - DNA, 439 bp, Arabidopsis thaliana
attcccgggacgttgtatgcacaggttaaatggggtaatgttttagtcagactgatcaacaagtttcgtaagaagctgtctttgaaagttcagtggaggcccttgtatgataccttgattcatgctcatttcagcatgagcccgggtcctgaaggttggaggttaagacaacgacactttatggctgttacctccctcattcgttcctgtatgagattttttccacaaggggccgcatctgagatatggtctgaattcatgtctcttttggagaatccttggcataattcctcgtttgagggctctggctttgtgagattgttccttcctacgaaccccgaaaatcatgatttcatctccgaaaagtggataataaacgttctagagctctgggattcaataccaaattgtcaattttggcatactcaatggacatctg

SEQ ID NO: 138159 - DNA, 431 bp, Arabidopsis thaliana
accacgcgtccgatcgtttcaatttctaaaattctcctctctcaacgcaatcaccaaatccaaatttagggtttcttttctctttctgcgatcgatctctgaaaactcataactgttgtttaatcgtgaagatggcatcaaacggatctttctctgctcagagaaacgcaaacgctagaacaacgatgaagagaagaagcgacaatcgcggttacggtggcggaatcggaggttatcaagaggagacgaaccgttacgcgccgccgcaaaaacgtttcagatcacaagcgcaacagcaattccgatctggtcataatcctctgtatcatcatcatggtagtaataataataacgtgtctagggtttcttctcaatcatataacaattgcggtgttgatgtgattgcttctaattcaagttttgcattacgt

SEQ ID NO: 138160 - DNA, 426 bp, Arabidopsis thaliana
tgcgaaccggagcttctgggccgaagaagagaggtcgggaacctaaaaccaaggaagattctcagacgccgtcgtctcagcaacagagcgatgttaaaatgaaagaaagtgggaagaaaacgcagcagtcgccgagtgttgacgagaagtactctcagtggaaaggtctcgtccccattctctacgactggctcgctaaccataacctcgtctggccttcactctcttgcagatggggtccgcagcttgagcaagcaacctacaagaatcgccagcgtctgtacctctcagagcaaactgatgggagtgtgcccaatactttggtcatagcaaagtgtgaagttgttaagccaatggttgctgcagcagagcacatttctcagttcaatgaagaagcacgttctccatttgtgaagaagtacaaga

SEQ ID NO: 138161 - DNA, 270 bp, Arabidopsis thaliana
gaaagcttaatctatttagcccgcaaatgcagaataccgttggtgtaccaccaggcggatgggttgtcctcagatttatcgctaataatcctggtgtatggctgttccattgtcatatggatgcagatttaccatacgggattatgagtgctttcatagttcaaaacgggccaactccggaaacgagcttgccatctccaccgtcgaatcttccgcaatgcactcgggatcctacgatctatgagtctcggacgactaacattgatttgt

SEQ ID NO: 138162 - DNA, 386 bp, Arabidopsis thaliana
gaattaagcaactctttatttctcggctcacacactccgattaagcccgacgctctctctcctctttgtcgtcgtcatcatcgtctccggagtaggttgcagaaattcagatctgaactctcagacgaagctccgatcttactgagacatttttgctcgatttgactttcgcctttaaagcttctcagagattattgtactgaattaatggcgaattctcgtcaatattatccatctcaagatgaatcaatgtccccgacttctgtgagatcaagggaatgggaaggtccttccagatggactgagtacttgggacctgaaatggctgcatcagtgtcttctactaggagctctaagcaaattgatggacatgttggtggttccac

SEQ ID NO: 138163 - DNA, 232 bp, Arabidopsis thaliana
aaaaggcgtcttcaggtcttatattcatgtcatgtgaagagttggaccacgactcagtgagtcaggcacgtgaagatttcaaaattcctatctttgggattggaccatctcacagccactttccagctacctctagtagcttgtccacacccgacgagacttgcattccatggttagacagacaagaagacaaatccgtgatttacgtcagttacgggagcatcgtgaccat

SEQ ID NO: 138164 - DNA, 314 bp, Arabidopsis thaliana
accacgcgtccgcccacgcgtccgcccacgcgtccggtaagtccttaaacaagctatctatataatgaaaacacacaccaaagtgatgggaggacatgtcttgcttactgttttcactctttgtatgctttgttcaggggttagggcacagctaagccctgacatttatgctaaatcgtgccccaatctagttcagattgtccgtacacaagttgccatcgccctgaaggccgagatacggatggctgcttctctcattcgtcttcatttccacgactgctttgttaatgggtgtgatgcgtcgttattgttgg

SEQ ID NO: 138165 - DNA, 413 bp, Arabidopsis thaliana
caaaaatgttttagggtttttctttactcgattaagctcactagttcttcgcaacgtagttagagatcgacactggcgcggtggatttagggtttttttcctccgcgactacgctcggcgtttcgatttggaaccctaagctatgtggaacaacaacgatggtatgcccttagctcctcctggtactggcgggtccatgatgccgccacctcccgctgctcatccttcttacacggcgcttccgccgccttctaatccgactcctccggtcgagcctactcctgaggaagcggaggctaagcttgaggagaaggcccgaaaatggatgcagctaaattccaaacggtacggcgacaagaggaagtttggattcgttgaaactcagaaagaggacatgccacctgagcacgtca

SEQ ID NO: 138166 - DNA, 426 bp, Arabidopsis thaliana
cacacgcgtccgagttagtgtgtctctctcgccggccgatatggccgcctccgtagcaaactgctgcttctccgtcctcaatgcctccgttaaaattcaatcttcgtccatctcctcaccgtggtgtttcgtgtccgcatcgtcgttgactccccgagcttcctccaatattaagaggaaatcgtcgaggtctgattcaccatctcctatattaaacccagagaagaattacccaggtagagttcgagatgaaagttccaatcctcctcaaaaaatggctttcaaggcttttgggtcacccaaaaaggagaaaaaagagtctctttctgattttagtcgagaccaacagactgatcctgccaagattcacgatgcatcctttctcaacgctgttgtcaaggtttattgcactcatactgctcctga

SEQ ID NO: 138167 - DNA, 371 bp, Arabidopsis thaliana
gccatattttgataagagaagaagaacccttatagagaaagagaaagagagagacagagagagtggatggatgtcttatagaatgaacaaaacatcctctgtttctcttgtccttgtccctttttccagatcttaaggttttccacattttatcatctgggtcctctccttaatgatttgaagacactcaattcctatttgatcggggactagaatttggattctgtttcagacaaaagtagatttccctgtctctttcccgtttgattttcaataagatgaatccggaggagcaaaagatggaatctgcatcggatctgggcaagctcttcattggcgggatttcatgggacacagatgaagaacgactg

SEQ ID NO: 138168 - DNA, 285 bp, Arabidopsis thaliana
atacgtcgtcgtttccgaccgtcactctcctccaagtcgcatgccgactcagtcacgccacggatgtctccgatgtcttcctcattgatttgagttcgattcatcttccatcggtttgggagctgttgaatgatatgttcgtgtcgccggatgttctgaaactagggtttcggtttaaacaggatttggtttacttgtcttcgacatttactcaacatggatgtgaaggtggattccaagaggtgaaacaatacttggatattacaagcatatacaattatctgc

SEQ ID NO: 138169 - DNA, 124 bp, Arabidopsis thaliana
atctcttgcttctgttaaatgacttgtgtttttcttctgttctgttttggcctgaaaaatgtacgatattttgccaagagggcattgcttatttcatttttattgaaataaatttaacacatgt

SEQ ID NO: 138170 - DNA, 414 bp, Arabidopsis thaliana
cagaaaaaaactaaactttcgatgtttcaatggcggctgtgaactcgaaagctcttaactttatgtaggaattggcaaattaaaggttttgattgacgaaattggtgattaattgcttaagctgctggtgcttagaggaagatacgtgttgctgatttcaatttgcttccacaatgttgcttcaactacaagttgttaaagcttgattctttttgggacatgagcatgtgacttatgaaagttttagtctttatttgtgatttgagctggctagagaagactcttgtctctgtttgatagtagtcatggtgatcattctcctattggtcttctttgttggttcttctgtgagccaaccatgtcatcccaacgacttatctgcgctccgggaattggcaggagcgttgaagaaca

SEQ ID NO: 138171 - DNA, 156 bp, Arabidopsis thaliana
aaactagcgacgacgattcttccttcaatcaatttaattctcgttaaacccttctctcaatccaccaccattcccaaaaaacaggatcgagttcgtgaccatggctacgacaattacatggaagtggagaaaaaaatccgcaaagtcgtcaaattt

SEQ ID NO: 138172 - DNA, 404 bp, Arabidopsis thaliana
caaaaacaaaaatccacggagccgataaaaaaaaaaaaaaaactctctcagatctgagaatcatttcttcttcttcttcctcactttgttcatcatcttcttctccgatctaaacaacaatggcgacaccaggagcttcctcagcaagagatgaattcgtatacatggcgaaactcgccgaacaagcagagcgttacgaagaaatggttgaattcatggagaaagtcgcgaaagctgttgacaaagacgaactcaccgtcgaagaacgtaatctcctctccgtcgcttacaaaaacgtcatcggagctcgtcgtgcttcgtggagaatcattttatcgatcgaacaaaaggaggagtctcgcggtaacgatgaccacgtttcgttgatccgtgactacagaagc

SEQ ID NO: 138173 - DNA, 356 bp, Arabidopsis thaliana
cgtcgagctggaaagtttttcagctatgttcaagaatacgacgagaaggaccctcaaatccattccatcatgtgtttttgggtccttctcgtcgtattcttgaacatagctgaaaaggacccaaaatcacatgatggaatggatttgaggagagttacaactaaggatttgattgcgaaattcggtcttaaagaatatactaatgactttattggtcatgcagtggcacttcactgtaatgacaatcatctccatcaacctgcctatgatactgtaatgagaatgaagctctacgcagagtcccttgcacgttttcaacgaggttcaccatatatctatcctctctatgggttggg

SEQ ID NO: 138174 - DNA, 393 bp, Arabidopsis thaliana
acccacgggcccgcaatttctctacacttaaaaccaaccccaattctcaccaaaaatcgcaaaaaaagatttcaactttcgataaacccagatcgaaaaatcagatttttccagatcaatcagagagttagagatggagtataataacaacaatcagcaatctttttggcagttcagcgaccagctgagagttcagacaccgaatctagcgaatctgtctctcaacgactcgatctggagcacaaactctgtcttcaaagagcgtcgaaacttagacatagccgccaccaccgacaagaacaacaaccagatcgactattatcagaagaagacaacttccgacaacatcaattccaactggaactggaagtcttctggttcaaacaacgacat

SEQ ID NO: 138175 - DNA, 393 bp, Arabidopsis thaliana
ctattttcacattctcttctctctcgatatcatctaaatctctctcgatctcaatttcgcaaaatggctgacaagaagatcagaatcggaatcaacggtttcggaagaatcggtcgtttggttgctagagttgttcttcagagggatgatgttgagctcgtcgctgttaacgatcctttcatcaccaccgagtacatgacatacatgtttaagtatgacagtgttcacggtcagtggaagcaccatgagcttaaggtgaaggatgacaaaactcttctcttcggtgagaagccagtcactgttttcggcatcaggaaccctgaggacatcccatggggtgaggctggagctgactttgttgttgagtctactggtgtcttcactgacaaagac

SEQ ID NO: 138176 - DNA, 392 bp, Arabidopsis thaliana
caaaaatgctgggtttttgaacgaacgaggatgacgatgctcagagtccgaagcagagatggattggagagagtgagtgtagatggacctcatatcacagtctcccaactcaaaaccctaatccaagatcagcttcagatccctatccacaaccaaaccttatccaccaatagaaaccttctcctcgctaagagcccttctgatttcctagcgttcaccgacatggccgatcctaacctccgaatctcgtctctcaatctagctcacggctctatggtctaccttgcttacgaaggtgagcgtacgattcgtggtggtcctgctgtaacgcctgctggttccttcgggaggaagatgaccgtcgaagatctaatcgctcgacagatgcgcgt

SEQ ID NO: 138177 - DNA, 261 bp, Arabidopsis thaliana
gaaacagtcattatcctcaacatccccgctggtatgaattatgtgatttgttcggcatgtacatgatcgatgaagccaatatagagacacatggttttgatctctctgggcatctgaagcaccctgcaaaagagccaagctgggcagctgctatgctggatcgagtagttgggatggttgaaagagacaaaaaccatacatgcataatttcttggtcacttggaaatgaggctggctatgggcccaatcattctgccatgg

SEQ ID NO: 138178 - DNA, 396 bp, Arabidopsis thaliana
gtggcaaagatgatgaatcatttgcttttggctcttttccttgttggaaccatcgccttaccagatagaggaactcaacaattgaccaacgatggcctcaccggcgcgaggcgagagatactctctttcttagaccaaagacttgcagtggtgtacccagtgatccagagattcaagtcactcatcactctcgacccttataacgtgaccaagacatggattggttcagacatctgcagttatagaggcttccactgtgacaatcctcctcacaacaaaaccgcagttactgttgcttccatcgatttcaatggctttcagctctctgctccatccatcgaaggatttatcgatcaattcgctgacctagctctgtttcatgttaactcaaacaat

SEQ ID NO: 138179 - DNA, 439 bp, Arabidopsis thaliana
caaacattaagtagcactctttttcctctctatatctctcactcacactttttctctatatcttctcctcaacttggatatgggtgaagccgtagaggtcatgttcggaaatgggttcccggagattcacaaagccacatcacccactcaaaccctccactctaaccagcaagactgccattggtatgaagaaaccatcgatgatgatctcaagtggtcttttgccctcaacagtgttctccatcaaggaactagtgagtaccaagatattgctctgttggacaccaaacgttttggaaaggtgcttgtgattgatgggaaaatgcaaagtgctgagagagatgagtttatctaccatgaatgtttgatccatcccgctctccttttccatcccaaccccaagactgtgtttataatgggaggaggtgaaggctctgct

SEQ ID NO: 138180 - DNA, 412 bp, Arabidopsis thaliana
cgattaacgaaaaagacttgtcgttctcaattcttatcgatttaagaacaaatcatctaacgaagattacttccgaagatcagaaacaaacacaaactgtgaatcgttgtttgttaattctctttaaaatcgccagaagaaagagatctccgttttctacagaagaaaagcaagagagtaagaatgggatcggaacaaaacgatagcacaagcttcacgcaatcgcaagcttcagagccaaagctatgtgttaaaggatgtggtttctttggatcaccatcaaacatggatctctgttctaaatgttacagaggcatttgtgctgaggaagctcaaacagcagttgctaaagctgctgttgaaaaatctttcaagccttctcctcctcgtagtctcttcatagcagaacctc

SEQ ID NO: 138181 - DNA, 388 bp, Arabidopsis thaliana
cccacgcgtccgcgaggaggaatttagaggatcttgttgtgcctaactatcaagagacatcagattcgtacccttctcctgatatgtggggtactggatggagcatgaactcttcagaagctgctgagaaatgttttgattatgatgtgattcacaatggtttcagtggaggattatacagtcagatggagatggatatgggaactagtgaacaagtagaagaagaaactaagaagttaaaggctagtggttgttttgaccgttcgcttcatgattttgatgaaatccaacacatggatgacatgttcttaagttccattttggaggatgttccagggaatgagaattttctttctttcaaggagtcggataataacaacagctccag

SEQ ID NO: 138182 - DNA, 369 bp, Arabidopsis thaliana
cacacgcgtccggtggaatcgaattcagatgatccaaatatgcatagtatacttaaccgtataataatgcctgagtccattgaaaagcatggagtcaactggaaaggcgttgactttcttgttttcaacacttacatttggtggatgaacacattcgctatgaaagtcctacgaggatcgttcgataaaggagacaccgagtatgaggagatcgaacggccagtagcgtataggagagtgatgacgacttggggagattgggtggaacgaaatattgatcctctacgtaccactgtcttctttgctagcatgtctcctcttcacatcaagagcttggattgggagaatccagatgggatcaagtgtgca

SEQ ID NO: 138183 - DNA, 310 bp, Arabidopsis thaliana
gtgagattgctcgacagtaactccaccaatacgacggttcgttcctttagcacttctttcatcttcataatcccttcaagctcaacaagcaacggaggtttcggcttcacattcacactctctccaaccccaaaccgtacagatgcggatcccgagcagtacatggggcttctcagcgaaagaaacgacgggaattcgagcaatcacgttttcgctgtggagttcgatacggtacaaggattcaaagacggaacacatcgaataggcaaccacatcggtctaaatttcaacagtctctcttcagatgtcc

SEQ ID NO: 138184 - DNA, 333 bp, Arabidopsis thaliana
gcggagattaggaaacctcttattggtatccgtggaagaaccccaaccagaacaaccgcatggttcaaaacgacggtcgcagtcaccgttctattgtcgttttgctccgtcgtgctctgcgttttggccttcactggcaagcgacggactcagagaccatggaacctcatagacccgctcttttggcttattcacgccgttacacacctagtcatcgccgttctcgtcctccaccagaagagattcgctgctctaaatcatcccttatctctacgaatctactggatttccagtttcgtcctcacgtctctcttccccgtcactgggattttc

SEQ ID NO: 138185 - DNA, 259 bp, Arabidopsis thaliana
cttgcggaaattcgacggcgacttttgcgatggcggtgagattctttactggaccagcggtaatggccgtggcagcaatggctattggattacgtggagacctattgcgtgtggccattgttcaggctgcattgcctcaagggatcgtgccgtttgtgtttgcaaaagagtataatgttcatcccgcaatcttgagtacaggggtaatatttgggatgcttatcgcactaccgattacacgtgtttactacattttact

SEQ ID NO: 138186 - DNA, 146 bp, Arabidopsis thaliana
atatccattgtgtatccacaatcgatgatacttgctatgttggtgatcctacagtccgtgaattccacgaggcttgctctgagcaccatctcttgaaaggtcaaggagttgttggagaaacctttttgacgaatggcccttgcttt

SEQ ID NO: 138187 - DNA, 100 bp, Arabidopsis thaliana
atccaaagataacttggcttcaagaacagaggagtatcttgagagcatcgtatgcaagaatcttgagatgtgtgttcaagtcttgaaacaatccgagatt

SEQ ID NO: 138188 - DNA, 292 bp, Arabidopsis thaliana
tggtaaaaccttctgaagctgagaagaatcttgttcagtcaacaactgctgctgctggagcaggggggatgttgggcccctactccgggggagctaggcgtctttatgttggtaacctccacattaacatgtcagaagatgatttgcgaaaggtatttgaatcatttgggagtgtggagctggtgcaagtacctcgtgatgaaactggtctctgcaaaggatttggttttgttcagtttgcccggctggatgattctagaaacgcactgaatctaaatgggcagttggaaat

SEQ ID NO: 138189 - DNA, 390 bp, Arabidopsis thaliana
atcgaatttagggtttttctctcccccgagcttgcttttccgttgggtgaacgactaccgttgattttcttcgtttttttggataccgattcgattctctctcaccgatttttgaggttctctatttttcgtggataagaagataaagttattgtttattgataagttttctgctgggaagttgcaactttttctagatttaggacgttacaaatttcaatcatgagtgcatcatgggcagatgtggctgattcagagaaggccgtttctcagtcaaagcctccttatgttcccccacacctacggaacaggccatcagagcctgttgctgctcctttgccacaaaatgatcatgcagggtatggtggtcaaccagctgggtctcgttgg

SEQ ID NO: 138190 - DNA, 312 bp, Arabidopsis thaliana
aatacctgaatctcaccgtgaggatgaagttacgagttttgctgtggtcaatccaagtgggagggatctagagaatggtgtgaacagtgaaagtcaagcttatactagtgcaactggtcaagctgatggctctttaaaactttggagaagtagttttcaggaaagttcaacaccttccggtctgtgggagctagttggcatgcttacggttggccaaaatcctgtcagtgctatatctctgactgattcgggacacaagatagcagccctctgtacagagagtcattcaaaagctgcccgcgcagttagtag

SEQ ID NO: 138191 - DNA, 106 bp, Arabidopsis thaliana
aacaaacatcagaacctcaggaaaaaagcaaagttctcttctggaattcgagaaaatgggaatgtcgaactcgaaaggcaacacacacaacatcttccttctctgc

SEQ ID NO: 138192 - DNA, 290 bp, Arabidopsis thaliana
gcgatttggacggagatttctccgattacattgattgggactttagtgaatcttcacagaagcaacttcacggagaacggcgagaagaatgtggaattgagagcgtcgttagaggatggagaagcgtcggccgtttcactggagagatctagtgttgttcgttgatgaaggggttctaatttcgatacctaacggaattgatcattgataaggtcgcattccggtggcaatcgtcgtcgccggaaacaatgtgcacagatacgaccttgaggggatgattcacgtgagag

SEQ ID NO: 138193 - DNA, 194 bp, Arabidopsis thaliana
attctctcagtagaagagcatgatgcttgaggatattcctggggcatcagtggagtcaggattaatgtcacttatcgaaaaaccatcctataggggtctgccacaatattatctaagatctggttctggccttttggatcttctccaggctataccacctacacttccaatttcttcgcaggaactttttacca

SEQ ID NO: 138194 - DNA, 331 bp, Arabidopsis thaliana
ctaaaaatcttactcttcttcactctaaatcccttctctgaacctcttcgtttgctgtatgtgttgatttcacttctctctgagcaagaagctttcgcgtgagagaatgacgaaggtctatggaactggcacgtacgacttcaagcgccacagagtggcggagtatccattggagttacctagccatcctgctgagaagcctctagagtcaaagcctggatctaatttgccgagctccatcactttatcggagattcagcaagataggttaacgaaaatcgctgaggagagctggattaagactggaggtaagctccctgagaaaccgttc

SEQ ID NO: 138195 - DNA, 164 bp, Arabidopsis thaliana
gttcgtggattttgaaggatttgattggtttccatggtattagatctctgtgatggttgttgatctatcttaaaacttgatttatcttcagttctctcgatttcaaacttgtacttgtcgtacttcaagtgatcgaatcggaaacttattgttgctatgtttac

SEQ ID NO: 138196 - DNA, 341 bp, Arabidopsis thaliana
agacgggatcttgggagttggaggttcggatcagagtcgagcaacagccgtcgtggtcgctagtagacgaagatggctaaagaggcgagaaacatggctggtggttctcggtgttgctcttcacgccgtctacatgctaagcatcttcgacatttacttcaaaacgcccatagtccacgggatggatcctgtgcctccgagattctctgagccgccggctaagcgacttgttcttctcatctcggatggtttacgtgctgacaaattctttgagccggacgatgaaggcagatacagagcacccttcttgaggaatatcataaagaatcaggggcgttggg

SEQ ID NO: 138197 - DNA, 423 bp, Arabidopsis thaliana
acaaaattgaagacaaaaatgtctcgcagatcgctaactctcctcaagaatctagctagaaacgcgaatggatcaggtattcaaacccgatccgtgacttacatgcccagacccggtgacggagcaccacgcgcagtgacgctgatccccggagatggaatcggtcctctggtgacgaacgccgtggaacaggtgatggaagcgatgcacgctccgatcttcttcgagaagtacgatgttcacggagaaatgagccgtgtgccgccggaagtgatggagtcgataaggaagaataaggtttgtttgaaaggtgggcttaagactcctgttggtggtggtgttagttctcttaacgtccagcttaggaaagagcttgacccctttgcttctctggtcaactgttttaatttgcctggtttacct

SEQ ID NO: 138198 - DNA, 325 bp, Arabidopsis thaliana
aataatcaaaattatgctgttgacccgttggtcttgaaaatttcactgattgttggaagaacccctgaagacttgattatccattgcattaaccgggcaagcataaccagagccaagatattattctaccttgtggagtccagtcccttgcatctgttagtctttggacactttttctttagtatgctaagtaagaaacaggatgactctgctcttacagatgatcagtttatcatgcttctgcctgctgtgctatcgtatctgacatcagttattgcaaaactcgagaagccttgtaatagatgtttggatataacttcagttt

SEQ ID NO: 138199 - DNA, 422 bp, Arabidopsis thaliana
accacgcgtccggttatttcaattcacgttggtcaagccggtatccaagtcggtaacgcatgctgggaactcttctgcctcgagcacggtatccaacctgacggtcaaatgccatcagacaagaccatcggtggtggtgatgatgccttcaacaccttcttctccgagactggtgcaggtaaacacgtcccaagatgtgtcttcctcgatctcgagccaaccgttattgacgaagtcagaaccggtacctacagacaactcttccatccagagcaactcatctcaggtaaagaagatgctgccaacaacttcgccagaggacattacaccattggtaaagaaatcgttgatctctgcctcgatagaatcagaaagctcgctgatcaatgcactggtctccaaggtttcctcgtcttcaactc

SEQ ID NO: 138200 - DNA, 364 bp, Arabidopsis thaliana
cccaaacgatccagtctctttagattcactttctcctagatcagaccacaagcatttggccacttctgtcctaatttattctctcatcaaaacctctattttgcttctccctttccttacaagctgttcactatatcccctgcgatttgtgtttcccacaaaccctaattttgcaagaagaggggtttcttctaaattatataagtctcggttctttttgccatttcgttttctctgatcatggattctgaagaatacatgctcgatacgcacgatatggactctggagatgatgagttctacagcggtggaactgatgatctgtaatgatactgatgatggttaacctgattatgggtttgtt

SEQ ID NO: 138201 - DNA, 421 bp, Arabidopsis thaliana
aaaagcctatttgggggatcatcaaccttctatcatcaccatggatccttacaagtatcgtccttcaagcgcgtacaacgccccattctacaccacaaacggtggtgctccagtctccaacaacatctcttccctcaccatcggagaaagaggtccggttcttcttgaggattatcatttgatcgagaaggttgctaatttcaccagagagaggatccctgagagagtggttcatgctagaggaatcagtgctaagggtttctttgaagtcacccatgacatttcaaacctcacttgtgctgattttctcagagcccctggtgttcaaactccggttattgtccgtttctccaccgttgtccacgaacgtgccagtcctgaaaccatgatggatattcgtggttttgctgtcaagttttac

SEQ ID NO: 138202 - DNA, 276 bp, Arabidopsis thaliana
accaccgtccggtttacgagcaacgtatcggaggacacggattacggacgaccgataccgcagaactcgaatcacaaagtgactttgacgcaattgagacagcagcatcggcaacgtgtgccgatatctatgggcaccgcctacgaatacccttctgccgttcacatcgatacagctggaatcaatgtttgtctcgtcggacattcacctgccatggatgtccatggctatgacaccactcttcctatctccctaaaggagatgcttgttcactgt

SEQ ID NO: 138203 - DNA, 374 bp, Arabidopsis thaliana
cacacgcgtccgtctttatctccttcactttctctctctcgataccgtttcgccgcagcttctcttcttctcccttcatctcaaaccattttcatccgatctcaatcctccaatcgtcggtctaactctaaccatctcggagtaatctacgagattgatatcgctgcggatcctcttgtcaataagttggaagatgctgtccagcggattatggtacgccgatccgcacctgattggctcacttttgtccccggtgcttccttttgggttccacctcctagatcccagtctcatgggatcgctaagctcgttgagaagctgggcaatccgatctctgatgaagaatctatttcaatctcatcggttcgaggatg

SEQ ID NO: 138204 - DNA, 384 bp, Arabidopsis thaliana
cacacgcgtccgcccacgcgtccgcccacgcgtccgctgaatcgaaaaagatggatgctaatttcgagatgcctccagtcggtggaatgaacgacgacgacgacatggatttcggtgacggcgcctcgtttcttaaagtcggtgaagagaaagagatccaacaaggtttgaagaagaagcttcttaaagaaggtgaaggatatgaaactcctgagaatggcgatgaagttgaagtgcattacactggaactttgcttgatgggacgaagtttgattcgagtcgtgatagagcaacgcctttcaaattcactcttggacaaggtcaagttattaaaggatgggatattggtattaagacgatgaagaaaggtgaaaacgctgttt

SEQ ID NO: 138205 - DNA, 425 bp, Arabidopsis thaliana
aagacaaggcttgaacgtccggtgaaagaaagaattcagctttccgcactaaccacttctgaatcctaaccaacaagcttctccatttcgtttttcgcgtctcgattccaaattccacttaagacggcggattttctcaccgggaaattggttttagatggataggactgaggaaatcgaagaatcccccgccggaccttcttccggatccgcgaaattgaagctcggaaacagagcagatcctttccttgttgtttgtagatgcttcagcctcgttacctctctcatcgccattctctgtgttgtcgttaacgttctcgctgccgttcgctccttccgtgacagccacgatctcttcgatggaatattccggtgttatgctgtggtgattgcttgttttgttgttctcgttgagactgaatggg

SEQ ID NO: 138206 - DNA, 396 bp, Arabidopsis thaliana
gctgttttgtacgccattagattgaaccctaaaaactctattattggattggatcatcatcgttaaagctccacgccttgtcccaatttcctctttggttctttccttctgggcttgttattgttgtttctcgaaaaagaagaagaagcgatggtattgggattttagggattattgcggtttgttgtatatatatatatagaagctgagggattttgtgttgtgaagaacatcgaatcctgtttttttccgtaagaaagttcttagatttctccaagtgaaagaagatgtcatcagctggtgttgcgttaagtccggttcgtagcgagccattgattatgcctctggttcgtgccaattcttgtcttgattcttatcctgacgacaccatcatga

SEQ ID NO: 138207 - DNA, 364 bp, Arabidopsis thaliana
cactgacgtcaccatccgacgtgtcagctttaaaagctttcaaagccaccgtgaaacccaactcaatcccaccgtggtcttgtctcgctagctgggactttactgtctccgacccatgtgcttcaccacgtcgaacacatttcacttgcggcatcacttgctcgtctgactccacacgtgtgacccaactcactctcgacccagccgggtacacgggtcgtctcacgcctctcatctccggcctcacagagcttctcacgctcgatctcgccgagaacaacttctacggcctaatcccatcctccatctcctccctcaccagcctcaagaccttgatcctccgatccaactcgttttccgggtc

SEQ ID NO: 138208 - DNA, 181 bp, Arabidopsis thaliana
atgagattacagacttctttcaatacctcaaatcttggattgttggtaatcgtaactgagattttgctttgtagcatgaaataaagaaaacaggtcacaatagttcctgaaactctgttacttttaagatatctctctctctttttttttctttctatttagtatttcaagtttatggatc

SEQ ID NO: 138209 - DNA, 203 bp, Arabidopsis thaliana
ctttcactcacacaaagagttttttcgtttaatacagaaactctttcaaggttttaaatctgtggtaaaattctctaaacctaagagtgatcaatgaagattcggaacagccctagttttcatgggggtaatggttacagtgtccttatagctcgtaacttaacattcaagaaagttgtgaagacagtgatgagagaccagtc

SEQ ID NO: 138210 - DNA, 296 bp, Arabidopsis thaliana
cgaaacagcggattgctttcatcactaatgcgcttttcatgaacatgcctcatgcccctcaggttgagaaaatgatggagttcagtgttctgactccatattacagtgaggaagttgtatacagcaaagagcagctccgaaatgagactgaggatgggatttccaccctatactacctgcagacaatttatgctgatgaatgcgaaaaatttcacggaagggatgcatagggaaggaatcaagacagatagtgagttgtggacaagcaagctgagagacctcaggctttgggcttc

SEQ ID NO: 138211 - DNA, 405 bp, Arabidopsis thaliana
atttgttttgctttgtcagtcaacggttgacccattgactcgcccaccatccatgacttcttcagcttaagttatgcactcatcttttatctccttcttaaaaaaatctgatgaactgtaacgttttgtttcttctctctgttctcgtctctgttacggctggagttacggcggcgtaccatcctaccgatgtctttctcttcaactgcggcgatacttccaacaacgtcgacaacagtggccggaactggacggtggaaagtcgtcaaattctgtcgtcgaatttagtcaacgcttcattcacttcagaagcgtcataccaaaaagcaggggtctctcggattccgtacatgaaagctcgaatattccgatctgagttcacctacagtttcccagtcactcccg

SEQ ID NO: 138212 - DNA, 357 bp, Arabidopsis thaliana
accacgcgtccgcttcactccaagtttatgaggagatctagagagataatcatatagagaaagagagatctccagagaaaatccattgaagggaaaaaaacagtctgtctttcataattgctctttctataaatcttctctcttgtgttcttacctttcttctaaaaccattctctctctctttaacacttcatcactctttacggaaaatttcttattttcaccacctgagccatctctattttcgtcaaaacttctcaacttttgtgccaaaacgtcatttcttctgagggaataaacacaaaagaacaattttcccggaaaatcatggagatttccactgctctaatgattctt

SEQ ID NO: 138213 - DNA, 418 bp, Arabidopsis thaliana
caaaaaaaaagcaaaatcgcaagagagaccttaaacgacatcgttttcagatgaggagacaccaccaccgatgccaaatcggctccgatagcgaaaccggatccgaatccgattccgataccgacacgccgatgcgatgcatctcttgtcgagaagagtacctccctcgcaacgccgggacctgcaaggaatgctacgtcgaagccggcgaaactgaagaagaactcaaacgcgagatcgatgacctcaaagctaaagttgctttccttcgcttatcttcttctcttgatcatggaactagttcaacctctagatccttcactgatgttgttctcatcgcctctgaagataacgccggatctcctcctattcccgctcataaatccgttctggtgagtcgttctccagttttcaaagc

SEQ ID NO: 138214 - DNA, 256 bp, Arabidopsis thaliana
cgacgatcttctgggtgactcaaagtgagacgttaagctcaaggtctctggattgcttttgaatttgcatgctgttggaggatgatagaccatcggtatgtgcttgagttttctcgaggaaggatgaaccgatacgagccgtcatattgattaagtatatatatgtagtggagtgcctgaaggagatatatatatatatactagcagttggatatgatggttttcatttgttaggtgtgagtttcttttgttgttg

SEQ ID NO: 138215 - DNA, 446 bp, Arabidopsis thaliana
aaataattctcttaaaagagctaagaaaatgcattcctctttgataaaattgggatttcttcttcttcttattcaggtatcattgtctcatgctcaactaagcccttccttttacgataaaacatgtccgcaagtctttgacattgcaaccactaccattgtcaatgctctaagatcggaccctcgcatcgctgcaagcatccttcgtcttcatttccacgactgctttgttaatggatgtgatgcatcgatattgttagacaacaccacatcgtttaggacggagaaagatgcgtttgggaacgctaattccgctcgaggtttcgatgtgatcgacaaaatgaaggctgccgtggagaaagcatgtcctaaaactgtttcatgtgctgatttgctcgccatcgcggctcaagaatctgtcgttttggcgggaggtccttcatgga

SEQ ID NO: 138216 - DNA, 468 bp, Arabidopsis thaliana
cccacgcgtccgatctgcagatcacttatacacagccatttgtggaatcataccaaacatttctagcccaggttgcaggatatttcattgtggaggatcgggtgattaggacagctggagatttcttgttggctgatcaagttgagacaatgtgggaaacagccatttccaaaattgtagccatattggagaaccaatttgccagaatggattcgcctactcatctgcttttggtgaaagattatgtaactctccttggcacaacccttagacagtacggttatgaagtgggtccagttcttgatgcccttgacaagagccgagataaataccacgagcttcttcttgaagagtgtcgaaagcaaattgtgactgctattacagaggacacttatcagcagatggtaatcaagaaggaagctgactatgaaaacaatgtcttgtcgtttaatcttcagacctcagaca

SEQ ID NO: 138217 - DNA, 372 bp, Arabidopsis thaliana
aactcgctttcctaacttctctctctgtcactctaactctttgtcggtaccaaattcttcttcactcgaagaactgtttaggtcaagtatgacttaattctgccaaatttctggtgtttattcaaagttcaaagtcaattgaacaaaactttttatcagataaactgaagcaatgtataccgagggagcctctgattttgtcattgaccagagcatgtattatcccgcttattactcttcaggttatgattcatctgtgggtcttcagggtgggcaaaatgaaaatgctccctatatctgctatacaccaagttatggatatgcacagtctccctacaatccctacaatccttacataccaggagcttcaat

SEQ ID NO: 138218 - DNA, 442 bp, Arabidopsis thaliana
aaaaaaaaagagagaagaaaaatggtgttgacaatctatgctcctttattcgcttcttcaaagagagctgttgtgacattggtggagaagggagtatcattcgaaactgtcaatgtcgatctcatgaaaggagaacagagacagcctgagtatctcgcgattcagcctttcggtaaaatcccagtcctcgtcgacggagactacaaaatcttcgagtcgcgtgcgatcatgaggtatatagcagagaagtatagatcacaaggacctgatcttttggggaagactattgaagagagaggacaagtagagcaatggttagacgttgaggctacaagttaccatcaccacttccggtgatcggaaacctccttcagcttcagaagcttaacccacaacgcttcttcgctggatgggccaaaaaatacggtccaatcttgtcata

SEQ ID NO: 138219 - DNA, 377 bp, Arabidopsis thaliana
ggagaagaagaagaagaaaagagaagaagctcttgttatcccggcgttcttaaaacaacgacggcgacggtgacggctaagcggaagagcttttgttgccaatgacggactcttacggcgccgtctccgtcgacgttggaacaatctatcttggtggcaaggagcatcgtgttaaaactgctagtggtgttgtgtctgtcattgtctatggagacagagaaaagccagcattgattacttatcctgatttagccctaaaccgtaaggctaaagaatctctataggcactaatgtaatggctaaatttattaatgtttttgttgtttcttcttcagatatgtcatgcttccaagggttattcttctgtcctgaagcag

SEQ ID NO: 138220 - DNA, 457 bp, Arabidopsis thaliana
aaaaagagtctctctttgctctcaccacactaagaaagaagaagcgagggagaaggagactttttgactcttctgcttcttctcctttctctctgtcacttatttcccctctttgcttccgtcgattcatcccaatctgatcatctctttctccggttaaggtctcaggacttctcagattcgaattataaatgggaaattgttgtgcgagcccgggttcggagactgggagtaagaaggggaaaccaaagatcaaaagtaacccgttttatagtgaagcatacactacgaatggatctggaactgggttcaagctctctgttttgaaagatccaacaggacatgatatatctcttatgtatgatctggggcgtgaggttggtcgcggagagtttggtattacttacttgtgcactgatatcagaacgggcgagaagtatgcgtgcaagtctatatc

SEQ ID NO: 138221 - DNA, 444 bp, Arabidopsis thaliana
caaacgggtccagtatggcactcattagacagcccgtctgggcaggtttgccttaacattaatgcaatcaaactacccgtgaatgctcctagggctgtaactggatatgctggagccggtagaataagggtcacattggatcagcaaggcccaacaattgtacatcaaaagccagggcctctgcagacgatatttgatctcctcccggatgaggttgtcgagcacagttattcatgtgccctggagaggtcattcctgtatcatggccgaatgtatgtttccgcgtggcacatatgtttccactccaatgttttctctaagcaaatgaatgttgttgtccctctcggagatatagatgagattcgtagaagtcaacacgcgttgataaacccagctataacaatcatactacggatgggtgctggtggacatggtgttccccct

SEQ ID NO: 138222 - DNA, 427 bp, Arabidopsis thaliana
tttattcgcctctatcagaagcttgacgaaatctcttctccgtctctctctctctttccctcgtccattccacgatcttcttccaatctcaaatctcccattttctagtgtttcattttgatccttcttccttcctctggagatttctcaaatctcttcaactattttgatttgccgccatgtatcgacgcgccacttccggcgtgcgttctgcctccgcaaggctttcttcttccctctccaggatcgcctctagcgagacagcttcggtttcggctccatctgcgtcgtcgcttcgcaatcagacgaaccgatctaagagtttctcctcggctctccgctcctttcgagtttgctctgcttccacgcggtggagccatggtgggagctggggattgcctgctagccttcgcgctcaagctaggaa

SEQ ID NO: 138223 - DNA, 391 bp, Arabidopsis thaliana
  unsure (1)..(391): unsure at all n locations
tttttaaaaaatcaactataccatttttagctattctttggtcttcgtttcgtgtaagcattcaatgttttttttcttttatctctttgggaaacgggagtgtggtcttcgtgtgtgtgtcnctgtttcattaaccaataattatgcttgggagtggaaagcaagaaaaattctaaactttatataaaattcccagaatcaattgatccaaaaagagtattgtcaaaaaagataatcaagaagaagaaactctgtttttttgttctgttcttggaaaaaaatgaggagtatgatgatggagagagagggaaggaatgagatagaaagagaagtaatagatgacttggaagagacgcaaaacgaaggagatgatttcaagtcaatacctcca

SEQ ID NO: 138224 - DNA, 409 bp, Arabidopsis thaliana
atcagtctccgtcaggttacggcgaaggaagtgtattcaatgatagccaaatacaaggtaactcatttctgtgcagctcctgtggtcctcaacgctattgtcaatgctcctaaagaagacactatccttcctcttccccatacagtccatgtcatgacagcaggagctgctcctccaccttctgttctcttctccatgaaccagaagggcttccgagtcgctcacacctatgggctttccgagacttatggtccttccaccgtatgcgcttggaaacccgagtgggattccctccctcctgagacgcaggcccctcaatgctcgccaaggtgtccgctatactggcatggagcagcttgatgtcattgacactcagaccggaaaacctgttcctgcagatggaaaaacc

SEQ ID NO: 138225 - DNA, 358 bp, Arabidopsis thaliana
acttggacgaaatgggtctatattgttggttttagatgatgtttgggctgaggaagagtccttgctacaaaagtttctgattcagctacctgattacaagattttggtgacttctcggtttgagttcacaagttttggtcccacttttcatttgaaacccttgatagatgacgaggtcgaatgcagagatgagatagaagaaaatgaaaagcttccagaggtgaatcctcctcttagcatgtgtggtggttgcaactctgcggttaaacatgaagaatctgtgaatattttgggtgttctttggcatcctggatgcttctgctgtcgttcttgtgacaaaccaattgctattcatgag

SEQ ID NO: 138226 - DNA, 203 bp, Arabidopsis thaliana
cgcgtccgaccacgagtccgcttctctcgacttatctctctctctttttctcatcggcctttgccatggcagatataatcggcggcgaagttgtgacggagctcgtgaggcagctctatgcggtttctcaaaaaaccctcagatgcagaggcatcaccaaaaatctcgccaccatgatccatggtcgtcaaccaacgatcaag

SEQ ID NO: 138227 - DNA, 362 bp, Arabidopsis thaliana
attgctctatggccctcctggttctgggaagacacttattgcccgtgctgttgctaatgagactggtgcatttttcttctgtatcaatggtcccgagatcatgtcgaagctagctggtgagagtgaaagtaacctcaggaaagcgtttgaggaagctgagaagaatgccccttcgatcatattcattgatgagatcgattcgattgctccaaaaagagagaagactcacggagaagttgaaagacggattgtatcccagctcttgacacttatggatggtcttaaatccagagcccatgtgattgttatgggagctaccaaccgtcccaacagcattgaccctgctttgagaagatttggac

SEQ ID NO: 138228 - DNA, 266 bp, Arabidopsis thaliana
tgaggacattcaacatggagcttgtttaggtcttggcttgtcagctctcgggacagctgatgaagagatatatgatgatgtcaaaagcgtgctttatactgacagtgcagttgctggtgaagctgctggcatcagcatgggtttattattggttggaactgctactgaaaaggcaagtgagatgctcgcttatgctcatgagacacagcatgagaagataataaggggattggctctaggaatagctcttacagtatatggtagag

SEQ ID NO: 138229 - DNA, 350 bp, Arabidopsis thaliana
gttttgagaatcaagttcaagaatcatttgaaattcccgcattttcgttactgtttccgacaaaagggtcaaaatcaacatccgactccttctccttcagtttcatctgttgctaagtcttttcttcctactaaacgaagattgaagcttgatccttctgagaaactctattttccttatgagcctgggaagcaagttaggagtgctattaagattaaaaatacaagcaaatcacatgtagccttcaagtttcaaacaactgcgccgaagagttgctttatgcgtccacctggtgctattcttgctcctggagagactattattgctactgtgtttaaatttgttgagcc

SEQ ID NO: 138230 - DNA, 168 bp, Arabidopsis thaliana
tgcagataagacatgtctgtcttggttgccagaacggctcgttgattggttatctgaatacgatatactcctttctagctcacatccaacaatctactcaaagctccaggatttccagaaggaacttgttggcctgcaggccatcgaggatgatctaagatactggga

SEQ ID NO: 138231 - DNA, 355 bp, Arabidopsis thaliana
acgcgtccgtctttctctcacaatctaatcttcttcgtcttcaaactcaatctagggttctcttctcctctctgtaggtaggattttgaacacccaaatctctcatcgaatttttcttgctcaacgtatcatcgcacaattcgtctctcgttttccgtcacgtggataatcgaaatctcataatcccaaaggtaaaacaatcaattctgggattggaattttggatccataggatcgtcaattgaaacaatcccgatggcgttatctatgaagccattcagagccgatgattccggtttccagtcaaacaatctttgggtcggtagcctaacgccggagacgacagagtcagatc

SEQ ID NO: 138232 - DNA, 286 bp, Arabidopsis thaliana
gaaatttagaacctatcaaagaggcaggaattttggagggtcgcaatggtataaaggagacttgccttcagcatgcagccaggtatctcgcgaatcaagagtgggtaaaaactgactccctgaagacagttgaaaacacagctataccaattatcatgcttgttgtggaagtcccttgtgatctgatatgcagtatacagtcaccaaaagatggtccagactgtatcaccgttgaccaggatagcaatggtaacactgaaatggttggatttgaagactctgcagc

SEQ ID NO: 138233 - DNA, 294 bp, Arabidopsis thaliana
acgagcctcgtcatgctcttatcactggcatagattcatggccaggcaagcagattcacagccacaattaccgtgttcctgaccaattcaaagatcaggtggtgatagtgatcggaagctctgcgagtggagttgatatatgcagagatatagcgcaggtcgcgaaagaagtccacgtatcatctagatcaacttcaccggatacttacgagaagcttaccggttacgagaatctatggcttcactcaacgattcaaattgcccgcgaagacggttcggtggttttcgagaatg

SEQ ID NO: 138234 - DNA, 206 bp, Arabidopsis thaliana
atttctcactctctcttctgtttttgacagccagtgtgtctctcttggacagtgattgaactgcttcaagagatttaattttttacccacgagagaagtcatgttgttgatgaataaagatttgttcctttgtcttgtttctttcactttttcattcacaaagatctcatcgacaagagtttctttttttctgttggggttgcttc

SEQ ID NO: 138235 - DNA, 412 bp, Arabidopsis thaliana
gttagtgaaaggttagattttttattccgatcttggtcagtctcctccaatcgtgatttctcttctggatccaagctgatgagctctacgtcttcctcccagatggttcagctcgtagctgacaagcatgtacgttacattctgatggcagaaaagaagaaagagagttttgagtctgtggtgatggatcatctaagaatgaatggtgcatactggggactcaccactctcgacttacttgacaagctcggctgtgtttctgaagaggaagtcatttcatggctcatgacttgccagcatgaatctggtggctttgccggtaacactggacacgatccacatatcctatatacactcagtgctgtacaaatcttgggcctatttgacaaaatcaacattcttgacattggga

SEQ ID NO: 138236 - DNA, 346 bp, Arabidopsis thaliana
aagatttcacaattttcttgtgattttctctcagtttcttatttcgtttcataacatggatgccatgagtagcgtagacgagagctctacaactacagattccattccggcgagaaagtcatcgtctccggcgagtttactatatagaatgggaagcggaacaagcgtggtacttgattcagagaacggtgtcgaagtcgaagtcgaagccgaatcaagaaagcttccttcttcaagattcaaaggtgttgttcctcaaccaaatggaagatggggagctcagatttacgagaaacatcaacgcgtgtggcttggtactttcaacgaggaagacgaagcagctcgt

SEQ ID NO: 138237 - DNA, 294 bp, Arabidopsis thaliana
gagaagccggtttcagatttgatcaattcgaagaattgtggctttcgttcgttgggtgaatccttgcttcgtcctttttgatagattgctactgtgttttcgaggaagttgtgtggagatagttagagagatttatgagatttcaagaggggttattataacgcacgcatggtgttcgacggaaagccgcagagaagttttgttgctatccgatttgactgagactcaaagtttgaaaattgttacttgggtattgagaaagctaaccttgggcaagttcgtatatgagttggg

SEQ ID NO: 138238 - DNA, 379 bp, Arabidopsis thaliana
aaagtctctgtttttgagaatttttctaccgatagatccaagcgaattgatctagaggaattgatccaacatgggtaacacagataagctgatgaatcagatattcgatttgaaatttacgtcaaagtctctgcaaaggcaatcaaggaagtgtgagaaggaagagaaagcagagaaattgaaggtgaagaaggctatcgagaagggtaatatggatggtgctcggatctacgctgagaacgccattcgtaagcgtagcgagcagatgaactatctccgtctcgcttctcgccttgacgctgttgttgctcgtcttgatactcaggctaagatgaccaccatcaccaaatccatgaccaatatcgtcaaatcccttgag

SEQ ID NO: 138239 - DNA, 172 bp, Arabidopsis thaliana
caaaaatatggcctcttgaataatggttgagacaatactaatcacaagtggttggtattgtctcaaccattattcaagaggccataccaaccacttgtgattagtttgtgtgttttttctggtatgatcagtgtgtcactgtcatgtgttttttgctttgtttaaggattat

SEQ ID NO: 138240 - DNA, 339 bp, Arabidopsis thaliana
aggacgcgtggggctgaaacagcgtcgttggaggaggaggaagaggatacgaaggagattgtgatttacgctgatagtgtgaagaagaagaggaagaagaagatgaacaagcacaagtataggaaactcaggaaacagcttggtcgcaagtcatagattttttttactattccggtgagaagtttgctcctttcatgtcttctgaattactgggattcaaaggatgaaccttttttattgaatcagaacaaaaaatttctaaattccattgcattgtcattagtctgtgttcatcgtttgtcttgacaacacatttctaataaaacgtttgctcaattc

SEQ ID NO: 138241 - DNA, 295 bp, Arabidopsis thaliana
gatgatctttccgaacaatcgttttacatggttggaggtatcgatgaggtggttgcaaaggcagagaagatcgctaaagagtcagcagcttaagagattgattcagatctttcatgcttaatacttctcttttttttcctgacaataacgaaaaaaaaaaaccaatgcgtgcgactctccgaccaaacggaatctgagttccgtaattatagtttcttttggttcaaattccatgagagctggcaagatgatactgaacagatccattcactgttaatcaaatttttggttgttt

SEQ ID NO: 138242 - DNA, 423 bp, Arabidopsis thaliana
cacatgcttaacttagccaatttggctgaggaggtgcagattgctcaccgtcgcaggatcaagaagctgaagaaaggtgatttcgttgatgagagttctgcaactactgaatccgatattgaagagacttttaagaggctcgtttcggatcttggtaagtctcctgaagagatctttgatgccttgaagaatcagactgtggatctggttttgactgctcatcctactcagtctgtgcgtagatcattgcttcagaagcatgggaggataagggactgtcttgctcaactctatgcaaaggacattactcctgatgacaagcaggagctagatgagtctctgcaaagagagattcaagctgcattccgaacagatgagattagaagaacacctccaaccccacaagatgaaatgagagctggg

SEQ ID NO: 138243 - DNA, 151 bp, Arabidopsis thaliana
aaccgtggaaacaaaagagactctgtctgaagaaagctaaagacttgtgatgattcttgacagaagaaactgtgtctttggagaactctgaagtaagagagacagagaaggacgcagagagagacatggtgggctcaggagttggaggagg

SEQ ID NO: 138244 - DNA, 422 bp, Arabidopsis thaliana
cccacgcgtccgtgttactatagatgaagaaattacggatgagaaacaagaagaggttactgtagttgaaaaagcagagtgttctgatgctaaagatgtagctgtggacagtgatgaacctgcggatagagaagatgatgaagggttggtagttgcagaaaatgttcatgttcaaagtgaaggtatagattgtgattctccagttagcggtggcagtaactctgattcaccacccgtaccagctccaccaccaaaaccttcttccactgtcaatcctggtagtaacagatcggttttgggaagttttggcgctttacgaattggaccaacacgaagagctgctgggcctcgctctcttgtttccagtaggagttcgccaactggatcacatccttcttctccaagatcacacagtgagaacg

SEQ ID NO: 138245 - DNA, 421 bp, Arabidopsis thaliana
gaaaaaaaaaagaacattcacgtctctctcgtttttttggccgacgacgatcgctgaattgactgccggagattcctttaatcgtcagattctcgttgagggataatgaatcctgaatatgactatctgttcaagcttctgcttattggtgattctggtgttggaaaatcatgcttgcttctaagatttgctgatgattcttacctggatagctacataagcaccattggtgttgactttaaaattcgcacagttgagcaggacggaaagaccatcaaactccagatctgggacacagcaggccaagaacgtttcaggacaatcactagcagctactacagaggagctcatgggatcattgtcacttatgatgtcacagacctagagagcttcaacaacgtcaaacaatggctgaatgaaa

SEQ ID NO: 138246 - DNA, 337 bp, Arabidopsis thaliana
cacgcgtccgcccacgcgtccgcccacgcgtccgcccacgcgtccgcggacgcgtgggtgcgaatctgaaggatctttacgaattccataatcttcagatcgaaaggtttctatcgattcgttggtcaagaggagattgtgcgtgtgattcgtgagcatgggctgttcgttttcaggattgaacgcactttacgacgccgtcaacggtggaggtgacgtatggatcaatgagaatcgattcaggatcgtgaggcagctcggcgaaggaggtttcgcattcgtctttttggtcaaggaaattgtcgccgacgcttcctccgccgcatccggtggtggt

SEQ ID NO: 138247 - DNA, 413 bp, Arabidopsis thaliana
gcaacaaacaacatcctcgttgtgcttccatctaaggaatctgtcactgaattgcaaccaagaatggatgatatattgaaatgcccctgtgatggcataattgtgacagctgctggttctacaggatcgtcctatgatttttacagtcggtactttgctcctaagttcggagttgatgaggaccctgtttgtggaagtgcacattgtgcattggcacattactggagcatcaagatgaataagtttgatgctccagtaatgtggaagtgcacattgtgcattggcacattactggagcatcaagatgaataagtttgatttcttagcctaccaggcttcgagtaggagtggaacgataaggattcatctagacaaggagaagcagagggttctcctgagaggcaaagccgtta

SEQ ID NO: 138248 - DNA, 406 bp, Arabidopsis thaliana
acgatgactaatacgatgagcaacaacaacaacaacacactagtaacaacagtagcatcagcttgaaagagagaactaaaacctagaaatcgagagagattggtggaagatttttcaccagatttcatgggagaagaagagagtcgaattggagacgagctttcgattttggttctcacggcggagcgactccgtgtagctgtggatgaagctgaatcattcaaaacagagtgtggcgaggttggtaaacaagtagatcggcttgctcaaatgcttagaacacttgttcgattcgtctctagttcttctcaacaagtttatgatcggccgattcgtagagttatcgtcgatgttaagaagaatctcgagcgtggttttgctcttgttcggtaagtgtaggagacac

SEQ ID NO: 138249 - DNA, 418 bp, Arabidopsis thaliana
gaactcaatacaccccagaaagtctttactaattagctttgttgagcttatcaaagtggcaaattataagacattgcatgatttggatatcagcttcatgttgtggctgaagacgaagggggttaataacttatgtctattgccacatcatctttctctttttctacaattacagttaccttccagagagaaaaatattagatggaatttcctttgtcgtaccggcaggaaaaagtgtggcaatcgttggtactagcgggagcggcaagtcaacaattcttaggatgctattcagattcttcgacacagattccggaaatataaggattgacgggcaagatataaaggaagtgagactagatagcctccgaagctccataggagttgtgccgcaagatactgttctcttcaatgacac

SEQ ID NO: 138250 - DNA, 205 bp, Arabidopsis thaliana
cccacgcgtccgttttgtagcaaatccattggttcttgatgatgatgttaagacagctctcgaggttgctagagatgatggttacagtaatgtcgtacgcgcaatcgagagtcatatctgcttgttctctggttgtatgcgtgagtattctggctctagcttgcttaatttatttgctcctcagcttctttcatcaaaagtatgg

SEQ ID NO: 138251 - DNA, 373 bp, Arabidopsis thaliana
cccacgcgtccgcccacgcgtccgcccacgcgtccgcccacgcgtccgcttgtgctatctttcaagcaagtttcgttgcagggttgatgatgttatctttatctactggtgcgttattgcttgaaccaagtggttgtggagttgaagattcgccgtgtaagcctcattcgacgtttaagacggttctgttttatctgtcggtgtatctaatcgcgttagggtatggtggttatcagccgaacatagctacttttggagctgatcagtttgatgcggaggattccgttgaaggacactcgaaaatcgcgtttttcagttacttttacttggctctgaatcttggatcgctcttctcaaatactgtcttgggtta

SEQ ID NO: 138252 - DNA, 329 bp, Arabidopsis thaliana
agcaaattccgccggaaatgttcgatctttctaagcttgtgtgtgggacttatatagacagtaggttacttgtacttaggtgtgtaaatggttcagcattgttgttcacaaggtccagcttggaccataagtctatgtagccatttggctcaggttcttatgtatataacaaatgaatcattctttttgggactaaaccgttgtagtctctgtgtatgttgtggtaatgtatgcttttggcttttaggttgtaataagagctttttagtaaaagctttatactatggtattcttttcatgattataatagaaacacaatgatttgcaat

SEQ ID NO: 138253 - DNA, 150 bp, Arabidopsis thaliana
accacgcgtccgtagaatctttcggttaaatttcttttgtttctttttctttcgttcattctttttcaatatgtaaaatttccattactaatgtgggggtttgactggtgtagctcttttcttcttcgaatgtaatataaatgcgtttta

SEQ ID NO: 138254 - DNA, 354 bp, Arabidopsis thaliana
tgagagagaagagatctaaaaaaatccacaattttgttcaaatcttggagttaaatgctgaattttaggccttgttgcttagatttatggcttaaagtttcaaacttttcattggatatgtgagaagaaaatgtcaggatctgagacgggtttaatggcggcgaccagagaatcaatgcaatttacaatggctctccaccagcagcagcaacacagtcaagctcaacctcagcagtctcagaacaggccattgtcattcggtggagacgacggaactgctctttacaagcagccgatgagattagtatcaccaccgcagcagtaccaacccaactcagctggtgagaattctgt

SEQ ID NO: 138255 - DNA, 405 bp, Arabidopsis thaliana
ggcaagagcagtgaaagtgtaactcgaaagaagcttaaaactgatgatgttgttggcatgaatgtgtctcaaaagacaacgttgatcgtttgtccaccttctgtgatttcagcatggataacacagttagaggagcatactgtaccgggaatcttgaaggtgtatatgtatcatggtggcgaaaggacagacgatgttaatgagcttatgaagtatgacatagtgttgactacttacggcactttagctgttgaggaatcgtgggaagattctcctgtaaagaaaatggagtggctgagaataattcttgatgaggcacacaccattaagaatgcaaatgctcaacagagccgagtagtttgtaagttgaaggcttcccgcagatgggctgtcacaggaactcct

SEQ ID NO: 138256 - DNA, 347 bp, Arabidopsis thaliana
attcagcttcacctggtgtttcaattagagggagagtaagaaagatggcaaagtggaaaccagatagtgataatgaaagtgatttggagtctgaagctgactctgctgacgattctaatgattctgatgatgagttcgagatatgtcagatatgcagtggggaagatgaaaggaagaagttgctccattgttctgaatgtgacaagctttttcatccggactgtgtggttcctccagttatagacttaccatctgaagcgtggatttgcttttcttgtaaggaaaagacagaggagtagattcaagcaagacgtctttacattgccgaattgcagaagatgtatgaa

SEQ ID NO: 138257 - DNA, 346 bp, Arabidopsis thaliana
tgaaaggcttctttttcctaatctcattgttgattgggttctcaagctcttacaggaaaaggagatctttgaaattttgcagctgctactccccattgtgtatggtgttttagagagtattgttctctctcagacatatgtacagagtcttgtagctattgctgtccgtttcattcaggaacctgctcctggtggatctgatcttgttgataactctcgaagagcttatactctatctgctctaattgagatggttcgctacttggtacttgctgcacccgacacatttgttgcttcagatttctttcctcttcctccttccgtagcagcatgtggacctaatgat

SEQ ID NO: 138258 - DNA, 310 bp, Arabidopsis thaliana
cgaagaggcagcgtgctgcgcagagtttgatgaagaaagctattcaggagacgaggtataaggagagtgtgcgtgctgcgatttatcagaagagagcagctgcagagagtaagcggatggggattttggaagcggaaaggagaagagcgaatgcgagattgactcgggtgtttggtgctgctagttctgtgcggagtcaaaaggaagctgagagaaggaaaatgaatgaccgtttagaagagcggcttcaaagggcaaagaagctgaaagcgcaatatatgaggcgaaggagaggtatggatagttgttc

SEQ ID NO: 138259 - DNA, 414 bp, Arabidopsis thaliana
catgacctccacaccggcattgatgtttgtgtaaagatcataaagaacaacaaagacttttttgatcaaagccttgatgagatcaaacttctcaagtatgtcaaccagcatgatcctgctgacaaatatcatctccttcgactgtatgactacttctacttccgggagcacctgttaatagtatgtgaacttctcaaggcaaacttgtatgagttccaaaagtttaatagggaatcagggggagaggtttatttcactatgccaagattgcagtcaattactatccagtgcttggaagcattgaactttctgcatggtctcggccttatacactgcgacttaaaacctgaaaacatactaatcaaaagctacagcagatgcgaaatcaaagttattgatctgggaagtagctgt

SEQ ID NO: 138260 - DNA, 221 bp, Arabidopsis thaliana
tgtatgttctaaatatgtattgtagtgcatataaacaacacagaggatacaaaaaaagaaagagactttgttgtttgagagatggttttatcctctgtgttgtttatatgcactataagctttgtatgttctaaatatgtattgtagtgtcataacgaaatttttttgaatatttttatttattgtcttatagatgatgacgaatcggaatcatgtaatat

SEQ ID NO: 138261 - DNA, 339 bp, Arabidopsis thaliana
tttaattttgtcttctcctattgactttttgagtttctcagaaaatccctagtatggggaagcaagaagatgcagagctcgtcatcatacctttccctttctccggacacattctcgcaacaatcgaactcgccaaacgtctcataagtcaagacaatcctcggatccacaccatcaccatcctctattggggattaccttttattcctcaagctgacacaatcgctttcctccgatccctagtcaaaaatgagcctcgtatccgtctcgttacgttgcccgaagtccaagaccctccaccaatggaactctttgtggaatttgccgaatcttacattc

SEQ ID NO: 138262 - DNA, 401 bp, Arabidopsis thaliana
ggcaaaggtgcgatcgggcgtgtttgtcaggtcatcggtgccattgtcgatgtgagattcgaggatcaggaaggattgcctccgatcatgacatctcttgaggttcaggatcatcccacaaggctggtgcttgaggtgtctcatcatttgggtcaaaatgtcgttaggaccattgctatggatggtactgagggtcttgtccgtggaaggaaggttctcaacactggtgctccaatcactgtacctgttggaagagctacccttggccgtatcatgaatgtgcttggagaacccattgacgagagaggcgaaatcaagaccgagcattacttacctattcacagagatgctccggctttggttgatctagccactgggcaagagatcctggccactggtat

SEQ ID NO: 138263 - DNA, 250 bp, Arabidopsis thaliana
agggagaagaaaggttttcttgttttgcaaggcactctttgatctgattttgacccgtcgtctatcagcgatttacatttcttaaattttcttagttgttgttctctcctctctctcccagctacgaacatatctctctcttcttgaccatttttaagtttaagtcatatggagtatttatttcttcactattttaatattcggctttgttgtttgtctttgatttttgtatcaatcaaatcttttcatc

SEQ ID NO: 138264 - DNA, 360 bp, Arabidopsis thaliana
gtctctctgagcaccagaatctagggtttcttcacagtgaatctttttttttttttttgcttcctcctcaataatcgccttctcgtacttgtgtgaaagctcccttctttgtggagaaatggcaactgagaatcctattaggatatctggaagcaatgaaagatggtctaattctaggaaggtttctgttcctaatcgaagtggcagtgcgccaccgaacatggaggggtcttttctagctgtggataatctattgtcacgacagggcggctcagtttacaataacttgatgctaccgcgttacgggtttgaggagcccgtgaccactcatccttcttctaaacatagccttaaccgcat

SEQ ID NO: 138265 - DNA, 321 bp, Arabidopsis thaliana
cacgtgaatgccttgatgtcgccagaatctaattatcttgctccattgcagccttcataagctctgctggctgtgaaacatcctgttgatgaattggaggaaggtcagttggaggaagaacaagtgatgcaggaagatgtaaaggaaggtctgttggtggaagaacaattgatgcaaggaccatgtatcaacacatctaagtgggggacaggtttgacttccccaaaggatgagttaatagctgtgaacgtttccaagactaatagatggaacaagagcagtttgacaccggagtgcgaggaagtaatggtgtctgaagaa

SEQ ID NO: 138266 - DNA, 400 bp, Arabidopsis thaliana
agctgttccaattccaattccttctgaaatattcatcgcaattcgtatcggtaatttttccttttgatcgcattttttttttatctttgatcttccgtattaaacgtgctcgatctatatactcaatgatcttatatgtgtatgatcatgtaatttggaagttgaaatgtaaatcatctattccttggtaaattattcttcgattttttttctgatataggttaatggtaattcctgtgatttttactgatgtaatctggtgttgattgttgtgaattcttgatctatgagattatgtcttagatttgccaaatgttaagtttgtttgatctttgacaaaatattgtaggtttaaagtataacagcaatgggaggtggtaaagacaagcatcatgatgag

SEQ ID NO: 138267 - DNA, 388 bp, Arabidopsis thaliana
catcaagcaaagtaacaaattccataaacacaattagctaaaagaaagaaacaatcatgaaggccaccatatccatcactaccatctttctcgtggtcgctttggccgcaccctccctagctcgtcctgacaaccatgtcgaggactctgtaggccgtctacttcgtcctggtcaaacgtaccacatcgtacctgcgaatcccgagacaggaggaggtattttctcgaacagtgaagaaatctgtcctcttgacatcttccagtcaaacaatccgcttgacttgggcctacccatcaaatttaagtccgagttatggtttgttaaggaaatgaatagtatcaccatcgagtttgaggctccgaactggtttttgtgtcctaaagaatc

SEQ ID NO: 138268 - DNA, 311 bp, Arabidopsis thaliana
tggccacggcggagaaatcaccactagagctacttcaacaaaccaaagcctccgtcgaagcaatcatagcaaagatgctctccatcaagcaacaaggaacccctaaatccgagaatcgagaactcctcactcagatgtttctcaacttcatcaatcttcgtcaagcgaatcgctcgattcttatagaagaagagaaagtgagaacagaaacggaaatagcaaaatctccggtggatttcacgacgttggagcttcacaatctcatgtatgagaagagtcattacctcaaagctaataaagctagtagagat

SEQ ID NO: 138269 - DNA, 375 bp, Arabidopsis thaliana
agaagctctctctcctcagaaatcaaaaaccctaaaaaccctttttgtagcgatgatggtagaaccgaatcagctcgttcaacatctcgaaacttttgttgacactaatcgttcctcttctcaacaggatgatagtcttaaagcaattgcttcttctttggagaatgattctttatctattacccaattggttagagagatggagatgtatttgacaacaaccgataacctcgttcgagcacgaggtattctcctgcttgcggagattctcgattgtttgaaagcaaagccgttgaacgatacaatagttcatacgctcgttggattcttttccgaaaagctggcagattggagagcgatgtgcggggcgcttgt

SEQ ID NO: 138270 - DNA, 367 bp, Arabidopsis thaliana
atcagatgtggtatcagatcttccatcttttgaagttgcagagaccaataccgttgatagaagtggtggtatgttagagactcaaaatgtaggacctgaagagatctcagatgatgaaattgagcttcctgaaggaaaatcaacagattctcagaatgttgcacctgttcaagatcattcattatctgatgcagagagaatccaacgagagattgcagcaacgtctgtgcaggctgcgtttagaggttacttggctcggcgtgctttttgggcactcaaaggcataataaggctacaagcgcttatccgtggtcaccttgttaggagacaagctgttgcaactcttttctctgtcatgggaattgtc

SEQ ID NO: 138271 - DNA, 372 bp, Arabidopsis thaliana
gttctgataagctttacactggaagtaaagatgagaccttgcgtgtttgggattgtgcttctggacagtgtacaggagtactcaaacttggtggggaaattggctgtgtgcttagtgaaggcccgtggctattagttggcatgccaaaccttgtcaaggcgtggaatattgaaaccaatgctgaccagagtctaagtggacctgttggccaagtctattctcttgttgtgggtactgatctgctctttgctggaacacaggatggctctattttggcatggagatataatgctgccactaactgttttgaaccatcagcgtcactgacgggccatacacttgcagttgttaccttatatgttggggcgaaca

SEQ ID NO: 138272 - DNA, 351 bp, Arabidopsis thaliana
ggtgaacgcaatcccaaagcctatcaaggacatttgggacgaatggagcattcgaagtaccttaatcttcagtctcagccttcaaacatttctcattttctttgcacctcaaagaaaacgctcatccagaaaagttttactctctttcatttggtcagcttaccttcttgctgattggtctgccaatttcgccgccggacaaatctcagatagtcaaggagatgatccagaacccggagaaccgaaaaagagcgccgagttgtttgctttctgggttcctttcttgctcttgcatctcggtggtccagatacaatcactgcccttgcccttgaagataacgagctctggct

SEQ ID NO: 138273 - DNA, 384 bp, Arabidopsis thaliana
gctctctgagcaagctgagcgttatgaagaaatggtggaatcaatgaaaagtgttgcgaaattgaatgttgatctgacggtggaagagaggaacttactctccttgaaccaatcacgttcttgtaacccacagagagtaagttcctctcttcgattgaacaaaaggaagcagtgaaagggaatgatgttaatgtaaagaggatcaaagagtatatggagaaggttgagttagagctttctaacatatgcattgatattatgtctgtcttagatgagcatctcattccttcggcttccgagggtgaatctactgtcttcttcaacaagatgaaaggtgactattaccgctatcttgctgagttcaaatcagggaacgagaggaaa

SEQ ID NO: 138274 - DNA, 137 bp, Arabidopsis thaliana
atgcacaccaccacgagactcaggagacatggccaacgaaattcctatcaaagggattctcaagatcgacgctctaaaacagtacatcatggacacgtcagcgtatccaagagagcatgaacttgctcaaggaactt

SEQ ID NO: 138275 - DNA, 208 bp, Arabidopsis thaliana
cttgaacaattcatcatcatttattgtaggtattgagggtttctatatgtggtacaataaaactatttcaagaatttaaaataatatgtggaaaagctaagcggttagacaaaatattcatctgattgatgctatacattcaaatgtaatcgctcctatcctatgtacgtagtgattaacctcaaaaataatcagcttaagttgctgt

SEQ ID NO: 138276 - DNA, 374 bp, Arabidopsis thaliana
cacacagaaaaggagtcggagagggtttttcgcctagggttttagaattcgatcttactcattcaaatttctcccttcagatttattcatctgttgagtaaaaccacaagggtttctctctaatgttgcccagattagctcgagtcgtcactcaaacctcaaagcttcgatctttgaccactaatggatcgatgaaaaatctctcctttttctcccgatatgggtacgcgactgttgcgccggcggcagctgatcctccgtcgcagaaggatttccccagtaaatctccgataaacttggataagatgttttggtcaaagccatgttcattggctctgcctaaagactctcctctcagaattgatgaaccagac

SEQ ID NO: 138277 - DNA, 410 bp, Arabidopsis thaliana
aagaaaggttaataatgatgggcagtgtcgagctgaatctgagggagactgagctgtgtcttggtcttcccggtggagatacagtggctccggtaaccggaaacaagagagggttctcagagacggttgatctgaagctaaatctgaataatgagcctgcaaacaaggaaggatctacgactcatgacgtcgtgacttttgattccaaggagaagagtgcttgtcctaaagatccagccaaacctccggccaaggcacaagttgtgggatggccaccggtgagatcataccggaagaacgtgatggtttcctgccaaaaatcaagcggtggcccggaggcggcggcgttcgtgaaggtatcaatggacggagcaccgtacttgaggaaaatcgatttgaggatgtataaa

SEQ ID NO: 138278 - DNA, 342 bp, Arabidopsis thaliana
gttcaacatattttctgctgacgcttctttaatgaagtagcacgaagaagtaaacaggacgacttttggccaccggaaaatttctctgttataaaaacgaaagtctgtgtcctcttaaacatttttgggatcatcaatcggtttttggtcaaccatgaatatgaatcaagttgcagagtatgtggaaactgatccaactggtcgctatggacgttttgcagaaattcttggaaggggagcgatgaagacagtgtacaaagcaatcgacgagaagctgggaatagaagtagcatggagccaggtgaagcttaaggaggttctgcgttcctctgttgatctaca

SEQ ID NO: 138279 - DNA, 410 bp, Arabidopsis thaliana
cccaagtatcagggacaggataagcttccagttacagtttggatgatggctcaggcctcccaaggtgatatatcagtaggcttgtactcgtgggctcacaacttgttaccggtggtcagtagcaagagttgcaatcctcagtcaagggatctcattcttcagttggttgagaggatcttgtccaacccgaaggcccggaccatacttgtaaatggggctgttaggaagggagagcgattgattccacctccttcgtttgagatcttggttcgacttacattctctgcatcttccgcaagagtgaaggctacagagaggtttgaggcaatatatcccttgctgaaggaggtgtctcttgctggtgctcctgggagtaaggcaatgaagcaagtcacacagcaaatattcac

SEQ ID NO: 138280 - DNA, 412 bp, Arabidopsis thaliana
acaaaatatctctttcctgttagagacaatggacggattgatcagaggtttggtcgacgtggctatcggaggaaaccaacgccgcggcggagacgatggtggtgatgatgaaggcaactcgagggacgagagatccagatctacttgggctaatgtggtttccggtgaggaagaggatcagaatcgcgcgggaggatcgtcgcacggccgtcgccagaattcagaggagaatcaatgggagaagaagggcgaaaggcttcccacaaggcattcacaatcacatgaggaggaccaggaagagaatacatatgcggctaaagtgagcgagaaacaagacttctcggagagccagcaagaggaaaatgatggttgggaaactgtgggcaaaaagaaacctgcaaggcaatcacat

SEQ ID NO: 138281 - DNA, 414 bp, Arabidopsis thaliana
ctttttcttctatccaaaacaccatttttgagatcagagcttctagcagcgtaaaaaatgcagacgaggtatatggagaggactaatagtatgagagagaagagaaaattggaggaagatgataatcagcagcagcagcaacagcctgagcgtaaaaggccagctcttgcaagtgtaattgtggaagccttgaagatggatagtttacagaggctttgttcttctttggaaccgattcttcgccgagtggtaagtgaagaggtggagcgggcattggcaaagcttggccctgcaagacttagtgaaaggtcgtctccaaaacgaattgaaggtatcggtggaaggaatttgcagctacaattcaggtctagattgtctgttcctttgtttactggagggaagatagaaggggag

SEQ ID NO: 138282 - DNA, 410 bp, Arabidopsis thaliana
cccacgcgtccggctctggaaatctgtgtgaaagctgctgttggtgctcctgatcatctcggcgactgtccgttcagccaacgggctcttctcacactcgaggagaagagtcttacctacaaaatccatctgattaacctctctgacaaaccccagtggttcttggacattagtcctcaagggaaagtaccagtgcttaagatcgacgacaagtgggtgactgattccgacgtcatcgttggtatactcgaggagaagtatcctgatccaccactcaagactcctgctgaatttgcctctgttggatccaacatttttggtacttttgggacattcttgaagagcaaagactccaatgacggatctgaacatgccttgcttgttgagctagaagctttggaaaaccatct

SEQ ID NO: 138283 - DNA, 168 bp, Arabidopsis thaliana
gattgatgacgcatcgaggaagaagatggatttgacagcagaggagttgaaggaagagaaggacctcgcttactcatgcctctcttaaaccggtcttttctcagctggtttaatcagtgaaagctttgtttcgaataaagaagttttgttataaaatgaacttttaat

SEQ ID NO: 138284 - DNA, 417 bp, Arabidopsis thaliana
aggcggctgctgcgaaggagatcctacggcgaccagtggcggcaacaataaggctaaccgttccggcgggaggagcgaggccagccccaccggtaggtccggcgctaggtcagtacaggcttaacctgatggctttctgcaaagacttcaacgctaggactcaaaagtacaaaccagacactccgatggccgtgacgataacggcgttcaaggacaactctttcgaattcaccgtcaagtctccgacggtgtcgtggtacatcaagaaagcagctggagtcgataaaggaagcacacgcccgggtcatttgtcggtgacgacgctatcggtgagacacgtgtacgagatcgcgaaggtgaagcagacggatccgttttgtcagtatatgccgttggaatcgatttgcaaatccatca

SEQ ID NO: 138285 - DNA, 413 bp, Arabidopsis thaliana
  unsure (1)..(413): unsure at all n locations
atctgtttcaatcatggcggagaatggtgaagagaagttacttgctgttgcgcgtcacatagccaaaacacttggccacaatgaatccatggccgatgatatcttacagatcttctccaacttcgacggcagattttctcgcgagaagctcgccgaaggtcaagctggagaagatggatccggagtcgccacactcgagcgagctctaaattcaatagacggtcagatctctcgctttgttgctgcggaccaaccaatttgggctgatcctgcagattcagctgctttcctcgacacaatcgatgagctcgttgcaatcattagagagtggagtcncatggcttcagagaaacctatcggcatctgtctaacacgcgccgacgatatgatgcagcaagctatgttccgcatcg

SEQ ID NO: 138286 - DNA, 393 bp, Arabidopsis thaliana
gttggattgattttgctttggatctcacatctgagatcagattaatctctctgtgaagtcgaagaacgaaaccctagttcccatggatctctcttcacgcttctcatcgatccttatccttctcttgatctccatctccatagcttcggctgagattcgtaaatcagagatccgatccgatgatcgtccaatcatccctttagacgaattcggtttcactcacagcggtcgtcttgagcttgacgcttccaagatctggctttccaacagcaatcccgatctcgatctctccaaagtgggcttctttctctgcactagagacgcttgggttcatgtgatccaacagcttgaagaagaagagatcacgtgcgctctacaatcagatctcgttaa

SEQ ID NO: 138287 - DNA, 268 bp, Arabidopsis thaliana
actatcttctctgtaaagtcgtttctctctccaatttttttgttttcctgcgaaaatcaaagagactaacacagagagcttattcaattttctttcgatctgtgaaatcgcagattttgatttggaaagttgtggagatttcagctgttcttctttgttgttgggtctatttctgggtttcttcgagctgatttatagagtttggttctccgatgatagagctaatctgcttgagatagctactgtattgagagttcttctgaggatc

SEQ ID NO: 138288 - DNA, 407 bp, Arabidopsis thaliana
cttccatcgccattgccatggctaagctctctctttcctccatcttcttcgtcttccctctcctcctctgtttcttttccccttcttcttcttcatcggatggcttagaatcctacatcgtccatgtgcagagatctcataagccttccctcttctcctcccacaacaactggcacgtctctctccttcgctctctcccttcttctccccaaccagcaacgctgctctactcttattcacgcgccgttcatggcttctccgctcgtctctcccctatccaaaccgccgccctccgccgtcatccttcagtcatctccgttatacctgatcaagcgcgtgagatccacacaactcacacgcctgccttcctcggtttctcccaaaactctggactctggagcaactca

SEQ ID NO: 138289 - DNA, 363 bp, Arabidopsis thaliana
agaaactctctctgttgtttgtttgttgacaaatctctcaaaaccatttgttttgcaatcgcagatccgtttttcttcgggtctcatcacaatgaatggcttctctgatcttaatccttctgagaggtacgctttgtctgatcatcaatgatgcttataataatctcatttatacatgatcttgcctctatatatttgttcatcttagtaatcttcggtctcagcttccattttcgtctcccactatgtttctaggattttgtgttacttttgttagaaaactgcgatttttgtgctagtgtttgtttctccaagatcaatggaactcgttgcctaaaattcctgattatagttacataaaca

SEQ ID NO: 138290 - DNA, 404 bp, Arabidopsis thaliana
acccacgcgtccgttcgctcttcaatttatattttaccaaatcatcttctctctttctctatctctcaaaacaaaaagtaaccatgatcaagacaaagacgacgtcccttctctgtttccttctcacagccgttatactaatgaacccatcttcctcctcccccactgacaattacatatacgccgtttgttctccggctaaattctcccctagctccggctacgagacaaatcttaactccctcctctcttccttcgtcacctcaaccgcccaaacccgctacgccaacttcacagttcccaccgggaaaccggaaccaaccgttaccgtatacggtatttaccagtgccgcggcgacctagacccaaccgcctgctcgacgtgcgtatcaagcgccgtcgca

SEQ ID NO: 138291 - DNA, 407 bp, Arabidopsis thaliana
atcaatgatgaagcaaatcgaagagaagcatcatgacactgcagcatcagtgttctgttgtctgtacagaaaggctccacctccacggtctctgtttctgtcacagaaaggaatgtttggcgttgtagcgcttctaggttcagttgcctccacgtcgctaagcagggttttgtctgaatatttggggaaagacacaatgctttctttggtgtgcaaatcatcacagtttggacccaaaagcgatgagtatcgcaagtttcaatctgaagcagctagcctcggacgatctatcaccaatcggtttcttgttatttgtcttgatgcaactagaccttggaggaacggacttgtgaggaatgatcctcagaagagattagccatggataacccttacctgccgaatggag

SEQ ID NO: 138292 - DNA, 407 bp, Arabidopsis thaliana
ggaagatgaagttttctcatttcacactcaaattcaattccctttgttcgtgaggttgaatttcggttgcaaacatttgggtttgttgtaaattaaggttccgtttgtaaaagagattcctttttatttggggaaatcgaggagttcgtgtacggagctgagtttttgcctttttgatggttgcagataaggtctaaaatcttgaaggattcaaaaatttccgatgaatacacgttattccaatcagccggagttatcttctagtaatatcacgatcactatttcatcgtctgctttgttaagctcctcaccgcgaggcgataacagtcatgttgctgctgctaatggtcaagagaggtctccatcttcgttttatataaggctggctatgaaggtatctagagcta

SEQ ID NO: 138293 - DNA, 413 bp, Arabidopsis thaliana
ccatgatgtactcctctgcaatattcaagtcagaaaatgaggatcctagaactgcacagatgagaaaaatatctcttttaattgaaaaggcgaggatagagaagaaccatgaggtcttagagatgggatgcggatggggaacttttgccatagaagttgtgaaaagaactggatgcaaatacactggcattactctttctattgaacagcttaaatatgcaaaagcaaaagtgaaagaagctggacttcagggtcggattacgtttatgctctgcgattatcgccaactatctgatgctcgcaaatatgacagaattatagcttgtgagatgatagaagcggttggccacgagtttatggataagtttttcagttgttgtgaagatgcgcttgcagaaaacggcatttttgtc

SEQ ID NO: 138294 - DNA, 414 bp, Arabidopsis thaliana
acccacgcgtccgcggacgcgtgggttcactctctctaatcaaaaagcttttaacctcagccgttaaatctttctccgatcatgccgaccagaaacatcgccattggtggagtccaagaagaggtctatcaccccaacgcacttagggcggcgctcgctgagtttatctcgactttgatcttcgtcttcgccggctcaggctccggaattgctttcaacaagatcactgacaatggagcaaccactccttccggcctcgtcgccgctgccttagctcatgctttcggtctctttgtcgctgtctctgttggcgctaacatttccggtggccacgttaaccctgccgttaccttcggtgtcttactcggtggtaacatcactctcctccgtggtattctctactggattgctcag

SEQ ID NO: 138295 - DNA, 349 bp, Arabidopsis thaliana
cctccaatctgaagtttctcggcaaccatatcagaaaaggctttgtcttcttcttcagttgtcagtttctccgccacataatctctacccgacacacttttatcttcccctcgttgctcctctactccacttccacctccggagataggtaacttcgtcgtcaacgtcgagaccccgataacgttggaggaagagtcggctgtttcagactatcttagtggtgtatctaattatcagtccaaagttactgatcccaccaaagaagaaactggaggagtaccggagattgctgagtcttttggtaatatggaagtgactgatgagtctcctgatcagaagccaggacaat

SEQ ID NO: 138296 - DNA, 416 bp, Arabidopsis thaliana
aaacaggttggagaacgtggtgttcaactctcaggtggacagaagcagagaattgcaattgctagggcgatgttgaaagacccaaagattctgttactagatgaagctacaagcgctcttgatgctagctctgagagcattgttcaggaagctttagacagagtcatggtggggaggaccactgttgttgttgctcatcgtctctgcaccatcagaaatgttgattccattgccgtgatacagcaaggccaagttgttgaaaccggaacacatgaagaactcattgccaaatccggtgcttacgcatccctcatcaggtttcaggaaatggttggtactcgagatttctcaaacccgtcaactcgtcgcactcgttcaacccgtttgagccattcactgtcaacgaaatcactcag

SEQ ID NO: 138297 - DNA, 312 bp, Arabidopsis thaliana
acataactctcgtttttcgctttatcgattcttctttcgctcagtgcccaattcaacaggtttaaaccaatccgatgactagaggacgttgtggtggtggccctggtagaggcggtcgtggttttggtggccgcggaggaagtcctggttttggtccatgaggtcctggttttggcccaggacgtcctggttttggtccacgacgtcctggttttggtccacgaggtcctgattttggtggccggggcccgagaggtcctggttttggcacaagaggccctggtccttggagtggcccaagaagtcctcgtc

SEQ ID NO: 138298 - DNA, 328 bp, Arabidopsis thaliana
  unsure (1)..(328): unsure at all n locations
cacaaacatctcaacanaagtagcagcttcctcaacaccatccctaattgttctctgcttccagacctaaacatgagctctgtatatctcaaaggaactcctccctgatttctcacagatgaaatctttaagagtcatcgacatgtcttggaaccacttcaccggtagcttcnctctctctatcttcaatctcactgacttagagtatctcaatttcaatgagaatccagagcttgatctatggactctaccggattctgtctctaagctgacaaagctcacacacatgctcttgatgacgtgtatgctccatggtaatatcccaaga

SEQ ID NO: 138299 - DNA, 408 bp, Arabidopsis thaliana
  unsure (1)..(408): unsure at all n locations
aaaagccctaactttctccgtcgatggctttcttcttctactttttcttcctcttgactctttcttctccttcttcttctgcttcctcttcaaactccttgacttacatcgtccacgtcgaccacgaagctaaaccctcaatcttccccactcattttcactggtacacttcctctcttgcctcactcacctcttctcctccctccattatccacacatacgacaccgttttccatggcttctccgctagactcacttcacaagacgctagtcaactcttagaccatcctcatgtcatctctgttatcccggaacaagtccgtcacttgcacaccactcgttnccctgagtttcttggtcttaaggtcaccgacaaagcgggtctactcgaagagtctgatttcgggt

SEQ ID NO: 138300 - DNA, 416 bp, Arabidopsis thaliana
ggcagccgaagatcccgagggccctttgcgatgtctcaaagcggcggtgacttcaacctctccgacgagattctcgccgtgattcccaccgacccttatgatcaactcgacctcgccaggaagatcacttccatggctatcgcttcaagggtttcgaatctggaatctcaagtctccggcttgagacagaagcttcttgagaaggatcggcttgttcatgaacttgaagacagagtctcttcctttgaaagactttaccatgaagctgactcgagtttgaagaatgttgtcgatgaaaatatgaaactgactcaagaacgagattcactggcaatcactgcgaagaaactcggtcgtgattatgcaaagttggaagcattcaagagacaattgatgcagtcattgaatgatgataa

SEQ ID NO: 138301 - DNA, 351 bp, Arabidopsis thaliana
atgatgcaacagttgacgtggaacttgatgcagtggagaaatttgttcctcaatgcatggcgttttatcagaaggagcttgccttgtgtacagcttccaaagttagtactgagtttttatgctttgatattgatggtgacatagacccaatgttcaaggagtactggtgcaaaagattacacccaataaatgtatgtgaaaaggtttacagacaacctcccctacgtgaatcacttaagaagggtaaactgaaaaagcaagatcttgcaataaccaaacagaaggcgaatattcttcgttttgctgatttactacgcaagaggatccaatatgattgtcctggattcttac

SEQ ID NO: 138302 - DNA, 372 bp, Arabidopsis thaliana
ctctcttctctctctctgtctgtgtgtgaagtgagaggatctttgtttggttctgcaatcataatttcgtgatatactaaaaaaaatgcaatttcctcttctctcttataagcagagaccctactactctttgatcgaattttccttgctctcttctctttgttctctcatgtttttttctccctaaatttatgggctttgctctctctctaagccacactcacactctaaagcactcgtctttcttcttctttttcttcagaaacagttattttgacttgaaaaaccagagctttaatcctggattcatggcaaaaagagcattacttttcttttcctctctcactttcttgtttcatttggcttaaaaat

SEQ ID NO: 138303 - DNA, 367 bp, Arabidopsis thaliana
atatcactccatctgatatacagagcctcatagaagtaaatgtacttgttcaagatttcaacaaatggctactgcaaccagaggtagcagcggaccagtcacgctgtttgttgaaatcttgaacacgtacatttacttctttgagaaagggaatccacatatcactccatctgatatacagagcctcatagaattgatcaacaatgagatgcaaagcgacaacggtaacacgacaatccactcagatcccttctttacaagtacattgcgttacattaagttcataaaacagaaaggtggtttgatgggtgagaaatatgaccctatcaagctgtgacttaaatccgagacacaagcctcatcaaat

SEQ ID NO: 138304 - DNA, 352 bp, Arabidopsis thaliana
  unsure (1)..(352): unsure at all n locations
ggaaagtctaaaggctttggatttgtcaattttgagaattctgatgatgcagccagagctgttgacgctctaaatggaaagacctttgacgacaangagtggtttgttgggaaggcccaaaagaagtccgagagggaaactgaactcaaacaaaagtttgagcaaagtttgaaggaggctgcagacaagtctcaagggtcgaacttatatgttaagaacttggatgagagcgtcacagatgataagctcagagaacattttgctccctttggaactattacatcatgcaaggtgatgcgtgaccccagtggagtgagtagaggatctggatttgtcgcattttcaactcctg

SEQ ID NO: 138305 - DNA, 359 bp, Arabidopsis thaliana
  unsure (1)..(359): unsure at all n locations
gttttgggtaaagtagacagaacaaaaattgctgaagtgtcagaagaaacagacacaaggattgaagatgaggatcaggagaaagatgatgagatgactgatgttgcggaagatgtgaaaacgcatggagactcctcagtagctgatattgaagagggaagggaaagtcaagaagagatgacagagacacaggaggacagtgttatggctgatgaagagcctgaggaagttgaggaagaaaataagagtgctggaggaaagangaaacgggggagaaatacaaagacagtcaaagggacaggaaagaagaaagaggaagatgtttgttttatgtgctttgatgggggtgatcttgtcct

SEQ ID NO: 138306 - DNA, 387 bp, Arabidopsis thaliana
atggagatgagtttgcgtctcgcttcatcttcaacctcaaacccaatttgtctactaaaccctggaaaaaaccttaatttcccaatccgaaaccatagaatccctaaaacttcgaaacccttttgcgttaggtcttcaatgagcttgtctaaaccacccagacaaaccttatctagtaactgggatgtatctagcttctccattgattccgttgctcaatctccttcaagactcccaagtttcgaagaactcgataccaccaacatgttgctccgtcaaagaatcgtctttttgggttctcaggttgatgatatgacggcggatttggttataagtcagctattgttactagatgctgaggactcagaaagagacattacgcttttt

SEQ ID NO: 138307 - DNA, 411 bp, Arabidopsis thaliana
caggcttacgtcccatcatcattccccgttctctttttattttctctaatcgccgacgattatctctttcgtccggcgatagctattttgtctcttcaaatccccatagaccaatactcaactcttcatctccatgtctcctcaatctcatttctctccttagtgattgagctttttccttctttctctttggttattattccttctcctcctccgtcgtgtttttgattgatttcagaatctaaatctccgtttgatttctccatactcgtgctgattttcacctatgtaatgtgatttatgagctctgtttagttcaaatcgacggcgatcgttgaatttactgatcaatgtgtaagtaagagcttgaagaaatagtttttgttgttgttgtgaaagctcagagttttg

SEQ ID NO: 138308 - DNA, 262 bp, Arabidopsis thaliana
tattcccctcgatatacgatttgattttgtatgattttgatccctgcatcagagatttcgacatagtttgtggaatttggtttaatcgacgacaagcaataatgggacttgggttttcacgatagtgatggatgatccatcgaagaagactggaactttccaaaggattgatttagacactcatgtggctttccttcatacgacccagagatcgattctccttatccgaactcaggtatttgactgaccagctgagacagat

SEQ ID NO: 138309 - DNA, 355 bp, Arabidopsis thaliana
accaggtccagacatagtaaggattgacagactgagagctcttccttgtcttcgctaaaaccaccccagcaagggaatcaaggtatctctgcaaataatcaagatccactcaactctttcggtgtaccaaaacagagccaaggaatgccatctttcaccagtgcttcataaactcgccgccatcatcgatattcacggggtccaagatcgaagctgaggatggttctccgcttgtgatcgagctcgtggacgccaccacaaacactctagttagtacgggaccgttctcgtcttctcgggtcgagctcgtgccgctgaacgctgatttcacggaagaaagctggaccgttgaggg

SEQ ID NO: 138310 - DNA, 351 bp, Arabidopsis thaliana
actttatcatcgtatattcaacgttatggtagagttgaagaagatatcgccaagagatttatgaagcaaattggagctggtttggaaattattcatgataatcacattatccatagagacttgaaacctgagaatattttaattgacggatctggtgatgatttggtgttgaagattgccgattttagtcttgcaagaaaactacatccgggcaagtatcttgaaacagtgtgtggttctccgttttacatggctcctgaagttcttcagtttcagagatacaatgagaaggctgatatgtggagtgtacgagcaatccttttcgagctacttcacgggtatccaccattc

SEQ ID NO: 138311 - DNA, 405 bp, Arabidopsis thaliana
acacttacttcttctttgatcatatcatatttatcttcactacaaaaaaaacaagtaaaataaagccaatcttcttaaatatctccagaagatctatcagcatttacgtattcaggtcctccaatttcttctcacaaagaaaaaggaagaaaaaaaagaagttgtgagagcaaaaaaaaaatggcagtggataaagtgattgtgaagcagaggaacattatattggttggaattccaattgatgaaagtggcgtagaggttttaaaatgggcacttgaagaagttgcaaaacatggagattgtgttgttgttgtccatgtttgttttacttattaccgtgccttgaaaagcaagtcatcgctggatcggtacttaaaaccatacattgaattctgctcaacaaag

SEQ ID NO: 138312 - DNA, 255 bp, Arabidopsis thaliana
acaaaagcatgagacttgtccaggacatcatggggggattagatcgcccaacagattatgtactgattaccgcagcattctagttgaacgcagttcctttacatcaccagtaaaggatcgtccgttggccttaggcaacgttaaatccaggatgctgccacctccgttgcagtctgcatttgtcagcccaacacggtccaacccatgaggtggaggagaaacttgtgcagaaactgggatcaatattttcttcac

SEQ ID NO: 138313 - DNA, 147 bp, Arabidopsis thaliana
aatgggcctgaagtgctgagcaagtttgttggtgagacagaaaagaatgtaagagacttatttgctgatgctgagcaagaccagaggacccttggtgatgctagtgagttgcatgtcattatttttgatgagattgatgctatttgc

SEQ ID NO: 138314 - DNA, 381 bp, Arabidopsis thaliana
cccacgcgtccgaccaccaacaattcaaactctctctttctcctttcaccaaacaatacaagagatctgatctcattcacctaaacacaacttcttgaaaaccaatggatcaaatcgaagcaatgttgtgcggcggaggagagaagacaaaagtggcggttactacgaagactttggcagatccattgaattggggtttagcagcggatcaaatgaaaggaagtcatttagatgaagtgaagaagatggtcgaagagtatcgtagaccagtcgtgaatcttggcggagaaacactgacgatcggacaagttgctgccatctccaccgtaggaggcagcgttaaggttgagttagcggagacttcaagagccggtgtgaaag

SEQ ID NO: 138315 - DNA, 300 bp, Arabidopsis thaliana
cacgcgtcaaggacaatgcaagagaagagaacacacaaggaatagtgaacatggttctccgttgctgtgcaaacgccttacttggtgcccttgactatctcaacaagttcaccatcaactttgctgcaataacaggggaagcgtattgcacctctgcgaaaatgacttacgagctgttaatacgcaacctactgtcagctgtatttgtcgaaacggtttccaccagaatcctaaccgggaatagtctttgtcctgtcagccgcatatgcagtcgcgacatgggctgttctgagaggagtg

SEQ ID NO: 138316 - DNA, 351 bp, Arabidopsis thaliana
acccacgagtccgcttcattgcctcttaagccccaattatgacaacaaacctcacgcgtactgtcttcttcgtcttgttcttcttcatctaccatgaaagctcttctctttcttcttacccttttcctcatcctcccaaacccaatctcagccattgatttcatcttcaacggcttcaatgactcatcatctaatgtctccctcttcgggatcgcaacaatcgaatcaaaaatcctaactttaacaaaccaaacatcgtttgcaactggtcgtgctctatacaacagaaccatccgtacaaaagatccaatcacatcctctgttttacctttctctacttctttcatcttc

SEQ ID NO: 138317 - DNA, 365 bp, Arabidopsis thaliana
agccgacgccaaaattctgcttccggtatcagatattttcgtcgtcgagaagaagcatgagtttagaaaaatggcgacggaggcagctccgatggacgaaaaggcgaagagaatgagacatctaatgtcgagcttctacgcaccggatccttcaatctcgactagtggttcctccatcaacgcctctttcgagtaacatcaacagcacttcctttgatgctgatcagtacatggatctcatgatcaaaaagtcgaatttggaggtgcttctgcaaagacatgttcaaatggctgctgagattaacaatctcgacagagacttgcaaatgctagtctatgaaaattacaacaagtttatcagtgca

SEQ ID NO: 138318 - DNA, 263 bp, Arabidopsis thaliana
agcggacgcgtgggcggacgcgtgggctgacgcgtgggcggacgcgtgggccatgcttggagctcttatgaaaagtatgcatgggggaaagatgagcttcagcctcggacaaaagatggcactgatagctttggtggccttggagcaactatggtagattctttagatacactctatatcatgggtctagatgagcagtttcaaaaagccagagagtgggttgcaagctcattggatttcgacaacgattatgacgccagtat

SEQ ID NO: 138319 - DNA, 411 bp, Arabidopsis thaliana
agcccacgcgtccgcccacgcgtccgcccacgcgtccgtcttagcctaccctttttccttcctcctctccgattcttcctccgtcagtaaaagaaaatcaaaatggcttcacacattgttggatatccacgtatgggccctaagagagagctcaagtttgcattggcatctttctgggatggtaagagcactgctgaggatcttcagaaggtgtctgctgatctcaggtcatccatctggaaacagatgtctgccgctgggactaagttcatccctagcaacacctttgctcactacgaccaggttcttgacaccaccgccatgctcggtgctgttccacctaggtatggatacactggtggtgagatcggccttgatgtttacttctccatggctacaggaaatgcctct

SEQ ID NO: 138320 - DNA, 322 bp, Arabidopsis thaliana
gagagaagaaagatagagaaaaaaaatgggaggcaaaggtgtgatgatggtggcgatactttgcctttgggcactctctgcaacatctgaagcagtaacagaggctgagccaggtttgatgatgaacttctacaaggacacgtgtcctcaggccgaagacatcgtccgtgaacaagtcaaactcctctacaaacgccacatgaacaccgctttctcttggctccgtaacatcttccatgactgcgccgttgagtcatgtgatgcgtcgcttttgctggattcgacaagaagagagctaggagagaaagaacacgacaggagc

SEQ ID NO: 138321 - DNA, 411 bp, Arabidopsis thaliana
gattcttcctccgtcagtaaaagaaaatcaaaatggcttcacacattgttggatacccacgtatgggccctaagagagagctcaagtttgcattggaatctttctgggatggtaagagcactgctgaggatcttcagaaggtgtctgctgatctcaggtcatccatctggaaacagatgtctgccgctgggactaagttcatccctagcaacacctttgctcactacgaccaggttcttgacaccaccgccatgctcggtgctgttccacctaggtatggatacactggtggtgagatcggccttgatgtttacttctccatggctagaggaaatgcctctgtgcctgccatggaaatgaccaagtggttcgacaccaactaccattacatcgtccctgagttgggccctg

SEQ ID NO: 138322 - DNA, 403 bp, Arabidopsis thaliana
acggacgcgtggggctgcacttgagagaggcttgtggtctacagcaactataaatattgaagttttgagaaccttaaatgtgattttctccaattttcctaagctccgtgcctcagaagctgctactttctgcatccctcatttggtaggggcgctcaaatctggtgttgaagacgtccagggattagtattggatattctttacttgctaagacactcctggacgaatatgtctatagatgttgcaaagtctcaagccatgattgcagctgaagcaattcccgtcctgcaaatgctgatgaaaacatgccctcctaggtttcacgacaaggcagatagcttattgcactgcttaccaggttgcttaacagtgaacgtcatgcgtgccaataacttaaagcag

SEQ ID NO: 138323 - DNA, 412 bp, Arabidopsis thaliana
cccacgcgtccggttcagttccatgccctagctttgctccatcagatacgccaaaatgatcgcttggctgttagcaaattggttggtagcttgaccaggggatctgtccgctctcccttggctcagtgtcttttgatacgttacaccagccaggttatccgtgacatggccaaccacggtcaatctggagaacgtccgttctatgaatttttggagagttgcctgcgccataaggcagaaatggtgatccttgaggctgccagggcaattactgagcttgatggtgtgacaagccgagaactgactccagcaatcactgttcttcagctctttttgagttccccagaccagtgttgagatttgccgctgtccggactctgaacaaggttgcaatgactcatcctatggctgt

SEQ ID NO: 138324 - DNA, 375 bp, Arabidopsis thaliana
acacacttctaaactttagcctcacaatattcttctctctgtctctctctaagtcatctctttgaacatcagggattaattactgtaattgaagctcacatcatggaccatcatcagtatcatcatcatgatcaataccaacatcagatgatgactagtactaacaataattcctataacaccatcgtcacaacacaaccaccatcaacaacaacaacaatggattcaacaacagcaataactatgataatggatgacgataagaagttgatgacgacaatgagcactaggccgcatgaaccaagagactgtccaagatgcaactcaagcaacaccaagttttgttattacaagaactacagcttagcacagcct

SEQ ID NO: 138325 - DNA, 417 bp, Arabidopsis thaliana
agcaagaagggtattcaggctcagcttgagaagatgaagaagtacgctactgtcatccgtgttttggctcacactcagatcaggaagatgaagggattgaagcagaagaaggctcacatgatggagatccagatcaatggtggtaccattgcccagaaggttgactttgcctacagtttctttgagaagcagatcccaattgaagctgtcttccagaaggatgaaatgattgatatcattggtgtgaccaagggtaagggttatgaaggtgttgttactcgttggggtgttacccgtcttcctcgtaagactcacagaggtctgcgtaaggttgcttgtattggtgcgtggcatcctgctagagtgtcctacactgttgctaaggctggtcagaacggttaccatcagcgtactgag

SEQ ID NO: 138326 - DNA, 396 bp, Arabidopsis thaliana
ggataatggagggagcgtgttgtcgctctctgctccacacttcccttactccgccaccattctccgacgtcactctccggtggcttccatatctttctcccttaagcaaccaccaccgcaaccaccagaacctcctgagagtcctcctgacctccgccgcccggagaaatctattggttcttcttcatcttcttcctctccttcccctatcccttctcctaaaacccctcttaagattaatccactcaagggtttaaccaatcgctcttctgtgtctcctcttgttcaatcagaggtttcgagtaaagtttcttcctttggctcctctctagcatccaagctacgtttgtccagcaagctctctcctcctcctcctcctccacctccgcctcctgt

SEQ ID NO: 138327 - DNA, 396 bp, Arabidopsis thaliana
gataaatataaggagattgatgaatccacctttgcctaaaggctactggggaaatggatgtgtgccaatgtatgctcagatcaaagctggagaactcattgagcaaccaatctggaaaactgcagagctcataaaacagagcaaatccaatacgagtgatgaatatgtacgctcctttatcgacttccaagagctgcatcacaaagatggaatcaatgccggtacaggagtgaccggattcacggactggcgatacttggggcattccacgattgattttggatggggaggacctgtgacggttttgccactatcaaacaagttgcttggaagcatggaaccatgttttttcttgccatattctactgatgctgcagctggaagcaagaaagacag

SEQ ID NO: 138328 - DNA, 378 bp, Arabidopsis thaliana
ccttaataggactagtatatataaaacataacgaaatgggtatgagcacacttcttggttgtcgtgtcctcatagtctctatggtcgcacaggcctcatccgccagtcttacggtgaattggtcccttgggatcgactacactccgctcaccactggagataccttctctgtccgagatagcatagtgttcaattatggtgcgggtcacacggtggctgatgtgagcgagaacgactacaatagttgcactctagggaactccattacgtccgacagcagcggtaccacgaccatagctctcacgatcactggtcctcgcgacttcatctgtggcatccccggtcattgcgctgccggtatgaagctcgcagtcaccg

SEQ ID NO: 138329 - DNA, 394 bp, Arabidopsis thaliana
agctacgatgaaggaaaacgtacggcatagacgttgaccatggactatcaccgaggtgccaatgttgaggtcagaattgctaggatcttcaacacctatggtccaagaatgtgtatagatgatgggcgtgttgttagtaacttcgttgcacaggcactaacgaaagagccattgactgtttacggtgatgggaagcacacaaggagtttccaatttgtttctgatctggttgaaggtttgatgagactgatggattctcgaacaccgcttcaaccaagaattccgtggccctcctaggcgtcaactcattaccatcttctggatagtttcgcagttcttaacactagagcccgagtttaccttttaaaccttattttccttctcctcttcactg

SEQ ID NO: 138330 - DNA, 412 bp, Arabidopsis thaliana
agaagaaacagaggctccaaaaaaatgatgatggagactagagatccagctattaagcttttcggtatgaaaatcccttttccgtcggtttttgaatcggcagttacggtggaggatgacgaagaagatgactggagcggcggagatgacaaatcaccagagaaggtaactccagagttatcagataagaacaacaacaactgtaacgacaacagttttaacaattcgaaacccgaaaccttggacaaagaggaagcgacatcaactgatcagatagagagtagtgacacgcctgaggataatcagcagacgacacctgatggtaaaaccctaaagaaaccgactaagattctaccgtgtccgagatgcaaaagcatggagaccaagttctgttattacaacaactacaaca

SEQ ID NO: 138331 - DNA, 413 bp, Arabidopsis thaliana
aaaaaaatccaaagatctgaagcttcagatccttctcggctaaggctaagtcacaaccttggtctgagtaaatggtggacgctgttgtaacagtgtttttagagaaaaccttgaacatcctcgaagaaaaaggccgaaccgtatcggactaccgaaaacagttggaagatttgcaaagcgaattgaaatatatgcagtcttttctcaaggatgcagagaggcagaagagaactaatgaaacgttgcgtactcttgttgcggatttacgagaactggtttacgaagctgaggatatacttgtggattgtcagctcgcggatggtgatgatgggaacgagcaaaggtcatcaaatgcgtggctttcgcggcttcatcctgcccgggttccgttgcagtacaagaaaagcaaacgt

SEQ ID NO: 138332 - DNA, 97 bp, Arabidopsis thaliana
cccacgcgtccgattttgaagttttttcagtaacatgtaaagaatgcttgttactgatttgtggtggtgcaaaataatttttatgaagattttagtg

SEQ ID NO: 138333 - DNA, 352 bp, Arabidopsis thaliana
agttccttctctctgcgctttcactggagaatacctatgcaagtcccaattacagagaagcactctcaaagtcattactctttttccaaggtcagcggtctggtcgcctccctagtgaccaacaactctcatggaggtctagctctggcctctctgatggctcatctgctcacgtggacttgaccggaggctactatgatgctggggacaatgtgaagttcaatttcccgatggcgttcaccacaaccatgctttcctggagctctttggagtacggtaagaagatgggacccgagctccagaactcccgtgtggccatccgttgggccacggattatctactgaaatgtgc

SEQ ID NO: 138334 - DNA, 409 bp, Arabidopsis thaliana
acttctcttctttaataacttttagaaacacaaataaaagtttaattacttttaagcccaacaaaaatgggttatgctaaatcagccatgctgatcttcttactagcattggtcatcgcatcttgtgccacggccatggacatgtccgttgtttcctccaacgataaccaccacgtgaccgccggtcccggccgccgtcagggtattttcgacgctgaagccaccttgatgttcgagtcatggatggtcaaacatgggaaagtgtacgactccgttgccgagaaggaacggcgtttaactatttttgaggacaacctccgttttatcactaaccggaacgctgagaatctcagttaccggcttggtttgaatcggtttgcggatttatctctccatgaatacggagaaa

SEQ ID NO: 138335 - DNA, 408 bp, Arabidopsis thaliana
cttcgccttcctgtctccaccagctccctccttctcaatcattagcttcttctcttctcttctctcacagagagagtaatcacaagccaagtgagaaaaagaaaacactaaacccagatcgaaaaccatgtctattaacaacaacaacaacaacaacaacaataacaacgatggtcttatgatctcatcaaacggagctttaatcgaacaacaaccatcagtcgttgtgaagaaaccaccggcgaaagatcgacatagcaaagtcgatggaagagggagaagaatccgtatgccgattatatgtgctgctcgtgtttttcagctaacgagagagcttggtcataagtcagatggccaaacaattgaatggttacttcgtcaagcagagccttctattatagctgcaac

SEQ ID NO: 138336 - DNA, 394 bp, Arabidopsis thaliana
aaaaaaaaaacaagttttcttctttttacactcaagaatataaattccctgttctccagatcttttctcaagaaaatttaaagctttaacttaagaaagcttgaacctttctcttccaaccacatcttccttctttttatcctctagctcaacttagaaagaatagaataaagtggcaaaaccgaaagtgaaccaacttgtagtaaattaatagttatgggttcgaaacctaatgccatgaagaatgtggtggctatggcggcagtttctgctctgttccttctagggtttcttgtttgctctgtttctggttctgtctcttacgatagcagagccattaccatcaatggcaaaagaagaatccttatctctggatctattcactaccccagaa

SEQ ID NO: 138337 - DNA, 392 bp, Arabidopsis thaliana
actctctctatctatcttcttcatctttgtttcagcttctcctttgaaactagattatctccgttaatggcgcctcagatctaaccttgggagttatatatatatacttgttcaactcttcttcgaacgctgtccaacttcttcctctggttcgatcatcgagatctcgaggttatttggccgcaatgcagaagcgaatagccttgtcgtttccagaagaggtactagagcatgtgttctcgtttattcagctggataaggataggaactcagtctctctggtgtgcaagtcatggtacgagatcgagcggtggtgcaggaggaaagtcttcatcgggaactgctacgccgtgagtccagcgacggtgattaggaggttcccgaaagtgaga

SEQ ID NO: 138338 - DNA, 213 bp, Arabidopsis thaliana
ccgagagagggagagagaggggaagatgaacgctacatttaccgcatcggcgttccaactcgcagacgaactcagcgagacagatacctagatccacacatggtttcgcattgaattctgttcgacactcctttcttgtcctttcttttgttctttcgtttcacgagaactttcgttggttccctccgatttggccatgctggtgaagatatg

SEQ ID NO: 138339 - DNA, 398 bp, Arabidopsis thaliana
aacgaaactagccagagagatgacgagcaagattctagttatcggagctacaggtctcatcggaaaagtcctcgtagaggaaagcgccaagtctggccacgcccactttcgctctggttagagaagcctctctctccgatcccgttaaggcccaactcgttgagagattcaaagatctcggcgttaccatactctacggaagtttaagtgataaagagagcttagtgaaggcgattaaacaagtcgatgtcgtgatatcagctgttggtcggtttcaaactgaaattcttaatcaaaccaatatcatcgatgccatcaaagaatctggaaatgttaagagattcttaccgtcggaatttggtaatgacgtggatcgtacggtagccattgagccaacg

SEQ ID NO: 138340 - DNA, 399 bp, Arabidopsis thaliana
aaagtaacaaattccataaacacaattagctaaaagaaagaaacaatcatgaaggccaccatatccatcactaccatctttctcgtggtcgctttggccgcaccctccctagctcgtcctgacaaccatgtcgaggactctgtaggccgtctacttcgtcctggtcaaacgtaccacatcgtacctgcgaatcccgagacaggaggaggtattttctcgaacagtgaagaaatctgtcctcttgacatcttccagtcaaacaatccgcttgacttgggcctacccatcaaatttaagtccgagttatggtttgttaaggaaatgaatagtatcaccatcgagtttgaggctccgaactggtttttgtgtcctaaagaatccaaggggtggagagttgtg

SEQ ID NO: 138341 - DNA, 372 bp, Arabidopsis thaliana
  unsure (1)..(372): unsure at all n locations
aaagacaaagcctttttctctatatatatatatatatctctctatctttcgccattttggtttttgcttctctctgtgtgtgagtgattatgatgatgggattatctttctaaagctttttgttttcctgaaaaattaaaaaagaaaacttttatggttcttcatctcttctgtgttggagttgagagaccaataaatgctgttagtaatggttagttgagatgagaggtaaaaagatcccgtagtccgaggagtgtttggtttcttgcaaaaggatagtgaggcaaaacatgggtttggtttctcttgtctcctttcattcatcccttttccattaatggtctctcnctcttccaacaccaacctcttctt

SEQ ID NO: 138342 - DNA, 402 bp, Arabidopsis thaliana
gtccgctgctgaattcttcacgattttccaactgggaccgctccacttagacggaaacacttccaaagctgcagacaaatgggtgtctatagacgagtatttggatggctacttggtggaaaggaagaacagatatgggaaaaacatggaagtgatcgatgtcggaatgcaagagataaaaacttacttcaggctcttcttgttgtcttcagtacttctgatgttcatgttctgttccaggatagcgaagagcaagtatagtagaaactccatgcctgtcttgccatgaaactaatggaggaagctctcatttaattaacccttgtaagttagtaattcttttggttgcgaaacttgtattcctcattttagaaatgttgtgtctcatgaaaagacaacata

SEQ ID NO: 138343 - DNA, 249 bp, Arabidopsis thaliana
atccagaagtacttggactttttgagcctacagtaaaaccatttggctcgtctttttcatatcagctcacactcttccgggttcttagaatcacggactgtgatctcctgaaaagcattgaataccttaacgctcttacaatgctaaatactcttcaagtttctggtgctagctccctgagcacaatatctgaaaaattcattgagtcatttcctgaactccgaagtcttcaactctctgggcttaaga

SEQ ID NO: 138344 - DNA, 378 bp, Arabidopsis thaliana
aaaactgctgggggaaaagctagcgccaacagctctactgccaaaaatcaaaagaaggatcaatccatcaccaagaagggtcaaggaagagggaagggaaaagcttcttcaaagaaaagtttttcatcgtatatgatggttgactccaacattctatggtctgacattcaggaatttgccaaagcgaaatatgagtttgagttgcccgagctatcaagaactaccgctaaaaaagtatctgttcttcgtaatctttgccaaaaggttcgtgtcagtattgctgctcgcaaatacgacttcagtgcaaacacgccttttgagacgtcagatattttggatcttcggcccgtaattaagcactccgtccctgtatgctct

SEQ ID NO: 138345 - DNA, 360 bp, Arabidopsis thaliana
  unsure (1)..(360): unsure at all n locations
atctccatggatgatctaccaacccatgtaacagcaccaactatactaaggtcagtatctacacgaataggtcttttcatgataatcctatccactgaagcagtcaccaaaatcatcgatctcgcactgctgtcaccaccacaatgctgtttcagtaaaagcacacataacaaagttatattcaaatactcaggatgcaaacaaataagaaggcaagagccaaaaacaagaaccttgaaggagatggttccagcaagagcgtcaagatcttcaaccaatttaccagtacgaatctcattccaaggattcctatattgttctcgaagaacanaatcagaagaaaacttatagagaattgac

SEQ ID NO: 138346 - DNA, 346 bp, Arabidopsis thaliana
aaattattttccaggacctgcagagaacaaactctgttgctgttaccgtgaacaatcttctccagatgtgatgatagtttgtgtaaaatatactaagcacttccatttcaaccttaggtatagattaatgattggggacatatccttatccgtaagttttacacaccacccaacattccaagcttcacccgctgtagatataaggcactgtgtatcactttttgctatatagaagaagaggctctagtgtatagcttctgttcattgctctcttgcgaaaataagttcggatatttacataaggtgatgatgccctgctggtctggagatatcttgttgcagtctg

SEQ ID NO: 138347 - DNA, 318 bp, Arabidopsis thaliana
  unsure (1)..(318): unsure at all n locations
atgaaaaagcaaagatcaaatgtcacatttgtggcaatctttgaatcacagtcatcattgtcatcatcaagctcaggggaggtatattcagatggcacctcttcgtggacttctaattataacagcgcggaggaggagcatgacaacgacttggactctgtataaattcaaaggcccccataattgtctatgggtaccagagcggacgcgtgggatattcctcaagtttgtgaatgattgtcggcaaattgggattagttgtcncattgttcctggaattatgcctattaataactacagaggctttttgcgtatgac

SEQ ID NO: 138348 - DNA, 394 bp, Arabidopsis thaliana
accacgcgtccgctctcccctgaagctcccctcactcactcttctccgaggaagaacaacagagacaatggcggttcccaaagccattattctacctatcttgctactcatctgtggtgctgctctcggagctcctgcttctgaaggttatcttcgtaatggaaacttcgaagagtcaccaaagaaaaccgacatgaagaaaacagttctactaggcaaaaacgccttgcccgaatgggaaaccaccggtttcgtcgagtacatcgccggcggtcctcagccaggaggcatgtacttcccagtggctcatggagtccacgccgtgaggctcggaaacgaagctacaatctctcagaagttagaagtgaagccaggttctctctacgcactcacg

SEQ ID NO: 138349 - DNA, 112 bp, Arabidopsis thaliana
aatagttatgcctatctatgtttaaatgtttttaagcgttctcttttgtgatgttggtctttatataatgttacgtatgatacatttgaataaaggtggttgattccatccc

SEQ ID NO: 138350 - DNA, 62 bp, Arabidopsis thaliana
accaaccaagttgtgttgctacttggtaataagagtaagctttaaaaagagtatgttcactg

SEQ ID NO: 138351 - DNA, 400 bp, Arabidopsis thaliana
cggacgcgtgggctaaatctctctctgttgttaccttcccatgggatggtcactaagaactctcataagagcaatctgggcatgacaaagtccatgaatttctttcagaacatcattaaacctttcaaacgcagctccaatcgaggtcttgaagatgatattgagcgaattgctgctatggagcaaaaagttttcccatttcaagttttagtttccgctaccaaagattttcacccgacccataaactcggtgaaggtggtttcggtcccgtcttcaagggaagattacctgacgggagagacatagcagtgaagaagctatctcaggtttcaaggcaaggcaaaaacgagtttgtgaacgaggctaagttgttggctaaagttcagcatcgcaatgttg

SEQ ID NO: 138352 - DNA, 386 bp, Arabidopsis thaliana
caattcaggaagttttgtgggacaatcctcccataccagagaaccaagcaacatgcgctttattttactctatttcttcaactcagcctggcttagctgggataaacctcggaaaatttctgatcaaacgagtgattacgttggtgaaaaaagacatgccacatgtttctacatttgcaacacttagccccattcctggattcatgcaatggctcctctcgaagttatcatctcagtcaagatttgctgaagatgagcgtggtacacagagcaattcgccttcatctacgtttagtgagaaagtattactaccagaagaggaacatgccctcatgactctatcagatgaatcttcatccggtagcaacggtatggaagttctgttg

SEQ ID NO: 138353 - DNA, 263 bp, Arabidopsis thaliana
aaaggtcataacgctcagacgaattttctcactcctcctcctagtccgacgactgaggtgttaccggaaactccggtgattgaccttgaaactgtctctggttgtgattcggcgagggaatcgcaaatcagtctgtgttctccgacttctgttctccggtttagtcacaacgacgaaacagagtacagaacatagccaacggaagaacaaaatccgtttttcttgcctggatttgtttcgctccggagattatttttgggatt

SEQ ID NO: 138354 - DNA, 428 bp, Arabidopsis thaliana
tctaaatctctaatcttttgaaaccctaaatcaaagttttgtttttttttatcaactggggaagaagaaaggtgtaacctttatataaccatggattccggtgacgcgacatctttgcttttgacgaaaattcgaagcttggagccagattatgctcctaagattattgggtatttgcttttacatgattttggtgatagagacttgatgcatctggctcgtggacctgaatcgattttgcagtcgactatttcgaaagtgaagagtctcttggggattttctccaacaactcgccttcttctactccgacgtctccttctccgttgaatcctatctgtcgtcctcctcttaacggaagaggaagctctcactccaatgggtttatggatttccgtagaaactctccgtcttctccttcttctacctc

SEQ ID NO: 138355 - DNA, 421 bp, Arabidopsis thaliana
attcgacttcttcgttctctagttttttcctcagtctctgttcttagatcccttgtagtttccaaatcttccgataaaaatgtcgggtaaaggagaaggaccagctatcggtatcgatcttggtaccacttactcttgcgtcggagtatggcaacacgaccgtgttgagatcattgctaatgatcaaggaaacagaaccacgccatcttacgttgctttcaccgattccgagaggttgatcggtgacgcagctaagaatcaggtcgccatgaaccccgttaacaccgttttcgacgctaagaggttgatcggtcgtcgtttctctgacagctctgttcagagtgacatgaaattgtggccattcaagattcaagccggacctgccgattaaccaatgatctacgtcgaatacaagggtgaa

SEQ ID NO: 138356 - DNA, 338 bp, Arabidopsis thaliana
cagcaactcagtagtcagcgggggaataaataaagtcaaagatggttctaatgggacatgctcgaagaaaagcacaccaggtggtctgatatatcctaatcagatcagcatgtctgctcacgcgagtgcaaataaggtcggcagacctgggaagaaaagcaaagtttttatggaagctgctgctaatggatttgttgagaaccctctgagatctgtttcagtatcaaagacagcgaatacagatgccaaaatggatcaggattacaaacttcatatccaaagttcaactagacgttggtctgctgcatcagtattggatacacggaagcccttaattc

SEQ ID NO: 138357 - DNA, 331 bp, Arabidopsis thaliana
cttttctacagccgcatcatccttctcgcttgtgcgatatcgtttgcgtgagatttgtctgaaaagtagctaaccatgggtaaagagaagtttcacatcaacattgtggtcattggccacgtcgattctggaaagtcgacaaccactggacacttgatctacaagttgggtggtattgacaagcgtgtgatcgacaggttcgagaaagaggctgctgagatgaacaagaggtccttcaagtacgcatgggtgttggacaaacttaaggctgagcgtgagcgtggtatcaccattgacattgctctctggaagttcgagaccaccaagtact

SEQ ID NO: 138358 - DNA, 301 bp, Arabidopsis thaliana
agtactgagagaagaacgatagagaaaaaaaatgggaggcaaaggtgtgatgatggtggcgatactttgcctttgggcactctctgcaacatctgaagcagtaacagaggctgagccaggtttgatgatgaacttctacaaggacacgtgtcctcaggccgaagacatcgtccgtgaacaagtcaaactcctctacaaacgccacaagaacaccgctttctcttggctccgtaacatcttccatgactgcgccgttgagtcatgtgatgcgtcgcttttgctggattcgacaagaagagag

SEQ ID NO: 138359 - DNA, 347 bp, Arabidopsis thaliana
agtcaactccaagaacaaaaagcacctctgctctgttttgagatccaaccacagttcaaactaatcaaaagtcccaatttctaacttcagtctaggctttttctctccatggatccttgattctgagatcaaccaatcgaaagaaaccaaaatgggcttcaacgttgttgtgttcttgagttgtctgcttctacttcctcctgttacttttggtagcaacatggaacgaaccaccttggttatagacggctcacgtcgaatcgctgagaccgatgagaactttatctgcgcaacgcttgattggtggccacctgaaaaatgcaactatgatcaatgtccttggggtt

SEQ ID NO: 138360 - DNA, 333 bp, Arabidopsis thaliana
tctatgcagatgccgatgtgcgtctagcgagaaggataaaacgcgatactgttgagaagggcagagatattgccactgttcttgaccagtactcaaagtttgtgaagccagcatttgaggatttcatactcccaacaaagaaatacgcagatataataattccccgaggtggtgataaccatgttgctattgatttgattgtgcaacacatccatacgaagctcggtcaacatgatctctgtaaaatttatccaaatctttatgttattcaatcaacttttcagatacgtggtatgcacactctaatccgcgactctaaaacaacaaagcatg

SEQ ID NO: 138361 - DNA, 347 bp, Arabidopsis thaliana
acggacgcgtgggcggacgcgtgggtcttagaggtgatcctcctcatggtcaagataagtttgttcaggttgaaggtggttttgattgtgctttggatcttgttaatcacattcgtagcaagtatggtgattactttggtatcactgtcgctggttatcctgaggcgcatcctgatgttattggtgagaatggtcttgcgtctaatgaagcttatcagagtgatcttgagtatctgaagaaaaagattgatgctggagctgatctgattgttactcagcttttctatgatactgatatattcctcaagtttgtgaatgattgtcggcaaattgggattaattgtccc

SEQ ID NO: 138362 - DNA, 130 bp, Arabidopsis thaliana
acggacgcgtgagcggacgcgtgggtagtaatgttgtttttaattttctgtagtgtgctttaatccgttcttgtattttctgtaacttctgtcaaaaatcttaaaatggtataaaatttaactttttacc

SEQ ID NO: 138363 - DNA, 352 bp, Arabidopsis thaliana
agaaaaaaaaagagagaagaaaaatggtgttgacaatctatgctcctttattcgcttcttcaaagagagctgttgtgacattggtggagaagggagtatcattcgaaactgtcaatgtcgatctcatgaaaggagaacagagacagcctgagtatctcgcgattcagcctttcggtaaaatcccagtcctcgtcgacggagactacaaaatcttcgagtcgcgtgcgatcatgaggtatatagcagagaagtatagatcacaaggacctgatcttttggggaagactattgaagagagaggacaagtagagcaatggttagacgttgaggctacaagttaccatccaccact

SEQ ID NO: 138364 - DNA, 403 bp, Arabidopsis thaliana
ctcttttctctccagatttcgattcccgaggctcgagagaaaaccgtaaatctcttctccgttcactcaatcaaccaaagatgcgtgagattcttcacatccagggtggtcaatgcggtaaccagatcggagccaagttctgggaagtggtttgcgccgagcacggcatcgatccaaccggaaggtacaccggagactcagatctgcaacttgagcgcatcaacgtttactacaatgaagcgagttgcggtagattcgttcctcgtgcagtgctcatggatttggagcctgggactatggatagtctcagatctggaccgtacggtcagacctttcgacctgataacttcgtctttggtcaatccggtgcgggtaacaactgggccaaggggacacacactga

SEQ ID NO: 138365 - DNA, 362 bp, Arabidopsis thaliana
acccacgcgtccggaaagacagagataatgaacgagagttggccagaaagattccccggcaaaagaaaaacctccgccggcaactaaaaaacgatttttgactccgggaaaattcgtgacaatcttgtgtaccattaacttgataaattacgttgatcgaggagtgatcgcgagtaatggtgttaatggaagctcaaaagtatgtgatgccaaaggggtttgctctgcaggaactggaattcagggagagtttaacttaactaactttgaagatggtcttttgtcatctgcgtttatggctggacttcttgtggcttctccaatattcgctggattgtcaaaaagattcaacccttttaaac

SEQ ID NO: 138366 - DNA, 362 bp, Arabidopsis thaliana
atctaagacgcccaatgctcctgccaaaaccaaaaccggtgcaggcatgccatgttctctctgtcctcatcccacatgccaacactctgtcagaaaccaaggagtctgcgcttgtccagagtgtgaaggcacgctcgtcttggacccggttagcttccccaagtggaaactcaactgcaacttgtgtagttgtatcgttttgcttccggaaggtgctcatcgcatcaccaccactagtaaccgctgtcccgagtgtgattcagccatcatagagatcgatttcaacaagaaaactactcctctggagaacggagccactctgcatcaaggatgtgttctatgtgacgagttgcttctctcac

SEQ ID NO: 138367 - DNA, 362 bp, Arabidopsis thaliana
ctctcagtgaacaaatttggctatggctttttctgcaccatcactttccaaattctctcttttggttgccatttcagcatcagctctcctctgttgtgcttttgcccgtgatttctccattgttggatacacgccggagcatttgacaaacactgacaagcttctagagctcttcgagtcatggatgtcagaacacagcaaggcttacaaaagcgtggaggagaaggtgcacaggtttgaggttttcagagagaatctgatgcatatagaccagaggaacaatgagatcaacagttactggctcggtttgaacgagtttgcggatttgacccatgaagagttcaaaggaagatatctaggac

SEQ ID NO: 138368 - DNA, 267 bp, Arabidopsis thaliana
gaagatcatgagcactactgcacacaagcaatcgcaacctagaacggagttcaccacgatggatcgattaactacggtggatactcagaccatatcgtcgtctatgaacgttacgctgtcaaaattccacacacattgcctctgagtttcggccgcaactttgctttgtgcaggcatctcgatgtacagtcccatgaagtacttcggattgaccggaccggataaacatgtcggaatcgtggggctacgtggtcttggacacattgg

SEQ ID NO: 138369 - DNA, 387 bp, Arabidopsis thaliana
gatgttctgtgcagtgataaaacaggtactctcacgctcaacaagctttctgtggataagaatctgatcgaggtttttaagaggggcatcgacagagatatggcggtgcttatggctgcaagagctgcacgtttagagaaccaagatgctattgatactgcaattgtttcgatgttgtcagacccgaaagaggcacgtgccgggattaaagaactccattttcttccattcagtccagctaatagaagaactgcactaacgtacctagacggagaaggcaaaatgcaccgagtgagcaaaggcgcgcctgaagagattttggatatggcccacaacaaattagaaatcaaggagaaagtacatgctacaatcgacaaatttgcagaa

SEQ ID NO: 138370 - DNA, 387 bp, Arabidopsis thaliana
cggacgcgtgggatttagttttcatattacttgacaaacctgatgagctactcgacaagcaagtctcagagcatattatgtcgcttcattctgcaagtggagaaacatcacctgcactaaagaagtttaaaccaacatcacagaatgctgggtatgcaaacatgcatgcagaagggaattctctactttcaagactgcggttggactctgagaaagatgacgacttttctccggttcctggccaattgcttaggaaatatatttcctatgcacggaattttgtcaatcctaagatgtcaaaggatgctggagagatcatacagaagttttacttgaagctgagagaccataacacatctgctgattccacaccaataacagcaagac

SEQ ID NO: 138371 - DNA, 314 bp, Arabidopsis thaliana
gcatttacacctatagagtttcctttccctgctcaagtggctcaagtctcagccacacagaaccattctgctttcgtattgcaatctggacaggttctcacttgtggggataattcatcgcattgctgtggtcatttacatactagccgtccaatatttaggcctaagcttgttgaggctttgaaggggactccttgtaagcaggtggctgctgggcttcactttactgtgtttctatcaagggaagggcatgcatatacttgtggatcaaatacacatgggcagcttggtcatggagataccttggacagacc

SEQ ID NO: 138372 - DNA, 109 bp, Arabidopsis thaliana
tcaagtttctcgagccgattccagacgattttctttcggcttttcacgcgttgtcggctcgaaagtgcgattggctgaagcatttttctcgggaaggggttgagtgtgc

SEQ ID NO: 138373 - DNA, 261 bp, Arabidopsis thaliana
gctttcagaatcttcattacgtatagcggcatgaggagcacaccattgcacactcaatacagacttcgtacaagaaatccaagttatatctgtggcctgggccatccacgacgggaatgattgctcggagagttgtcaatacagtcttgctcctaacaaggttcaacactaccagatcaaaggtgattggttcaaggaagtcatacagcaccgttaaggcagtgttgaaggccttgaatgcggtccatacaccaaacgatg

SEQ ID NO: 138374 - DNA, 389 bp, Arabidopsis thaliana
agccgagtgaagccgcgactgtgaaatcatgagaggagtaaaacgcgccgccatctccgaatcgaatgactctccctttaagaatgcaaaaccagtggaaggaatcttttttggtactcagaagaatgtggtaccgatgcagcagagttcagtaacatcagcatcattggataaacagagggctgagttagctaggaagcatgtgagagctcttaataaccaatttgtaagttgggtgcagttacagctgaagaatcatcctgatgaactttgggaagatgggatgaatgactacattacgcatgcttcaaacattctggaaaagtttaaggatgtggtcagctggcttaaagaaaataaaggaaagggggagaatttatcccctgaat

SEQ ID NO: 138375 - DNA, 380 bp, Arabidopsis thaliana
gatcgcgccaagattgaagctggaaagctggagttggcatcagtaccatttgatatccgttcaatattggatgatgtcctttctctattctctgaggagtcaaggaacaaaagcattgagctcgcggttttcgtttcagacaaagtaccagagatagtcaaaggagattcagggagatttagacagataatcataaaccttgttggaaattcggttaaattcacagagaaaggacatatctttgttaaagtccatcttgcggaacaatcaaaagatgaatctgaaccgaaaaatgcattgaatggtggagtgtctgaagaaatgatcgttgtttccaaacagtcaagttacaacacattgagcggttacgaagctgctga

SEQ ID NO: 138376 - DNA, 416 bp, Arabidopsis thaliana
cccacgcgtccggaaagaatcaaaatttgttgagataagacatggtgttccgtggcgacacggtggtgtccgtagctcatatatcggctgagatttttcagcgattacggtggattccgccgtcggatcgaatcagcagcggagagatgttacaactcgtttgttgttttccgcttcagcaactgggtcgattcgttttatggttctggaactatatctgtgttccacctccggagattttgtattttgatggtcgtcgtgatgatgacgatgatggttatggatcatcttcgtcgtcttcgaatgttactcatcatcataattactatcatcttcatttggagtgaccaaagttccggtttttctgatttgttgttgtaaagtttttatttttcccgtttttgtgcagagaaaga

SEQ ID NO: 138377 - DNA, 259 bp, Arabidopsis thaliana
acatggcatagctaaaggagaaactcatcattccttctcattcgaaaccaacttctcagtcagaaggtatcgcagaacaggcctaaacgtcgagtctgggacaggctatctttgcaagtggaaccccaattgcgccattagagtatcaaggaaagacgtttgtgcctggacaggcgaacaacgcatacatcgtccctgggtttggactcgggctaacaatgtcaaggacgatccgtgtccatgatgacaagcttctggc

SEQ ID NO: 138378 - DNA, 203 bp, Arabidopsis thaliana
cccacgcgtccggtctcatctcaccatctctctcttcttcttttttttggttacccagaagagattcacttctatctccaacaatttcgtattctctcataatattcagttttaaatcgaataaaactcgcgtcaatttcgcctctttctttctgggtatatattcttttctgcttttctttttttgtttcttgggttcgagc

SEQ ID NO: 138379 - DNA, 414 bp, Arabidopsis thaliana
cagagacacaaaggcgagagctatgtcgtcgtcggtggatttcgtgacggaacaggggagatgcggcgacgatggtaacggcgccggagagacagtaaagaatggcgaaattgatcatttgctttccgaaccgtcggctccgactatttctctccctacggaatctttcctcagagcagcgacgttactcaagaaccaggttgtggaggccacgtggaaaggtggtgtcgaagctcttgcctctggttcgggtccagtgctggatccgactgtgtacacaggactactcggcacagcgttcacctgcttgaagtcgtacgaggtaacgcggaaccatcaagatctgctaacttgcgcagagataatcgacacgtgtgccaacgttgcgcgtgccacaaccaggcacgtgacatt

SEQ ID NO: 138380 - DNA, 162 bp, Arabidopsis thaliana
agtttcttttctcactcggttctaaagttcctagttttcaatggattacgtgagaacccaagtcgaagctgtttttgatgattctgaccaagatggatcaaccatctctgaatctggaagctgcgattcttcttctgatcgatcttttgctgacgagcttgg

SEQ ID NO: 138381 - DNA, 327 bp, Arabidopsis thaliana
cttcgtctttgattttgggaatactgagggaagaagaaatgcatatcgagctatcgtgcaagcaaggcctcctcacttaaacaatatttacctagcaactcagaggccggaacagcttttgagaagaactcagttaatggagcgctgggctagatgggagatcagcaattttgaatacttaatgcagcttaacacgttggctggccgtagttacaatgacattactcagtatcctgttttcccgtggattatttctgacaacagttcagaaagtctggacctttcaaatccatctaccttcagagatctttccaagccaattggtgc

SEQ ID NO: 138382 - DNA, 332 bp, Arabidopsis thaliana
tgcatctgttaaaaaagtttgaattatttgatcataaaatgttatgttcataactttgattatattttctaatgtatttttgctaaaagagtttaaagttaatcacttggagatgaaagttagtaactttagtggatcaatctcttttttcttctttgcaggggatattacagatgtagtagctcaaaaggatgtccggcgaggaagcaggtggagagaagccgtgtggacccttctaagcttatgattacttacgcctgcgaccacaatcaccctttcccttcctcctccgctaacaccaaatcgcaccaccgctcctccgtcgtcctcaa

SEQ ID NO: 138383 - DNA, 229 bp, Arabidopsis thaliana
tctagatcgcgagcggccgccctttttttttttttttaatgctaacaaatgttttttcgctctcaaaatagattgaggagatacaatccaacccaaacaaaaaaagttacgtatcacgcatatgtaattgaaaacacatacattaattggcaagacaaccgaaagataaccattatccatacttgtgaaaagtgatggatcaaacttggtaattgggatctcccttttg

SEQ ID NO: 138384 - DNA, 427 bp, Arabidopsis thaliana
ctcttttaaatcaaaacaaaatatctctttcctgttagagacaatggacggattgatcagaggtttggtcgacgtggctatcggaggaaaccaacgccgcggcggagacgatggtggtgatgatgaaggcaactcgagggacgagagatccagatctacttgggctaatgtggtttccggtgaggaagaggatcagaatcgcgcgggaggatcgtcgcacggccgtcgccagaattcagaggagaatcaatgggagaagaagggcgaaaggcttcccacaaggcattcacaatcacatgaggaggaccaggaagagaatacatatgcggctaaagtgagcgagaaacaagacttctcggagagccagcaagaggaaaatgatggttgggaaactgtgggcaacaagaaacctgcaaggcaatcacat

SEQ ID NO: 138385 - DNA, 356 bp, Arabidopsis thaliana
gtgactcaccgctccctgaacctggcttgctctccacgagccagcaacatcgagttcttattgatcattctttggaggcaagtcacaatagcaagcgttcaagaaaatcaaggagattgggcggttctgatttgaggattggtgtgagccttggatcgtctcataggaatatagaggctgagcaggcggctgctggttggccagcttggctttgttctgctgcggctgaggctgtccatggttgggttcctctaaaggcagaggcgttccagaagttggagaagattggacaaggaacatatagtagcgtgtttcgagcacgtgaagtagaaacgggaaagatggtggcattgaag

SEQ ID NO: 138386 - DNA, 332 bp, Arabidopsis thaliana
agttctagatcgcgagcggccgccctttttttttttttttttttttttttttttttttttttttttttttttttaatggagacatactataaaccccaaactcaacacgataccataaaaatacaaaaacaaaaacaaaaaacaaaagatgggacattgtcgctgtttaaaaccagaaacttatttttcctacaactatgacagaatcaaacacaaaactgtacttctctctctctctctctctctctctttcgcttcttcttctcctactcttggtctcagcatattaataaaactggctatgactttggcttttaccctttccctttttc

SEQ ID NO: 138387 - DNA, 447 bp, Arabidopsis thaliana
aaatcatcaacttaatcgtttctctcaaatttagggttttctcttttctcgaaagtcttgcggttttctgaatcatctctatctggtttgagggtttcgtttgatatctggagaaaggggtttctggaaacaaggagttcataattcgcgatcttgatctatcgatcttcatttatatataaaagcgtgaatgagattatgatggagtcgaaaggtggtaaaaagaagtccagcagtagtagttccttattttacgaagctcccctcggttacagcattgaagacgttcgtccaaacggtggaatcaagaaattcaaatcttctgtctactcaaactgctccaagaggccatcctgagtaccagcgtgcaccgatcttcataatatagttatagctttctttactttccagtttataattttcttctttcatagctccttttctgct

SEQ ID NO: 138388 - DNA, 356 bp, Arabidopsis thaliana
tatatagtactagtgtgatttgcccaacttgtcatcattatctctatctaataaatggcgttacaaaggcaactcctgaagagagctacttccgatatctatcaccgccgtgcgatctctctcctccgtactgatttctctacttctccttcgattgctgatgctccgccgcacattccgccgttcgttcaccagccacggccgtataaaggtccttccgccgatgaggttttacagaaacggaagaagtttctcggaccttctcttttccactactaccagaagcctcttaacatcgttgaagggaagatgcagtacttgtatgatgagagtggtaggcgatatctggatgcctt

SEQ ID NO: 138389 - DNA, 303 bp, Arabidopsis thaliana
ctttgcccatctctcatctccactcgtcgcattccgtaagtaacatcacatgacagagacattaatggcttcccacattgttggatatccacgtatgggacctaagagagagctcaagtttgcattggagtctttctgggatggcaagagcagtgccgatgatttgcagaaggtgtctgctgatctcaggtctgatatctggaaacatatgtctgctgctgggattaagtatatcccaagcagcaccttttctcattatgaccaggtgcttgacaccaccgccatgcttggtgctgttccatc

SEQ ID NO: 138390 - DNA, 213 bp, Arabidopsis thaliana
cccaagcgtccgctcaatctctccaactacaataatcatcaaattcttatttagcatttacacaatatggcttcaaagaatatgacaacaatcatggctctcttcctcaccttcaacctcgtcttcttgggtttcacctcagcccaacctgtgtgtcctcttaaccggtctgacttggggatttgcgtcaacgtacttggtctcatctccctc

SEQ ID NO: 138391 - DNA, 394 bp, Arabidopsis thaliana
taatttcaagaaaaacaagaaacttgttttgctatccgacgccgtaaccatgcacctatcatcggtcaaatcatcgatgatcaaccaccgtcaaccaaactaacgaaaaacgaactctatccccgtcgccttacggattgctgacatgcacacggacctacaaacatcagctgcatcatcggcgtcggcggcgacgacgactccggcaacgttgacgaagcccgttggagttaatgtgggtaaaggaaaatgggcaccagagagttggaggacgaagaaagctttacagcaaccggactatccagatttagctgcgcttgaagctgtgctagagacgatcgaagcttttcctccgatcgtgttcgccggagaagctagattgcttgaggaacga

SEQ ID NO: 138392 - DNA, 367 bp, Arabidopsis thaliana
cggacgcgtgggcggacgcgtgggttaggtttttattaaaggttttgcggcagtggaagacgacggcacgagcttcaccgaagagcgaaaatggtgaacattccgaaaactaagaacacttactgcaagaacaaggagtgcaagaagcataccttgcacaaggtgacgcagtataagaaaggtaaagatagccttgctgcccaaggaaagcgtcgttatgatcgtaaacaatctggttatggaggtcagaccaagcccgtcttccacaagaaggctaagacaactaagaagattgtgctgaggcttcaatgccaaagctgcaagcatttctcgcaacgcccgattaagaggtgcaagcactttgaga

SEQ ID NO: 138393 - DNA, 360 bp, Arabidopsis thaliana
  unsure (1)..(360): unsure at all n locations
cccacgcgtccggttctggtgttggccagattactctctaccctatacttatgaagaagggctcaacaaccgtggctctctatggtttaggaaacatcagggatgaacgtctcaatagaatgtttcagaccccacatgctgtccaatggatgaggcctgaagttcaagaaggatgtgatgtttctgactggttcaacattctggtgcttcatcaaaatagggtgaaatcaaaccccaaaaatgcaataagtgagcactttcttccacgtttcctcgacttcattgtgtggggccatgagcatgaatgcctaatcganccccaggaggtatctggaatgggcttccacatcacacaaccag

SEQ ID NO: 138394 - DNA, 246 bp, Arabidopsis thaliana
aagaagagaatcgttgagatggagagtgaagatgcttatagaatggcgttgaagactatggttaaatgggtgaagaagaatatggatccattgaagacgagggttttctttgctaccatctctcctactcattacaagggcgatgattggggaggcgaacaatgaaaaaattgttacaatcaaacgacaccgatccaagacatgaaccattggccatcagactgcagcaaaaccttaatgaaagtg

SEQ ID NO: 138395 - DNA, 346 bp, Arabidopsis thaliana
atgataatgatgattcgtgtgctcaaaagaagcaacgtgttgtttggactgttgagctgcataagaaatttgttgcagctgttaaccaattgggatatgagaaggctatgcctaaaaagattttggatctgatgaatgttgagaagctcactagagaaaatgtggccagtcatcttcagaaattccgcctttacttgaagaggatcagtggtgtggctaatcagcaagctattatggcaaactctgagttacattttatgcaaatgaatggacttgatggtttccatcaccgcccaatccctgttggatctggtcagtaccatggtggggctcctgcaatgagatc

SEQ ID NO: 138396 - DNA, 396 bp, Arabidopsis thaliana
aaaaattatcttctttttcttgtgaatttttttttggggatattgcatgtaattttttggggatttttgaggtttaatctccattgaaagaagctctggcatttctctgctacagtgttggttttcagctgcagaattggtgaaaaaagtttggtgaatttcaggagcagagtatttaagtaattttggggaattagtgagaaaatggaggagaaaggtgaaataagtccaagtggggtcgtcacagttaagggagatgaagctttggttccaagaacagagtttcaacaaaaccctagttttctccaattcgtgagtcccacaacggtagtgactcctctcgctcctccaccagctccgtcttcggctccggtaccaaccaccgtgactcctggc

SEQ ID NO: 138397 - DNA, 279 bp, Arabidopsis thaliana
cgatgaattgatacaatctcttctatctgctgagttttttgttttctggtaaacaattttatctgtggagttttctggagttgctagtggaagaatctgtctcacagaaccagaaatagtgtttgtgggagttacatgttttgcaatagagatgacatatcggggtaatgtgcatgattttagtggtgattaaagagtctgaagttgggaggaatgtcggacttgtacattcatgagctatgcgattatctttcggatgaatttcatgggaacgatgat

SEQ ID NO: 138398 - DNA, 296 bp, Arabidopsis thaliana
gcaaaagtttaatttgtctctttctctatttatctccggcgtcaatttcacggcggctacactacggttatcgaggtcattgactgtctaggagtactttgattaagaatccttcattagaccttctggttggaggtgtacagagtgtaactcttggagatgaggaagcgaccagaagaggtggccagaagactgtccttgaaagaaaaggtccttcaacatttaactgtggtgcagaaatagtttcaaagactgaagttcgagttcatcgtagtcctgaagcaactgttgatgct

SEQ ID NO: 138399 - DNA, 105 bp, Arabidopsis thaliana
attttgaattcattatcctttgctctcttcaaagactcactctgagctcttgtcttcagattcttggttttgtcctccaaacgagtagatattaactgcggagtg

SEQ ID NO: 138400 - DNA, 346 bp, Arabidopsis thaliana
aaacaaacgtgaagtttgattcctcggtggtgaaaacgttctttgtatcatctcctagtgggagtatagcttcagttggtggtaacaacaatggcggcggtggaaacgtcaagccggtgttaagcggaactgacggtgatggatccgatggatcagaacagttcagaacaatcatacccgaaggagtttctcaattgtcatcatcgaatttcgggtcagagccgtcagtatcgggacaagatgaacatagattgtggaattcgatggtggaggaagcagaacgaatgcagtattcaaatattgacgattcgttggatcaggagacgaggaagcggttcgtgtctca

SEQ ID NO: 138401 - DNA, 228 bp, Arabidopsis thaliana
tgagacacagagagtcacagtttctatctgcgaaggccaacaaatgaaatatttcaggttaagaaactatgtctgatgatgttattgtgaactagttttgagttataacactatttttactacatctctgaaaagaagactgttgatattagttttgaagagattattcccaaacaccatttgttttggtcaacatgaacaacttaattgttctttgtttattgttgc

SEQ ID NO: 138402 - DNA, 372 bp, Arabidopsis thaliana
aattaaaaaaactgattgagacagagagaagaaagattgcttgaagaagacgaagacaaaaggaggaaactttcttctcatttcaattaaaaaatccatttttttctctgggtttttctttctcatgtgattgtgtaattgattcttatcgttttctcgcaatcattacggcttcttctgaaatcaacacgctcaatttccttccttggaaaattttggggttttggttttgttcctgtttcattcgtgtgagatttgattacttaagcgctcagatgaaatcatgataattaagaagcacaagagagaggaaattagagtcctttggtcaatttattggggaacttgattgggatttagtcagcttcaaag

SEQ ID NO: 138403 - DNA, 417 bp, Arabidopsis thaliana
gtgttgattcgttcgacgttttgtctcctacgattcgtagagcgtttcagttttcgatttctccgtcgtctaactcgccgccggtgagtccacgaggtgactcggactcgtcgtgttcgttactgagtcgttcactcgggtctaatctgggaaacgacgtcgttgcgtctctcaggaatctgcaacttaataaagtgaagtcttctctttcgtcgtcatacaacaatcaaatcggaggatacggatccggattcgggtcgcctcgtggatcggttttgggtcctggtttccgtagcttaccaactacaccgacccgacctggttttatgaacatttgggagaatggcttggaggaagaaccggcgatggaacgggtcgagtcgggtcgtgaactgcgagagcagctgttcgagaagc

SEQ ID NO: 138404 - DNA, 278 bp, Arabidopsis thaliana
gcatcttcttactttcagacttgtgtccctgatttacttaaggttgctctgacctgtttggataacgtagctgacactgatggatcaatcaggggcatgagatctaagattgctgggtttcttgcaagcaacacacagcggaactggcctcgagatttgtacgagaagatagctcgaagcttttgaatctaagaaattcgaatacttgtctaaaaaagatcttgtaagaagctgttaaacccatttttgttacttaacctcgaggatcactttttgtt

SEQ ID NO: 138405 - DNA, 389 bp, Arabidopsis thaliana
atttcggattcaaatctcagatctagctcaaccatggcgttgctcgtcgagaagacctcaagtggccgtgaatacaaggtcaaagacatgtctcaagccgatttcggtcgtctcgaactcgagctcgccgaagttgagatgcctggactcatggcttgtcgtaccgaattcggaccttctcagccattcaaaggcgctagaatcaccggatctcttcacatgaccatccaaaccgccgtactcatcgaaaccctaactgctctcggtgctgaagtcagatggtgttcctgcaacatcttttccactcaagaccacgccgccgcagccatcgctcgtgactccgccgctgttttcgcctggaaaggtgagactcttcaagagtactggtg

SEQ ID NO: 138406 - DNA, 347 bp, Arabidopsis thaliana
cggacgcgtgggcggacgcgtgggctaagtcgtcgagttattatgttgcagtaggcaacgtatacctgaatgaagtgaaggcgacgattgacattcaagttgagggggtattgtatgatactacaaatgcttattacaattgctctttccctaacgacaagtgcactctaagtgttccattatttggaactaatgctgctgtactaacctcaccaggtccaaagctgaacaattctaagaatgagttctgcgcaaaactctcatatgaaccaaggtggattgcatacatagtttgcatgggtgtagtgacagcactcttgttaattgtctcgagtctcttcaataaa

SEQ ID NO: 138407 - DNA, 252 bp, Arabidopsis thaliana
aggcaggcaagtgcagcacacattcaggttttactctcaccaatggaggacttgggctgcttgtttcagagctttcacggtcctcgtggaagacgggagatttacacctgattttggatccaatgcccatgtcagaagctcttccccgcagaattctccttctttcaggagactgcggttgaagaaaccgctcctgcctccatctgttgtcacactctcgaggcgaccacgtattaggaagagtatctcgtt

SEQ ID NO: 138408 - DNA, 370 bp, Arabidopsis thaliana
aactcgacaaatatttccatagtaatgataatcctatcattgctggagcactgctgggagttgggattgtaaattgtggcattaagaacgattgtgatcctgcattggcacttcttggagactatatagacaaagaggattcatctgtcagaatcggtgctatcatgggtcttggaatttcatacgcaggttcccaaaatgaccagattcgaaacaaattgtccccgatactgaatgatgcaaaagcgcctcttgatgtgattgcatttgcttcactttctttgggaatgatatatgttggttcctgtaacgaagaagtagcccagtctattatatttgctttgatggatcgaagtgaggcagaactggg

SEQ ID NO: 138409 - DNA, 358 bp, Arabidopsis thaliana
tgatagcagaactaacaggattcttacggaaggctaatcgggttctaaggcaagcaacactgattactatgaataccttggtaacagcctatggtgataaaattggttcagaagcttatgaagttattcttgtggagctttcatctctgataagtgtttcagacctgcacatgacagctcttgcactcgaactctgctgcactctgatgactggaaagagttgtagtgaaaatatcagtttggcggtccgcaacagagttcttccgcaggcactaactttagttaaaagcccattgctccagggtcaagcacttttggatctgcaaaaattctttgaagctctggtgtatcatgcaaa

SEQ ID NO: 138410 - DNA, 421 bp, Arabidopsis thaliana
gcaaataaaatctagagaagcttgtttctagggtttcgactctcgacggccggtacgatttttcaactgcttgttctaaggaatcatgaagcctgtcttttgcggaaactttgagtatgatgctcgtgagagtgatcttgagcggcttttcagaaagtacggcaaggttgagagggttgatatgaaagctggatttgtttcgatcttgggatgcccattctcccacacagcccattgatggacaatatggaaaatccatttcctgcccaaaagagtcaacctcatccacgcaatggcactacgttcccataaccccgactttagttgcatttcattcctcttgacttttctcctcttcgagatgcacatgcctctttggtagacttataccaacctctcacagcagaggcagcaaatcaaa

SEQ ID NO: 138411 - DNA, 287 bp, Arabidopsis thaliana
gaaaaacctagaaagctctagagagaaagagagagagagatggaacgtaaagaagaagatgttagagtcggagctaacaagtttccggagaggcaaccgatcggaacttcggctcagagtgacaaggactacaaagagccaccacctgcgccgttgttcgagcccggcgagctagcttcatggtccttctggagagctgggattgctgagtttatagctacgtttttgttcctgtacatcactgttttgactgttatgggtgtgaagaggtcaccgaacatgtgtgc

SEQ ID NO: 138412 - DNA, 191 bp, Arabidopsis thaliana
gaacagaaaagttacaagtcagaacctcatagcaatggaaaactaatgtcggctgagtactatgaaaatcacctctggttaggtcctagaggaggaagctctggttcaaacaacctttaccctggtgacctaatcccttttacacggaaaccacttttcttgatcattgatagcgacactagccgtgcatt

SEQ ID NO: 138413 - DNA, 417 bp, Arabidopsis thaliana
ttctctcccttaacaagaaccatgagctcctccgatggcggctcctctagggtttcgattccttaccatctccgcaaaacccttcagaaaatcagagagtataccggaaagcagcactcggatgaggatatctttgccgtctataaggattccttcaatgatcctcatgagaccgctcagaagctcctcttcttagatacatttcatgaggtgagaagtaaaagggagaaaaagaaggagcctatagtgccagttacacaaccaagtggcagaggtggtcggaggaactttgcttcaagtaactcttatcaaggtagtggaagaaatgcttcttttaaaagggaaaatggagctaatcatgtaacaagaggttctagaactgctcagcctgccactaacaaagcaagcaacatcaca

SEQ ID NO: 138414 - DNA, 333 bp, Arabidopsis thaliana
tggaagctgtgcgggtctatctttcccggaaatgaatgttatgtcactccagtaccaccctgaagcctcccctggacctcacgactctgataacgcatttagagagttcatagagcttatgaagagatcgaaacaaagctcctgatcaatgagaagtactctttgtttttgtacgttgctgtttttaatcatggcacttaaattaaaaccaactgttttgttagtgataatggattggcattattgtttctttgctttgactgtattgagcaaccatccaacctataaaataagtaagattttgtaaaagtaataaagagataaagagatgtg

SEQ ID NO: 138415 - DNA, 416 bp, Arabidopsis thaliana
atgtttgcatatcttcatcttcttcttgagatgaagttgaagttgtcatcaatctccatgaatcataagaatgtgcttctcatcaagctcatctccgctattctgatatcttttttcgcgttccgtctcttcattctccactccagcgagttttctccaatctttgcgtcggtcaccggaaaattcgaagctcggtttctgccgccggagattatcgtaccggaaaatgaagatctgattcctcaagatattgaagtagagaagtgtgatcttttcgccggaaaatggatcccagattcagtaggaccaatctacacaaacaaatcatgcggatcactcattgacggtcaccaaaattgtatcaccaatggccggcctgacttagattttctctactggaaatggaaacctcatga

SEQ ID NO: 138416 - DNA, 143 bp, Arabidopsis thaliana
gtgtttttctaaacctatatttctatctcttgctggtggtttgatttctattatctagttcgtttgtgtattgactcatgtttctggtaatatctttcttactatgtgataaagtaatctcaaaaactgaattttagctgggt

SEQ ID NO: 138417 - DNA, 144 bp, Arabidopsis thaliana
agtgtttttctaaacctatatttctatctcttgctggtggtttgatttctattatctagttcgtttgtgtattgactcatgtttctggtaatatctttcttactatgtgataaagtaatctcaaaaactgaattttagctgggt

SEQ ID NO: 138418 - DNA, 120 bp, Arabidopsis thaliana
aaatagggttcatgtagacttgtagaaacttgctatgagaatgtctttgtcaaaagtctctctatctgtcttttatgcatcctaaaccatgggagagataatcaaagccttttatattag

SEQ ID NO: 138419 - DNA, 406 bp, Arabidopsis thaliana
caaattccttgatagaaacaaaatggaagacaataaaagaaaagtattagatgaagaagcgaaagcttctctagacatatggaagtatgtctttgggtttgcagatatagcagctgcaaagtgtgccattgatcttaaaataccagaagccattgaaaaccatccttcttcacagcccgtaacactagccgaactctcctccgccgtctccgcctctccctcgcatcgccgccgtataatgaggtttcttgtacaccaaggaatctttaaagaaatccccacaaaagatggtttagctacaggctacgttaatacgccactctctcgccgtttgatgatcacaagacgtgatggaaaatcgctggctccttttgttctcttcgaaacaactcccgagatgctcgct

SEQ ID NO: 138420 - DNA, 401 bp, Arabidopsis thaliana
atcaccagcttcgcatcttcttctccggcttgatcttctctcgtttctagatctccgacgatcggaatatcaaatccgatcgattaattctgtcaatcacacagaaaccgaaaaccaaaaaaaaaccatggcgtttgagaagatcaaggtggcaaatcccatcgtcgagatggatggtgatgaaatgaccagggttatttggaagtctatcaaggataagcttattactccttttgtggagttggatatcaagtacttcgaccttggtcttcctcaccgtgatgctacgggtgacaaagttactattgaaagtgctgaagctactaagaaatacaatgtggcgatcaagtgtgccaccatcactccagatgaacgccgtgtcacggaatttggcttgaagc

SEQ ID NO: 138421 - DNA, 399 bp, Arabidopsis thaliana
acactctcttctctttgtctctgtgactcacattcatccaatccaggaggcatgtcgacatctgaggataaaccggaaatcatcagtagagtagttcatcaggagggtgacgtggaaatcgtcgatagaagtcagaaggataaggacgaggaaaaagaagaagggaaaggtggattcctcgataaggtgaaagatttcattcatgacattggtgagaaactcgagggaaccattggctttgggaagccaactgctgatgtctctgcgattcatatccctaagatcaatcttgagagggcagatattgttgtggatgtgcttgtcaagaacccgaatccagttcctatccctctcatcgatgtcaactacctggtcgagagcgatgggaggaaactggtt

SEQ ID NO: 138422 - DNA, 374 bp, Arabidopsis thaliana
attatgatttacttttctatccttatataattatgatgatcatttcgtgtaaaaaaaaaaaaaaaaaaaaaaaaaaaaaaaaaaaaaaataaaaaaaaaaacgaagaggaagaggaaagatggattcgcaaaaaaagatagctcatgagatcggaggtatgaaaaacaatgcccttcgctttggtcttcacggcgttaagagcgatatccttagatctcatcctctcgaaacggcttacgaatctgggaagcaatcacaagaagaaatgaagaggacattgatcacccatacttatggagctgctcttcctttgaagatggatcttgatagaaaaatcctttctcggtttcaaagacctcctgaacaaattcct

SEQ ID NO: 138423 - DNA, 449 bp, Arabidopsis thaliana
attcgcgcgacacatagagtgtagagacgctttcacgagcgtttccgacgtcggactttcagctcatcatctccacatctttaacggtaaagattaatcatgcctgaaattcatttgggtgctcatacaataagatcccatggagtaacagtcgcgaggttccacatgcatgactggctcattcttctgctgctaatagtcattgaaattgttcttaatgtcatcgaaccctttcatcgttttgttggagaagatatgctcactgatctcagataccctctgcaggacaacacaattcctttctgggctgtcccgttgatagctgttgtgctaccttttgctgtcatttgtgtttactacttcattagaaatgatgtttatgacctgcatcatgcaatactagggcttttgttctctgtacttataaccggtgtcataaccgatgctat

SEQ ID NO: 138424 - DNA, 292 bp, Arabidopsis thaliana
  unsure (1)..(292): unsure at all n locations
aaagagtttgcttataatattaattaataataatattaatattgtggtgtattacattttanaaaattaaatcgtttttgttatatgtattatatacatatattaatatgtatatttaattaagttgcatctatttccgttaaaaccaacttttgtttttacgcattatcgtgttgtctatatggtctgtgtccgtaaggcatcttaatgtgttactttgacgtaccaaattattacttacattatttcatttctcaacaatctttttttatccaacattttcaaccacctt

SEQ ID NO: 138425 - DNA, 414 bp, Arabidopsis thaliana
caggaactctttcatcaagtattggaaatttaacaaatcttcaaactgtgttattgcagaacaattacataacaggaaacatccctcatgagattgggaaattgatgaaactcaaaacacttgatctctctaccaataacttcactggtcaaatcccattcactctttcttactccaaaaatcttcagtacttgagggttaataataacagcctgacaggaacaattcctagctcattggcaaacatgacccaactcacttttttggatttgtcgtataataacttgagtggaccagttccaagatcacttgccaaaacattcaatgttatgggcaattctcagatttgtccaacaggaactgagaaagactgtaatgggactcagcctaagccaatgtcaatcaccttgaaca

SEQ ID NO: 138426 - DNA, 351 bp, Arabidopsis thaliana
tcgaccacgcgtccgcattatcatgtctcttcctaccaaacgctctactttctccgccgcttctgcctccgacgactcttcttactcttctcctccgatgaaaaaggccaaaaacgacctccaccattcccctcaacaccctaataccgccgacaaggttgttggctttcatatggaggaagatccaactcccgccgccgctaatctctctcggaagaaagctacacttccgcaacctactaagaagtttgtaatcaagctcaataaagccaaaccaactctaccaacaaactttgaggagaatacatgggagaaattgcagtcagctatcagagctatattcctcaaaaa

SEQ ID NO: 138427 - DNA, 446 bp, Arabidopsis thaliana
aacatggggtacgacggctccaggtttgccttacgtagacgaggcgataactaatgctggaaactggctcattgggggtgatcttgaggttcttgagccagtgaagtacaatgatgggcttgatcgtttcaggctttcgcctgctgagttacgtaaagagttggagaagcgtaatgcggatgcggtgtttgctttccagctgaggaatcctgttcataatggtcatgctcttcttatgactgatactcgtaggagacttcttgagatgggttacagaaaccctattcttttgcttcatccgttacgtgggtttacaaaggctgatgatgttcctttagattggaggatgaagcaacacgagaaggttctagaggatggtgttctcgatccggagactacagtggtttcgatattcccgtcacctatgcattacgctggtccaaccg

SEQ ID NO: 138428 - DNA, 222 bp, Arabidopsis thaliana
attaaggtcgatgggataaagtgtcatctaagagagaatttctgattagtcatggtgatgataataatgaggtgcgtccgtctccgattcaagggtggtcacgatcatcttcatcatcatcatcggcagcagatgaggttgattctctatagtctgttaatgaatctgactatcagttgactcacagccgttgatcaagaatctgataacagcttcttcttt

SEQ ID NO: 138429 - DNA, 466 bp, Arabidopsis thaliana
aacaaaaaacacacttcactcgctacacaaggaagagagatggcgacgtcaggaacatatgtgacggaggttccattgaaaggatcggctgagaaacactacaagcggtggaggagtgagaaccacctcttccccgacgccatcggccaccacatccaaggtgtcaccatccacgacggtgaatgggactcccatggagccatcaagatttggaactacacatgcgatgggaaaccggaggtgttcaaggagaggagagagatagacgatgagaatatggcggtaacgttcagaggactcgaaggtcacgtgatggagcagcttaaagtgtatgacgtcatctttcagttcattcaaaagtcacctgatgatatcatctgtaagatcactatgatctgggagaagcaaaacgatgacatgcctgagcccagcaactacatgaagttcgtcaagagcctcgctgctg

SEQ ID NO: 138430 - DNA, 453 bp, Arabidopsis thaliana
gaaaaagtttaatttgtctctttctctatttatctccggcgtcaatttcacggcggctacacgacggttatcgatgtcattgactgtaccggagttcgatttcagattgacgccacagtttggtttctcacagtcaccgatcggggagcgtaatttcgcggatgttgataatctggagaactgtattaagtatttgaatcagagcttagtcacctctggattctctgcttcgcttgacctcttcgctaccgatcctgtttcgattgctagaacttgcaattgcgtatacgctttgattcaacagaggcaacgagatgtggaatttagagaatctgctaatgatcagagacaacgacttttatccgatatggcgagactcgaagcaaaagttgaaaggcttgagactcaattgcaagctaaagaaagggaacttggttcggtgacaagaacgga

SEQ ID NO: 138431 - DNA, 232 bp, Arabidopsis thaliana
ttttgttgcaaagattactcagagtctcagatacttgttcaaccttaaaactatatacgactataagacatcttacagagtcaatggaaacaaaccagtggcggtcgaggaaaaagatagaagcagctgcagaaacactccaagtttcttctagaagaggcagaggacaggcacgtatggttcctcctgtaagtggagttagatccgagagagctcgaaaaagtcgaagtga

SEQ ID NO: 138432 - DNA, 387 bp, Arabidopsis thaliana
aggacgcgtccgcccacgcgtccggcgatcgacaagcttccacttcttctctttctctccatactcctctgcctcaatcgccctgttcttagcgacaccgatgaagaggacattcttctcacaggaatcaagagctacagaacaacacagaatctaacaatcttaagcaagaacgaaaacgcagaatgcctagctgacgaaatcgcagaccaattcaagaacaaaccttgtaccaacgacactggctcagccacagtacctggaactgagccacagttcgcaaactaccctcagattctagcagaatgccacttgaacgtctcagacacgagagacggctcgattatgcctgcatgtgttcctcgtttagaatcaaacctcgtcctc

SEQ ID NO: 138433 - DNA, 409 bp, Arabidopsis thaliana
cccttttccgttctcattccctctcttctccgcatctctcactctctctgtgtatgtgtgatgtcatcgattgtgaatcgagctagttcagcttctcttcctaatttcctcgcatggcgtgctctggggtttcgcaccatctgctccggccgccttggtttcgctccgtctgttccagactcgccggtctccgcaggaaccaaaattttggaatcatttaaggaggaattcgaagtcggatcccgcgtggtctcgtttgagactggaaaaatcgctcgctttgctaatggttcagttgttctcggcatggacgagaccaaagttctctctactgttacttgtgctaagaccgactcgcctcgggacttcttacctctcactgttgactatcaagagaagcaatacgctc

SEQ ID NO: 138434 - DNA, 326 bp, Arabidopsis thaliana
aaaggttattaggagttcgatggggtaggatttttgtttggaaaaataagagaaaccatacggtgatgaggaagagtgagtaagctcaatttcttcctgatttgaactttatcatttttgttttttttgaaatttgtgttcctgaattcaggatagtgctctctctctctttacatactctcttcctattgtttcttgtcctttttttctttgtgtgatgtaatcttaaaagatgagagggacacactccaagatagagagagtgggcatacacccactcactactttttattcagtttcagttgaaattctcttttggttgctct

SEQ ID NO: 138435 - DNA, 224 bp, Arabidopsis thaliana
agtttgataatggagacaatctaatagacgtagtcatcaccggtgaaaatgggacatttgacggtcaaggtgcggcatggtgggagtggcttgagtccgggtccttgaactatagccgacctcatatcagcgaattcgtctcctctaaacacatcctcatatcgaatctaaccttcttaaacgcgcccgcaatcaacattcaccctgtttattgcagtcagatt

SEQ ID NO: 138436 - DNA, 305 bp, Arabidopsis thaliana
aaaaataataatatattattgattttgttatttgttattttgcaaaagtagttattctttttgttataaattcaaagaatattcattattccttttcacatatatttgtttttccataatctgggagaaaatgttgaaatcatattcaaaatttccaaattaactaacagtgattgatttgattcattcaaatccagagaattttatcatatgatcttgtgatgattttaattccagattaattactacttagttcgtttgttttgtttccatatggtgttgcgcaatggtaaatttgggatttt

SEQ ID NO: 138437 - DNA, 359 bp, Arabidopsis thaliana
aaagaggccaaggtcatagccaagaaaccgggagtggtttcagtttttcctgacccacacttccagcttcatacaactcattcatgggactttctcaagtaccaaacatcagtaaaggtcgattccggtccaccttcatcagcctcagatggatcatatgatagcattgtcggaattcttgacacagggatatggccagagtcagagagtttcaatgacaaagacatgggtccaattccgtctcggtggaaaggtacatgcatggaagcaaaggacttcaagtcttccaactgtaacagaaagatcattggagcaagatactacaaaaatcctgatgatgattcagaatactataccac

SEQ ID NO: 138438 - DNA, 407 bp, Arabidopsis thaliana
gtgtcgaacaatggcaccatcaatgaaagaaattttttctaaagataatttcaagaaaaacaagaaacttgttttgctatccgccgccgtagctttgctcttcgtagccgccgtcgccggaatctctgccggagcttcaaaagccaacgaaaaacgaactctatccccgtcgtctcacgccgtgctaagatcctcatgcagctccacgcgttaccctgagctctgtatctctgccgtggtaactgccggcggcgtcgagctaacgtcgcaaaaagatgtcatcgaggcatcggtgaacctaacaataaccgccgtggagcacaattacttcaccgtgaagaagctgatcaagaagaggaaaggactgacgccgcgcgagaagacggcgcttcatgaacgtttggaga

SEQ ID NO: 138439 - DNA, 284 bp, Arabidopsis thaliana
agaaaatcgtgtgaaagacaagacagatagacagacacgaatattcaaaaaaaaaaatttcttttctctttctaacaccagagatttcgcaatcgtgttttgatctgattcttccacgattctcccggtggcggatagaagaaacaaaggaaacccagaatgcatttttctcaatggcgtcgactacacgagaaaagtttgtatctttcatacacaacagatggctcgtcttcattgctgccatgtggatagagtcttgtgcgggtatcggtcatttgttcgga

SEQ ID NO: 138440 - DNA, 190 bp, Arabidopsis thaliana
aagagatgttcaactctctgaatgcagtctcataaaatggcagcctgctgacgatgccaccctgtgttaacccgtggctgctcctgtcaatggctgtctcaattggactccactttgcgatattgtacatcccattcttggtgcatgtgtttggaaatgtgctactgaacttgaacgattggctgctatc

SEQ ID NO: 138441 - DNA, 404 bp, Arabidopsis thaliana
  unsure (1)..(404): unsure at all n locations
agcatattcgcttcaattcaataaaaggcgaaaaatctctcactgcactttatctcgagagctcagatctccgatctagagcctttcgcttctcctcttctgttcatataacaactgaataatgtcgatctccgcccaaaatccggatatttccggcgatagacaatccggccaagatgttcgtactcagaacgtgatggcttgtcaagctgtttctaatattgttaagacctcacttggtcncgtcggcctcgacaagatgttggtggatgatattggtgatgtgactattacaaatgatggtgctactattcttaagatgttggaggtcgagcaccctgctgctaaggttcttgtcgagttagctgaacttcaagatagagaagtcggtgatgggactacat

SEQ ID NO: 138442 - DNA, 398 bp, Arabidopsis thaliana
aatcatcttcgtttatcgatgttataaaccctgctacacaagaggttgtatctaaagttccattgactactaatgaagagtttaaagctgcggtatccgctgcgaagcaagcgtttccgttgtggagaaacacgccgattactacccggcagcgtgttatgctaaagtttcaagagcttatacgcaagaatatggataaacttgctatgaacatcacaaccgagcaagggaagactttaaaggattcacatggtgatatcttccgtgggttagaggttgtggagcatgcgtgtggaatggcaaccttacagatgggtgaatatctccccaatgtgtcgaacggagttgatacatatactattagagagccattaggtgtttgtgctggcatttgtcct

SEQ ID NO: 138443 - DNA, 333 bp, Arabidopsis thaliana
ctccgcccaagcgtccgctcgtttggatctttggaaattttagagtttttttcgttttgaaatggcgaggaagaagatcagagagtatgactcaaagaggttggtgaaggaacatttcaaaaggctttctggcaaagagcttcctatcagatccgttcagattaatgaaacaactgatctaaatgagctagttgaaaagaggtagagatgagtggatgcaaaggacccataacaacattcatagttgaaccatttgttccacacaatgaggagtattatctcaatgttgtctcggatcggcttggttgcagcataagcttttctgagtgtgga

SEQ ID NO: 138444 - DNA, 371 bp, Arabidopsis thaliana
acagatgcgattttcttctccttcttcattgtgctcttcaacacttatgaacaagagcaccaccaccacgacaacgacgactacaaagaccaaagctttcgttttgtgtttctgattttgattcgattttgatgctcatcgaagagaacccttgattttgttgctgtagttcatagagattttacacattttgtggaatttagtggatttatgatgatgggtaggttagtttttgtaatctggctctataattgtctctgtttgctgctactctcgagcttgggtgacgcggatcaggccaacatagattgcttaaggacctttaaatctcaagtagaggatccaaatagatatttatcgacttgggtttt

SEQ ID NO: 138445 - DNA, 318 bp, Arabidopsis thaliana
ctccgcccaagcgtcagaagtaaatggttgaagggtaatttgggtaaaaacctcggaacggcaaattggaaataatcaacggctcagatagcttcacgcgatataaacgctaagggttttctcttttctcgaaagtcttgcggttttctgaatcatctctatctggtttgagggtttcgtttgatatctggagaaaggggtttctggaaacaaggagttcataattcgcgatcttgatctatcgatcttcatttatatataaaagcgtgaatgagattatgatggagtcgaaaggtggtaaaaagaagtccagcagta

SEQ ID NO: 138446 - DNA, 319 bp, Arabidopsis thaliana
aaaaaaatccccagttcccaaatcggcgtcctcgtttgaaaccctaattcctgaatcgaagcagatcctgatcgaatcgaaggtgttcgaatgatagctacccagtaagttcagaaccctaattaacaatgggcggtacggacgcgaatgacattctcgggttgccgaagactccactgtctttaactcaggacaagaaatctcgaccccagaaagagtcccatacaaaacccgatggcatttctcgcgaggtttatgcgcttaccgggggcgttgcacctcttatgccttcaattgatttaaagcgccgtcctcctgc

SEQ ID NO: 138447 - DNA, 342 bp, Arabidopsis thaliana
acccacacgtccgattaaagaggtttcttcttatagaaatgaatttctcttattcttccttgtcaacttggacaaccctaatgacattgggttgtcttctgcttcattcatccatttccagtgctcagctaaccccaactttctatgacaatacatgtccaagcgtctttaccatcgtacgggataccatagtaaacgagctaagatcggatcctcgtatcgctgcaagcatccttcgtcttcacttccacgactgtttcgtcaatggctgtgatgcatcgatcctgttagacaacacaacatcctttcgaacagagaaagatgcggctccaaacgcaaact

SEQ ID NO: 138448 - DNA, 139 bp, Arabidopsis thaliana
ctccgatcaaatttgcatttggagattcttgttttgtggtgttttattttcaccgagaatctcataattagatttgtttcaagctttcattgcttatgctgtttattggtgcaaccaaaaagtttattcgagtttggtt

SEQ ID NO: 138449 - DNA, 305 bp, Arabidopsis thaliana
agcaaggatctaaaggtcgttgcgggagaagccagtcgaaatgctgagagagaacgtcgatcagacttcttcaaccaaccttgggtcgaagatgcagttatacgttacttgaaccggaggccagcagctgggaacgatgggccagggagttggtgagtttcttgacgatacaagtctcttcatctgtttgagcatttttagtagaagatattgttgagattagtctggtttaaaagtgaactagtgtatctgtaatcttgtgtatgttgaaacattactactttatataattagctttgttttgt

SEQ ID NO: 138450 - DNA, 424 bp, Arabidopsis thaliana
agcccacgcgtccggaagagagaagaagaagaagaatgaagctaacacataacttctcgtttcttcttcttcttcttcttgttcacatgagctcgaaacacattcttgcttctaaagattcgtcttcatatgtggtgtacttcggagctcactctcatgtcggagagataacagaagatgccatggatcgagtcaaagaaactcactacgactttcttggttccttcactggaagccgtgagagagccacagacgccattttctactcatacacaaagcacatcaacggattcgctgctcatctagaccacgagcttgcttatgaaatctccaaacaccctgaagttgtgtctgtcttcccaaacaaagctttaaagcttcacacgactcgatcatgggactttttgggtttgggacataactc

SEQ ID NO: 138451 - DNA, 361 bp, Arabidopsis thaliana
acttttgggtccctaaaaaagctccttcgtttatcttgttttctaagttatctttttgtatgagtttcaaagcttatcattatctcactcttcttccatagctatgactactttaacgaagattcaagtgtacccacaagtcttggagcaccgtctcttcttcagagatccgatacgggtcgggtcaagattgacttgtagagaacgtagtaatagggtttatgtgcatcggtgtgagaaaaaagttgaaagaaagagaaaagttgagaaatttaagggaaatgggtcgtgggattctttgaaatctgggtttttagggtttagtaaattagggttcttgtctaaagatgagtataatcag

SEQ ID NO: 138452 - DNA, 422 bp, Arabidopsis thaliana
aggaaataatggagaagctgtcatcagctgctgtagttcctcagctcctccgcaacatcatcgtcgccgtcgttgttttcgctgatgaatctctccttcaaatctccgggaattcaaagctcctcgagaaactccgtgtatttctcgtcacgtgtttcctcttcttcttacgctctcttccttcaatcgtctctttcgcaaaccctaattcgtcagtcgtctctttcgccaacccttattcatcgaagacgaagaagaagaataagatactggtgatcaaccattgcgaagaatcgggaatcggtcgagcaatttggcagttattgtcagcgatgaatgaaattccggtgagttctagaaagtaccaagtggttcgatcgttggcggagagactaatcaacgataatcaaggagaaaactca

SEQ ID NO: 138453 - DNA, 336 bp, Arabidopsis thaliana
cgaatatgaaatatctgaatctgttgattcatttattctccgcatgaagctgtgttggtgaagtttttcggagatttagggtttctgagttgttcctcgtttggttggtgaataaagcgaagatgcttgtgaaggagtttccttggatcaaaggatttaactttgatcttcctcatgtcattgaagttgctgaagtcttggacggtgttgagaatgttgagggcgatatgtttgattctattccggcttgcgacgccattttcatcaagtgggtgttacacgattggggagacaaagattgcataaagatattgtgattattccactcctcttgag

SEQ ID NO: 138454 - DNA, 341 bp, Arabidopsis thaliana
ccaaactgcatcttggtcccattctcttggcgtttgctttgcatgggacaatggtggtgattgtgcttcacttaccaataaaaacaatcagtctcatcagccagtcctttttccctctccaatttggggtgtacgaggatgagtttgtgtttggcttacttgttgcttatatgtgcctagtaatattcggtccccggtggttagccaatttaattagaccatccatcagacccatagttcacaagtgggttatcactatcagttctttgctcaagttgagtgatttcttgcttggagagccccgaaaacaccgtgcaaatcataatatgagacttcggtgt

SEQ ID NO: 138455 - DNA, 383 bp, Arabidopsis thaliana
acccacgcgtccgcccacgcgtccgctttcttcaaataaattcaatgggtcgcttccgtctcatatctgccataactctactcaaattagggttgtgaaacttgcggtgaactacttcgccggaaacttcacttccgggtttgggaaatgtgtcttgcttgagcatctctgtcttggtatgaacgatcttactggtaacatccctgaggatttgtttcatctcaaaagattgaatcttttagggattcaagagaatcgtctctctggttcgttgagtcgtgagattaggaatctctcaagtcttgttcgtcttgatgtttcttggaatttgttttccggtgaaatccctgatgtgttcgacgaattgcctcagttaaagtttt

SEQ ID NO: 138456 - DNA, 166 bp, Arabidopsis thaliana
aaggtgtgtgtctgtgtggaaagtgtcttgttgttgtgataaaaccatttttaaaaggttatatatattccaatggtatgcgatgtagtagtaacatataaacttttgtcatggtttggtttcagacattactttatagagtgaaaatgtattgtatgtttttatt

SEQ ID NO: 138457 - DNA, 155 bp, Arabidopsis thaliana
ccgaaatgaaatcacatacagacagacattttctccgatcgtgaaattagatcggtcaatcagtgatcatattggtatacaaaacagattagagatgcagcctaatcccatcctcacattcggatcaattttggatagtccaattctcttcattg

SEQ ID NO: 138458 - DNA, 417 bp, Arabidopsis thaliana
acccacgcgtccggttatagggccgtgcttcttgatgctcagaaacaaactgagccatttgtatattattgtggtgtttttcttgtccccaagactcgtgctcatgagtggctgttctgttcagaagaaggacagtggcaggttgtcgagagttctcaggccgctcgtctcataatggtttttctcgacagtagccatagtggagccaccatggaggatatccagaatgatttatctccaatggtgacacaactagctcccagaaatgatgatgaagctcgcattccgtatatgatggcaagtgatgggataaaaaagcgtgatactgtccacgaggttacatctcctatgactgggaaagtggttgttgaagatgtggtttatgaaagcgctcctagtaatttagaagacttgtct

SEQ ID NO: 138459 - DNA, 418 bp, Arabidopsis thaliana
ggtgtaacgaaaacgctagaacaataactttgatcgttcttcttcttctcttgaatcggaaacaatggcggatgaacataagcatgaagaatcttcacctaatttggatccagcagtggaggttgtagagagggaatcgttgatggagaagttatcggagaagatccatcacaaaggtgattcgtcgtcttcatcatcatcagatgacgaaaacgagaagaagtcttcgtcatcgtctccaaagtctttgaaatcgaaggtttatcgtttgttcggaagagagagacctgttcataaggttctcggcggcggaaaaccggcagatatatttatgtggaaggacaagaaaatgtcaggaggtgtatttggcggtgctacagtggcatgggtgctatttgaattgatggagtatcatctt

SEQ ID NO: 138460 - DNA, 418 bp, Arabidopsis thaliana
agcaattctatccaaaatcaacccaaaaaaagaaagaaatatgtgggatgaaactgtagccggacctaaaccggagcatggccttggccgcctccgcaataagatcaccacccaaccccttgacatcaaaggagaagggagcagtagtaaaactgtggcggcggtggccgggagtcctggaactccgacgacgccaggatcggcgcgtaaggaaaacgtgtggagaagtgtgtttcatccaggaagtaacatcgccactagaggaatgggcacaaacctcttcgacaagccttctcacccaaactctcccaccgtctacgattggctatacagcgacgacactaggagcaagcaccgttgagccgagagggtagagtgacatgagaatgatgtaaaataattatgttctttacgccac

SEQ ID NO: 138461 - DNA, 418 bp, Arabidopsis thaliana
aggtgagagcagccatattaagcactgatgctttcttaacaaatgctcggggttatccttgcttgtccaaacgccaccaaaagttaatagcaggattttttgatcatgctgcccaggttgtaatttgtggaaagcctgttcataatcttcaaaagcctcttgattctagctcggagggtacagagaagaatcctctgcgcatatatttggactatgttgcttatctgttccaaaagatggaatcactttctgaacaggaacgcatcgagctgggttacagggattttttgcaggcacccctgcagcctcttatggacaacctcgaagcccaaacctatgagacgtttgagagagactctgttaaatacatccaatatcaaagagcagttgagaaagccttggtggacagggtacctga

SEQ ID NO: 138462 - DNA, 423 bp, Arabidopsis thaliana
aactacccaacctgtgaagctacccccattctctctcaacgttttcgttttgaaatggcgaggaagaagatcagagagtatgactcaaagaggttggtgaaggaacatttcaaaaggctttctggcaaagagcttcctatcagatccgttcagattaatgaaacaactgatctaaatgagctagttgaaaaggaaccttggctctcgtctgagaagctggtggtgaaacctgacatgttgtttggaaagcgtggcaagagtggtttggttgccttgaaattagattttgctgatgttgccacttttgttaaagaacgtttgggaaaagaggtagagatgagtggatgcaaaggacccataacaacattcatagttgaaccatttgttccacacaatgaggagtattatctcaatgttgtctcg

SEQ ID NO: 138463 - DNA, 411 bp, Arabidopsis thaliana
cgaattttcaggtttctctttccgtttgtttgaagaagcttttaagtagaattcataaaatcttgcttagcttctgggtttgatttgtttgtggtaaagttttgattttttttttagtttgagagctggatttgtgattctttctctgggttggtgaagttttttacttgcttcgatcttatagatcagagcttctagcagcgtaaaaaatgcagacgaggtatatggagaggactaatagtatgagagagaagagaaaattggaggaagatgataatcagcagcagcagcaacagcctgagcgtaaaaggccagctcttgcaagtgtaattgtggaagccttgaagatggatagtttacagaggctttgttcttctttggaaccgattcttcgccgagtggtaagtgaag

SEQ ID NO: 138464 - DNA, 424 bp, Arabidopsis thaliana
aggaggaaggtgacgaaagaatccattgaagtgatagctcagagcattggactctccactctttctccggacgtctcagccgctcttgctcccgatgtcgagtatcgcgtccgagaggtcatgcaggaagctatcaaatgcatgcgtcatgctcgacgcaccactttaatggctcatgatgtcgattctgctcttcatttcaggaatttggagcctacctctggctccaaaagtatgcggttcaagagagctcctgagaacagagatctatacttcttcgatgacaaagatgtcgagctcaagaatgttatcgaagctcctctaccaaatgcacctcctgatgcatctgttttctctcattggttggcaattgatggtattcaaccttccattccacagaattctcctctccaagccatatctg

SEQ ID NO: 138465 - DNA, 416 bp, Arabidopsis thaliana
agggaagagagagacggcgatggcggctacaggatctggacggtctcaattcatttccagttccggcggtaaccgaagcttctccaattctccactcatcgagaactctgattctaatcagattattgtctctgagaagaagagctggaagaatttctttgcttacttaggccctggttttcttgtttcaatcgcatatattgatcctggaaactttgagactgatctgcaagctggagcacactacaagtatgaattactttggatcatattggtggcctcatgtgcggctttggtgattcaatctctggctgctaatcttggtgttgtcacaggaaaacatttggctgagcaatgtagagccgagtactccaaagttccaaactttatgttatgggtcgttgctgaaattgcag

SEQ ID NO: 138466 - DNA, 416 bp, Arabidopsis thaliana
ttaaaaaataattaaacatggaacagtaggatgctaacatgactgacgagactgtagctgctcaaaagaaagtctaagctaaattagaaccaaagggcactcctgaggatgctgaaaacctaaaaaattaaggcaatgaggaatttaagaaaggaaactacgcagctgctatttaacactattccgatgcattggatattcaaagaagtgaagctatcctcactaacagagctgccgcttatatcagcttaaaaaaatataaagaagcattattcgactgtgagcaagctattggtctcaaccgatagttcctgaaatcttattaaagagcctataaatgttacatgtagttgggtgacttgcctaaggccaaggaagtctctgaagttgctaaagaccttggagatgctgaagct

SEQ ID NO: 138467 - DNA, 417 bp, Arabidopsis thaliana
aacaagacaccacaaaccctaaatttcgtcaactccacagcgactcgattcgatcaaggaaatggcgtacgcttctcgttttctctccagatctaagcagctacaggggggtctggtcattttgcagcagcaacatgctattccagtccgagcttttgctaaggaagctgctcgtccaacctttaaaggagatgagatgttgaagggtgtcttttttgatatcaagaacaaattccaggctgctgttgatattctccgtaaggaaaagatcacccttgatccagaggacccagctgccgtaaaacagtatgcaaatgtaatgaagaccatcaggcaaaaggcagacatgttctcagaatctcagcgcattaaacatgacattgatactgagactcaagacattccagatgctcgtgc

SEQ ID NO: 138468 - DNA, 243 bp, Arabidopsis thaliana
gccaacagctcggtagtagattcggctttgtttgtacagatgcattacttgcttgtgtttttgacctttcacattgtctctggtctttagttattagttttgagcttaacactacttttttttctttcttttggactcgaggttacaagaagtgcttcgagtttgtttgtttttcttttattgttttcagactaactcggtgatttatgtgggattgtgatatattatgttttcttttaactg

SEQ ID NO: 138469 - DNA, 100 bp, Arabidopsis thaliana
  unsure (1)..(100): unsure at all n locations
agcaggcaagtgcagcacacattcaggttttactctcaccaatggaggacttgggctgcttgtttcagagctttcacggtcctcgtggggngcgggagat

SEQ ID NO: 138470 - DNA, 338 bp, Arabidopsis thaliana
cagaagaaaagattgatttaaatttgagaaaccaagcgactgtttgtttactttctttattattacagatttacaggtacagacaaagttgtatgtaagtgtgattagaacagtggatgctcttatcacgggtccacttgctctctaaaaagaatattgaagctcataattacatctttagagactaaaacaatcttaatcattcaccttcaccaagtacttgtgtccagaagaaaaagaaggaaaaaaagaacacaccattcaagaaagagagaagcttcttgtgataagaaatttcacagattgggttttaacattccaaggagaggactttgtct

SEQ ID NO: 138471 - DNA, 290 bp, Arabidopsis thaliana
ctctaatgtgcctaaagctgaaatgactttggatgaaactttggaagcacttggtctcaatgctaactctaagcaagataaggttcaagagacaaaaccaaatgctgattcttccaaaaaggcttcttcacgatttgtgttggaaatagattccaagtatctgaatcttgagaacgagttgaggagaacgtatggttcaaaggctatgcgatcatttgagagtgagagtggctctcaaggtggtagtagctctagacgagggggaaggcgtggagtccatcatatcacaa

SEQ ID NO: 138472 - DNA, 334 bp, Arabidopsis thaliana
aggacgcgtgggcggacgcgtgggctgaaagggaaacctaggtttgctgatttcaatctcatgcctcctgattggggtgctaattttgctccttgggtttctactatggctcaagcttatccttgtcttgagaaagttgatttgaagaggatgtttgttactgatgatgatttagctcttcttgctgactcttttcctgggtttaaagagcttatcttggtttgttgtgaaggttttggtactagtggtatctctattgttgccaacaagtgcagaaagctgaaagtgcttgatttgattgagtctgaggtcacggatgatgaagtggattgga

SEQ ID NO: 138473 - DNA, 385 bp, Arabidopsis thaliana
cccacgcgtccgctctactcaaggaactccacaaaaattaaaatctcacaactccaacatcttcttataacacgtcttgatttatctttaagaaccaaacaaaaaaccaaaacctagaagagaaaatgggagatcaaggagtacaacaaatgcaacagcctattgttgtgtatccaaacgcttacaataaacagtatccagacccttctacaaaaccttcttcttcctctggctcaagcggaaactttgggacggtcttcatagtcctagccgtgatctttgtcttgtcggctcttgcttgtgtctttggaaggctatgtaaccgtgaaagccgcgcggctaagcagcaacatagcaagcatccgaagcatgagaaagcttcttc

SEQ ID NO: 138474 - DNA, 256 bp, Arabidopsis thaliana
tctctccctacttctcgactctctgactcaatcaacctctataaatgtaaaacgagtcagaaggaacacagacgcacatcaagaatttaaatcactaaaatggattaccccatgaagaaggtaaaaatctttttcaactacctcatggcgcatcgcttcaagctctgcttcataccattaatggttgctaaagccgtggaagcgtcacgtcgttccacacaagatctccaaaacttttacctctacttacaataca

SEQ ID NO: 138475 - DNA, 379 bp, Arabidopsis thaliana
gtgagatatcttcatctctctctctcgcgccagattttcaccggctcgatttcagattgaagatctcagacacagagctccgacatgtcgacgttcagcggcgatgaaacagctcgcttcttcagactcctcagtgcggcagccgcactcgttttcgcttgtacgggagctgcttatggtaccgcaaacagtggtgttggagtggcatctacgggagttatgagaccggagttggtgctcatgtctattgtgactgttgtgatggctggagtgttgggtagctatggattgatcactgccgttatcatcagtaccgggattaaccccaatgttaaatcttactatctcgttgatggatacgcacatctcacgtcaggac

SEQ ID NO: 138476 - DNA, 202 bp, Arabidopsis thaliana
tactaccatggttctcaagaccgagctttgtcgtttcagtggacatcagatttacccacgaataggaattaggtttatccgatctgagtctcagggtttcttgtttcttaactcaaaatgttagaaggtacttccataacaggttgaagccatccaagcttgcatggacagccatgtacatgaagcaccacacgacggatgc

SEQ ID NO: 138477 - DNA, 397 bp, Arabidopsis thaliana
ggacaagagacatttcatgaactgttctcttatcatttgtatctagcctcgcatcaaacatttcaatggttggaatcatgttacggatcgatcgtcgaacccaattgactagatcccctccttgctccagcggttgaactgggggctttcctgttattagctccagaagcacaactccaaagctatagatatcacatttctctgtcaccttcatcgtgtaagcatattctgaaacacagcaaaacatcaattagatatgttagataagcgattgtgggaagaaagaaaactgtgatgttttactcacctggagcgatgtatccgtaagacccagcaacagctgacatggactttgagtaagagagatcaatcaacttagccaggccaaaatctccaa

SEQ ID NO: 138478 - DNA, 410 bp, Arabidopsis thaliana
cccacgcctccgacccggccagccacagatctccgtggccatctctctctttctaattattacaaagaagcattattattattattttaattatataattattgtataatcaaatctctctctgtaagtaataattatcgtataaatcctccccattgttgagttaattagttcttgtaaacccatgacgttttccgtcaaagctgaaatggaagttctcatggtctcagatagccactgttgcttctgtcattgttctcgtttccttggttcatctgtttcttggtcctgtagtgccttcttttgattctattactgtaagacaagctcagaatctttgtggaccaagtaatgaatcaatctcacaagtgactaagaattcaagtcaatcccttgttgttgttgccttt

SEQ ID NO: 138479 - DNA, 379 bp, Arabidopsis thaliana
  unsure (1)..(379): unsure at all n locations
acncacncatccggtcctctggtggtttatggcactgaaggatctaagatagttaaggcgtttagaaaccttcctggtgttgagctttgtcatgtggagaggcttaatttgttgaagcttgctcctggtggtcaccttggtcggtttgtgatctggaccaagtctgcctttgagaagcttgagtctatctatggttcgtttgagaagccatcagagaagaagaaggggtatgtgcttcctcgtgcaaagatggtgaatgctgatcttgccaggattatcaattcagatgagattcagagtgttgtgaatccgatcaagaaggatgcgaagagggctgttcttaagaagaatccatttaagaatctcaatgtgatgttga

SEQ ID NO: 138480 - DNA, 308 bp, Arabidopsis thaliana
aattttctgaagtgaatgcaaagatgatgatggaagagaaacttgtgatcaacgaattggaactagggaaagagcttgctaaccgattgatgaacaatctcaaacacacttcttctgtcgattccaacagaaccttgatcgctgatatcctccgtatttaccagaatgccattttcatgttgagcgtcaaccaagacaagaacatccttaagcgaacccttgagatcgatggaaaagattctaaagacgtcttcaaacacaggaaagtatcggagaagaacacagagaaagttaaagtttttgttgca

SEQ ID NO: 138481 - DNA, 370 bp, Arabidopsis thaliana
atctgattactgattcttcattgacggtaggagtcaccacttttggcggcgattccttgttctctattttttttgcacaagcaacatttagcttctgcaaactccagttcatctctcaaccctcatatcgccgtgttttctcgctctagtaccgcgagctcggacgaaccaggaagcaatccgttaatctagaagcggtgttgagaagatgacgattacatcaaatatctctgtacagaacgataacctcgttgttcaagggaagactatccttaccaaaatccctgacaacattatcctaactccggttaccggtaatggattcgtttccggttcatttataggcgcgacgtttgaacaaagcaagagt

SEQ ID NO: 138482 - DNA, 418 bp, Arabidopsis thaliana
acaacttttcagaagatactctgcctcgcttccatggtcaacaagaatgaagatcgctcatggagctgcaacaggacttcaatttctacacgaagctgaaaatcctgttatctatcgggatttcaaagcctccaatatcttgttagattccgattacacggcgaaactctctgacttcgggttagccaaagacggaccagaaggagacgacactcatgtgtcaactcgagtgatgggcacacaaggctacgcagctcctgaatacatcatgaccggtcatttaacagcaagaagtgacgtatacagctttggagttgtgttgctagagcttttgaccggacggagatcagtagacaaaaagagatcatcgagggaacaaaaccttgtggactgggctcgtccaatgctcaatgaccca

SEQ ID NO: 138483 - DNA, 214 bp, Arabidopsis thaliana
agtttcatcattaagcactggaacgtctaccctctgtagtattacttgctttccgtaggtgccctcaaactactgagtactgactgtatctttgtttcctgttatcgttctggtttagtgttcatgtgcaagaattattactgtttgaacagcctttttagtctctgttttatttgaatcttctctggtttggaattcatagcattctaactcc

SEQ ID NO: 138484 - DNA, 146 bp, Arabidopsis thaliana
gacccacgcctccacaaacgtatatttctttcattttttctcgtaagtgttgccttttattaaaacgaagtgtgcgtatcttgttttcacgcttgctaattaaatcattgtaaacaaaaaataattaaataaagtttggtttctat

SEQ ID NO: 138485 - DNA, 355 bp, Arabidopsis thaliana
agaagggtttaagttagggcttttgaagtaaaccaattttgtgcgtctcccttttcttcttctcttcccaatttcaccgcctctctctatcgccggaaattaaccatgaaacgcggcggaagaagctacgtaacttcacctccatcattctccaacgacgctaaaaagcttctcgtctgcacaggaaacactgtctctgttttcagcgccgccactggcttacaggtcatacagctccagtaacaactctaattgttgttcctgcatcaagtcctgctcaaaaaatcctttgttattgttggactgcttctcttgatggtactattcgtcattgggatttctctggacctgagct

SEQ ID NO: 138486 - DNA, 417 bp, Arabidopsis thaliana
acaaattgcgagttctaagcctacaggtagtgaaggattgaaatgtgccattgatcacatccttgaagctgagcagaagggagaaatcaacgaggacaatgttctttacatcgtcgagaacatcaatgtcgccggtaacttctatttcttacttgtaggatacgtaatcaatcctctagacgtctctgcttgcataaggaattggacattagtgttttaagtgaatcctagaaatccggaattgtaaccataacaggaaattaggctcatgtaggttggttttttggtctcccctgaagaggctggattgtatatggttttgtgaagctgatatcttgatttctgctgaaacagcgattgagacaacattgtggtctatcgagtggggaattgcagagctagtgaaccatcctgaaa

SEQ ID NO: 138487 - DNA, 425 bp, Arabidopsis thaliana
acaattctcttctttcttgtgtgttcacattcaaagaaaatggataatcacacagctaaagacattggtatgaagagaagtgcttctgagctggctctacaagagtatctcactacaagccctctagacccttgtttcgacctcatgaaccgggattacacttgtgagttaagagatagtcttttgtggtctgagggattgtttccggctggaccttttcgcgatgcacagtcctcaatctgcgagaatctgtcagctgatagtccagtgtcagccaataaacctgaggtaagaggaggagttaggagaaccacaagtggatcttctcatgttaactctgatgacgaagatgccgagacagaagcagggcaatctgaaatgactaatgatcccaatgatctgaaacgtattagaaggatgaactc

SEQ ID NO: 138488 - DNA, 344 bp, Arabidopsis thaliana
gaaaagagtaaaaaagcacatggcctcattaccattggggcctcagcctcatgctcttgctccgccgctgcagcttcacgacggcgacgctttgaaacgccgtcctgaattggattctgataaggaaatgtctgcagctgttattgagggaaatgacgctgttactggtcatatcatttccactactattggaggcaaaaacggcgaaccaaagcagaccattagttacatggctgagcgggttgttggaacaggttcattcgggattgtttttcaggcgaaatgcttggaaactggagaatcagtagccattaaaaaggtcttgcaagatcgacgctataaaa

SEQ ID NO: 138489 - DNA, 366 bp, Arabidopsis thaliana
acgaaaaatatgggagaaatcggtggagaagaactggtcttagatgtggatgagacgattttcgtcgcggtggcggaagatgtggagagaagcaaaaccacggtgttatgggcggcgcgtaacttttccggcaagaagatttgcttgctttatgttcatcgaactgctcgcgctgcctcctggacgcacaagaaacttgttggtggtagctttaaaaagcatgatgtcaaggtgattgagcgagttgagaaacccaaagtggatgaactgatgaattcttatctccaacttttatctgaaactgagattcaaacagataaactttgcattgcggggcaaaatatcgaggaatgtatcgtagaacta

SEQ ID NO: 138490 - DNA, 424 bp, Arabidopsis thaliana
  unsure (1)..(424): unsure at all n locations
aatgggttcatggatacccaagttgctgctgctgcaacttgtgcttctgttgactaagcatgctgattcaagttctatcatcaaatatcttcctggttttgaaggccctcttcccttcgagctcgaaaccgggtttgttcctcttcatattagccttatgatgtatgactctgtgttctctaagttttggagttaaatcattaaggtacattggtgttggtgaggaagatgaagatcaaatgttctactacttcatcaaatctgagagcaatccaaaaacagaccctcttcttctctggctaagtggaggacctggttgctcttctttcactggtcttatatatgagaacgggccacttggtttcaaggttgaggcgtacaatggaagtatcnccacgttggtctctactacatattcatggac

SEQ ID NO: 138491 - DNA, 156 bp, Arabidopsis thaliana
attaaacatcattctcacttcatttctctattcagttgtttattttattattattgatatcaatagagttatcacagaagctctgcaagaggctctgctcaagacaatcatatctctacgcacatctctggttctaactctggatttacatcttca

SEQ ID NO: 138492 - DNA, 435 bp, Arabidopsis thaliana
cccacgcgtccgcggacgcgtgggcgagttctacaattgtgtgatcaatcaatcttctccgatttcaagcttctcgatcaaaagaatcatcatgggaggaggaagagctatggcgacggcggcgaaggttgctggaatcggagttggtaaaggaggattcaagggatttggatttcctccggcgactgagcagtttcgtgttaaaaccgcggcggctgcggcgtcgtctaaaccggtttcggcttcgattacatcggcggttcatccttctgttgaagaagatgggatgattatgcagagaccggtttgggatgattgggaatttgctgaagaagaaccgattcctaaggttgtttttagcaaacctcctagtcttgaagaagctaaagaagctactgaagatcttaaagaagcaattaatttggtgtatatgtc

SEQ ID NO: 138493 - DNA, 124 bp, Arabidopsis thaliana
atcctctcacactctctctcctttggattcttcagtgaggagaggaaatgtcggatcttcagacaccgcttgtgaagcccatgaggcagacgacgtgggttgattagcttgtccagttcagatg

SEQ ID NO: 138494 - DNA, 441 bp, Arabidopsis thaliana
gagctttctcaatctctctttactgattcttaatgaaagtcatctcctttctctttggtatcccttttcttcttctctgcttaattcctgaccaaaaattgtgacaagatctttcaatccaaaagctatatacattaagagctcaggtcactatctgacgggatccgtgacaatagtggttactggagtcaaaagcagctccttgaatcttgagtgttaagtagataggtaaggtaaccgttcatggcctcgaagtatggttctggagttctcccagaaaataataaggaaaagggcgataaggaaaccccggaaacatcttattccagtcaaagtgtctcagtaaacactttggcagatcaagtatcttcaactttgtcttttgctccaagcagcgacagtaaaactggaggtgaagttaaatttaatgaaaagtctgat

SEQ ID NO: 138495 - DNA, 338 bp, Arabidopsis thaliana
cccacgcatccgcggacgcgtgggcggacgcgtgggcagcaccccactattgcgcacaaagctgccgggcagttcatgcgttcaagtgtttccaacgacgttcaagtgggttaccagaggccttctatgtatcaaagacatgcaacctacggaaactactccaatgctgcatttcaatttcctccgacatcccggatgttggcaacaactgcttctcccgtgtttgtccaaaccccaggagagaaggggttcactaactttgcccttgactttctgatgggtggtgtttctgctgccgtctccaagactgctgctgctcctattgaacgtgttaagct

SEQ ID NO: 138496 - DNA, 414 bp, Arabidopsis thaliana
cttcactctttctctttctttctctctctctctctctctcgctcttctaattttgcctcaaaaacctccaattaataagaaaaagccaatggtcccccctccggaatccggttaaggcgttttgggccggaatctgacaagggatatggatgtaggagttacaacggcaaattcaatacttgaaaagcctctgaagcttcacactgaagaagatatttcacagctaacgcgcgaagattgccgcaaattcctcaaagagaaaggaatgcgcaggccttcgtggaataaatctcaggcgatccagcaagttttatctcataaagctctctatgaacctggagatgattccggcgccggaatcctccgcaagatccttgtttctcagccgccaaatccgcctcgcgttacaacaac

SEQ ID NO: 138497 - DNA, 354 bp, Arabidopsis thaliana
tttggattttaaagaggctcatttgcttccatcagggcatgttgagagatatgagggaagtcattgggtacctattggttgggctagaataactgaactagttcaaatggttcaagtaaacgctgagtggcctaatctagagttgattgatgatgaagaagatgtccctgttacagatttagcagctccgtattgggaacgaccaggtggccctacatggtggtgtcacttgactgctggaaactcttttgttgagggatggcttagaagtgctacgtggttgcatcctgcaattagtctggcattgagggatgaaagtaagctaataagtgaacggatgagacatcttctata

SEQ ID NO: 138498 - DNA, 333 bp, Arabidopsis thaliana
  unsure (1)..(333): unsure at all n locations
cggacgcgtgggcggacgcgtgggcgaacctttcaagattgcaatgcaaaaattcacaaagaagattgtggatatgatgaaagaagaaaagctgtttgagactcaaggaggacccatcattctctcacagatagagaatgagtatggaccaatgcaatgggagatgggagcagcaggaaaggcttactcaaaatggacagctgaaatggcattgggactgtccacaggtgtcccatggattatgtgcaagcaagaggatgctccttaccctattatagacacatgcaatggattttattgtgagggtttcanaccaaactcagacaataagcc

SEQ ID NO: 138499 - DNA, 331 bp, Arabidopsis thaliana
cccacgcgtccgttttagagagcctcgacagagaattatttttttcttttttattttcgtttacaagtttcaattcttctctatatattaaaaaaacaaacagatgcaaccttggagaagaaaatttccattgttcgaaacaggagttacaatgaaacagaggaagaacagtaatctctcaatcttcgtcgtagtcttctctgttttcctcttcgggatcttcatgtacaatgaagacgtcaagtccatcgcagagtttcctttctccacctcaaaacctcacgacgtccacgacgaagcgacaccgatcacagagatcacaacactaccg

SEQ ID NO: 138500 - DNA, 131 bp, Arabidopsis thaliana
agatcgcgagcggccgccctgtttttctatgttttaatctattttttgttttgttttgtgttgtagtcttttattgtattaacggaaaacatattgaggatgcgaataaaagattactgcgtttgattttc

SEQ ID NO: 138501 - DNA, 327 bp, Arabidopsis thaliana
gcttcatcatcttctttctagtctctctctctctcttcaccgcgtacacagtaacacagaccctttttccctcttactcaaggttcttctttgtcatcttgttgccgaatccacaaagaggagaataaagattcgacctttattagatattaacgactctggatttttgggtttttggagttggatccacatgggttcttatccggatggattccctggatccatggacgagttggatttcaataaggactttgatttgcctccctcctcaaaccaaaccttaggtttagctaatgggttctatttagatgacttagatttctcatc

SEQ ID NO: 138502 - DNA, 276 bp, Arabidopsis thaliana
gtgctgcactactcaacctcaatggccgcctcaacaatggctctctccacacctgccttcgccggtaaagccgtcaagccttcccccgcagcagctgaagtccttggaaatggccgtgtgacaatgaggaatcactgttgccacagccaaagggcccatcacgcagcccacggtacggatctgaacgtgtcaagtacttgggtccactcactggcgaaacaacgagctaccttaccggaaagttccccggagactacggatgggacaacgccggac

SEQ ID NO: 138503 - DNA, 187 bp, Arabidopsis thaliana
catcatgcttcatgcttctcgtggcaacaagtggtcggtcatagcgagacatttacctagaagaacagacaacgagatcaagaactactggaacacgcatctcaggaaacgtttgatggaacagggtattgatcccgtgactcacaagccactggcttctagttccaaccctacggtcgaggagaat

SEQ ID NO: 138504 - DNA, 315 bp, Arabidopsis thaliana
gctcgcatagccaatagccccaaagagttagcggagatgagcgacgttgtgttcacgattgttggaaacttcaacgatgtccgatcattgcttctcggtgacgatggtgtactctctggtcttacgcccggtggagtaacagtggacatgactagtagcagaccaggattggcgcgtgaaatacacgcacaagcgaggcgtacgaattgttgggcggtggatgcgccggtatcaggtggagacgctggagcacgagaggggacgttagggattttcgccggcggagattcagagattgtggagtggttgtccccg

SEQ ID NO: 138505 - DNA, 419 bp, Arabidopsis thaliana
cgggccgacccacacgtccagatttaacaggaatttgcggaattttgattatatcagtgagtagaagaaatgagcgcagtctcgggtgtaatctcgaggcaagttttgcctgtttgtggtagcctttgtattctttgccctgcgcttcgtgcaaggtctagacagcctgtgaagaggtacaagaagctcattgctgagatttttcctcgtaatcaggaggaaggcataaatgatcgaaagataggaaaattatgtgagtatgctgcaaaaaacgctgtgcgtatgccaaagatatcagattccctggaacatagatgttacaaggaattgaggaatgagaatttccactcggcaaagatagccatgtgtatttacagaaggcttctggtcacttgtaaggagcaaatacctctattttc

SEQ ID NO: 138506 - DNA, 414 bp, Arabidopsis thaliana
tgaagcgagcaagatacgacacgaaatcgatctcccccttgcgttttccatctccgtcgtctgctgaaaccatttgatcgatctctcagataaggttctcaggatttaggttgcttctatgagaaggacacgttgcagttggtgcttcatgtctagtttctcaaccgtatagggagtcttcaacttctgggcataagcaagtttgcaccactcgtaatggctggacagcatttgtaaaaagagtctctatggctagtggagcaattatgagattccaggagcgtgttttagggcctaataggaccggtcttccgagcacaactagtgacgtatggctcttgggtgtctgctataaaatatctgcggatgagaactcaggggaaaccgatactggcactgtattggctgcattgc

SEQ ID NO: 138507 - DNA, 434 bp, Arabidopsis thaliana
ctccaatttcttcattttatcagcttcctctcttctttagtttctgggtcactttagtttcgctctttccgaggaaaaacaaaacaaagatttgatttttctttttggtgggtttaaacagtgatttcttcttttgcccttttattggttcttattgttctcctcaaaagtctacaggattgtcggaagcaaacacacttgtccatggttatgaatttccctctaattggtgaagaagacacatgaagcagtgaaatctctgtttgtattgaatcttattagtctcaaactatgaatttccgacaagagaagtttgtaaggtttcaagattggaagtcggataagacttcctccgacgtggaatattccggtaaaaacgagattcaaactggaatattccagagaacaataagctcaatctccgacaagtttta

SEQ ID NO: 138508 - DNA, 319 bp, Arabidopsis thaliana
gtccgatcatttaaagagagcatgttcccataagcaacctcttcacttgtctttggttcaacgaagttgaccgattcacttctagagatcaaatcagtttctcaacagtaagagataagatggcagcaaagacaaactggacagtaagcatgttccttgattgtgaaagacgcaattttgtagttcagagatatcaccgagcagaacaagaaagatttgcaaggcaacgacctccggtgcctaattttcctcctccaccagcttcgccgcctccaccagttttaatcagcagcgatttgcctagaagaatgtcaagtgg

SEQ ID NO: 138509 - DNA, 442 bp, Arabidopsis thaliana
agctgatagtggtgctgctacgtcgtctataccaccaaatgtctatggtagctcagtcacggctatgcctggacagcctccatatatgagttatccgtcttactacaatgctgttccccctccaacacctcctgcaccggcctcgtctactgatcattcccaaaacatgggtaacatgccatgggccaacaatccttctgtctcaacacctgatcactcacaaggtcttgttaatgcaccttgggcacctaatcctcctatgccacccactgttggctattcacagagcatggggaacgtaccctgggctcccaaacctccagtacagcctcctgcagagaatccatcctctgttggagagtctgagtatgagaagttcatggctgagatgaagtagcatgcgtgttctgatgagaaactccttagtggagaggtgtgatgt

SEQ ID NO: 138510 - DNA, 267 bp, Arabidopsis thaliana
ccatcgcctgatccccacatcagcacaggctgctggtctcggggggcggcacagctgaccgctgtatccgcttctggaacacgctgacaggacaaccactgcagtgtatctacacggtctcccaagtgtgcaatctggcctggtccaagcacgccatcgagctggtgagcacgcacggctactcacagaaccagatccttgtctggaagtacccctccctgacccaggtggccaagctgaccgggcactcctaccgcgtgctgtacc

SEQ ID NO: 138511 - DNA, 442 bp, Arabidopsis thaliana
acccacacgtccggccgcatcaaagagaactgaagcaataggcttttgaagctctctgcataaacatgactttcaagcgcaggaatggtggcaggaacaagcataaccgtggtcatgtgaaaccaatcaggtgttccaactgtggaaagtgttgccccaaggacaaggcgattaagagatttatcgtaaggaacattgttgagcaggctgctattagagatgttcaagaagctagcgtctacgaaggttacactctcccaaagctttacgctaagacgcagtactgtgtctcgtgtgctatccattctcacgttgtgagagtccgatcccgcaccaaccgtacagttcgtaccccaccacctcgttttgccagacgcaaggaggatacacccaagcctgcacaacctggtcaggctcctcgccctgccggtggtgctcctgc

SEQ ID NO: 138512 - DNA, 311 bp, Arabidopsis thaliana
cacgcgtccgcccacgcgtccggaaaattttaagcatttgaaacaaaaaaaatgggctccaaaggtttggttccgttgggtcccctttgcggttcttctcgtcgtctcagaattacccccggaaccttcggcaaaattgaattcaaaaattaaggaaacggtaaaactcatataacttggcaacgtgaacaatggaggaaattacaataacggaggaggttaccagagaagagggggtaattaccagggaggaggaggtaattaccaacgaggaggaggtaattaccagagaagaagaggaatataccaga

SEQ ID NO: 138513 - DNA, 414 bp, Arabidopsis thaliana
agctcaagcttgcagagatctttcactttaatccttgagaagtagcaaaaatggctgaaaaggcggtcaccatccgaaccaggaaattcatgaccaacagacttctctccaggaagcagttcgttattgatgttcttcaccctggaagagccaatgtttcaaaggctgagctgaaggagaagctagcaaggatgtacgaggtcaaggatccaaatgcaatcttcgtattcaaattcagaacccactttggaggtggtaaatcatccgggtttggtttgatctatgatactgttgagagcgctaagaagtttgaacccaaatacagacttatcaggaatggacttgacactaagattgagaagtcaaggaaacaaattaaggaaaggaagaacagggcgaagaaaatccgtggtg

SEQ ID NO: 138514 - DNA, 376 bp, Arabidopsis thaliana
acccacgcgtccgattcatcgtctcttctctgctctgctttgctctagatcacaaattaaaagacttcattagtcttcctgtctccaccattaccttcttcctttttaactcagccacgacgagcagactattgttctgttttccttgtataaaaatggcgtcgatgatgtttaccgattgctcctccaccacgacgtcgcgtctcatccatttgaaccgaagcagcggtactttcctcctccgtcaatgcgtcggccaactccgtttacagaccactgcttctggccgtggctgctgcattcgctcctcttcttctcccatttcttccatttccgctgatacaaaatcagagggtggcgcaattgtaatagatgg

SEQ ID NO: 138515 - DNA, 380 bp, Arabidopsis thaliana
acccacgcgtccgcccacgcgtccgaaaatcgtccattgaagtgaacagtcagcatcgttttgcttgcttgtgcgtttctctcgaactctctccatggctgttgcgctccaattcagccgattatgcgttcgaccggatactttcgtgcgggagaatcatctctctggatccggatctctccgccgccggaaagctttatcagtccggtgctcgtctggcgatgagaacgctccttcgccatcggtggtgatggactccgatttcgacgccaaggtgttccgtaagaacttgacgagaagcgataattacaatcgtaaagggttcggtcataaggaggagacactcaagctcatgaatcgagagtacaccagtgatatat

SEQ ID NO: 138516 - DNA, 324 bp, Arabidopsis thaliana
aaatcgaactctaaaccacactgagatggcgaaatggtggcgaggcctgagatccgtgacggcggaggtggctgatcttccggcttcttcattcggtcgatcgattcgatgtattcatcagtatcagacgatccaggcgattccacgtgaagctacgggtcgaggagtatcggctcgggatcggacgattggtcgtattcccgccgtcgttttcccgcaatcgcttctagatactgatgcttcgaagcgaggcgtgtcgaggaagcagctattgacggcggataagaagcagatcaagtctattattgactctgttggtctccc

SEQ ID NO: 138517 - DNA, 391 bp, Arabidopsis thaliana
acgtcagcaaatttgtgtgatcttctccagaagaaacttgaggaactttaagctaaacctctgtagttttcagattgattcgttggtggaaagcgtctaaattttgcgtaaatggcggcagctcttgtacgcagattctgccggggatcatcttttccggtctctggtcatggatataggatgctatcgacggttgaaaatgtatctgaaagtggtaaatcgatgaatctatactctgctattaatcaagctcttcacatcgctttagagaccgatcctcggtcttatgtttttggggaagatgttggatttggtggtgtcttccgatgtacaacaggattagctgaacgttttgggaaatctcgagttttcaacactcctctctgcgagc

SEQ ID NO: 138518 - DNA, 427 bp, Arabidopsis thaliana
aggtgctgtagcggatgtagccggcgccacgaaactagcagccactgcagatgtgtctgtgcttgtgatcggtgccgatcaatcaatcgaggcagagagccgagacagagtcgacctgcatcttcctggacagcaacaagagctggtgatccaagtggctaaagcagcaaaaggaccggtcttgctcgtcattatgtccggtggaggtttcgatattacattcgctaagaatgacccaaagatcgccggaattttgtgggttggttatcccggagaagccggtggtatcgccattgctgatatcatctttggccgttataatccaagtgggaaattaccgatgacgtggtatccacagtcgtatgtagagaaagttccgatgacaataatgaacatgagaaccgataaagcaagcgggtatccgggt

SEQ ID NO: 138519 - DNA, 394 bp, Arabidopsis thaliana
acccacgcgtccgcccacgcgtccgaacaaatcttaaacgttttactttgtgctgcactactcaacctcaatggccgcctcaacaatggctctctcctcccctgccttcgccggtaaggccgtcaagctttcccccgcggcatctgaagtccttggaagcggccgtgtgacaatgaggaagactgttgccaagccaaagggcccatcaggcagcccatggtacggatctgaccgtgtcaagtacttgggtccattctctggcgaatcaccgagctaccttaccggagagttccccggagactacggatgggacaccgccggactttcagctgaccccgagacattcgcaaggaaccgtgaactagaagttatccacagcaggtgggccatgctc

SEQ ID NO: 138520 - DNA, 425 bp, Arabidopsis thaliana
cggacgcgtgggttgtcatggaatttatacattccactcctcaaagtacttgaatatcttccacgggggagtccttcggaagcatgcttgatgaaaatatttgttgccactgtggaaacaatactcagtagaacttttccgcctgaatcttccagggaactaaccagaaaagctagatcgagttttaccacaagatcagcgaccaaaaatcttgctatgtctgagcttcgtgctatggtccatgctctctttttagaatcatgcgctggtgtggaattagcttcacgcctactttttgttgtgttgactgtatgtgttagccatgaagcacagtctagtggtagcaagagaccgagaagtgaatatgcttgtactactgaaaatattgaggcgaatcaacctgtatctaacaatcaaactgctaa

SEQ ID NO: 138521 - DNA, 418 bp, Arabidopsis thaliana
actgaactccttggtggcattgagcaactgctgataggtaaatgatgatccaagactcccaaagtttatagagactcctcctcttgagggaagtgtttcatcaggaggtaatgggccaacaccgttgtgtcttcctctaggatgattacttgttgatgatctgtttcttcgacggacacagaaactcactgttattggtaacactatgagaatgagcataagcaatatagaccctccaactgcagcaagtataactattttcgtgtggcttaaccaggaagttttagaactcttcttctcttcatgttgtccgaaattgttgaaagttaagcccttttttgaataaaacaaagtgcaatccgacaacttccgctgcttctctgggccctgaagacaattgttgctcaatgaagctctg

SEQ ID NO: 138522 - DNA, 440 bp, Arabidopsis thaliana
ctaacaattacatcaactgattcagaagatgaagcagaggattctgatgatgaaagcatggagaccattatcctgggcgacaaaagaatagggatcaaaacaagtgttctagaggaaaaggccacggcttgtaacatgctttgttgctatgctgatgagttaaaagaaggattttttccttggattgatcaggttgcacctacattggttcctttactgaaattctattttcacgaagaagttagaagagcagctgtttcagccatgccggaactaatgcgctcagccaagctggcaatagagaaaggggaatctcaagggcgagatctatcatatttgaagcagctttctgactacattattccagccatgctggaagctttgcataaagaacctgatacagagatctgtgtgagtatgttggaagctatcaatgaatg

SEQ ID NO: 138523 - DNA, 335 bp, Arabidopsis thaliana
acttgtacaggttacctcaaattctgttagattagttagttctacaactagagagttgcggaatacatgggatgccccagctggattctctgttaatgttgcaactgcaaatgcgagccaggttcttttggccactggaggtgggcatttggtctatctagaaattggggatgggacattgaccgaagtgaaacatgtcctgttggagtacgaggtttcatgtcttgacatacaccccattggtgataatcctaattacagtcagctatctgccgtctggatgttgactgatataagtgtgaggatttttgtgctaccatacatgactcttatta

SEQ ID NO: 138524 - DNA, 309 bp, Arabidopsis thaliana
aggcgacgaggagagagaatttcaaatctctctagatcaaagtgaaagacaagtacaacaagtaaccgacaaagtgaagcgcaagtacttgtttctttccttttcctttaatatttgataatttgagaaaagtaaaaatgataaaatatatatagtttctgtccgaatcggcctatcttcacaaaatctcgattccaatcaagaatttatggcaggaaaggtcgatgaatcaatcagatgatgatcgatctagagatctctaaatgtgtgttgttgtgaattgagaatgcgagagcattcgacgatgta

SEQ ID NO: 138525 - DNA, 374 bp, Arabidopsis thaliana
cccacacgtccgattggccaaggctttggccggtcagacaaatgagagtttcttcactgccaacgctgacgcattgtcttcgaggaggtcttccccaagagtcaccaatgagtctgtccagaaggctgctgctgctttgaagggatctgaccaccgccgtacaactgaagttagcgcaaggctagatgctcagcagaagaagcttaaccttccaatcctcccaaccacaaccattggatccttcccacagaccgtggaactcaggagagttcgccgtgaatacaaggccaagaaaatctctgaagaggattacgtcaaggccatcaaggaagagatcaagaaagttgttgacatccaagaggaccttgacattg

SEQ ID NO: 138526 - DNA, 185 bp, Arabidopsis thaliana
agtaaatcaccaatcaagccttctttgtctcatgcctctagtagctttttacttatttattttcagactaaaacactcagtttttgttttcacattttagttgcgtttgaagattttgaattcgaggatatgttttgtttgaagaatttattatcatctcttattacaccatcgtcattttcagg

SEQ ID NO: 138527 - DNA, 248 bp, Arabidopsis thaliana
ggttcttttcttcccggcaatgaggccaccacaggaggagtcagcagccgctcaagctcctttaacagaagagaagaaataaggagtctacacaagttttctgactaagcttagtcaattcgctattatgcactctgttctcaagttacttgtaattgcagaccatatttttcaaaaaaaaaataccaattaattattatcaaaaacctttgtaagacttttttgcaattagtagtgatttcacttat

SEQ ID NO: 138528 - DNA, 355 bp, Arabidopsis thaliana
aactccaaaagcatctctctgtttcttctcctctcttcaagctttttgtttcgtctcagtcgtcgtcatcatctctgacagatctaagaacaagtttcgagattggatattgacgacaacgatatgggacttggaggtagtgaaacaatggaatgcaagtgtggtatgcctctgtgtatctgtgtagctcctcccaaatcaactgataaaccaaacccacctgctaccattgctcctgtggttcttcctcagttgaagtcagaggcttcagcaaaaagtaaaggttccacttccagcagcaatgctagatcagctctaaatgctggactagacaccccccaaagagactatgaag

SEQ ID NO: 138529 - DNA, 336 bp, Arabidopsis thaliana
tggagatgacaatcctgtgtttatgattcaagaagtgtctactgaggaacctcgaggttccgtgctcagactcacattcgcctgtaactcttttctatcatggtcaactatgtcaggcgttcttgatagtgcttcgatttgttgcaagaagatacaaatctttgagaagaaggggttgactctcggggttgttcttcttctggatcaatctgggcaacatagtttgtttaaaacccgggtagaaaacaccctcaaggttgcaaccaaaaagccaaaaccgacatctgttaagctccctttcgggctttgtggctgtcaagaacagaacggtggtgt

SEQ ID NO: 138530 - DNA, 352 bp, Arabidopsis thaliana
  unsure (1)..(352): unsure at all n locations
atggcttctctcctttagagcgcatcaattcagactgttgtgtgtttcccttacttgggcggagtcattgagctgggcgtcactgaattgatttcagaagaccataacctgcttcgaaacatcaaatcttgcttgatggaaatatctgcacaccaagacaacgatgacgagaagaagatggagattaagatcagtgaagagaagcatcagcttccattaggtatttctgatgaagacttgcattacaaaagaaccatttcaacagtactcaactactccgcagatagatcaggtaagaacgataagaacattcgtcatcgtcagccanatattgttacttctgaacctggct

SEQ ID NO: 138531 - DNA, 354 bp, Arabidopsis thaliana
gacgaccactcatagtaatcgttatcttcatttatataaccgccggcgtgaaaatcgccgccgcggatgagccggtgccgacgccatggccacaccagttccacgcgctaatgttcatgaattactccggcgatctctcgatgatcgacctttggtacgactggaccaacggtcgtaatttcaatatcatccaggagcagctcggtggtattacctacgaccttgaatggaacaatggtacttccttcttttacacgctcgacgagtcaaaatcgtgccgctccggtcagctcgaggttggaatactgcgaccaaactggctagatggagccaagtaccttggtcaacagaacg

SEQ ID NO: 138532 - DNA, 347 bp, Arabidopsis thaliana
atcaaagctacaaaagccataaacgaaaacattcttcttgaaatgccagttcccattgttatcaaggaagcaatacctaaatctggaaagaacagcctcggtgatgaactgtacaagatgttggctgtggaatctgcaacagtagatgaaatctttatatcgctcaatctgggaaccgaacatgcagcactcgagacagttaacaagttagaatctgctatgtttgcttggaaagaaaggattacagaacaaggcagcaatggtaaatcccctgtaagagcatcgtggtcattcgctaaagatccgttgtctgaaattggtcgcaatgagtcactcttgaaccgagc

SEQ ID NO: 138533 - DNA, 358 bp, Arabidopsis thaliana
  unsure (1)..(358): unsure at all n locations
accacgcgtccgaagacgttaaacaaaccatctctcgattctctcgggaaaacactccaactacgaatctacaatcatcgagcacatacaaagaggaagatttcanatccaatcatcaatcaccccttttgattgatcggattcaatctacttgccccttaaattaatggttgatccgtttgaatttggtgtttgttgaggcggaaatctcaaaaatgaaccaccttcaaggtaaccttcaatggcttcttcttccctctcttgtggtttccccttttagcgaggctcgattcgttgtggagaagaatagtttgtcggtgacttcgccggagagtataaaaggaactcatgatagtgc

SEQ ID NO: 138534 - DNA, 366 bp, Arabidopsis thaliana
gttgttcccttatataaagaaactcttcctttcataccaaaaaaaaaaaaaaaatccattttcatttctcctcttaaaaaaccgccatgacctctctctccaccgccggttaccttcttctccttctccttctccctataagctacgacggtggcttcatcggagccgccgatgcagaacatgacctcagagccactgatctccataatcatcgccatcgtcgccaccgtaaccaccatcgcggagaagagtttgagtactcagccatatcatgtagagcttactcagcctcattggacgagtttggcgccgtaggagacggtgtaacttcaaatacagcggcgtttcgcgacgcggtgtcacaac

SEQ ID NO: 138535 - DNA, 352 bp, Arabidopsis thaliana
cccacgcgtccggactactctcatcattgctcatcgcctttctaccattcgaaaagctgaccttgttgctgtgctacagcaaggaagtgtctctgagattggaacgcatgatgagcttttttccaagggagaaaatggagtctatgctaagctaattaaaatgcaagaagcagctcacgaaaccgccatgagcaatgcaagaaagagtagcgcaagaccgtcgagtgctagaaactcggttagctcgccaataatgactcggaattcgtcgtatggaagatcaccttattcacggagactatccgatttctcaacttctgattttagcctctccattgacgcttcgtcctac

SEQ ID NO: 138536 - DNA, 406 bp, Arabidopsis thaliana
caacggtcgagagatggtgggtctggttcgagaacccttgaacgtatatgacaataatgcaatcagagtactcaacacgcgatctgagcaagtgggtcacatcgagcgtacagtagcagccgttctcgcgccgatgattgattctcacacgatcgtcgtcgagggtattgtacccaatactcgttctaactccaataggtacagaatcccttgtcaaattcatgtatttgcaaagttagaagcgtcctctactgtgaaatcgacgatttctagaggtgggttagtattgatttcggagtcagatacatcgtttgggttatctgaggctgttgtggttaaggaacagatgggaaatggagataagaggagtgttgataagatttttaaacttgttgatgagaatgtg

SEQ ID NO: 138537 - DNA, 427 bp, Arabidopsis thaliana
  unsure (1)..(427): unsure at all n locations
cggaagagtattcaccagataacctaatttccaagactgagaggtttctctctcattccgtctacaagagcttgcgtgaatccattaaagctctcaaagcttgtgagtcagtctctcctttagccggatcgcttggtataacggaacagtgcatcgactctatagtctccagagcttcctcagctgatccttcactcttcggttggccagtaaacgatggcggcggaagaggaaacatctccgccaccgatctgcaacttatacccggcggcgcggcgaaatctcgaaagaaaccgagtagagattcgaacatggagctgtggtttgaagatctgacgcaactgagtcttccgatcttcanaactgtgatcctatcaatgagatcaggagatctgagctccgatatcatagagagctgtttgatttg

SEQ ID NO: 138538 - DNA, 355 bp, Arabidopsis thaliana
tcgacttattcatatatatgttgctttttatcacataaagctcgttgtgcaaaagaacagaatgagttctaagtttgatatcggctccttaagcatagtaatgactctgcttatttgcttcttattattatctttggctccaaaacttgaggctgagctcgcaacggtccaacatgctccaaaccccgatggctctatcagttttctggtgattggagattggggtaggcatggactctacaaccaatcccaagttgccctccagatggggagaatcggggaggagatggatatcaattttgtggtatcgacgggtgataacatctacgataacgggatgaaaagtatcgatgat

SEQ ID NO: 138539 - DNA, 358 bp, Arabidopsis thaliana
aggaattctgatagacttgattggtttttttctttctttctttctcttttttatgtggaaaggattgaagaaccctaatttgattcataagaaagacactatttttagattttgcgtttggttgattagagtaaccctaatttgttactcggatctaatcgtctactttgacttaagatgaatgatctgtaaatatttagatctaacatgtcttgagaaagtttcaattttttcttaacggtgaatttgatttcttattcttcagtatatatactcttccacaaaggaagatgctcaaggtccctgaacaccaagttgctggtcacattgctagtgatgggaagctcggtccactcgt

SEQ ID NO: 138540 - DNA, 148 bp, Arabidopsis thaliana
aggacgcgtgggcggacgcgtggggcctaatttaaagttataaaggaaaaaaagggagatagagaatccattaacgctcatattgctgtaaaagctagttaatggatttatgggttttttcttcatctaaagatctttctttagtttg

SEQ ID NO: 138541 - DNA, 387 bp, Arabidopsis thaliana
cccccacagatgaatctcaaaatgatggtagtgctgaaaaggaggaatcagacgaggttaagaaagtggaggattttgtaaccgagaagaaggaagagttgtcaaaggaagagttggggcgtcttgttgcctctcgttggacaggagagaaatctgataagccaactgaggcagacgatatccccaaagctgatgatcaggaaaaccatgagcacacgcccatcactgcacatgaagcagatgaagatgatggatttgtttcagatggtgatgaggataccagcgatgatgggaaatacagcgaccatgaacctgaagatgattcctatgaagaggagtatcgccatgattctagttcttcatacaaatctgatgcagatgatgatg

SEQ ID NO: 138542 - DNA, 331 bp, Arabidopsis thaliana
ggatgatttggaagcttactattctcactataatttaccggcgatggttcctcctccgccgccgggagtttctccgattccaattacttcagctcattccgtctatttgcctacccatgtctcaattggagctcgcgatgaggttaggacgcttttcgtcgccggacttcctgaagatgtcaagcctcgggagatctacaatctctttcgtgagttcccaggatatgagacttcgcatctccggagctcagatggagctaagcccttcgcatttgctgtgttctcggatctgcaatcagctgtagccgtgatgcatgctctcaatggaatg

SEQ ID NO: 138543 - DNA, 370 bp, Arabidopsis thaliana
acggacgcgtgggcggcgaaaaagagagcgaagcttgaaatctccgattaagccatgaatgctcccgaacgatatgagcgattcgtcgtccctgaaggcaccaagaaggtttcttatgatagggatacgaagatcatcaatgctgcttccttcacggttgagagagaagaccatacgattggaaacattgtccgcatgcaacttcatcgcgacgagaatgtcttgtttgctggataccaacttcctcatcctcttaagtacaaaatcatagtgaggtggtttctgtatgtagattcacacaacaagccagtcttccccaatgcaagcatacaaccaggccatcaatgacttgggcaaggagctcgactac

SEQ ID NO: 138544 - DNA, 423 bp, Arabidopsis thaliana
aatgatgattcctctccttttcttcctcaactcataaacccgatcggccgattccttcacaattatccttaaaattttcgattttgattattgggtttctctctgatcatggcggttgttgagactggagcagcagctactgctgctgatgcaggaggagtcgtgatccagccgccgccgtcttcaccaccatcttcaatgactagtcaagattccggcgtttcttccgatgatcagaaccatcactctaggatcgatcaagttctccggcacgatcaaggtctttacagcaagatcgggtcacacgtggcgagatccgacggcgttgacggtggtgagagctttaagcgtgatatgagagagcttcaggagcttttctctaagcttaatcctatggctgaagagtttgttcctccttctctg

SEQ ID NO: 138545 - DNA, 411 bp, Arabidopsis thaliana
aggtccctccacttagagagaagcagacagaacataactaaaatcgagaaaaatggcaaacagtggtgaaggtaaagtggtgtgtgtaacaggagcctccggttacatcgcctcatggctcgtcaagttcctacttagccgtggctacactgttaaggcctccgtccgtgatcccagtgatccgaaaaagacacaacacttagtttcactagaaggtgcaaaggaaagacttcacttgttcaaagcagaccttttggaacaaggttctttcgactctgctattgatggttgccatggagttttccacactgcttctccattttttaatgatgccaaagacccacaggctgaacttattgatcctgcggtcaaggggacgcttaacgttttgaattcgtgcgccaaagcctc

SEQ ID NO: 138546 - DNA, 413 bp, Arabidopsis thaliana
caaactgctgaagtggtgactaacgcggataaccagttggaagctagcagtggtatgacaactggtccagctacagagaagaagagaaagcgaacgaagggctcaaaagatcacatcaaacaatctactgctgctgctactacaaattcaagaaaaattgtgaatgagataaatgaattacctggaaatggagattgtggtgatgctacttctaaatctcttccaatcccagaaagagaaactcttcaaaatcctcttgtagaagcaatacaaaaagaaactgagttgggtgtgaaaactgtcgaagatgtgggaacaaataatatggaaactgatactctagtgagccacccggaaaatcatttggtggccaacagtgagttgacatctactccagttactgagaagaagaa

SEQ ID NO: 138547 - DNA, 429 bp, Arabidopsis thaliana
  unsure (1)..(429): unsure at all n locations
gacactaccactttccattacaatctctttgaacaaacctcctctgaggaagagaatagtaaaaagaatcttctggatatggtagagagaagcgcttattatgcagtccgagtcattctgaaacgtttgctttcggaacacgaaaacgctcggtttgtagtcactggtcacagcttaggaggtgctttagcgatactgtttcccacattgttggtgttgaatgaggaaacagagataatgaagaggctgcttggagtttacacgtttggacaaccaagaatcgggaacagagaggtcgggttattcatgaaagctcaactgaatcaacctgtggatcgatacttccgagtcgtttactgcaacgatatcgtcncgagattgccctacgacgacaaaacgttcctctataaacatttcggactctgtctt

SEQ ID NO: 138548 - DNA, 424 bp, Arabidopsis thaliana
ctcgagtcctcgtcgctcgtagacggtgccaagcttcagtccttagaccctacggcggtttaaagccctttctttccttctgcagcttacctaactccactgcgccgttccgggattcgttgagagcaaaatccgatggattggctcgggcctatgttaccggagcgccgcctatcgtggaagaaccagacccaaagattgaagaatccaaatctgaggctgaatcgaaggatttaattagttgggggcttctgtggagcttgatgagcaagcacaagctcaggctcagtgtttgcttattgactctccttggatgcagtacttgcactctctctatgcctgttttttctggtagattctttgaagtactgattggggtgagaacggagcctttgtggcggctgctgagcaaaattgctgtttt

SEQ ID NO: 138549 - DNA, 422 bp, Arabidopsis thaliana
acaagccgtctgaacgtgaggccaagcatctagaggccaatctccatataagctcagtctatgtgaggtacaatcaatctcttactggtctcaggctgatcgatccttgggacagaaacttgcaagccgtctgaacgtgaggccaagcatctagaggccaatctccatataagctcagtctatgtgaggtacaatcaatctcatcgatctatcatcgcttggtcgttaaatccgtcaaaaagataatcacatgtgttgttgtttcttgtctatataataataatgcttgtaatcccaaaaactcatgtttccttcctttctactctcactgtctttgtaatctctttttacaataaatcaatgtttcttgaagcagtaaaaaaaaaaaaaaaaaaaaaaaaaaaaaaaagggcggccgctct

SEQ ID NO: 138550 - DNA, 378 bp, Arabidopsis thaliana
cccacgcgtccgcccacgcgtccgaaaaagctgaaaattgggggaagaagagagaagagtttcatcgtcactggaatcaatagagtcaattggcgggagaggttagtctcgaaaagaagtggaagccctagggggaaactttctcgctcactcgctcgtctgcaaacaccatggaagacagtcctcaaggccttaaaaggagtagagatccggatcaggatcaggatgacgacagcggcgaggctggcaaggccgacggaagcggcggagagaatcaggagcgcagcagcgaccagattgagctcgatgacgacgatttccaggaaacccgtcccaagcccaagcgtagtcgcacccatcctcctcaacagaatctca

SEQ ID NO: 138551 - DNA, 390 bp, Arabidopsis thaliana
caaaaccttacccagctcactgatctcagcctgcaaaacaattctcttagtggtccaattcctaacctccctcctcgccttaaatacttgaatttgagcttcaataaccttaacgggtcagttccatcttctgtcaagtccttcccagcatcctcatttcaaggtaatagccttctatgcggtgctcctctgactccatgcccagaaaacaccactgcaccatctccttcaccgacaacaccaacagaaggtcctggtacaaccaatataggtcgtggtaccgccaaaaaagttctctccactggtgctattgtgggcattgcagttggaggttcggttctgttgtttatcattcttgccatcataaccctttgctgtgccaagaaaaga

SEQ ID NO: 138552 - DNA, 428 bp, Arabidopsis thaliana
aacaaagcaactcgactcgaacaaacacatccatggctccttctgcgcaacctcttcctgtgagtgtttcggatgaaaaatatgcgaatgtcaagtgggaagagttggcattcaagtttgttcgtacggattatatgtatgttgcgaagtgcaatcatggagagagttttcaagaggggaagattcttccttttgctgatttgcaacttaacccttgcgctgctgttcttcagtatggccagggtttatatgaaggactgaaagcttacaggacagaagatggtcggattctgctattccgaccagaccaaaacggtctccgccttcaagccggagctgacagactctatatgccttatccttcggtcgatcaattcgtctccgccatcagacaagttgctcttgccaacaagaaatggattcctcct

SEQ ID NO: 138553 - DNA, 427 bp, Arabidopsis thaliana
aggcgaaaccactgtccctcgaatctcagacgatcgaatttgtaaaaggaaagccgcttctcctcctcaaatgggttggctccgacccaaccctacctgcctttctcctcaactcccacaccgatgtcgttcccttcgaggactccaagtggactcaccatccgctccaagctcacatggaccaccatggcgacatctatgccaggggttcccaggacatgaagtgcgtcgggatgcagtacctcgaggccatacgcaagctccaggcttctggcttcaagccactccgatccgtctatctctccttcgtccccgatgaagagattggcggccacgatggcgcagagaagtttgctgaatcccaattattcaagagcttgaacatcgcaatcgtgctcgacgaaggcctgccatcgcctactgagag

SEQ ID NO: 138554 - DNA, 402 bp, Arabidopsis thaliana
  unsure (1)..(402): unsure at all n locations
acggacgcgtgggcttttccaagtttttaaagagagagagagagactgaaagaaaaacaaaaaacagagagctttggttccggatcttgattatggcaaatgggtgggtcaaatcgttacaatgcaagtcgaaagctttcgatgatgtttacaatccgattaaaaacccgaacccgaatccgagcccgagtccgaaacatctcatgtcaagctacagttgcagaaaaagcacacagagtctaaaagatgtgatcgaaaccaaaaaacccaaacctaaaccgaagaaacccaatccaaaaccggataaacgagaaaccgacccggttttatcaccatcaacccggatccgatcaaccggagttcgtgatcgtgatccgtntttaccgacattgacggagctat

SEQ ID NO: 138555 - DNA, 421 bp, Arabidopsis thaliana
aacacaggaacaacttttgcagctacaaatttggataatctaagcagagaattatgtcatcgaaccaagaaaatgccaaggaagagaaactccatgtcaaaataaagacgcaggaattggatccaaaagagaagggggaaaatgttgaggtggagatggaagtgaaggcaaagtcaattgagaaggttaaagcaaagaaagatgaagagagtagtggaaaatccaagaaggacaaagaaaagaaaaagggcaaaaacgtggactcagaggtaaaagaagataaagatgatgacaaaaagaaagatggaaaaatggtctccaagaaacatgaagaaggccatggagatctggaggttaaagagagcgatgtgaaagtggaagagcatgagaaggaacacaagaagggcaaagagaagaaaca

SEQ ID NO: 138556 - DNA, 409 bp, Arabidopsis thaliana
cccacgcgtccgcggacgcgtgggcggacgcgtgggcaccgcacctattgatcccaatgccaaagaggtaacgaagcgcgtggactcaaacgagaaacattggtcgggatggaactggagaacggaaggtgacgttatggttaacggagcttttttcgtgccgtcaggtgacggagtgagcccagcgtatgccagagccaccagtgttcagcctaaagccgccgcgatcattgaccagctcacggtcaatgccggcgttttcggcgatccaagtgggagaaacggccaaggaggaagctttcccggaattacgaacggtggtgggaccatcacgcgcggttacagtaaaagtggacctgccggcggtggcagcggcagtgacagtgatgatgggcttttcacattgata

SEQ ID NO: 138557 - DNA, 399 bp, Arabidopsis thaliana
aaaaataaaataaagaaaaggaacagtttattttcaaaaattaaaaactgttcttattctccacatccacatgatctctacaatctccaaacactgttttctttcacaccttacacaaaaaaaaaactgttcttttaaataattaaaaactgtttctttgtttttttattattattttgtaatattgatacaaattttttgtttttataacactaatgcatatgtttgatattctcaaaatattttaatatattttataaattaatatttaattaactctgcataacagtggcataattctagtatatatataattaaagaggtttaagaaataacgaaaatttacgtactcatcaaattattttactacagacaaaattttgccaaaaaacaaatttg

SEQ ID NO: 138558 - DNA, 377 bp, Arabidopsis thaliana
ggagttagaatgctatgaattccaaaccagagaagattcaaataaaacagagactaaaaaggctgttcaaacagtaataattcttgcacatgaacactaaaccagaacgataacaggaaacaaagatacagtcagtactcagtagtttgagggcacctacggaaagcaagtaatactacagagggtagacgttccagtgcttaatgatgaaacatcatcagtacaagcaaacgtgtttttcatcatacaccgtatcactttcacaagtggctgcagtcattccgcagcataaggagattgacttcgagaagcagcatcaactttgcgcagaggagcagggctaccaggagatggggaactctcattgctacgccttt

SEQ ID NO: 138559 - DNA, 232 bp, Arabidopsis thaliana
gaagaaagatagagaaaaaaaatgggaggcaaaggtgtgatgatggtggcgatactttgcctttgggcactctctgcaacatctgaagcagtaacagaggctgagccaggtttgatgatgaacttctacaaggacacgtgtcctcaggccgaagacatcgtccgtgaacaagtcaaactcctctacaaacgccacatcaacaccgctttctcatggctccgtaacatcttcc

SEQ ID NO: 138560 - DNA, 171 bp, Arabidopsis thaliana
aaaaaacgtttcgatttctcgcatccattcgaatcgaaaatcttgttatctctttctctctaactctactgcactcagaatctctctgtatagaaaagccctaagtaagttgtgatgttgcgagctttagcatggtgtctcgaatggtgtttgggaagcaaagctagtggt

SEQ ID NO: 138561 - DNA, 122 bp, Arabidopsis thaliana
ctaaaatactgaggcagacattagcgttgataaacctacaaacgtacgaacgagagatagacagccatgtctgcgaaaacaatcctaccatcagtacttttggaggttctcgtcgccgcatc

SEQ ID NO: 138562 - DNA, 226 bp, Arabidopsis thaliana
cacgcgtccggagaccgctctctcgtccttatcctccatcgtcgaatggtttaatccagcagctgtcgactatgtcgacaacgtactccgctatttcctctagtagatttactgggttttcaccaataagtgtaccttttgctattcagatcgtaaccagaaggcactttcttaatcacaagacgtcttacagatttgggttctctccatcacttcagggaactag

SEQ ID NO: 138563 - DNA, 110 bp, Arabidopsis thaliana
gcatctctctcgcgcaaccttcgattttcgtttattcgcatccatcttgacagagaaagacaatcaatagatcgaccatgcttggtgtaccaagatcgtctcaccggtga

SEQ ID NO: 138564 - DNA, 425 bp, Arabidopsis thaliana
  unsure (1)..(425): unsure at all n locations
aagggtgtgatcaggaggtactgtaatctcgcacacaagaaccattgatcttggtccaagtgagaaagacaggggctacctgaacctgcatcttccccgacggttcagaagacctctgtttccggagaggatttccagctcgcgccgccgaaattgggcgtgattttcgtgatctcttcgcttctgtgttcgctttatctttaccttctctgtttccactacaatgttgacaatgagctcaagcgtccgatcctcattaacgctgggcttagcttggttggattctttgtcacactcaagttgattcctgtagctgctagatacgttctgaggcgtaatatgtttggttttgatatcaacanaagaggcactcctcaaggagaagttagagtgcctgagtcattgggaattgttgtcggtattgt

SEQ ID NO: 138565 - DNA, 159 bp, Arabidopsis thaliana
cccacacgtcggcgcatctcattgcttcatcattagcatatcatcaacttaatcgtttcactcaaaattagggttttctcttttctcgaaagtcttgccgttttctgaatcatctctatctggtttgagggtttcgtttgatatctggataaaggggtt

SEQ ID NO: 138566 - DNA, 414 bp, Arabidopsis thaliana
gttcaattcactaaaccaatgaaaatgcaagcagttcttgttatcttggttttctccggtttactttcggttaagacagcgttagcagcacgacatgtgatcggcgggagccaaggctgggaacaatccgttgattttgattcttggtcttctgatcaatctttcaaagtcggcgaccaaatcgtttttaagtattcagaactacacagcgttgtggagctaggaagtgaaacagcatacaagagttgtgacctgggaacatcagttaattccttaagctctggaaacgacgtcgttaagctttctaaaaccggtactcgttacttcgcttgtggaaccgttgggcattgcgaacaaggcatgaagattaaagtcaacgttgtctcttctgactccaaatccgcttcctctcct

SEQ ID NO: 138567 - DNA, 423 bp, Arabidopsis thaliana
agagattcctcgctgtctgaactgaaaaataagatcgcattaactcaaaactctcacaaagacaaagatcttctcctccttctcttctctttttcacttttctctcttcccctctctcgaagcttgaaaggtaacaacaatggagaaccctccggatcaaacagagtcaaaggagactcttcaacaacccattacaagaagaagaacaaagggtggtcttctcactatgcccttcatcattgcaaacgaggggttcgagaaagtggcgagctatggattattacagaacatgattctttatctgatgagtgattacagattgggacttgttaaaggacaaactgtcttgttcatgtgggttgctgctactaatttcatgcctctcgttggagcttttctctcagattcatatttgggtcgctt

SEQ ID NO: 138568 - DNA, 437 bp, Arabidopsis thaliana
cccacgcgtccgtgtcactagaggaagctcgacaacttgggcataactacattggttcagagcaccttttgcttggtctacttcgtgaaggggagggtgtggcagctcgtgtcttggagaatttgggtgcagatcctagtaatatacggacacaggttatacgtatggtcggggaaaacaatgaagtcacagcaagcgttggtgggggaagcagcggaaacagcaaaatgccaacacttgaagagtatgggactaacttaactaaactagcagaggagggtaaactggatccggttgttggaaggcagccacagatcgaacgagtggtccagatcttggctcgaagaaccaagaacaacccatgtcttattggagaacctggagttggtaagacggcaatagcagaaggacttgcacagcgaatagctagtggtgat

SEQ ID NO: 138569 - DNA, 385 bp, Arabidopsis thaliana
caaccccatttccccattgagacttttgttgacctaattcctccaaaatctcaccttcacattgctcgatttcagtcctctgaaaaaatctccctgctttgctatggctctgaggtgttttcccatttgggtttgtccccaaacgactcatcatcgttctcctctcatgggtctcgctgaattcgacgctgataaacgccgtcgtttctgtctctgggagtgctcttcttcagcttctcagagagctgtcactgccattgaaggcgagattccttttagccgcgagctcaaaaagtcctctgatgaattgggtttgactcaagagactcaatctctttcttttcacagagacttaagtatgcttcctaaaacgctaactgcaaac

SEQ ID NO: 138570 - DNA, 352 bp, Arabidopsis thaliana
  unsure (1)..(352): unsure at all n locations
ttattttctctgtcaaagttgaattgctttttctcttgtttttcgtcgaagtggaaaatttgattttattttttccggaattttgaaaatctgtgagctcataaatcttcgctaatcgcagagacgaatctgcgaaaattccaacaccagattccggcgccggagcgccgatgaacaatcaggtcgtttagtaaaattcgatgaatctcccgcggaaataattagattcgatttcgatttccgtggggaagttttgtgccatttgatttgttttcgttcgtcnccgttggagattttttgtaatttctggggacagaaacaatgtctaaggtagtgtacgaaggatggatgg

SEQ ID NO: 138571 - DNA, 419 bp, Arabidopsis thaliana
ccaaattcgatccgttttccggcgataatctccgatctagatccgatggcgaaagaaccagttcgtgtgctcgttactggagctgcaggacaaatcggatatgctcttgtacctatgattgcaaggggtatcatgcttggtgctgaccaacctgttatcctccacatgttggatattcctccagctgctgaagctttgaacggtgttaagatggagttgatcgatgctgctttccctcttcttaaaggtgttgttgctacaactgatgccgttgagggatgtactggagtcaatgttgctgttatggttggtggtttcccgaggaaagaaggtatggagaggaaggatgtgatgtccaagaatgtttccatctacaagtctcaagctgctgccttggagaagcatgccgctcctaactg

SEQ ID NO: 138572 - DNA, 353 bp, Arabidopsis thaliana
cttacattctccctctattttttttttctctctctccacaagaaacgccgtcgttcattaaaaatgatggcggtgggcagatccggaggcaccatcctattgttctgcctatcattcttcgccgcggtaaccgcggagagtccataccgattctttgactggaatgtaacatacggcgacatttacccactcggtgttcgtcagcagggaatattgattaatgggcaatttccgggaccagacattcacagtgtgacaaacgacaatctcatcattaacgtacacaacagcttagacgagcctttcttaatctcatggaacggagtacaaaacagaagaaattcttatgttga

SEQ ID NO: 138573 - DNA, 449 bp, Arabidopsis thaliana
  unsure (1)..(449): unsure at all n locations
cggtgagctatttgagcgtatatgtagcgctggaagattcagtgaggatgaggcaagatactttttccagcagcttatctcaggagtcagctattgtcatgctatgcaaatatgccacagagatctgaagcttgaaaataccctcttagatggaagtcctgctccacgcctgaagatctgtgattttggttattccaagtcctcactgttgcactctatgcccaaatcaactgttggaactccagcatatattgcacctgaggttctttctcgcggagagtatgatggcaagatggctgatgtatggtcttgtggtgtgactctttatgtcatgctggtgggagcatacccatttgaagaccaagaggatcccaaaaacttcaaaaaaacaatacaaagaataatggctgtcaagtacaagatcncggactatgtccatatctcacaag

SEQ ID NO: 138574 - DNA, 275 bp, Arabidopsis thaliana
ccacgcgtccgcccacgcgtccgcccacgcgtccgatcagctgcagcaactccaaaacccaggggaatcgccgccggtgcacccttttgtagcgccgttgtcgtggcgattaggaacatggagaggacaaggagaaggtgaatatcctactataccgtctttccgctacggcgaagagatccgtttctcacattccggcaagccggtgatagcgtatacgcaaaagacatggaaattggaatcaggagctccgatgcacgccgagagtggttact

SEQ ID NO: 138575 - DNA, 207 bp, Arabidopsis thaliana
tttaatatggcaaactctcccgctgctcctgcacccaccaccacaaccggtggtgactcccggcgacgcctctccgcgtccatagaagcaatatgcaagatgagattccggagagatagcaaaggaggtggcagatcggatatggtgaaaccgtttaatatcacaaatttttcgacacaagacaaacacagtagttgttgttgtttc

SEQ ID NO: 138576 - DNA, 377 bp, Arabidopsis thaliana
accacgagtccgcccacgcgtccgctctggctccgaggaccagtcatcatgaaaggttatgtgggaaacgagaaagcgagtgcggagacagtagacaaagaagggtggttaaagactggtgatctctgttattttgattcggaagattttctatatattgttgatcggctaaaggagctaatcaaatacaaggcttatcaggttccaccggtagagttggagcagattcttcactcgaatccagatgtgattgatgctgcagttgttccgttccctgacgaggatgcacgagagattccaatggctttcatagtgagaaaaccaggaagcaatctcaacgaagcgcaaatcattgatttcgtagctaaacaagttac

SEQ ID NO: 138577 - DNA, 367 bp, Arabidopsis thaliana
ggttgaaagagctttagttccgtacaaatggcgagtaagaaggttgacggagaaggaaaagggaaagctatagcgaatacgaggatgcttcgaagcatggatcgaaagactcgaggcgatactaagcgagatggttcttcttctaagctcatgaagatcgaatctccggagaagaagaaacggaagacgacgaaagcgaagaatgttggagctgcgaagaagaaggtaaagaaagaagaggtagctgtgaaaatcgagaaagaggaggaggaagatgatgatgctgcagagaaagaagaagatgacgactccgataagaagaagattgtgatcgagcattgcaaacaatgcaaatcattcaaggaga

SEQ ID NO: 138578 - DNA, 389 bp, Arabidopsis thaliana
cggacgagtggggaaaggtcaaggatctgggtctgattcagatgatgaacaagggcaaaagagtaaatcgaaatcggatgatgagattcttaattacggattgaccattgcttcgaaagggcaagagaatgtattacttgtgcttgatcaggttttacgagactacagttgtttcacagagcagagaatgtctgaaaaagccaaggagactggagaagaggtgctgggaaattcagtggtggcggacacttcgccggaggagcttaagggtgagagaaaggatgttgtggaaggtcaatgtgcggcgtattggacaacacttgcaccgaatgtcgaggattatactcacagtactgctaaaatgatagcttccgggtcaggtaagctga

SEQ ID NO: 138579 - DNA, 349 bp, Arabidopsis thaliana
agtcctaaccaaatcatttcacaattccggtgatcgccggaattatcaagaaatttatccagattccgatttatcgctagatggcaacgtttaacagcttccgtaaagctgtcggagcaatcaaagattccactaccgtaagtatcgccaaggtcaacagcgaattcaaggatttggatgttgcgatcgtaaaggccacaaatcacgtagaatctgctcccaaagaacgtcacattcgtagaatattctcggcgacatcggtagtgcaaccactagcagatgttgcttactgcattcacgcattaaccaaaagattgtcaaaaactcgcaattgggttgttgcgatcaa

SEQ ID NO: 138580 - DNA, 421 bp, Arabidopsis thaliana
acaaaacccaattagccggagatggccgcaacatccgccgctgctgcagctgcttcttccatcatgggtactcgggtggctcccggtatccatcccggttcaggtcggttcacagccgtgttcggtttcggaaagaagaaggcagctcccaaaaagagtgccaaaaagacggtgactacggaccggcctctttggtacccaggcgccatttctcctgactggcttgatggttccttggttggagattacggttttgatcccttcggtttaggcaaaccggccgagtatcttcaattcgatatcgattcactagaccagaatctggctaagaacttggccggagacgtgatcggaacccgtacggaagctgccgacgccaaatcgacgccgtttcagccgtacagtgacgtgttcggaatcc

SEQ ID NO: 138581 - DNA, 392 bp, Arabidopsis thaliana
aaaaaaactcactcactctcacttttttcatttcttcaacaaaaaaaacctaaagctctcttttctctccagatttcgattcccgaggctcgagagaaaaccgtaaatcgggtctccgttcactcaatcaaccaaagatgcgtgagattcttcacatccagggtggtcaatgcggtaaccagatcggagccaagttctgggaagtggtttgcgccgagcacggcatcgatccaaccggaaggtacaccggagactcagatctgcaacttgagcgcatcaacgtttactacaatgaagcgagttgcggtagattcgttcctcgtgcagtgctcatggatttggagcctgggactatggatagtctcagatctggaccgtacggtcagaccttt

SEQ ID NO: 138582 - DNA, 368 bp, Arabidopsis thaliana
aagaaaaagtaagtatcaaaaaaacagaattttgtcttcgttcttctctgagattaaagctttctcttttgtaatggaagaatctcagggcatcaatggcgtcgatgattcagatcgtcatctcccaattctctacttaacctttttaacgatctggtctttctccgcttgttcttggacggttaacactttcaaaaatcgccactttcagacaaatagtttacaatggactcttgcttcagttccattaatcaaagccttacagctcacactatctttcctcttttggcattcatgttttcaccatcacatttgctctctatggatgtcttttggtgtatatgtgactggtgttctgtttcagacag

SEQ ID NO: 138583 - DNA, 406 bp, Arabidopsis thaliana
acgatctcttgcatcatcataatcctttgcatgcgattcggcttttagcggcggtgatgctacattgagttagtacccacttgcctctcttcttctcttttattgcaattttcgacctaacccaagtgttcgaagctcgtggcatttcctcactcgaagtttgaatttggttttgtgatgggatctaaacaagtatcaaagactagaaatggtggatttagcaagttaaagactgttgagtcctctgcatcttcaacaacctcgtcttcaaaactttatcaagaggcgtctgtagatagccatagctcccctacttcttcatcggttcgaagcaagcctcagttaccacctaaagcctttgcagtccagagaaaatgtcactgtcactgtgcgttttcgtccactc

SEQ ID NO: 138584 - DNA, 375 bp, Arabidopsis thaliana
acgaaaacaaaaccaccattttctctctctctctcctcgccagcttctgcaattcgaaagttcttcgcatcatcttgctgtcaccactctctcgcgaatcgaatcacgattcttcaatcttcttcttctctattgcgatctctctgaattttgtagcttcacgatttcagtatctctactttcatcaccaatcgttgggggtttagggtttttgcatcgacgccatctatcgagctacggagaagcatactcatcttctattttggctaaatccgaggtcaacttaatctctacgaaatagcttttgagtgatgattccgatggataattattgcgtaccgagtactagcacgaccggtttagtgttttcggcga

SEQ ID NO: 138585 - DNA, 233 bp, Arabidopsis thaliana
aaactccaattctctattcactactaatcattgatccaaatcaacgccggtggcttttaatcggcgagacactctctgatttctcggtcaccgatcaactgatggagggttttttttggggacgacaatgcaaaggtagatgatggatactggtaataataatatgaagagagccaagaggaatttggatgggaacgatgatgatcatcctgagcgaaaacgccctgcttttg

SEQ ID NO: 138586 - DNA, 405 bp, Arabidopsis thaliana
aaaacagtcaagtactgctcagagacttgcaccgattcaagaacataacaatgaagagagacaagaacagaaaccgatacaatcgctcatggacatgccgatacaatacagagagaagaagcaagagattgaagaggagcctaggaattcaggggaaggaccatttgtgttagattcttctgctaaatgggaaacattcgatcatcatcccgtgacgccattgagctcgactactgcgaaaaataacgcgatcccgcccaggtttaattgggaattctttgattgagaaagttcacattttgtgaaactttttctttcttttatcttgtatgcttatataattcttgtgtggaagtgttggttttttttcaggcttcttcatcttcttcgtcaccatcattatga

SEQ ID NO: 138587 - DNA, 312 bp, Arabidopsis thaliana
aagaggcaagccatagccaaagggttcgtgtcggcttcaaccaaacactgactgtgtgtgtatacacctttatatacacacctttatctctctctctctcacatctttgttacaaatcaatcttctactgttttctttttcctcttcttacattattttttgacagcaattcttagtttctcttctatcccctttctgggttttgtttgaactctacctcgctttggatacaatggttttaacttagaggtaaatttatcgacagtaagtatattcctaatggcagcttccaatcattcatctgctaaacct

SEQ ID NO: 138588 - DNA, 362 bp, Arabidopsis thaliana
agaccacgcgtccggaagaactcaaacgcaagacagaaagatcaatggcgagcaacggagttaccaactgtaacgcaaacgccaatgtttggcggttcaaaggaaacggtgcaacgagtgatgcggcggcggtgacgttgagaaagcttgcttttgggatgtttaaaaactgcaccatgaacagtggaaagaccattttgttcccaactcccggcgagccctccgcccattccaacttcaggacttgcccggaagccgaggaagccgttgccgcagctgcacgctccggcatggctaactcttacgcacccagccctggagttttcaaggctagaagggcggtggctgaatatttaaacgga

SEQ ID NO: 138589 - DNA, 284 bp, Arabidopsis thaliana
agaatgttttttttgaagggagagaagatttgatttgctaacaaagtggcgaaagaagggtggagtctttttgatgggatatacaaattttagaaacctgtctcttgggaggggggtgaaggacttaaatgcggccatagggatctgtaatgccttgagggatggacctgatatacttgtttgcgacgaggctcacatcattaagaacaccaaggctgacacaacgcaagcattgaagcaagttaaatgccagagaataattgccttaactggctcaccccttc

SEQ ID NO: 138590 - DNA, 361 bp, Arabidopsis thaliana
acgacttcttcttcgttgccactgccccaattaactctgtctatctctctcttcatcccctagattgaaactaattgcaattggagtgtatattgcagtatctagtttttgaatctctgggtattcctttatggatccagtagatatggttgtgtcacagccaattacgcctggtcaggtttcgtttctgcttggagtcattcctcttatgatagcatggctatactcggaatttctggagtataggaggtcttcttttcacgctaaagttcattcagataagaatttggttgaactggaaatggtgacgaacaaagatgatgaaggaacagttttaatggaaggaggtcttccaagatct

SEQ ID NO: 138591 - DNA, 432 bp, Arabidopsis thaliana
cggacgcgtgggttggaggacacagagaagcgcaaattatcagacagagtgagaacgaagaagaagaaagcacaggatgctaagcttgagatattcattaccttatcttcttcttcaaacaagggaatcatcaactaagctcttcaccaaaaagcctaacaatgttgtggtttgtgcggcgagaggtccaagacctcggtctcctcgtgtatggaaaacaaggaagaggattggaactatctctaaagctgccaaaatgattgcttgtataaaaggattgtcgaatgttaaagaagaagtttatggagcgcttgattccttcattgcttgggaattagagttccctcttgttatagttaagaaggcattagttatacttgaagatgaaaaagaatggaagaagattattcaggtgacaaaatggatgctgag

SEQ ID NO: 138592 - DNA, 376 bp, Arabidopsis thaliana
acaatgaaagtttctccaacaaaaaaaaaaaaaaaaaaaaaaaaaaaaaaaaaaaaaaaaaaaaaaaaaaaaaaaaaaaaaaaaaaaaaaaaaaaaaaaaaaaaaaaaaaaaaaaaaaaaaaaaaaaaaaaaaaaaaaaaaaagggggggccccccaaaaggttcaaaccttacttacccttcaatgcaacttcaaaccccttcaaaagtttcacctaatttcatttcattggccttctttttaaaacttcttaattggaaaaaccctgggtttccccaatttaacccccttgcaaaaaatccccttttcgcaatttgggttaataccaaaaaggcccccaccattcccccttccaaaaatttgcccaccctaaat

SEQ ID NO: 138593 - DNA, 409 bp, Arabidopsis thaliana
  unsure (1)..(409): unsure at all n locations
acgagacttctcggatctcttcgccattccggcggcggctgcagcggcagctcaaaggtctgctctctcacttcattggtacagtctcgctccttcgggacaactcctccgcctcctgcggcggtctttgtcgacaaaaatacacgtgtcatctgccaaggtattaccggaaagaacgggaccttccacactgaacaagccattgaatacggcaccaaaatggtagcaggagtgacaccaaagaagggtggaacagaacatttggggctacctgttttcaacactgttgctgaagctaaggctgagactaaagccaatgcctctgtgatctacgtacctgcgcctttcgctgctgctgctatcatggaaggtttagctgctgagttagatcntantgtttgtatcactg

SEQ ID NO: 138594 - DNA, 374 bp, Arabidopsis thaliana
gcgtccaatgccaatttttcttcctaaatcctctctctctctctccgttcccgagacaagcaaaagcttcaatctcaaatctttcagcagctacaaaaatgttcttcatctaaaagagactgtgaagcagagagagagagagagagagagagagagagagatgggaggtgtgacgtcatcagttgcggcgaagttcgctttcttcccgccgagtccgtcgtcttacaagctggtttacgatgaactgaccggacttcttctgatgaacccatttcctcaccgtgaaaacgttgaaatccttaagcttccgacacgtagaggaacagagatcgtggctatgtacgtcagacatccgatggctacctctactctgc

SEQ ID NO: 138595 - DNA, 415 bp, Arabidopsis thaliana
  unsure (1)..(415): unsure at all n locations
aaccacgcgtccgcgattctctacgcgtttcagcgtcaagtcttctagatctctaaagccttcgtgctcgccaatataaatctctgagatcggtcccgtaaaatcggattcgcgtcgtttttgagtaaaaaaaatggcgcaacaatcgttgatctacagtttcgtcgctcgtggtaccgttatcctcgttgagttcacagatttcaaaggcaatttcacatcaatcgctgctcagtgccttcagaagcttccttcttctaacaacaagtttacctacaactgcgatggtcacacgttcaattacctcgtcgaaaatggattcacctattgtgttgttgcagttgattctgctgggaggcagattcctatggctttcttnggacgagttaaggaggatttcaacaagagatatggt

SEQ ID NO: 138596 - DNA, 422 bp, Arabidopsis thaliana
atacaatgtctactcttgttttattcctccaacttttttccatcctaccattagcacttgggttgaaccacccaaattgtgacctgaccaagactcaagaccaaggctctaccctaagaatcttccacatagacagcccttgctcccccttcaaatcatcatccccactctcatgggaagcgcgtgtgctccagacgctggctcaagaccaggcccgtctccagtacctgagcagcctcgtcgccgggagatctgtagtctccattgcctcagggcgtcaaatgttgcaaagcactacatacattgtcaaggctttgatcggtactccggctcagccgctgctcctagccatggacacgagcagtgacgtggcttggattccttgctccggctgcgttggctgtccttctaacacggccttt

SEQ ID NO: 138597 - DNA, 213 bp, Arabidopsis thaliana
cccacgcgtccgcggacgcgtgggatcgtagcaccactcagaccaccggagatcgttgtggtgttgagccggagtcaccgcgtgaatcatcctcaccggagagatctgtgccactccgccgttccaaccgccaagcaaaccgtaagggagactcgtcgagaaaagccaccgagaaagattgagatcgttagtggaccttttcccgttgctgtt

SEQ ID NO: 138598 - DNA, 172 bp, Arabidopsis thaliana
aaaaccacaaaactttcttttctttttctaactattttatttattattcctacaaaatgtcatgtttgaagtatttcttgatcttattgatgttgggactgtgtgtctcagcggaggagaattttcaatatgactacttgaaagttccggcaagcgagtttgtgagctccat

SEQ ID NO: 138599 - DNA, 337 bp, Arabidopsis thaliana
cgtaggtgacttgagtcaaaagtttttactcgcaatgaaatatttcgaagagccactagaggagctcctcgtgacaatgagaccagactgtcttgtcggtaacatgttcttcccttggtcgactaaagttgctgagaagttcggagtaccgagacttgtgttccacggcacaggctacttctctttatgtgcttctcattgcataaggctccctaagaatgtggcaacaagttctgagccctttgtgattcctgatctcccgggagacattttgattacagaggaacaggtcatggagacagaagaagagtctgtaatggggaggtttatgaaggca

SEQ ID NO: 138600 - DNA, 388 bp, Arabidopsis thaliana
cggacgcgtgggttttagtttcaaatagggaaacatcacgctgttttgttcgaattcgttttgtcgccgtcggtaatggcgaaaaattacacagtcgccgatgtcgtaaatatcgacagtgacagtgacagtgacgacgacaacggaggagtaataggaatggttccgagcttggcatctctaatagagaatcagaaagtttcgatcgctgatgctgcgacggtggctcctcgagaaaccctagagtgccgaagtttctggaaagccggcgaaaactttgtgatcccttcaagtgttactctaactgccataggtatggttgagcatgctcgtgttcatccaaagtttcttcactcgaatgctacttcacataaatgggcttttggag

SEQ ID NO: 138601 - DNA, 350 bp, Arabidopsis thaliana
gcgataactaggtttctctcctctctctcatctctctttgtttcgacccttttttagtatatttccaggaaatatcttcttcctcctttcgttttctctatctcagttttctctcgtctcagcattaagtagtcaacggtcagcgatctcggcgttccttctaatcggaaaagtctagcttcagtttcttttttttttgcttttttggtttccgcgattaatcgatttgggtattttgattttctcttcaaattaagtcaacgggtggatacgcgttgagagggcttttctcgtattctgcttctaatttcatcatcttggtattaccttgtgtgggtggtagcttaatc

SEQ ID NO: 138602 - DNA, 103 bp, Arabidopsis thaliana
aggcccattcaacctcaatcttgattgtgaccactacatctacaactctatggctttgacagaatgaatgtgcttcatgcttgatcgtggaggcgatacaatc

SEQ ID NO: 138603 - DNA, 292 bp, Arabidopsis thaliana
ctcacagctatatgtgaggcagaatttcattatcaagccaaaatagatccaatttcttatgcagtggatatttcttcaaacatgaagatatatccaaccaagcattggctggtaggatcatcactgccttcgaaatttaatccagctattgtgcaaaaggttctcgatgagctttctcccaataatgttcgaatcttttgggagtcaaataaatttgaagggcaaactgacaaggttgagccatggtataacactgcttattcacttgagaagataaccaaattcaccattc

SEQ ID NO: 138604 - DNA, 258 bp, Arabidopsis thaliana
acgcgtccagttttgttggttctccgatctcagtggtgtcttcttctccggtagataattctcgtgttgaaaatctccggtagtgtttgactgagttacgaatatgccggtggtttgcgctggctaaggttgttacttctccggcggtggccggagatttagcggttcgtgttccgttcatttaagggaaacgactagtgtccaatcgtgtttctttcaggaaattgatgcgccggagttgtataggtcaatgcgtaa

SEQ ID NO: 138605 - DNA, 422 bp, Arabidopsis thaliana
gtgggtttcgatggggtcaggtgcatcgaagaatactgaggaagatgacgatggttccaatggcggaggtggtcagctctacgtttcactcaaaatggaaaactctaaggttgaaggagagctcactcctcatgtctatggctctcttcctctcatcggttcctgggatccttccaaagctcttccgatgcaacgtgaatctgcgttaatgtcggagctaagcttcgttgttcctcctgatcacgagactttggacttcaagtttttgttgaagccaaagaacagaaatacgccctgcatagtggaggagggtgaaaataggcttcttactggtggttcgttgcaaggagatgctagattagctctgtttaggctggaaggtgatgtgattgttgaattccgagtcttcatcaacgctgaca

SEQ ID NO: 138606 - DNA, 297 bp, Arabidopsis thaliana
accacgcgtccgggaatgtacgcaatcagagctaggagaaagactgtgactgagaaagactttctagacgcagtgaacaaagtcattaaaggttaccaaaagttcagtgccactcccaagtatatggtctacaattagagagattgagacagatagaagaactccgaaataaaactccgaaacactctttgttctttgtttgtgtctcttcccttcaagctcttttgtagtacttgtttcacaacttattccagtaactcgggtttatcttcttcaatgtctactacttttggattc

SEQ ID NO: 138607 - DNA, 409 bp, Arabidopsis thaliana
agaaaatggaatctcatgttgttcataacgcacaaaagccacacgtagtttgcgtgccttacccggctcaaggccacatcaatccgatgctgaaagtggctaaactcctctacgctaaaggctttcacgtcaccttcgttaacactctctacaaccacaaccgtctcctccggtcccgtggtcccaacgcgctcgacgggtttccttcattccggttcgagtccatccctgacggtctaccggagactgatggcgataggacgcagcatactcctaccgtttgcatgtccattgagaaaaactgtctcgctccattcaaagagattctgcgccggatcaacgataaagatgatgttcctccagtgagttgtattgtatcggacggtgtgatgagttttactcttgacgc

SEQ ID NO: 138608 - DNA, 270 bp, Arabidopsis thaliana
atggatcaacaccatagcagtactcacgcacagtacttgttcggcagtcggacacgtgctcagaatccccgaatcctacactctctcgtcccgtttctgcaccgctctgcaatagcaacaagtaaccgacacggttcaagcaaaggaggatgtagttaatgcgttggagccacaacgttacgacggtttggctccgacgaaagacggagagaagccaagagttttggttctcgggtcgggttgggcgggttgtcgggtattaaaagggat

SEQ ID NO: 138609 - DNA, 422 bp, Arabidopsis thaliana
agcctaccctttttccttcctcctctccgattcttcctccgtcagtaaaagaaaatcaaaatggcttcacacattgttggatacccacgtatgggccctaagagagagctcaagtttgcattggaatctttctgggatggtaagagcactgctgaggatcttcagaaggtgtctgctgatctcaggtcatccatctggaaacagatgtctgccgctgggactaagttcatccctagcaacacctttgctcactacgaccaggttcttgacaccaccgccatgctcggtgctgttccacctaggtatggatacactggtggtgagatcggccttgatgtttacttctccatggctagaggaaatgcctctgtgcctgccatggaaatgaccaagtggttcgacaccaactaccattacatcgt

SEQ ID NO: 138610 - DNA, 318 bp, Arabidopsis thaliana
aacaaatcttaaacgttttactttgtgctgcactactcaacctcaatggccgcctcaacaatggctctctcctcccctgccttcgccggtaaggccgtcaagctttcccccgcggcatctgaagtccttggaagcggccgtgtgacaatgaggaagactgttgccaagccaaagggcccatcaggcagcccatggtacggatctgaccgtgtcaagtacttgggtccattctctggcgaatcagcgagctaccttaccggagagttccccggagactacggatgggacaccgccggacttttagctgaccccgagaca

SEQ ID NO: 138611 - DNA, 305 bp, Arabidopsis thaliana
attgaaaaccgtgacgaagttagagctgatcatcggcgtattagacaggctgagattatatctacggaagaagaagaatcgaggaatcaagagaatagagacgaggatgatgatgaagatgccttggaagaaagaagaagaagaattaaggagaagaatcttagacgagcacaagaggaggctgctttacttcctttagaagaagaagatgagatacaagaggaagaagaggaggaggaggagtctgagtacgagactgattcggaagatgatatgcctggtattgccttgattaagcctgtttt

SEQ ID NO: 138612 - DNA, 424 bp, Arabidopsis thaliana
accacgcgtccgatccgtataagaaaaatggcacaagctacgcgtcagtcttctctacaaggggaacttgaggtagatattgagatcaaagcatcggcaaagaagttccatcacatgctctctggaagaccacaagatgttgcgaaagccactcctgacatccagggatgtgctttgcatgagggagagtttggcaaagttggcagtgtcatattctggaactatgctattgatgggcagcccaaggtggcgagggagaggatcgaggcagtggatcaggagaagaatctgttagtgctcagggtaatagatggagatctgacgaaagagttcaagagcttcttggtcactatccaggcaaccccaaagctaagaggaccgggaagtgtggttaagtgtcacttaaaatatgagaggattgacg

SEQ ID NO: 138613 - DNA, 421 bp, Arabidopsis thaliana
accacgcgtccgctgattttgtttcgtagattgttcttatgtattgagcaatgagatatctgcagatacagcaaccacaggatcaaccaagatcaggttcgaggatgtaaacgcgacttcacttacagtggttctcgcctctaatgaaattccctcacctccaaacatcgttcactacagtatttggcatcgtaaggtaccagaaaaagattacccggagaaatcgacttgcacattgtttattccaaacacaagatttgttgtctctggattagctccagcttttgagtactgcttcaaagttgtgtcctatagtggaaccagagaaatgggcgttgatgaaatcaatgttttgacacgtagcgctgaagaaggagcgaattgctcttcggcagtggaaagaagcgtaagccctctcaca

SEQ ID NO: 138614 - DNA, 257 bp, Arabidopsis thaliana
atcacacatcagatgtcttcttcggttctcgcttttatctgagtcttcattgagtatctgagtacacccacatcaagtggacaggtatcaaagttttcggacacccagcttcaagtgcagcaggagagtcctcaacgccctccacgagaaacagctcgacattgagctcgttcatgtcgaactcatccatggtaagcatatcatagagcctttcctcacacgcaacccatttggtcaggttccagcctttgaagatg

SEQ ID NO: 138615 - DNA, 420 bp, Arabidopsis thaliana
caatttctcaaaatcttaaaaactttctctcaattctctctaccgtgatcaagatgcagatctttgttaagactctcaccggaaagacaatcaccctcgaggtggaaagctccgacaccatcgacaacgttaaggccaagatccaggataaggagggcattcctccggatcagcagaggcttattttcgccggcaagcagctagaggatggccgtacgttggctgattacaatatccagaaggaatccaccctccacttggtcctcaggctccgtggtggtatgcagattttcgttaaaaccctaacgggaaagacgattactcttgaggtggagagttctgacaccatcgacaacgtcaaggccaagatccaagacaaagagggtattcctccggaccagcagaggctgatcttcgccg

SEQ ID NO: 138616 - DNA, 415 bp, Arabidopsis thaliana
ataaactgtgagtaaaaaagagaagaaagaaaaatggtgctaaaggtgtacggacctcactttgcttcaccaaagagagctttggtcacactgatcgagaagggcgttgccttcgagaccatccccgtcgatctcatgaaaggagaacacaagcagcctgcttatctcgctctacagccttttggtactgttcctgctgttgttgacggtgactacaaaatcttcgagtcccgtgcggtgatgaggtacgtagctgagaagtacaggtcacaaggacctgatcttttggggaaaaccgttgaagacagaggtcaagttgaacaatggcttgatgtggaagcgaccacttaccacccaccgctattgaacttaacgcttcacataatgttcgcatcagtcatgggattcccatctg

SEQ ID NO: 138617 - DNA, 417 bp, Arabidopsis thaliana
gagacttacttgaagatagacgggagtaaagccgagaagtttgtgtcaaaagggatgtacaaggatccgagtggtctctctgttcttactggaaacaacaagaagaaactgatggaccatgcaagctttaaaggcttgaaggatccaaaacgtaactctcaagagaaaaccctgagaaccagcctgagccggttgatgccaacagtcagttttaatgacaagactctaaactcacccacatctcagaaacgaaaatccgctgtttatcggctttctttcaaaaggaggtcgtgtgatggtgaggaagttactgagcaacgtaagttgttgtaccgtccaaaagcgggattcacaattccttcctcgggcagagaaaagcagtctagcggaagttggtctgagataccgccttcaact

SEQ ID NO: 138618 - DNA, 155 bp, Arabidopsis thaliana
cccacgcgtccgaagttagtcaccaaaacatggaatcaacacagaacgtttcaatggccgcctccacaatggctctctccgctcctgccttcgccggaaaggctgtgaacctttcccccgcggcatctgaagtcctcggaagcggccgtgtgaca

SEQ ID NO: 138619 - DNA, 424 bp, Arabidopsis thaliana
  unsure (1)..(424): unsure at all n locations
cacacgcgtccgaaatggacgaacagcttcttgatgcgctctgtgaccgtttgcaacctgtgttatacacagaggaaagctacatagtaagagaaggagatccggtagacgaaatgctcttcataatgcgcgggaagcttctaacaatcacaacaaacggtggaagaaccggttttttaaattccgagtatcttggagccggtgatttctgtggtgaggagcttttaacctgggctttagacccacactcatcctcaaacctcccaatctcaacaagaactgttcgagctctcatggaagttgaagctttcgcacttaaagctgatgacctcaaattcgtggcttcccagttcagacgtcttcacagcanacagctaagacatactttcaggtactactcacaacaatggaagacttgggccgc

SEQ ID NO: 138620 - DNA, 435 bp, Arabidopsis thaliana
attcccgggcttgcctacaagcttacacgcgggagctcaacatcagccatggcggaacagactgagaaagcttttcttaagcagcctaaggtcttccttagctcgaagaaatctggaaagggaaagagacctggaaaaggtggaaaccgtttctggaagaacattggtttgggcttcaagactcctcgtgaagccattgatggagcttacgttgacaagaaatgccccttcactggaactgtttccattagaggtcgtatcttagctggtacttgccacagtgcgaaaatgcagaggaccattatcgtgcgaagggattaccttcactttgtgaagaagtatcagaggtatgagaagaggcattcaaacattccggctcatgtctcaccatgcttccgtgttaatgaaggagaccatatcatcattggccaatgc

SEQ ID NO: 138621 - DNA, 355 bp, Arabidopsis thaliana
caaaatctctctctttctctgttagtttttttttatttcttctgcttctgggtttttttctccgttaactgtagttgggctagggtcttgagctccgttcctcgataatggcggtttctttgagaagaaagctcgtgtcttccttctattaaaaaagctaactttccccttttttatactaactttcaaaatgggaaatttctgaaaaatgtgttgcaagttaagcttgtgaaagtttcgatttttcgttttggggttcttaaattttaggacaattatttaactttttaaagattataggataattattatccgttgggagtaaattggaagctaagtgagtgtatctctttga

SEQ ID NO: 138622 - DNA, 325 bp, Arabidopsis thaliana
aattgatattgtttgatatctactgtagatgattcgtcttgacaaagaggaaggaggctgcttgacatcgaccaccctgaaagtccttttggtacaaaggaatctcctgctgtcgtacagtcctactttgacaagagaaatatcggatgccgtggtggtgaaggcgaggatggacacgacgtcgtttggttctggctagataaaggaaagtcatttgaatgtccagtgtgctcccaatactttgagcacggaccaccagacggtcatggtgacgatgaagaccaccaccattgattccggtcttttcttaacggcgaaatgtttt

SEQ ID NO: 138623 - DNA, 322 bp, Arabidopsis thaliana
cggacgcgtgggcggacgcgtgggcggacgcgtgggggtgaggattattggcctgaaggaacttcgagccgggttagagctgctagagctcctcaaccagctggtgagtcttcgagttttccttcctatggaaagaatcctggaagtaggagaaagaagaataggaaagctactgaggagaatgtgactgttgaaacgaatgacgaagtatccgattctgaggatagctctgaagaagaggaaaatgattcctcggatgggtttgttacctataagaatgaatttgagagagaagaagaggagactggttttgaattagaca

SEQ ID NO: 138624 - DNA, 353 bp, Arabidopsis thaliana
actctaatctctttgccatggaggtagatcctaccgttgaaactgatgacatggctggtacagacgggatggatggtttattctctgatttggcaaatgcgattcctggaatcgatgaggctatgagttttgctgagatgttgaagttggtgcaaacaatggattatgctactattgtgtttgacactgctcctactggacatactctccgcctgttacagtttccggccacactagaaaagggactttcgaagttgatgtcattgaagagtagatttggtggcttgatgactcagatgagccgtatgtttggcatggaggatgagttcggagaagatgctttgctgggaaga

SEQ ID NO: 138625 - DNA, 389 bp, Arabidopsis thaliana
cccacacgtccggttgtggaaaagattatgttcagcgattgggagaatgggtacaacgcaatgactgatacatatgagaatctgttcgaagctggagtgattgatccggctaaagtgacaagatgtgcgctacagaacgctgcttccgtagcaggaatggtactgaccactcaggccattgttgttgacaaaccgaaacccaaggctcctgctgctgctgctcctgagggtctcatggtgtaatcaaaacacaacatcttatcatcacaatggcatctttgtctttttgcacatttgtcatccccatttatctgcaatgtttttcttttttgggggaatatgagtagtttgttaacagtatcgagaaataattatcatcttttttgtcc

SEQ ID NO: 138626 - DNA, 369 bp, Arabidopsis thaliana
agccgagcaactgaagcatgctgaagagcaggttgatcagaaaacacaaaatcgggatgctcttagagcggatatccagaagatacgcgcaatatgtaaggactatgatatcagttacaaggcggtcatggcagaagagagatctgcaagaaaagcaatgcattcaaaacggcaggaaattgaggcccttcagtctatgattagccgggttaaaagtgctgcgtctgttgatgatattgattcaagggtgcgtaatatggaacatacgatgcagcacacaactttatctctgaatgaagaaaaaggtttcatgcgtgaaataaagcagttgaagcaacttcgcgagcagatatcttcgagtatgggtac

SEQ ID NO: 138627 - DNA, 288 bp, Arabidopsis thaliana
acttgaagaaacttacttacgaggagaggaagaacaagttgatcgagagagtcaaggcattgaatggagcaggtggtgatgatgatgatgaggacgatgaagagtaaatcagtcaagccttctttatctcatgcctcttgtagttttttatcttttgagcttaatgcctcaaattttctgttttcagactaaaacactcagcttttgtgttcacattttaattgtgttcgaggattttgatattgaggatacattttctttgaagtatcattatcttattattacctt

SEQ ID NO: 138628 - DNA, 385 bp, Arabidopsis thaliana
ttcttagatctatgaattttcaaattcgttgatccatttttccgcttcaatcgtctccgatctgatttcatcagcttcgtaccgctccggtcatgaatccattctcttccggcacgcgtctcagcgacatgattcgagctatacgtgcgagtaaaaccgctgctgaggaacgtgctgttgtgaggaaagaatgtgctgcgatccgtgcttcgattaatgaaaatgaccaggactatagacatcgggatctagcgaagcttatgttcattcatatgcttggttaccctactcattttgggcaaatggaatgcttgaagttaattgcttctcctggatttcctgagaagaggattggttatcttggattaatgttgcttcttgatga

SEQ ID NO: 138629 - DNA, 165 bp, Arabidopsis thaliana
gcgtccattttatgttacttttgggattgaagagttatcgaaccgtaacaaaaaagcatgtctataaccattaaaccattgagtaaaggctatcaactttactcccaaccagcagggggtgcccctgacggtggcgcggcagcttcccatccaccatctgccggt

SEQ ID NO: 138630 - DNA, 331 bp, Arabidopsis thaliana
  unsure (1)..(331): unsure at all n locations
agagaagaaagatagagaaaaaaaatgggaggcaaaggtgtgatgatggtggcgatactttgcctttgggcactctctgcaacatctgaagcagtaacagaggctgagccaggtttgatgatgaacttctacaaggacacgtgtcctcaggccgaagacatcgtccgtgaacaagtcaaactcctctacaaacgccacaagaacaccgctttctcttggctccgtaacatcttccatgactgcgccgttgagtcatgtgatgcgtcgcttttgctggattcgacaagaagagagctaggagaganagaacacgacaggagcttcggactta

SEQ ID NO: 138631 - DNA, 380 bp, Arabidopsis thaliana
acgagaattatcaccatctagaatcttccctcaacctctagaaaacaactttcgtatccttcaaaaaccctaaaccctagcttttgcacagacgcaatttcatcgcatcattttgcaattttcctttactgatctgtcaccacctcttgaatttcgaaaccatggctaccgcagctctcctccgctctattcgacgccgtgaagtcgtttcctctcctttctcagcttacagatgcctttcaagcagtgggaaagcatcattgaacagttcctatctgggtcagaattttagaagcttttccagagcctttagctcgaagcctgctggaaacgatgtcattggtattgatttgggtactactaattcatgtgttgccgtc

SEQ ID NO: 138632 - DNA, 354 bp, Arabidopsis thaliana
actaaaagatatccaagttcaaaagcaaaaaaatatcttcttttctctctctctactctcttctcttcttctcttcttctcttcttctctggctgggcaaccatgattactgtcgtcacctccaggctctctctccttcctccagtcttctccgtcgttaactcttcttcttcgcgttccaaagatatgaatctagagccaaaaaagaaggttaaattaagagaagactggagagaaaagtccagacctatcccacccggaggaacctatccagctaaagaccattgcagtcagtgcgggctatgcgacacctactacattgcccatgtgaaggacgcatgtgcatttcttgga

SEQ ID NO: 138633 - DNA, 390 bp, Arabidopsis thaliana
acccacgcgtccgctctcgatcagcttcatgcggcgtccacatcatcaaattggagaagataaccgaagaaaatcgtcccccttccgccgtgatcatcatctcaaccgacggtctcaacatctgtgacttcgaacataatcggcgattttgatgaaccaaatcggagagagaagattaataagatagttttgaggaagaaatcacaattagagcttaaagcaagaataaatcacaatcacaagatgagaatttttcggacaacgtagtgataatcagtcaatcggagaaagaaggtgacccgagtgttataaccatcaattgtcctgacaaaacgggtctaggttgtgatctttttcgtatcctcctcttcttcggcctcaacattgtct

SEQ ID NO: 138634 - DNA, 431 bp, Arabidopsis thaliana
  unsure (1)..(431): unsure at all n locations
gtttctgaagaagagacagagagagaaggatagagtaaaagctaagagagagagcgagactgagagagaaagaaagagatatcattttggttattaagtaattaacttatactaatcatgggttttatcgatggaaagtgggcaccaatgatagtcttaattgtttctaacatgattgcgggaatggttaatgctttagttaagaaagttcttgatggaggcatcaatcatatggttattgctacttatcgtttgggtatatctactcttttccttcttccagtcgcttatttttgggaacggaaaacaagaccaaagctaactctaagcatctcatgtcagcttttcgtcagtgcnctttttggggcgagcttgatgcaatatttctacttgcttggactgtcctacacgtctgcaacgctgggatctgc

SEQ ID NO: 138635 - DNA, 405 bp, Arabidopsis thaliana
accacgcgtccggagagagatcggttaaatagccggagtaaacggcggagaggagaacgcttaatgatggttcacggtaatctagacgacggtggcgacgatagctcggaagagagtgtcaacgacgatgaagaatatgacgacggaggtgtaggaccaccttcttcgttgaagatgcttcctccgacgagcaataatatctcagctgcatcgttttcatcgtctctatcaaatcatcacaacggaggtagcggtaatctccatcaccaccatcacagccacaacaataaccatcagaggaagaataattttccgccgacgaaagttttcagatcgtctccttctccggcgccggtatcacctcttgtctcgacgtggaaagccgccgacgagatgatcggtgtt

SEQ ID NO: 138636 - DNA, 249 bp, Arabidopsis thaliana
tcttaaacgttttactttgtgctgcactactcaacctcaatggccgcctcaacaatggctctctcatcccctgccttcgccggtaaggccgtcatgctttcgcccgcggcatctgaagtcattggaaacagtcatgtgacaatgaagaatactgatgccatgccaaatggcccatcatgcagcccaaggtacggatctgaccgtgtcaagtacttgggtccattctcaggcgaatcaccgagctacctt

SEQ ID NO: 138637 - DNA, 343 bp, Arabidopsis thaliana
accacgcgtccgcataaagaacacaaccatgcttaggtttgattacttactaatcacggcacttgccatttcaactgtttcggttgtcatggcccaagtccctcccgagaaacaattcagagtgctcaacgaacccggctacgccccatacatcaccgagtacgacgcgagttaccgattcctcaactcaccgaatcagaatttctccacactctcattcggccgaaacggaaaccttgtgctcgctgagttaaacggccaagtcaagtggcagactaacacagccaacaaaggcgtcaccggattccaaatcttgcccaatggaaacatggtgctacacgac

SEQ ID NO: 138638 - DNA, 282 bp, Arabidopsis thaliana
aaagaagccaatcatcatcgccagttgttcttctcttcgagatattcaaatcctccgtctctagagaatttcatatcaagagaatcagtggtttctgtagtttgtggtggtggtggttggaaggtaagataggatatggcgcaggagcaggaaggagcggtcgttgagaaaggtgagccgaatgattcctccgccgctgccgtggccgcaaccgcaaccgcaaccgccgatagcgtgaagaagaagcaaaatggattcttttcgcgtttgtggaatgggata

SEQ ID NO: 138639 - DNA, 355 bp, Arabidopsis thaliana
aataatatgggtgtgtttctttatgatgatcttttagcgattttgtcgttgcgttatcagaggattcatcttcttcagattagagattctggtcatcttgttgatgctcgtgctattggttacttttgtcgtgaagatgatgagcttttcctcaattctagctctcaggcaatgatgagtcaagataagagtaaacagcagagtttatctgggagtaaggaagatgatactggagagaatgggttgcgtcatagtctaagtcagccaagtggttcgaattcgtttcttagtggtgttaagcaacggttactttcttttatcttcagggagatttggaatgaagaatcagataacg

SEQ ID NO: 138640 - DNA, 408 bp, Arabidopsis thaliana
caaaaatgggacacctaattcctcaaaccggagatgaagagaccgagcttggtttagctgcggttaggctagctaactgtgcagccttcccaatggttttcaaagctgccatcgaactcggtgtcatcgacactctctacttagctgctcgtgatgacgtcaccggatccagttccttcctcagaccttctgagatagctattaggctcgccacaaaacctagtaaccctgaagcaccagctctgttggatcgtattcttcgtttacttgctagctactccatggtcaagtgccaaattatcgatggtaacagagtctacaaagcagagccgatttgtcgatatttcttgaaagataatgttgatgaagaattaggaacacttgcttctcaacttattgtcactctcg

SEQ ID NO: 138641 - DNA, 386 bp, Arabidopsis thaliana
  unsure (1)..(386): unsure at all n locations
cccacgcgtccggagatggtcaacccggagtctcaagacaggatgtgtcttgaaggggccgacgtcgtgccagctcaagagatcgccgagtgcgatcgaagtcagtccgttcaggtcgtcgagcctgaagttcaaaatattaccgacgaccgctccgtcgtcgtttatgccgcccctccagcaggcgaagaggtcaacacgggcctaactatccttgatcaagacaaggacgaaaccgttgctgagcccgggatttccaggaggtcccgtgaggagaaagggaaaggaggggctaaccaatccaagaagaggtcggcttctgaagccggtttagatgaggccgctgctccaaagacgtntcgcctgtcgcgaggcgagactcttaa

SEQ ID NO: 138642 - DNA, 246 bp, Arabidopsis thaliana
attaccacagacgaggatgaagataccaaggaggaggaggacggtaccaacgacgaggacgacgataccaaggaggcggtgggcgacaaggaggacggggaagtgggggaagttactgccgccacggctgctgctacacaggttacaacggctgttcaagatgctgctcgtatcccggagaagctgttcagactcagcccggtcactatcacactatattaaccaatcaccaccatgcatgtattg

SEQ ID NO: 138643 - DNA, 426 bp, Arabidopsis thaliana
aatctctctgcgccacagaattgtgcgatttacgaaaatctctgaaacctccgatcgttaacggcgaccgccgattttcccggtaaaaatgaacgacggagatgtatcgaggcagatccagcagatggtgagatttatccgccaagaagcggaagagaaagcaaacgagatctcggtttctgctgaagaagaattcaacattgagaaactccagcttgttgaggcggagaagaagaagatcaggcaagattatgagaagaaggagaagcaagctgatgttcgcaagaagattgattactctatgcagctaaatgcatcaaggatcaaagttcttcaagcgcaagacgatattgtcaatgccatgaaagaccaagcagctaaggatcttctgaacgttagtcgcgatgagtatgcctacaaacagct

SEQ ID NO: 138644 - DNA, 299 bp, Arabidopsis thaliana
aggctcttcattggtgggatttcgtgggatacagacgaagaaaggttaagagactactttagcaactatggtgatgttgttgaagctgtgatcatgagagatcgtgccacaggtcgtgcacgtggcttcggcttcattgtctttgcagacccctgtgtctcagagagagtgatcatggataaacacatcatcgatggccgcacggttgaggcgaagaaggctgtgcctcgagatgatcagcaggtgctaaagcgacacgctagtcctatccaccttatgtcacctgtccatggtggtgg

SEQ ID NO: 138645 - DNA, 333 bp, Arabidopsis thaliana
cgaatcctgatgttacaggcttagatgaggaagggagaggtgaatcgaatgatttgcctcaatttcgtgagttctctatagagactataaggaacgcaacttcaggatttgcagcagagaatatagtttcagagcatggtgagagagctcctaatgttgtctataaaggcaagcttgagaatcaaagacgtattgctgtcaaaaggtttaaccggaaatcttgggctgattctcgtcaattcttggaagaagccaaagctgttggtcaattacggaatcatacgatggcaaatctacttgggtgttgttatgaagatgaagagagactactta

SEQ ID NO: 138646 - DNA, 274 bp, Arabidopsis thaliana
acccacgcgtccgcggacgcgtgggcaatgacaagctccgataaatctctgtcgcacgacgttttcgtctacggcagtttccaagaaccatccgtcgtcaatctgatcctcgaatgttctccggtcatggttcccgctcaactccacggctagtacgtctctttctctgtctctctctgtcacttcacttctccgatctttatctttcttaagcttcaagaattgattcaattcgatttctgtgtgttttctttgcagtcacgtatatagactc

SEQ ID NO: 138647 - DNA, 201 bp, Arabidopsis thaliana
atccgcccacgcgtccgcccacgcgtccggttttatcagtcaaggaaaagccaaagaacagtggtggtgaatgtacttggagacaagattccactctatggaagtggctcaacattagtcccaccaccacctcctgcaccaattccaaaacccaagaagaagaaaggacctatcgttatcgtcgaaccaacaacgcctcct

SEQ ID NO: 138648 - DNA, 404 bp, Arabidopsis thaliana
  unsure (1)..(404): unsure at all n locations
cacagtctgggttagtttttagcttttaacggtggcgatgcgtcttcagtgtcttgtaatatcgccactagaggaatgggcacaaacctcttcgacaagccttctcacccaaactctcccaccgtctacgattggctatacagcgacgacactaggagcaagcaccgttgagccgagagggtagagtgacatgagaatgatgtaaaataattatgttctttacgccacgtgtttatgttctgtttcgtctattttggctatatgtgcaatcttttatttgcttcatgtcgtttgtgtttgttagtgaccgttgatttccaccatctgggttagtttttagcttttaacggtggcgatgcgtcttcagtgtcntgtaatatttttactgttcggtaatattacaa

SEQ ID NO: 138649 - DNA, 375 bp, Arabidopsis thaliana
acaagagtgaggaaactagagagagagaccacccaataatggtgaggttcgagaaggttcatttagtgttagggttagctctggttctaactctggtcggagctccgaccaaagcccaaggacctgtttgcggtgcaggcctgcctgacaaatttagcagattaaacttccctgaaggcttcatttggggaaccgcaacagcagcatttcaggttgaaggagctgttaatgaaggttgcagaggtccaagcatgtgggatactttcactaagaagttcccacatagatgtgaaaatcataacgctgatgttgctgtggatttctatcatcgttacaaggaagatatccagttgatgaaagaccttaacactgatg

SEQ ID NO: 138650 - DNA, 376 bp, Arabidopsis thaliana
cccacgcgtccgtttgattctggtcgttatccagatcagagaaatccgtgatccttttttctctctcactttcttctctgaaataggaaaaacaaaaaacaaatctgataatcgaaactgatcactcactgctgattccgtaacctaaaaaatgtcggcagcttcttctagctccgttcttcacctccgaatcaaccaacaactgttatcactccgatctctcaaaaattccacctccgttgcatctcaattggccgttacgtctggtgttagccgtagaagatcgtgtacggcgcgatgctctgtgaagaaaccggtgattcctgagagtcctttcctagggactcgtgtgcggagatccggatccgagacgctt

SEQ ID NO: 138651 - DNA, 434 bp, Arabidopsis thaliana
ccgacgcgtgggtagaaatactgattacccccaaatccgaagaaacgatttcgtctggagatatcaaagatttgacaatgtcaccggatcatagaatgtcaccggatcatagagatagccatagaaagaggtctcgtcctcagtctgactacgatgataacggtggaagcaaacggagatatcgtggtgacgatagagattcacttgtgattgatcgcgatgacactgtattccgatacctgtgcccggtaaaaaagattgggagtgttattggtagaggaggtgatattgtcaagcaattgaggaatgatactagatcgaaaattagaataggcgaagcaattccgggatgtgatgaacgtgttattactatctatagccctagtgatgagaccaatgcctttggagatggagagaaagttctttctcctgcg

SEQ ID NO: 138652 - DNA, 438 bp, Arabidopsis thaliana
  unsure (1)..(438): unsure at all n locations
attatcttcaaagaacaaatctcccaaatctaaaatctttctcttctctcttcgtttccataaccatgtctgcgaagaagattgtgttgaagagttccgatggtgaatctttcgaggttgaggaggcggtggctctcgagtcacaaaccatagcgcatatggttgaagacgactgcgtcgacaacggagtccctcttcctaacgtcacgagcaagatcctcgccaaggtgatcgagtattgcaagaggcacgtcgaggctgctgcctctaaggccgaggccgtcgagggtgctgctacctccgatgacgatcttaaggcctgggacgctgattttatgaagatcgatcaagctactctctttgaactcattctggctgctaattacctgaatatcaagaacttgcntgatctaacatgtcagacagttgcggatatga

SEQ ID NO: 138653 - DNA, 449 bp, Arabidopsis thaliana
gataaaccacaacatcacctgatcaagatttggcattgctttaattaggaagtgtttgacgtgctcgatctgctcctttatgtcttcattgtcatcacaaatttcttcaaacttaaatatcttaaggaccttcaccggacttgataatagagattaacgaactttgtgatgacaacgaagacacagctgatcaaatcaagtaggtcaaccactttctgaagacaatgccgaatcttgaacaattgatgttgtgctacgatacaccaaatcatttgatgataccattagaaattacatttattcacccacgattctgtatttggaaaagatgagacaattaaatatgcaaaattaggttttgaatcttaaagtcattcttaaactcatgaaaggcctcctttagtctagatgacaaaattgtttttggaagaaacaaacggttttgcaaa

SEQ ID NO: 138654 - DNA, 415 bp, Arabidopsis thaliana
caatctcatcaggttggaagctctcatagcataagaggagagataacaccagctgtaacaaggagagtcacaagagtaacagatgaatgagaaggttcgttggagaaagattcaagtcatagtttgcatcatccatgtactttgtttaggctggctggatctgcagttcttaagtgtttcgggattgaccggagtactgaagaaaccgaggattctttgagacatgaatctaatgaaagagagatgattgaagctcttgtgaatagagaagagagaacattactaacacgttttattatgtgtttatcgtaactatcgagtatgaagagattgaagaaacttgtaagtatagatgataaggtgaaattgttggtgtaacacgaacgagttgactcaacgcattcgcttttttctt

SEQ ID NO: 138655 - DNA, 419 bp, Arabidopsis thaliana
cccaagcgtccgcaaattatcaactttgtttctttgatcagctttgtcatcttgaaattatcaacgttttgactaaatttaaagaacagttgtgttcgttcgtgccattcttttgaatgcttatacgtacatttcttcttgaaaagactttgaatccaagaacccgtgaggaagtaatcccagtgaagagaagacgacaaagaaaaaggagcctataaagatccaaagcttcccttgtctttagttctcatcaaaaaaattgaaaaacgtttggagttattgagagagagagagatagagaaagatgttggaaggcaaagcaatggtggaagattcagacatgccagtgaagatgcagatgcaagctatggcatttgcttctcaagctcttgacctttttgatgtccttgactgtaaat

SEQ ID NO: 138656 - DNA, 435 bp, Arabidopsis thaliana
gattaaccataaactgtgagtaaaaaagagaagaaagaaaaatggtgctaaaggtgtacggacctcactttgcttcaccaaagagagctttggtcacactgatcgagaagggcgttgccttcgagaccatccccgtcgatctcatgaaaggagaacacaagcagcctgcttatctcgctctacagccttttggtactgttcctgctgttgttgacggtgactacaaaatcttcgagtcccgtgcggtgatgaggtacgtagctgagaagtacaggtcacaaggacctgatcttttggggaaaaccgttgaagacagaggtcaagttgaacaatggcttgatgtggaagcgaccacttaccaaccaccgctattgaacttaacgcttcacataatgttcgcatcagtcatgggattcccatctgatgagaagctga

SEQ ID NO: 138657 - DNA, 263 bp, Arabidopsis thaliana
agtccaagagcagcagcagccggatgttcctccatctgttggaagcgaaactgttttgggtgatggtaacgaaggtggtgaacaaagtgaagaacatgaactgttaaatagcaatgaagttatgcaccctcttcctttgaacagtacaccgaatgagattgatagaatggaagttggggaacggggtggagcacctattgagcaagtacaccgtgaagcagtgcatcttatctccagtgctcagggtcaatctgatacttccg

SEQ ID NO: 138658 - DNA, 252 bp, Arabidopsis thaliana
cacacgcgtccggctcattagtgcaattgtgagatttgtttgcatccaaatccaattcataactcacactcgtctcaaattcgaaaaatgtcgtctctctcctgccctacctaccgctcccgcacttcgtcttcgtctcctttcttgtcgaatcatcatcattcttcgctgatcaatgttgttgacccacgccgctcactctccttccactacgcttctcctcaagggcttaatctagctgagctctgtgtt

SEQ ID NO: 138659 - DNA, 340 bp, Arabidopsis thaliana
gaaattacgccatagatcggagcgattttggagcatcgccgaagctaaagaggaattggaggtttctgtagatcggaaaacacttgttgttctctctctcgattcatcccaaagcaagattcttggatctgcctcttaagatcgatcggtgcttttgtatcctcaggtatgtgttgatacttgatcgtatctatctacagagattaatcgtatcgtagtctgatttggtagatttggaattgggaatcgagaagtttaaaaatggaggaggatagagagaatgcaaagagagtagtgtttgtaactgtaggaacaacgagtttcgatgctcttgtgaaag

SEQ ID NO: 138660 - DNA, 435 bp, Arabidopsis thaliana
cgtcgccgcaacaatatcttttgctttctctctcattcttcaccagtaacaagcccatctctcgattcttcactctcaaggaaggagacgttttgaaaatcagaaatggtgaagatatgctgcataggagctggttatgtgggtggtccaaccatggcggtgatggctcttaagtgtcctgagattgaagtagtcgttgtggatatctctgaaccaaggatcaatgcttggaacagtgataggcttcctatttacgagccgggattggaagatgtggtgaaacaatgcagagggaaaaacctcttctttagcacagacgtggagaaacatgtatttgagagtgatattgtatttgtctcagttaacactccaaccaaaacacaaggtcttggtgctggcaaagctgctgatcttacttactgggagagtgctgct

SEQ ID NO: 138661 - DNA, 232 bp, Arabidopsis thaliana
cacgattttaatggcagtttaacgggaacacttctctctctctctctagatcccaaaactcaaaatcgttcctttttgcaaaaattgttcatctttctgttttcccagaaataggaaagctctcttgatttgcctttcctggtattgaggaaatatgtttagatcatcaccgagaagaggacagagatcaaagggtttcaaggtgaagcattgtattcaattgactttgttg

SEQ ID NO: 138662 - DNA, 348 bp, Arabidopsis thaliana
aaaaagagtttgaaattcagaattgtcatcttttgtttcgatcggattccttattcgtgtatcttctccgattcgatgggaattggctctcatggcaatggtaatcaagaggtttcgcgttaatcaaaaggagtgaaacgatggcgttttgtatttggtgtttaagcaacttcagttcttaccgttttgagtgttgatcatttgtttggcagagaacttaaaaggttagatctttcttctgaaatgatttcattattaattgtctgcttgtacttgaatcatgttaattatgactgagcttttcttcttgaggatgaggaaatcgtaatggctaatgcatacaatttg

SEQ ID NO: 138663 - DNA, 415 bp, Arabidopsis thaliana
attaagatcatcttcataaatcttctcagatctcttccaattttctagaaaaaacatgtcttgctgtggtggaagctgtggttgtggatctgcctgcaagtgcggcaatggttgcggaggttgcaaaaggtaccctgacttggagaacaccgccaccgagactcttgtcctcggtgttgctccggcgatgaactctcagtacgaggcttccggcgagactttcgttgccgagaatgatgcttgcaaatgcggatctgactgcaagtgcaacccttgtacctgcaaatgaagaacttcataaaccctaagtctgtaataaccctaatgttatgttacgtttgcttatatgtaataattggctgatttttccggtagttttgccggcgacgttggtctttctcttcttctgtgtgtg

SEQ ID NO: 138664 - DNA, 371 bp, Arabidopsis thaliana
ctggagttgtccaactaagacaaaaagtgcaatacatgaggcgtcgaggtgcaaaggtgatgctggagggatggataacaagagaggggattcattgtgattgctgcagtaaaatactcacagtctccaggtttgagattcatgctgggagcaagtcatgtcagcctttccaaaatatttatctggaatctggcgcttctcttcttcaatgccaagtcagagcgtggaatatgcagaaagatgctacgaatcttgctctccatcaagtggacactgacggggatgatccaaatgatgatgcttgtggtatatgcggtgatggtggagatttgatttgctgtgatggttgtccatcaacatatcatcaaaac

SEQ ID NO: 138665 - DNA, 398 bp, Arabidopsis thaliana
cccacgcgaccgagttgcagagcacgaggatttatgattatttgggtctttcgccgagttttccctcaggagttctccatgagagcaacatgggaagtgatcttgtcattggttttcttgactcaggagtatggccagagtctccggcttataatgacgaagggcttgaaccaataccgaaacattggaaagggaagtgtgtagccggagaggattttgacccagcaaagcattgcaacaagaagttagtaggagcaaagtacttcactgatggctttgatgagaacaattctggaatcagcgaggaggactttatgtcccctagaggttatagaggacatgggacgatggtctcttcaattgcagcctcttcatttgtgcctaacgtgtcatatggt

SEQ ID NO: 138666 - DNA, 383 bp, Arabidopsis thaliana
caaaacttatgcttcttttgggtctctttgcatttcttttcatcgtctcagaaatggctgccgcgggtacgtgttatatatatttcagtctacttcatacatccaaggctaattaaacctaaactaacgtaccgatattagatattttcaaactatttcgtcaatagtagttacaaaatatattcacttatacagaagtggaaatatacatatatatctcaaactaaaacaaatacaaatagaaacttgtatatatgtttagcagtgaaagtaattacgtttctttttctaataatatggatgatatattcccataaataattctcaatctcgtaatcttggtcttagcgatcttaattcattttcggttgatctctcaacag

SEQ ID NO: 138667 - DNA, 442 bp, Arabidopsis thaliana
accaagcgtccgcgccactctctctcccccatcaccaccaacctccgtcaaaaccctaaaccactatctctctctctctcttcatatcgcaacaatggagtccgtcgctctatctcgcataggtctcgccggtctcgcagtcatgggacaaaacctcgccttaaacatcgccgataaaggattcccaatctccgtctacaatcgaaccacttccaaagtcgacgaaaccttagatcgtgcctccaacgaaggaaaactcccagtcgctggtcaatactcgcctcgcgatttcgttctctcgatccaacggcctagatccgttatcatccttgtcaaagccggtgctcgcgttgaccaaaccatctctgctctctctgaatacatggagcctggtgattgtatcatcgacggtggaaatgagtggtatcagaacacagagcga

SEQ ID NO: 138668 - DNA, 426 bp, Arabidopsis thaliana
cccaagcgaccgcaaaaatgttcccaagcttgtcccaggctggacaaagcccatctgcattggaaggcatgcttttggtgatcagtaccgtgccactgatgctgtaatcaagggaccaggaaaactgactatgacctttgagggaaaagatgggaaaactgaaaccgaagtctttacatttactggtgaaggtggtgttgctatggcaatgtacaacactgatgagtccatccgtgcttttgctgatgcatcgatgaacactgcttatgagaaaaagtggccactttaccttagcacaaagaataccattcttaagaaatacgatggcagattcaaagacatcttccaagaagtctatgaagccagctggaagtcgaagtatgatgctgctggaatctggtatgaacaccgtctcattgatgatat

SEQ ID NO: 138669 - DNA, 409 bp, Arabidopsis thaliana
gttcagagctgtttctaagaaaacaacaagtagttcggatcggagctacgcttgcaaaactcaaaacatggcgaggggtttgaagaagcatctgaagaagcttaatgcgcctaagcattggatgcttgacaaacttggtggtgcatttgccccaaagccgtcttctggaccacataagtcaagggagtgccttcccctcgtccttatcatcaggaacaggttgaagtatgctcttacctaccgtgaagtgatttcaatcttgatgcaaaggcatatccaagttgatgggaaagtcaggacggacaagacctaccctgctggtttcatggatgttgtgtctatccccaagaccaatgagaacttccgtcttctctatgataccaagggacgtttccgtctccactccatc

SEQ ID NO: 138670 - DNA, 379 bp, Arabidopsis thaliana
cccaagcgtacgggttttttgagaatttgcgtaaaggaagaaactttttcaaaacttttttttgcatcaatggagaacataaccgcgcagctcaaacgaggtatctcaagacaattctcaactggttcgattcgtcgaacattgagccgacagttcacgcgtcagtcatctcttgaccctcgtaggaccaacatgaggtttagtttcggtcgtcagtcttctctcgatccgatcaggaggagtcctgattcttccaagagtgatgacgagccacatatgtcggtaccggagaatctcgattcgacgatgcagcttctctttatggctagcaaaggtgatgtcagaggaatcgaggagcttcttgacgaaggaattgatg

SEQ ID NO: 138671 - DNA, 393 bp, Arabidopsis thaliana
gtcgatgcaatcaatgtgagtccgattgagtatgggcatgtgttgctgattcctcgtgttcttgattgcttacctcaaaggattgatcacaaaagccttttgcttgctcttcaaatggcggctgaagccgataatccgtatttccgacttggatacaacagtctaggcgctttcgctaccattaaccatcttcactttcaggcttactatttggcaatgcaattcccgatagagaaagcttcttccttgaagatcactaccaccaataatggcgtcaaaatctctaaactcttgaattaccctgtgagaggtcttctagttgaaggtggaaacaccattaaagatctcgcagatactgtatcagacgcatccgtttgtcttcagaacaacaac

SEQ ID NO: 138672 - DNA, 438 bp, Arabidopsis thaliana
cccaagcgtccgggcgtttgatttgagataacgttcttctccaaaattgcttgaggaagtggttttgttgtgtctctctgggtttgaaatatgagcggagatagacttgaatttgaaaaccctatagaggatgcggtttcgaggctcagattctcccctcaatcaaacaatctcctcgttgcttcttgggattcttatctgagattgtatgatgtggagagctcttcgctaagtcttgaattaaactctcaagctgctcttcttgattgttgtttcgagaatgaatcaacttcatttacctctggttctgatggattcatccgaaggtatgatttaaacgctggaacagttgatacaattggaaggcatgatgacatttcaacatccattgtctactcttatgaaaaaggtgaagttatctcgactgggtttgatgag

SEQ ID NO: 138673 - DNA, 380 bp, Arabidopsis thaliana
ccaacatgcacaaagaaatatgaatggtatatttcctgaggaccctggtcagcttgtgaatgagtattgcatgaaaagaggagtttcattgtcatcgacggacaatcaaaaatcaaatcctaacgaagaaccgatgaaagatttgagaagtagagggctttgtcttgttcccatctcatgcacactacaagttggcagcgacaatggtgccgactattgggctccggcgttcggaaccactctccagtgaactattcactttctgttattttatttttggtcagccaaaaaaaaaatagtagatgttataacatcatgagcaaccaatcaattgagaaaacatcaaaatgagtttccaaatttgattgctcatgatgcta

SEQ ID NO: 138674 - DNA, 168 bp, Arabidopsis thaliana
aaagtatccagatctgggttcactgttttcgtctaaagagagattgttacctctctctgaatgtttttctgtgggcattgcatcaaaaacagatattccacaactctgcctcaatgtcctctctcggttaacagcttatgctccttgcttggagacgatggtatctga

SEQ ID NO: 138675 - DNA, 348 bp, Arabidopsis thaliana
gaaaaaggacaacattttcggaaacaaagttgagagttttgagagttgaaaaagggcaaatctttcttctccttcgtcactctaattgagttgactaaacacagttcgagttcgagagacaatggatcttgctaagtttctgtgttggattgttttgctactgggaatctcactcgtagaatcaaggtacatggtctacaatacttcacataccattgttcctggaaaacttaatgtccatgtggttcctcattctcacgatgatgttggttggctcaagaccgttgaccagtactatgttggctccaacaactctatccaggttgcttgtgttcaaaatgtactgga

SEQ ID NO: 138676 - DNA, 412 bp, Arabidopsis thaliana
acaaaaaccatgcgtttgcatttttgctcgctactcttactctactgtatcgtcttcgtttcaagcttcttgacgaccgacgctcttgcttgtcttcctgaccagatccaagctctaatcgaattcaagaatgagtttgaatctgacggctgcaaccgcagtgactacttaaacggagtccagtgtgataacacgactggtgcggtcacgaagcttcagctcccaagtggttgcttcactggaactctcaaaccaaacagtagtctctttgagttgcatcagcttcgttaccttaatctctctcacaacaacttcacttcctcttcactcccttctgaattcagcaatctcaccagattagaggttttgtctcttgcctctagtagctttactggtcaagttccttcctcaa

SEQ ID NO: 138677 - DNA, 335 bp, Arabidopsis thaliana
acggacgcgtgggtgaatttatattatgaatttatattatggttttcactagtgttagaaatacatgtttgccattccattcccaactctctccataattaactgttttttttctttcttttctttaaaacacacaataaatatttatttacataaatgcaaataaagatgtgtttgacttgtattattacaatttcttttatatttcaacatatttttctgaatttgtatgtagcaaataaatgtattcttttttagttgttaataaaataaatgtttccttaccaaacttttttttttttgcagattttaccgactagaaaagtaccaacgtc

SEQ ID NO: 138678 - DNA, 359 bp, Arabidopsis thaliana
atgcaaccttttatggcggaagtgatgcctctggtacaatgggtggagcttgtggttatggaaacctatacacagacggctacaagacaaacaccgcggcgttaagcacggccctgttcaacgacggcaagtcatgcggtggatgttaccaaatcttgtgtgatgcaaccaaagtaccacaatggtgtcttaaaggcaaatcaatcactatcacagctacaaacttctgtccaccgaactttgctcaggcaagcgacaatggaggttggtgcaacccaccgagacctcatttcgacatggctcagcctgcgtttctcaccatcgctaagtacaaagctggaatcgtccccattctttac

SEQ ID NO: 138679 - DNA, 382 bp, Arabidopsis thaliana
cgaaaatgaagttttggggctggatgcatcataagttccgggagaatagcaaagagccattaaaagatgcttctactggcaacagctattccattctttcagctcatccatcccttgatagccaagaggtttacccaacagcatgtgctggctccagatacaatactggattcagaaaacaggtcaacctgttccaggaaagctccttcgcaggacccaagcaatacacagaggaagacttcaaggatgagagaaacagtgatttttttgatggatttcttgccattggaacccttggtggagaaacacttcttgatgaacaaccagcaacgccgacatttggcatgtcaattgaggacccagcaatagatgatgcagatgt

SEQ ID NO: 138680 - DNA, 384 bp, Arabidopsis thaliana
cccaagcgtccgccctctttctaaaatctgcggcacaaagtatatgaattaagaaagcaacatgagtttgtggtatatcatagttgtgttcgtcttctttgcatctatattcattgcaaagaacacaagaaagacaaagaagaatctacctcccggaccaccaagacttcctataattggtaacttgcaccaattgggatcaaaacctcaccgttcgatgttcaaattatctgaaaaatatggacctctagtgtacctaaagcttggaaaggtaccgtctgttgtggcctcaactccagagacagtgaaggatgtcttgaaaacgtttgacaaagattgttgttcgcgagcttttttgacatatcctgcaagaatttcatacaa

SEQ ID NO: 138681 - DNA, 369 bp, Arabidopsis thaliana
cggacgcgtgggcggacgcgtgggcggacgcgtgggtttcactgatagtattctcagctcttgcaccgccgatgaacggatcatggtgtttacgatgactgggaaagaacaaattgacccggctatgcttcgaccgggtcgggtcgacgtacacattcattttcccttatgtgatttcacggcgtttaaaacgctcgctaataactacttaggtgttaaagagcacaagcttttctctcaagttgaaggaatatttcaaaacggtgcgtctttgagtcccgccgagatcggagagttgatgatcgcgaatcgtaactcgccgactcgtgcattgaagcatgtcatcaatgctttgcagactgatggtga

SEQ ID NO: 138682 - DNA, 315 bp, Arabidopsis thaliana
gtccagtacaagaggaaggttcatcagccaaaaggagcactctatgtttcagcgtcgagcgaaaagaagattctgataatgggtggtactcgattcattggtctgttcttgtccaggatccttgtcaaagagggacatcaggttacattgttcacaaggggtaaatctcctattgccaaacaattgcccggtgaatctgaccaagactttgctgatttctcttctaagattcttcacttgaaaggagacagaaaggactatgactttgtgaagtcaagtctttcagcagaaggcttcgatgttgtttatgatatc

SEQ ID NO: 138683 - DNA, 311 bp, Arabidopsis thaliana
cccacgcgtccgcccacgcgtccgcccacgcgtccgcccacgcgtccgcccacgcgtccgcccacgcgtccgccgagctcacgtcatcgctctcggtgctttcctctgggccactgccactttcctcgtcgccgtctccactactttcttccaggtggcagtatcaagaggcttgaacgggatagggctagccattgtgacacccgcgattcagtccctagtcgctgactcaactgatgactataaccgtgggatggcatttgggtggctacgattcacatcaaacattggttccatacttggctatgtat

SEQ ID NO: 138684 - DNA, 276 bp, Arabidopsis thaliana
ataaatctaacccaaacccttctcttcttcttctgccctcttcttcatctctctttcgctgctttcactccaactgataattatctcatcaattccggttctaacaccaatacatctttcttcacaacccgttcttttctcagcgactcttcagaacctggctcgagttttctctccaccgatcgatccatctcgatttctgacacgaacccatctccagattcacccgttttgtacaacacagctcgtgttttccccgtcggaggatcatacaaa

SEQ ID NO: 138685 - DNA, 310 bp, Arabidopsis thaliana
gtgaaattggtgtcatggtacgacaacgaatggggttacagttcccgtgtggtcgacttgatcgtccacatgtcaaaggcctaagctaagaagcagatctcgaatgatagggagtggaaagtcatctgttcatccccttttatggtctgaatttgtcgttttcgaataaaatttctttgaacttggaactttttttttttttggttttcttaattctcattcatgtgaggtgatgggagtttgtagaccgatgttttactggaagccctttgtttttggcttttgatatattgagttaacgttatggttt

SEQ ID NO: 138686 - DNA, 321 bp, Arabidopsis thaliana
cttcctctttctctttctctgtttctgcaacacaaaaacaccattgagaaccaatcaaaatgtcgacaaaccctaacccatggtcaccatacgattcatacaatgattgttctcaaggaatctgcaacatctactgtcctcaatggtgttacctaatcttctctcctcctcctccttctttcttcctcgacgacgactcttcctcctcctcctccagtttctctcctctcctcatcgctctcatcggtatcttaaccagcgctctcatcctcgtcagctactacactctcatctcaaaatactgtcatcgccaccaccaaa

SEQ ID NO: 138687 - DNA, 315 bp, Arabidopsis thaliana
caaactctaaaatcaatctctcaaatctctcaaccgtgatcaagatgcagatcttcgttaagactctcaccggaaagactatcaccctcgaggtggaaagctctgacaccatcgacaacgttaaggccaagatccaggataaggaaggtattcctccggatcagcagaggcttatcttcgccggaaagcagttggaggatggccgcacgttggcggattacaatatccagaaggaatccaccctccacttggttctcaggctccgtggtggtatgcagattttcgttaaaaccctaacgggaaagacgattactc

SEQ ID NO: 138688 - DNA, 376 bp, Arabidopsis thaliana
cccacgcgtccgggtgctcaagagtgcaaacaaatatttgcaagattctattgtgttaatgagaaagcttcttcaataacaactctcaggttccaagaagggtgctaagaaaggtgctcaagtaacagctgtgccagaggggaagctaaaaggcctagtatatgtgaatgagcaatttgatggatggagagctcactgcctgcggattctgcaaagtagatttgaccagcaaacctgtagtttccccccggatacagagatgcttgcagaactaagtgcaacattgttgcatgagggaaaaaacttgaaagccattcaaaaggtttgcatgcctttccttaaattcaagaaggacgaagcaatatctattggcact

SEQ ID NO: 138689 - DNA, 294 bp, Arabidopsis thaliana
gtcggagataatcgggtgatcggcgatggagaatacggacgtcttcttggggctgcatgatttcctggagcggatgcgcaaaccctccgccggcgatttcgtcaaatccattaaaagtttcattgtttcattctcgaacaatgcaccagacccggaaaaagattgtgctatggttcaggagttcttttctaagatggcctggagaagtatgttatgacaaagctatttactcgggtgtttgcttcaaacactgaggaggttatagctgatgagaagctatttcagaagatgtca

SEQ ID NO: 138690 - DNA, 329 bp, Arabidopsis thaliana
ctccttataaataagagaagctcagtgcgttactcaaatggccgtcactttggtaacgtccttcgcttcttcgtcttctcgcttccatttccgctcattctcctcttctccgtcgtctctctcctcttgtttcgtccgattccagttcccctctcgccttagactcgcttttgccgtcacgcctctctactcttcttctagagccatggctcatacaatctcacacgctactctcggcctcactcaggctaactccgtcgatcatcctaagatctcattttcggggaaggagatcgacgtgacggaatggaaaggtgatatactcgctg

SEQ ID NO: 138691 - DNA, 278 bp, Arabidopsis thaliana
ccaactcgtacaagccagttaagcacggtaggcctggcgttggtgctacccactcctccaggttcatccctctcaagtgaagaccatacagagtctgtgttgtgctcttgttttgttagatctcattatgcaattatagggtcctccttctttgtcagttttgggaccattttgtctgtctgtacttctctgtttggctactctgctgcgattctctcttctttagatgagtctaaactcttgttccattcgtttaaagaagactcaaaactttttgg

SEQ ID NO: 138692 - DNA, 359 bp, Arabidopsis thaliana
  unsure (1)..(359): unsure at all n locations
caaaaccctagatcgaaatcttatctctctaatctgttgttacagttcgtagagtcatggcgttagcatcaaccacgttgccgacgaagtccggattatctctttggtgtccgtcttctccgtctctcgctcgccgatttcccgctcgtttttctccgatcggttctagaatcgcttccagaagcctcgtcactgcttcgttcgctaacgagaatcgcgagtttgtgattgttggtggaggaaatgctgctggttatgctgctagaacttttgtggaaaatggaatggctgatggtcggctatgcattngtgacaaagaggcttacgcaccttatgagagaccggctttgacaaaagct

SEQ ID NO: 138693 - DNA, 282 bp, Arabidopsis thaliana
caaggtcggtggtgcttcaaatcgacggtttttcccggatcaaggaaagcatggtacttggatttgcattccacagattccgctgttgttcgcgtaaatgtttggattgttcaatctgtctagctgaggactttcagggattctacctttaagcttgttgttacgcaaatccaatgtattcagctcgcttagcttggataacgttttcgggatttcgccagtgaggttgttgtgtgaaaggtctaagctctctaccttctcaagatctccaaaactttgtgg

SEQ ID NO: 138694 - DNA, 345 bp, Arabidopsis thaliana
cggacgcgtgggcggacgcgtgggcggacgcgtgggtccatatcgaggtcggagtggttttgctcgaggacgaacaaagtttgtaaacaaccccaaacgagattttcctggatttcgttcacgatctccagttagatcaagagaaagatcagatggttcatcctcgtctttcaggaatagatcacaggaagagttcagtgggcatacagacttttctcatcgaagatcaccctcaggttacaaagtggagaggatgagctcgcctgaccattctggttattcaagagaaatggttgtcagaagacacaattctccacctttctcgcatagacgatcgaatgctgg

SEQ ID NO: 138695 - DNA, 394 bp, Arabidopsis thaliana
tgcaagcaaggaaacagcgagaagcagtacttgaggctgcactagctgagaaagaatacatagaagaagagtttaggaaaaaagctgaagaagcaaagagaagagaagaggcccttgaaaacgatttagccaacatgtgggtgcttgttgccaagttgaagaaagccaatagtggcgccttgtcaatacaaaagagtgacgaagcagagcctgcaaaggaagatgaagtgacagagttagataataagaatgaacaaaatgcaatcttgaaagagaggcaactcgtgaatggacatgaagaagtaatagttgccaaggctgaagagacaccaaaggaggaacctcttgttgctcgtcttaaggcaagaatgcaagagatgaaagagaaagagat

SEQ ID NO: 138696 - DNA, 358 bp, Arabidopsis thaliana
cggaagcgtggactctcactttctctcttctctctctctctttcttttttgagtccgtgaaggctaagtctgaaagaatgacgaaggatgagttgacggaggaagagtcgctctccggcaaggactacttagacccaccgcctgtgaagacgttcgaggtgagagagctcaagaagtggtccttctacagagctgtcatcgctgagttcatagctactttgctctttctatacgtgactgttttgacagtcatcggctttaagagccagactgatatcaacgccggcggcggagcttgtgccagtgtcggcctcctaggcatctcttgggcctttggtggcatgatattcatcctcgt

SEQ ID NO: 138697 - DNA, 387 bp, Arabidopsis thaliana
gttaatttagagcaacatccgtccggtgttccaaactttcaagcaccaatgggatggccaaaccatatgcctcaatacttttacccgtctccataccaaggctatccgtaccctcctatgcaacacatgccaaatcaaaaccaaggaaacatgccatggccttcaaggggcaaaacatccaagaaaaaagggaagggggattctgatggagatgagtctagtgaatcaagtgaatctagtgaatctgaatcggccagcgatgattctgcttcatctttggaagatcaaggtaaaagacactctcgtacaagtaaaaactcacgccgatcaaagaaaaaccggaagaagtcatctaaaactgttatcatccgtaatattaactatata

SEQ ID NO: 138698 - DNA, 369 bp, Arabidopsis thaliana
acggaaacgggtttgattctcatgtggttccctttgataatattgggattgtttgttttgaaatgggtgctgaagagagtgaatgtttggatttatgtgtccaaacttggtgagaaaaaacactatctgccaccaggtgatttgggatggccagtcataggcaacatgtggtcctttcttagagctttcaaaacatctgatcctgaatccttcatccaatcctacatcaccaggtatgggcgtaccgggatttataaagcacacatgtttgggtacccatgtgtactagtaacaacaccagagacttgtaggcgagttctaacagatgatgatgccttccacataggttggccaaaatctaccatgaaa

SEQ ID NO: 138699 - DNA, 243 bp, Arabidopsis thaliana
gtgattcatcgtgatttgaagcctaaaaatattctagccaactctgattgcaagttgaagatttgcgactttgggcttgctcgagtgtcctttaatgatgcaccttcggctatattctggactgactatgttgctacaagatggtaccgtgcgccagaactttgtggctctttcttctccaaatatactcctgccattgatatatggagcataggatgcatatttgcagaaatgctcactggg

SEQ ID NO: 138700 - DNA, 272 bp, Arabidopsis thaliana
cccaagcgtccgggacagagcggcatgaatcacgtcgaatagacaatcagttgcgtgggcgaagtggccggcaaggggatcctggaagttcccgattcttccttagtcttgaagataacatattccgcatttttggtggagatcggattcagggtatgatgagggcattcagggtggaagatttaccgatcgaatccaagatgcttactaaagctctagatgaagctcagagaaaagttgagaattacttctttgacatcagaaagcaatta

SEQ ID NO: 138701 - DNA, 257 bp, Arabidopsis thaliana
cggacacgtggggggctgtagattccgggttgcatctagtacaacttttaccagtaaatgacacatccgttcataagatgtggtgggactcgtatccctacagctcgttatctgtgtttgcattgcatccattatatcttagagtgcaggctctctctgaacgtctgccagaagatatcaaggaagaaattcagaaggcgaagaatcaactggacaagaatgatgttgattatgaggctaccatggaaactaacctt

SEQ ID NO: 138702 - DNA, 425 bp, Arabidopsis thaliana
cccaagcgtccgaaagattcttggtctccgatccagtcacctgaagattctccgagcttcttttgaccacacactttcaatggcggatgctgtgaacgctcaaactccatcgctctccgagcaatatcatttggagaaagaagtgaagcaagacacaagtgcaaagcctgttgaagtgaaagaggtggcaccagaagttactacacaagctgaagaggttaagacggagcaagctaaggaagaatctcctgttgaggaagcggtttctgtagttgaagagaagtctgaatctgctcctgaatcaacggaagtggcttctgaggctcctgctgcagcggaagacaatgctgaagagactcctgctgctgctgaagaaaataatgacgaaaacgctagtgaagaagttgctgaagaaaccctgatga

SEQ ID NO: 138703 - DNA, 376 bp, Arabidopsis thaliana
cccaagcgtccggatactggcagagatatatctacttgtggattgattatgcactgtttgaagagattctagctgaagacgtggagcgtactcgagctgtgtacagagaatgcctcaatcttatcccctcactccaaattctcttttgccaagatatggttgctcgctgcacagtttgagatcaggcaattgaatctctcgggtgctcggcggatactaggaaacgccattggcaaagctccaaagcataagattttcaagaaatacattgagattgaactccacttgggaaacatagatagatgtagaaagctgtatgcgcggtatcttgaatggtctcctgagagttgctatgcttggaccaagtttgctgagt

SEQ ID NO: 138704 - DNA, 281 bp, Arabidopsis thaliana
atttagttttgggtcaagcttgttgccatttaagtttaatggaggatgcaatgggtcctcctcaaaccggttaacgccttaccaacggctgctttcggccgtcagagtatttgttggcctgacaatagcttcattctcttctcctccgaagacggcggctcctctcctccctcctccgtcgtcgtaacttccgcatctcagccacgatccgagagcatcgctcacgtgttatctcacatcaagctactcttaagacggcgcgccgccgcactcgccgctct

SEQ ID NO: 138705 - DNA, 296 bp, Arabidopsis thaliana
gccacaagctctcgcgattcctgatgttcttcagtaatttcttgcaatccttataaacaaagagcgtggagaatcgtttcagaggaaagaaaactaaaaatggcgactcttttcaacaaatttcagcaggctgttggagttcttgccaagagtaccacatttgctaagaacccaaggcaactgcagtttgaagcagacgttaacaaactctttatgtatacaagctataaccggttgggacgagaagctgaggagactgatgcagaggagatcattgagatggctggtaaagccac

SEQ ID NO: 138706 - DNA, 242 bp, Arabidopsis thaliana
gttcaagatcgcgagcgcccgccctttttttttttttttgaagtataaaccatatgcaaactttatataaaagatataatgaaattacaaaataaaggatcaaatgcactcacagaatgccacattaactactaaaaaagatcaaaaagatcagcctaaatctttcaagaaaagatcacaagaaagagttcaatgggcatacaaaacttttctcatcgaaaatcaccctcaggttacaaagt

SEQ ID NO: 138707 - DNA, 409 bp, Arabidopsis thaliana
gggctcggttccatactcggtggcgactcaaaatgggtcaagaatcgtttatctatagcttcgtcgccagaggaactatgatcctcgccgagtataccgaattcacaggcaatttcccgtctattgctgctcagtgtctccagaagcttccgtcctccagcaacagcaagttcacttacaactgcgatcaccataccttcaatttccttgtcgaagatggctacgcatattgtgttgtggcgaaagattctcttagcaagcaaatctcgatcgcatttctggagcgtgtgaaagctgatttcaagaagagatatggaggtggaaaagcaagtacagctatcgccaaaagtctcaacaaggagttcgggccggtgatgaaggaacacatgaattatattgttgaccatgc

SEQ ID NO: 138708 - DNA, 369 bp, Arabidopsis thaliana
cccacgcgtccgggtcactgtgccaggtgctcttgcacgtgatttgattgagcaggctgaggtggaagttgataggcttgaccagctgaaagctagccgaatgaaagaaattgcgttcaagaagcaatctgagcttgaagagatatatgctcgtgcccatgtagaagttaacccggaatctgctcgtgagagaatcatgtcgctgattgattctggaaacgttgagcctactgaattattggcagacatggatagccagatatcaaaggctaaggaagaagcatttagtagaaaagatatattggaccgagtcgagaaatggatgtcagcttgtgaggaagagagctggctagaagactacaatcggga

SEQ ID NO: 138709 - DNA, 270 bp, Arabidopsis thaliana
aaccgcttgattggctgcctctgagaactgataaaaatgatccgcttgttctatgcattgccggggctgatagcaccttccggctcgttgaggttactgtaaatgaaaagaaagctggctttgtgccccagtctaaatcagtaaaggagaggtttcgtcctatgcctatgtattcccctatcttacttcctgtgccacatgcgctggcactgcggatgattttacagttaggagtgaaaccatcttggtttaatacgtctagcacaactt

SEQ ID NO: 138710 - DNA, 348 bp, Arabidopsis thaliana
gcacctgatagagttgtgtatactacgatgattcgaggattctgtgagaagggatggttagggagcgcgaggaagctttggtttgagatgataaagaaagggatgcgaccaaacgagttcgcttacaatgtgatgatacacgggcattttaaaagaggcgaaatttcgcttgttgaagcattctacaatgagatgttgagaaatggctatggaggaacaatgttaagctgcaatacgatgataaagggtttctgctcacatggaaaatcagacgaggccttcgagattttcaagaatatgtctgaaaccggggttacaccgaatgcaatcacgtataacgctttgata

SEQ ID NO: 138711 - DNA, 286 bp, Arabidopsis thaliana
acggagcggttttacgacccgaactcaggacaagttttactagatgggcaagacctgaagacgctgaaactgagatggttaaggcaacagatagggctagtgagtcaagaacctgcattattcgccacttctatcaaggagaatatactcttaggccgtcctgacgcagatcaagtcgagatagaggaggctgctcgagtcgcaaatgctcattcctttatcatcaaactacctgatggcttcgacacacaggttggggagagaggattgcagctgtctggtgggc

SEQ ID NO: 138712 - DNA, 323 bp, Arabidopsis thaliana
  unsure (1)..(323): unsure at all n locations
aaccgcggacgcgtgggcggacgcgtgggcgccgacgccgcagcacaaaggaggagaagaaggatcaaaggcgcgacaacaatggcgacaggtaaaacagtgaaggatgtctctccacacgagttcgtcaaggcttacgctgcccatctcaagcgttccggcaagattgagctgcctctgtggacagacatcgtcaagactggtaaacttaaggagcttgctccatatgaccctgactggtactacatcagagctgcttccatggctaggaaggtttacctgaggggtggtcttggagttggtgccttccgtangatctatgg

SEQ ID NO: 138713 - DNA, 335 bp, Arabidopsis thaliana
gattatgatgatgattgcgagagtgatgatgaagtaatgagcactggtcactctccttatccaaatgaaggagtttgcaacaaaagggaattagaagaaatcgatggtccttgtaaaaggcagaaactactggataaggtcaacaacatcagcgacttatcatcacttgtgggcactgagagctccacactactcaatggatcttcctttcttaaggacaaaaagctccctgaatcaaaaaccatatcgaccaaagaggacactggttctggtctgagcaacgagcagtcgaagaaagacaagatccgcacagctctgaaaatactcgagagcgt

SEQ ID NO: 138714 - DNA, 355 bp, Arabidopsis thaliana
tagtgaaaaacttcttgctcaagacacttcagcttcaaggttgggagaaacgggttgaccggttcaagcttggggaaggcgttatgccagcgagtttcaaggtgcttcatgatccagttcgtaaaaccgacacaattattgcggattttggagaaagcgctataggaagagtagcaccggtggattcaggattctggtggatcatacttctccgtgcttacacgaaatctacgggagatttgactttatctgagacaccagagtgtcagaggggaatgaggcttatactctctctttgcttatccgaaggttttgatactttccctacgcttctttgtgctgacggttgttctat

SEQ ID NO: 138715 - DNA, 357 bp, Arabidopsis thaliana
gctacttccaaaaacctcaaacgctcctcacacaacggagtgatggggtctctcgttcgtgaatgggttgggtttcagcaatttccagcagctacccaggaaaagctgattgaattcttcggaaaattgaagcaaaaggatatgaactcaatgacagttcttgttctgggtaaaggcggtgtcggaaaatcatccactgtcaattctcttatcggcgaacaagtcgtccgtgtcagtcctttccaagctgaaggattgagaccagtgatggtttcaagaacaatgggagggttcactatcaacattattgacacccctggacttgtggaagctggatatgtcaatcaccaagctctc

SEQ ID NO: 138716 - DNA, 381 bp, Arabidopsis thaliana
cccaagcgtccgtctctctcgccggaaaaaagaacaacgtcgtttatagctaaagattcgatcatgttggatcttaacctaaagatcttttcttcttataacgaagatcaagatcggaaagtaccattaatgatctcaaccaccggtgaagaagaatctaactcatcttcctcctccacaacagactctgcagcgagagatgctttcatcgcttttggaattctcaaacgcgacgatgaccttgttcctcctcctcctcctcctcctcataaagaaacaggagatctctttccggtggtggctgatgctcgtcggaatatagaattctccgtggaagacagtcactggttgaatctttcttctttacaaagaaatacacag

SEQ ID NO: 138717 - DNA, 256 bp, Arabidopsis thaliana
aaccgtctgtatcacccaactaaatcctcacgggattagatccaaagtctcaaactttgatccaaaaacacaaactttggtcaaaagacataaactttgagccaaagtcacaagctttcgtggcgagcgatggattacaatccaaatcttcctcctttaggaggaggtggtgttagtatgagaagaagcataagtcgaagtgtaagcaaagcaagtaggaacattgaggatatcttcgcatctggttcaagaagaa

SEQ ID NO: 138718 - DNA, 330 bp, Arabidopsis thaliana
gatatatcactccatctgtgcgattttgccgactctccctaagatctttggagctccttcgtaggtagccggaggtgaagtagaatacaagacagaagaaagtccaagtgtcgcttctcatctcttttctccagtagataatggaggggagattggctaatatgtggaggttgactgttaacgaaagtaaattcgtggaaactgcgttgcaatcggagctcagagtagatggacgtggcctttatgattatcgcaagcttactattaagtttggcaaataatatggtagctcggaagttcaacttggtcagactcatgtaatgggtttcg

SEQ ID NO: 138719 - DNA, 213 bp, Arabidopsis thaliana
cccacgcgtccgcccacgcgtccgcggacgcgtgggcggacgcgtggggaaagcaacgaagaaattcgggagtcggagaaattgccgggtggatggatgaatacctgtcagtttatggacaaacagatacaggatcgatcttcttcttcatctcaaccgtcgactgatttcaacgatctgatgaacactcatgacggcgatgatcaccagaag

SEQ ID NO: 138720 - DNA, 372 bp, Arabidopsis thaliana
gtgtacgtcttctccgcccttcttattcatttctactctgctgcgttatttctccgtcgtcctcaactcatcgccggcgtttaccatccgctagatccgtcgcctctccggtcgactatttatatggaatcgtaaatttacagacactaataagaatagtttgacaaaatctgtagctggaataatgtcgatgagcaattccttgaaaaagctctcttcttgtgttcttattgatctcgatggtaccttaatcaacacagatggtgttgttggtgacattttgaggaaatacttgtgtaaatatggtaaacagtgggatggaagagaatcattgaaaatagttggcaaaactccagtagaagctgctactac

SEQ ID NO: 138721 - DNA, 377 bp, Arabidopsis thaliana
cccaattatgtcttattactcctctttcttcttccttttcctcttctcctttctcacgagtttcagagtttctgctcaagatcccacttacgtataccacacctgtcaaaatacggcaaattacacaagtaacagcacttacaacaacaatctcaagacccttttggcttctctttcttcccgcaacgcttcctactccaccggattccaaaacgccaccgtcggccaagctccagacagagtcaccggacttttcaactgccgtggagatgtctcaacggaagtttgccgtagatgcgtctcctttgccgtcaacgacaccttaactcggtgtcctaaccagaaagaagccacactttattacgatgagtgtgtac

SEQ ID NO: 138722 - DNA, 398 bp, Arabidopsis thaliana
cggacgcgtggggaacaactcaagaactctgcagctgatcgatatacaaaggaaagaagcagtattgttgtgattggacttagtattcacacagctcctgttgagatgcgtgagaagcttgctatacctgaagctgaatggccaagagctattgctgaattgtgtggtttgaatcatattgaagaagctgctgtgcttagtacttgtaaccgtatggagatttatgttttagctttatctcagcatcgtggagttaaagaagttactgaatggatgtcaaagacgagtgggatcccagtttcagagatttgtcaacaccgttttctgttgtacaacaaggatgctacacagcatatatttgaagtctcagctggtcttgactctcttgtcctaggaga

SEQ ID NO: 138723 - DNA, 371 bp, Arabidopsis thaliana
agaggctcatgctttctctaccgccgatggtttctctctcgatgtatttgttgttgatggctggtcgcaggaggaaacagaaggtttaaaagatgcattgaagaaggagataagaaagtttaaggatcaaccttgttcaaaacagaaatctatcactttctttgagcatgacaaatcaaccaacgagctgctacctgcgtgtgttgaaatacctacggatggaactgatgagtgggaaattgacatgaagcagctcaaaattaaaaaaaaggtggcatgtggatcatacggggaactatttagaggaacctattgtagtcaggaagtagctatcaaaattctcaagcctgagcgtgttaatgcggaaatgc

SEQ ID NO: 138724 - DNA, 370 bp, Arabidopsis thaliana
ttatcccaagaaatgctcatcctccagagcctgaaacccttgatggaaacatggatgcaggggctggccagactccgcagctgcgattgcctcgcattaaggaagtacagcttaatggaatcacatttaaggtcaagtactgtgacacttgcatgctctataggccgcctcgctgctcgcattgctcaatttgcaacaactgcgtagaaaggtttgaccatcactgcccttgggtcggccaatgtattgggatgaggaactaccgattcttcttcatgttcgtcttctccacgacccttctatgtatatatgtgtttgccttctgctgggtctatataagaaagattatggaatcagagcacacaaccac

SEQ ID NO: 138725 - DNA, 281 bp, Arabidopsis thaliana
ggctcaccacccatctcctcatttctcttttgcatttctttctttttttctgcattgcattcttttgaggggtttaattttctgcatagctttgtctaatctcttagagctcaataagagaagatggatgttccacggccagctttcaaatgttttgatgacgatggccggcttaaacgttcaggtaaaaaatttgaatccccttgttggttacttgacagtttacacctttgaaatgaatgatccagagagaaaaactgcgattgtttcatggacggttt

SEQ ID NO: 138726 - DNA, 365 bp, Arabidopsis thaliana
ggcaccatcaatgaaagaaattttttcgaaagataatttcaagaaaaacaagaaacttgttttgctatccgccgccgtagctttgctcttcgtagccgccgtcgccggaatctctgccggagcttcaaaagccaacgaaaaacgaactctatcaccgtcgtctcacgccgtgctaagatcctcatgcagctccacgcgttaccctgagctctgtatctctgccgtggtaactgccggcggcgtcgagctaacgtcgcaaaaagatgtcatcgaggcatcggtgaacctaacaataaccgccgtggagcacaattacttcaccgtgaagaagctgatcaagaagaggaaaggactgacgccgcgcg

SEQ ID NO: 138727 - DNA, 378 bp, Arabidopsis thaliana
gacaacttgtaggaagatagtaaattggagaaattacttgaaattcccagatgaggttagactatcaccagaagccaaggatcttatttgtaggcttttatgcaatgttgaacaaaggcttggaacaaaaggagcagatgaaattaagggtcacccttggtttagaggcacagaatggggaaaattgtatcaaatgaaagctgcctttattccccaagttaatgatgagttggacacccaaaattttgagaaatttgaagagactgacaagcaagttccaaagtcagccaagtcaggtccatggagaaagatgctctcatccaaagacattaactttgttggttatacttacaagaacgtagaaatcgtaaatgatga

SEQ ID NO: 138728 - DNA, 349 bp, Arabidopsis thaliana
gaaacttagggtttatgtggtggatgaatgatttagcagcgaattgaagggtgtggtggaagatggagttttgtccaacatgtgggaatctgttgcgatacgagggaggtggcaattcgagattcttctgttccacatgtccatacgtcgcctacatccaaagacaggtggagataaagaagaagcaacttctggttaagaaatctatagaagctgttgtgactaaagatgatatacccacagctgctgaaactgaagccccatgtccaaggtgtggccacgacaatgcatacttcaaatcaatgcagattcgttcagcagatgagccagaatcaagattttatagatg

SEQ ID NO: 138729 - DNA, 363 bp, Arabidopsis thaliana
cggacgcgtgggtctctcgctccgtccttcctcagatctgatcgtccgccggttttcacgatgccgtcctcgtgttccttcttctcgtttcccttctcactcctacgttcgcatccgattcagatcacaagtatcaagccgaggagcaggtcaccctatgggtaaacaaagttggcccatataacaatccacaagacacatacaactattacagtcttccattttgccgcccatctggaaacaatgttcacaaatggggtggtcttggtgaagttctaagtggaaatgagctgattgacagtgagattgcgataaaattcatgaagaatgtcgagagaagtgtcatctgtccgcttgaactcg

SEQ ID NO: 138730 - DNA, 395 bp, Arabidopsis thaliana
ctcagattcagaaaaggccaggtctgatttctcccgggttcttaagaaatccgccgccgatctcgggattgagatttggatcctattgacgagcctaaggtgaagcaatccatcgaagatgccacttcgcaaccagaatcgcgctcctttacctagtccagacgtcaaaaaggaagcgctctcaagtattccttttgacaagcgaaggaaggagacgcaaggtactggaagaagacaagtgctttcgacagtgaacagacaagatgcgaacagcgatgtgggaagcacagaggagtgtggtaaagttgagtttacaaaagatgaagtgttggctttgcttaacgagagagctaaagctggaaaatttgataccaagggtaagattgagcaaatga

SEQ ID NO: 138731 - DNA, 376 bp, Arabidopsis thaliana
cgccgatcaaaaaaccctagaatttcttccactgttatgtaagtttgatcttgttgtctccactaagaggcgaagagagaaagagggttttaggttgtgtgttctgtttcaaagggtttacttctcgttgaccccgatcgagatggttgattcttctcgtgattcgtgtttcaaagctggtaagtttagtgctccaggttttcgatttcaccctactgatgaagagcttgtggtttattatcttaagaggaagatctgttgtaaaaaacttcgagtcaatgccattggtgtcgttgatgtttacaaagtcgatccttctgaattgcctggtctatcgatgttgaagacgggagatagacagtggttctttttcact

SEQ ID NO: 138732 - DNA, 408 bp, Arabidopsis thaliana
gaaaaaaaaaagagagaagaaaaatggtgttgacaatctatgctcctttattcgcttcttcaaagagagctgttgtgacattggtggagaagggagtatcattcgaaactgtcaatgtcgatctcatgaaaggagaacagagacagcctgagtatctcgcgattcagcctttcggtaaaatcccagtcctcgtcgacggagactacaaaatcttcgagtcgcgtgcgatcatgaggtatatagcagagaagtatagatcacaaggacctgatcttttggggaagactattgaagagagaggacaagtagagcaatggttagacgttgaggctacaagttaccatccaccactattggctttaacgctcaacattgtctttgcaccacttatgggtttccctgctgatg

SEQ ID NO: 138733 - DNA, 375 bp, Arabidopsis thaliana
cccacgcgtccgatctgagctgagaaaaagtgatttatcgttagggtttcggccttttcgggccaatgagcaaccccaatatccttggctggcggctccggtgacggaaaggaagaagatgagaagcttatattcaaacagcagctgagtttgtcccatttatggcttcttctggtgctatcagtggctgttccattactccaatggtgtttgagcaaacaggacaagacgggtctctggtttgagctgttggggttgctttgtctaaacactcaacatggtagacgtgatggcaggggaaaacaccagtggctggcatgtctctggatctcaatatcttgtatgagctccatggagatttctgagataaaagct

SEQ ID NO: 138734 - DNA, 342 bp, Arabidopsis thaliana
ttcttctttctctctgttttcttcttcttccgccgaatcagaaagcttgtctttttctttactccggctaccaaaacttctcggagtttctctgagagtttcatttccgaccttcttcttatccttatttgcggcaagatttccagcgagagtttttttctcttttcctttatcgaacataagaaatctctggtttgctggaagttttttttccggaaggtggaagcttagattggttctgatttcagaagcaaatcgtttgttgttgcctaagtaaaccgaatcaatttatgggatctatagaaacagacggagaacagaggaaattaagctgattttttc

SEQ ID NO: 138735 - DNA, 370 bp, Arabidopsis thaliana
ggacctggagatttccttgttatcgaactaactgatcagctgcaaaaactgaaggtggaaccagtgctgctacattatctttctcagatgaagattcttcaaggtatggaactgagaatgactactagcacaaggttaaaggcgtgtttatacagttttacctctcctggaggtccaatgtacccgacaagagccgtccgtcatgcagcctgggatgctttggattccctctttcctgtgagtattaccttgtaaaaagttcaggtttaggcccattgttttgattgcaagatccagtgtaagtgtgtatgggtttcaaaaacatcatctaagagttttaggcaatcacctaaaaatctgaaagctccca

SEQ ID NO: 138736 - DNA, 136 bp, Arabidopsis thaliana
acaaaggttttagatcgctcctcgagttcatcgaggaagatatcacacatattgtccccacagagttgattggatgaattccatgtacaccatgggctatggatgtgacgagcagacagcacactggtggacacat

SEQ ID NO: 138737 - DNA, 370 bp, Arabidopsis thaliana
gaaaagttcttacgaagaacccagattttgttaagaaatggatgtgccagaggagacgaggcttcgccacaagcgagattttatccagttcctcgatagtatgtatatggaggaaatcaaggctttggtacatcaaaagcgtcaccgtctcattattaatatctctgacattcaccaccacttcagggaagttgcctctaggatactgaagaatccaaatgagtatatgcagtcattttgtgacgcagccactgaagctactcgtgctattgaccctaaatacttgaaggaaggagagcttgtccttgttggttttgaaggttattttgtttctcgcgttgttactcctagagagcttctctctgatttt

SEQ ID NO: 138738 - DNA, 381 bp, Arabidopsis thaliana
cgcttatcttctcttcctgtccttttcaactccgtgactaaaaaaaaaaaaaaagtaacctttacctacttttcttctgggttttcgataatctcttttgggtatttgcaaacccctcaaagattcttcctttctcctttaaatcgtctctgctttggctttgtactagccatcgcaattcatcatcatctattgcaagtatctccaaggttttgatttccacaatggcaacaactactctcaatgacagtgtcaccactacacttgcttcagagcctcaaaggacttaccaagttgttgttgctgcaactaaagaaatgggtattggtaaagatgggaaattgccatggaatttgccaacagatctcaagttctttaaag

SEQ ID NO: 138739 - DNA, 361 bp, Arabidopsis thaliana
acggacgcgtgggctgggacatcagtgaagatgtctaggtatcctgtcagagttgttctttctgcctttatgatactcggccatccagatgctgtttttaatggtcaaggtgatcaagaggctgctctcaataacgcggctaaagggtttgtgagggagcttaagttattgataaacgttattcaagagggtcctgttcaggtttcgggtggagaatcaaaacatcggaccttaagatctcagttggacttattcgataaggcttggtgctcctttttgaactcatttgtgatttggaaagtcaaggatgctcggttgttggaagatgacctggttagagcagcttgtcagcttgagcttt

SEQ ID NO: 138740 - DNA, 360 bp, Arabidopsis thaliana
gacaggcgttagtggcgattggcgatggcagctcctgcggtggaggcaaccgtcgcaagtgctctccgctctgtgattcttagagctcgtaaggcggcggagcaagtaggaagagatcccgagcgggtcagggtccttccagtctccaagactaaacccgtctcacttatccgccaaatctacgacgcaggtcaccgttgcttcggcgagaattacgttcaagaaatcatcgataaagctccacagcttccggaagatatagagtggcatttcgtggggcatttacagagcaacaaagccaaaacgctattgagtctgacttttatccccatctttaatattgaattaggggtttagtga

SEQ ID NO: 138741 - DNA, 369 bp, Arabidopsis thaliana
cttcatcattaccaaatcatcaacttaatcgtttctctcaaatttaaggttttctcttttctcgaaagtcttgcggttttctgaatcatctctatctggtttgagggtttcgtttgatatctggagaaaggggtttctggaaacaaggagttcataattcgcgatcttgatctatcgatcttcatttatatataaaagcgtgaatgagattatgatggagtcgaaaggtggtaaaaagaagtccagcagtagtagttccttattttacgaagctcccctcggttacagcattgaagacgttcgtccaaacggtggaatcaagaaattcaaatcttctgtctactcaaactgctccaagaggccatcctg

SEQ ID NO: 138742 - DNA, 392 bp, Arabidopsis thaliana
ggagccagagatatatagtggctggatctgatgcgagtaagaagagctttggttctggacttagagttcgtcactctcagaaattgattccaaatgctgttgcgacgaaggaggcggatacgtctgcgagcactggacatgaactattgcttttcgaggctcttcaggaaggtctggaagaagagatggacagagatccacatgtatgtgttatgggtgaagatgttggccattacggaggttcctacaaggtaaccaaaggccttgctgataaatttggtgaccctcagggttctcgacactcctatttgtgaaaatgcattcaccggtatgggcattggagctgccattactggtctaagacccgttattgaaggtatgaacatgggttt

SEQ ID NO: 138743 - DNA, 246 bp, Arabidopsis thaliana
gtgaagctggagaacagtttaacgccacaatacattgcaacaacaggctaataggagctaggtactatctaaacggtgtactcgccgcaattggaggaaaattcaacagaacaatcatccaagatttccaatccaccagagatgcaaacggtcacggtacacatacagccacaatagctggtggctcatttgtccccaacgtgagctactttggtttagcccaaggtcgtgtccgaggtggtgctc

SEQ ID NO: 138744 - DNA, 367 bp, Arabidopsis thaliana
cccacgcgtccgcagaaacaaagatggttttgacaaaaaccgcaacgaatgatgaatctgtctgcaccatgttcggatctcgctatgttcgcactacacttcccaagtatgagattggtgagaattcgataccgaaagacgctgcgtatcagatcataaaagatgagctgatgcttgatggtaacccaaggcttaacctagcttcttttgtgactacatggatggaaccagagtgtgacaaactcatcatggactctatcaataagaactacgttgatatggatgagtaccctgtcacaactgagctccagaaccgatgtgtaaacattatagctcgactgttcaatgcgccactcgaggaatctga

SEQ ID NO: 138745 - DNA, 245 bp, Arabidopsis thaliana
aggacagagagaaaagggaaaattaccagacaagagttcttctttcttctctctgcctgcttctttttcctctcttttctctctctctctctttctttgtgaaaatctagaagaagagaaagctacaaaaatctcaacatcgaggtaagagttttggctacagagcaaccatgctaacttgcgccttctcgcaaaatcgtatgcactaatctcggtaaggaaagtgatgttggcaaaatggtgaa

SEQ ID NO: 138746 - DNA, 285 bp, Arabidopsis thaliana
tgatgattttgagtctagcagattaggaaggagaacaatggctggacttaagatctggcaagccatctttatcaccattgcactgatcatcattgtcgtactctctgttctttcattttgtctcatttggaaaaagaaatcaagaagatccaaaaccttaagtcttcccatcatacaaacccctgtggtgtcaaaggagatcaaggaagtcaggatcgagcatgttgtctcaacgagtagtaacttcgatcctcaggatgaaaacaacaatgaatctgacaaatt

SEQ ID NO: 138747 - DNA, 201 bp, Arabidopsis thaliana
aggggtgatgaagaatgaaagagaattgagatgaaggagtgatttcatcttggttataatattgtggacgtcagagaataaacaagagttattactcttctacatgactttgtatatttgtattgtaggggtttttatagactctttttgttacctctatgtatcttttttggtctacttttgagttctacttttgtttat

SEQ ID NO: 138748 - DNA, 254 bp, Arabidopsis thaliana
aggcgggagtatggcgcatctcgtcaaagactgtcctgataaattcaaccaagagtcagcccaaccaaagaagacttcaagatttgatgctacaccaagaggaaagctcactaagtttagtggggacgatcttgaagacgatttcactgaagagcccaaaagcagcaagaagatcaatacctctgatgattcagctcagaatagtgtcgaggtgaagaaaaagaaacaaggtccaaagattgtcaatttcgttg

SEQ ID NO: 138749 - DNA, 75 bp, Arabidopsis thaliana
cccacgcgtccgcggacgcgtgggtttgaaacttatctataatttggtattgtaatgacagtttgtgtttggttt

SEQ ID NO: 138750 - DNA, 294 bp, Arabidopsis thaliana
actggttcgagcctaaagatccaaattcgagtgaagacgtcaaagcagctagacgatccctcgagtaccaactcggctggtttcttcgccctctcacatatggacagtatccagcggaaatgttagaagatgtaaacatccgactgcgtgaatttacaccagaagaatctgagaaactaagaaaatctttggatttcgtcggattaaattactatggagcattcttctctacccctctcgccaaagtcaattcatcgcagcttaattatgagaccgacgtacgtgtaaactgga

SEQ ID NO: 138751 - DNA, 378 bp, Arabidopsis thaliana
cttcttcatcgatttctctcttccaaatctcccaaaagatgtcgaaccctagagttttcttcgacatgagtctcagcggtactcccatcggacggatcgagatggagcttttcgctgatacaaccccaaacacggcggagaatttccgtgctctctgtaccggcgagaaaggaatgggaaagctaggtaagccacttcacttcaaaggatcgatcttccaccgtgtgattcccggattcatgtgtcaaggacgtgatttcaccgccaagaacggaaccggtggtgaatcgatctacagtggtaagttcaaggacgagaactttatcaagaagcatacaggagctgggattctctcaatggctaactctggtcctaaca

SEQ ID NO: 138752 - DNA, 308 bp, Arabidopsis thaliana
aggatcctctttttaccctttctctctctctctttctctgcttttgcttttactgtttccttacaattgtgattgtattgagctaattttggtcggattcatttactcttctctttgtcaatttgcttgtttttgttaaagatgtgacatttattactaaaggcagatccacagtgcctgttgattgtttcttcctatcatcaatctcggaatttgagggggtcttattattaaggggaccataatgaatgaactccgaggcacaaaggctcacaagattgaaagtccagttccaggatgcttaggga

SEQ ID NO: 138753 - DNA, 187 bp, Arabidopsis thaliana
gcttgtgccgaataattggttaaggttgacatatgcaatcaagtctgagcaaagcggcaagcttgagtgtctttcagttcttgcaaaattggggcctcttttcacaatctgttcaagagccgagagtcctgctgcaatggaggatttacctgtctggaagcatgaaaatcgtgttgaatctctgcca

SEQ ID NO: 138754 - DNA, 269 bp, Arabidopsis thaliana
cccacgcgtccgcccacgcgtccgcccacgcgtctgctttttttcctcttccccgaagcaaaacccttctccttcttggcggctgcggccatttttttcttctttctctcttctattctatctcttaaaccctagatttgatctgggtttttcctgattccatttaaggtttctctatcttctttttttttcttcgtcatcttctttctctttggtcgcatccccttttatccgagaaggatctagccaaatctttgtttgtcgaatct

SEQ ID NO: 138755 - DNA, 369 bp, Arabidopsis thaliana
acggacgcgtgggtgaagaaccttctcttcctgcctctgttgaagcaacttcttctggaatgaaaaagcctcagggtttaccagcgaaaactaaaattgttaagaaagtaaagaagctggtaaaaaggaaaattataaaaggcactgctgctcaggtggctggtgaggagaatgtcatcaaggaaggtgaacaaagtggagagccttctcttggcgaaagcgaaaaggacaaagattcagaaccctatcttggaggaaacgatatggaatttcagaaagaattagcagtagctactcaacctgcagttgatgttaaagttgttggaggggagccttctggtaaggaaacactaaaagaggtaaagggaa

SEQ ID NO: 138756 - DNA, 353 bp, Arabidopsis thaliana
cttcgttgattgattctgctgcgagctctggtggttcacctccgatcctgaagcctctcttcgagtcccaaaggctgtgctgtacaatattttactctttgaactttcaggacttaccggagtttttcgaggatcatatgaaggagtggatgggagagtttaagaagtatctatcttcaaattatcccgccttggaaagcacagaggaggggttaacacttgttgatgatcttcgcgctgctatttgcgagaatatcaatcattatattgagaaaaacgaagaagactttcaaggctttttgaatgagtttgcatcacttgtctggacattgctccgggatgtgtcaaagtct

SEQ ID NO: 138757 - DNA, 161 bp, Arabidopsis thaliana
atacatatatattttgtcttggttggattttgttcgcgtgggttacttacttgagagaacctcgagacctgtcttgtctttatgcttcagaagcaaatcaaagcatctctccaagatttgaagctccatctatggcagcccttcgtcaccttttccttttc

SEQ ID NO: 138758 - DNA, 313 bp, Arabidopsis thaliana
tgagtcgtattaaacatcacctctgagtggaaaaaattgagtgagcgccattgtaggagagcttcgggaaagaagaagaagaagaagaagccatgaccatggctcttgcttcttctaaagctttttcctcaatcttcagtactttatcaccaatcaatcagtcgaaatttgtgttagcttgctctggttcaaatcatgtagacgtcattgatcggagaagaagaatcatgatctttggctcgagtttggctctcacgtcgtctctgcttggttccaatcaacagagacttccgatggaatccgcaatcgcatt

SEQ ID NO: 138759 - DNA, 376 bp, Arabidopsis thaliana
ccctctaaaatgaatcatattaagagagagagagagagatatgatggacggcgttgaaggcggcacggcgatgtacggtggtctcgagacggtgcaatacgtacggacgcatcatcaacatctgtgcagagaaaaccagtgtacctctgctcttgtcaaacacatcaaagctcctcttcatctcgtttggtcacttgtacggagatttgatcagccgcagaaatacaaaccgtttgtgagcagatgtacagtaatcggtgatcctgaaatcggcagtcttagagaagtcaatgttaaatctggtcttcctgcaacaacatctactgagagattagaacttcttgatgatgaagaacacatcctcggtatcaaaatc

SEQ ID NO: 138760 - DNA, 352 bp, Arabidopsis thaliana
ttacattgtgctgcactactcaacctcaatggccgcctcaacaatggctctctcctcccctgccttcgccggtaaggccgtcaagctttcccccgcggcatctgaagtccttggaagcggccgtgtgacaatgaggaagactgttgccaagccaaagggcccatcaggcagcccatggtacggatctgaccgtgtcaagtacttgggtccattctctggcgaatcaccgagctaccttaccggagagttccccggagactacggatgggacaccgccggactttcagctgaccccgagacattcgcaaggaaccgtgaactagaagttatccacagcaggtgggccatgctc

SEQ ID NO: 138761 - DNA, 358 bp, Arabidopsis thaliana
taaagtgagtcgtatgacacgagaaagctgacctcactcgctacttgggttgattgtgtaaatatatgaaagtatcgtcgttgagaaattgggactctgatctgttgcagaaagccgaaagctttggtctttggagctctaacctctgcctctggtaaattttctattttttctttatgatcgatttggttattgttgaaatccagatcaatttttgttgagatgggtttagttgttgtgatgattgctaagtcttctcagctgcttttgttttcatttcttacatattaccccccaaaaaaaggctgtgttttttccaggtttaagtgcaattgagtttgcttcaaagggtttactt

SEQ ID NO: 138762 - DNA, 401 bp, Arabidopsis thaliana
accacgcgaccgcccacgcgtccggcttttctgtgatgattttcaagattctcgaaactcttttgatggcttcttcctttttgttttaaaatccgtgtccttatttataacaaatctaccaacttgttcatcactcattcaactactcccttcattacttttttctattacagaactaaagtatcaattatttgccagtgtgtctcatcattcatcaaggcatatttgatcctttttggctttggttttttgtttctacaaatcgctaaagtttttgtttttgttttcttcttttgtgcaattcagtgctacggagtgcaaggattgtatttgtgtgtgatcatggtggaggagaaaacgggaaacgtgactctacttgatcaaacagttgaagatttgtt

SEQ ID NO: 138763 - DNA, 350 bp, Arabidopsis thaliana
tcctcagctttctccaagaacaacaacaataagtctattaatttccatactgatccacttcagaaccctttaattacgggaatgccaccatcatcttttggttatgatcactccattgatctcaacctcgctttcgctactctccaaaagcatcatttatcctctcaagctactacgccttcttttgggtttggaggtgatctttctatttatggaaactcaacgaatgatgtacggatcttcggagggcaaaacggtacttataacaatagtttgtgttatgggtttatgtccggaaatggtaataataatcaaaatgaaatcaagatggcttctacattggggatgtc

SEQ ID NO: 138764 - DNA, 368 bp, Arabidopsis thaliana
tctcactctctgcctcctttcggattcaaatctcagatctagctcaaccatggcgttgctcgtcgagaagacctcaagtggccgtgaatacaaggtcaaagacatgtctcaagccgatttcggtcgtctcgaactcgagctcgccgaagttgagatgcctggactcatggcttgtcgtaccgaattcggaccttctcagccattcaaaggcgctagaatcaccggatctcttcacatgaccatccaaaccgccgtactcatcgaaaccctaactgctctcggtgctgaagtcagatggtgttcctgcaacatcttttccactcaagaccacgccgccgcagccatcgctcgtgactccgccgctgttt

SEQ ID NO: 138765 - DNA, 226 bp, Arabidopsis thaliana
caatccaataacagatctctattcactattttttttaattggtaaaaaaatccatgttcagtcaaaggaaacaagtacacaagtgaaagaaaaaagaatagtaaaagagtagttgtttactgaagtaacaactgccagctctgtctcaaaacggtttgttgttccgattgttgggtttggaggaagaagatgatgacatcgacattgatcttgagtgattttgtgt

SEQ ID NO: 138766 - DNA, 319 bp, Arabidopsis thaliana
ataaaaaaaaaaaaaaacacaaaaaagtttcaatggccgcctcaacaatggctctctcctcccctgctttcgccggaaaggctgtgaacctttcccctgcggcatcagaagtccttggaagcggccgtgtgacaatgaggaagactgttgccaagccaaagggtccatcaggcagcccatggtacggatccgaccgagtcaagtacttgggtccattctctggcgagtcacccagctaccttaccggagagttccctggagactacggatgggacacagctggtctatccgctgaccccgagacattcgcaaggaaccg

SEQ ID NO: 138767 - DNA, 398 bp, Arabidopsis thaliana
acaatggaagctatctctcaaacctgcacaaagatcatcaccaacccatctcagaggatatataaaacctcatctccagtcacggcaattccacaaacaaagctgagccttaaagtcaagaaggagaggtgggttgctgctgctagatgcgtggcttcaggatcggattatgctgcggcaatggagccaattacgccggaggaagaggaggaattgactcagagaagagggatatgtggtggagaagtaaacagaggagtatgggagctcttggagtgccttgagaaagaagctattatggggaatgatgatgggagagatcctagagattacaatagaagagcaaagatttttgacaagagttctaagatcttcaagaacttaaatgaacagagaga

SEQ ID NO: 138768 - DNA, 400 bp, Arabidopsis thaliana
agagacgaccctttttctactacacaaagaaactactgattaattcattaatactaatagagttattaacattaccgatccttatattattatattaaatataaaaaaaaaaaagagaaagaagcgatctctaaaaatcaaaatctcgattttttttttttttttttccgtttggaggcgagaggaataatttttgttggggtgaggatatatgggatggcctttcacgtagcttgtccaattacatgtcgtcggatttgccattgctccttagggttttctcgggatctccgtggagccaatgcgaaacataagtttttgaaagaggttattcgagtggaggagtttctcaaggatcctgctgtttcttctaatgtttttattggaggtaccgttcaag

SEQ ID NO: 138769 - DNA, 349 bp, Arabidopsis thaliana
accacgcgtccggaaaacccaaaaaaaatccagatccagctgaaattgaattttcaaccaacgaagaagagatttttccaagagcaacagacaagaagaagagaatgaagtcggagctaaatttaccagctgggttccgattccatccaacggacgaggagcttgtgaaattctacttgtgccggaaatgtgcttccgagcagatctcggctccggttatcgccgagattgatctctacaagttcaatccttgggagcttccagagatgtctctgtacggagagaaagagtggtacttcttctcacctagagatcggaaatacccaaacggttcgcgtcctaaccgggc

SEQ ID NO: 138770 - DNA, 262 bp, Arabidopsis thaliana
acggagaagacgattatttcgtcggagagttcaaattcgtctccgttaaacccttcttctacgcggattatctgccatgtatgtaataagcagttctcgcagtacacttgtcctcgctgcaacttccggtactgttcccttccttgttacaaatctcacagtgtccaatgtactgaatcattcatgagagataatgtaaacgatgaattgaagcaagttcgatctgatgatcaaacgaaaaggaagatgctcgaaattttga

SEQ ID NO: 138771 - DNA, 416 bp, Arabidopsis thaliana
agagttttaccatagacgaacgccttttattcgtcgtggcgaacgaaaccctaatcatcacttctccacttttgttcgtcatcctcttcaaaatttcttcaatttgattctgcaatttcctttatctctctctggattaagtttcaatttcttcttagcccgccatggatgctcagcgagctctgttggacgaactaatgggcgcagctcgtaatctgacagacgaagagagaagagggttcaaggaggttaagtgggacgatagagaagtatgtgcattctatatggttcgattttgtcctcatgacctctttgttaacacgaaaagcgatcttggagcatgctcgagaattcatgatccaaagttgaaagaaagcttcgagaactctccgaggcatgattcctatgtgcctaaa

SEQ ID NO: 138772 - DNA, 412 bp, Arabidopsis thaliana
  unsure (1)..(412): unsure at all n locations
cgtccagaaatattggccttgtcaaataacaatttgaccggagaagtacctgaatttctagctgacttaaaatcaatcatggtcatagacttaagaggcaataacctcagtggcccggttcctgcctcacttcttcagaagaaaggattgatgctacatcttgatgacaatccccatattctttgcacaactggttcatgtatgcacaaaggagaaggcgaaaaaaagagtatcattgtaccagtggttgcatcaattgtttcattggctgttattataggtgcactcattctgttccttgttttccgaaagaaaaaggcatcaaaagttgaagggacactaccatcttacatgcaagcatcagatggtagatcgccgagatcctctgaaccagcaatagtgacganaaaca

SEQ ID NO: 138773 - DNA, 367 bp, Arabidopsis thaliana
acccacgcgtccgggcgcttgttgcgtggaaaacagacaatgacagagtttgagccccttcataagctgcaagctcataatggccacatccttaaatgtctcctctctcctgcaaacaagtaacatgtttcttatactttctcttttaaccgttttcttcatcctctccttttcgaagctcttacatatttgttagcagatatctagcgactgcatcatctgataaaactgtcaaaatatggaacgtcgatggttttaaactagagaaagttttaacaggacatcaaagatgggtttgggactgcgtcttctcagtggatggagaatttcttgtaacagcatcatcggacatgacggctagattgtg

SEQ ID NO: 138774 - DNA, 419 bp, Arabidopsis thaliana
gggccgacccacgcatccacttcttcttcttctctccgatttgctcagtcgattgcgtcatgtcgtcgtttgatccgccgaatcaccgatattcagccttagtacttattcttctcctgcttggtttttcggtagcggcggccgacgatgtatcgtggaccgaagattccagcctcgagtctcctggctgtaccaataagtttcaaatggtaaaggtcttaaattgggttgatggtgttgaaggagacttccttactggcttaactgctcaatttggagctgccttgccttctgttcctgatcaagctcttagatttcctgctgcttttgtagatcctttggactcttgttcccatctctcttccaggttagatggacatattgccttgtcgatccgtggcaattgtgctttcactgag

SEQ ID NO: 138775 - DNA, 386 bp, Arabidopsis thaliana
acccaagcgtccggttttcgatttggtttcagtctaataacgagaggggagggaagagtaactaaaacctcaaaaaaagtcaaaaaagtttcgaaaatccaaaaaaagataatggcgcaggttcaacttcagggtcagactccgaatggttcgaccgcggcggtcacttctgctccggcgacgtcaggtggagcaacggcgacccagtttggtaacacgtcgctttatgtgggggatctcgatttcaatgtgacggactcgcagcttttcgatgcgtttggccaaatgggtactgtggtcaccgttcgtgtctgtagggatttggtcactcgccgatctcttggctatggatacgttaacttcaccaatccccaagacgctgcaag

SEQ ID NO: 138776 - DNA, 374 bp, Arabidopsis thaliana
aacggtgagaaatccggagtcggtgttgccatccacgaaatcgctcacagctggaccggaaacactgtcacctgcagcaactggtcgaacctctggatcaatgaaggattcactgttttccttgaaagaaaggctgacgttaaattgttcggacctgactactacaagactgatgccgttaatggaaatgactccatgtggactgatatgcttaacttcggactccagaataacttctcaagtcttttccctctcacccagggacagaacccagacaatgcattctccaccattccttacgaaaagggattccagtttttgacctacctcgaaacctacatcggtgaaaccaatatgcagactcttatccacaa

SEQ ID NO: 138777 - DNA, 363 bp, Arabidopsis thaliana
acccaagcgtccgcaaatcttaaacgttttactttgtgctgcactactcaacctcaatggccgcctcaacaatggctctctcctcccctgccttcgccggtaaggccgtcaagctttcccccgcggcatctgaagtccttggaagcggccgtgtgacaatgaggaagactgttgccaagccaaagggcccatcaggcagcccatggtacggatctgaccgtgtcaagtacttgggtccattctctggcgaatcaccgagctaccttaccggagagttccccggagactacggatgggacaccgccggactttcagctgaccccgagacattcgcaaggaaccgtgaactagaagttatccaca

SEQ ID NO: 138778 - DNA, 409 bp, Arabidopsis thaliana
acgaaaaagaccaatcaatcctttctccctgaaatggcggcggctctgcagacgaatatccggacggtcaaggttccggctacgttcagagctgtaagtaaacagtcattggcaccctttagagtaagatgtgctgttgcttcccctggtaaaaaacgatacaccatcactctccttcccggagacggcatcggtccggaggttgtctccattgccaaaaatgtgcttcagcaagctggatctttggaaggagtggaatttaacttccgtgagatgcccattggaggagctgctttggatttggtcggagtgcccttgccggaggagactatctcagctgcaaaagaatcagatgcagtgcttcttggagccattggagggtacaaatgggataacaatgaaaaacatc

SEQ ID NO: 138779 - DNA, 378 bp, Arabidopsis thaliana
aatccacccacgcgtccgcttacaacaacaaatcttaaacgttttactttgtgctgcactactcaacctcaatggccgcctcaacaatggctctctcctcccctgccttcgccggtaaggccgtcaagctttcccccgcggcatctgaagtccttggaagcggccgtgtgacaatgaggaagactgttgccaagccaaagggcccatcaggcagcccatggtacggatctgaccgtgtcaagtacttgggtccattctctggcgaatcaccgagctaccttaccggagagttccccggagactacggatgggacaccgccggactttcagctgaccccgagacattcgcaaggaaccgtgaactagaagttatccaca

SEQ ID NO: 138780 - DNA, 354 bp, Arabidopsis thaliana
aggagggtacaaccattttgctggaaggtttgttttgttaaaaattatgtggagagattctcatatgttcttctatcttcttcttgttaatctttcatgtttgtagctgatgggaagtgtttttccatgtcattctttcgctcagagacgcttctcgtgcatttgtttctggcaactttacaggagatggacttacagattcgttacaagggttatctagcagtgaggtgaagagcattgttgactggcgaggtttctactccaggacctacactcctgttgggaagcttgttgggcggtactacgatagccaagggaatccaactaaacaccttaaaggagctgaagcaaaag

SEQ ID NO: 138781 - DNA, 446 bp, Arabidopsis thaliana
cgaacatgcttgctggtttctcgttgatggtgaaggtagaaatcatggtccacattctatattggagctttttagttggcagcagcatggatatgtttcagatgcagccctgatacgtgatggtgaaaataagcttagaccaatcacattagcatcgttaattggtgtatggagggtgaaatgtggtgatgctaattgtgacgagccagtgactggcgtgaacttcatatccgaagtttcggaagaactctctgttcatcttcagagtggaataatgaaaatagctagaagagctctactcgatgaaatcatcagcagtgtgatttcagactttctgaaggccaagaaaagtgatgagcatctcaagtcttatccacccacttctgctgttgaatccatatcgtctcgggttattaatgcggagaaaagtgttgtctcaaacactg

SEQ ID NO: 138782 - DNA, 346 bp, Arabidopsis thaliana
tggaattttcaggtcataatttctggagatccacaggtcataatttctgaagctatacctaaaacatggcaaaaaaagaagaatccacaggtttttatggatgtatcaattgatggagatccagctgagactatggcttttgagcttttccctgaagtcgctcccaaaacatcagagaatttccgtgcactatgcacaggggagaaacgcatcggacccagaagcggaaaacctttgcattataaaggatcctttttccatagaataatgaaaggttcctcagcacatgatacaggtctgatcgcaacacctgcttttcatgtgatatagttttaaggccggtgac

SEQ ID NO: 138783 - DNA, 275 bp, Arabidopsis thaliana
tctgaagctatacctaatacatggcatctgtcgaacaatccacaggtttttatggatgtatcaattgatggtgatccagctgagacgatggattttgcacctttccctgaggtcgcgcccaaatgatcagagaatttccgtgcactatgcacaggggagataggcatccgtccgaggagcgggatacctttgcattagaccggatcctttttccatataatactgaagggttcctcagcacaggatacaggtctgatcgcaacacctgcttttca

SEQ ID NO: 138784 - DNA, 455 bp, Arabidopsis thaliana
  unsure (1)..(455): unsure at all n locations
ggaatccaaatgttcagtactattccagcaaagaattctcgcggcttgatcacgccttgcactacaacgtgcgtggtacactggccttgcctgtctttaatccctctggtcagtcctgcataggtgttgtggaacttataatgacctcagagaagattcactatgcacccgaagtggacaaagtttgcaaagcccttgaggcggtaaatctgaaaagctcggaaatacttgatcaccaaacaacacagatatgcaatgagagtcgccaaaacgcgcttgctgagattctcgaagtgctgacagttgtatgtgagacccataacttgcctctcgctcagacttgggttccatgtcagcatgggagcgttcttgccaatggtggcggtctaaagaaaaactgcaccagctttgacggtagctgcatgggtcanatctgcatgtctacaaccgacatg

SEQ ID NO: 138785 - DNA, 443 bp, Arabidopsis thaliana
aacaaactttttaaaaaatgtccgtttcaacacatcaccaccacgtggtcctcttccctttcatgtcaaaaggccacatcatccctctcctccaattcggtcgtctcctcctccgtcaccaccgcaaagaaccaaccatcaccgtcaccgttttcaccactcccaagaaccaacctttcatctcagacttcctctcggatacgccggagatcaaagtcatctctctccctttcccggaaaacatcaccggaatccctcccggcgtcgagaacaccgaaaagctcccatccatgtcacttttcgtccccttcacacgcgccacgaagcttctccaacctttcttcgaagaaacactcaagactcttccaaaagtttcgttcatggtctctgatggattcctctggtggacatcggagtctgcagctaagttcaacattccaaga

SEQ ID NO: 138786 - DNA, 354 bp, Arabidopsis thaliana
gaaaagggaagatggagggatcttgacatatgatggtagatatgttatgtacaatgtactcggtaacattttcgagctatcttcaaaatacatccctcctattgaacccatcggccgaggtgcttatggtattgtctgctgtgctacaaactcagagacaaatgaagaggttgctataaagaagatagcaaacgcgtttgacaacagagttgatgctaaaagaactctccgagagatcaagctcctttcccacatggatcatgacaatgttatcaaaattaaagatataattgagctaccagagaaagaaaggttcgaagatgtatatattgtttatgagttgatggatacaga

SEQ ID NO: 138787 - DNA, 335 bp, Arabidopsis thaliana
acgcgtcaacagaggatgaatatattatgctatcatttcgaatttatattagtaaatttgaagtcataattatactttttgaatgctaatactcaatttgtgattattttaccagtgaaatgtgaatccgaacaaatgaaatgttaaacgtgtccaggtccattgttctataatggatggtaccatttcttctatcaatacaacccaaatgcagctgtgtggggtgacattgtttggggtcacgccgtgtcaaaagaccttatccactggctttatctcccagtagccatggttcctgaccaatggtacgatgcaaacggtgtctggaccggttc

SEQ ID NO: 138788 - DNA, 430 bp, Arabidopsis thaliana
cgcggacgcgtgggccaccggtaacctcccaagctccttagtctgcacaaccaaatcacacggcgcatgcgccagcttcttcagcgattcgagcttgctctgcgttgacgacatccatgattacaccgccacaactccggttcctgccattttttctagggttttgagagagtgtggagcagaggagaggggattttataggacgcgatttgaaatttgtttgtggactgtgagctgttggattgagaaaagatagtaaaagtacgtgaatcggacgggtttagaggaaggagcacgaggattgtggtggacgtgagtgtagagaagagaagctacgtatggaaactttgaccacaagatttgtttctttttgttgtaaatgtatagtcgcgaagagattattatcttgttgacgtggaagctcatttcc

SEQ ID NO: 138789 - DNA, 345 bp, Arabidopsis thaliana
agaagattgcaagccgtcaagagggtcgcagtcttgattcacaaattggtcctcaatgtgtgaatcaagactgcgaccctcttgatggatagattgctgaccggttttgaagttcacgtttgtaggcctgtatcgcttcctggccgggccagtgctggcgttctgatggatacttcttggaaggtaaagagttggagttctacatgaagaagatccagaagaagaacggcaagggtgctgcttagagtctcttcttatctgccttgagcttttgtcttacaacatgttttgagttttcagtttcaattgtctgagagactaggtttttggattagcttgtggtat

SEQ ID NO: 138790 - DNA, 416 bp, Arabidopsis thaliana
agcgagccgacccgtcgcgtcgtgggtttaggtttaacgtattggcgcgccagtgaagaaaatagacgacgatggcgatgatgcatcctccgcagccgccgcaaggctcctatcaccatcctcagacgctcgaagaagttcgaactctttggattggtgatttgcagtactgggtcgacgaaaattacctcacttcctgcttctcccaaaccggcgagctcgtttctgtcaaggtaatacgtaacaagatcacgggacagccagaggggtatggttttatagagtttatatctcatgcagcagcagagagaactctgcagacgtacaatgggacacagatgcctggaactgagtttaacttttcggttaaattgggcttcttttggttcaggacagaaagttgatgctggacctga

SEQ ID NO: 138791 - DNA, 182 bp, Arabidopsis thaliana
aattttactctgtggagatcgtcttggacgtcacaatcagctcttcaagcgtgtcgaatcggttatcaaatctgctggtccctttgatgctctgatttgcgtcggacagttttttcccgattctcgataatttctatatgagtttttggattaagtccaaggtctagctcaagttccgattc

SEQ ID NO: 138792 - DNA, 381 bp, Arabidopsis thaliana
gttacctatgcatatcggttggagactcatgctcggtatagccgcggttccgtccctagtgctagcgttcgggatcttgaaaatgccggaatctccacggtggttgattatgcaaggccgtcttaaggaaggcaaggagatattggaattggtatctaattcccctgaagaagcagaactccgctttcaagacatcaaagctgctgcgggaatcgacccgaaatgcgtagacgatgttgtgaaaatggagggtaagaagactcatggtgaaggagtgtggaaagagctcattctaagaccaactcctgcagtgagacgtgttcttttaactgctcttgggattcatttcttccaacacgcctccggaatcgaagcagtgct

SEQ ID NO: 138793 - DNA, 400 bp, Arabidopsis thaliana
cccacgcatccgaggacgcgtgggcggacgcgtgggcaaagttagagacttttgctggtgctgatataacctatactattgaggctatgatgggagatcggaaggctttgcaagctggtactagccacaatttaagccagaacttttctcgtgcctttggaactcagtttgcagatgagaatggagaaaggcaacatgtgtggcagacatcatgggcagtcagtacacgttttgttggtggcattatcatgactcacggagatgacactggtctcatgcttcctcccaagatagctccaatacaggtagtaattgtacctatttggaaaaaggacactgagaaaacaggagttctcagtgctgcatcatcagtgaaagaagctctccaaactgctggtgt

SEQ ID NO: 138794 - DNA, 379 bp, Arabidopsis thaliana
gatactgagaatcagtttttgaaagattacttggtgaaacagttgtggaaggagaaagaggagagggttccaggtgaagaagagttgaaggagttgagtgaggatgatcacgaggtttgggatcaggaggattttgaggcacgaagaccgttggatttattaaactataggcatgaagatgagaatgctggggacactgttatgggtcagtctagggttgtggaagggtcggtgaggaagaaggataatgcgaggaaggcgcagaggaagaataaagacgagaggatgaagaaggaggatgatgtgaggaaagacgagttgaagcggttgaagaatgttaagaagaatgagattaaggagaagatgaagaacgtgcttt

SEQ ID NO: 138795 - DNA, 414 bp, Arabidopsis thaliana
acgcgtccgcacgttacatcttttttactcggcgagcttgtgaagaagaaactggtgatttcatctccttcgatcactcccaagattcgcattacctttcttataatcgccgagattgttcgagcctgaataatcaaaatggttgtgcttgctgctgccattgtggtcaagtctgggaaagtgattgtttccagacactatgtggatatgtcccgtatcagaatcgaaggtctacttgcagcttttcctaagctggttggaatgggaaagcagcatacctatatcgagacggagaatgtgcgatatgtttatcagcctattgaagctctgttcctgcttcttgttacaactaagcagagtaacattctagaagacctggccacccttactttgctctccaaacttgtacctgag

SEQ ID NO: 138796 - DNA, 421 bp, Arabidopsis thaliana
atcttttcaccgcccttctcatagcagctctcgccgatcctgtgtaatcgggaatcggtaatcgtcagggtctgtttggggtacggcgacgcgattttctgattattagggtttaagatctcgaggttgaggagagcttgaaaagttgtttgtcaacatggagcgcaagactattgacttggagcaaggatgggactatatgcagactggaattactaagctgaaacggattctggaaggattgaatgagccagcatttgactctgagcaatatatgatgctttatacgactatctacaacatgtgcacccagaaacctcctcatgattactcacagcagctttatgacaagtatcgggaagcatttgaggaatatattaactcaacagttttgcctgcgttgagggagaagcatgatgag

SEQ ID NO: 138797 - DNA, 421 bp, Arabidopsis thaliana
gagaggaagaagctaccaggaacttgaacgccatgaaccagttgaagaccaagaagccatggtcattgtctttctcattcggacgtgcgttgcagcagtctaccttgaagacatgggcaggtaaagaggagaatgtcaaggcagctcaagaggcgttgtatgtgaggtgcaaggctaactctgaagccacactcggaacctacaagggtgacgctaagcttggtgatggagcagctgagagccttcacgtgaaggattacaagtactgagcatcgtccacgggttgaattgtgacgtttgtcatcttcctggatatatttctagggatttttcgtttttctacttgacattatcggattataagtgttttttcttcattttccttttggatttgtgttttgattttgattgggttttgttt

SEQ ID NO: 138798 - DNA, 375 bp, Arabidopsis thaliana
gagagtccaacttgccgagacctacctcagccaggctgctttgggagacgcaaacgctgacgccatcggccgcggaactttctacggtaaaacagaggaaaaggagcccagcaagtaaacctgccagttcctgaagggtgtactgatcctgtggctgaaaactttgatccaacggctagaagtgacgatggaacctgtgtctacaacttttgagcaatattatcctgcttattaatttgctgttttactcctattgtctcttttggtttatttttctcctttgtgtaattgtggattggatcttgtcctcttttgttcccttttttttttttttatgatgtacaacacattggtaatttaaaattgccttgtcat

SEQ ID NO: 138799 - DNA, 369 bp, Arabidopsis thaliana
gacgtcgtattacgcgtccgcccacgcgtccgcccacgcgtccgctttgccatctgttacaaacaccaaactctcctgattcatcagttttaagtcttcttcaagtcccagggatcatcaatccaatggctcagatcttagcagcttctccaacatgtcagatgagagtgcctaaacactcatcagtcattgcatcatcatccaagttatggagctctgttgtgttgaaacagaagaagcagagcaacaacaaagtcagaggctttagagttcttgctctccaatctgataacagtactgtcaatagagttgagactcttctcaatttagacaccaaaccttactctgacaggatcattgctgaataca

SEQ ID NO: 138800 - DNA, 326 bp, Arabidopsis thaliana
acgcgtccgaccacacgtccgcccacgcgtccgcggacgcgtgggcggacgcgtgggttgtgctttgcgcttctctcttattatagtatcgtctcatgaacgcgctcctatttcctcctaaagccccccttccttgtttctctaccgcaacaaagaaaaaacaaaagtttgagaaaaatggtgtgttcgttgtgtaaccaatgattgggttttagcttactacttcgagagattataagaaagaaagagtgaatatacattatagagagaagagaagcagataccaaaaaaagaaaccattaagtctttttgtgataatgatgata

SEQ ID NO: 138801 - DNA, 373 bp, Arabidopsis thaliana
acccacgcgtccgcggacgcgtgggtgcttttctccgtcactgagtaccttgcctctcgagctcccaatcttaagaggattgagcttaaggcaagatggtaagaatcagtgttcttaacgatgctctcaagagcatgtacaatgctgagaaacgaggcaagaggcaggtcatgatcaggccttcctccaaagtgattatcaagtttctgattgtcatgcagaagcacggttacattggtgagtttgagtatgtcgatgaccacagatctggcaagatcgtcgttgaattgaacggaaggttgaacaagtgtggtgttatcagcccacgttttgatgttggtgtcaaggaaattgaaggttggactgcccgttt

SEQ ID NO: 138802 - DNA, 386 bp, Arabidopsis thaliana
  unsure (1)..(386): unsure at all n locations
ggtaaggaatctttagaaccgaatcgtgaccgtacaaatcaggttttgtcgttgaaaccttatcgtcgttttgagatgatgttacttgcgttacaatctgataaaggcacgtttgttagagaacctgatgatttaagtgattttgagaattggagtttagggttgaagttagaggagaaaaggaatgagattgttgagttgattaatgggaacaatggtgttaaagagatctatgaggagattgttcctgttgaagttgatgctgagactttttggagaaggtattattataaagtttataagcttgagcaagtanaggaagctacggttaagcttgtgaagagagctatttctggtgaagaagatgaggatttaagctgggatct

SEQ ID NO: 138803 - DNA, 302 bp, Arabidopsis thaliana
cccacgcgtccgtttctctctcactttttctttgcctttgcccaattcagagaactaatggctttgtcggtcatcgatagataaacaaaatttaatctttatctctctctttctcttgtttgtcaaaagatgcccaccaacacagaaatgaggaaaaaaagatctcttttttatttgaatgttgaacagtaagaagaaggtttattctattctattgggttgggttgttcatcaactaaaacatgcaatcaaaaaggagcaaccggccgggggatttggggaagggtttccgaaaactaaag

SEQ ID NO: 138804 - DNA, 380 bp, Arabidopsis thaliana
acacctatgctttatacttgtgcaatctgtgctaaaggttacaggagttccaaggctcatgagcagcatcttcagtcgcgtagccatgttttgcgggtttcacaagggacatcaatcaacggagaggaggatatagcgattatcaggcaacttcctcgccgtgttcaacacaggggttccattgatgatgatagtgaagatgaatgggtggaggttgattctgacgaggaattggctgctgaagaagcctctgattctttgtctaagttgaatgtgaatgagtctggatctgctgaagatatggatgatgatggtgatgcagataagtatgagctggatccaacctgctgtttgatgtgtgacaaaaaacataagacctt

SEQ ID NO: 138805 - DNA, 347 bp, Arabidopsis thaliana
aggacgcgtccgcccacgcgtccgcccacgcgtccgcccacgcgtccgcccacgcgtccgcccacgcgtccgcccacgcgtccgcccacgcgtccgggatttggagcgacctacaaagcagaaatctctcaagatgtggttgtcgcaatcaaacgcctctcgatcggacggtttcagggagtccaacagttccacgcagaaatcaaaactcttggtagacttcgacacccgaacctcgtgactctcatcggttaccacgctagcgaaactgagatgttcttggtgtacaactatctcccaggaggcaacctcgagaaattcatccaagaaagatccacaagagattg

SEQ ID NO: 138806 - DNA, 393 bp, Arabidopsis thaliana
acgcgtccgaccaagcgtccgcggacgcgtgggcggacgcgtgggggcggcgagaggtgctatgcttcgatacctgagagtcaacgtcaatccaacaattcacaaccctagagaatgtgtacttcctttctccattctccttcgtcgtttctccgaggaagttagaggctctttccttgacaaatctgaggtcacagatcgagttctctctgtcgtcaaaaacttccaaaaagttgatccttctaaggtaacaccaaaagccaatttccaaaatgatctagggttggacagtttggacagtgtggaagttgtgatggcattggaggaggaatttgggtttgagatccctgataatgaagcagacaagatccagtccatcgatctagccgttga

SEQ ID NO: 138807 - DNA, 389 bp, Arabidopsis thaliana
agagagataaggttagagcaaaacactgtctgaaacaaacaacaaaaaaatggcttgctctaatctaacaacaatgtgggtttcatcaaaaccatctctttctgctgattcatcttccttatcattccgatctgttctcaagtgcccaactaacacttcctcacctccttcacgagcttcctctgtttcaccactccaagcgtctcttcgtgagctcagagaccgtatcgattcagtcaaaaacactcaaaagatcaccgaagctatgaagcttgtcgctgcagctaaagtcaggagagctcaagaagctgttgtcaatggacgaccattctcagaaaccctagttgaagttctttacaacatcaacgaacagcttcaaaccgatgatg

SEQ ID NO: 138808 - DNA, 381 bp, Arabidopsis thaliana
ggtcgggccacgcgtccgaccaagcgtccgcccacgcgtccgaccagagatagagagaggtttagcgaaaaatggcgatggccatggctcttcgaaggctttcttcttcaattgacaaacccattcgtcctcttattcgatccacttcatgttacatgtcttctttgcccagtgaagctgttgatgagaaggaaagatctcgtgtcacttggccaaaacagcttaacgcacctttagaggaggttgatcctgagattgctgacattattgagcatgagaaagctagacaatggaagggacttgaacttattccatctgagaacttcacatctgtgtcggtgatgcaagctgttgggtctgtcatgactaacaaatacagtg

SEQ ID NO: 138809 - DNA, 392 bp, Arabidopsis thaliana
accacgcgtccggagataacatcctctttggaggtgtgatggatgaacaccgttaccgtgagacaattcaaaaatctagcctagacaaagatcttgagctcttacctgatggagaccagactgagattggtgaaagaggtgtaaatctaagtggaggacagaaacagaggattcaactcgctcgtgcgctataccaagatgcagacatttatctccttgatgatccatttagtgctgttgatgcacacactgcttcaagtctgttccaagaatatgttatggatgctctcgcgggaaaagctgtgttgttggttacacatcaagtggatttcttgcctgcttttgattctgttttgttgatgtcagatggagaaatcactgaagctgataca

SEQ ID NO: 138810 - DNA, 371 bp, Arabidopsis thaliana
  unsure (1)..(371): unsure at all n locations
aaacaacaaaaactcaagaacaatatctccacttgatcactaccacattgtccaatcactctacaaagcctgtacgtacacaacaacattaccatggtgaaacaagaacgcaagatccaaaccagcagcacacaagacgaaatgcctttgtcatcatcaccatcgtcatcttcgtcatcatcttcttcctcgtcatcgtcttcgtgtaagaacaagaacacgaagagtaagattaagaagtacaaaggagtgaggatgagaagttggcgatcatgggtctctgagattacggcaccacatcanaagacaacgatttggttaggttcttactcaacagctgaagcagctgctagagcttacgatgttgcact

SEQ ID NO: 138811 - DNA, 349 bp, Arabidopsis thaliana
ccacgcgtccggcaagcaaacatggagcttgagttccagaggaacaaggagaggtttgctttccttaaatggggttctactgcgttccagaacatgcttgttgtgcctcctggctctggtattgtgcatcaggtcaatttggaatatcttggaagagttgtgttcaataccaaaggccttctctacccagacagcgtggttggaactgattcacatacaactatgattgatggtttgggagttgctggatggggtgttgggggtattgaagctgaggcaacaatgcttggccagcccatgagtatggtattgcctggtgttgttggattcaaacttgccggaaaaatgc

SEQ ID NO: 138812 - DNA, 365 bp, Arabidopsis thaliana
tcttaaacgttttactttgtgctgcactactcaacctcaatggccgcctcaacaatggctctctcctcccctgccttcgccggtaaggccgtcaagctttcccccgcggcatctgaagtccttggaagcggccgtgtgacaatgaggaagactgttgccaagccaaagggcccatcaggcagcccatggtacggatctgaccgtgtcaagtacttgggtccattctctggcgaatcaccgagctaccttaccggagagttccccggagactacggatgggacaccgccggactttcagctgaccccgagacattcgcaaggaaccgtgaactagaagttatccacagcaggtgggccatgctcgg

SEQ ID NO: 138813 - DNA, 375 bp, Arabidopsis thaliana
actcaaagaccaaatccctacttggtttgctgttggaggttatatcacaatagctgcaacatctacagcgatactccctcacatgttccaccagctgagatggtattacattctggtcatctatatctgcgcgcctgtcttagctttctgtaacgcttatggagctggactcacagactggtccttggcttcaacttatggaaagttagccatattcacaattggagcttgggctggctctgagcacggtggtatgctggctggtctagcagcatgtggtgtcatgatgaacatagtctcgacagcttcggatctaacacaagacttcaagacaggctacctcactttatcatctccaaagtcaatgtttgtgag

SEQ ID NO: 138814 - DNA, 300 bp, Arabidopsis thaliana
actgacattactgctaaagtgaatcaagtgagtattgatgagagtaatgaagaaactattgttgtcaaggaatgtcaaagctcggttgatacggtgaaagacgaagtcaaggacagtgtggatagtccagtattggagaaagcagaggagattgctcttgaggaacagaagatagaaatggtcgtccatgtgcatgagagatcagaagaggttttacaagaggatgagaaagaagagacagaagtaatagaagaagtgagagacgacatttcattacaaaatgatactgtggatgcaaat

SEQ ID NO: 138815 - DNA, 160 bp, Arabidopsis thaliana
acccacgcgtccgccgatttcaaaattttccggtgaaatcgaaaaaaaaagcgagatcttcttctctaatggcgacgaccttaagcagagatcaatatgtctagatggcgaagctcgccgagcaagccgagcgttacgaagagatggttcaattcatgga

SEQ ID NO: 138816 - DNA, 399 bp, Arabidopsis thaliana
ccgggccgacccacacgtccagaagatgtcaaagtttttgttcatggtggcgcaagtatcgggtgccccaaaaatgcaggagcagctggaacatactttaatgctgaattagtgagtttaagggttggaaatgataacatgactacagagacagaaactcctttgctcgattttcctacaaggcctctgtggtcaaacatctatgtagataataatgcaaaagttttggtcccgctgctgtggaccagaatgcaggtcggaggtcaaatcagtctttatcggggaagcagcattgttttcgggttatcaaaatatccaatttcagaatttgagcttgttgctgaagaacttttaatgagtaactccgttataaaggtttttggtgcattacgacttgtt

SEQ ID NO: 138817 - DNA, 398 bp, Arabidopsis thaliana
ggacgcgtggggaagcaacgtcgtgatgatgaagatgaggttttgatggataaggaaaggagaaaggctgctactgttgctccgaggactactaggaaaggtcttggtgtgtcggagagtaagagtcgggttgttgtttcgggttcggaagtatgtgccggttcttctgattcttcttccgggtcgggtcgggttcttagtgatgggtctaacttggatcggttcttggagcatactactcctgttgttcctgctcgtttatttcccatgaggagcaggtgggaacttaaaacccgtgaatcggattgccatacgtattttgttttggaggatctttgggagtcatttgctgaatggagtgcatacggtgctggtgttcctttagagatgcatcctct

SEQ ID NO: 138818 - DNA, 346 bp, Arabidopsis thaliana
caagttgatatggcgttaggaagatttgagaatgcgattgtaaaggtggagagagccatgacgattgatcatagcaatagtcccgaggtagtatcggtcgtaaacaatgtgaagaatgtggcgaaagctcgtacccgaggaaacgagctttttagttcggggagatactcggaagcgagtgtggcttatggggacggactcaagttggatgctttcaattcggttttgtattgtaatagagcggcatgttggtttaaactcggtatgtgggagaaatctgttgatgattgtaatcaagcgctaagaattcagcctagttacaccaaagctcttctccgaagagctg

SEQ ID NO: 138819 - DNA, 132 bp, Arabidopsis thaliana
aaaactctattaggaaattacccattgtggaccacaatttgtggtagacctattattatatcagtaccagttctttagttttcttaagtcttgacttactagtgttgtgagcagcaaaatagttgttgttac

SEQ ID NO: 138820 - DNA, 366 bp, Arabidopsis thaliana
cccaagcgtccagttgaacagccacattcgacaactgattttacaaatggtaattcgactggctgggaattggcacttgtgactgccccaagctcaaatgaaggtgccgctgcagatagcagattggtagatagcatctctccctctctctagttcttatgtttagccgcagaagtgtgttttatgacattagatgtcttcctgtgtcatttgaataaaaaggcgggtggactggacaagctcacacttgacagcctatatgaggatgcaatcagagtgagtcaacagcagaacaggagctataatccatgggaacaaaatccagttcataatggtcacatgatgcaccaacctttctatgcatct

SEQ ID NO: 138821 - DNA, 375 bp, Arabidopsis thaliana
accatctcatgcagatgctttaggatcagcagatgcttatccgcctaacaattctattccaggtgggactaatgctcattcttatgcctctggcccaaacactagcggtccttcaattggtccacctcctgtaattgcaaacaaagctcctagcaatcagcctaatgaggtctatcttgtatgggatgatgaagcgatgtctatggaggaaagaagaatgtccttaccaaaatacaaagtgcacgatgaaaccagccaggtaagttctgatttaccctttttaaagttaagaagagtttgcttttgcaagtctaacccattcggtaggctttatttatacatttctgttccagatcctattgtttctgtgctaag

SEQ ID NO: 138822 - DNA, 157 bp, Arabidopsis thaliana
aatcacttcaatcgcctccctgccaggtatgctttggatgtgaatgtggagagggctgaagacgtcttgatgcacaagcgattgctgcattctgcttacgatccccagaatcggcctgctatcgaagttcatctcgtccaggttcaacctgccggga

SEQ ID NO: 138823 - DNA, 417 bp, Arabidopsis thaliana
ccacgcgtccgcttggatgctttaaacctctctctctctctctctcaattatttttttttctatttcaaaaacaaaaaaaaatgaatatctctcaaaaccctagccctaattttacgtacttctccgatgaaaactttattaatccgtttatggataacaacgatttctcaaatttgatgttctttgacatagatgaaggaggtaacaatggattaatcgaggaagagatctcatctccgacaagcatcgtttcgtcggagacatttaccggggaaagcggcggatccggcagcgcaacaacgttgagtaaaaaggaatcaactaatagaggaagtaaagagagtgatcagacgaaggagacgggtcatcgagttgcatttagaacgagatcgaagattgatgtgatggatgatggt

SEQ ID NO: 138824 - DNA, 430 bp, Arabidopsis thaliana
aattctctctctctctaaaaaaccaaatccagagtcagagaaaatctgtgatggctctttccaacgcctcctctctctccaccagatctatctacggcggtgatctttctcaccgtccaagcaaccgtcaatcatccttcacatttcatcccgccgtcaacaccaagcctaaatccgttaacctcgtcacggctgtacacgcggctgagccagctagaaacgctgtttcagtcaaagaatccgttgcgtcttcttcgtctggtgcattgaaatggactccagagagctggaaactgaagaaggctctgcaacttcctgattatcctaacgccaatgagcttgagtctgtgcttaaaacgatagaggcttttcctccgattgtgttcgccggagaagctaggaatcttgaagagagattggctgatgctgc

SEQ ID NO: 138825 - DNA, 343 bp, Arabidopsis thaliana
tgaagagaaataataacaattaactcaaccaaaaatatgaggaagccagaggtagccattgcagctagtactcaccaagtaaagaagatgaagaagggactttggtctcctgaggaagactcaaagctgatgcaatagatgttaagcaatggacaaggatgttggagtgatgttgcgaaaaacgcaggacttcaaagatgtggcaaaagctgccgtcttcgttggatcaactatcttcgtcctgacctcaagcgtggcgctttctctcctcaagaagaggatctcatcattcgctttcattccatcctcggcaacaggtggtctcagattgcagcacgattgc

SEQ ID NO: 138826 - DNA, 172 bp, Arabidopsis thaliana
agagtacttgtatctcataatggagtatttacctggtggggatatgatgactttacttatgaggaaagacaccctcactgaagacgaggccaggttttatattggggaaactgtcctggctattgagtccattcataagcacaactacattcacagagatatcaagcctgat

SEQ ID NO: 138827 - DNA, 408 bp, Arabidopsis thaliana
gtctagaagaatgttcagacaggaccattggaaactggcatttgcgtggaataagcggaggagagaagaaacggcttagtattgccctcgaggtcttaacaaaaccaagtctcctctttctagacgaaccaactagtggactggacagtgcttcagctttcttcgtggttcagattcttagaaacatagcaagcagtggcaaaactgtggtttcttcgatccatcagccgagtggtgaggttttcgccctctttgatgacctgctacttctgtctggaggagaaactgtttactttggcgaagcagaatctgcaacaaagttctttggtgaagcaggttttccttgtccaagtagacggaatccatcagaccacttccttcgctgtgtcaattccgatttcgataatg

SEQ ID NO: 138828 - DNA, 229 bp, Arabidopsis thaliana
cccaagcgtccgcccacgcgtccgcccacgcgtccggccgaggttaaaatccaaagcgtaaaatcatagcgagaaatttccttattcctgtgattttgctgagaagaagaagaatctcgaggaggaagaagaaacaggcgacatgggagaacggaaggtgctaaacaagtattatccgccggacttcgatcctgcgaagcttcaacggctccggcggccgaagaaccag

SEQ ID NO: 138829 - DNA, 434 bp, Arabidopsis thaliana
aagaagagtgaagttatgtgatcaagaggcgcagagagatagatcttcccacctgtcttccttcttctgacaccgacacttatccgtctgtcaccctttaaaccctatctttttctcaactaagcttgtgtttaatctcaccattaatcttgtcactacgcatcatctcatctccttcctttattggaaactccgactttacctggaatcgtacccgatttgatttcactcgagataaaataattagtgcaaaaaagttctcaccatctttctccgtcttgtcggtcacgtttttgtcctcgtagctaaaaaaatcagctttctacaactccgtaaggtggaagcttgagattatgcagaagaaacgagagatctgtggttatagagacaaattagacaagaccttatcttctcctgaactcactaatcacgag

SEQ ID NO: 138830 - DNA, 363 bp, Arabidopsis thaliana
gcgtccacccacacgtccgcggacgcgtgggcggacgcgtgggcggaagagttggtcgtttggttgctagagttgttctccagagggacgatgttgagctcgtcgctgtcaacgagcccttcatcactactgagtacatgacctacatgttcaagtacgacagtgttcacggtcaatggaaacacaatgaacgcaagatcaaggatgagaagacccttctcttcggtgagaagccagtcactgttttcggcatcaggaaccctgaggatatcccatgggccgaggctggagctgactacgttgttgagtctactggtgtcttcactgacaaagacaaggctgcagctcacttgaacggtggtg

SEQ ID NO: 138831 - DNA, 409 bp, Arabidopsis thaliana
gtccgtttgaaagacattctaaagaaaagagctctggagaatcttaaaagatttcgtggagtgacccaaaagagcggaatagctaaaaaagaggtgtcttctgtttcagaaggagaacctatgcaaattgaatctgaaaaagttgagtcacaagaccatgatctcatggagcagaaactttgtgattctgctgtaagcaaagatcttgagaattcagaaaagattttacatgttattaatgttaaggaatctggaacagcattggctaattctgcctctcaacaagatcagcattctggtgatactgccaaggttaaagttagttctggtcttagctcttgtacaaccaaacgaaagttggttagaccggtattgagtaaagatagtttaaatctagctagcaagaaag

SEQ ID NO: 138832 - DNA, 387 bp, Arabidopsis thaliana
acttgcatttgtttgaatccttccactaatcaatcacttggaactcgcaggaagaagctaccaaaaccaattgatttgtctgagttacttgatttcaatttgatttcacaaaatttcaacaatgacggtgttttgccagacggaattagggtttcgaaagttgattcttctcctgtgttctgcatcgataatcgccctggtttttactttatacctgatgcattgagtttaaaggagcaatgtaaatggattaaagagagcttgacgagttttccgcagcctccgaatagaacaaaccacaatgcaatttacggtcctattgatgatttgtttgattcagctaaagaaaacaaggtattggttcaggatgatcttaccaacaacaag

SEQ ID NO: 138833 - DNA, 419 bp, Arabidopsis thaliana
agcattagctggcgtcctcgtcttcataattctggttttggcaatactcttgctgttgccaaaatgtgcaagacgtagagaacatgctaacagagttttcaaaccgcatcaagttggtgctgatagaggaagcagagagaatgctctggaaaacgggactccggtactgccaccacctggtcgatctgaaaaagttcaaagagaacccttcaagaaagctggagaggaaccaaaggtcttacatgaccttgagaggctgcggagacctgcacctatatcaagacaggaaagtcaagatattgacttttcaatgttgatgcctcctcctccaccacctccaccaccaccaccacctcctcctttggatgagaaggtcacggttatgccaatcatatcacccgaaagaaccgttaagaaaa

SEQ ID NO: 138834 - DNA, 415 bp, Arabidopsis thaliana
cgtccgccgatatctgtttcttctcgtttggatctttggaaattttagagtttttttcgttttgaaatggcgaggaagaagatcagagagtatgactcaaagaggttggtgaaggaacatttcaaaaggctttctggcaaagagcttcctatcagatccgttcagattaatgaaacaactgatctaaatgagctagttgaaaaggaaccttggctctcgtctgagaagctggtggtgaaacctgacatgttgtttggaaagcgtggcaagagtggtttggttgccttgaaattagattttgctgatgttgccacttttgttaaagaacgtttgggaaaagaggtagagatgagtggatgcaaaggacccataacaacattcatagttgaaccatttgttccacacaatgaggagt

SEQ ID NO: 138835 - DNA, 374 bp, Arabidopsis thaliana
attgaaaagtcgaatagacatggtaaatcaaacaaacattctgatgccttaggaaatgttcgtaaatctgacaaaggggaccattttccacttgaaatgctttctagtcgctcaggaaaggccttcagggacaatcagagagatgatgttcatttgaaaaataagtttccaaggaataaaaaagatggtgagtcagccattcgaccttcattacctaccgagacatccgatagaaagcccgatgaactggatggaagtgacaaggatcccaagaatgtttcaggcttgagcataggttcttctcccttagatagccagagaacatatttggcgaaattacctaagggaaatggacctgtcctccaaaaacaagt

SEQ ID NO: 138836 - DNA, 425 bp, Arabidopsis thaliana
  unsure (1)..(425): unsure at all n locations
ctctattgaagctctctgacgtgaaaggaactgatggcaaaactacacttttacattttgttgttcttgagatcattcgttctgaaggcgttcgtgctcttcgccttcagagccgaagcttctcaagcgttaaaaccgatgattcaaacgcggattctagtccacaatctgtggagcgttaccgcagcacgggtcttcaagtggttacggggttaacgacagagcttgaagatgtcaagagagcagccatcatagacgctgatggtttggctgcaacattggcgaatataagcggttcacttacgaatgcgagggagtttttganaacaatggatgaagagagcgatttcgaacgagcattagctggatttatagaacgtgcagatgctgattttaaatggttgaaggaagaagaagagagaatc

SEQ ID NO: 138837 - DNA, 301 bp, Arabidopsis thaliana
gagagaactcacaaaacatacttcgaattcccattgtttaaaagacgaagataatggatttctccggtttgtttctcactctctccgcggcggctctgtttctctgtttactccgatttatcgccggagtccgccgtagctcctccacgaaactccctcttcctccgggaacaatgggttatccttacgtctgcgaaacattccaactttactcacaataccctaatgtgttctttgcagcaaaacagagaagatacggatcggtgttcaagactcatgtattgggatgtccatgtgtgat

SEQ ID NO: 138838 - DNA, 355 bp, Arabidopsis thaliana
ctttcgatggcgttacttgctgagatcaatcgaagtaactttgtcgtctctgcaagtaacgccaaagttacttcgattgatctcagctccaagcctctcaacgtcggattcagtgccgtgtcctcgtctctcctgtctctcaccggattagagtctctgtttctctcaaactcacacatcaatggctccgtttctggcttcaagtgctctgcttctttaaccagcttggatctatctagaaactctctttcgggtcctgtaacgactctaacaagccttggttcttgctccggtctgaagtttcttaacgtctcgtccaatacacttgattttcccgggaaagtttcaggtgggt

SEQ ID NO: 138839 - DNA, 223 bp, Arabidopsis thaliana
caaaatatcacacaattttcctctctttacccagaagatttcatcagaacctcttcgccattaatggttacagcgatgttttgtgcatcatcttctccaattacatctcctctctacccaaaagcttataaattttctcaaacaaaatcgaattcgaagagattttcctctctgcgtgcttcgttgcctgtttctgataacaagcttcttaaatttgaataca

SEQ ID NO: 138840 - DNA, 299 bp, Arabidopsis thaliana
ctcaatttacaccttctcttctctgaacaaggcaaacaaaaatggttacaacccaaaacacgaaggccagagtcacctccgtctctcaccgccgatcacagcaagatcctgagtcgccggtgaagaagttcttcaagttggtcttaccttcaacgatgaaggataagatgatgaagattccgccaagattcgtgaagctacaagggtctaaactctcacaggttgttacattagagactcctgcgggtttcaagcgttccattaagctcaaacggatcggtgaagagatttggttccat

SEQ ID NO: 138841 - DNA, 407 bp, Arabidopsis thaliana
aattccggagtgtctctctcccaaatcgaatctgcgatgctgatttgggagagagacactccggaatcagcatcccagattcgatttctcagcctaagagacctgaaaaatggagggtggcttcaaggcattgctcgatgatcttgacgttctcgacaaatctctctcagatccggctctgatcaacaagctgcgatcacatgttgagaatctagccactctgtctaaatgtaatcctcaccggcgttccaaagtcaaggaactaaactcggaagtggtagatagtaatccttacagtacgcttatggcacttcagcggatgggcattgtggacaactatgagagaattagagagttttccgtcgccattgttggaattggtggtgttggaagtgttgcggctgaga

SEQ ID NO: 138842 - DNA, 384 bp, Arabidopsis thaliana
aggtgctgcaaaaggtctcagtttcctccatgaagaagctttgaagcctgttatatatcgagatttcaaaacatcaaacattttacttgatgcagactacaatgcaaaactatcagattttggacttgccaaagatgctcctgatgaaggcaaaacccatgtttctactagggttatgggtacatatggctatgctgctcccgaatatgtaatgaccggtcacttgacatcaaagagcgatgtttatagttttggggtggttctacttgaaatgttgactggacgacgatctatggacaaaaaccgcccaaatggtgagcacaacttagtggaatgggcaagaccgcatcttcttgacaagagaaggttttaccggttacttga

SEQ ID NO: 138843 - DNA, 313 bp, Arabidopsis thaliana
agtcacagagatacttttctcactcatctctctctctctttcccgcttccctccttaaaccccaattcttctcctgctcacaaaaaccctatcttttgggttttgttatacagtgatgatgaaacctgcttctttgcaaggtttctcctcacatgcgtcctcctctatctactccgatgttcgcaggccagctactactccttcgaaaatggcagcttttagtgccctctcgctttgtccctatactttcaccttccgccaaagctctcgaattaagtctaccgtttcctgttccgtcacttctgctcctgct

SEQ ID NO: 138844 - DNA, 391 bp, Arabidopsis thaliana
cttcattcataacagttctttttctctcgttctctggtttaaagcataatgacggaagagctcatcgaccaatcaccaccacctgacccagacccgattcaaaattcgaatttaataatccacccaagacgtgttcctttcgagcacggccttcttccgatccagaagctcgtttttaccgacccgattcaaactctagctccgatcaagcaaaagttagcttctttggcgacgaatcatcgcgtcggatctgctgccatttccgatgcactctcgatctccgatgaccatgcgcgcctcgttctcgaaactctctcttcggtgctccattgcgagactgacccattggttttggccaaacctgaggaagttgattccgtgggagctgatt

SEQ ID NO: 138845 - DNA, 398 bp, Arabidopsis thaliana
aacccacgcgtccgtggtggccaagttacatgatattgagccgccaaaactggctgcaggtaacgtgaatcttcagacacgacaatttgggccatctttggataattcaaacgtgacatgcgaagagtacaaggaggctgtggtcaaggccaaagaacatatacttgcaggagacatatttcagatcgtgctgagtcaacgttttgagcggcgaacatttgcagacccctttgaagtttatagagcactaagagttgtgaatccaagtccgtatatgggttatttgcaggctagaggatgcattttggtagcatcaagtccagaaattctcaccaaagtaaagcagaacaagatagtgaatcggccattggcaggaaccagcaagagagggaagaatg

SEQ ID NO: 138846 - DNA, 414 bp, Arabidopsis thaliana
gaaaaagaagagaaatgacagagaagaaagagatggaagtggtgaaagggctcaacgtggagagatacatgggccgttggtacgagattgcttctttcccatcaaggtttcagccaaagaacggcgtcgacactcgcgccacctacacccttaaccccgacggtaccatacacgtcttgaacgaaacgtggagcaacgggaagaggggttttatcgaaggcagcgcctataaggccgatcctaaaagcgacgaagccaagctcaaagtcaagttctatgtccctcctttcctcccaatcattcccgtcaccggagactactgggtgctctacatcgatcctgactaccagcacgctctcattggccagccttccaggagttatctctggatattgagcaggacggcgcaaatgg

SEQ ID NO: 138847 - DNA, 321 bp, Arabidopsis thaliana
ccttgatgttaaaacccgagtaagaaacggttcgaagcgtaaatttgtctctgccttctgtcaatcaaactgtggtgatgtgagtccaaatactcttggtaccttttgcattgacactggactgccttgtgatttcaatcacagtacctgcaatggacagaacgagttgtgctatggccgtggtccgggctaccctgatgaatttgagagtacacgtatcattggagaaaagcaattcaaaatggctgtggaactttttaacaaagctacagagaagctgcaagggaaaattggttaccaacatgcgtatctagatttctc

SEQ ID NO: 138848 - DNA, 408 bp, Arabidopsis thaliana
aggtgggagagatgcgaatcgatgccagattttctctacgaatccgcgtcgtccacgtggctttccgtagcggtgagttcggagaagatgtacgtgacggagaagagatcaggcgttacgtgtagtttcaatccagtaactagatcgtggacgaagcttctcgatctctgtcccggcgagtgtagcttatactcacgttcgattggattctccgttaatcgtttaattatggctgggatcatcggagatgaatataatccgacgggaatcgaactgtgggaagttatagattctgacgaatcgcatttgaaattcgagtcgatcggatctatgcctgagacgtatttggagaaactaagagggattaattctgattggccgttaacgtcgatagtgttgaacgcggtg

SEQ ID NO: 138849 - DNA, 412 bp, Arabidopsis thaliana
ctcgcaaacggtatctccagcttctctccacaacccacttccgattcctcaaaatcaccaaaagggtttcacccaaaacccgaatccttaaaattcccatctcccaaatccctaaatccaacgagaccgatcttcaaactcagagccgatgttggaatcgattctcgtcccatcggagcttctgaatcatcatcatcaggtacatcaaccgttagctcaactgataaacttcaacagtatttccaaaatctcgattacgataagaagtacggattcgttgaagatatcgattccttcacaatccctaaaggtttatctgaagagacgattcgtttgatttcgaaattgaaagaggaaccagattggatgcttgagtttaggttcaaagcttatgctaagtttctgaaactag

SEQ ID NO: 138850 - DNA, 411 bp, Arabidopsis thaliana
acccacgcgtccgatcatcactcgccggctaatggccacaacgatgacacgtgtctccgtcggcgtcgtcctctttgttctcttagtctcgctggttgccgtctccgccgcgagaagcggtcctgatgatgttatcaaactcccttcgcaggcttctcgcttcttccgtcctgctgaaaacgacgacgattctaactccggtactaggtgggctgttctagtcgccggatctagcggatattggaattacaggcatcaggctgatatatgccatgcctatcaacttctgaggaaaggtggattgaaagaggagaatattgtggtattcatgtatgatgatattgctaacaattacgagaatccaaggcctggaaccattatcaacagccctcatggaaaagatgtctatca

SEQ ID NO: 138851 - DNA, 331 bp, Arabidopsis thaliana
cccacgcgtccggggatactggtcaggactatgataacttgtgttttgaaaagcgtgacgccagctaactcttttatctgggatcaatcacagataagcccgcatgcgattacgacttgttcagacacgactcagagcatgtactgccaactgctttgtgggcttctacaacgagataatgtacgtcgccttggtgcaccatttgcgtcatcctttcgcgaaataatcaagttcttggatgatcactggcctgagttttgctcaaacataaggactggttgtctcagtgactggattacagacccccaatgtgtttcagggatcggtaagt

SEQ ID NO: 138852 - DNA, 369 bp, Arabidopsis thaliana
cccacgcgtccgcccacgcgtccgcccacgcgtccgcccacgcgtccgtctcacattaatgggtcaaaccttttgctcttccttttgattaatttagtgtttgacaatctcctcctccttctccttcttcttcaaagttttgtcgcagtatctattgttcttacagagagaaaggaaagctttagtcttttaccagtttgatccaattctgggtttcactgaaaaaaagttgggagtttgattcttctaactgtagaagaaacagagtcaacagaagaaaactaaaaaagttgagatttttctctcacgcgctcaagaacttgagtatgtcttcttctgtaacagtgttatgggttgctacttcttctc

SEQ ID NO: 138853 - DNA, 420 bp, Arabidopsis thaliana
gggaagtcataaggacatatcataacgtttggagtcatctctttgatggcgaaagatctgcggccttacattccgaatatatcttttggggattctggagaaataaagatgaaaagatttggaagtttctggtttaagacagggagtaaaaacgggttagaagctccggttctgaagacactggtcttggtggcaacgaggtcgttgtgtaatgaggaacttttgctgaattacaggctgagcaactctaagagacgaccagattggtatactccggttaacgaggaggaagataggagaagatggagctaaatttctcttttatgttttaatgaaacttgaaaggctctgtttcaaaacatgctcctcggttttctttagactattagcgggacgtcgtttcgctgattgtgtcactat

SEQ ID NO: 138854 - DNA, 420 bp, Arabidopsis thaliana
gaaaagtgtcatcggatccagttgctattgacgcacctggtggatttctgtttgagtggtggtctgtcttctgggatatatttattgctaggaccaatgagaagcattccgaggttgctgcatcttacatagagacacagatgatcaaagcacgagaacagcaattgcagcaatctcaacacccacaagtttcacagcagcagcagcaacaacaacaacagcagattcaaatgcaacaactcttgttgcaacgtgcacagcaacagcagcagcagcaacaacaacaacatcatcatcatcagcaacagcaacagcaacagcagcagcaacagcaacagcagcagcagcagcaacaacaacatcaaaaccaaccaccttctcaacagcagcagcagcaatcaacgcctcaacaccaacagc

SEQ ID NO: 138855 - DNA, 440 bp, Arabidopsis thaliana
ggaaacttccggagacatcggaggaaccctaaattgaatgagaagaggagagtgagacgggagagaaagccagagcgagcgatagagcaaagacatggagagagaggaggagaagacgaaagagggctcatcgtataggtactgggtgagagaagccacctcagacgcagctcctcctcctctgccccaaaagctcagcaacaacgacgtctctctcaatactgctcctgcgtcccttggctctctctggaatcgggctggcacttgggaggagaagagtctcaccaaatgggctactgaccgattaaaggagctgttgggatcagtgggttcattgcagttctcttctggaaaagctgagattatagatgttaacagatgtgttggagatgctttcttagtcacagttcggaacaagaaaagagttggctatacttacg

SEQ ID NO: 138856 - DNA, 296 bp, Arabidopsis thaliana
gtcatcttcgtacgcgtcgagctgcactaaattgatctctctcaccaaacaattaagctcttacgcgaaccaaggaaaccatgaacaagctcttaatctctttcttcaaatgcattcgtctttcgccttacctctcgatgcacacgtcttctcactcgctctcaaatcgtgcgctgcagctttccgtcctgttctcggtggattagtccatgcacactccgtcaaatccaattttctgtcgaacccatttgttggatgcgcgttactcgatatgtatggtaaatgcttgtctgttt

SEQ ID NO: 138857 - DNA, 324 bp, Arabidopsis thaliana
tgaaaaagtgttgctccctgtccgtcagatttatgaaagatttgatgcagcctccataacccaagtggacgatgcacgtcttgaatattttaccaaaaagattttcccaaagattaaagattctgttcagggaggagtaatgatctttatccattcttacttcgagttcgtcaggcttagaaactttttgaatacgcagaatacctctttctgtcttcttggagattatgcaaaacatgcagatatatcccgagcaagagaacagttttttgtagggagccgagagatcatgctttacactgagagagcatacctttataagag

SEQ ID NO: 138858 - DNA, 322 bp, Arabidopsis thaliana
tttattctctcctcctcagtatatatctaatctctgtttgctcttttttcgcaccatgtcatatcaatctaccatcaatcgatcgtctcttcttcctccgtctgcgttgatcttttcgtttcgtcttctccgattgatgctctgtcgcgagagtcatgcctacattttctgctgccgctttgggtagatcactaaattcagggacgtccttatctagtaaatttccaagcacactgcagtcaaagccgtctattttgaatgatgaaagtaagcaacctaaagaaaagacattcactcgtcctcagatgtcaccttctctata

SEQ ID NO: 138859 - DNA, 352 bp, Arabidopsis thaliana
ctaaatctgattttcaaccaaaagccaaattcagcggaggaactgtcgttttcctttcttctttacttcttcacctttctcctatttcatcttaacatataatcatcagaagaaaaaaaaattctaaaacaaaagaggaacttgagaattttatgcttgagacaaaatggcagaagatacgtacgaggaagagtgcgactacttgtttaaggcggtgttgatcggagactcagccgtcggaaaatcaaacctcttgtctagattttctaaagacgagttccggtttgactctaaaccaaccatcggagtagagtttgcttaccggaatgttcacgtcggagataaaatcatc

SEQ ID NO: 138860 - DNA, 406 bp, Arabidopsis thaliana
acgcggacgcgtgggaaaattccggccttgttcttggaaagcttagtggacgtcacgctgtgaaagatcggctgaaagagttgggatatgaactcgatgatgagaaattgaacgctgtcttctcactattcagagatttaaccaagaataaaaagagaatcacggatgctgatttgaaggcattagtaacatctagcgatgaaatctctttggagaaattaaacggcgctaacggtttaaagtctaacggctatataccagttcctcaggtttcatcgaatgtgtaaacacgttgtatctcttgtatatttgtgtaccacagtaatatcaatttccatttgataatgccgtttttgttgtaatgtattaaaaacagtattaaataaaaggaactgctttatttcct

SEQ ID NO: 138861 - DNA, 409 bp, Arabidopsis thaliana
cccaattatctcctcctacgctcccgactagcgtttatcctattccggtcgccgccggagaccttgtatctccatataatggtgtcgccgaaagatttagtggcgatagtacactcttcgctgctcggaacatcccggccaactccaacgcagcgtatcgaactcactcatgccattcgcaactcatttccctctcttcagaacctcctctctttcccgcctccgaagccgtcggacagagcgcaagttcagtccaaagaaattcgactcccggattcgctgccaatatctttggatgaccaagatatcgctattagcttgaaactgagtgatgagcttcacctaaatgagatagattctgttcgtctgcttgtatcttcgaatcaggagtggggcttaatgggacgag

SEQ ID NO: 138862 - DNA, 398 bp, Arabidopsis thaliana
agtgaatgaagaaatgatagagacattgttcaaggtgaatgatccaacttcgagaacaagagatggcgttgttcaatccgtgagtcaggagaatcggtttcttgatccaagaaagtcacacaacattgctattttgttgagagctcttaatgtaactgctgatgaagtatgtgaagctcttatagaaggtaactcggatacgcttggacccgagcttctcgaatgcttgcttaagatggctcctactaaagaagaagaggacaagcttaaggagcttaaagatgatgatgatggatctccttccaagataggacctgcagagaaattcctcaaagcattgttgaacattcctttcgccttcaagaggattgatgcaatgctttacattgtcaagttcg

SEQ ID NO: 138863 - DNA, 369 bp, Arabidopsis thaliana
acgcgtacgggaaacggaagcaaagcctctgcttaaggaagatagaagtgatccggcgattcatgattctcaggagaagaagagacctagaatggttgctgaagctgaacaccataagtttgagaggaattgtgaactcaaactcgacttggataaatctgatcatgtgggtttagtacacaagcatcatgttcagaagccgccaccgcaacagcaactatctgttcctgataaaactgctcaagctagccatttgcctctgcatatgtctatgcctggctggcctgggggccttcctacaatgggatacatggcacctacacaaggagttgtgcctacggataccagttccttatcagctgcagcaat

SEQ ID NO: 138864 - DNA, 449 bp, Arabidopsis thaliana
atcaccaacaaaatttaatgaatcatgtctctgcttctaaagatgttattattttccttattcttcttctatatggcttcaatttctcaatgctcagacccaaccggtggacagtttagcttcaacggttacttgtacaccgatggagttgcggatctaaacccggacggtttgttcaaactcataacttcaaagacacaaggaggagctggtcaagttctttaccagttcccactccagttcaagaactcaccaaacggcactgtttcatccttctccaccactttcgtctttgctatcgtcgcagtacgtaaaacaatcgccggttgtggactttccttcaacatctctcctacaaaaggcttgaattcagttccaaatatcgaccactctaaccattctgtttcggttggatttcataccgctaaaagcgataaaccggatggtga

SEQ ID NO: 138865 - DNA, 255 bp, Arabidopsis thaliana
cgttatgacttcgcatcttacggagatgggaaaacaactggttactgatccggaaaagtcaaaggatccggtggaatttgtacaacgtctattggatgagcgggatacatatgacaaaatcatcaacaccgcatttggcaatgataaaacctttcagaatgccctgaattcttcattcgagtatttcatcaacttgaatgctcgttctcctgagtttatctccctgtttgttgatgacaagctacggaaaggact

SEQ ID NO: 138866 - DNA, 249 bp, Arabidopsis thaliana
acgggaagaggaagatgctggtgagggtgaggccgaacccgaagctgctcctggtgctgctggaactggtgaacaaggtggttcaggtgatcaagatgttgcaccaatggaaatttgagcaagagggaatgagttcaaagttggattttctaaccaattttcttgtgtgtagctctttgatatgttccaacttccaagtacaattgtggtttttattcggctttgtttatttaacagcttggaacaagg

SEQ ID NO: 138867 - DNA, 368 bp, Arabidopsis thaliana
attgggctcccgagctggagctcttagacaaatgctcctggatcttttagaggatccccatgaaatacgccgcatatgcatcatgggaagaaattgcacacttagaagaggagacgatgatttggagtgtacattaccctcagataagctgattgctgaggaagaagaggaggaaatcgaaatgctcttggagaactatctgcaaagatgtgagtcatgccatggacaagcagaaagacttctggattctgcaaaggaaatggaagactcaattgctgtcaatctaagttctcggaggcttgaggtcagcaggttcgagttgcttcttcaggtcggtacattttgtgttgcagttggtgctctcatcg

SEQ ID NO: 138868 - DNA, 343 bp, Arabidopsis thaliana
ctcaatttcatctcctttctcattgattgatactcttcttgagataatttaatttagctggcttcttcttcttcaggagagctctgaaaaaaacctgaaagattgagtttttagggttcttgattcttctaaagttcctgcgtttgattgatacagagagctcaagatgatcttgttccgaccaatattggcttcaatggattcatatggctgcatttatgggatttgatagattgtcaataaaagaaaacttgtggttatggattctcgaggtgacagttctaggttcgggcaatatccgacaaagcctacaaagaacatgtcttcatcttcatcagctgct

SEQ ID NO: 138869 - DNA, 357 bp, Arabidopsis thaliana
cccacgcgtcagccagtttggatggagctcatctgtggctgggttggtccagtcttccttcttttggggttatgccttgagccagttgcctggaggttggctttccaagatttttggcggaagaaaagtgcttgagattggtgtctttacatggtctttcgctacagctcttgttccactacttgctggatttatgcccggtttgatcttttctcgaattttggtgggaataggagaaggtgtttccccatcggctgcgacagaccttattgccaggacaatacctgttaaggagcgctcaagagcggtaagctttgtttttggacgactgactttggggagtgtaatggggcttct

SEQ ID NO: 138870 - DNA, 454 bp, Arabidopsis thaliana
tctacaccgcgataagagagagagattaccacattctcaccggaaaagaaaaaagggctttcctttcctgagatttccggtgaaaagtcattgactttatcactctcaagtctctccacaagttgattgattctgctctaatctcctcatctggggtctttcccctcttgctattcaaatggctgctccagtcataattgtgggttcacatgtgtgggttgaagatccacatttggcatggatagatggagaagttactcgaatagatggtataaacgttcatgtcaaaaccaagaaggggaaaaccgttgtgacaaacgtatattttcccaaggatactgaaactccatctggaggtgtagatgacatgacaaaactttcatacttgcatgatcctggagtcttactagaccttgagacaagatatgaacttaatgaaatatacacatataca

SEQ ID NO: 138871 - DNA, 406 bp, Arabidopsis thaliana; identical to SEQ ID NO: 122690

SEQ ID NO: 138872 - DNA, 392 bp, Arabidopsis thaliana
acgttccggcgatgattttctctctcggaggctactcgatgaacaatttccacgatttcaccgatatagtgattcctctgtacacgacggcgcgtcgattcaacggagaagtacagtttctcgtgacgaacaagagtccatcgtggatcaacaaatttaaggaattagtgaggaaactctctaattacgaagtgatttacatcgacgaagaagacgaaacgcattgtttcagcagcgtcaccgtcggtctcactcgccaccgtgagtatttcaaagagttgacgatcgatccttcgaattcggagtattcaatgtccgatttccggagttttctaagagacacctactcgttgagaaacgacgccgtggctacgagacagatccggcggcgg

SEQ ID NO: 138873 - DNA, 313 bp, Arabidopsis thaliana
ggagaccagtgatgatcttatcaggcatatgcaagagagatttaaagaaaaggctcgcaaatctgagtcagtttattatgcagcctcggatgtgattatactcagatttatggttgaggtttgttgggctcctatgttggcagctttcagtgttccacttgaccagagtgatgatgcagtaataacaacattatgtctggagggtttccatcatgccatccatgtcacttctgtaatgtccttaaaaacgcacagagatgcctttgtgacttcactagcaaaatttacttccctccactctcctgctgatatc

SEQ ID NO: 138874 - DNA, 120 bp, Arabidopsis thaliana
gccacagcaataaaggaggctggtggtcctgatatcccgatgacatactgggacacttgctcttgtaacacctgaacagtgtccagacgaaggaagactccctgatgctggacctccttc

SEQ ID NO: 138875 - DNA, 174 bp, Arabidopsis thaliana
aaaacaaattacgacacagaaaagatcaggaattagtttgtgcacaaatccaactggagaagccgagtaactatggtagccacagatgagttcaacggttttgaccaaatccgagaggtttcgtctatgccgctgaaataagcctccgctccttcttcacaacaatgtctccga

SEQ ID NO: 138876 - DNA, 402 bp, Arabidopsis thaliana
gaaaaaatggaagaggatttgattaagcgccttgaagctgcggttacgaggcttgaggggatctcaagcaacggaggaggagtagtttctctttcccgcggaggagatttctcctccgccgccggaatcgatatcgcgtcgtccgatccatcgattctggcttatgaagatctgatttctcaatgtgttggtagggctctgaccgccgctgagaaaatcggtggacctgttctagatgtgactaagatagtcgccgaagcttttgcttcccaaaaggagctgcttgttcgcatcaagcaaactcagaagcctgacctcgctggattggctggatttctcaaaccgttgaatgatgttacaatgaaagctaatgcaatgactgaaggaaaaaagtcggatttt

SEQ ID NO: 138877 - DNA, 162 bp, Arabidopsis thaliana
acccacgcgtccgatttgtagcgatgatgaagaagggaaatccagaattggtgccaaaccgacgcagaatgtgagagatcttttgatgttgtttgtttgtttttggttatcactttactcaaactttgtgtttctgttacaatcaattattttgtttcctgc

SEQ ID NO: 138878 - DNA, 229 bp, Arabidopsis thaliana
agtcaccttgatccaaaaagtacaactacattccctgccagactcgctgagctgaccgctcgactgaaaaagtggaaaaatattcttcagagcaatgttgaatacaggtttcctgctgtgttaagattggaacatgagagcagggttttgcgtgacgttaatgttgttgatgtggagataccagggcagtactttgctgaccaggaagtagcacctgatcatacagtaa

SEQ ID NO: 138879 - DNA, 384 bp, Arabidopsis thaliana
aaagaaagaaacaggaagtggttcagtagcagttgcaatagacaaagacaaaggaagccaacatgctcttaaatggacaatcgacaatcttgcttctcgtggccaaaccatttctcttattcatgtcctctgcagatctcattcttcttcagatcttgaagaaggaacgccacaacagaaacagcaaatggagaagatagctaaagatctctttgtatccttccactgctattgttcccgtaaagagataaattgtcgagacattttgctggaagacgcagacaaagttcgagccattaccgaatatgtttcatcttctgcaattgagaacttagtcgttggatctgcatcacgtaatggcttcatgagaagattcaagacgga

SEQ ID NO: 138880 - DNA, 372 bp, Arabidopsis thaliana
attctctcgagaaaacaaactgaatttttttgatcgaagaagatctaaaaaaaaagatggagagacgacaagcgaagatccatgtctttgtattgataggtctaattctattgaattcaatcaatcaaatctcatctctctctgtaacggtgaacgacgaagaatgtgtccaagagtacgtcctttacgaaggcgacactgtttccggtaacttcgtcgtcgtcgatcatgatatcttctggggatccgatcatcctggtttggatttcacggtgacgtcaccagctgggaacattgtacagactttaaagggaacatctggagataagtttgagtttaaggctccaaaaagtggaatgtacaaattttgtt

SEQ ID NO: 138881 - DNA, 214 bp, Arabidopsis thaliana
ctaatccccaagaagcttcgttttgatatcaaacgatctggtttgtcggatttgatattggagcaatggctttggtgagtccaattccagcaatgggtgaaagagctggatccatgagatttcacggaattggtagcccaggatcaaggtctagtaggagcgggattatggacgaacctgtctcgcggctgattgacgagaagatcttcgttgc

SEQ ID NO: 138882 - DNA, 282 bp, Arabidopsis thaliana
gcttcttcgattttcctctcagaccaatcgggctttcgaatcccatcagtagaaatggctacatcaaggttccaagcattcttgaacagtcccattggcccaaaaacaactcatttctgggggcctatcgctaattggggttttgttgctgctggtttggtggatatgcaaaagccccctgaaatgatttctggaaacatgtcgtcagctatgtgcgtttactctgcattgttcatgaggtttgcctggatggtgcaaccacgtaactatttgctacttgcg

SEQ ID NO: 138883 - DNA, 285 bp, Arabidopsis thaliana
gaggtgagtatcattcaaacaacccagagatgtcaaagttgcttcacaaggctgtccgtgaaaagagtgaaactgcatatgcagtctatcaacagcatctctctaacagacctgttaatgtcctccgtgacctgcttgagttcaagagtgatcgtgcaccgatcccagtagggaaagtagaaccggccgttgctattgttcagagattttgtactggtggaatgtcacttggtgctatttcaagagagactcatgaagctattgctattgcaatgaataggattg

SEQ ID NO: 138884 - DNA, 281 bp, Arabidopsis thaliana
gtttttcttttatcctcttatcgctaatctggagctctatagagactataaagggtttttgattgattcgggagctcgagatttgacttcttttagctgattcggcaagtttgtatctagaaaggatcgattggtgaggtcaatagtggttggtgggttttagtaatggaagacggtgagcttgatttctccaatcaggaagtgttttcgagttcggagatgggtgaattaccacctagcaattgttcgatggatagtttctttgatgggcttttaatgga

SEQ ID NO: 138885 - DNA, 282 bp, Arabidopsis thaliana
aaaaaaaaaaaacacaaaaaagtttcaatggccgcctcaacaatggctctctcctcccctgctttcgccggaaaggctgtgaacctttcccctgcggcatcagaagtccttggaagcggccgtgtgacaatgaggaagactgttgccaagccaaagggtccatcaggcagcccatggtacggatccgaccgagtcaagtacttgggtccattctctggcgagtcacccagctaccttaccggagagttccctggagactacggatgggacacagctggtcta

SEQ ID NO: 138886 - DNA, 278 bp, Arabidopsis thaliana
gttccatcaccacaacgccggacgacaatgggtattgatctgatcgccggaggtaagagtaagaagaccaaaaggacagctccaaagtctgatgatgtctacctcaagcttactgtcaagctttaccggtttctggtaaggagaactaatagcaagttcaatggtgtgatattgaagaggcttttcatgagcaaagtcaacaaagctcctctttctctatctaggcttgtggagttcatgactggcaaggaagataagattgccgtcttggttggaac

SEQ ID NO: 138887 - DNA, 224 bp, Arabidopsis thaliana
cccacgcgtccgcccacgcgtccgcccacgcgtccgcggacgcgtgggccatccgccgcccctgtggctgccgcgcctcccgtcgtgctgaaaagcgtcgatgaggaggttgtggtggccgaggaggggatcagggagaagataggtagtgtacagctgacggattccaaacattctttcttgagctccgatgggagcctcactgttcatgccggtgaaagatt

SEQ ID NO: 138888 - DNA, 283 bp, Arabidopsis thaliana
cggacgcgtgggttcgccgtcgagagcatccatgggtcgtgtcatcagagctcaacgtaagggtgcgggttccgtcttcaaatcccacactcaccaccgcaaaggtccggctaagttccgtagcctcgatttcggcgagagaaatggttacctcaagggcgtcgtgacggagatcatccacgatcctggtcgtggtgctcctcttgctcgtgtcactttccgtcatcctttccgtttcaagaaacaaaaggagctcttcgtcgccgccgaaggtatgtacacc

SEQ ID NO: 138889 - DNA, 282 bp, Arabidopsis thaliana
ctttgattctatcattcttgcttcttcttctagcaacaaagcttcctgaatcactagctggtcactgcaccaccacgacggcgacgaaaagcttcgagaaatgtatctctcttccaacacaacaagcgtcaatcgcgtggacataccatccacacaacgctactctcgacctttgtttctttggaactttcatctcaccttccgggtgggttggatgggggattaacccggattccccggcgcagatgactggttctcgtgtcctcatcgcctttccagatg

SEQ ID NO: 138890 - DNA, 281 bp, Arabidopsis thaliana
ggaacagtggagttactagctctatcagtcttccaaaagcactcactgagaaagaacaacaagagcttgttgatctcgtcgatgtcaagcttggtcaggagtacgagcttgttgtcaccacctatgctgggctttacaggtacagagtgggtgatgtcctaagcgtggctggtttcaagaacaatgcgcctcagttcagcttcatatgccgcaagaacgtggtcttaagcattgactcggacaaaaaccgataaggttgagcttcaaaacgcagttaaaaa

SEQ ID NO: 138891 - DNA, 276 bp, Arabidopsis thaliana
cccaactccgtcacgcttaacttcggatcttctggatttgttgcttactctcttgataatcctgatcctcgtgttcctagattatttgctgtggtggatgatattttctgtctcttccaaggacacattgagaacctaccgtttctgaagcagcagtatggactgaacaaaatcacaaacgaggccatcattgtgattgaggcttacaggacactacgtgatcgaggtccttaccctgtggacacagttgttagagatttccatggaaagtttgcg

SEQ ID NO: 138892 - DNA, 284 bp, Arabidopsis thaliana
gaatcccataaagtccacaactctctccttgtagagagagagattttatggcggtggagctcatgactcggaattacatctccggcgtcggagctgatagcttcgccgttcaagaagcagctgcttcaggactcaaaagtatcgaaaatttcatcggtttaatgtctcgtgatagctttaactctgatcagccatcttcttcttccgcctccgcctccgcctccgccgccgcagatcttgaatcagctcgtaacacaacggcggacgcggctgtttcaaagttt

SEQ ID NO: 138893 - DNA, 286 bp, Arabidopsis thaliana
tctcgttccattcttcttcctaattacaccatgcccaacatcaccatgggtttgaaacccgacccggttgctccaacgaacccgactcatcatgagagtaatgctgccaaagagattcgttacagaggcgttaggaaacgtccatggggaagatacgccgctgagatccgagatccggttaagaaaactcgagtctggctcggtacgttcgacaccgctcagcaggcggcgcgtgcttacgacgcagccgcgcgtgactttcgtggtgttaaggctaagaccaatt

SEQ ID NO: 138894 - DNA, 281 bp, Arabidopsis thaliana
gtctggtttcctcttttgtttcgtccaaatctctactttttagggatcttgtccttctcttttctgctgattaaaaccctcgaatttgctccaattcgacgcgaaaaagggcattgagatggtgaatggagaatcatcaactagtacgtcttactctgatagtaacaatgacacaaatgatcaaggaggagactttgaatgtaacatttgtttcgaactagctcaagatccgattgtcactctctgtggccatctcttttgctggccttgcttataccgtc

SEQ ID NO: 138895 - DNA, 277 bp, Arabidopsis thaliana
ctttttgcctcagagctccgtggagagcagcaatcagtagccatggctgagcagactgagaaagcttttcttaagcaacccaaggtcttccttagctcgaagatatctgggaaaggaaagagacctggtaaaggtggaaacccttctggaagaacattggtttgggtttcaagactcctcgtgaagccattgatggagcttacattgacagtaaatgtccattcactggaaccgtttctatcagaggacgtatcttagctggtacttgccacagtgc

SEQ ID NO: 138896 - DNA, 282 bp, Arabidopsis thaliana
cccacgcgtccgctctacctccctcacaccctaaaactcagcaacaatggccgttaccttttcagatctacacacagaggagggtgtcaaatccgtggaggagcacctcgccggaaaaacctacatctccggagatcaattgtctgtggatgatgtcaaggtttacgctgccgttccagtgaaacccagcgatgccttccccaatgctagcaagtggtacgagtccgtggcttcccaacttgctaaaagtttccctggaaaggccgttggagtacaattcgg

SEQ ID NO: 138897 - DNA, 280 bp, Arabidopsis thaliana
cccacgcgtccgcggacgcgtggggttaaattgagtttgtgtctcgtaacttatcctgtgagcgaaaatggtgaaagcaactaaggcagagaagaagatcgcctacgataccaagctatgtcagcttatcgatgagtacacccagatcttggtcgttgcggccgataacgtcggatcaactcagcttcagaacatcagaaagggtcttcgtggagactccgtcgtgcttatggggaagaacactatgatgaagcgttccgttaggattcactctgagaac

SEQ ID NO: 138898 - DNA, 279 bp, Arabidopsis thaliana
cccacgcgtccggaaaattctttgattctcatgggagaaattggagggaatgactataactacgcattctttgtgggcaaaaacattgaagagatcaaagagctggttccgcttgttattgaaactatctcttctgcaatcacggagttgattggtatgggggggaaaacatttctggtgcccggagagttcccgctcggatgctcagtagcctatttgagtttatatcaaacatcaaacatagaagaatatgatcctctaacaggatgtttgaaatgg

SEQ ID NO: 138899 - DNA, 276 bp, Arabidopsis thaliana
cccacgcgtccgcggacgcgtgggcttacgagctttaccttcgtctccctgagctaagaaagctctggtcatctcgtgattttcctcaatggacatcagagccgattctcaaaccagctcttcaagctttggagatcagtttcagattagttttcgccgtttgttctgatactagaccgtacatcaaccaccgtgaatggaaccggaggctagattctctcatcacgaagcagatccagcttgtagcagcgatctgcgaagatgaagaagaagaag

SEQ ID NO: 138900 - DNA, 285 bp, Arabidopsis thaliana
ttaaggtttcgatcatcgataattttgataactctgttatcgaagctgttgatagagttagggagcttgttggtcctgatctctccaagaagctcgacttcaatctgggtgatctaagaaacaaaggggacattgagaaactattctccaagcagagatttgatgctgtgattcattttgcgggtcttaaagctgtgggtgagagtgttgaaaaccctcgccgctactttgacaataacttggttggaacaatcaatctatatgagaccatggcaaagtacaact

SEQ ID NO: 138901 - DNA, 278 bp, Arabidopsis thaliana
cccacgcgtccggtctctatcggaagttccgaagaaattgattgttattggtgcggggtatattgggcttgagatgggttctgtttggggtaggcttggatctgaggttacggttgttgagtttgctggagatattgttccttcgatggatggtgaaattcgtaagcagtttcaacgttctcttgagaagcagaagatgaagttcatgctcaagactaaagttgtttctgtggattcctcctctgatggtgtgaagcttacagtggaaccggcagaag

SEQ ID NO: 138902 - DNA, 285 bp, Arabidopsis thaliana
atgatccaaacgtattagcctctcggattcccgctctgcagaagaaatgggacgacatttgtcaaagaatccatcaaactccggcgtttcctaaactcagttttcagcccgttagaccgcagttcccgcttcagcttggttcttctagccagaccaagatgagtcttggaagcccaactgagaaaattgtttgcactaggacgtctgaaagctttcaagggatggtggctctaccgcagaatccgccacaccaacctggtttatcagtcaaaatctcaaagccaa

SEQ ID NO: 138903 - DNA, 275 bp, Arabidopsis thaliana
ttttgtctttcaatcaccattagaattcagctgcaacacaagtgtttgcaaaagagagaatcatggagagagctatggcaagacaaaagatactgcttcgtcatctcaatccagtttcttcttctaattcttctcttaaacatgagccttctcttctgtcttttccccaatggctgcgtttggagatgacattgtgattgtagcggcatatcgtaccgccatttgcagagcgagacgtggaggtttcaaagacactcttcctgatgatcttcttg

SEQ ID NO: 138904 - DNA, 280 bp, Arabidopsis thaliana
cccacgcgtccgcttcaatcaaaaaacattccaactttcttctcaatttcattccaggatagtattatgtgcagtggaccaaagagcaatctctgctcttcaagaaccttaacagaaatcgaatcaaggcaaaaggaagaagaaacaatgcttctcctcgaattcgctgcttgtgatgatcttgactcgttcaagagagaggttgaagagaaagggcttgatttggatgagtcagggttatggtattgcagacgtgtcggttctaagaagatgggtcttg

SEQ ID NO: 138905 - DNA, 277 bp, Arabidopsis thaliana
cttcaccatcttgtggggaaaaacaaaacttctccggccatggatcctggcgacccaacttcaataatcttttcaaagatcagaactttcgaacttgagaacgcttccagagtcattgactattttctcttgcaagacatggaacaaagagatttgattcgaattgcttttggtcctgactctctcatacagactttctgtcagaaagctaaagtcgatttaggtttttcctcgaacggtttctcgagacccatcaatatccatggccagtcattgt

SEQ ID NO: 138906 - DNA, 286 bp, Arabidopsis thaliana
gccacacactcacaaattaaaaagagagagagagagagagagacagagagagagagagattctgcggaggagcttcttcttcgtagggtgttcatcgttattaacgttatcgcccctacgtcagctccatctccagaaacatgggtgcaggtggaagaatgccggttcctacttcttccaagaaatcggaaaccgacaccacaaagcgtgtgccgtgcgagaaaccgcctttctcggtgggagatctgaagaaagcaatcccgccgcattgtttcaaacgctcaat

SEQ ID NO: 138907 - DNA, 284 bp, Arabidopsis thaliana
tgggaatggaagcggcgattaccaaaaaagatgcgattatcacatcgtatcgtgatcactgtactttcattggtcgtggtgggaagcttgttgatgctttctctgagcttatggggagaaaaactggttgttctcatggtaaaggaggatctatgcatttctataagaaagatgcttccttttatggtggacatgggattgttggtgctcagattccattgggatgtggtttggcttttgctcagaagtataataaggatgaggctgtgacttttgctttgtag

SEQ ID NO: 138908 - DNA, 281 bp, Arabidopsis thaliana
gtacgttgatggggctgggatcttatccttgtgatgatgagttgtcgttacatatgcttggaatgcatgggactgtgtatgcaaattacgctgtggagcatagtgatttgttgttggcgtttggggtaaggtttgatgatcgtgtcacgggtaagcttgaggcttttgctagtagggctaagattgttcatattgatattgactcggctgagattgggaagaataagactcctcatgtgtctgtgtgtggtgatgttaagctggctttgcaagggatgaat

SEQ ID NO: 138909 - DNA, 282 bp, Arabidopsis thaliana
cccacgcgtccgtcttcttcctctaaagtttattttcttaaacttattacaaaaaacatgatcttcaaaagttgatttaatctctttttatccatcttcttcttcatttctcaatatcaaacttttctttttttgtaagcttaacataaaccctaatattttcttgatttttttcaagaaaataaaaacataaagatgcttgaagttagatcaatggatatgactccaaaatcaccagaacccgaatccgaaactccgacccggatccaaccagctaaacca

SEQ ID NO: 138910 - DNA, 282 bp, Arabidopsis thaliana
cggacgcgtgggcaacaaatcttaaacgttttactttgtgctgcactactcaacctcaatggccgcctcaacaatggctctctcctcccctgccttcgccggtaaggccgtcaagctttcccccgcggcatctgaagtccttggaagcggccgtgtgacaatgaggaagactgttgccaagccaaagggcccatcaggcagcccatggtacggatctgaccgtgtcaagtacttgggtccattctctggcgaatcaccgagctaccttaccggagagttccc

SEQ ID NO: 138911 - DNA, 278 bp, Arabidopsis thaliana
cccacgcgtccgctgatatttattttcttaccttaaatacgacggtgcttcactgagtccgactcagttaactcgttcctctctctgtgtgtggttttggtagacgacgacgacgataatggaggagctagatcgttcacgtgcttttgccagagacgtcaaacgtgtcgtcgttaaggttgggacagcagttgttactggaaaaggtggaagattggctcttggtcgtttaggagcactgtgtgaaaagcttgcggaattaaactcggatggatttg

SEQ ID NO: 138912 - DNA, 284 bp, Arabidopsis thaliana
tgagagaagaaagatagagaaaaaaaatgggaggcaaaggtgtgatgatggtggcgatactttgcctttgggcactctctgcaacatctgaagcagtaacagaggctgagccaggtttgatgatgaacttctacaaggacacgtgtcctcaggccgaagacatcgtccgtgaacaagtcaaactcctctacaaacgccacaagaacaccgctttctcttggctccgtaacatcttccatgactgcgccgttgagtcatgtgatgcgtcgcttttgctggattcg

SEQ ID NO: 138913 - DNA, 280 bp, Arabidopsis thaliana
atagtcctcaagaacagggtttaacggtgaggccgagagaaactaaaggagttgaagcaagtcatgcaatcaaatgcgcaaatactactgtcaaaagaaagatggatcatcagaaagagacaatgttgggaaagaaacgccacaggcagaccatgtttctcaacctggacgatgtcaggcaagctggtcctattaagacaacaacacctagaagacagaatttcccacaacctgtcgtcacacgcacagttagagaatctcgtgcaggccctccaactgc

SEQ ID NO: 138914 - DNA, 397 bp, Arabidopsis thaliana
accaagcgtccggtctgaggcccgaaagctgcttcttactcgaaagtcgaaacccttgtgagagaacttggtgatgccgaagatggtaactccgacgagtactggaaccagtttattgagccattcgcagaatctgagggtcaagtggtctcttctctctcattgctttatcttaattaagactttccaggtattgagtaatgtaatacacgtatctacatgaagatgaggatataaatatccatttatgagaaaagaaaaaaagggacaaacaaaagttggcaagtttaactaagtgaaaagtctatggcggagacaacgagttggatcccagtatggtttcctctgatggtgttgggatgttttggtctgaattggttggtcaggaaggtgaatg

SEQ ID NO: 138915 - DNA, 404 bp, Arabidopsis thaliana
aaggtcaacaacgtcgagaataatggcatcatctctttgtgcttcttctgccatcgctgccatttcttctccaagtttcttgggtggtaagaaactgaggctgaagaagaagttgactgttccagctgtgtccaggccagatgcgtcggtgcgcgccgtcgcagctgatccagatagaccaatctggttcccgggaagcactcctccagagtggctagacggtagcctccctggtgacttcggatttgatcctcttggtctttcatcggacccggacagtctaaaatggaacgtacaagccgagatagtccactgccgatgggctatgctaggagccgccgggatattcatcccagagttcctaacgaagatcggaatcctcaacactccgtcatggtacacgg

SEQ ID NO: 138916 - DNA, 115 bp, Arabidopsis thaliana
cggacgcgtggggcatctattatcgtaatgattatgtccgtattagggcaacactatagctgtgtgctcgtggtggtaatggtactgttgacactgatatagagagcaacgattt

SEQ ID NO: 138917 - DNA, 403 bp, Arabidopsis thaliana
cttgaagaataatgatgtagaaagatacagggagatgttgctggaacagcaaactaatatgcctggtgatgctgctgaaagatatgctgttctctcttcatttttgacccaaaccgaagattatcttcataaacttggaggtaagattactgccacaaaaaatcaacaggaagtggaggaggcagcaaatgctgcagcagtagcagcgagattgcaggggttgtcagaagaagaggtcagggcagcagctacttgtgctcgagaagaagttgtgatcagaaatagatttacggaaatgaatgcgccaaaagaaaattcatctgtcaacaagtactatactctggctcatgctgtaaatgaagtggttgtaagacaaccttcaatgcttcaggctggaactttg

SEQ ID NO: 138918 - DNA, 394 bp, Arabidopsis thaliana
atgaagactatcaaaaccgagcttcaagtctgcttagcattgctagcatatcaggatgttgtcaggtgactgtgccactcggacatcatgagaaatgccctatttcagtttctttcataggaagacacggtggtgaccgctttttactagatacagtgcagacaatgtatccatctttgcaagagtactcgagtattgttaccgatcccaaatcttctaaaaaggctatcaccaaagaagagtcagccgagattgccaaagagaagggtaaccaagcgttcaaagagaaactatggcagaaagctattggtctatactcagaagctataaagctaagtgacaacaatgctacctattacagtaacagagctgctgcatatcttgaacttggagg

SEQ ID NO: 138919 - DNA, 396 bp, Arabidopsis thaliana
gcaaaaagttgatgaactaaatgaggtgcaaactgatctccagtatattaaagaagatataaatgccgttgagagacatagaatagatttataccgagctagggacagatattctgtaaagttgcggatgctcggagatgatccaagcacaagaaatgcatggccacatgagaagaaccagattggtttcaactccaattctctcagcataagaggaggaaattttgtaggcaattatcaaaacaaaaaggtagaggggaaggcacaaggaagctctcatgggctaccaaagaaggatgcgctgagtgggtcagattcgcaaagtttgaatcagtcaactgtctcaatggctagaaagaaacggattcatgctcagttcaatgatttacaagaatg

SEQ ID NO: 138920 - DNA, 395 bp, Arabidopsis thaliana
accacgcgtccgattttgcgttttcagaatcttggtttctagggtttcacttaccttccctccgcgcccttgagctctctacctgagcttctccgggattcctaaagctgaaattcaaacacctccattttcatcctcaagggagataaataaaactctattgagtagaaaatgagtgctgcagcacacaggactcctaaatcagggaggcaatctctgctatttcaagatttagcttctcctgtttcagcacgtagagggaaattctcgagtccgggacaggcagctgcggtatctgcactatggcgtgagaatttcggaggatctgatcttccaccacctccaatgtatactttggatgaccggtccgatttctctcctgagtctggtattgc

SEQ ID NO: 138921 - DNA, 363 bp, Arabidopsis thaliana
cccacgcgtccgaaaattctatataactataatctgttctcttgtgtgtttctcgcgtggcttgcgtgttacttcattcatcactgctttagcttctcctcatatgaatctcgaggcaatccagtcactgacttttctcactccccatctctagggttaaaactgtgagcatttggagtagcaaaagtaacaaagcatggcaacacttaaagacattggtgtatcagcagggataaacatcctcactgcattcattttcttcataatctttgcgtttttaaggcttcagccattcaacgacagagtttacttctccaaatggtacctcagggggttaagaagcagccctgcaagtggcggcgg

SEQ ID NO: 138922 - DNA, 396 bp, Arabidopsis thaliana
aaacattttactttgtgctgcactactcaacctcaatggccgcctcaacaatggctctctcctcccctgccttcgccggtaaggccgtcaagctttcccccgcggcatctgaagtccttggaagcggccgtgtgacaatgaggaagactgttgccaagccaaagggcccatcaggcagcccatggtacggatctgaccgtgtcaagtacttgggtccattctctggcgaatcaccgagctaccttaccggagagttccccggagactacggatgggacaccgccggactttcagctgaccccgagacattcgcaaggaaccgtgaactagaagttatccacagcaggtgggccatgctcggagccctaagctgcgtcttccctgagcttttggcta

SEQ ID NO: 138923 - DNA, 274 bp, Arabidopsis thaliana
aagaaaaggaagaactgagtgagatgggtaagcctgtaactaaggggaaagagaagaaagataagaagggtaaagcaaagcagaaagcagaggagatagaggtaactggtaaagaagagaatgagacagacaagcatgggaaaatgaagaaagagcgaaaacggtaagaagtctgaatcaaagaaggaagggggtgaacgagaagaaacccagaaagaggctaatgagtcaacaaagaaagagagaaaacgtaagaagtctgaatcaaagaagc

SEQ ID NO: 138924 - DNA, 354 bp, Arabidopsis thaliana
ttatttgatgccattgctaatttatgtgtcccggtgattgtaagcgatgggattgagctaccttttgaagatgtcatagattacaggaagttctctatattcttgaggagagatgccgctttgaaaccagggtttgtggttaagaagctgaggaaagtgaaaccaggaaagattttgaagtaccaaaaggttatgaaagaggttaggcgatattttgactatacacatctaaatggaagtgtgaacgagatctggagacaagttactaagaagataccgctaatcaaactgatgattaatcgggagaagcgcatgatcaagagagatggaagtgaccctcaatgttcttgttta

SEQ ID NO: 138925 - DNA, 397 bp, Arabidopsis thaliana
aagaaagatagagaaaaaaaatgggaggcaaaggtgtgatgatggtggcgatactttgcctttgggcactctctgcaacatctgaagcagtaacagaggctgagccaggtttgatgatgaacttctacaaggacacgtgtcctcaggccgaagacatcgtccgtgaacaagtcaaactcctctacaaacgccacaagaacaccgctttctcttggctccgtaacatcttccatgactgcgccgttgagtcatgtgatgcgtcgcttttgctggattcgacaagaagagagctaggagagaaagaacacgacaggagcttcggacttagaaactttaggtacatcgaggagatcaaggaagctctcgagagggagtgtcctggtgttgtctcatgttc

SEQ ID NO: 138926 - DNA, 334 bp, Arabidopsis thaliana
tccgaaacttacaaagacaaaatccattgcaaaagagcgagcaacaacgacgaaatttcgaaatgccatcgccaccgacgacgacttctctctcggtgacacagaccataaacggatcacacagcttcacaatcaaaggctattctttggctaaaggaatcgggatcggaaaacacatcgccagcgatactttcaccgtcgggggttatcaatgggctatctatttctatcctgatggcaagaatcctgaggataattcggcttatgtctccgttttcattgctttagctagcgatggtaccgatgttagggctctttttgagctttctttgct

SEQ ID NO: 138927 - DNA, 342 bp, Arabidopsis thaliana
gccgtcaagctttcccccgcggcatctgaagtccttggaagcggccgtgtgacaatgaggaagactgttgccaagccaaagggcccatcaggcagcccatggtacggatctgaccgtgtcaagtacttgggtccattctctggcgaatcaccgagctaccttaccggagagttccccggagactacggatgggacaccgccggactttcagctgaccccgagacattcgcaaggaaccgtgaactagaagttatccacagcaggtgggccatgctcggagccctaggctgcgtcttccctgagcttttggctagaaacggagtcaagttcggagaggcggtt

SEQ ID NO: 138928 - DNA, 341 bp, Arabidopsis thaliana
cccacacgtccgctcatgttggtggtgtgaatgatatttccttctcgactccaaacaagcaactatgtgtaataacttgtggtgatgacaaaaccatcaaggtttgggacgctgcaacaggtgtcaaaaggcatacttttgaaggccatgaagctcctgtttattccgtttgtcctcattacaaggaaaacattcagttcatattttcaacagctcttgatgggaaaattaaggcttggttgtatgataatatgggttcccgagttgactatgatgcacctggtcgctggtgtactacaatggcttatagtgccgatggtactaggctattctcttgtggg

SEQ ID NO: 138929 - DNA, 344 bp, Arabidopsis thaliana
cccacgcgtccggtcagggagagcaaaacaaagatcggagaagatgaagacgattctttcttccgaaacgatggacatccccgacagtgttaccatcaaggttcacgctaaagtgatcgaagtcgaaggacctcgcgggaagcttgttcgcgatttcaagcatctcaacctcgatttccagctgatcaaggatccagagactggaaagaagaagcttaagatcgattcgtggtttggaacacgcaaaaccagcgcctccatcagaaccgctcttagccacgtcgataacttgatctccggtgttaccagaggtttccgttacaagatgaggttcgtgtacgccc

SEQ ID NO: 138930 - DNA, 347 bp, Arabidopsis thaliana
atcttcctttcccaaaaaaaacgaaattgagagacgatgattcgaagcctatcttattgctttcttaccatctatttcttcttgagcattcttccattaccaaacaccattgcttgtcccacacggttactgtgccgcagcgaccaaagagatgctcttttagaggtacaaaaggagttacatgtaccaacaactacatggaacaagaacgttgactgttgttcttgggatggtgtcacatgtgatgctatattgggagaggtgatatcactacaactctattatagtactgctaacatcttcgtgagctagtgctttcacgttgcaaacttcaaggggaaattcct

SEQ ID NO: 138931 - DNA, 342 bp, Arabidopsis thaliana
ccagcatctgtgtcaacttctggaaaatctccgcttggtattccaaacggtgttgctaaagcagcagctcctcttgttgatttactcgatctgggctctgatgatactcctgcgcctacctcctccagtaacaactttcttcaagatcttcttggtgttgatttatcgcagccttcagcacaacctggtgccatgcagccatcgcaagctggtgcggatattcttatggatctgttgtcaatcggaactcctgcccctgtgcaaaatggctcggcgaatggagacttattatctattcaagataacaatgctccaatagcgccttctttgacttctcccact

SEQ ID NO: 138932 - DNA, 347 bp, Arabidopsis thaliana
caggttttggtggaagagaaatcgagtgttagaatcttgacactaaacagaccaaagcagctgaatgctctgtccttccacatgatctctcgattgctgcaactgttccttgcatttgaggaggaccctagtgtgaaacttgtcatcctaaagggtcatgggagagccttttgtgctggtggcgatgttgcagctgttgttcgtgacatcaatcaaggtaactggagactcggtgccaattacttctcatctgaatacatgctcaactatgttatggccacatatagcaaagctcaggtttcaatcttgaatggtatcgtcatgggaggcggagctggtgtatccgt

SEQ ID NO: 138933 - DNA, 245 bp, Arabidopsis thaliana
atttggtgctcattcggctcatatgtggcctgggatgattctgaaatctggtgataggacaaatgaacctgtgttacctcaaggggaagacttgtcagaagaagaatctgaatatgaattggagtatgaagtgctatcagcacgctcaggtgatccatgggataatattgaagaaagatgggtttctgctagtgaaacgcattcacatgccgatgcaggcggatccacttcacaggaaaacctcc

SEQ ID NO: 138934 - DNA, 293 bp, Arabidopsis thaliana
atttatctttatttgtacaaaagattaagattttgattagctggttaggtgttcaagagaaagttttgatctttttttgggggggatgaagaaagtgtataggaagctgatttggatcagagacccattagcgagattgaagagacatgttagttcacattcagggtttaggtttttcagagatagaaaatggatgttcccttttttagcaagcttggttttgtcggttactcttttgatgtctgtcctttatgtccaactcgagacttcttatgtggaagagccattgcctt

SEQ ID NO: 138935 - DNA, 364 bp, Arabidopsis thaliana
cccacgcgtccgctcttcctgtctgttcactggaggtgaattttgatttttttggccgatcggatttgagtttttgaatctctgattgctgagaaaatgccggcgttttacggaggaaagcttacgaccttcgaggacgatgagaaggagagcgagtatggttacgttcgtaaggtttcaggtcctgttgttgttgccgatggtatggccggtgctgctatgtatgagttagtgcgtgttggtcatgataatttgattggtgaaatcatccgtcttgaaggagattctgccaccatccaagtttacgaggaaacagctggattgacagttaatgatcccgttcttcgaacacacaagccacttt

SEQ ID NO: 138936 - DNA, 382 bp, Arabidopsis thaliana
atctctccttttcttttcttcttcctctttctctcactaaaacccttgtttccttcactcgccgtcgcttttcccgtcatcggaatcttcaaattcgactctcgcttcactacgatccatgtccggttacatctacgccggttataccacctatacgtcgtcacttagctttcgcctcaacaaaacctccgtttcatccttccgatgattaccatcgatttaacccttcttcgctcagtaataataacgacaggagcttcgttcatggttgtggtgttgtagatcgggaggaagatgctgtcgttgttagatctccttcacgaaagagaaaggcgacaatggatatggttgttgctccatctaataatggattcaccagttc

SEQ ID NO: 138937 - DNA, 376 bp, Arabidopsis thaliana
agatgatgaaaatgttggtggacttgaagctatggacaattcttcaggaacctttttccccatagacccgttgccaaacacgcttgctatcaacctcggggacatggctacgatatggagcaacggaagattgtgcaatgtgaagcatagagtgcaatgcaaagaagcaacaatgaggtattccatcgcctcgttcttattaggaccaatggatacagatttggaacctccaagtgagtttgtggatgcagaacatccgcgactatacaagcctattagtcacgaaggggtacgaaatattagaatgactaaaaaattgcatgatggagaagctctcaagcttataacccatgcaggactagataaatgacctaaa

SEQ ID NO: 138938 - DNA, 370 bp, Arabidopsis thaliana
aaagaagctcctcctctctatcccaccacttctaaagctggctggtgagctctctctgagtgtcaagtctgtgaaatacactcgcggctccttcctctgccccggaggccagcctttttcctcaccgcagcttctctgaagaagtctctgttcttgatgggcactttactcagctgggcttgaacagcgtagcctacttgatgggcaatgatgatgagactaagaaatggcatgtctatgctgcctctgcccaggactccagcaactgcaacaacaatgtctacactctcgagatgtgcatgactggtctggacagagagaaagctgctgtcttctacaaggatgaagctgacaagactgggtcaatgac

SEQ ID NO: 138939 - DNA, 380 bp, Arabidopsis thaliana
tgaagcttcaatgatcactggaagcattggaatgcttccatctgctagtctcggtgaatcgggacctggactctttgaacctatacatggttcagcaccagatatagctggacaagacaaggcaaacccattggccaccattctcagcgcggcgatgcttctgaagtatggacttggagaagaaaaggctgcaaagaggattgaagacgctgtcgtggatgctctgaacaaagggttcagaaccggagacatctactcccctggaaataaactggtgggatgcaaggaaatgggtgaggaggttctcaaatcagtggaatccaaagttccagctactgtttaagtttattgatgatttgaagcacttgaaaaagtttgtg

SEQ ID NO: 138940 - DNA, 369 bp, Arabidopsis thaliana
gctatatcttgtcttaaaaagaagaagcaaagagaattagtggagtacgataagcagagaagtatgttaaaggtggtgttgttgatgatgataatgatgttggcgtcacagtccgaggctcagctgaaccgtgacttttacaaggaaagctgtccatcattgttccttgtcgtgagacgagtcgtgaaacgggccgtggccagagagcctcgcatgggtgcttctctccttcgtttgttcttccatgattgttttgtcaatgggtgtgacggatccttactgttggatgacacaccgtcttttttgggagagaaaacctcaggacccagcaataactctgtgagggggttcgaagtgatcgacaaaatc

SEQ ID NO: 138941 - DNA, 375 bp, Arabidopsis thaliana
  unsure (1)..(375): unsure at all n locations
atttcgcaaatggacaaacccaagatctgaaaaagtttttgtcttttctctcccaatcgcctgattcaagcctaaagctcggtttttttcttctgggtatttaggggttaagtgtattgtagaaaagcatggcgagtttgagtgggagttggagagatgcgtataaaggaatgtcatcggataatataaagggtttagtattggctttatcttcaagcttattcattggtgctagtttcattgttaagaagaaaggtctcaagagagctggtgcttctggtctcagagcaggttctggaggttattcttacctgcttgagcctctctggtgggtaggcatgataacgatgattgtangggaaattgccaattttg

SEQ ID NO: 138942 - DNA, 235 bp, Arabidopsis thaliana
gcccacgcgtccgcccacgcgtccgcccacgcgtccgcccacgcgtccgcggacgcgtgggccgcgatcatcgtgtttggcgactcttccgttgatgccgggaacaacaactatatcccaactgttgctagaagcaactttgagccatatggacgggactttgttggtggaaagccgaccggacggttttgtaacggaaagattgcgacggattttatgtccgaacccttagggc

SEQ ID NO: 138943 - DNA, 381 bp, Arabidopsis thaliana
acccacgcgtccgtggaatatgaacttgcggctttgagagaagccacagactcggggctaacgtatttactggctcatggagatgtaagggcgaagaagaattcgattttcgtgaagaagcttgtgattaattacttctatgcgtttctaaggagaaattgcagagctggagctgcgaatctcactgttcctcatatgaacatcttgcaagctgggatgacttatatggtctagtgtatgattctttagctatactctctttggaacatttctcctctggatatctccatgaattagggtttgtttcttgcggttgacgtctgtgactgtcgttaccgtaaggaacaagcaaaggttgaagatttcctaatattatttata

SEQ ID NO: 138944 - DNA, 361 bp, Arabidopsis thaliana
acccacgcgtccggccaaactgtcaggtaacactgcattggatgctgcactaaacgcacagtttttagtccagattggaatctttactgccgtccctatggtgatgggtttcatacttgaacttgggttgctaaaggctattttcagcttcattacaatgcaattccagttgtgttctgtctttttcacattttctctcgggacaagaactcattactttggacgtactattcttcacggtggtgcaaagtatcgagcaactggcagaggttttgtggttcagcacataaagtttgccgataattacagactttattctagaagtcattttgttaaagcttttgaagtaactctactgttg

SEQ ID NO: 138945 - DNA, 375 bp, Arabidopsis thaliana
acagattcgcatcaaaccctaagaaactgaagatgaggccgatcctgatgaagggacatgaacgtccattgacgtttctgaggtacaacagagaaggagatctgcttttctcctgcgccaaggaccacacacccaccctctggtttgccgataacggcgagcgccttggaacttaccgtggtcacaacggtgctgtttggtgctgtgatgtctcccgagactcgtcaagattgatcactggtagtgctgatcagactgcaaagctgtgggatgtaaaatctggaaaagaattgttcactttcaagtttaatgcccctacgaggtctgtggatttcgctgttggagatcgtcttgcagtgattaccactgatcact

SEQ ID NO: 138946 - DNA, 359 bp, Arabidopsis thaliana
atatctcctagcgttttaacgtgcactgttcttcgatttagaggagaagaaacgacctaatcctcgcgtatgcttctcattatcttctttagaagaggaagaaacagagctagacttcatgatagcgtggaccgttggattcactgtgtgcttaacagaacgagatggttgaatgatatgaacatgtggaagatcatctagtgcagagtttggtgttacttctgaggctttgtgctgttgaaacttcttctcaggggaccgagatttgagaatgtggttgctctgtggctgtaaggattgtaactgttggctgagtaagtgaattgtttcttgacaagctgcaagcttctctgttgcag

SEQ ID NO: 138947 - DNA, 361 bp, Arabidopsis thaliana
aagaaaatgcagaaaataatggccgtaaactacaagattccaggatatgttcacatatccgaagactgcagaaagttactatctcgtatatttgttgccaatccgttacatagaagtacgcttaaagagattaagagtcatgcatggttcctaaagaatttgccaagagaattaaaggagccagcacaagcaatctattaccaaaggaatgttaatcttattaatttttctcctcaaagagtagaggagattatgaagatagttggtgaggcaagaaccattccaaacctttctcgcccggtcgaatcgcttggatcagataaaaaagatgatgatgaagaagaatatttggatgctaatg

SEQ ID NO: 138948 - DNA, 389 bp, Arabidopsis thaliana
agggtttttgcaaagctttatagggtttaagaactatggctctctgagcttcatttggaaatcttcattgttcttcgacgactttgtttgactccaggcttagtcagaagctgatttgggatttgagatggcgacagagcatagcggtttagaagatcaggagagccaaccaagccaagtggctcctggttttgtaggagcaattgaagaacaatacaaaaaactcagagatcacgctgaagcttatccatatgtttggggttcttatactgttgtctatggtggtcttttcctttggacagcttatagatggaggaaacttaggagaactgaagatcgagttcgtggtcttcagacaaaacttcggaaactcgtcgaaaatgaacaag

SEQ ID NO: 138949 - DNA, 291 bp, Arabidopsis thaliana
acccacgcgtccgcggatgcaccaaaagcagctggaactggtggctggctagaggatacagaatcatcgggacttctaaaactggaatccaagcccaggctaattgagaacggtgtaacatcgatgacatcaagtgttatgcccacgagtgctgtttctgtgagccaaaaagtacggacagcttcaactgatactgcatcattgcaatcccttttgaaggatattgcagtaaatcctacaatgctactgaatctcctgaaaatgggagaaagacaaaaggtacctgaaaaa

SEQ ID NO: 138950 - DNA, 194 bp, Arabidopsis thaliana
ttgcatgaatgagaacacaatgcaagcacatgtttcatcaaagaagcatgctcgtatggagaaattagtgaaagaaggaaagattagaactgatgacgaagaagttgacgatctagagacagcatctcacgagaaggagaaaaaaggaaacagaagatcacaaagacagggaaagagatctcacaaacaggaaa

SEQ ID NO: 138951 - DNA, 359 bp, Arabidopsis thaliana
aagaagggaatacatttgatcaagcacgctatttggcgtaccttggaacggaatggacaggttgtcttattaggttcagctccagatcctcggatccaaaatgattttgtaaacttggcaaaccaattacattcttctcatggtgaccgggctcggcttgttctaacctacgatgaacctctttcccatttgatttatgctggggctgactttattcttgtaccgtcgatatttgagccatgtggactgacacagctcatagccatgagatacggcgctgttcctgttgttagaaaaactggaggactctttgatacggtttttgatgttgaccacgataaagaaagggcacaagctca

SEQ ID NO: 138952 - DNA, 355 bp, Arabidopsis thaliana
aggagatggctgcatcaccacaaaggagctgggaacagtgatgcggtcactagggcagaacccaacagaagctgagctacaagacatgatcaacgaggttgacgctgatggaaacggaaccattgacttccctgagttcttaaacctaatggctaaaaagatgaaggacacagactcggaggaagagctgaaagaagctttcagggtgttcgacaaagaccagaacggtttcatatccgctgcagagcttcgccatgtgatgacgaatctaggtgagaaactgactgatgaagaggtcgaggagatgattcgtgaagcagatgttgatggagatggtcagataaactacgaggag

SEQ ID NO: 138953 - DNA, 341 bp, Arabidopsis thaliana
actcgatcgtgaagcagaaaagtgaggttccaaatgggttctgtttcgggtcaaacccgaattacaacgatgaacctctcgctctcaacagcagagaagaaccctaatttccgctcgtcgcttctcaattctaagtacattcctcaggggtcaatttcaaagaatacatttttcttggctacaacacactcgacctttgagaaagcgaacagtatttggtcacgtgagctgcgtcatgccgttaacggaagagaatgtggagagagtgttagacgaagtacgaccatctctaatggccgacggaggaaacgtggcgttgcacgagatcgacggacttgtgg

SEQ ID NO: 138954 - DNA, 328 bp, Arabidopsis thaliana
aggttgttaaatcgtacgagaaaactattcgtgtcggaactttagatccgatatttatagaaagcaaccaaactccggctccggttactcgggagttcaagttttggattttgatgggtcatgctcgaactcgtaccggtatcatctccgtcgcttttaaattcttcaggtctctgttccctcgccatcaccgtactaacagcatgaagataaaaacaggaacgtttttgggggtttcgatatcattgattcttataaacttagctgcgatcatggaacgtgcagacgagaatctattgccttcggtttagaaagaagtgagtgaagc

SEQ ID NO: 138955 - DNA, 343 bp, Arabidopsis thaliana
acggacgcgtgggcagagatgtttggattcgttaaggatgtttttgtgtgttgcgctaagaattggggacttgagactttgatcaaggagcttgattgtgttagaaaggttttccgaggaagtgatgatgcaaaaggcaaagcattgcatcttaaagccaatgaaatggttaagaagctagagagtaaacagatttcccctcttgatgcttctaacttcatcattcagttcttcaactatgctgagtcaataccagaaattcccgacccaccgagagagctaaccgttgcagcggaaacgagctacagaaaagaccaggcatctgtgacgccttcaacatcaa

SEQ ID NO: 138956 - DNA, 347 bp, Arabidopsis thaliana
acggagccgtcgcttgtgaaactttccggcgatttaacagagtcatgatggaaatacgaactccgaagactggcaaagccaagcgtgttctcgaaagccgagctcctaagttggttgaaactgggaagaagacgttgatacttcatggaacaaagacgagtgctacacttagctctgtaatgacggaactctaccgtttgaagaagggaggtgccatcagatattcaaggaggaatgagaatattaggcctttcgagagtggaggtgaaacttcattagagttcttctctcagaaaacagattgtagcatttttgtgtatggttctcacacgaagaaacgacctgac

SEQ ID NO: 138957 - DNA, 267 bp, Arabidopsis thaliana
gggtcgactcaaacgtccgcccacgcgtccgcacagtttatggagaactggtgctaccacagggataccttaatgagcattgctaagcattagcaaacaggagaaactcttcccgagaatgtatacgataagctactggctgcaagaacattccgtgcagggtcccttagtcttcgccagttgaagtttgctacagttgatctggagttgcacacaaaatacatgccaggtggggcagagaccatctacgatgttgatcaaagggtg

SEQ ID NO: 138958 - DNA, 186 bp, Arabidopsis thaliana
acagtttagttttttaatcatatcaaagcagactgtgtgatggataagtacaaagtcgccggagaatttggtctcccggacatcacggtggcagagatggaatctttagcgagcttttgtgaagctgtcttgccttcagtgcagccaccgccggaagagctttccggtgaaggtgataaccagcgg

SEQ ID NO: 138959 - DNA, 343 bp, Arabidopsis thaliana
aattttcgtgagtaagaagaagaaacccgaaaacctcaaaccatggccgagggactcgtattgaagggcattatgcgcgcccacaccgacattgtcacggccatcgctacgccgatcgacaattccgacatcatcgtcacagcgtcgcgtgacaaatccatcatcctctggaaactcacaaaggacgataagtcttacggtgttgctcagcgtaggctcacaggtcactctcacttcgtggaagatgttgttctctcatcggacggtcagtttgcactctccggaagctgggacggtgagctccgtctctgggatcttgccacgggagaaacaactcgtcgat

SEQ ID NO: 138960 - DNA, 286 bp, Arabidopsis thaliana
aaactgtagtgattaagacaaagattcagaagagcagtaaaatggatgtggttaacggtgatgttgggagaattcaacaagtgagtataatgaaaagttgttctgcacacaagatgttcgataaaatgtctccacttaaagaacgactggaaacgaacaagaagatgaaaggattaagatcttggatgttcaaatacaaggctgagaagagaacaattaggaaacgacacaatcagggctggttacgcacttggatcaaaagcttgagatacaacgtttgagaaaa

SEQ ID NO: 138961 - DNA, 359 bp, Arabidopsis thaliana
acccacgcgtccggtggaaatggaggaaattgcttataataagttgtttcagtttcttcgtctcttctcttaaactttccaaaaccctagtattcgatgttttcacttttgatctcacgattaaattggtattgaaagtggagagctttcacgactctgtagcaagtagcactttagcaaggttttggtatcaatgaatgctaaagatgtaatcagccgtctaccagatgaggttcttgggcgtattctgtctcttatctccacaaaagaagctgtttcaacctcagtactctctaatacgtggaagaacatgtttgttttggtttccaatcttgatattgatgatcgtcaatctgtgc

SEQ ID NO: 138962 - DNA, 342 bp, Arabidopsis thaliana
gggcggacgcgtggggaagaaagatagagaaaaaaaatgggaggcaaaggtgtgatgatggtggcgatactttgcctttgggcactctctgcaacatctgaagcagtaacagaggctgagccaggtttgatgatgaacttctacaaggacacgtgtcctcaggccgaagacatcgtccgtgaacaagtcaaactcctctacaaacgccacaagaacaccgctttctcttggctccgtaacatcttccatgactgcgccgttgagtcatgtgatgcgtcgcttttgctggattcgacaagaagagagctaggagagaaagaacacgacaggagcttcggactt

SEQ ID NO: 138963 - DNA, 322 bp, Arabidopsis thaliana
agctgccgtcaacaatggcgaaagaaggagaagaacgtaagaaggagaagaaagagaagaaggagaggaaggagaggaagcgtcgcgaagctgaagaactcgctgtaagagagaagaaaatctcaaaaaaacataaatcgaaatccaaagaggaagagaaaccagagaaatcaaagaagaaatcgaagaaatacgaagaagtagaagaagaggagaaatctccatctccatctccatctcctaagaaatcgaaggagagtaagaagaaacataagagatcatcagatgaatccgaagagatcgtcgattcaaagcctgttac

SEQ ID NO: 138964 - DNA, 373 bp, Arabidopsis thaliana
ccacgcatccgccagttttgacttttgacttcgagtaatgagaagaaaaagcacagtgagattgctgttcttgacgttgagtcagagtctgtggctaggagcagcttcttttgttttttgaatcgacaatggttgaggaataaacgaaatcctgaccgttggattttttcttttcttttcttctacttaataatgtccgtgatattattattgtctaaaggggagacccgagaaagagcgagaccagttttgactttttggacattgtgtgttttcgattcgatcttttttttctgaagttaacaatgctggtactatcaataagaacaccaagatttgggaagtctctgctgaagattttgacaatgtcatc

SEQ ID NO: 138965 - DNA, 230 bp, Arabidopsis thaliana
  unsure (1)..(230): unsure at all n locations
ctgaatctggagtcgttgaagacacgagccgttagcttggccaaagccattgctcgaatccttgaagatttcgacgcttatggtcgaaccaacactactcctaaatggcaggatattctanggcagtattcgatggtaaatctcgagctttttaacattgtggaagaagtaaagagagtttcaaatgcgtttgttgtgcttcctaagaacgtcaatgctatgaacgctgc

SEQ ID NO: 138966 - DNA, 326 bp, Arabidopsis thaliana
cccgcaacgggagcgcaaaagatggtcgaattcgaagaccaaaagaagttgcgcatcttctacgacgacaaacgcatcgcctctgaggtcgttgctgattcccttggtgaggagtacaaaggctacgtctttaagatcaccggaggcaacgacaaacaaggcttccccatgaagcagggtgtcatgcaaagcaagcgtgtccgcttgttgctcgacaaaaactccaactgcttccgtgaaaagcgcagtggtcaccgtcgacgacgatctgtccgcggttgcatcgtcgccaacgacctttccgttcttaaccttatcattgtgaa

SEQ ID NO: 138967 - DNA, 194 bp, Arabidopsis thaliana
  unsure (1)..(194): unsure at all n locations
gacgagatangcatcgtgattggaccacatgcgaccgtagatgacgaagacattgacatggacatgggcaccaccgttggaccgcagaccaacctaaatgatgatgatttgggcaccatcattggacccgagtttgagatccacaagcaagatttccccgcagatttcatatttggaacatctgtttccgcata

SEQ ID NO: 138968 - DNA, 430 bp, Arabidopsis thaliana
acccacgcgtccgctaaacctatcttcttaaccaaaagatcaatagattacaaaaatgcagggagctctgtttatcaaaccaactattcttcttcctcttccttcttcagtttcttctccaaaactcacttttcttcttcctcacgcaaccaaagcttcaagactctcatctctcagatcaaacaactcatcatcatcatcatccttaacgtctgaccctaacaccgtcgactataactcctccatcctttctgtttttctagctgaagcatgcgaagtaatcagtggatacgcttgttctgctgatatttaccctgaagtcaagctcgatacaaagcccgtctcacgtcccgtggcttcagagcccgttgacagagaatacgaagagtataacagccccaaaacggttttccgtgaagaggcctgcgat

SEQ ID NO: 138969 - DNA, 392 bp, Arabidopsis thaliana
acccacgcgtccggtttgtttcttaattaccttgttgcaatgaatcttgcaaatatctaacgatgtctgagacaattctgggtaccgttgtttcaaacagaagagcaaagactctgctctctcagccaaaacatagttcttgtcacttctctctgtaattgacattaaatctttcaccatattccatgaagacttggaattgttaagacaagctttgcgtctccatgtgtacattgaagcttctactctatctgccagctgaagcgcttcatgttctgatacaatcttgagacgatctagaagtttttctggtgaaaaccgccctgaactcgtcatgtgtcgatagattgcatctcctgtgctcgcttttccgctctgcaaatgcataatat

SEQ ID NO: 138970 - DNA, 339 bp, Arabidopsis thaliana
atctcttcttactaaaaaatattcaatggatccatcaaaatatccttttgatattgaaccttaccaatagcagtctaaaattgaagagaagtatattatcaactggtttagggagcgccgaaacaaaataaaggaagactattcatctcatagcaagagaaaatacttcaagagagatcatgcagcagcaaatcaaagactaattgacgaatactttgcaattcaaccaacatatgaagatacaatgttttgtaagcgctccgagtgcgaaaacatgttttacttgggatcgttgcagacctatcaagcagcgacaactacttcaccaaacgatttgag

SEQ ID NO: 138971 - DNA, 374 bp, Arabidopsis thaliana
ggaagacttagttgtggaagaagatgtagttgggagcgaggatgaaatggcagattttattgtagatgaagatgatgagcatggtcctcctaagaggggcaactcgaagaaaaagaaatataggcagggatcagatattactgctatgcgagatgctaatgaaatatttggtgatgttgacgaattattaacaattcgcaaaaagggtttggcatctaatcaaaggatggaaagaaggctcgaagatgagtttgaaccaactgttctttctgagaaatatatgacagggaatgatgatgaaatccgccagcttgatattcctgagagaatgcagatatctgaagaaagcaccggaagccctcctgtagatgaaa

SEQ ID NO: 138972 - DNA, 303 bp, Arabidopsis thaliana
agatgataattcttgacaattcgatacttagaaatggcttcttcgtcttcacccccggcggcgatggaggtcggagaatctacaaactggacggagcttccaccggaactgacttcagcaatcctgcaccgtcttggcgcgattgagatacttgaaaacgctcagaaagtttgcagatcttggcgtcgtgtttgtaaagacccatcgatgtggcgtaaaattgacatgcataacctcggagatttggacgacatggattacaacctcgagatcatgtgccgtcacgctgttgatcgtagccag

SEQ ID NO: 138973 - DNA, 369 bp, Arabidopsis thaliana
ttaatagtaatctaatcggaagattcaagcgagaaatcgatttggttgtctgttaatttgttgggaaataaattgaaatacgagattgattggatggtgagaaggcaagaggaggagaagaaggcggagaagggaatgcgtctggggaaatacgagctagggaggacgctcggcgagggtaatttcggtaaagttaaattcgctaaagataccgtctccggtcattccttcgccgttaaaatcatcgacaagtctcgtatcgccgatctcaacttctccttacagatccaattcttatgaatctgtgcagataaaaagagagatccggactctgaaaatgttgaaacatccccacattgttagattaca

SEQ ID NO: 138974 - DNA, 305 bp, Arabidopsis thaliana
aaattacgaaagcagcgtataaagagatgatatcaaggatccttttacagaggtgtcaatgttcaagaagaattatgatcatcttccaaaagatacatattttggaatgtacaaagaagcaacacgaaataatccaaattacgttttgacttatggtaacggcaaatcagttgctcgggttcaagatcaccttcgtccaaatggagcacacagatggcataattacatgaaaactcccaatgagatcaaattggaggaggctgctgtcctacactacacatattcaaaattttctgacttaacat

SEQ ID NO: 138975 - DNA, 347 bp, Arabidopsis thaliana
accaagcgtccgtacaatttttgattcgatttttgtcgaaagaaaaagtgacaaaagtttttagcataattttatgttttctcataaacaaaaagtaaacccaaattgttttttcgaaacaagaatcgatttggcacgaaatcgaagatttgatgaattgtgtaaaacatggcgattcatgaagaaacccagatatcaacaacacaagagcctccttgcagttcgaaagatgccacgtcgcctcaagatcatcggttcgagaagcttcgtggcgtccgatggcgaatcaacctcggaatcttaccgtcttctccttcctccaccattgatgagcttcgcagagtaac

SEQ ID NO: 138976 - DNA, 394 bp, Arabidopsis thaliana
cccacgcgtccgcccacgcgtccgctccgaagccccgagcggccaagacgctacgtttgatttcgtctcaagattcactctgaatggggattgaatttggtgaactccaatgaggtgtttgcaaaactccgcaaagactctacctttagcgtttaaatcggcattgctgcctttgtctcaaaggtggttctgtaaattttctcctaagccatcctcattgacaaacattttcaaggtttcaatttcaaccatggcaaacactctcaatggaaatgtgatcatgacttcaaagcctcagagtacttaccaagttgtggtagctgcaaccaaggaaatgggtattggtaaagacggaaaacttccaaggaatttgcctaccgatctcaagttcttc

SEQ ID NO: 138977 - DNA, 291 bp, Arabidopsis thaliana
catcagcaacttccactcttcttcttctcttcaatcattctctctctctctttccctcttatacacatcatcacaacacgaagacatctctcattaatggaagtttcaacatcatccatgtcttcaaaaccagaacaaatgcaaaacccacctcctatgatctcatctcctaggtttcagcctcagataatatctcctcatcagcatgaccagcatcaacatctctcaaatccttatccaacaacatttgttcaagcagacacttctactttcaaacaagtcgttcagatg

SEQ ID NO: 138978 - DNA, 389 bp, Arabidopsis thaliana
acgagaaagaaaaaaaaccaaaatgaaaacttttgccaactttgcaattctgtttttattacaaagcttattgtttcctctttacagttcatgccttcatcaaacttcagatgattcatctccatttccttctgatttcctctttggcacagcttcttctgctttccagtatgaaggtgccttcttaaccgatggaaaaggtctgaacaattgggatgtctttgcccatgaaaaccctgggaaaatagttgatggaagcaatggagacatagctacggaccaatatcatcgatatatggaagatatccaatcaatgaattttcttggagtcaatagttacagattatctatttcctggtctagagtcttacctaatggaagatttggag

SEQ ID NO: 138979 - DNA, 287 bp, Arabidopsis thaliana
actctctgatgctttatatggaggaaatgttgcaacttggtctctcttttgtcaaatggcaaactggttcatcttcttctgtttgaaccgtaccttttcaaactgtttggagactgttcttaccatcatggggctgtactactggccttgtattagagattcttcaatagactatcccgtgaatcggaagtggggtttggtcatagcggccctagcatgtgccataaggccaactagtgcagtcatatggttatacgttgggatgctcgagctatttttgacaccta

SEQ ID NO: 138980 - DNA, 425 bp, Arabidopsis thaliana
acaaagcacttcaagatggacggctattggacgtcccattgagtacagcgttttataaacttattcttggtcaagagcttgatttgcatgatattgtattatttgacgctgaacttggcaagaccttgcaagagctgcgtgttgttgttgcccgcaagcactatctggagggagtaggtggtgacaatagcagcacgatttctgatttatgtttacgtggatgccgaatagaagatctctccttggaattcacgctacctggctatcctgagtacatcctgagatcaggagatgaaattgttgatattactaatcttgaggagtatatatcccttgtcgttgatgctactgtcaagagaggagtcactcggcagatcgaagcttcagatctggattcaatcaggtgtttgacataacatctctac

SEQ ID NO: 138981 - DNA, 345 bp, Arabidopsis thaliana
aaaacgttttactttgtgctgcactactcaacctcaatggccgcctcaacaatggctctctcctcccctgccttcgccggtaaggccgtcaagctttcccccgcggcatctgaagtccttggaagcggccgtgtgacaatgaggaagactgttgccaagccaaagggcccatcaggcagcccatggtacggatctgaccgtgtcaagtacttgggtccattctctggcgaatcaccgagctaccttaccggagagttccccggagactacggatgggacaccgccggactttcagctgaccccgagacattcgcaaggaaccgtgaactagaagttatccacagc

SEQ ID NO: 138982 - DNA, 347 bp, Arabidopsis thaliana
cccacgcgtccggcaagaatctggtcggaaaaggagggtttggaaatgtgtataaaggttgtcttcatgatggaagtatcatcgcggtgaagagattaaaggatataaacaatggtggtggagaggttcagtttcagacagagcttgaaatgataagccttgccgtccaccggaatctcctccgcttatacggtttctgtactacttcctctgaacggcttctcgtttatccttacatgtccaatggcagtgtcgcttctcgtctcaaagctaaaccggtattggattggggcacaagaaagcgaatagcattaggagcaggaagagggttgctgtatttgcatgag

SEQ ID NO: 138983 - DNA, 355 bp, Arabidopsis thaliana
acccaaaccgtcctatcgccagtttcatcttctctggtccaactggtgttgggaaatcagagcttgctaaggccttggctgcttactacttcggttcagaagaagcaatgatccgtcttgacatgagtgagttcatggaacgacacactgtttcgaaactcatcggttcacctcctggttacgtaggatacacagaaggaggtcagttaacagaggcggttcgacgcaggccctacactcttgttctctttgacgaaattgagaaagcacatcccgatgttttcaacatgatgcttcagatcctagaagacggtagactaactgatagcaaaggaagaactgtcgatttcaagaa

SEQ ID NO: 138984 - DNA, 314 bp, Arabidopsis thaliana
acttggtctcctggtgcttatgggaactggaccgtagtaaaggagatgcttgatgttccaatcgtctacataattggagctttcattccagcatcaatgattgctgtgctttactacttcgaccatagtgtagcttcacagctcgcgcagcagaaagaattcaatttgagaaaaccgtcttcttaccactatgacttgcttcttcttgggtttctgacattaatgtgtggtctacttggagtccctccatcaaacggtgtcattcctcaatctccaatgcataccaagagcttagcaactcttaaataccagtt

SEQ ID NO: 138985 - DNA, 171 bp, Arabidopsis thaliana
acccacgcgtccgctgaagcttaaaaccaactccacaaaatcctgaaaaactgattacagcattcctctgatctcttcaattttatgaaatactgtaaatttatggttgttatgtaaacttgagaagctcttcatagttttgagggattataaaatttatcttcttatggt

SEQ ID NO: 138986 - DNA, 354 bp, Arabidopsis thaliana
agagcaacaaaaccctgaactctatgtttctgttaaactcattcacaattttatgagaaattggacaaaaccctgatgtcggattccgtcaaaacgacggtggatccgcttttgaaagatttggatgggaaaaaagagagtttcaggcggaacgttgtgtctatggcagctgagttaaagcaagtgagaggtcgtttggtttctcaagaacaattctttgttaaagaaagcttttgtagaaaagaagcagagaagaaagctaagaacatggaaatggagatctgtaaattgcagaagaagttggaagatagaaattgtgagcttgtagcttcaacttctgctgctgaaaagttt

SEQ ID NO: 138987 - DNA, 351 bp, Arabidopsis thaliana
cccacgcgtccgcccacgcgtccgcggacgcgtgggcgacgataaaacccagatttgggttcaagcttccataactttaaacccctctcgcgatccaggttgctatcaaatacttgggagcccccagtattattgaataacacagcctgacaatgagtgtagtcgggtttgattttggaaacgagaattgccttgttgccgttgcgaggcaaagaggtatcgacgtcgtgcttaatgatgagtccaatcgtgagactcctgctattgtctgcttcggtgacaagcagcgcttcatcggcactgctggagctgcttctaccatgatgaaccctaaaaactccatctctcaaa

SEQ ID NO: 138988 - DNA, 360 bp, Arabidopsis thaliana
ctaacaacaacaaatcttaaacgttttactttgtgctgcactactcaacctcaatggccgcctcaacaatggctctctcctcccctgccttcgccggtaaggccgtcaagctttcccccgcggcatctgaagtccttggaagcggccgtgtgacaatgaggaagactgttgccaagccaaagggcccatcaggcagcccatggtacggatctgaccgtgtcaagtacttgggtccattctctggcgaatcaccgagctaccttaccggagagttccccggagactacggatgggacaccgccggactttcagctgaccccgagacattcgcaaggaaccgtgaactagaagttatccaca

SEQ ID NO: 138989 - DNA, 361 bp, Arabidopsis thaliana
aggcggaggcagagatggagattggcgttgtcccaaccccagttgtgggaacgtgaactttgcaaggagagttgaatgtaacaagtgtggtgcacttgctccttctggtactagttctggtgctaatgatcgtggaggtggtggatatagccgaggtggaggtgacagtgatcgtgggggtggtcgtggtggtagaaacgatagtggtaggagctatgagagtagtagatatgatggtggaagtaggagtggtggtagctatggtagtggtagtcagagggaaaatggttcgtatggtcaggctcctcctcctgctgcagctattccatcctacgatggttctggaagttatcctccaacc

SEQ ID NO: 138990 - DNA, 367 bp, Arabidopsis thaliana
aaaaaaaaaaaacacaaaaaagtttcaatggccgcctcaacaatggctctctcctcccctgctttcgccggaaaggctgtgaacctttcccctgcggcatcagaagtccttggaagcggccgtgtgacaatgaggaagactgttgccaagccaaagggtccatcaggcagcccatggtacggatccgaccgagtcaagtacttgggtccattctctggcgagtcacccagctaccttaccggagagttccctggagactacggatgggacacagctggtctatccgctgaccccgagacattcgcaaggaaccgtgagctagaagttatccacagcaggtgggccatgctcggagccctaggctgcg

SEQ ID NO: 138991 - DNA, 360 bp, Arabidopsis thaliana
gaatgtctagagtggaagataaggtataaagtggctctaggtatagctgatggtctgagttatcttcataatgcgtgtccaagaaggatcattcaccgtgacatcaaagcttctaacatattgctcaaccacgattacgaagctcagatttcagatttcggacttgcaaaatggctcccagagaactggcctcaccatgttgtattccccattgaaggaacattcgggtaaaagagagaaagctttgtaactatccatgaacagctttgctgatcaaaactataggtttcattgggttttttctccctttagatatctagctccagagtatttcatgcacggcattgttgatgagaagat

SEQ ID NO: 138992 - DNA, 351 bp, Arabidopsis thaliana
gtccgaaaatgtttctgtttggaagcaaagctctggaacagtttgtgaatcgtctggttgaattgcctcaatactgtaaccatattttgcaaatatctcatctgcgtagtactcacccggagttagtcactgttattgaacaagcactttcaaggatatcatctggtaatttagaatcagatgcctctgtttcacactctggtccctcacaatctttccctggaaatggcgagttgagtggttctggaattggccaacctgcattacagctttcttctcccctacagcttcaacagaaaaatgaagtgccaagtgtgccatctaacgaggcaaagccacttctgccatcgt

SEQ ID NO: 138993 - DNA, 411 bp, Arabidopsis thaliana
attcccggggtccgagtggcggtatggtgcattggggaatatggtgatctgttggttaacaatgtggggatgcttggtattgaagatccaataacggtaacggaatctgatgcagtggacgttatcgaggatgccattactcgccataactcagattcgactacaaaagcaatggcattggttgctctactgaagttgtcatcccgctttccttctatttcagagagaattaaagacataattgtgaagcagaaaggaagccttctccttgaaatgcagcagagagctattgaatacaattctatagttgacaggcataaaaatatcaggtcttctctggttgacagaatgccggtactggatgaggctactttcaatgtgaggaaggccggctcttttcctgcatcagtt

SEQ ID NO: 138994 - DNA, 412 bp, Arabidopsis thaliana
aaatcgctctacttctctctctctctctatattcgaaaaaatggcgaaactggtgatgttgttggctctctgtatcttaccggcgatagccatggcggcaaggaggggaaatattggaaagaatacaatggtggttcaaggtagcacctactgtgacatttgcaaattcggcttcgagactcctgaatcctcctacttcatccccggtgcaacggtgaagctatcatgcaaagacaggaagacaatggaagaggtttacacagacaaagctgtatcagacacagaaggaaagtataagttcattgtccacgacgatcacagagaccagatgtgcgatgttttgcttgtgaaaagctcggataaaacctgctctaaaatctccgttggacgtgagaagtctcgtgtgatcttg

SEQ ID NO: 138995 - DNA, 341 bp, Arabidopsis thaliana
tttttctctacacagatctctcattcactctctcgtacacaatgcaatcggttctttctctttccttctcacaagcatcgcttcctttagcgaatcgtacgctttgttcatccaacgcagctccttctacgccgagaaatctccggttctgtggactccggcgagaagcgttttgcttctctccgtcgaagcaattgacctcgtgccgtttccatattcagagtaggagaatcgaagtctccgccgctgcttcttcttccgctggaaatggagctccatcgaaatcattcgattatgatttgatcattatcggagctggagttggtggccatggagctgca

SEQ ID NO: 138996 - DNA, 413 bp, Arabidopsis thaliana
acccacgcgtccgcggacgcgtgggtcacagtaaatgcttttgcttgagagagagtctgttagaggttttttgtttgtttctgtttccttctgtcacccagaaaactaaaaagcaaacaaattcaagaagagagagagagagagatagcctcaaaaccaagtcctaaccattgttgatagaagagaaagcttttcttttcttgttgcttatggtgaaagaatgaaagagagagaggaggagaagtaagaagcagagaaagtgtttagagctttgcatgttcctttctctccaagtttatatcttcatcgtaaagtctctcaacctttgattctgttttttcctcttatccatttatcctctttctttttctctctctcctcataattctagccacaatctttttagggtttca

SEQ ID NO: 138997 - DNA, 416 bp, Arabidopsis thaliana
agaaaaaaaacacagaaagtttcaatggccgcctccacaatggctctctcctcccctgccttcgccggaaaggctgtgaacctttcccccgcggcatctgaagtcctcggaagcggccgtgtgacaatgaggaagactgttgccaagccaaagggtccatcaggcagcccatggtacggatccgaccgagtcaagtacttgggtccattctctggcgagtcaccgagctaccttaccggagagttccccggagactacggatgggacaccgctggactttcagctgatcccgagacattcgcaaggaaccgtgagctagaagttatccacagcaggtgggctatgctcggagccctaggctgcgtcttccctgagcttttggctaagaacggagtcaagttcggagaggcggtttg

SEQ ID NO: 138998 - DNA, 365 bp, Arabidopsis thaliana
acaaaaaatggctgcggagcttgtaagttctgcaacaagtgagaagcttgcagatgtggactgggccaaaaacattgagatctgtgaattagctgctcgagatgaaaggcaagcaaaagatgttatcaaggctatcaaaaaacgcttgggaagcaagaacccaaatactcaattatatgctgtccagttgctagagatgttgatgaataatattggagagaatattcataagcaagttatagatacaggtgtactccctacgcttgtgaagatagtaaagaaaaaatcggatttgcctgtaagagagaggatttttcttcttcttgatgcaactcaaacctcgcttggtggcgcttcagggaaat

SEQ ID NO: 138999 - DNA, 408 bp, Arabidopsis thaliana
acccacgcgtccgcccacgcgtccgcggagacgttgaattgattaagcttgagcctcaacagctccgccggaatctcatcggtgagttggttgttagagagatccaggtagtttaaaaccggtaaatcaccgagttccggtggtatcccgcctcgtaaacggttgttggagagatttaattcggttaactcggtgcacgaactcactgaactcggaatctcgccgtcgagcatgttctcctgcatctctactctctctagattcttcaatttgttgatgcaggacgggattgatcctaagaaactgttgctgctaagatcgatgactctgagatcacggagatcacaaagtttgacgggaatcacaccggacaagttgttagcggagatttcaagctgagatagatga

SEQ ID NO: 139000 - DNA, 415 bp, Arabidopsis thaliana
  unsure (1)..(415): unsure at all n locations
cttcgatatctctagtctgtttttgtcgtaaatccattgatcatgccgcctggtgccaaaaagagaaaggctttgaagaagaagcagcaggagcaggaagccactggagtcgctaccaacaacaaaggcttcaatggtcatggacatgatgaacatggaagccaagatgagagagacagtgatggcaatttgagttcccctggatctcaaggaaatgaagaatttgggactagagatccatcacctcctccattatctagtttagggaaagacattgttaaagagaaagcagaagatgcagactttactgggggacaagtagcgaaaggtgaagacgttattgaagttggaagaggaagaacggatcacgangagaatggtgtaaacaaacaactcaattcctgtcctgaaaatt

SEQ ID NO: 139001 - DNA, 234 bp, Arabidopsis thaliana
aacccacgcgtccgatagtctttatagataagactcttcaacgattccactttatttttcggtgggattgttggttgatgaagaaaaaaaaatagtttgtaattacaggtttaaatatgtagagaaaaaatgacgaatatgtattatcttgtttttttttccttcgaatatgtattacggtaatataaatttgcttgtaaaaataataaatatattatttgataaattttgtac

SEQ ID NO: 139002 - DNA, 336 bp, Arabidopsis thaliana
tagcagcaaagggctcagcttctgatcagaaacctggtcctgttccgttcttcgctgctggagtcagctcggttttgcatcccaagaacccttttgccccaaccctgcatttcaattatcgctatttcgagacagatgctccaaaggatgttcctggagctccaaggcaatggtggtttggtggtggcactgatttcactcctgcttacatctttgaagaagatgtcaagcatttctattcgattcaaaagcaagcctgtgacaaatttgacccttccttctatccccgattcaagaagtggtgtgatgactacttttacatcaagcaccgtgatg

SEQ ID NO: 139003 - DNA, 356 bp, Arabidopsis thaliana
acccatttgcttccttgaatggcaagtctcttctcctcacgtctcggctctcaatctctttctctcctcatcaacatcttcttcatctttctcatctttctccatttcgcttcacaaactcctcctccctccggatccatccaaaccttaaattcctttgccggcggtgacagtgacagctgcagcggaggactcgccagccttgacgaccaccgttccaagtgttcttacataagatctcaatcaaaatgtggcccacaaggttacatagactatctcaagattttcttctgcatcttcggacaatcccctgttttgggccatctagttttatccgcctggttgtttgttctgtt

SEQ ID NO: 139004 - DNA, 336 bp, Arabidopsis thaliana
gatcagtctctacaaagttttataactcacctatcaaaacaaacttgattagatttctgacgctggaagactctttcttgattgaaaatcgagcaaccttgagagcgatggctgagtttggggctattcttttttacttttatattagtgatcgaacaagcttgcttggagagtctaaaaagaattacaacagagatcttttcctctttctctactgtcttctcatcatagtttcagccatgacatccttgaagaaacacaatgacaaatcacctataacaggaaaatccattctctatcttaatcgtcaccagactgaagagtggaagggatgga

SEQ ID NO: 139005 - DNA, 414 bp, Arabidopsis thaliana
acccaagcgtccgttcagctaaacagacattgcgccgccgttaagtcgaaaggatagaaagaaattaaagaaagaagaagcttgttgtctttgcttcttgaggctctcttcttgtcttgatcatctgttacgttgttccacgaaaagaacagtagctttgtctctccatatagggttattatctgaaatgggtaattgtttagattcatcagctaaagtggataatagcaaccatagcccacatgctaattctgcttcttcgggctctaaagtttcaagcaagacaagccgttcaacgggtccttcaggactaagcacaacttcttacagcacagatagtagttttgggccattaccaacacttaggacagaaggagagatactttcatcgcctaacctaaaagctttcacttt

SEQ ID NO: 139006 - DNA, 333 bp, Arabidopsis thaliana
gtttacaaaattttgctgtttaaattgatagaagaagattcgacctttaaaggctatctgaagaacatctccatcatcgcctggtgtttcttcatttcatcaaattcaacacagaagattcgatgagtagcttcaacggagactccatggatgatttcaaaggcctccgaataactcagcttgatgatgatgacgatgatgaaactgcggtggaacctataaatatggatgaatttgatgatgatgatgaggaagatgatgaagattatgaacctgtgatgttaggtttcgttgagagtcctaaattcgcatggtcaaatcttcgtcaactgt

SEQ ID NO: 139007 - DNA, 410 bp, Arabidopsis thaliana
aaacacaagacgtgcttacaatacaccacacacttcactctttcttcatcttcttcttcttaaatagctcgaaatcacatctcacagaattaaatcttatggctctcgagactctcaattctccaacagctaccaccaccgctcggcctcttctccggtatcgtgaagaaatggagcctgagaatctcgagcaatgggctaaaagaaaacgaacaaaacgtcaacgttttgatcacggtcatcagaatcaagaaacgaacaagaaccttccttctgaagaagagtatctcgctctttgtctcctcatgctcgctcgtggctccgccgtacaatctcctcctcttcctcctctaccgtcacgtgcgtcaccgtccgatcaccgagattacaagtgtacggtctgtgggaag

SEQ ID NO: 139008 - DNA, 411 bp, Arabidopsis thaliana
ctatctttcctccacattaaagtaaagtatctctctcttttttctcctacgtactccatagtgatggcttcatcgcttctgacatcttccgttatgatccctaccaccggttccaccatggttggccggtcagtgttaccctttcaatcttccctgcactctctccgcctgacccattcgtacaagaaccccgcattgttcatctcatgttgctcttctgtgtccaaaaatgcggcaactagttctactgatctcaaacccgttgtggaacggtggccggagtacataccgaacaagcttcccgacggaaactatgtgcgtgtattcgacacgacgctccgtgacggtgaacaatctcctggtggatccctcactccgccgcagaagctagagattgcccgacagctcgct

SEQ ID NO: 139009 - DNA, 409 bp, Arabidopsis thaliana
cggacgcgtgggcggtcggccattgaattgttgttgattcattggctctaaaacgaaaatgggaattctcaacgacgacgccgttttaatcgaaccgggaaaaatctccggagatcccaccgtcgttaccgtcaattgtcctgatgaatccggtctcggttcaactctgtgtagaatcatcctcgaatttggtctctccattacccgagcagatttttcaacagatggaagatggtgttatatagtgttttgggttactccagatattagctctcctaaaattgattgggacagcttaaagaatcgtcttttatcagcttgtccttcttgcttaggctctttctacttctgccttcaatccaatgtctctaagcctccttccctttatcttctcaagttcttttgccgt

SEQ ID NO: 139010 - DNA, 409 bp, Arabidopsis thaliana
aggatctcggagcggacctaaaggcactccaagcatcaaagacgaagataaaatcgatatctatgattttggagtgatattgcttgaacttatagtgggaagaccattgagagcaaagagtcaagtcgatgttctaaaagagcagttacaagcaagcatttcagcggatgatggagcacgtaggagcatggtggatccaacggtccatagagcttgttcagaccaatcactgaagacaatgatggagatatgtgtaaggtgtctccttaaagaccctttagaacgtccttccattgaagatgtcctgtggaatcttcagtttgcttctcaagttcaagaaggttggctacaaaacagcaatccctcgagcaatctcggctcgccttctcctgctgcttcctctcttcct

SEQ ID NO: 139011 - DNA, 363 bp, Arabidopsis thaliana
cccacgcgtccggatgcattgtctttaaacggatctgagcgtgtatcactctcgagtacgacaaccacatcatcaacacgagacactgattcaaatgaagtgatgtctcaatcgaaatcagacggtgacttaaacgacacaaaccagcctgatttgattgattcatctgcagatgaaggtctcttggaaaactgcaggatcttaccgagtaattgtttgccttgtctgaatacaacaactgttccttctattgacaagagaaggtctcttagctctagccctcccagttccaggaaaaaatcatctcttagactttcttataaatggagagaaggtcatgcttcaggagccttgtttttgtcg

SEQ ID NO: 139012 - DNA, 381 bp, Arabidopsis thaliana
agcgaccctaatttgtgagctctcttctctttgcgcagtcaatttgctacaacttagaaaatggcggcggctacttcatccatcgctccttctctttcatgcccatctccttcttcttcatccaaaaccctttggtcttccaaagccagaaccttggctctacccaatatcggtttcctctcgtcttcttccaagtctctgaggtcgcttactgccaccgtcgctggaaatggcgccactggatcctcccttgccgctcgcatggtttcttcgtctgcggtcaaagcccctgtttctctcgattttgagacatctgtcttcaaaaaggagaaagtttctcttgctggttacgaagagtacattgtgagaggaggaagagac

SEQ ID NO: 139013 - DNA, 388 bp, Arabidopsis thaliana
acccacgcgtcggcccacgcgtccgggacgatttgctttctgattcgagtcttgaggtttcttgggaacaggatcgcttctacagatatttcacccatgtcaagtttaacagtgagaagggtatcgcgcgaagatatacaactggttcagaatctaattgaacgatgcctccagctttacatgaaccagaaagaagttgttgacactcttctagaacaggctaagatcgaacctggttttacagaactagtttggcagaagcttgaagaagagaaccgcgaatttttcaaggcatattatctgaggctcatggtgaagcaccagataatggaatataacgaactgcttgagcagcagataaaccacatgcgccagatgcatccaactg

SEQ ID NO: 139014 - DNA, 325 bp, Arabidopsis thaliana
gagttgttgaggctaaaaattttgcgcttgagcgggaaatatcggtccaaaaagaattgctggaggatttacgagaggagttgcagaaagagaaaccattgttggagctagctatgcatgatatatccgttattcaagatgagctttacaaaaaagctaatgcgtttcaggtagcacaaaatctacttcaggagaaagagtcaagtttggtggaggcgaaactagagattcagcatctgaagtccgaacaggcttctctagaactattactgcaagaaaaggatgaagaactcgctgaagctcgaaatacattgggagaagtgaa

SEQ ID NO: 139015 - DNA, 385 bp, Arabidopsis thaliana
tggaatcagatcttcatcaagttattaaagctaatgatgatttgactcgtgaacaccaccagtttttcctttatcagatgcttcgtgctttaaagttcatgcatacagctaatgtttatcaccgtgatcttaagccaaagaatatacttgcaaacgcaaattgcaagttgaaagtttgtgactttggattggctagagtagcgtttaatgatactcctacgacagtcttttggacggactatgttgccacaagatggtatagagcacctgagctctgtggatcattcttttcgaagggatgacttgaactctccccgaagttgaaaatctatgaatcagtacactcgagctatcgacgtttggagcattggctgcatctttgcag

SEQ ID NO: 139016 - DNA, 345 bp, Arabidopsis thaliana
tgtcaacacattcatcaatctcgcaaccgccgcttcctctcgccggaagagtcgccattgtcaccggctcttcccgtggtattggccgagcgatagcgatccacttagctgaactcggtgcgaggattgttatcaactacacccctaaagccgcagacgccgagcgtgtcgcgtcggagatcaatgattttccagttagggaagaaatcactggaaagggaccaagagctattgtggttcaggccaatgtctctgagccaagccaggttaaatcaatgtttgatgcggcggagagtgcctttgaagcgccggttcacattctggttaactctgctgggattctcg

SEQ ID NO: 139017 - DNA, 388 bp, Arabidopsis thaliana
aaaagaacagaccattgggatcacaaatctccgaagaagaagaagaagatatcaaagtgtttatttttgtgggatttctgctgcaacttgttcaagtctttcttctctgaccattggttgacttcttcttaggtttccagaagaagacgatattgtagtgtatcctcgttttcatgttttcttagcacaagtctatgggttgttgtaaagtgccagctcttattcaggcccaggtagaaatggggttggttaatgatgttgagcacaaaagcctttttagacgagatactgattccccagaaagaaaagcagcttccttgatggaacaaggatcactttctgcaagttttcgagaatgctcaactaaaacacctaataacagtgtgct

SEQ ID NO: 139018 - DNA, 387 bp, Arabidopsis thaliana
ccaagacattagcaaaactaacaaagctaactaatctccatttaagtgataatcgcctgaacggatcgattccagagtttattgggaagttaccaaaacttcaaagattagaactctatgcgagtggccttagaggacctattccagactccatttttcatctggagaatttgatcgacgtgagaatcagtgacacggttgcaggattgggacatgttcctcagataactagcacgagcctgaaatatttggttttgagaaacataaacttatctggaccaattccaaccagtatctgggatctgcccagtttaatgactctggatctttcctttaataggctgactggagaaatacagcatatgcaactgccccaaaatacacata

SEQ ID NO: 139019 - DNA, 381 bp, Arabidopsis thaliana
cttggattttgaaccagtggtcactgaaaggcctggcgaactgactgcgtactacaagattgcacgtcactacaagtgggcactggaccagttgttttacaaacacaaatttagtcgagtgattatactagaagatgatatggaaattgctccagacttctttgattactttgaggctgcagctagtctcatggatagggataaaaccattatggctgcttcatcatggaatgataatggacagaagcagtttgtgcatgatccctatgcgctataccgatcagatttttttcctggccttgggtggatgctcaagagatcgacttgggatgagttatcaccaaagtggccaaaggcttactgggatgattggctgagact

SEQ ID NO: 139020 - DNA, 385 bp, Arabidopsis thaliana
gcgagctccgatctccggaattttctcgagatctctcggttacctccaccgtacgacgccgctatcctccgctactcgtcacctatgcgccgtcgcttctcccgaagctcgaacgaagaaactcgagcgaatcgccgacgatttactcaaactgaatcggattgagctttacgattactcactcctcttcagccataaaataggtctcaatcgctacggttccgccgtagctgttaccggatctgtcggcgacgcgtcagcttctacggagacgaaaacggcggagaagactactttcgatgtgaagcttgagaaattcgaagcggcttcgaagattaaagtgataaaagagatcagagcattcacggatctgggattgaaagaa

SEQ ID NO: 139021 - DNA, 368 bp, Arabidopsis thaliana
tcttaaacgttttactttgtgctgcactactcaacctcaatggccgcctcaacaatggctctctcctcccctgccttcgccggtaaggccgtcaagctttcccccgcggcatctgaagtccttggaagcggccgtgtgacaatgaggaagactgttgccaagccaaagggcccatcaggcagcccatggtacggatctgaccgtgtcaagtacttgggtccattctctggcgaatcaccgagctaccttaccggagagttccccggagactacggatgggacaccgccggactttcagctgaccccgagacattcgcaaggaaccgtgaactagaagttatccacagcatgtgggccatgctcggagc

SEQ ID NO: 139022 - DNA, 331 bp, Arabidopsis thaliana
cccacgcgtccgcccacgcgtccgctgctgcgacccttgtggctgctcagtgtgtggaagctgctgaagttatgggagctgagagagagtatttggcttctgttgttagctccgccgtcaatgttcgttctgccggagatattatgactctcaccgccggagcagctacagctttaagaggagtgcaaacattgaaggcaagggcaatgaacgaagtgtggaacatagcatcagtgataccaatggataaaggactcacttctacaggagggagcagcaataatgttaatggtagcaatggaagctcaagcagtagtcacagtggtgaact

SEQ ID NO: 139023 - DNA, 398 bp, Arabidopsis thaliana
gtgttcttcaaattctcaatctttctctcaattcatctaaagggttcctcaaagtttcaatctttctctctgaatctaaaccatggctcgttgtagcaacaatctcgtatggatactcaatttcctagtatttcttctctcgatcccaatcttagctggtggaatctggctaagccaaaaagggtcaacagagtgtgaaagattcctagacaaaccagtgattgctcttggtgttttccttatggttgtagcaatagctggtctaataggttcatgttgtagagtcacatggcttctttgggtttatctctttgtcatgttccttttgattctccttgtgttctgtataacagtttttgcctttgttgttactaacaaatgagctggtgaagctattg

SEQ ID NO: 139024 - DNA, 410 bp, Arabidopsis thaliana
acaaaaatcacgataatccatgatctaactataagagggagtaagagaaacatttcacttggtttttcttactgagtactgatataaataaatatagaatcagacaaagattcgtttgctgaacgattttatataaatttagtccttacctgcgcagctaatcatcgtgagcggagcgactatgcgtcaagaaaaaaaaactaaaatactaataattaagtgactccttctctctccttttttttggggtatgcaccaacctttatttataagtataagcaagaataaataagaacaacaaagcaaacggctcatttctcagaaacaactcaaacatgggttccttcgacttgcctcacagttcatcgttcaagggagaaagtgaaatatttcttcggaatgtgttcgag

SEQ ID NO: 139025 - DNA, 416 bp, Arabidopsis thaliana
acccacgcgtccgttgttaaatgccacaagaagaaagctgaagaaagggagacgaaaaattcgcagaggaactatagccaacactagtcactgcaatatcgagcttggagaaatggagaaggaaagccatgaggagaacaaccacactatctcaggtgatttaacggcaaaacggaaacgaggtcgtccgaggaaacaattgaagctggaatcgaatgagcactctcttggtcattctccaagttttagcaggagtcagcagcagtctcgccagaggaatgacgatgaagctatggttggacagccgattagtggtgtgattgaggcgacatttgaagccgggttcttgctttctgttaaggttgggaattcagatagcatgcttagaggtgtggtcttcaagcctggtcactgtg

SEQ ID NO: 139026 - DNA, 401 bp, Arabidopsis thaliana
  unsure (1)..(401): unsure at all n locations
acaggcagttatatcggaggatagagcatgtcgtgccgctgaggcggttgggttgaaagattacaatcacctggaaccgtacaaaatctttcaagctgcacggctagttgctgttcttgaagcttatgctttgtatgaccctgacattggatattgccaaggaatgagtgatcttctctctcctatactctctgtaatccctgatgaccatgaagtcttttggtgtttcgtcgggttcatgaagaaagctcgtcacaatttcagacttgacgaggttggaatcagaagacaactcaacatagtctcaaagataatcaaatctaaagactctcagctttataggcaccttgagaaactccaagctgaagactgtntctttgtatacagaatggttgttgtga

SEQ ID NO: 139027 - DNA, 398 bp, Arabidopsis thaliana
ctgttgtccagacattggagagggaacatctgtgtatgttctaggcaccccagagaagttggggaattggaaagttgaaaatggacttagactcaactatgtcgatgattccatatgggaagcagattgcttgatccctaaagcagactttcctatcaaatatagatactgtaaagttcagaaggaagatagcatagggtttgaatctggtggtaatcgggagctgtctcttcactccatcggtagtaaacaggaatacattgtcatgtcagatggcttgtttcgagcaatgccatggaggggtgctggtgtagcagttcccatgttctctgtaaggtcagaagatgatgttggtgtgggagagtttctcgatctgaagttgcttgttgattgggctg

SEQ ID NO: 139028 - DNA, 362 bp, Arabidopsis thaliana
gtgtgtgcaaaacgtctctctctctgtctcataaaatctcagagaagaaacatcgtcgggtcaggtcgaagaaaggagagaaatgagtggtcacgattcgaaatacttctccacgacgaagaagggagagatccctgagctcaaggaagagcttaattcccagtataaggataagagaaaagatgcagttaagaaggttattgcggcgatgactgttggaaaggatgtttcatcacttttcactgatgtagtcaattgtatgcaaacggaaaatttggagttgaagaagcttgtttacttgtatctcataaattatgcgaaaagccagccagatcttgctattcttgcagtaaatacctttg

SEQ ID NO: 139029 - DNA, 300 bp, Arabidopsis thaliana
agatcatcggacatgaatataatccgacgggaatcgaacgtgagtaccgatcacattcagagagttttagctatcaaatcatcttttcccattgactaactgggctgtgcttactgggatcacctactcacgactcagtgcggagttacggcgatgcgtccacgacgttcgtcgtccgtacaaatgtctcgttgaactgtagagcttctccgatgagaacatcaccgttctcatctacaccgatgaatcctctactcatcctactggcaggaacatccgccgcgcgcttggcgatctcgt

SEQ ID NO: 139030 - DNA, 362 bp, Arabidopsis thaliana
cggacgcgtggggtcgaaagacggtagcggaacgtttaagacgatcgcggaggcgatcaagaaagccccggagcatagtagccgacgattcgtcatctacgttaaagcaggaagatacgaagaagagaatctgaaagttggtaggaagaagacaaacttgatgttcatcggggacggcaagggtaaaacggtcataaccggtgggaaaagtatcgccgatgatctaactacttttcacaccgccactttcgctgcgactggtgctggatttatagtgagggacatgacgtttgagaattacgccggaccggctaagcatcaggccgtggcactccgtgttggtggagaccacgcggtggttt

SEQ ID NO: 139031 - DNA, 380 bp, Arabidopsis thaliana
agaaaggatcgttgacaagaactaaagatctccaagaagataatggaagatcacttttattgggagacaatcagataatcaccggaagtcttaagccgacgccgacatggaggatgaatttcacggcggagctcaagaacctcagccgcatggcgctgcctatggccaccgtgactgttgctcaatatctattacccgttatctcagtcatggtcgccggccaccgcagcgaactccagctctcaggcgttgctcttgccacttcttttacaaacgtatccggcttcagtgtcatgtttggtttagcgggtgcacttgaaactctatgtggccaagcttatggagcaaaacaatacgcgaaaatcggaacttacactttc

SEQ ID NO: 139032 - DNA, 365 bp, Arabidopsis thaliana
acttcgatgtatgaggatacgattgtcgtctcttggtttatcctagaggtgattctcaggctcttcctggttacatcagcatctatcttcagatcatggaccctagaggaaccacttcgtctcgttgggattgtttcgctagctatcgtctctctatcgttaatcttgtcgatgattctttaacaatccataaggattcttggcatagattctctagtaagaagaaatctcatggatggtgtgatttcaccttgaactctagcattttggatcctaagatgggttttttgtttaacaatgattcgttgcttatcactgctgatatcttgattctaaacgagtctgtgagctttagtcgtgataat

SEQ ID NO: 139033 - DNA, 315 bp, Arabidopsis thaliana
ctttggagctcctcaatctctccaatggcgtcttcttctctctcgtctctctcctcaatcctcagtaaccctcatggttgctctctctgtttcaaagcctctacacaacgttgtttcgctcttagattcctctcctcaaaagcaacccatgcttcttcatcttcttcctctgctcttctccctcgttgccgtagcagcacccatcgtctcacacagaaaccgatcaataggaagaagggattttccttaaatctttctagaagcttctctatttctcaaattgctagttccggtaagtttgatggtccaagcctc

SEQ ID NO: 139034 - DNA, 209 bp, Arabidopsis thaliana
tatataaggctctcaagagagcttcatgagaatctactcatagcacaggagaacattaacgatcattccaccaacagagagacgaataatgagacaagaattaactcaggctggttcgatgactcgttctacacttcggcagaacattgcaacagtttcgctcatctgctggaaaatcttctcagtcaaaggtagctacgcaactccaa

SEQ ID NO: 139035 - DNA, 393 bp, Arabidopsis thaliana
aattcctcttctttttgttcatagctttgtaattatagtcttatttctctttaaggctcaataagaggagatgggtgaaaccgctgccgccaataaccaccgtcaccaccaccatcacggccaccaggtctttgacgtggccagccacgatttcgtccctccacaaccggcttttaaatgcttcgatgatgatggccgcctcaaaagaactgggactgtttggaccgcgagcgctcatataataactgcggttatcggatccggcgttttgtcattggcgtgggcgattgcacagctcggatggatcgctggccctgctgtgatgctattgttctctcttgttactctttactcctccacacttcttagcgactgctacagaaccggcgatgc

SEQ ID NO: 139036 - DNA, 385 bp, Arabidopsis thaliana
acaacaccactctcttcttcttcgtttgaatttgttcttctctttttttgcatagagaagactattgattagaaaatggctatggcttcttcgagaaatggtgcggttagaggatccatgagaccagtctctggagctaattcatccaatctcagatcgtcttctttcaaatccaggattccttcctcggcgcctgctccccgtcggagctcctctgcttctatcggagccgcagacaatggagtgcctgggagagttcgagtggctgtaagattacgacctcgcaatgcagatgagtcagtcgcagatgctgattttgctgattgtgtcgagttgcaacctgagcttaaaaggttgaaactcaggaaaaacaattgggatactg

SEQ ID NO: 139037 - DNA, 347 bp, Arabidopsis thaliana
aattcaacgatttgccaagataaaagcagacactgtacataagctccgcattcacttacgtgttggatacttaatttgacactcttctttgtgttttctcttccaccttctttttcgaggctctgcaaaagaagatgatcaaaacaatcacatctctacgcaaaactctggttctacctcttcatttacatattcgtacgctacaaactttcgccaagtacaacgcacaagctgcatcggctttgcgagaagagcgtaagaaacctctttatcaaaatggagatgatgtatatgcggatttggattgggataatctcgggtttggtctaaatccagctgattacatg

SEQ ID NO: 139038 - DNA, 359 bp, Arabidopsis thaliana
acccacgcgtccgcttggctctccggatccaaattttactttggatgcacatctcaaaggggtaaactgtgtagactactttactggtggggataaaccatacctaatcactggttctgatgatcatactgctaaggtgtgggattaccaaacaaagagttgcgttcagactctcgaaggtcatacacacaatgtttctgcagtatcttttcatccagagctacctataattattacaggatccgaggatggaactgttcgcatatggcacgccaccacttacaggcttgagaatacattgaactatggccttgagagggtttgggctattggacacattaaaggttcacgccgggttg

SEQ ID NO: 139039 - DNA, 377 bp, Arabidopsis thaliana
acggacgcgtgggcggacgcgtgggcggacgcgtgggctccggtcgacgattatcccaatctcgccgggattctcctctgcaccataaaatagaagatgagagaaatccttcacattcaaggtggtcaatgtgggaaccagattggttccaagttctgggaagttgtatgtgatgagcatggtattgatcccactggtcgttacgttggaaactctgatctgcagttggagcgtgtcaatgtttactataacgaggcatcctgcggaagatatgttccccgtgcaattctcatggatcttgagcctggtactatggacagtgtcagaactggaccttatggtcaaatcttcaggcctgacaactttgttttcgggca

SEQ ID NO: 139040 - DNA, 333 bp, Arabidopsis thaliana
cgcgtccgctctgatgcagtaagaagcatcagtttgttttggtgagtacaaaggtaagctcaaggggattcagattcgtcacattcaaggatgagaaatccatgaaggatgtgatcgagggattggctggacaagagctcgatggtcgcagcatcactgtgataatggctcagttacgaggaagtggtagaggtagtgaggatacagcagcagtggtggcggttactcaggagaaggtggttgtggctatggagttggtggtggttactcaagaggaggtggtcgtggcggtagaggcgaaggaggatacagcggcagtgttggcggttactc

SEQ ID NO: 139041 - DNA, 272 bp, Arabidopsis thaliana
cggacgcgtgggttacgggagtgttgaggcatgtccaaaagacaacatcgaggaagcaattgtgttgctaatgttacttgtaaagaagatggtggttggggacatacagtgggatccagaactcatggatcatctcacttacgccctttccatgactggacagtttgaagtgttagcgaactatctagagcagactcttccgggtgtttacacccgccgggaaagaatggaaccttctctccctttgttacagtgctgctgggatcgataaa

SEQ ID NO: 139042 - DNA, 312 bp, Arabidopsis thaliana
accacgaagtctgcggacgcgtgggttttgattgtgcttctgcaagctttgatactctctctgaagctctgaggaagacatgagttcgtctcactcagcttcttcttcattggtttcttctttcgtcgccgttaaagcgactccggtcaccggacctctgattccccgtcgcgatcgtctttcgattcgtatcagagctagctcgaatcagaataattctggttattgttttccacacaagtttaaatcttttgccaaatcagcgattctcaacggtgctgctgtttcaaggaccggaaagttttcaacttt

SEQ ID NO: 139043 - DNA, 275 bp, Arabidopsis thaliana
cttcctttaccagatcagacgtcaatttcaactcttcagtgaagagatttctttcaccgaattttctactccgatcgatcaattgaagattgaaatggaagctaattcaggcggaggaggaggagctgaaggcggaagagcggtaaccggaggaggaggaggaggaggagggagcgatgtggaattggtgagcaagacgttgcaagtggagcataagctaatccaatttggttcttaaggagaatcctcgtggaaggtatctaaagatatcggag

SEQ ID NO: 139044 - DNA, 364 bp, Arabidopsis thaliana
agttctctcatttttttttcttattattattattttttcgaaaaaaaagaaagtaaataaataaatattcaggaagaaaaagcctgtagagagagaagaagaagaagaagaagaagaagacgacgaagtcgagagaaagaaataatggcggaggagacgatggagaacgaagagagggtgaagcttttcgtcggacaagttccgaagcacatgacggagattcagctcctcacattgtttcgagaattctccatcgtcaatgaagtcaacatcattaaagagaagacaacacgagctcctcgaggatgttgttttctgacatgtcctacaagggaagatgctgacaaggtgatcaatagttttc

SEQ ID NO: 139045 - DNA, 116 bp, Arabidopsis thaliana
acggacgcgtgggcaaagttgacagttttgagagttgaagaagggcaaatctttcgtcgccttcgtcactctagttgagttgacgaaacacagttcgagttcgagagacagtggat

SEQ ID NO: 139046 - DNA, 181 bp, Arabidopsis thaliana
aaatcttaaacgttttactttgtgctgcactattcaacctcaatgggcgcctcaacaatggctctctcctcgcctgccttctccggtaaggccgtcaagctttccaccgcgggatctgaagtccctgtaatcggtcgtgtgacaatgaggaaaattgttgccaaaccaaagggcccatcaa

SEQ ID NO: 139047 - DNA, 205 bp, Arabidopsis thaliana
gccggtgaaagcacagaggtaatagaacaactgcttggtgaattgctcttggtctttgttggcgagagaattgtagaaaagagactttatcactgagatggagatcatggatgaccaaatattacctgcagcgctatctcaaagatcaaaccttttacaagatccagtctcagtctatcatcgacaatcctgatcagcgccttgt

SEQ ID NO: 139048 - DNA, 310 bp, Arabidopsis thaliana
cccactcatggcgtctcgaagagttttatcatctcttctccgttcatcttccggtagatctgccgccaaattagtcaaccgaaaccccaaagctcatggtgggttctctgtgtttgctggtgtgggggaacgaacccgtgagggcaatgacttgtacagagaaatgattgagagtggtgtcatcaagctaggcgagaagcagtctgagagcaaatgtgccctagtgtatggacaaatgaatgagcccccgggtgctcgtgcccgtgttggactgactggtttgactgtggctgagtatttccgtgatgct

SEQ ID NO: 139049 - DNA, 280 bp, Arabidopsis thaliana
aaagacattggggtatgagaggctggtttcatgacggtgtaaactgggaagaacctcgtggagcagagattgttttgccctggagaaacaaaagccttgcagtcaggccgatcattcagccgttaccgggggccctcctgcaagatcacttaattgcaatgtcgcaactaggccgagaccaagagcatcctgatgtggccttccctctgcaaccacccgagttattgaactgtccaatgcaaggggaatctctctcactgatccacggtattcttaatga

SEQ ID NO: 139050 - DNA, 373 bp, Arabidopsis thaliana
aagtttgcttttttgttgtgtcaatgaaatgggagaaatggagatcgaagaaatcgaagctgttcttgagaaaatctgggatctacatgacaagcttagcgatgagattcacttgatttcgaagtctcactttctcaaatcggttaaaccttcaaatagatcggagaagagaaagaatcctcacggaaattccggcgaagataagcgacctggttatgttttcatcaaaggattcgccgtcgatgataacgactccacgattcaggaggcgaagagtcttaacgcaattcgaaccgctcttgagaaccttgaagaccagctcgagtttttccatactatacatacacagcagcgaacagagaaagatgttgcg

SEQ ID NO: 139051 - DNA, 286 bp, Arabidopsis thaliana
aagttcatgcctcaccgtgggtttggtaagctaatgagtccagaaagtacaaccaccgggcataagctggatgctgctggggaaatgcatgaatcatcacctttaaaaccaaccttaaataagggtttggctgtgaatccgtttaacccatcctttgcaaccgaagctgtccaaggaatgaaacacatcagtccttctcagtccaacatggtccattgctctgcttctaatatactgcaaaagccatcaagacctgctatttcaactcctcctgtggctagtaaat

SEQ ID NO: 139052 - DNA, 389 bp, Arabidopsis thaliana
acccacgcgtccggacttgcagaggaaagaaccaacaagtgaaagcaatgactgatgcccacagtttagcgagtgaaacagatgatcaaccctcaacacttggaacagaccccaagggtcagaattattcttccgaggcaagcaacgttggtgaatctgattgggttgttgtctcccacatccaggagccagagggttctcgaaatcgtattcctgttgggagggttcgtcattcatgcttttaatgttttgaaattacaagatcgctgattgaattattggtttcgtgcaaagaggtccagaatttcacaatttagttgtccctttttcaaattcattttgcaggaacgcaaaacggttcaatccattgtgaactcggtcgacatgga

SEQ ID NO: 139053 - DNA, 307 bp, Arabidopsis thaliana
cccacgcgtccggcttcatcattaccaaatcatcaacttaatcgtttctctcaaatttagggttttctcttttctcgaaagtcttgcggttttctgaatcatctctatctggtttgagggtttcgtttgatatctggagaaaggggtttctggaaacaaggagttcataattcgcgatcttgatctatcgatcttcatttatatataaaagcgtgaatgagattatgatggagtcgaaaggtggtaaaaagaagtccagcagtagtagttccttattttacgaagctcccctcggttacagcattga

SEQ ID NO: 139054 - DNA, 128 bp, Arabidopsis thaliana
acccacgcgtccggaaaatctctccgccactgttctctccgactcactaatgggattcttccatcttagcattccgtacaatgagccgccaacatcaggtggtaaggaaatccccggcgggaaaacct

SEQ ID NO: 139055 - DNA, 361 bp, Arabidopsis thaliana
cgatcccaacgaaggccgtaacactctccatggtggttcaaagggatttagtgatgtgatttggtcagtccaaaagtatgttcccactagtcacattactttcacatacgatagcttcgacggtgaagaaggttttccgggcaatgtgacggtgaaagtgacgtacatgttgatcggagaaaacaaactcggtgtaaaaatggaagcaaagccactcaacaaacctacaccaatcaacttagctctccacacttactggaacctccacagccacaactccgggaacatcctctcccacaaaattcaactcctcgccggaaaaatcactcccgtcgacgacaaactcattcccaccggagaa

SEQ ID NO: 139056 - DNA, 228 bp, Arabidopsis thaliana
acccacgcgtctgactctttcaactgctaacaagaaacagagacaactatgacgatctttaactgggtgcagaataagctgcagcaaagtgtcatcaaagatggtgtgaggagaaacgagaacaagaagaggaatgaatgaataagtgagattgagaagaacacgaaagctatactggatcaagttggtttagtggatgcgcttgataattggttcgatggagttctc

SEQ ID NO: 139057 - DNA, 281 bp, Arabidopsis thaliana
ttcttcgttttcgttgttgtgaggaattttgctccgatgtcggcggagagttgtttcggaagctcgggtgatcaaagcagcagcaaaggagtggctactcatggtggtagctatgttcagtataatgtctatggcaatctcttcgaagtttctagaaagtatgttcctcctcttcgtcctatcggtagaggcgcttatggaattgtctgtgctgctacaaactcaaaaaacgggaaaggaggtacctatcaagaagattggtaatgcttttgacaatatta

SEQ ID NO: 139058 - DNA, 205 bp, Arabidopsis thaliana
gacgcacgggagggagagatggcaccacaaggcttcgtggagaattaatggccgctcctccttcttctctcggatccattgaaatcgatactcttgaagtcttgatcaattcaaagctttggttcctatgtgttcctctctgtttcctcaatgatcctatgtctccgtctctgtctcaaagcttcgagatctttcttctctattt

SEQ ID NO: 139059 - DNA, 278 bp, Arabidopsis thaliana
gcttcttcttctaccaatctaattcctctcttcagcttcttgtgttgtgacgcatactcgtcgcagtcttgagatatggccgccgcagtttccaccgtcggtgccatcaacagagctccgttgagcttgaacgggtcaggatcaggagctgtatcagccccagcttcaaccttcttgggaaagaaagttgtaactgtgtcgagattcgcacagagcaacaagaagagcaacggatcattcaaggtgttggctgtgaaagaagacatacaaaccgatgg

SEQ ID NO: 139060 - DNA, 103 bp, Arabidopsis thaliana
cttcctccgtcagtaaaagaaaatcaaaatggcttcacacattgttggatacccacgtatgggccctaagagagagctcaagtttgcaatgggaacctttcgg

SEQ ID NO: 139061 - DNA, 276 bp, Arabidopsis thaliana
ctcaagcttcgatctttcttctagagacgagctagtgcttccacaaaccctaaactatgtccggcggtttcttccggggtacttccgccgagcaggatactcggttttctaacaagcaagctaaattgatgaaaagccagaaatttgctccggagttagagaatctggtggatatcactaaagtgaagatggatgttatgaaaccttggattgcgactagagtcactgagcttcttggtattgaagatgaagtgctgattaactttatctatggtc

SEQ ID NO: 139062 - DNA, 276 bp, Arabidopsis thaliana
gacttttgcacatttctagggttccaatcaaaatctatctgcaacaaaaatggctaatcgtttcagatcagggatctccttcttcaagaccatcgccgtaacagattctgtctcctccgttagatccaagtcgcttttcccagcgttgagaacttatgcaactgcttctgctcaaacaaccgctaatgttaaggtgcctattgctttagttggtgaaaatgggaactttgcttcatggctatacattgcagctgtgaaaatgaattccttggaaaa

SEQ ID NO: 139063 - DNA, 232 bp, Arabidopsis thaliana
ttctcctccgtctccatcctccgccgtgaacacaagctccactggtttcaaccgcagaaccagacagagattgtccgatgcaacggcgagtgtaagcgagaccgacgtagaagatgaagatgaagatgaagaaggagtggaggagaagatcgaggcgcttcagacaatagttcccggaggaacggaacttggtgtcgacgcgctgttcgaagagacagctagttacattttg

SEQ ID NO: 139064 - DNA, 280 bp, Arabidopsis thaliana
cgggctgtgtgaattctatttctccgccgccggtgactttataccggcatcgtgcctctccgtcacggtcgtccttctcattatccggcgatgccttacactctctttaccggcaccgacgtgtatcaagatctccgtcgattatcgctcccaaatttcagattgtggcggctgaaaaatcggagcctctgaaaattatgatatcaggagctcctgcttctggtaaaggtacacaatgcgagctgattactcacaaatatggtttggtgcatatctctgc

SEQ ID NO: 139065 - DNA, 283 bp, Arabidopsis thaliana
gcgtctctctcgcgcaaccttcgattttcgtttattcgcatccatcggagagagaaaacaatcaataagcgaccatgttggtgtaccaagatcttctcaccggtgatgagcttctgtctgactctttcccttacaaggagattgagaatggaatcctctgggaagtagaaggaaagtgggttactgtgggagctgtagatgttaacattggtgccaatccatctgctgaagaaggtggtgaggatgaaggtgttgatgactctactcaaaaggttgttgacat

SEQ ID NO: 139066 - DNA, 284 bp, Arabidopsis thaliana
ttgaagaatcagagaagggtgggaagaaggaaaatttcatcagaaccagattacatgcctttgtggagtatgaaacggtggaggcagctgaaaaagcggcagctacattgaataatgagcaagactggagaaatgggttgcgagttaagcttcttgaacaagcagcaggaaagtttgcacagagaagaccagctcggagggaagtcgataaagaaaaggacactacaggcagagttcatgatcaaactggaggagagaaaaacaaaaagacgcgtgaacatcaa

SEQ ID NO: 139067 - DNA, 278 bp, Arabidopsis thaliana
cccacgcgtccgcaaaaaactcttgaatttttcaagaacaaaagaaaaagacatctttaatggcggccatgaactcgagtgttctcacttgcagctacgcaattgctggctctggctcggtagagcttaaccagaaagttggtttggtgaattcatcagttgggtttggtcagaagaaacagatgattatgcctgtgatcaaagctcaacgcgttgttggtgatgatgttgatggatctaatggaagacgatcagccatggttttcttagctacactc

SEQ ID NO: 139068 - DNA, 285 bp, Arabidopsis thaliana
cccacgcgtccggtttgtttatattttgggttggctctacacctactctcagaagtcataagccaagcaaagggggttttagggtttttgaccgcgagccagatctctttcttttgtttctcccacttccgaatcaatggccttctcttctctcctcagatctgccgcctcctacacggttgccgctcctcgccctgactttttctcgtcgccggcgtctgatcattctaaggtgttgtcaagtcttggatttagtcgcaacctgaagccatcaagattttcttc

SEQ ID NO: 139069 - DNA, 287 bp, Arabidopsis thaliana
gccaagccaaagggcccatcaggcagcccatggtacggatctgaccgtgtcaagtacttgggtccattctctggcgaatcaccgagctaccttaccggagagttccccggagactacggatgggacaccgccggactttcagctgaccccgagacattcgcaaggaaccgtgaactagaagttatccacagcaggtgggccatgctcggagccctaggctgcgtcttccctgagcttttggctagaaacggagtcaagttcggagaggcggtttggttcaaggccgg

SEQ ID NO: 139070 - DNA, 276 bp, Arabidopsis thaliana
cagctggtcaggaacgataccacagtttggctccaatgtactacaggggtgcagctgctgctattattgtctttgacattactaatcaagcctcatttgagagggcgaagaaatgggttcaggaactgcaggcacaaggtaaccctaatatggtgatggctcttgctggaaacaaagctgatttattagacgcaaggaaggtgtctgcagaggaggcagagatatatgctcaagagaacagccttttctttatggaaacctcagcgaagaccgcaa

SEQ ID NO: 139071 - DNA, 284 bp, Arabidopsis thaliana
gtttattgcttgaagacggcttcttcttctcacaaacctcatctctgctaatcaaaatgtctctggttgcaaatgaggagtttcaacacattcttcgtgtgttgaatactaatgttgatggtaagcagaagattatgtttgcccttacctctatcaaaggtattggtaggcgattggctaacattgtctgcaagaaggctgatgtcgacatgaacaaaagggctggtgagttatctgctgctgagattgataacctcatgacaatcgttgcaaacccacgtcag

SEQ ID NO: 139072 - DNA, 278 bp, Arabidopsis thaliana
aaaagaacaaagatgtcgaaagaagtgagcgaagaaggcaaaacccaccatggaaaagactacgtggatcctccaccagctcctcttctcgacatgggtgagctcaaatcctggtctttctacagagctctcatcgctgagttcatcgctacactcctcttcctctacgtcaccgtcgctactgtcatcggccacaagaagcaaaccggtccttgtgacggcgttggtttacttggtatcgcttgggctttcggtggtatgatcttcgtcctcgtcta

SEQ ID NO: 139073 - DNA, 188 bp, Arabidopsis thaliana
aaaaaataccaaatcacagcgaaagtttcaatggccgcctcaacaatggttctctcctcccctgctttcgccggcaaggctgtgaagctttcccctgtcgcatcacaactcattgaaagcggccgtgtgacattgatgaagactgttgccaagccaaagggtccatcatgcagcccatggtacggatc

SEQ ID NO: 139074 - DNA, 202 bp, Arabidopsis thaliana
ggcaagccaaaccggcgttgaaatcaacggtggtggcggttttcatcgctagcgaagagaactcttccattcctggtgttggtgtggacatgctggtgaaagacaaacttcttgataagctcaaatccggacccttgtattggattgatacagcggataagcagccgtgtgttggaactgggggtatgataccatggaagct

SEQ ID NO: 139075 - DNA, 286 bp, Arabidopsis thaliana
cccgaggattcggaagtcgataagctcgattatatcgcggcttttcacgcggtggctaaagggattacggttgtggctgctgcgggtaacgaagggcctggtgctcacactgttgacaatgttgctccttggcttttgactgttgctgcaactactcttgaccggtcttttcctacaaagatcacacttgggaataatcaaaccctcttcgctgaatctctgttcactggaccggagatttcaaccggtttagctttcttggactcagacagtgatgacactgttg

SEQ ID NO: 139076 - DNA, 292 bp, Arabidopsis thaliana
ctaggtttgttgtgtgtacttagttatttacaggaagctgcctgactctattatccgacgacttgaaatggagaaggaactacttgaaatagaatggcctactgttaatttggatggtgatctgaagcaaatggcgctcagactatttgataaagggatgcgttccgtacaacatggtaccaacaatggaatacaaaagcgacctgctgggctatttgctctgaactacgccctgtttatgattgcagtagatgagttagaaagccgtacggacattttgaaggcatctgtt

SEQ ID NO: 139077 - DNA, 287 bp, Arabidopsis thaliana
cttagacatcaccaacaattatcaactcttcaatgacgcatctcaacaaaaaacagaggttagagaataaccataacaatactgtgaagaaccatttcgaagacttacatgacgatctcagcatctctaaccgctgcaaactcgctagctccgcttcttctccttccgatttcctcaccgttctctccacatgcaggacattgaatcggttaggattacatcctctggttttatctaaagccggtactcaaaccctagccgtcacggtggagaaatggtcagattct

SEQ ID NO: 139078 - DNA, 190 bp, Arabidopsis thaliana
gagtgtactacatctccggcgattccgcctccgcaggtggagcattcaccaccacaggagaagccaggcaacgctgaactcttttcccccgctcctcactctccgccgccgccaaaaattacgatgatggatattgtgaatagcaccgggattttaacagatcaattgggtgatgaaaacccatcatttt

SEQ ID NO: 139079 - DNA, 272 bp, Arabidopsis thaliana
accaaactcatcctcaattgtgttggaccgtttcgtatccatggtgatcctgtcgtctctgcttgtgctgattcagggtgtgattatttggatataagtggtgaacctgagtttatggagagaatggaagctaactaccatgatagagcagaagagactggctctttaatcgtttctgcttgtggttttgattcaattcctgctgaattgggtcttctctttaatgctaaacaatgggtatctccatcggttcctaaccagattgaagcgta

SEQ ID NO: 139080 - DNA, 287 bp, Arabidopsis thaliana
tggagcttgagcatcaccgaaagatagattctttcaacagcggtacgaccgctctaaccattgtgagacagggtgatgttatttatatagcaaacgtcggggattcacgtgcggtattggccacagtttcagacgaaggaagcttggtcgcggttcagctcaccgtagatttcaagccaaacctgcctcaggaggaagagcggataatcggatgcaacgggagagtattttgccttcaagatgagccatgggtccaccgtgtatggcaaccagtagatgaatctccg

SEQ ID NO: 139081 - DNA, 286 bp, Arabidopsis thaliana
ctcacaattagttatgcttttgggattttgaatcatgaaggttctttgatcaagattactgtgttatctaatggtactcttagatcaagattccaatcttgcttcttccccatgggaaaactcgagcatttctcccactcatgccctttgacctcgccggagattgtagctgaaggcatctgcaacatttgcttccaagaccaagttgttgaatacgcatgtaagccttgcaattttgatatatgtaagacttgctccaagctgccgcaaaaggtgtcacatggtt

SEQ ID NO: 139082 - DNA, 273 bp, Arabidopsis thaliana
cgaaactgttcttttgccctcttctctcaattttaatccaccaaacaaatcgaacagtgttcgataacttttagattgcaagtcctgtttttgatttggtcgggagaaagaaaactagggttttgatgggaactgatacagttatgtctggacgagtaaggaaagatctatcaaaaacgaatccaaatgggaatattcctgagaatcgttctaattcacgtaagaagatccaacgacggaagtagaaaaaccctaatctgtccggttcaaaaa

SEQ ID NO: 139083 - DNA, 225 bp, Arabidopsis thaliana
cggacgcgtgggcggacgcgtgggttgaaaaatctggcaaggatggcaaacaagctgctcgtgtccttcaggacacacgtttgaataatagggttcttgacatcagaacaccggctaatcaagccatcttccgtattcagtgccaagtccaaattgcgttcagagaatacttacaatccaaggggtttcttgaaatccacacaccgaaattgatcgctggcagta

SEQ ID NO: 139084 - DNA, 341 bp, Arabidopsis thaliana
aactccctcttctcagtacctgcaaatggaggaagaagaatccttctctgaaacccttgttctcatttgattcctccttcctctctcttcttctctctctgtctctgattcgttattccacacttatgactcatctttcccgtcaatagctaagtttgcctcttctttgtgaaatttagctgaaaaaggagaggaattccgaattctgtcacttcaaagctcgaattttgcaaactttcctttgatgggttttacttgttttgttgtaatctgattaaaaatagaaactttttgttttcttcgtgtctccttttgctcttaaaagagaagctttttcaatg

SEQ ID NO: 139085 - DNA, 272 bp, Arabidopsis thaliana
ggaaaatcgagaaagacgaaacatggcttcttcttctacttctctgaaaagaagagagcaaccaatttcgcgagatggagatcaacttatcgttactccgttaggagccggaagtgaagtgggtcgttcctgtgtttacatgtccttccgaggcaaaaatattctgtttgattgtgggattcatcctgcgtactcgggcatggctgcgttgccttacttcgatgagattgatccttcttccattgatgtcctcttgattactcactttcata

SEQ ID NO: 139086 - DNA, 278 bp, Arabidopsis thaliana
gaaaaacctagaaagctctagagagaaagagagagagagatggaaggtaaagaagaagatgttagagtcggagctaacaagtttccggagaggcaaccgatcggaacttcggctcagagtgacaaggactacaaagagccaccacctgcgccgttgttcgagcccggcgagctagcttcatggtccttctggagagctgggattgctgagtttatagctacgtttttgttcctgtacatcactgttttgactgttatgggtgtgaagaggtcaccgaa

SEQ ID NO: 139087 - DNA, 279 bp, Arabidopsis thaliana
cccacgcgtccgctcacttttctgaaaaagttgtacgtccaaaatctccaaacccttttttaagaacaaatctcaatccatggcaatcatcgatcaaaattgagaatcacacaagcttcacaatgtcatcatcatcatcaacgacgacgaacacaacaacagaatcagattcatcatctctacctactcacatcggtagatcaaattccgacggaatcatcgacactacaccatttcttcctcccaccgttacaagaaccataagcgtagatgaagaat

SEQ ID NO: 139088 - DNA, 274 bp, Arabidopsis thaliana
cttcgttttctctctacgacgataaaacccagatttgggttcaagcttccataactttaaacccctctcgcgatccaggttgctatcaaatacttgggagcccccagtattattgaataacacagcctgacaatgagtgtagtcgggtttgattttggaaacgagaattgccttgttgccgttgcgaggcaaagaggtatcgacgtcgtgcttaatgatgagtccaatcgtgagactcctgctattgtctgcttcggtgacaagcagcgcttca

SEQ ID NO: 139089 - DNA, 177 bp, Arabidopsis thaliana
gtacaactccccctccgtcttcaatggtttacacgagggcaggcgtatgtattcctcaacttccatcgagcaataaaagtagctcgtctcttcatagtatcaatgagtatcacaggagaagcaacgctgtctcagtctctctgaggaaggactctcgttcttcagggaaggtttgtg

SEQ ID NO: 139090 - DNA, 404 bp, Arabidopsis thaliana
acccacgcgtccgaatttgagcatccatggcctgcaaatcctgacccgaatgtgaaaggaggagtcttgtcttacctggccgagttcaaaccattgggggatactcaaaagcctgtcactttggatttcgagaagccactagtcgaattggagaagaagattgttgatgtgaggaagatggcgaatgaaacggggttggatttcactgagcagattatcactttggagaacaagtatagacaggcactgaaagatctttacacgcatcttactccgatacaacgtgtgaacattgcgcgccatcccaaccgacctactttccttgatcatatacataacataactgacaagtttatggagcttcatggagaccgagcggggtatgatgaccctgcaattgtgac

SEQ ID NO: 139091 - DNA, 276 bp, Arabidopsis thaliana
cccacgcgtccgctaaagagagagagagagagagatatggctagtggaatcgctcgtggtcgtttagctgaagagaggaaatcgtggaggaagaatcatcctcatggttttgtggcaaagccggagacggggcaggatggaactgtgaatctaatggtgtggcattgcactatacctggtaaagctgggactgattgggaaggtggattctttccattaacgatgcacttcagtgaggattatccgagcaaacctccgaaatgtaaatttccacaa

SEQ ID NO: 139092 - DNA, 417 bp, Arabidopsis thaliana
atttgagagcaaggcattggtttggctcaagatacagtttcaagatggtgtcagcattgatgtgaaacgtggtgtttctcttcccaagcttaagaccctccaccttgattatttcaagatagaaccgagtaagtttaacaagcttctttctggctgccatgcgcttgaagagttagtgctgatcaatttgatgtgggctgattcctcgggatataaagtttgccctgtcacagtgtctatcccaaccctcaagagactaaagttttgtcgttctgaagatttctatgagggtaaatttcatgagtatgaagactatgatgaggagaacattaaaaagggagtgtcattgtcgtttgataatccgaatttggtgtaccttgaatattctgatgttattgtggacaagtataaacaagt

SEQ ID NO: 139093 - DNA, 276 bp, Arabidopsis thaliana
cccacgcgtccgaatcctcaaaagcctatttgggggatcatcaaccttctatcatcaccatggatccttacaagtatcgtccttcaagcgcgtacaacgccccattctacaccacaaacggtggtgctccagtctccaacaacatctcttccctcaccatcggagaaagaggtccggttcttcttgaggattatcatttgatcgagaaggttgctaatttcaccagagagaggatccctgagagagtggttcatgctagaggaatcagtgctaagg

SEQ ID NO: 139094 - DNA, 276 bp, Arabidopsis thaliana
cacgattgtaaaggctgtcttcattgtagcagtggtactacatgttgcagaaggaatctatgcgtggtttctggctaaacgagtcgacccaggaaatgcaatggggtggttcttgcaaaccagcgctctcgggtttttctcaatgcggtttttattgaagagagcgaaagagcaccagatttaaacccagccttgttttgattacaacatcaaaacaaggctgggtttaatgttgtaatcaaaaaaaagttttacatgactttgaatgttttcaag

SEQ ID NO: 139095 - DNA, 273 bp, Arabidopsis thaliana
cggacgcgtgggttaacaacaacaacaacaacatattctctgctgggtattagattcgaatttctctttttgtgatcagaaatggatcgagctccggtgaccacaggaccgttggatatgccgattatgcacgacagtgatcgatatgacttcgttaaggatattggttctggtaatttcggtgttgctcgtcttatgagagataaactcactaaagagcttgttgctgtcaagtacatccagagaggagacaaggtttcatttttaaaaatc

SEQ ID NO: 139096 - DNA, 400 bp, Arabidopsis thaliana
gaaccatcggagaagaggaagaagatcagtgtagagctatcgggaaatttatctgaagaggaaactgaaattgagatcgaagttttgagtttgggtaaaaaatggtaggaggagtagaagaattgagtattgaacagttagcttcgagtatctctacctacaaagaacaactcgaacaggttaggcagcttttgtcagaggatcctaggaactcggaatatgcagacatggaaaaggagcttaaagaggtgtgcttatatgggtcatgatggccagcctgcttctatctcctgatttctcgtgtttgatccctgaagttctacttctgaaaatctttactgatatattgtgtataattgctagaaatcctcaattctctgaaactttgtttttgcaccat

SEQ ID NO: 139097 - DNA, 273 bp, Arabidopsis thaliana; identical to SEQ ID NO: 120753

SEQ ID NO: 139098 - DNA, 276 bp, Arabidopsis thaliana
caagattcctcaaaaggaaagaagagaaagaagataagagatatctggttggtcggagatggagatgatcggaggagacgatacagatacagagatgtacggagctctagtgacggcacagtccttaaggttgcgtcatcttcaccactgcagagagaaccagtgtacctctgttctcgtcaaatacattcaagctcctgttcatcttgtttggtcactggtgcggagatttgatcagccgcagaaatacaaaccatttataagcagatgcactgt

SEQ ID NO: 139099 - DNA, 273 bp, Arabidopsis thaliana
cccacgcgtccggaacaacaacactaagcaaaaaagaaaagctcaagccgagagagacaatggcatcaacattcacgagctcaagcagtgttcttaccccaacaacattccttggccagactaaagcctcaagctttaacccccttcgtgatgttgtctctctcggatctcccaagtacactatgggaaatgatctttggtatggacctgacagagtgaagtacttaggacccttttccgttcaaactccgtcttacctcaccggagaattcc

SEQ ID NO: 139100 - DNA, 416 bp, Arabidopsis thaliana
cccacgcgtccgcccacgcgtccgcccacgcgtccggtgttgtaaagcagtggacagagacgacgatgagtacgatgaagccaagccggagcgacgaaatatccgacccggaacagcagatcaagaacgcgaaccagatcagagctgatttcgattccttggctcccaaacgacccactaaacccactcgaagcgaaccgggatttcctggatctttctctgcttccgacaaaatcaccgaccatcctgaagctgacaaattccaatctctccagtcacaaactcatggtaaagttctaggtgagggagattcatctgcagttcaagatgagttcctggaaacagagtattactcaaatctcaccgccattgataagcaacatcacacgaccggaagtgggtttataaatgtggtg

SEQ ID NO: 139101 - DNA, 274 bp, Arabidopsis thaliana
cccacgcgtccgcccacgcgtccgagaagatcagaatcggaatcaacggtttcggaagaatcggtcgtttggttgctagagttgttcttcagagggatgatgttgagctcgtcgctgttaacgatcctttcatcaccaccgagtacatgacatacatgtttaagtatgacagtgttcacggtcagtggaagcaccatgagcttaaggtgaaggatgacaaaactcttctcttcggtgagaaaccagtcactgttttcggcatcaggaaccctga

SEQ ID NO: 139102 - DNA, 268 bp, Arabidopsis thaliana
caatttttccagtgatttttcttctcttcagccaaatgaattgagctcacaaaactgagagagtgagagattatggcgatgcctttggaaatggcgatgcttttgacgaaaacggtttggtttgctctgagcggctggattttaacatgtttgtccatcgccgacgagattgctggttcactcagaaaccgagaagttggtcctcctttacatctcgcatgatcacatttacattcttcacctctttcctagctcctactcgattttc

SEQ ID NO: 139103 - DNA, 391 bp, Arabidopsis thaliana
ggaggggtttggtgttgctcatattttacaagagatgcttacttataaatctgatcatattagagctcgccaagaagtacttggtaccactatcattggacgaacaatacctaaaccagaagatgctccggaatcttttcgattacttgttcgagaactacgatctttggctctggaactgaatcatttccttgtatctgagaagaatttccagattaataggaaggaagtttaatcggaatgaatcacaaaatttcttatatgatcgatcggtataaacatcaacaactccgaattggcttagtttctcctcagcaaataagtgcttgggccactaaaataatacctaatggagagatagttggagaggtgacaaaaccctatacttttc

SEQ ID NO: 139104 - DNA, 393 bp, Arabidopsis thaliana
atacacatcacttatcaatggtttttgttgccaaggagacttcaaaatggctgaagagactttcaaagagatgcaattgcgggaccttgtgcctaacgttgtcacctacacaacacttattcgaagtcttgctaaagagagtagtacccttgaaaaagcagtttactattgggagctaatgatgacaaacaaatgtgttcctaatgaagttaccttcaattgtctacttcagggatttgtgaagaaaacatctggaaaagttcttgctgaaccggatggttctaatcatggacaaagttctctgttttctgagtttttccatagaatgaaatcagatgggtggtcggaccacgctgctgcttacaattctgcccttgtttgtctctgtgtaca

SEQ ID NO: 139105 - DNA, 253 bp, Arabidopsis thaliana
gcacgttttctcgcggtggctttgtttttcccaacgttggacaaagacatggaagaagagcacataatcaagaagcaacctatggttatgcctatatgtgaaccggttcggtttgaagatacacttgaaacattccttgacccaaacagccaactctaccgggaatttgttcctttcggttcggttttcccaacgtgtgatggtattattgtgaatacatgggatgatatggagcccaaaactttgaaatctc

SEQ ID NO: 139106 - DNA, 275 bp, Arabidopsis thaliana
ctccagtctccaacaacatctcttccctcaccatcggagaaagaggtccggttcttcttgaggattatcatttgatcgagaaggttgctaatttcaccagagagaggatccctgagagagtggttcatgctagaggaatcagtgctaagggtttctttgaagtcacccatgacatttcaaacctcacttgtgctgattttctcagagcccctggtgttcaaactccggttattgtccgtttccccaccgttgtccacgaacgtgccagtcctgaa

SEQ ID NO: 139107 - DNA, 205 bp, Arabidopsis thaliana
accacaagtggtaattgctgatctcgttgatgatctcatggtgttaaagctaatgcattatgatcgctagattctctgcattggtcacggatcggattcggctgtttcacggtttaaagacatgggtttctcagttgttcaatgggttcctaaacatccattgttttccattttcagtatgaagcatgtcatcgaacttgatctt

SEQ ID NO: 139108 - DNA, 125 bp, Arabidopsis thaliana
tcactgcatctgcctctaacaaagagtctattggtgatttagaatcagaaaaacaagaagaagttgagcttctggaggagcaaccttcagtgagtttagctgtgagatctacacgtcaaactgaa

SEQ ID NO: 139109 - DNA, 342 bp, Arabidopsis thaliana
acggacgcgtgggctagttctagatcgcgagcggccgccctttttttttttttttttttttttttttaacatgaaaactaatttcaaggaatcttgatttgaccacttacacatacagcacatattccgaatcaaatcagagacattacatgattctcatagagaaacataaacacttcacaacaactactaatccacacctctttttagtttaacttatttatcaaaagacaacaagacgatacaaacaaacaggaccaatgagtctgttttgcttcatcaggcagccttactaggcttttttttgtgaagctgcagatctaatggcggtttttgcaagcg

SEQ ID NO: 139110 - DNA, 342 bp, Arabidopsis thaliana
gagcaaatacgtggatctatcgagtgaagagagtcatagatactatcttgcgcggcgaaatggcttgcagatgctccgagacagaggctacgaagtctccgacgaagatatcaatctctcccttcacgattttcgaactgtttacggtgaacgtcccgatgttgatcgtcttcgcatctccgctctgcatcgctccgattctaccaaaaaggtatatcgaagtattttcgtattcgttgtgatttttcgatttctagctgtttttttgtctttgcatgttgtggggtttactgtttggcagtgaagaagatgatggaatatgaaatttgtgactcttttaaa

SEQ ID NO: 139111 - DNA, 99 bp, Arabidopsis thaliana
atattattcttggttattgttcttgagtactttagactcaaattcgtgaatctgaatttatgtttcacgttttcaccaagtaatggcaatttcttgagt

SEQ ID NO: 139112 - DNA, 303 bp, Arabidopsis thaliana
agtgttacaatttgatggtcctctcggattctataaaggaaatggggcgagtgttattcggattattccatatgccgcccttcattacatgacgtatgaagtttatcgtgactggattttggaaaaaaatcttcccttaggttctggtccaattgttgatcttgtggctggttcagctgcaggtggaacagcagttttgtgcacatatccccttgatttagctcgtactaagctagcttaccaggtttctgacacaagacagagtctccgaggtggtgcgaatggattttaccgtcaacctac

SEQ ID NO: 139113 - DNA, 414 bp, Arabidopsis thaliana
actcttactgcttcgaattcgatcgttactagaaactgcgaccacgacattggtcgtggcctcgttggggaagaagtagtcaaagtcacccgcatcgattgggacacgttcttcttcatcaacctaatcgaatcttttatcctctcttcgatcccaacatcgataaattattattaccatttgcggcgttgttgagtgatctccgcgactatggagagatcagcgtcggtgggtgttaacgacggccgttttggtggcaaccaattctattcgccatctttctcttcttcttcttcttcttcttccatgagacatgttaattacagttgtggatcttgtgggtatgaactaaacctgagctccacgaatcgaatcacatcgacaatcggatcaaagtacggtaaatccatgaag

SEQ ID NO: 139114 - DNA, 405 bp, Arabidopsis thaliana
ggaaactaagctttcaattgccaagaaaatctttgacatagagaaagaccagactttgaactcaagcaccttccagaaattcttctctgaaaacgagggctggttgaaaccatatgcagctttctgcttccttcgtgacttttttgagacttcagatcatagtcagtgggggaccttttctgactatacagacgacaagcttgaaaaattgatatccaaggacaacttgcactataacactatatgcttccactactacattcagtaccatttacatgtacaattgtcagcagcagcagaatatgcaaggaagaaaggagttgtgctgaaaggagacctacctattggcgttgacagaaacagtgttgatacgtgggtttacaggaatctgtttcgcatgaatac

SEQ ID NO: 139115 - DNA, 365 bp, Arabidopsis thaliana
ctctctggcttgttcgtgcaaccgctcgttgggcatagtagcgataggtgtactagtaagtacggtcgtcggagaccgtttattgtcccccggagctgttgggaatttcaatctcggttatggttattggtcatgcggcggatattggatgggcatttggggatagagaagggaagattaagccgagggcgattgttgcttttgttttagggttttggattcttgatgttgctaataatatgactcaaggtccttgtagagctctccttgctgatcttactgagaatgataatcgcagaacccgagttgcaaatggctacttctctctctttatggctgttggcaatgttcttggctatgctact

SEQ ID NO: 139116 - DNA, 164 bp, Arabidopsis thaliana
ttatcttgaatataaaggccatacaggggctgttacttcaatatccactgatagttctggcgagtggatagcctcaggttcaactgatggatctgtccgtatgtgggaagtggagactggtagatgccttaaggtctggcagtttgacgaagctatcatgtgtg

SEQ ID NO: 139117 - DNA, 429 bp, Arabidopsis thaliana
tatcttgtacccggacgctaattgtgcctaagcgtatgaagcagcctatctacgtatattaccagcttgagaacttctaccagaatcaccgcaggtatgtgaaaagccgaagtgattcgcaattgagaagtgtgaaagatgagaatcaaatagacgcatgcaagcctgaggatgattttggtgggcagccaattgtgccatgtggtctaattgcttggagtctctttaatgacacatacgttctatcaagaaataaccagggtttaacggtaacaagaaaggaattgcatggaagagcgacaaggaacacaagtttgggaaaaatgtgtttcccaagaactttcagaagggcaatctcactggtggtgccagtctagatccaaataaaccattgagtgatcaagaggatctgatcgtgtggatgaggac

SEQ ID NO: 139118 - DNA, 416 bp, Arabidopsis thaliana
  unsure (1)..(416): unsure at all n locations
caataattattcttctctttatctctcttttcctcttaaccatccactaatcaaacactaaaacctagaaaaaaaaaggatcaaatcatggagacggaagaagagatgaaggaaagtagtataagcatggtggaggcaaagttgcctccgggattcagatttcacccgaaggacgatgagcttgtctgcgattacttgatgagacgatcgcttcacaataatcatcgaccacctcttgtcctgatccaagtcgatctcaacaagtgtgagccttgggacatcccaaaaatggcatgcgtgggagggaaggattggtatttctacagccaaagagaccgaaaatacgcgacggggctgagaactaaccgagcaacggccaccggatattggaaagccaccggcanagacagaaccat

SEQ ID NO: 139119 - DNA, 354 bp, Arabidopsis thaliana
cgaattcattaatttattatcttcttcttcttcttcgaccttccaaaactctctctctctctctgtcgtcaacaatggatagtccgacgagcatacgtagtaaaccactaccggagactctttctccatgcggtagtcaacgacggagaagcagctgcgactctaacccacctgagttcgagttctggcgtttaactaactcttcatttcctcaagctgattcagatctcctctccgccgacgagctttttcacgacggtgttcttctccctcttgacctcctctccgttaaatcagagcttcagtccgacccgaatatcgcagaatgcgaaccggattcatctccttcgactg

SEQ ID NO: 139120 - DNA, 423 bp, Arabidopsis thaliana
aacacttgcttctctttattaacttcaaaataccccaaacttaaagccgaatcaagaacatgtccgatcaccagaaaattcatccggtgagcgaccccgaagcgccgccacatccaacggctccccttgttccacgtggttcctcaagatcggaacatggtgatcctaccaagacacagcaagcagcaccgttggatcctccgagggagaagaaaggatcaagaagttgttggtgcagatgcgtgtgctacacgcttcttgtcctctttctccttattgtcatcgtaggagcgatcgttggtatactctaccttgtatttagaccaaaatttccggattacaatattgaccggttacagctaacccggtttcaactaaaccaagacttgagtttatccaccgcatttaacgttaccataaccg

SEQ ID NO: 139121 - DNA, 431 bp, Arabidopsis thaliana
caacaacttccgccgccgttgttgttgaccgttggtctccgtcgctctcatcgtctctctatcgaatcgatggatggggagccccttatttcatagccaattcgtctggtaacatctctgttcgtcctcatggctctgaaactttgcctcaccaagacatcgatttgctcaaaatcgttaagaaggtgacgggtccgaaatcttccggtggtttaggattgcagcttccgttgatcgttcgtttccctgatgtgttgaagaaccgtctcgagtgtcttcaatctgcgtttgattacgcgattaaaagtcaaggatatgattctcattaccaaggtgtttatccggtgaaatgtaaccaagatcgattcgttgttgaagatattgtcaagtttggatcttcgtttcgatttggattagaagctggttctaaa

SEQ ID NO: 139122 - DNA, 431 bp, Arabidopsis thaliana
gcctgcaacaaagaaagactaagaaagaactaaaatattttgcttcgtctaattacttttttcctttggatttaattctcagccatcgccgccgttttcggcggtgtaaaaaatgaagaaccgtaggaaacgcggtggtttaagcagtgtcgacgtcgttgtttcatggagaagatttttccgatttgtttctttgttcgtcttctccttcgttctcttctctgctttcttcatcttcttaggcaaaattcgaccggtggtgcggtcttcggtcaacgcagttcttcgtggttctgtaccggtggttaaggtgatcacgatccatgaagcagttgagtttcccgaccaaacattgattttcctaaaataccctccatcttctcggttttttacgaaagaggacctcttttgcgttttctccgacgtaaacg

SEQ ID NO: 139123 - DNA, 317 bp, Arabidopsis thaliana
cccacgcgtccggagtagctgaccctacttttctgggatacttcatcgacaaaagtgcagcttcagctgcaaaagtagtgcgcaaggcatatccacaggaaaaagttggagtatttgtaaggaggggaaaaggtgggcctttgactgtagttgagtacacagagcttgaccagtctatggcttctgcaactaatcaacaaacaggacgtcttcaatattgctggagtaacgtaaactcctccctctttataagttttcgaagttatacttagatcattatttccggtactattgcgattgttccatttttgtgcaac

SEQ ID NO: 139124 - DNA, 335 bp, Arabidopsis thaliana
atttggaacaactctccttcttcatcattttgtgaaatcaaatataaagtgttagtgttttttggtgaaaaacctaaagcttctttctttctcttctttatatttcgataaaaggtcattgagctattgtattttcaatcttagatttctatgttaataagctcatttgagcataaaccattcatgttttagaaatgtcttcatggtatcagagcctaggcgattgatttgggtcttattttcacaagcttctagcttccgctcttctggttttgcgtttcttggcgtcagagcttgtgaatgaaaacgccaaggtgttgcaaacgtcgctattc

SEQ ID NO: 139125 - DNA, 411 bp, Arabidopsis thaliana
cccacgcgtccgcaaaaccctaagagtcgctcttgctctcagccgtctgtcttacctccagaagtcgacgacaacaatggcaccgaagaagggagttaaagtggcttcaaagaagaagccggagaaagttaccaacccattgtttgagagacgcccaaagcaattcggtattggtggcgctttgcctcctaagaaggatctttctcgttacatcaaatggcctaagtcaatccgtcttcaaaggcagaagcgtatccttaagcagaggttgaaggttcctccagctcttaaccagttcaccaagacccttgataagaatctcgccaccagcctcttcaagattcttctgaagtataggccagaggacaaagccgcaaagaaggaacgccttttgaacaaggctcaagctga

SEQ ID NO: 139126 - DNA, 342 bp, Arabidopsis thaliana
agagatctatagagagagagagagtagagataaaaggtgatgaatagaggtgtgttggagagttcgccggttcagcagctgatggcagccggaaaccctaattggtggaacgtaagcggcggcatgaggccaccaccaccgttgatgggtcatcagcaggcgccgttgccaccacatatgactcctaataacaattatctccgaccacggatgatgcccactcccttcccgcacttcttgccatctccggcgacttcttcttcttcctcttcttcttcaccgtctttgcctaataaccctaatctctcttcttggcttgaaagcaatgatctccctcctgag

SEQ ID NO: 139127 - DNA, 323 bp, Arabidopsis thaliana
tccctctccacatcaagaagaagtctctgctagttccaaaacagaacaagtgaatccctcaagtttcttattacaaaacccaaaaaccaaagtgaaccagtgttgttgtttgtactcacagatccattctccactgattcatttcttgctctgcttcttctctcttagttttgttaagaatcttctcttatccattgtgttttttctattttataaatacatatataattttagttgggggagagcttgcctggtgtcgccttcttctctctctaagacttgtgcttaatttacggacatgtgaagatacttcgcttttgcct

SEQ ID NO: 139128 - DNA, 379 bp, Arabidopsis thaliana
gacagtgttgtttcaagagcttcaagactctcatgggctcgttctctaagcgtagcatcatccaccacttcagacccaactcgccggtccgagtttgactcagactggagtttctcaccggaaagacttacttttcccaagccattaagtcaacgttggatcggtggacttgttcctgagaatgatctaaaggtgtttactttcaaagagctgaaaatagctactaaaggtttcaatagaggtcttttgattggcgaaggagggtttggttgcgtttatagaggtgttgttgatgtttcagactctaatggttttgattcgaagattaatgttgctgttaaacagcttaatcgtcaaggtttacagtgttcaggggcat

SEQ ID NO: 139129 - DNA, 408 bp, Arabidopsis thaliana
cccacgcgtccggcttcatcattaccaaatcatcaacttaatcgtttctctcaaatttagggttttctcttttctcgaaagtcttgcggttttctgaatcatctctatctggtttgagggtttcgtttgatatctggagaaaggggtttctggaaacaaggagttcataattcgcgatcttgatctatcgatcttcatttatatataaaagcgtgaatgagattatgatggagtcgaaaggtggtaaaaagaagtccagcagtagtagttccttattttacgaagctcccctcggttacagcattgaagacgttcgtccaaacggtggaatcaagaaattcaaatcttctgtctactcaaactgctccaagaggccatcctgagttacagcgtgcaccgatcttcata

SEQ ID NO: 139130 - DNA, 313 bp, Arabidopsis thaliana
ctcagcgtcggctgcttggaacgtcaccgttttctggaaaacgcaatcttctcccttccgtgacgtctcaccggaattttctcgcttttgtctactctcctccatctccgaggttctccaagctcagctcctcttcccatcattcatccgaccgccttatccggagaactacaaagaggaaaccaagattgttttgttttgttagactctaccccttttccgattcacatggtaaggacattgaggtagagaataatactaaaaagcaatgggagatgggagttccagtagatccaacagctcaaacagcact

SEQ ID NO: 139131 - DNA, 349 bp, Arabidopsis thaliana
caacaagaattgagtacattgtactcgtttgcaactcattgtgtgaggtctcgaatcctttgctcattttgatttcaaataaagctttctttcccttaattcttagattttgagatgggttggctgaggaagaagaagaagccaaaatccgatatagcgtccgagagaggggccaagttgttagaagagctcatcgaatgttgcgatggcaaatccaatcccatcaaattcttctctgctgatgagatcctcaaagccaccaacgatttcagcgactctaattttgttttacgattagaagttcccttcaaatggtattctggtaagaacgagaatcatcccatgatac

SEQ ID NO: 139132 - DNA, 387 bp, Arabidopsis thaliana
agcttgattcttgttttttttttttttttgccagcttcgttccaagaagagtatcaaacgcgtagaatccaccaaatcaaatccatggtggtgggatagtcatatcggtctcaaaaattctaagtggcttgagaataatctcgatgagatggaccggagcgtgaaacggatggtgaagttgatagaggaggatgcagattcttttgctaagaaggcagagatgtattaccagtcaagacctgagcttattgctcttgtggatgagtttcaccgtatgtaccgtgctttggcagagcggtacgagaacatcaccggagagttgagaaaaggctctccttttagagcttcagtcacagggctctggtctttctgacatctctgcttctg

SEQ ID NO: 139133 - DNA, 381 bp, Arabidopsis thaliana
tacccacgcgtccgcgcgttttccaccgcaaccaccgtcaccttcaaccgccggagccgccgcaaggaaggctcatcatccgccgtggcaattttttgaggtgtacaaagcattgcctatttgacgaaccaggaaatggttaaaaggcatggagagttttgatttacaagatatatcatgtcgcagtgcatagacggtttcaagcatgtatgctcctcttttttccggtgttttgatatcgatatttacaaacaatctggaggccttggtgaccctgaacttcttgcgagagagacagtttttagcgtgagtgaaatagaggctctctatgagctgtttaagaaaatcagcagtgctgtgattgatgatgggctaataaac

SEQ ID NO: 139134 - DNA, 402 bp, Arabidopsis thaliana
cttggaatgcgcgtgttaaagtggctcttggaactgccaaggctttagagtacttgcacgaagtttgcttgccttcaattgtccatagaaacttcaaatcagcgaatatattgctagacgaagaacttaatcctcacctatcagacagtggtttagctgctttgacacctaacactgagagacaggtttcaactcaagtggtaggttcatttggatacagcgctccagagtttgcactgtcgggaatttacacagtgaaaagtgatgtatacacttttggagtagtcatgcttgagctcttaactggtcggaagcctcttgacagctcgaggacgagagcagagcaatcactagtgagatgggcaacaccgcagcttcacgatatagatgctttgtctaaaa

SEQ ID NO: 139135 - DNA, 376 bp, Arabidopsis thaliana
  unsure (1)..(376): unsure at all n locations
gttctctccatattctcctctttagaaagagatagagagagtcttgtttttttcctgtcttgagtgatatttttttcagagccctgagttgttgtctccattaatggcgtcagagaaatctacctccaagggccaagcatggttttgtacgactgggttacctagtgacattgaaatcgaagttgatgacatgacattccatctccataagtttccactcaagttcaaagagcaggaaacttcacaggttgattacagagcaagagactagatcntcctcttccatggcgctgataactgtaatagacccaaaagtagaagagactgacaagaaaggtaaaggccatgaaatcgaggacgataaagaagaagaaga

SEQ ID NO: 139136 - DNA, 400 bp, Arabidopsis thaliana
agcagcaatgtccgaatacatctccaaagtaagcaataagcaaaggaaaatgaagtttgtttccgtcttcctcgttctgtttatcttcttcctcgtcgttcttgaggccccggagaagatagaagccaaagacgacaagttcatatgtgtggttgagtatggaggagacgtgggtccaacgttctgtaaccctaaattcttccccacgttgtgccgtcaaaactgccggagcttcaaaggtgccaaaggcggtaaatgcgtgaagcaacccaaacacaaacatatcaagtgcttctgcgactactgtaaagacgactagacttcacagtaaagtaccaaaccgctggtttcagcttcaatcgccaaacgcaaccgtcccctacggccctaagtgtttgta

SEQ ID NO: 139137 - DNA, 373 bp, Arabidopsis thaliana
cgagtcgctaatcaaataaacctaaaccctagatcgtgatcggcaacggcacctcctcgtcggcgatagcttctcttccactaaaagaaaatcctcttcggtattcttcttcctctaatcaatctctctctccgtttcggattctcatctccactcgatgactagaaacgtctcgatctgttttagatttgacaacgattcatgattctgattcgttcattgatttgattctctttgattttgtgttaactctcgtttataagcttagatttggttctcgtctctgattctgaatcgttcttgtagtgatttgatttatcatataagcgtagaagaacaatttgtgtttagttgaatttgatttttgttatgt

SEQ ID NO: 139138 - DNA, 358 bp, Arabidopsis thaliana
cggacgcgtgggcggacgcgtgggcggacgcgtgggcggacgcgtgggcttaagctttatttctccgttttcgttttgtctttctttatcgtctcggtttcgtcgtctgatgtcaacgacggcgatgatctcgtgatccgtcaggtggttggtggagccgagcctcaggttttgacctcagaggatcacttttctctcttcaagcggaagttcgggaaggtctacgcttccaacgaggagcatgactatagattctcggttttcaaagcgaatctcaggcgagcgaggcgtcaccagaagttggatccgtcggcgactcatggtgttacgcagttctcagatctgactcggtctgagt

SEQ ID NO: 139139 - DNA, 293 bp, Arabidopsis thaliana
ggaatccattctgcaaaagaatctccagccatgcacatcacagacctaactgtgtcggcagctaagatagctaaagatttcctgccatccctgcaaagaatcaggagaatacccgctgttgtggaatatgtcctcagcggacatcggtttaagctttatatcccaaagataacatgtagcatagccttttcaatcactggtgtcagatgtcctgagcgtggcgaaccttattcagaagaagactatctctgtaatgagacgtaggatcatgcagagagatgttgagattgaag

SEQ ID NO: 139140 - DNA, 189 bp, Arabidopsis thaliana
cccacgcgtccgcagagccaaacaggatctgctcttcacaattcggcttagaggaagcaattggattggccagtcccaaaataattcttttgttcttttgttataattgattgtgatctatccagaagctcttttgtaatacagcttgtaatatacactgcaaatataatttccttaaggtattcgttt

SEQ ID NO: 139141 - DNA, 278 bp, Arabidopsis thaliana
atcgaaacgaagaagatcgagatcagtgaagaagaagaagacgaaatcacgaaaccatgttcttgttcgattggttctacggaatcttagcttcgttagggttatggcaaaaagaagcaaagatcttgtttctcggtctcgataatgctggcaaaactacattacttcacatgctcaaagacgagagattagttcagcatcagccgacgcaacatccaacgtctgaagaacttagcattgggaaaatcaagttcaaggcttttgatttgggtggtcat

SEQ ID NO: 139142 - DNA, 275 bp, Arabidopsis thaliana
cggacgcgtgggcggacgcgtgggcggacgcgtgggaaataaacctctcttcatcgaaaatgtggagactctctgtgtcaattttcctcttctcatgtctcttcgtttcgtcgtcttcgttgggcgattcggaggcgacgtgttccggtatagttccgttacggtaccggtacgataagatctcgataaccgactttggaggcgttggagatggtcgatcggtgaatactaaggcgtttagggcggcgatttatcggattcagcatctgaagagg

SEQ ID NO: 139143 - DNA, 277 bp, Arabidopsis thaliana
caacacccgattctctaatcgaaaccgtttctctctttttgatcagatctcagatctttccctctttgattcttcttccttagatcgattctctctagaaacaacaatggcgtctgggcgtgaagagttcgtatacatggctaagctcgcggagcaagcggagaggtacgaagagatggtagagtttatggagaaagtctccgccgccgttgatggcgatgaactcaccgtagaagagcgaaatcttctctccgtcgcttataagaatgtgattggt

SEQ ID NO: 139144 - DNA, 276 bp, Arabidopsis thaliana
tgaagttcatattttcgggtatgcgaggactaagatttctgatgaagagctgagagataggattcgtggatatcttgttgatgagaagaatgctgagcaagctgaagctttgtcaaagtttctgcagctgattaagtatgtgagtggcccttatgatgctgaggaggggttccagagattagacaaggcaatttcagagcacgaaatctccaaaaatagtactgaagggtcttctagaagactgttttatcttgcacttccaccgtctgtttatcc

SEQ ID NO: 139145 - DNA, 277 bp, Arabidopsis thaliana
ctttcctttttagggatttcactttcctcttctctctctctctctctctgcctaacctcgatttctctcgatcgctcttcaccatggatctacgatcatgtggtccttcttgaagttttttgatctcttcttcttacgggtttttacttcgtttgattttcctgttgtttgttgttcaaggatcgagatttcgtggagctctctattcgcagcttggagattggacttgtttgaattggctcttttgtgatggaggatactcggtcagttgcttcac

SEQ ID NO: 139146 - DNA, 277 bp, Arabidopsis thaliana
gagactcaaaacggcaattagcgaaagtgggcgggaggattcttttccggcgactcttttatgtcttctcttcctcttcgctccggtgagaagatggaatcgccttccatctccgacgccgttccacttcacgcaccagaagacgcgaccgcggatttttcccaaccgcaatcgccgttacatgaagttgattcgtttccagttactgaatcctccgatgatgttgttgttaacgtctcggagataccgaatttatctccgtctgatgatgattttg

SEQ ID NO: 139147 - DNA, 278 bp, Arabidopsis thaliana
gttttcttcttcttcttcagcttctaatcgaattcgttatcgaattgaaagtttcgacctttcgtcgttgtccctcaatacgctctattcttttgattagcatccctaaaactaaaatcgcagagagaatttctccgtttggatctctaccaaattggggcgcttttgggaataatgccaccgtttatgtctggtctcagagctgtatcttccttactttcatgtcgaaacgcgattagcaggaaactcgttagtcgttctgggatccctcgagggag

SEQ ID NO: 139148 - DNA, 280 bp, Arabidopsis thaliana
gaaagaaggtgaatcaaaaaagcaggctgataggtttatatagcaatgtctggtaacaacaacaatccacaaaagcctcaaggctctgcgcctttgccttttgggaatcctgggatggcctctgcatctgttcctggaaaccaaggttttgctcagtctcatatggcagctaactttcaagctcagtttcagttctctcaagctcaggccctagcccatgctcaagcacagtctaaagttcaagcacaactgcaagctcagttacaagctcaaggcatga

SEQ ID NO: 139149 - DNA, 280 bp, Arabidopsis thaliana
cccacgcgtccgagtgaatctcatgaggatattaccgaaaagcggaggaggtgctctttgcctcctctttgtgtttgctctttgttcggtggctcattcccttagctgtgacgtcaaggttgttggcgatgtcgaagtcattggctactcagaaatcagcaaaatcaagatccccaatgcattctcaggacttcgagttacgatagaatgcaaggcggccgattcaaaaggccattttgtaacgaggggaagcggagaagtggacgaaacaggaaagtta

SEQ ID NO: 139150 - DNA, 277 bp, Arabidopsis thaliana
atcgaaacgaagaagatcgagatcagtgaagaagaagaagacgaaatcacgaaaccatgttcttgttcgattggttctacggaatcttagcttcgttagggttatggcaaaaagaagcaaagatcttgtttctcggtctcgataatgctggcaaaactacattacttcacatgctcaaagacgagagattagttcagcatcagccgacgcaacatccaacgtctgaagaacttagcattggaaaaatcaagttcaaggcttttgatttgggtggtca

SEQ ID NO: 139151 - DNA, 277 bp, Arabidopsis thaliana
gttcctctctaagccttctagtctaacaattttctcaagctttctccaattcaattaaaaatacttaccaaaatggcaatcaatccattgattctcttaaccatattcccactcttccttctcttgagcttcaccgacgccggaatccctagagtcttctcaggtggttcttggcaaaccgctcacgccactttctacggtggaaacgatgcttcgggaacaatgggtggcgcgtgtggatacgggaatctgtatagccaaggatacggaacaaaca

SEQ ID NO: 139152 - DNA, 379 bp, Arabidopsis thaliana
accacgcgtccgcgattccacaatgggtgaccttgttgccgagcgtcttcttgttgaagctagcaaaatgcgggatcaagatgagcttagatgattggaagccagcggaaccgttgtactaccattacattgatttgtcgaaaaacgagatctcagggagtctagaaaggttcttgaacgagacgaggtatctgcttgagtttcgggcggcggagaacaaacttcgattcgatatggggaacctaacgtttccgaggacactaaaaactttggatctgtcaaggaacttggtatttggtaaggtgcctgtcacggtggctggtctacaaagactaaacttaagtcaaaaccatctttgtggagaacttcctacgacaaa

SEQ ID NO: 139153 - DNA, 282 bp, Arabidopsis thaliana
cgtgagtagtattaggtttgctaaaagcttgggcttcaatgacatccagtttgggtgcgaagatggcggcaggtcggacaaggatttcctatgcaagattctaggagaagccataaaagccggtgttacggtggtgaccatcggtgatacggtagggatcaacatgccacatgaatacggggaactcgtgacttatctcaaagcaaacacccctggaattgacgatgttgtcgtcgctgttcattgtcacaacgaccttggtcttgcaaccgccaactcaac

SEQ ID NO: 139154 - DNA, 278 bp, Arabidopsis thaliana
ctctcttatctcctttcctttcattgtagttaacgaaaagattacgataatggcaacatcagctatccagcaatcctccttcgccggccaaacggctctcaagccctccaacgaactcctccgcaaggttggtgtatccggtggtggccgtgtgaccatgcgtcgtaccgtcaagtctactcctcaaagcatctggtacggaccagaccgtcccaagtacttaggaccattctcggagaatacaccgtcctacctaaccggagaataccccggagact

SEQ ID NO: 139155 - DNA, 281 bp, Arabidopsis thaliana
atggaacttgatgggaaggcttgtgctggtgttgggcagagcagtctcatggcttactatgagactatgtttgaccagttggatgtgacggttgctcaaatgcttgtgaccgatagcagttttagagataaggatttcaggaagcaacttagtgaaactgtcaaagcgatgctgaggatgagggttattccagttttcaatgagaatgatgctataagcactcgcagagccccctacaaggattctactggtatattttgggataatgacagcttagccgc

SEQ ID NO: 139156 - DNA, 280 bp, Arabidopsis thaliana
gtttacaccttcacactgctgcgtctctctctctctctctctttctttctcagattaatcgctgagaagaagcaaccacctggagacggcggagatggcagggtacagagtggaagatgactacgattacctcttcaaagttgttcttataggcgattctggagttggcaaatccaatctcctttccagattcactaaaaacgagttcaatctagagtctaaatccaccattggcgtcgaattcgccactcgtaccttaaaagtcgatggcaaagtcgtt

SEQ ID NO: 139157 - DNA, 278 bp, Arabidopsis thaliana
gtgtttctcataaagatctcaaagatattcctactacacatgggttctcttgacttgccttacgcttcatcgttcaagggaggaagtgaaacctttctccagaatgtatttgaaagtatactgaaaacgtatttgaggaagaacccgatggcgaagacgatatgggaactagttaagtcggtggacaacgaaaagatctcttacgaccacttctttttcaggacatttaaggtcgatggttatggaattgattccctggcgagttttttcatggatta

SEQ ID NO: 139158 - DNA, 278 bp, Arabidopsis thaliana
cttcagcaacgaagaggttgttgctcacgtgacttggttcatcgaaaacgttcctgaaggcgatcctgctcaatacctcattgcagagcttctctctcgtgctgccaccaagaacggaatggagtttcatgatctgttggatattcctcaaggagatagaaggaagtaccatgatgatgtctctgtcatggttgtgtcacttgaaggaaggatttggcgctcgtctggacaatattatccagagagaaaacataaattcaatagataaattaaccaaa

SEQ ID NO: 139159 - DNA, 382 bp, Arabidopsis thaliana
attttctccgtcactgagtaccttgcctctcgagctcccaatcttaagtagaggattgagcttaaggcaagatgtcgtaaaaccgccgcgtctctgctgaccctcctcttctcatttcatcgacgggagaaaatcccataccatctgagatttccaacagtgaaattaagatgtcaacaggaatatccactgatctccatgtccattttggagctctaaatttctcaaaaacctacaaatctggtttaagcaatcgaacggtgtctttttcgagagtcgggtatgctcagaacaggaaattgagctgcagtgtttccaacacagagaatgtagctcctaaggatgatgaaagaggaaaggatagacctttggttaagatgtg

SEQ ID NO: 139160 - DNA, 365 bp, Arabidopsis thaliana
aatgcagacaaaagaaacaagcaagtctcactaaacatcgagcacgaggtagttgaccaaaccggtctgagcaagagattaagtttagagatgaacaagtcatcatcatcttgtgcctcgtgtgcaacggtggctttgaagtatcaaaggagagtttcaggttcacaacgtttgttcccaactcctatcattcactcaatgcttgcggttgcaacggtctgcgtttgcgtctgcgttttcatgcatgctttcccaatcgtcagacaagggtctcacttcagttggggaggtttggattatggctcaatctagagaactatactatataaaagtattataatttattcttttggtttctcgaagac

SEQ ID NO: 139161 - DNA, 281 bp, Arabidopsis thaliana
ggcctaagttcatctgcaacatcaggaacgtttttggttgaggatggtccatattactattgcatgcttgaaatcctacttggaaggctatctggatctctatataaccaggccttgaaaaagatatcaaagtttgttcagacaaatatccttcctggtgcaattgccgaggttgggttgctttgttgtgcatgtgttcattcaacccccgaagaagcagttgctcaaattgttgaaccaatgctccttgctgttatatcttctctgaaagaaatccctgt

SEQ ID NO: 139162 - DNA, 280 bp, Arabidopsis thaliana
cccacgcgtccgtcccactctctctctcgtttgcttcttcttcatcgtttcacccactcacttcattctctctctaaaaccttcactttctctatctatcttcaaaacaatgggaaacctgtttgacagtagcaagactttatggggaaacatgaaccatggatcgtcacgttactctctaaacggcaaaatcatgcttgcttccgtcatcatcctcttcgtcgccgtcattttaatcctctgtttccacagctacgctagatggttattccgccgtcaa

SEQ ID NO: 139163 - DNA, 279 bp, Arabidopsis thaliana
ggagcttccgccttattcagagtgtagaggaggatccaaaagaaaagaggaaaaaatggactatatgtatggaccagggagacaccatctgtttgtaccaggaccagtgaacataccggaaccggtaatccgggcgatgaaccggaacaacgaggattaccggtcaccagccattccggcgcttacgaaaacattgttggaggatgttaagaagatattcaagaccacatcagggacaccttttctgtttcccacgaccgggactggtgcttgggagag

SEQ ID NO: 139164 - DNA, 279 bp, Arabidopsis thaliana
ggagactacactgctttcaggaggtctggtcgtcttcctaagttccttgtccttgcgccgacccgagagctggctaagcaagtggagaaggagattaaggagtctgcaccttatttgagcactgtttgtgtgtatgggggagtttcttataccattcagcagagtgctttaactcgtggtgttgatgttgttgttggaactcctggaagaatcattgatttgattgaaggaaggagtcttaaattgggagaagttgagtatttggtacttgatgaagct

SEQ ID NO: 139165 - DNA, 279 bp, Arabidopsis thaliana
gaaaatcaaagcagcagttatggccgacgtagcaacaaagcaccccatggaagatgaggtgaagaagacggaggcgtctagtttggtggggaagctagagacagacgtggagatcaaggcttcggctgataagtttcaccacatgttcgctgggaaaccacaccatgtctccaaagcaagtccaggcaacattcagggatgtgatctgcacgaaggcgactggggcacagtcggctctatcgtcttctggaattacgtacatgatggggaggcaaaggt

SEQ ID NO: 139166 - DNA, 280 bp, Arabidopsis thaliana
ctttgacacatttctggtgggtggggatactgctgaggttaacgatataaaattcagcaacgatgggaaatccatgctcctaacgactacaaataacaatatctacgttcttgatgcatatcgtggagagaagaaatgtggttttagtttggagccttcacagggtacacccatagaggccaccttcacaccagatggcaagtatgttctgtcaggttcaggtgatggaaccttacatgcgtggaacatcgagaacccatctgaggtggcgaggtgggag

SEQ ID NO: 139167 - DNA, 386 bp, Arabidopsis thaliana
atcacacagcacgatcttggacgtcgttttaagcgcaaaacaaaggaaaaagactgacgtttatacatactaaatactggtttggagttttgccttttggactcagaaaactcaaaagagagagagagacatttctgtatcttatcgggttttgtgttgtcagaaagaagctcaaggacaaaaaaaaaagcaattatttttagggttcaaacgaagcaaaatttggaactttcagaagttgtgggtggtggcttcttgaacaataaagctttttcttagactcttcttccaatttgtgactctacctatctctctctccacgctggaatgatgatggagaataagcggaatgtctgctctctcggagaaagcagtatcaaacgcca

SEQ ID NO: 139168 - DNA, 280 bp, Arabidopsis thaliana
catttctttagctcaaccttcattactaatctccttttaaggtttctttcgtgaatcagatcggaaaaatggaatcttttttgttcacatctgaatccgtcaacgagggacatcccgacaagctttgtgatcagatctccgacgctatcctcgatgcttgccttgaacaagaccctgagagcaaagttgcttgtgagacttgtaccaagactaacatggtcatggtttttggagaaatcaccaccaaggctaacgttgattacgagcagattgttcgtaa

SEQ ID NO: 139169 - DNA, 280 bp, Arabidopsis thaliana
cagaagcttgatactgttcttaagcttctccctcttgctcgccaccgacggatactcctccagcatcttctcaactactcctccactacttgaattcaccaattccgccacgatctcctcatgtaattgaatgttcacaagatgccgacaatgtcaccatcaatcaaacttagcagtggatgagtcctgaagattactttctgcaggagaccttcaggagccatgtcagcctttgtcacaacagccagagtccgttcaccagttttgtcaacttgtcttg

SEQ ID NO: 139170 - DNA, 276 bp, Arabidopsis thaliana
cgctcaacaaaatctctctctactaatatctctctctctctctctctattgttgaagaagactcataatcggagattgtttgtttttggtttgctctgtaaattggagaagttttgttagagatcaaatggctgggatttgttgcggtgttgttggagagactgaaccggcggcaccggttgattcaacttctcgagcttctcttagacggaggttagatctacttccgtcgatcaaaattgttgctgactccgccgttgctcctccgcttgaaaa

SEQ ID NO: 139171 - DNA, 280 bp, Arabidopsis thaliana
cccacgcgtccgcccacgcgtccgctgggtcagggatatgcgcgaagcgcgttgtcgtcgacgggcgacaccacatgcttggtcgtctagcttccaacactgcgaaggagttacttaacggacaggaagtggttgttgtccgatgtgaagagatttgtctctcgggaggtttggttcgacaaaagatgaagtacatgagattccttaggaaacgtatgaacactaagccttctcatggtcctattcactttcgtgctccttccaagatcttctggcgcac

SEQ ID NO: 139172 - DNA, 365 bp, Arabidopsis thaliana
acacaccggtgttgatctcggcgctaactttcacaaccgcggttttcttgggtgtcaagcttgatgcaggaacggttttcaccacaacgacgattttcaagattcttcaagaaccgataaggacgtttccgcagtctatgatctctctttcgcaggctatgatctctctcggaagactcgatgcttacatgatgagcagggagctatcggaagagactgtggaaaggagtcaagggtgtgatgggaatgtcgctgtggagatcaaagatggaagctttagttgggatgatgaagatgacgagcctgcaattgaaaacatcaactttgaagttaagaaaggagagctcgctgcgattgttgggacc

SEQ ID NO: 139173 - DNA, 305 bp, Arabidopsis thaliana
gaaaaaaagatggacgataaaatagataaatattttttttcttttgcacacccaaaaattgcagaaaggtgcgacatattcaaatatcacctccgtcgtcatcggcttccattgattttggcactactacaagagacttacgttcttcttcattaacttcttctctttctgaaaccctaagatttttggttggattgtcttgtcgttctactgttttccttagctgctcctcaaggtgaaattgggtttctgtagctttttttctccgggaaaggtttttcttttttgaagatttcatgcaaatg

SEQ ID NO: 139174 - DNA, 280 bp, Arabidopsis thaliana
cccacgcgtccgccttaacttggattctttctggtcaccatggcttcggttactttctctgtccccaagggtttcactgaattctcaggattgcgaagctcctctgcttctcttcccttcggcaagaaactttcttccgatgagttcgtttccatcgtctccttccagacttctgcaatgggaagcagtggtggatacaggaaaggtgtgactgaggccaagcttaaggtggccattaatggattcggtaggatcgggaggaacttcctgagatgttggc

SEQ ID NO: 139175 - DNA, 251 bp, Arabidopsis thaliana
atgtcaccggcgatttgtgatttccggtgagtcgacactccgttaacgtggaattcatcaataggagacgttgcagcaccatcggtgaacgaagaaaaaaacaattgttaatttggtagtcccatccgaagtaaaatcgatcagctccaaaatatttcccagataaagagccaatgatgattgaaaaagactgcccacattgtttgattcaccactgatatgaattctataaagagctttgtaagaagaga

SEQ ID NO: 139176 - DNA, 370 bp, Arabidopsis thaliana
actcaatattttatctcccccaaagtccaattttccaaaaaatccaaaacacacagagagaaaaaaaactgaaacatcccaaatggatcatcatcttcaaccataacaacacgaaacccttcttctccaaaatccccaaaaccttgaaacaaagtctcaaaatttcacttcgtggatccgaatgtctcagaacccatcactcttcttcctcttatgtctagggttaggtttttgcgttgacctgggtcaatccctgaaagttcctttcagcgttaacgatgttcttccgatgctacctcgtcaagtctcatggcctgttttgaacagtttccacaacgctgtggatttgttgccggtttttattgggtca

SEQ ID NO: 139177 - DNA, 378 bp, Arabidopsis thaliana
gtttatatggaaaacaagaccatccgaccgcggaatgcgtggcaaaggagtctcaacaggtacattcgtctgcacaactcaatcccctgaagaagatcatctcagtacaatcgcgtgtctaaaaaacctcgattcgagtttacacgcaatgccaaacatcgaacaaatccatgctatgattcaacactatggtccaagagtttacttccatcctaatgaagtctacctaccttcttcagtctcatggttcttcaaaaacggtgcactcttatgcagcaattcaaattcctctgttatcaacaatgaagctatagacgaaaccggctcgaatctacctcatggcggaaccaacgataagcgatattggatcgatttacc

SEQ ID NO: 139178 - DNA, 325 bp, Arabidopsis thaliana
aagtacgtacccaagtcccaatattgttaattgtctctgagagttataatggctccagtcggattacctccaggctttagatttcatccgactgacgaagaactcgtaaactattatctgaaaagaaagatcaacggtcaagaaatcgagcttgatataattcccgaggttgatctctacaaatgcgagccatgggacctcgcagagaagtcgtttctaccaagtagagatccggagtggtatttttttgggccacgtgaccggaagtatccgaacgggtttaggacgaaccgagcaacgagaggtgggtactggaaatcgaccg

SEQ ID NO: 139179 - DNA, 354 bp, Arabidopsis thaliana
aggacgcgtgggcggacgcgtgggcggacgcgtgggaaatcttagacgttttacgttgtgctgcactactcaacctcactggccgcctcaccactggctctcccttcgcctgccttcgctcgtaatgccgtccagcatttccccgcggcatctgaagtccttgatagcggtcgtgtgaccatgacgaagactgttgcgaatccaaagggttcatcaggcaacccatggtacggatctgatcgtgtcatgtacttgggtccattcgctggcaattcagcgacctacgttaccggagagttccccggagactacggatgggacatcgccggactttcagctgactccgagacattc

SEQ ID NO: 139180 - DNA, 345 bp, Arabidopsis thaliana
aatccaattaatggggttgatcttgccacctctcggacctctcaacaactcacaagtctttgagaggtccgagaggtggcatgatcttcttcaggaaggatccaattaatggggttgatcttgaatctgccgtgaacaatgctgtcttccctggtttgcagggtggccctcataaccacacaattggaggattagcagtctgcttgaaacacgcacaatcaccggaattcaaggcgtaccagaaaagagttgtgtctaactgtagagctctagctaaccgattggttgaactcgggtttaagctagtttctggtggcagcgataaccacttggttctcgtcgatc

SEQ ID NO: 139181 - DNA, 397 bp, Arabidopsis thaliana
attctatcagctgacgatgagttcttggtaaattgtatcttactttcgtgtcatatatatgcaactttgattgtttattagacggttgagaataataataggttgaatgtggtaggtaatggcaagcgacgggctctgggatgttatgaacgatgaagaagttattggtataatcagggatactgtaaaagaaccttcaatgtgttcaaagagattagcaactgaagctgcagcacgtggtagtggtgacaacatcacagtcattgtagtcttcctgcggccagtgtctacagccgaaaggatctactagtagtatccaattcttgcacattattattcaacattcaacttctttacatataaattaattcatgtgtgttatcaaaatgaaccttat

SEQ ID NO: 139182 - DNA, 374 bp, Arabidopsis thaliana
cccacgcgtccgcccacgcgtccgttcccttctcccaatctcatcttctccgaaaacctttcttctctcaaatttctgtgaaaacatgtctgacgacgagcaccactttgaggccagcgaatccggagcttccaagacctatcctcaatcagccggtaacatccgtaaaggtggtcacatcgtcatcaaaaaccgtccctgcaaggtctgatttctatttcatcatcaaacatcgttctcgatctctttttcctgattctagatctcgtctctgtatagtagctccttgattttgtttttatcctcggatttgacctggttctgtttagtttgaatttttcttatagatcgctacttagatgaatatgatgaat

SEQ ID NO: 139183 - DNA, 353 bp, Arabidopsis thaliana
acaaagagcaagaagaaggattctcgtgcaacgacgcctgcaaccaaaaagtctgaacaagctcctaagagccatcccaagatgaaacggatagcaggagaggaagtggagtccaatacaaacgagcttggtgaagaactcgttggtaagagagttaatgtctggtggccactcgacaagaagttttatgaaggtgtcataaaatcttattgtagagttaagaagatgcatcaagtaacatattctgatggcgatgttgaagagcttaatctgaaaaaagaacgttttaagataatcgaggataaatcttcagccagtgaggataatgaagatgatctgcttgagtctactcc

SEQ ID NO: 139184 - DNA, 390 bp, Arabidopsis thaliana
ctgtgttctctctctcgcgcgaagcggttctctttcttttgtttatttgtttttatttgtttttctcttatacggtggagagaagatggtggcgcctgctttgttaccggagctctggacggagatccttgtaccgatttgtgccgtgattggtatctccttttcgcttttccaatggtacgttgtatctcgcgtgatactcacctctgacctcggcgcatcgtcttcgggtggagctaataaggggaacaatggatactgtgattatctaatcgaggaacaggatggtgttaatgaccagagtgttgtcgctaagtgcgctgagattcacactgctatttccgagagtgcaacttcattcctattcacggtgtacaaatatgttggtgt

SEQ ID NO: 139185 - DNA, 334 bp, Arabidopsis thaliana
gaaaaaaagatggacgataaaataaataaaaatttttttttttttgcacacccaaaaattgcagaaggaagctatatatgttaacgttaccttctctgcaaatctccttatctcactctctcgcgtccatttttttttctcaattcgtcttcaaaaattcgttagatagagaagaatctaaaagtctctctcggtcatcggaatatcttcttctcaggaattcgacgagactattcgaaatcggaaatcgcgctttgaatctgaaactcagaatttagaggacgcttactccaaagaatctagggtgttaactttctaagaaagggagtttgtt

SEQ ID NO: 139186 - DNA, 358 bp, Arabidopsis thaliana
gctcaactctttaatctccggtggtgtaggaggaggagatgaagctggagatgaagaagttacagatactgaatggttcttcttagtttcaatgacacagagctttgtcaagggtactggtttacctggtcaagctttctcaaattcagacacgatttggttatctggttctaatgctttagctggatcaagttgtgagagagctcgtcaaggtcagatttatgggttacaaacaatggtgtgtgtagcgacagagaatggtgtcgttgagcttggttcgtcggagattattcatcaaagttcagatcttgttgataaagttgacacctttttcaattttaacaatggtggtggtgaa

SEQ ID NO: 139187 - DNA, 118 bp, Arabidopsis thaliana
gttacttttgggattgaagagttatcgaaccgtaactgttttttcttctcacttgtttctcttaagacccttagatgttttgcacctttttgtttgaatcgaatctatattttgcgtt

SEQ ID NO: 139188 - DNA, 311 bp, Arabidopsis thaliana
cccacgcatccgggcaaagaagacacttcgctgaagcttttttttccaaaaaaatttcttagtgtcgtcaatggctttggctccacttaattttacggaaatgccactgagaagctctcttcctctgacctctagctctcgctattgttcctctccttcgcttcacgcattgctcttctattcgttgggtgtgaaaccctcgcgtcaacaaattgttcggccattctcttcgctgcgtacaagcgagcgtagcaacaacaggagcaataacaatcgtcgattagatcaacgtaatcataaacctactcctc

SEQ ID NO: 139189 - DNA, 416 bp, Arabidopsis thaliana
ggcgaatcatccactatcttcttctcgatccaaccgaccttttttcgtcagatcacttgctggacacacctcaaatctaataattcctgatgagtttttcactgctcacttagagggtaaaactggcttaacgaaattgaaactgacttctgatgcttcggatagaatctgggatgtgagactgaacggccggagattcgccggcggctgggatgatttctccgccgcacactgtcttcgagacgacgacgttttggttttcagactcgacgtgaagatggttttccacgtcacaccttccggacgcagtttctcacagatacgtacatcttctagctccggcgactacgacagtgatgatgatgatgatgaagcaagggacgatgattcagattcgaagaacatttcgttgaaga

SEQ ID NO: 139190 - DNA, 337 bp, Arabidopsis thaliana
gcacttgcttaccacaaggagatgaagctacttggacagatgctttactatgttcttacgacaggttcagggcaacaaactttaggagaggaatattgtgacattatacaggttgcagggccttatggactctctcctacaccagctagacgtgctttgttcatattgtaccagaccgcagttccatatatcgcagagagaattaggtttcgtcgcatttcttattgttgttttacaaagaacaatttgaatcttgtccgctgatattgatataattgtctacagcactcgagctgctacgcaagcagtcacctttgatgagtctgatgagtttttt

SEQ ID NO: 139191 - DNA, 403 bp, Arabidopsis thaliana
aaaacactctctataatggaatcgaaaaccataaacgacgtcgtcgtatcagagtcaaatcacgagttagcatcttcgtcgccatcagaatttgagaagaaccagaaacattaccaagaaatcatcgcaactcttcctcacaaagatggctggagaccaaaagatccgttcgttgagtacggtggtcactggtggctacaacctcttcttgaaggtttacttcacgcccagaagttcttcaaggcacgtcccaatgatttcttcgtctgcagctacccaaaaaccggcacgacttggctcaaagccttaactttcgcaatcgcaaatcgctccaagttcgacgtttcaacaaaccctcttctcaaacgtaatccacacgagtttgtgccttacatcgaaatcg

SEQ ID NO: 139192 - DNA, 352 bp, Arabidopsis thaliana
cgcgtcagcttcaccttacttagtcgacaaagacggtgtaccactcgacgtctctgccggttcattcatcgggtttaacctcgacggagagcccaaaagccaccacgtggcatccatcggaaaactcaagaacattcgtttcatgagcatattccgtttcaaggtttggtggactactcattgggtcggatcaaacggacgtgacatcgagaacgagactcaaatcatcattcttgatcaatccgggtcggattctggacccggatccgggtcgggtcgtccttatgttctcttgctacctcttcttgaaggctccttccgttcatcattccaatccggagaagacgatgac

SEQ ID NO: 139193 - DNA, 304 bp, Arabidopsis thaliana
ttgatgagctggttggaatgcaaggtccagtgtttcatttggttgagaatgcctttactgttctaacaagcaatatgatattccttggtgttgttatcttcgtgccctttaccttgggacggattatattgtatcacgtgtcatggctttttgctgctgctagaggccctgctgtggctgcatcattgcatcttacagataccggactctcattggaaaatattactctgaagagtgcgctgactgctgtctcgaatttgactagcgagggccaacgaaatgggctgcttggtcagctcactga

SEQ ID NO: 139194 - DNA, 315 bp, Arabidopsis thaliana
cttgacaagaggctttcggttgtgaagtcgtttaaagcgcagaatcaagctggagattttgatcatactcggtggttgtttgagactaaaggtacttatgggtatgggaacgctgtttggcctaaagatgggtatggaatcgggtcgggtggtggtggaaacgggtatgaaacgccacctgagtttggggagagaagcaagaggcctcttactaggaaagtcagtgtctctgctgcaattatcagtccttacagattactcattgcactgcgtctggtggctcttgggttgttcctgacatggagggttcgccac

SEQ ID NO: 139195 - DNA, 399 bp, Arabidopsis thaliana
gatattttgttttctctcttaacgatggcgaagagtgttttggttaccggcggcgctggctatatcggaagtcatactgttcttcaactgcttgaaggtggttactccgccgtcgttgttgacaattacgacaattcctctgctgcttcgcttcagcgcgtgaagaaactcgccggcgaaaacggaaaccgcctctccttccaccaggtggatctccgagacaggcctgcgcttgagaagatattctcagaaacaaagtttgatgcagtgatacactttgctggacttaaagcagtaggtgagagtgtggagaagcctttgctctattataataataacattgttggcactgttactcttttggaggttatggctcaatacggctgcaaaaatcttgta

SEQ ID NO: 139196 - DNA, 371 bp, Arabidopsis thaliana
aagaaatccaaagatattacttttagatgaagcaacaagcgctcttgatgccgaatcagagaagattgttcagcaagcacttgacaatgtcatggaaaaaagaacaacaatcgtcattgcacatagattatccaccattcgaaatgttgacaagattgttgtcttgagagatggtcaagttagggaaaccggaagtcactcagaactgatatcaagaggaggagattatgccactcttgtaaattgtcaagacacagaacctcaagaaaacttgagatcagtcatgtatgaatcttgtaggtctcaagctggatcatatagttcaggaagaatttttagctcaagaaggacttcaagcttcaaggaagacc

SEQ ID NO: 139197 - DNA, 439 bp, Arabidopsis thaliana
caacatcgtcagccgctgatcagggtttgatgattctccaatctccaaaagtagggttcttcaggagatccaaaaccataaagggtaaacgcctgccttcgtcttgtaaagagaaagaccaagtgaaagaaggtcaaattctgtgctacattgaacaactcggtggccaatttccaatcgagtctgatgttaccggcgaggtagtcaagatactccgagaagatggagagcctgtaggatacaatgatgctctcatctccatccttccatccttccctgggatcaagaagcttcagtaaaaccaaattcgagctggttttgagttatgacactgtgccttgtgtatgcttttagataaagaaacttcattcatatttgtatttgtcttttgcttgtatgaaagttcttctttaagactcttttattctgtatgcttttt

SEQ ID NO: 139198 - DNA, 448 bp, Arabidopsis thaliana
  unsure (1)..(448): unsure at all n locations
gaaaaagcaagcgggtatccgggtcggacttaccgattctacaccggagaaacagtatacgcattcggagatggactcagctacaccaaattcagtcacactttagtcaaagctccaagtctcgtttctctcggtctcgaagagaatcacgtttgccgatcatcggaatgtcaatcgctagacgcgatcggaccgcactgcgaaaacgctgtctccggcggtggatcggcgtttgaagttcatatcaaggtacgaaacggaggagatagagaagggattcacacggtgtttctattcacgacgccgccggcgattcacggatcgccgaggaagcatttggtaggattcgagaagattcgattggggaagagggaagaagcggtggttacgtttaaggtanagatatgtaaagatctgagtgtggttgatgagattgggaagaggaaga

SEQ ID NO: 139199 - DNA, 349 bp, Arabidopsis thaliana
gctctctaaaaaagctctttgttcgtctctatatcatacgaataatggattcttattttttccttggcactgttgttgttgttgctcttgcaatctacacgcttttgggaacaatatcttttatggtttatagaaaattcaggttacaccaagagaagaacaacatatcatcttgtttttctttttcatcttgcttttctttttcatcttcttcatcgacttcgtcgcccggtcgtaaacaccaagtctttccaagtttccacggggcagatgtacgcaaatcctttctcagccacatcatgaaggagttcaaaagcaagggaatcgacatattcattgataaagatat

SEQ ID NO: 139200 - DNA, 151 bp, Arabidopsis thaliana
cagaacagctcggtgcagattagattgtacaagtgacaacacacttagaggatgttggttctgaggttgaacagattcagaaagctatggggtcaaacatcgatgtaacattcgactgtgcgggttttaacaaaaccatgtcgacagcatt

SEQ ID NO: 139201 - DNA, 323 bp, Arabidopsis thaliana
accaccaaacgctaaacgcaacagccaagatgactgagaaggaatgtgaacatcaccacgacgaagatgagaagatgaggaaacgtatacgagcattggtgcttgggtttctcgcagctgttcttttcgtggttttcttggtgtgggcgatacttcacccacacggaccacgttttgttcttcaagacgcaaccatttacgcgttcaacgtttctcagcctaattatctcacttctaatcttcaggtcactctttcttcacgaaatcctaatgacaagatcggaatcttctatgaccgccttgacatctacgcatcttaccgc

SEQ ID NO: 139202 - DNA, 410 bp, Arabidopsis thaliana
ccacgcgtccggaaagattgagagggacaagcgagttttgacccaaggattgttgacggtctatattgaacaagtaaacaaggatgcgtaagtggatctgttgtacatgtcaaatagaagactcaaatgaagagcaacaactgaaaagttcacagcagcaatctgatgcaaatcataagaattcaaaaccagcacctgttgcaaaacatgaggttaagaaggaagctcttcccatcgaggtccctcccttgtctttggatgaggtcaaggaaaagactgaaaattttggatccaaggcactgattggtgaagggtcttatgggagagtatattatgcgacactaaatgatggtgtggcggttgctctgaagaaacttgatgtcgcacctgaagctgaaacagataccgaa

SEQ ID NO: 139203 - DNA, 385 bp, Arabidopsis thaliana
cccacgcgtccgcccacgcgtccgaaacattctaaaatggccacttccgtcaatggttcccatcgtcgtccacattacttgcttgtaacattcccagcgcaaggtcacatcaacccggcgcttcaactagccaaccgcctcatccaccacggtgcaaccgtcacatactccaccgcagtctctgctcaccgacgtatgggcgagccaccttccacaaaaggtctatccttcgcttggttcaccgatggattcgacgacggtctcaagtcattcgaagaccagaaaatctacatgtccgaactcaaacgatgtggttcaaacgccctgagagacatcatcagagccaatcttgacgccaccaccgatacagagcctatcaccgggg

SEQ ID NO: 139204 - DNA, 399 bp, Arabidopsis thaliana
agaaaagggagtgtacacatagctcgctctcgctctgtgccccttaacgacaaggaattaagcctgaagggaatggattcatttttcagagtaattccttcgactcctcgtgttaaggaaggagacgttttctcaaatgcatcagaggctggtaatactgaaacaggtgatgctgatggagaagacatacctgaggatgaagcagtttgtaggatttgtttggtagagctctgtgaaggaggagaaaccttaaaaatggagtgtagttgcaaaggcgaacttgctcttgcccacaaagattgtgctcttaaatggttcaccataaagggtaacaagacttgtgaggtgtgtaaacaagaagttaagaacttacctgtaacactcttacgcatccaaagc

SEQ ID NO: 139205 - DNA, 407 bp, Arabidopsis thaliana
gcatttctagttattcggtgatggatcaaacacagaacacaatcgccggaattggtgaaatcaacggttcgataaaaaccgaaatcaatgcaattgcaaccgtcgacgattcaaatgagaagctgaaccaaattataaactcgaatcagaaaattttagaactccttcatcaattaaaactcaccgtctcttctttcacacctgcttctcagcttcacctcctccaacgcctcaattctcttgtgatggagcttgataatatggctaagttgtctgataaatgcaacattcaagtccccattgaggttcttaacttgattgatgatgggaagaacccagatgagtttacaaaagatgttcttaataagaactgcattgctaaaaatcaagttacaaagggaaagagt

SEQ ID NO: 139206 - DNA, 313 bp, Arabidopsis thaliana
  unsure (1)..(313): unsure at all n locations
caaacgcgtccgcgaaaaattcaccaaacattttcggtttctcttcacaaaaaatctcaaatttctctgtgaaaatgggcgaagaatcagaaatcgccatggcttcagcagatcgaaataacctaacccagaaaatcgccaagatcctaaacgagactcgcacatcatacgctactcataaccgtaagctaaaggagctcgccacaatccgttcaaaactatcttcatctgaatccgaatccgagtccgtgtcttcttctattcttcaattctcttccgtgtntctcaaaaccctaacccctcttttcatcgc

SEQ ID NO: 139207 - DNA, 242 bp, Arabidopsis thaliana
catcctcatgtatttcctcaagggaagtctcccttggcaagggctgaaagctggaaacacgacacaccagtatgataggatcagcgagaacaaggtttcaacttccatcgaaacgttatgcagaggtcatccaacagagtttgcatcttacttccattactgccgctcacttaggtttgatgataagccagactatgcatatttgaatacactattccgcaacctttttatccgggaaggtt

SEQ ID NO: 139208 - DNA, 427 bp, Arabidopsis thaliana
cacgcgtccgccattctcagattgaaatcgaaagcacggatctttcttcatacctcaaacctgcaggatccattcatgattttggagatctgtttatcaaatctcagatcagaagcttctacgagttgattatatgctgtgtttgcagatctgggtttggttatatttctgagtaaatctctcacccaacaccatgtgtgatcaaagaccaaatcttttagggtctctcgtgttgttgggtttcttcatcttctttgtaaatggagaagaatgctctaattcgagctcattgattgggcatgagtctgagttcaagatgttgcaacatcagcttcgtggggttttcactgttgtcgatgattgttcgtttaaggtttctcgttttgatatgctctctggttccgaggttcattggtggggtgctatg

SEQ ID NO: 139209 - DNA, 373 bp, Arabidopsis thaliana
cggacgcgtgggcaaagacaaagaaaacgaaaatgttggcaatatttcagaaagcttttgctcacccaccggaagaactcaacagtccggcttctcatttctccggcaaaactcctaaacttcccggcgaaactctctccgacttcctctctcatcaccaaaacaatgctttctctatgaacttcggcgactccgccgtcttagcttacgctcgccaagaaacctctcttcgtcaaaggttgttctgtggactagatgggatctactgtatgtttctagggagattgaataatctctgtacattgaatcgacaatacggtttatctgggaagaactcaaacgaggcaatgtttgtgatcgaagcttatcgaac

SEQ ID NO: 139210 - DNA, 417 bp, Arabidopsis thaliana
cttcttcttcttcttcctcatttctcttcctctcccatattccatggaattgctctacttcttcacctatgagagtaatatatcctcatgtactcaaaatactaatcaaacttcatgcttcaacaccaccttttcttaatcctccttcttcatcttcttcttccactatttcattttccctagtcggtgtaaatatcaaatggaggaagaacggcgagttctgttcggaaagtacgagatgggaaggttattaggcaaaggaaccttcgccaaagtctattacggcaaagagatcatcggcggcgagtgcgtcgcaatcaaagtcatcaacaaggatcaagtaatgaagagacctggaatgatggaacaaatcaaacgcgagatttcaatcatgaagctcgttcgtcatcccaacat

SEQ ID NO: 139211 - DNA, 418 bp, Arabidopsis thaliana
cagcgaacagtcgctgcaacgccatcgtcttctcgatcgtaccaattccacccagctcgtgctgcaattatcgatcttttcaatctctacttagggagaggaagccgtcaaaagcctgatgagtccctccgagatcccccgaacaaatcacagaagcgtgttcatgctcctaatagagacttaccaccaagaaacgagcaattccttttggattttgagctgcttcagagccaattcaatgatccagagcaattgaggacgattactgagtcagttttgatatctctggtggtgcaatgtagcaatcatgcgcctcgtgctgagtttctactctttgctttgcgtacattgtgtaggattagttatatcaattgggatacttttttaccatcccttctctcttccgtttccgctgctg

SEQ ID NO: 139212 - DNA, 381 bp, Arabidopsis thaliana
aattctctctaagagattttgtaggtgacaatcaaaagtttgacaaaatggtgaagtttacagctgatgagcttcgaaggattatggactacaaacacaacatccgtaatatgtctgttattgctcatgtcgaccacgggaaatccactcttactgattctttggttgctgctgctggtatcattgcccaagaggttgctggtgatgttcgtatgactgataccagagctgatgaggctgaacgtggtatcactatcaagtccactggtatttctctctactacgagatgactgatgaatccttgaagagtttcactggagccagagacggaaacgagtacctcatcaatcttattgattcacctgggcacgttgactttt

SEQ ID NO: 139213 - DNA, 455 bp, Arabidopsis thaliana
cccacgcgtacgcggcaaggttgaaacagacagagacaagcaatatgattactgtgtgtatggtactgacattgctacaagttatggagctggtgcatttgttcttctctttgtaagccaagtccttattatggctgctagtcgttgcttctgttgtggaaagtctcttaaccctggcggttcaagagcttgtgccattattctcttcctcatttgctgggtgtttttcttgatcgctgagatgtgtttgcttgcggcatcaatcagaaatgcgtaccacacacagtatagaaagatgtggaaagttgaagatccaccaagctgtgaagttataaggaaaggagtttttgcagctggtgctgcattcacactcttcaccgccattgtctctcagttctactacgtttgctactctcgtgctagagatgcgtacaagaatcgctcctactaaaaat

SEQ ID NO: 139214 - DNA, 376 bp, Arabidopsis thaliana
cggacgcgtggggttcatggtgaattagtggtggcaaaaaagttggtactactgggagaaaaaaaaaaaaaggttaggtgaagctttttagccatagccaataatactactcaattttgcagagacagtgaaatgctgaaattgataaagagagaaaaaaagaagaagaaagaagccatgttttgaggaaggagacatgcatcatctcatccttttatgatttttttccatatcttcaccaaatccatagattctctctccctctgattttttggtaaatttggtcgctatatttgactacttgtactctgctttgagaagaaaaataaaaccatttttgggtgaaaagttagaaaaaaatccaaataactttttt

SEQ ID NO: 139215 - DNA, 264 bp, Arabidopsis thaliana
agatgatctaccaagaagccatagcactcaatccaacatacggttagaagtgcagcagccccgtgaatgcctggtattacccaataaccatccgaatggctacttagtatctttgcctgttcttttattcatgtacttcttccacatatgtaatcttgtaacttttatttgtttgttcatgttatttactgctagtgattaagtgtagctccaatgtaaagtactccagttattaaagaatatctatagacttttttacttcac

SEQ ID NO: 139216 - DNA, 355 bp, Arabidopsis thaliana
ggaatttagaaagcgtgagagatggcgacgaagactgtttggatcatactgttgtgtctatttgttgtttcccaggcagatcagggtttcgatgttcgtcatcacctctccaccgtcaccagatactctacttcgaaagatgttacccaaaatttgattgaagggtcgaatgttcctagtgagtgtacacctatccaccttaaccttgtggctaagcatggaactcgttctccgaccaagaaacgattgcgggaattggaaagtttggctggtaggtttaaggaactggtaagagatgcagaagctaggaaattgccttcagacaaaattcctggatggttgggacaatggaaat

SEQ ID NO: 139217 - DNA, 408 bp, Arabidopsis thaliana
aacgacgaaaggtttggttacttaggtctcccgccaatcgcagccaacgaaccaatcttgtgcttaatttgggaacaaatcgcggttctgatgaccggttcgccggaagataaatcagacgccgccgcgtcgttggcttctttagcaagagataacgatagatacgtgaaactgatagttgaagaaggcggagtcaaccctttgttgaaacttgtaaaagaaggtaaaatcgacggtcaagaaaacgcagcgagaacaatcgggttactgggtcgtgacccggaaagtgttgagcatatgattcagcttggtgtttgttcagtgctttcaagtattcttaaagaaggttcgatgaacgttcaagccgttgtggcttgggctgtttcagagcttgtttctggtaatcac

SEQ ID NO: 139218 - DNA, 352 bp, Arabidopsis thaliana
ggaaaatcttcaactgttcaggctctatttcgtgtgacatctaagaatgatcaaccactcttcacttttgcggttgaaaaggaacaaagtattacagcagctacaataagaaaacagactctcccagagaaggaagactatggacacaagtatacttttttcactgttcaagaagtacagaagaaaaatgcacaatggatgaacaacagcatgaaagtcgaaagccaagagtacacatccaacattgtcgctcagatgagagtctcagatcctaagcctctatttctcgctggagaaagatctgcggaaaacctcttaactagagagtttgtacttgttgcacctgaatcgc

SEQ ID NO: 139219 - DNA, 394 bp, Arabidopsis thaliana
accacgcgtccggtcattttctgctctgtttgttttaaagtcaccctaatatataattggcttttttcggggacctgacgatagagtgaggatttgcctctcaagcaatcagactctgcttcatgtaagttttttgtattcttttgatattttttaattgccgccttatcttatcttatgtgtgacattgtcaatactataatgctgagtattctatattatatagtttgttttatgtgacattaccatattatatcgtttttacgataatgtaaaacgaaatatatttcttctgtttaaatttttattatctgtttgaaagatataatacggttgtgacatgaaaaataatatggttgtgacaatattcaaaaacaatattcatttttttttt

SEQ ID NO: 139220 - DNA, 370 bp, Arabidopsis thaliana
cccacgcgtccgcccacgcgtccggccagtggttgtgttgttgtagttccgttccgtggctgtctttgtttatcatcgtttaatctcaacctcttaaatcggcagccatggcggttcctcatccttcttcttcctcctctagatctcatcctttcctctcccatgtctatcacactagcttccatcatcatcatcatcataatcatccatcgcttgtgctcttctggtgcctcgtgttttctctattatctcctctcgctctctcatcatcatcttcgtcttcttcttcttcctcagactcgtcgtcatcatcgtcctcccatatctctttaggaatcggtgaaacagaagggacgaagcatgatctgca

SEQ ID NO: 139221 - DNA, 380 bp, Arabidopsis thaliana
caaaaacatatatcctcaaattaattagatctcatctatctctaccctcgacatggatcatgaggaaattccatccacgccctcaacgccggcgacaaccccggggactccaggagcgccgctctttggaggattcgaagggaagaggaatggacacaatggtagatacacaccaaagtcacttctcaaaagctgcaaatgtttcagtgttgacaatgaatgggctcttgaagatggaagactccctccggtcacttgctctctccctccccctaacgtttccctctaccgcaagttgggagcagagtttgttgggacattgatcctgatattcgccggaacagcgacggcgatcgtgaaccagaagacagatggagctg

SEQ ID NO: 139222 - DNA, 371 bp, Arabidopsis thaliana
ctccctccggaaaagctacaaccccaatctaaaaccctaacggccatttctaccatcggagctccgaaaatgccgggtatgtcttcggaatctggcggtggagaattggttctgttttcgaccaaggaaaaaactccggtgttgtatcctctaagctatggcctcaagtctccggttcacaggctctccatctcctggggttgcggaaacaacctacgcgtcacggttttaaggaatccagagttacgcgatgatgacgacggagaagttggtggtaaggtcgtaaacgttaggcttagcggcgaggatggcgaaatcagtgacccacagtggcgaaggatcgcttatggatcggtatctccgttcgcgct

SEQ ID NO: 139223 - DNA, 358 bp, Arabidopsis thaliana
gggaaaacaaaaaataagaaaattgtggctggacgactcagcaattcgtcgtcttctttccatatatcttgtttattatttcataactaatccacttcgattctgctttttatataaagttgaggtttttgagctattttttctcctaaaggattccgaaaaaagcttagacctttttgatctgatacgtatctataaatctggaaaggagctgagagtttcaaggggttttaatttcgctgagaaaacgtttaattatctttgtcgagatggattgtggtatggagaattgtaatggtgggatctcaaacggtgacgttttgggtaagcatgagaagctcattatcgatacagaccc

SEQ ID NO: 139224 - DNA, 410 bp, Arabidopsis thaliana
cccacgcgtccgcccacgcgtccggcaaagcctgatgagccaagttgggagagcccttggggtccaggaagaccaggatggcacatcgagtgcagtgcaatgagtgttcattatctgtctccgaaatttgatattcatggaggtggtgcagatcttaaattcccgcatcatgaaaatgagatcgcccagacatgtgctgcatgtgaggatagtggtgtaaattactggttgcataatgggcatgtcactatcaacaacgagaagatggcaaaatcaaagcacaactttaaaacgattagagaaataaccgctagctaccatccattggctctgaggcacttcttgatgagtgcacagtaccggtctcctctgagtttcactgcctcgcagctagagagttcgtcagaagc

SEQ ID NO: 139225 - DNA, 401 bp, Arabidopsis thaliana
cccacgcgtccggccaattctgtattgcctgaatgtcctggagatttatgttctgtctcaaagctacaagatagtccacgtactaagttacgtagaaaagatgcactgcagccttctctttggctctctgaagcgttgtgtctactacgatctgctgctgaagtgatcgaagatggtgatagaggtaaaacagttactccacagggagatggaccaagaaggaaagatcttaaatctgtctctaaaatgctctgggatttctattttcccaagccagaggataaaactctaaaacgtctgtggctaccaccacaatcaatcgtcatgtgggacacccttaagtactctctcatttcaatggaaattggtactcgttttgccaagaattcaatgctgcctgt

SEQ ID NO: 139226 - DNA, 274 bp, Arabidopsis thaliana
cggacgcgtgggcggacgcgtgggcggacgcgtggggttcaagccatcgtcaccggaaagggacctttggagaacctcgccgaccatttggccgacccagtcaacaacaacgcttgggccttcgccaccaacttcgtccccggaaagtgagcggctgcttattatgtgaatgagagcagagaaagagagtttgtttgtggtctattctatgtaaatttgtgaactttcctttgtggtatctttgtatagaaatcgaacctctttttctctaaaa

SEQ ID NO: 139227 - DNA, 399 bp, Arabidopsis thaliana
cccacgcgtccgcggacgcgtgggtggctccattggaaaaaaaaactagaagcagatctgttgaagttaagccgagattcatcaattcgtgttatttgtctctcttgataagcaaaaaacatcgtacgaagaagaagaagatgaccttaattttttctgaatgaaatcttaaaattcccagaaagaagaatgacgaacagctcgtcatcgaagaaacaagctcaagatcagccagaaactagcgaacccactctcaaatctctcaaaaccaagatgactaaatccgacgaaaagcagaagaagcttaaagacattgaaataagcgttccaattgtgtatggtaatgtagcattctggcttggcaagaaggctagtgagtatcaatctcacaagtgggca

SEQ ID NO: 139228 - DNA, 380 bp, Arabidopsis thaliana
gcatcaccaagatgctgacccagactttggttcttgtcaagccaaggaactactggaccatctagaaactgttcttgtgaatgaaccagttattgtgaacagaggccaccaaatcgttgaagttaagcctcagggagtaagcaaagggcttgtcaccgggaaaattcttagccgaatgcttgaagatgggatagcgccagattttgtggtatgcattggggatgatagatcagacgaggagatgtttgaaaacatatcaacaaccctctcagctcaatcatcgtcaatgtctacagagatattcgcgtgtactgtgggaagaaaaccgagcaaagccaaatacttcctcgatgaagtaagccacgtggtgaagttgcttc

SEQ ID NO: 139229 - DNA, 406 bp, Arabidopsis thaliana
aaactcttttgttcgaaagtccaaatactctctgtttttactcttatgatatgttcgactactcaagtttcttctctcccctgttttcattccacaagctactgaaagacatcaccctacaagcctatgagaggtttatggggaacacaaaatgaaaatggagactgatccgatccgtcacattcatataactttaaaggtgctggctagagactgagtaatgatgatggagttcacgaagggagaatgttacggaatagagaaatcaaaatttgaaggtgctagacgggtaataatgatttgagtatagggatatttacaaatgcttgtaagatgtgtgatgagaggatgtatgtgtagtgtgtgtaaacgtatcattgtatagatgagataaatgtgcaagttg

SEQ ID NO: 139230 - DNA, 345 bp, Arabidopsis thaliana
acccacgcgtccggtttgaacggtcctcagaaattcggagcttgtagcttctcggtgcggtgccttcactttaatggcggcaatatcccctgttcaatgcttattctcttgcaattctcatcatcatcatcaacaacgcgagcagagtgggtcgctttggagattgggttctagggttttagtatcttcgagtctatggaagctttctctgttctctggactccatttgaaccgaaggtgattatgttctagttaacgatttcagtaggatttggcccttgaagcgatgattctgtgtaatgcagttggatatgagataattgattgcaatcttttgggtctaat

SEQ ID NO: 139231 - DNA, 319 bp, Arabidopsis thaliana
ctctgagttgactcgaccgagaaaaggcgatagagctggggtttaattcggcgataacaatggacgaagattccgtccatggcgattctcacctcaagacatgtgtcgtcctcggcggacgagggttcattggtcgatcgcttgtctccagattgcttcgtctcggaaactggacagtccgagtcgcagattccggtcacactctccatcttgatgaatccgattcgctcctcgaggatgctctctcctccggccgcgcttcttatcactgcgtcgatgttcgtgatagacctcagatcgttaaagttacccagggttc

SEQ ID NO: 139232 - DNA, 388 bp, Arabidopsis thaliana
acgaacttcgacatcatttctcttttctctcatcgctcggtgaattcgaggatcctcgagctttttgatcggagactttttctctcatcgtcgttgtttgaattctccggctgagagatgcttgcttgacgacgaatctccaccgatcttttaccttttcgcacaacaagtaagagaaggatgtcgactccagcgaggaagagattgatgagggatttcaagaggttgcagcaagacccacctgcaggaattagtggtgctccacaagacaacaatatcatgttgtggaatgctgttatattcgggcctgatgataccccttgggatggaggtactttcaaattgtcactgcagttttcggaagattatccaaataaaccaccaacag

SEQ ID NO: 139233 - DNA, 380 bp, Arabidopsis thaliana
cggacgcgtgggtggatatgtgaacaatgagtataatgatggaggtatggagcaggaccggtcatatggcagaggacgcgggcgtgggagaggaggtggacgtggtggtcgaggaagaggaggctgctaaggaccttacatttggttatgtcaagattgatgacgatgaagaacacggaaaagagaaaaagaaacgaaggctttcaaaggcaagagaacttgaaagggctatgaagttagaggctgcaaagaaggatccagaaaaaggtgatgtaattgcaaagaagcactcatggaaggcagctacaagcagagcagctggtatcaaggttcatgatgacccaaagctattgaagcaaagcatccacaaagacaaaaag

SEQ ID NO: 139234 - DNA, 350 bp, Arabidopsis thaliana
ccgatctgaattccggcgatcaaattacgacagcgactaattcaacgttttaaattactctgtgtgagagaaatttgcgtgtgtatcgtgataaagctagctcgatcgcgatgatcttagaaactcagaggaatgttgaattccctcatcggatcgttgataagcgtcccaggaaacgtccccgattgacttgggatgctgctccgcctcttcttcctcctcctcctccacccacggtatttcaacctccgttgtactatggtccggagtttgcgagtggtttagttcccaattttgtttacccaaacatgttctataatggccttcctcgtcagggctctcctccctgg

SEQ ID NO: 139235 - DNA, 376 bp, Arabidopsis thaliana
acggacactcgggaaagatcatgagctccggtgagtgggttacaagaaaacttcttggatctgttcctcatgatataggtctaaacgatccgtggctagaactaaacgaatataacttcttcaacacggatcgttggaaagacttgaacgccaagtttgttcttcaagtctacagagacgtggttgctactaacgatcagagttttgctaaagcggtttggccgtctgtttacacagcagttgcttacttagatcagttcgataaggacgaggacgggatgatcgaaaacgaagggtttccggatcagacatatgatgcttggagtgttacaggggttagtgcttattgtggcggtctttgggtcgctgctctaca

SEQ ID NO: 139236 - DNA, 393 bp, Arabidopsis thaliana
cgtaatacttgctcttacttatctcttgggtttctcatgaacaaaagtaaattcttgtggcggttagctaaagcgcctatgtttagtcctggaacaacggtggaagtgagttctaagataaataacaaagaagtcgtttgggttcctgcagtggttattaaagagtttaaggaagatgatgagtataagtatattgtcagggtttatgataagtccttcagctgcaagggtaataaggctgcaagactcaacaaaaccgttgatttgtgtagtcttaggcctacaccgccttctatttcggttgaagagtatcaattaaaggaatacgtagaggtgtttcatgatggtatgggatggcgtcaaggacgagtgatgaaaattcaagaacgagtg

SEQ ID NO: 139237 - DNA, 391 bp, Arabidopsis thaliana
gttaagcactactctccccctccagtctaccattccccaccaccaccaaagaaacattacgtatacaagtcccctcctcctccggttaagcactactctcctcctccggtttaccactctccaccaccaccaaaggaaaagtacgtgtacaaatcacctcctcctcctccagtacaccactactctccaccacaccatccttacctctacaaatctcctcctcctccataccactattagatatctctatcacggagaacacgatgtacacaagaagacaaagacaagacgaaaccagtactggtgattgtaataagagaaacaaaagatgaaagagagaatccaagcagagaaagctttctcatcattttcaaagtattgtttgcgtttt

SEQ ID NO: 139238 - DNA, 360 bp, Arabidopsis thaliana
aaaacttgaaagaagagtagtagttagaacgtcagagagctagctacttcgaaggaaggtttcattcatcgaaaatggcagctttattattaaataatcggtcaaactctgcctcccaatccaaagtctaaaacctttccttcttctttctttacaaatccaacaatctcaatgtctccaaatccataactttcttcgatccccttgttcttcctctgtctgctgttacattttttacaaaaccctaatcaaacccattttcttctatcaatcttaaccctagaatcaaataaagactcaatctttctttgctttgctctgttctgctctgtttttgctctgtttttataatggcttgtt

SEQ ID NO: 139239 - DNA, 410 bp, Arabidopsis thaliana
ctttatttctctctacaaatttcatttgttccattttctcaattttagaacttaagaaacccaaaaagcaaatttttagtacattttctggtttaactaaagtaattaatttttgtgttttccatcaaaattccactggttttctttagaatttttttatctctctttaagacatgaactgtctgttcttgttcaaatcaaagaaacccagaaagcaacagaaagacaacaacaagaacaaaagaaaaggtaaagagttgttacaaaactcagctccagaactgacgaatcggagtgaaacgtcttcgtttaatctccagacaccaagatcgttgccttctccaagaagtatcaaagatttgtatacagagagagaacaaaatcttagggttttttcttacgaagaactc

SEQ ID NO: 139240 - DNA, 356 bp, Arabidopsis thaliana
ctcttgttcccatgatcttcgtcgatgttctttggaaattgtttcctctatactcgtttggatcaggaagagactctctctcagagtccattttgcagatcattcccgagacaatggcttcttctaccactaaaatcctctgtgatgctggcgaatcagacctctgtagagacgattctgctgcatttctccttaagtttgtagccattgcctccattctactagctggagctgctggtgtagccatacctctcattggcaggaaccgccggtttcttcaaaccgagggaaatctctttgtagctgctaaagcctttgcagctggtgtcatactcgccaccggctttgtccatatg

SEQ ID NO: 139241 - DNA, 307 bp, Arabidopsis thaliana
gggtgtcaagtgttcgaaggaagttgctactgccattagaggagctattattcatgctaagctatcagtggttccggtgatggtggaagttacggaggcggtggtggcggctggtaatcaaagatagagttgtttgcgtgctgctgctctgtttttggcttacatttggctttgtgtcaccacttctggtttggttatcgttcgtttggcttacttttttgatgaaacagtttcgtttaagtcttctttgtctggaacgaaatgttaattcacgtgttgtttactacatttataacgtttcctttta

SEQ ID NO: 139242 - DNA, 453 bp, Arabidopsis thaliana
gccttctttgatcgtaaagactcacaaaaaggaaactctgggattctcaattctaatcccaactcgaatccaagctcgcaacggttcttactaaaatccaaagcgtcgatcatcggtttgcctaaaccgcagaaaacgtgtttcaacgaggcaaagcaacggagacacgcgggcaagaaccgggtcatcttgaaacgggtcgggtcaaggataaagacggatatttcgcttctggaaccttcttctcctaaagtctcttgcatcggtagagtgagatccagaagagaacgcagccgccgtatgcaccgtcaaaaatcaagtcgggtcgaaccggtaaaccgggttaagaaacccgggtttatggcgagtttcagagctattttcaggatcaaaggcggctgcaaagacgtgtcagcgcgtgagactcacacgtcgacgagaaacacacacgac

SEQ ID NO: 139243 - DNA, 441 bp, Arabidopsis thaliana
cacaagtaccatggacgagatccaaatagcttcaatcctcaaatcatctgagctttttccgattccacaaggcgtcaagctttcgtatggaacagctggattcagaggcgatgcaaagttattggaatcaactgtgtatagagttgggattctctcagctctccgatcacttaagcttggatcagccaccgtcgggcttatgatcacagcttcgcataacaaagtctctgacaatggcattaaagtttcagatccatctggttttatgctttctcaggaatgggagccttttgcagatcagatcgctaacgcatcttctcctgaagaactcgtttcgttgattagaaaattcatggagaaggaagagattgcaatcggagagaataataaaggtgcagaggtttggttgggaagagatactagacctagtggtgaatcact

SEQ ID NO: 139244 - DNA, 311 bp, Arabidopsis thaliana
agagcagatgaagccatgcgccgcaaactcgccgccgttgacgccgataggtttcttagagagagccgccaccgtttacggtgactgtacctccatcgtttatggcagcaacaccgtttacacgtggcgtgaaacaaacctccgttgtctccgcgtggcgtcttctctgtcttcaatcggaatcggtaggtctgacgtactctctgttctctctctcaatactccggctatgtacgagctccagtttgctgttcccatgtccggcgcaatcctcaacaacatcaacactcgcctcgacgcacgcaccgtct

SEQ ID NO: 139245 - DNA, 447 bp, Arabidopsis thaliana
cggacgcgtgggcggacgcttggggaagaaactacaatagttaatcaatcaaagagaagtaagagaaatggcagattctaactgtggatgtggctcctcctgcaaatgtggtgactcttgcagttgcgagaagaactacaacaaggagtgcgacaactgtagctgtggatcaaactgcagctgtgggtcaaactgtaactgttgatgaaattattatggtctaaaatcatatatatggcagaaaaattggggaaaatatgtgttttatgctaagagatgtgtgtgtgttgttggaataaagacgtgaccgttgtgttgcgtatcaactctcttaagctttgacttttcccagctttgtattttcctatgtatggtaatggtgtgattgtgtaatgttttcatatgtaacgtaaaaaaaatatttatgtgacattgacttttgtgact

SEQ ID NO: 139246 - DNA, 449 bp, Arabidopsis thaliana; identical to SEQ ID NO: 125096

SEQ ID NO: 139247 - DNA, 437 bp, Arabidopsis thaliana; identical to SEQ ID NO: 124932

SEQ ID NO: 139248 - DNA, 450 bp, Arabidopsis thaliana
cccacgcgtccggcgttgaccaaatctctcactctcaccagccaaatctctccaacttcctctttctctccacccaaatctcgccggcgatcgtcactgacgaatctgattcgtccccaacactcaacgggaggtagaagaatggcgactcctgttgatccacctaatggaattaggaatcaagggaagcattacttctcaatgtggcaaacacttttcgagatcgataccaaatacgtgcctatcaaaccgataggccgaggcgcgtacggtgtggtttgctcttcggttaacagagagagtaatgagagagtggcgatcaagaagatccacaatgtgtttgagaataggattgatgcgttgaggactcttagggagctcaagcttctacgtcatcttcgacatgagaatgtggttgctcttaaagatgtaatgatggctaatcataag

SEQ ID NO: 139249 - DNA, 451 bp, Arabidopsis thaliana
cggacgcgtggggagaagctccacgttctctcatacccacactccaagaacgacgctagcgttccggtgttcgtcatgttaccgctcgacacagtaacaatgtcagggcatttgaacaaaccacgagccatgaacgctagtttgatggccctgaaaggagctggtgtggaaggtgtgatggtggatgcttggtggggattggtggagaaagatggacctatgaattataactgggaaggctatgccgagcttatacagatggttcaaaagcacggtctcaaactccaggtcgttatgtcattccatcaatgtggaggaaacgtaggagactcttgcagtatccccttgcctccatgggtgcttgaagagatcagcaagaaccctgatcttgtctacacagacaaatctgggagaaggaaccctgaatatatctccttgggatgtgattctg

SEQ ID NO: 139250 - DNA, 335 bp, Arabidopsis thaliana
ctaacttacgcttcaatggcgactccaactccatctctatctcctcctccattgaatctctggataatcttatcagaatcaaaacgaatcaatcatccgcttctcacaacaccgtctctctcctccgcggcggactccacaacaacaacgatgatgacatcgataccaaaacaacggtcttacttgtaatcggttacatcgttgttatcaccgtcttcaatctcttagctattggatcaatcgcttatagtgtgtttcaaggattccatggtagacctgtgaaattgaactctgcagtgaaatcgagcttcgcttcgtttttacctcttctcgct

SEQ ID NO: 139251 - DNA, 388 bp, Arabidopsis thaliana
cttaacggttacgacttgacccaatcccctgactctgaaacgttctttgatttttgacccatgaccagaatttttgttgattctttaaaatttctgacttgtcatcaacattaacatctttaatacactactactatagtatatagtataatcttgctacggtgacgcaagcgtgcgtttgactctctcttaaaatcccacctccactcactttctctcttcacctttcacttagcatcatcttcactttcccgcattttctctgcccagattttctctgattcttttgttgtttttttctgatggggagagatgaaacagagacgtacattacagtgccaagtttcttcaaatgtccgatatctcttgacgtgatgagatctccggt

SEQ ID NO: 139252 - DNA, 286 bp, Arabidopsis thaliana
cggacgcgtgggaaagacgaacacttacaaacaattatctctttgtgagctttagcgatcgtaacaatggccaacgacgtgattcttcttgagattctggcctattaggttcgggatgacgacacggatcgcattgagggagaatcgtcatgcatttcagtacagagatcaagatctaaggaacaggaatcctttgcttctccatatgaatccgattcacaataagattcctgttctcatccacaatggtaaaccggttaacgaatccatcatccatgttcagtac

SEQ ID NO: 139253 - DNA, 392 bp, Arabidopsis thaliana
ccaacgcgtccggaaagcttttgacaatgggccacagacacagcaagtccaaatcctccgatccgccaccgtcctcctcctcctcttcctccggcaacgtagtccaccatgttaaacctgccggagaacgccgcggatcatccggttccggaaccgtcggatcgtcaggctccggaacaggcggatctcgttccaccacatctactcagcagaatggtcggatcttaggtcggccgatggaggaagtacggagaacctatgagtttggtcgtgagcttggtcgtggccagtttggtgtcacgtacctcgtaactcacaaagagacgaaacaacaggtcgcttgcaagtcaatccctacgcgccgccttgttcacaaagacgacattgaagat

SEQ ID NO: 139254 - DNA, 299 bp, Arabidopsis thaliana
ggagtttggagtcaaaatccagagcgcggggaaacgaaacgagccaacaaatccgccatggcagctcgtaagagagcttcatcgatctcaattcccaacaaaccggacccgtcggaacccaactcagcgccatcggagcagaagatgacccgaaagacggtttctgcttccggtgaggaatttcgtctcgcgccgccgaaattaggagtgatcttcgtgatctctactcttctctgttcgctctatctataccttctctgttttcactacaaggttgataatgagctcaagcgatcgat

SEQ ID NO: 139255 - DNA, 390 bp, Arabidopsis thaliana
gaagaaggagaatatgggtttgagaactgataatattatggcttcgtttcgaggtggaatcggggtttctaatggctgagtcaactcggtgattctgtgttatagtcacgagcaaatataaaaaagtttgtaactttcttgtttttttaggtgtgtgtgttcagagaaaaggtcgaatcttttttcggtgtttgtaaaagggaaagttgtaatcttaaagtctgtttttctttcttgtgttttggtatttagctcataaaagccgaggagtaatataaaggataggttttgtctttgtgtgcccttttgagattgcatgaagaagaaaagcctctagtgtgttttgaaggaaacagaattcgatatttatgcggtaatgtgatttgtgaa

SEQ ID NO: 139256 - DNA, 295 bp, Arabidopsis thaliana
acccacgcgtccggatgattcctcggagacatctggcgagaaacaagtagatagatctgttaaaccaagcaccttgcactctccagtgcttaagaactatctcatcgatgccactaccagcaatgatgactcaacatctgcaagtatgactcaaaagaacccagaagaagaagattggaaggatcggctgtattcaggaattgcgttggatggaaagaatcagaaatctcttgaaggtataaggatcttgctggcagaggatacacccgttcttcaacgagtagccgacataatg

SEQ ID NO: 139257 - DNA, 389 bp, Arabidopsis thaliana
  unsure (1)..(389): unsure at all n locations
cacaaagctttctctctcaaatccgccatgactaaacagcacgcgaactggtctccttacgataacaatggaggaacatgtgtggccatcgctggatcggattactgtgttatcgccgccgatactcggatgtctactggttacagtattcttagtcgcgattactccaaaatccataaactagcggacagagctgttttgtcttcctctggcttccaggctgatgtgaaagctttgcagaaggttctcaaatccagacacttgatctatcaacatcagcataacaagcagatgagctgtcctgcaatggcccagcttctctccaacacgctttatttcaagcggtttttcccctactatgcctttaatgttctangagggcttgacga

SEQ ID NO: 139258 - DNA, 355 bp, Arabidopsis thaliana
tccgctgacttcgcctttcagcggtgaagaaggtttaactgagatggttgaatctcctgagatggggaagaatctatgcgtatcgaacattttccataaagcgtgtatcgaagtgaatgaagaaggaacagaagctgcagctgcatcagctggagttataaagctaagaggattgcttatggaggaagatgaaatagattttgttgcagaccatccgtttctattggtggtcacagagaacataacaggagtggttctgttcattggccaagttctagatcgcgagcggccgccctttttttttttttttatgtatcactattattcttacacacatcaaagagtcaagacaaag

SEQ ID NO: 139259 - DNA, 385 bp, Arabidopsis thaliana
aggtggtgttttaaatctgatgtggaaatttacttctggtaatgatattctgctaccagcatttagctcttctgccacaaattttgctacattgggaagaatagccgagctcaaatccaatctgcaggctatggttacttcggccgagtggaatgaatgttcatattcggaagaaccaagtggattggtgatgaatgctctcactgatgaagccttttggaatgcagtagctttggtaaaccatttaactagtcctcttttgcgggctttgagaatagtttgttctgaaaagagacctgcaatggggtatgtctatgcagcattgtaccgagcaaaggatgcaatcaagacacatctggttaataaggaggattacataatatac

SEQ ID NO: 139260 - DNA, 213 bp, Arabidopsis thaliana
ccagcgcgtccgcggacgcgtgggcggacgcgtgggcggacgcgtggggcttgctcttgttgatagggaaagcacggaacgagaggccttgggagctctaccactataccagcgcacactcccataagcattcctttccccttttcttgtggtcaacgctgcttctctgcataaatctgcaacattgatattttggtgctcactttctgaaca

SEQ ID NO: 139261 - DNA, 387 bp, Arabidopsis thaliana
cagacgcgtgggcggacgcgtgggggtcacaactgcactccctactgttgagttagatccaccaacaatttctatgacgtttggtgtcaatgactctccgttggctggtcaggatggcacccacttaactggaggaagaatcggggaccggttaatggcagaagctgaaacaaatcttgccataaacgttattccaggcttgtcagagtcatatgaagtccaagggagaggagaacttcaacttggtatcttgattgagaatatgaggcgggaaggttttgagctctcagtctcaccacctaaagtcatgtataaaactgaaaagggacaaaagcttgaaccaattgaagaggtgactattgagattaatgatgaacacgtaggatt

SEQ ID NO: 139262 - DNA, 390 bp, Arabidopsis thaliana
cggacgcgtgggcggacgcgtgggctggccatgtggtcctggtcaagagtttttcatttatgcacacgaacaacgcggctatttcaccttttggcagcacatggaaaatgcgtacccgggctccaacattctggtggtgacgttgaccaacgaacaatcaaagcgcgttgaagctcaatcagaccaggagacgatgaaagaggcaatgagtgttctcagggacatgtttggggccaccattccttacgcaaccgatattcttgtccccaggtggtggaacaaccggtttcaacgcggtagctacagtaattaccctatgatatctgataatcagcttctgcaaaatatcaaggccccagttggacggatattctttacaggagaacacac

SEQ ID NO: 139263 - DNA, 300 bp, Arabidopsis thaliana
atttcctcaaaatccatttcgcttccgacgccattctcagtcggtgtgaacgcgtgagagaaagagagagatttggcttactttatctccggcgggcatctttttccggcggagtttccgatgtatctactctagctaagctcagctcttaactgttacaggcagatccacagtgcctgttgattgtttcttcctatcatcaatctcggaatttgagggggtcgtattattaaggggaccataatgaatgaactccgatgcagaaaggctcaaaagattgaaagtccagttccaggatgc

SEQ ID NO: 139264 - DNA, 323 bp, Arabidopsis thaliana
agtagtccgagttatggacaaagaagcaacaattcttccaagatggcgttaaaagagagattcagaggttttaatgccagctttgaagagttatacaggctgcaaacggcttggaaggtcccggatcctcaacttcgtgaagaactgagaatatctatatcagagaaagtaatcccggcttaccgggctttcttcggaaggaataggagtcaactagaaggtggtaggcatgctggaaagtacataaagtacacaccagatgacctggagagttacttaccagacctatttgaaggaaatcaattggttattcaccacccgag

SEQ ID NO: 139265 - DNA, 365 bp, Arabidopsis thaliana
aagaagacgggaagtcctatgcggaacaagaatcgctctgcttcatggaaacatctgcccttgaagctaccaatgtggaggacgcatttgcagaggtgttgacacaaatttatcgcatcacaagcaagaagcaagtggaagctggtgaagatgggaacgcctctgtcccgaaaggtgagaaaatcgaagttaaaaacgatgtctctgcgctgaagaaactcgggtgctgctcaaattgaagcctttttttgttttcactgttgagagagaattataacccccatggtccattgtttgattatgtccttgttttgtaacactatcgacatttgtatgagttttagaccatacactacataatgttt

SEQ ID NO: 139266 - DNA, 390 bp, Arabidopsis thaliana
gagacgctaggacgaagcagaagacaaaggttgataaagattgcggcaccaaacctaaatggaagcatcaaatgaagctcaccgtcgatgacgcagcggcgcgtgacaatcgtcttactcttgttttcgagatcgtggcggatcgtcccatcgctggtgataaacctgtcggtgaggttagcgttccggtgaaggagcttttggatcagaataaaggtgacgaggagaaaacggttacttacgccgtgaggttgcctaacgggaaggcgaaaggatctctcaaattctcgttcaaatttggggaaaagtatacttatggatcttcgagtggtcctcacgcgccggtcccttcggctatggatcataagactatggattagcccgtcaccg

SEQ ID NO: 139267 - DNA, 373 bp, Arabidopsis thaliana
acaacaccgcatagaaatcagacggcagtgttggatcggaggattttgatctgtggagacgaatatgaaaggtgaaacttatcgagtgttctgtgtcggaaccgccgataccaagcttgatgagctacgattccttgctggatcagtgcgatcaaatatcggcgcattctccaaaaactcgtcttccaaggttgaggttgtgattgtggatgtttcggcgggtgctgatcagaagcatatcgataatgttgcagactttgcgtttgtaacaagagaagaagttctctcatgctacattggatcgaaccaggacgaaaaaccggttaaacttccggatgatagaggcgacgcagttggtgtcatgagcaaatgt

SEQ ID NO: 139268 - DNA, 249 bp, Arabidopsis thaliana
acatatccatagcgaaagccagatgatccattggttccagacattgctcagatgtccaaaaccgacatagcaccgtatgaatctactgctagaagctggactcagaagtatgcaatgggatgaaagtttgtgtcctttgatccctcatagactcggttttaatagacagagagagagaatgagagaggacttcttcacatacggatgttccatgaactaagttagattcgtatgttttatcatcacttt

SEQ ID NO: 139269 - DNA, 374 bp, Arabidopsis thaliana
cccattcttaattatactcaacacacattatatttttctgatcatatcattctttcagtccatctatataaccaattcttgatttatacttaaaacacacattatacatctttctcatcatagtttgtatcaatttcctagagtaaactacctaaaggaaaaaaaaatctattttgggaatcatatactaaaaatggaaggaagagatatgttaagttgggagcaaaagacattgctaagcgagcttatcaatggatttgatgcggccaaaaagcttcaggcacgacttagagaagctccgtcgccgtcgtcatcattttcatcaccggcgacggctgttgctgagactaacgagattctggtgaagcagatag

SEQ ID NO: 139270 - DNA, 389 bp, Arabidopsis thaliana
gtggtggcgagatcttggatcatcttcgcttggccgcttgggcggtggtcgtcggcatcgtcactaattaattattgtgattaagaaaaaatgctaaattgagtttcgtcgtcttctgcttctgcttaagcttcttcatcatttagctccagaggcggagctttcttctctctctgtggacgaccatggcggcggacgacggcgaccccactaaattcgctgcaatctacgactcatcctctccgtcacaccctcttctctctaaaccctccacgtccgctctcgattctccgcgtcgaagtgatcccgaatccgacccaactcagtttcttcagatctcctacaattttggcccaagaactttcaaggacatccctttcctacttctc

SEQ ID NO: 139271 - DNA, 210 bp, Arabidopsis thaliana
tcacgtggcgtcaggctcttgtccgagaccaacccgctcacgggagaccaaggggagatcaggaaggattgtcgttatgtgaactaatattgatggtccttgcataaaggatatatattgtggaaaagtaataataataatatatatgtgtatgaatgtctgtcaatgttttggattcaataagaagaaataccaaaaccgttgtggatc

SEQ ID NO: 139272 - DNA, 417 bp, Arabidopsis thaliana
aacacagagaacagagagagagagagagactccattgttgaagtgtgttcactgaactcctcctcaaacaacaatggcgacgacggttacactcaaatccttcaccggacttcgtcaatcatcaacggagcaaacaaacttcgtctctcatgtaccgtcatcactttctctccctcaacgacggacctctctccgagtaaccgcagccagagccactcccaaactctccaaccgtaaactccgtgtcgccgtcatcggtggtggaccagcaggcggggcagctgcagagactctagcacaaggaggaatcgagacgattctcatcgagcgtaagatggacaattgcaagccttgcggtggcgcgattcctctctgtatggtcggagaattcaacttgccgttggatattattgatcg

SEQ ID NO: 139273 - DNA, 414 bp, Arabidopsis thaliana
caaaactctgaatttcgatttcaatggagtcacgcgtgctgttacgcgccaccgcgaatgtcgttggaattccgaaattgagacgaccaatcggagcgatccaccgtcaattcagcactgcatcgtcttcctcgttctcggttaaaccaatcggaggaatcggagagggagcgaatctgatctccggtcgtcagcttcgtccaattcttcttctcgattcgtcggcgatcaacggaggagagaaaagagaaattctcaaaccggttaaagccgccgctgctgaaggtggagataccgctggggatgctaaagttggattcctcgccaagtatccatggctagtcactggattcttcttcttcatgtggtacttcttgaatgtgattttcaacatccttaacaagaagatctata

SEQ ID NO: 139274 - DNA, 416 bp, Arabidopsis thaliana
cacaaaccctagatctaaccccagccgtcagatcagattgatcgggcaatcgcttctagaccgttggaatcaagcaatggtagaggtagaatcgtatttgtgggtatctagaagaggcgttaggattgtctccaagctgggtgttttttcatcttgatggccaactaatcgaatctcctactctaaagatatttttgtttatttctgtcatgtgtgatttggtcgcgcgtacgggtcgtctccagcagcggtacgaggatggctctcgtctcgtcgccgggtgtattccgtttaggtatgtaaattctgacaaagatggtaattctgaatctgggaaagtgattcaagtgttgatgatcagctcgtctagtggacctggacttttgtttcccaagggaggatgggagaatgatgag

SEQ ID NO: 139275 - DNA, 283 bp, Arabidopsis thaliana
tggtgagggtaagtgctggttttgggactggaagagctgcaaagtgtttaggactcttaaatgtcacaatggagtatgcattggagccgagtggcatcctctggaacagagtaaagtcgcaacttgtggttgggacggcttgattaagtactgggactaagacaagcagaggcatttcggagaaagagagagtagaaggcacagaaatcacggcctagcctgggctatacggaatgctgcatctttgggatacaaagcccctttgagttttgctttccgctgt

SEQ ID NO: 139276 - DNA, 423 bp, Arabidopsis thaliana
  unsure (1)..(423): unsure at all n locations
caaacgcgtccgctccacaatcactctaaagctgtttcaacaggcacaatgaccattggcttactcacaactgttctctcggttgtttattctgctgttcgtgctggttcttccactactcttctctcccctcctgattctcctcgcgcagagaagcctctgcttccgatagacgggaaagcagaagagaaggaagagaaagagaataaaaaaccagtttcatactcatacgcattcttccacatcatcttctcccttgcgagcatgtactctgcaatgctcctaaccggctggtcaacttcagttggtgaaagtggtaagctggtggatgtcgggtggccttcagtgtgggtccgtgttgtgaccagctgggccactgctggtctcttcatctggtcncttgttgctcccattctcttcccc

SEQ ID NO: 139277 - DNA, 414 bp, Arabidopsis thaliana
caaaaaacctctcactgcaaagtgccaacaaacaacaagtcttcaccttcttcttcttcttcttcttcaaaatctcttgtacgcaaataatccatgagaaactagggtttaacttgagatctctcttccgaagtattaccatcaatggcgacttcttcttcttcatcgtcgtctctgcttttaccaaacatcaatttcaactcaagacaatctccaacaatcactcgttccgtttcaatcgccgggatcttcttacccagaaaccgattaagctacaatcacaatctccggattcgtacgagattaatcagagcttctaaagacgataatgtcgctgttgaagatcgtgataatgcagtgaagatcaacggtgattacaacggaagtgcacgtttaaacggtaacggctctgcg

SEQ ID NO: 139278 - DNA, 417 bp, Arabidopsis thaliana
cactaatcaaaaagcttttaacctcagccgttaaatctttctccgatcatgccgaccagaaacatcgccattggtggagtccaagaagaggtctatcaccccaacgcacttagggcggcgctcgctgagtttatctcgactttgatcttcgtcttcgccggctcaggctccggaattgctttcaacaagatcactgacaatggagcaaccactccttccggcctcgtcgccgctgccttagctcatgctttcggtctctttgtcgctgtctctgttggcgctaacatttccggtggccacgttaaccctgccgttaccttcggtgtcttactcggtggtaacatcactctcctccgtggtattctctactggattgctcagcttcttggctccgtcgccgcttgtttcctccttagc

SEQ ID NO: 139279 - DNA, 416 bp, Arabidopsis thaliana
caaatcttaaacgttttactttgtgctgcactactcaacctcaatggccgcctcaacaatggctctctcctcccctgccttcgccggtaaggccgtcaagctttcccccgcggcatctgaagtccttggaagcggccgtgtgacaatgaggaagactgttgccaagccaaagggcccatcaggcagcccatggtacggatctgaccgtgtcaagtacttgggtccattctctggcgaatcaccgagctaccttaccggagagttccccggagactacggatgggacaccgccggactttcagctgaccccgagacattcgcaaggaaccgtgaactagaagttatccacagcaggtgggccatgctcggagccctaagctgcgtcttccctgagcttttggctagaaacggagtca

SEQ ID NO: 139280 - DNA, 352 bp, Arabidopsis thaliana
aaatttctaaaaactgcttttatctccaagaagttgaaaaagatggatcttagtggttgtagagatataatcagtagtttaccagaagccattagttgccatatcctatccttccttcccactaaagaagctgcttccacttcggttctttcgaagaaatggcggtatctctttgcttttgtccctaatcttgatttagatgaatctgtttatctgaatcctgagaatgagacggaagtttcttcaagttttatggattttgtggatagagtgttggcattgcaaggcaattctccattacataagttctctctaaagatcggagatggcgttgaaccagaccgtatcattc

SEQ ID NO: 139281 - DNA, 136 bp, Arabidopsis thaliana
agtaattggtgtcgtcacatgaacattcatcctttacacgacaaacacaacagaaactctgacattgttgctaaaactctattatcacagagaataaacaagtttcgttgaatcccacaaaactttttggttccct

SEQ ID NO: 139282 - DNA, 223 bp, Arabidopsis thaliana
attcccggggccgacccacgacgtccagatacacactacctaataaaccatgtaagcttcttagtgctccgcctttgctttttctattcagctttggcgacttcgtaaaggtgacgaagtttggtttgtgacagagaacgaagccattcacactgtaaccaagactagaacttttcaacgagtggcgaatttcgaagaaaggcttcatccttcggtgttgcat

SEQ ID NO: 139283 - DNA, 335 bp, Arabidopsis thaliana
aaggagtatcttcacttcgatattgttcctccggttgttcatagagatataacttcgtcgaatatctttgtggagaaggatatgaaaatcaaagtcggagactttggtctctctaggctcttggtgttttcagagacgactgtgaattcagctacttcgtctgattacgtttgtaccggaccacaaggtacgcccggttatttagacccggattatcaccggtcttttcggttaacggagaaaagtgacgtgtatagctacggtgtcgttttgatggagttgattacgggtatgaaagcggttgatcaacgacgtgagaagagggacatggcttt

SEQ ID NO: 139284 - DNA, 111 bp, Arabidopsis thaliana
acttatcccaatcttatctcagcccttttgactatgacactttagtctttactttgctcacagctttggatcaccaaaattcatcctcaagagagactttgtggccatggc

SEQ ID NO: 139285 - DNA, 340 bp, Arabidopsis thaliana
gcgtccgaacacattgagatcttcacccttatcacttgatccaaccatggctcggctccttctcctcgtgcttctgcatccttagtctagtcgattacgcttcttgttccagacacgaagatgagagaaaccgaatctttcaacttcccggtgaagcaaacgatgtctccttctctcacgtctctggttagattacggtcaacgagtcagcacgaagagcactattctactgggtcactgagtcaccatcgagtgaaaaccctgagtctaagcctcctgtcctctggctcaacggtggacctggttgttcctgcgtagcttacggtgccgctgaagaaat

SEQ ID NO: 139286 - DNA, 438 bp, Arabidopsis thaliana
cacgtctctctctatctccttagattttcaaagttttcaacattcaacaaaatcattattttaattttgcagagacgaatcgaatcgatctcatctccaaaaatcttgtattcaaagtttgattttctgggtttcttctgtattatctcgatatttgaaaaaaatggcgaaggaaattgaatcagcgacagatttaggtgatactaacatcaaaggagttcttgttcatggaggaagatattttcaatacaatgtttatggaaacttgtttgaagtttctaataagtatgttcctcctattcgacctattggtagaggagcttacggttttgtctgtgctgcagtagattcggagacacacgaagagattgcgataaagaagataggtaaagcctttgataataaagtagatgcaaagagaacattgagagagattaa

SEQ ID NO: 139287 - DNA, 364 bp, Arabidopsis thaliana
ccacgcgtcagcacacgcgtccggaaaaatattgcggggattacaaaaatcattatcaagattctaggtagtaatccgagtcccggtggctcttacgtgatttttaataactatgactggtggaaagatatgacaatgctcgactttctgaacaaagtcggtaggtttgctagggttggtactatgatggcaaaggagagtgtgaagaagagattataatcagagcaaggtatgagctacaccgagttcacttatcagttgttgcaagcctatgattttcttcacctgttcaagaacgaatggatcaatgttcagataggtggcagtgatcaatgggggaatataacagctggaactgatttga

SEQ ID NO: 139288 - DNA, 388 bp, Arabidopsis thaliana
cgatcttgtctgtggcaaaaagatgaatttcattggtgattctgtagccagaaaccacatggagtctcttctctgcctcctgtcaatggaagaaactccgaaagatatctacctcatggcaaagtttctagtggccggactcgaaaggactcatgctaagaagaccggaacaggaatctatgatctcgacattgacaagcgagcaatgggcaattgatctgctaaatacagacattgccattgccattggaaatcttaacatctcagatagaacagcttgaagatatttaaacgtgacagcttaaaaaagaagaagtttgaggttttggatgtgactaaggttatgctaatgagaccagacgggcacccgaattcttactggggaaat

SEQ ID NO: 139289 - DNA, 424 bp, Arabidopsis thaliana
agcacacgcgtccgcccacgcgtccgcgctctctcaaaagtcgaatatcccaaattcgatccgttttccggcgataatctccgatctagatccgatggcgaaagaaccagttcgtgtgctcgttactggagctgcaggacaaatcggatatgctcttgtacctatgattgcaaggggtatcatgcttggtgctgaccaacctgttatcctccacatgttggatattcctccagctgctgaagctttgaacggtgttaagatggagttgatcgatgctgctttccctcttcttaaaggtgttgttgctacaactgatgccgttgagggatgtactggagtcaatgttgctgttatggttggtggtttcccgaggaaagaaggtatggagaggaaggatgtgatgtccaagaatgtttccatctac

SEQ ID NO: 139290 - DNA, 416 bp, Arabidopsis thaliana
cccacgcgtcagcaaggttctgagccttctaaatggtggacagtcaagtgggttgatgagcagctctgataatactgtgaagcgagaggctgctgttgatttacctgacttgattgacaccggtgattcagacgatactttgaacaatctgaatgctatagatactggcagtacagtggcgacagcaggtccattgatggatgatgattggtttggggatagctctgacattggactgagtagcagcgagaagaaaactgatgacgacccctttgcagatgtctcatttcatccgaatgaagaaaaagaaagtgcagatgacctcttctctggaatgactgtcggggaaaagtccgctgctgttggtggtaatcatgtgcctgatctatttgatatgtttgggtcaactgcaaaac

SEQ ID NO: 139291 - DNA, 432 bp, Arabidopsis thaliana
gaccttcaacaagaaaatccaatggctgatccggcaacgagttctccgttgttggatgaccatgtaggtggagaagatgaaagaggaaggagatcaagatcatcaactttggttcaaaaagtgatcgacgtggaagaagcaaaagctcaaatgatttactctttgccaatgatactcaccaatgttttctactactgtattcctataacttctgtgatgtttgcttctcacctcggtcaactcgagctcgccggtgccacccttgccaattcttgggccaccgtctccggttttgccttcatggtagggttaagtggatcacttgagacattatgtggacaaggctttggtgcaaaaagatacaggatgttgggagttcatctacaatcatcttgcatcgtttcattagttttcagcatcctcatcaccatc

SEQ ID NO: 139292 - DNA, 436 bp, Arabidopsis thaliana
cacctcctcctccatggttttggaccttccgctgtatggcaatggagccatcaggtcaagccactctctcacttctttcgtctctacgtccccgacctagtcttcttcggcggctcctcttcctccggtgagaaccggtcggagatgtttcaagcgttgtgcatggggaagcttatggagaagctcgaggtcgagagattcagtgtcgttgggacgagctacggcgggtttgtggcgtataatatggcgaaaatgtttccggagaaagtggagaaggtggtgcttgcgagctccggtgttaatttgcggaggagtgacaacgaggcgtttatcgctagggctaagtgccaccgtatcaaggaggtgatgcttcctgcttctgcaacagatcttaggagattctctgggatggtttcttctaagagactcgattatg

SEQ ID NO: 139293 - DNA, 367 bp, Arabidopsis thaliana
  unsure (1)..(367): unsure at all n locations
aggaccatctgagcatctctcagaaacctcaatgaacgtggaaaaagaactagaaatgcctgccgttgaaattttgccagacaatgacaaaaactctgatgtgttggcagttggagtttctggagacagtgacaatgtggtatctgtcttgcccgcttcccaaacttcctctgatcgtgatgaaggaatgattacagttgatgctgaacctacggaagacatgaaacttgatgttccagattctaaattggttactgatactactgttgactctactaataacaaggatgcccatgttgaggctaatactgaaaggcaagataattctagtgcacttgtgctaaatgatgcanataatgaaagtgca

SEQ ID NO: 139294 - DNA, 255 bp, Arabidopsis thaliana
cccacgcgtcagcagacgcgtgggattgatgtcatgaactctattgctcttggccacaacattcctcgtttcgctgctgctgatctacctcataatgagattgctgcgcaaatttgtcatccggctggatttgtgaagctgctggaacaacactgagaacttaattcacgaggatcatggttaggacacttttgcaactgtttttgcacctatgggtgtacacatgtagacagctcagtttttcaaacgtgattt

SEQ ID NO: 139295 - DNA, 336 bp, Arabidopsis thaliana
cccacgcgtccggacgagagagaagtagaagaagaatgatggagatggtggttttgttttattatttagagtaagcttcttcatttttttaaaaacttctattattttgaccttaagaagaaagtgacaaggagaggaagaagaagaaaaaaaacataatttgaggaagaagaaaaaaaattcggatttgttttttcaataaattgactaattgagtactcgtttaaaggaagtgaagagcggttttttggtagtggtggtcgagaaaagagagagtttgtctctgtgactcagagtgaaatcaatagagcgggaaaagattgttgcttttttttg

SEQ ID NO: 139296 - DNA, 381 bp, Arabidopsis thaliana
attcgggaccataccgtaaaggagaagctggtggaacgtgggatctctgtgcaaagctacaatggagatctattgtatgaaccgtgggagatatactgcgaaaagggcaaaccttttacgagtttcaattcttactggaagaaatgcttagatatgtcgattgaatccgttatgcttcctcctccttggcggttgatgccaataactgcagcggctgaagcgatttgggcgtgttcgattgaagaactagggctggagaatgaggccgagaaaccgagcaatgcgttgtttaactagagcttggtctccaggatggagcaatgctgataagttactaaatgagttcatcgagaagcagttgatagattatgcaaagaacag

SEQ ID NO: 139297 - DNA, 106 bp, Arabidopsis thaliana
  unsure (1)..(106): unsure at all n locations
agaaaaatgccggctggacatggagttcgagcgagaacgaaggatctgttcgcgaggcctttcangaagaagggttacattcctctatcgacttacctgaggacct

SEQ ID NO: 139298 - DNA, 312 bp, Arabidopsis thaliana
gggcagtgattaaaacttcgtctccgtgtctgttcaagctcccattcttgtggccttcacgcttcaggaacaaagaccagtatctctctgaaagactacttctcggaaattttcgtctccatggcacccgtgagggggattcttggcttgcaaagggcagtgtccatttggaaggaaagtaacagactgactccagctttgagatcattcagcactcaagctgcatccacttccaccactccacagcctcctccaactcctccgcctccgttagccaggtgagaatccttaagcgcggcgaagaaatcccca

SEQ ID NO: 139299 - DNA, 367 bp, Arabidopsis thaliana
  unsure (1)..(367): unsure at all n locations
ccacgcgtccaccacgcgtccgcagtttcgtttatggaattcctgaacacgccactagcttcgcgttgaagcctaccaagggtcctggagttgaggaatctgaaccctacaggctttttagtctagatgtgtttgaatacgatcatgaatcaccgtttgggctttacgggtcgattccgttcatggtttcgcatgggaagtctggtaaaacttcaggatttttctggttgaatgctgcggaaatgcagattgatgtgttggctaatggttgggatgcagagagtggtatttctttgccttctagtcacagtatgatcgacacattctggatgagcgaggcanggattgtggatacattctttttcgt

SEQ ID NO: 139300 - DNA, 411 bp, Arabidopsis thaliana
aattttcttcgcacaagaatcctgtttcacgacctcaagtttctgcgcctccaggattttctgctcccaacaggctacctcctcctggcttctcgtcacatgaaagagtgggcctatcatcagatactacactaggaaatcgatttcttgactctacttcattgaggaatgcatatcaagtaccacctccagttggtaattcaaatggtgcaagtgatatcgactttgtggatcctgcaattctagctgttggaagagggatggtaaatgctgacttggacatgagatcaggattctcatcacaactgaattcttttgaaaacgaaacaggactccatatgttgagacagcagtctctgtcttctgcacaacaagttaatgggtttcatcatgatctcagaaacttatctc

SEQ ID NO: 139301 - DNA, 386 bp, Arabidopsis thaliana
attaccgttgcttgctatctttcgccgtcgtctctttagcttcttgcgaagatggttcttcaaaacgatatcgatctgcttaacccacctgctgagcttgagaagaggaagcacaagctcaagcgtcttgtccagtctcccaattccttcttcatggtaatcaaaattttaaagctttctccttctcttgaaccctttagcaaataagtctctgtgattagaactgtatgttaatttggagtttaatgattttctcataatccctagctttgacagtgtgttatgtgatggcgatttttggatgtaagtttgagaatctatgtaactagtttcgagtttgtgaattgtatgtatgttttgagtttgtgaatttgatttgtatctga

SEQ ID NO: 139302 - DNA, 273 bp, Arabidopsis thaliana
cttcaacccggcgattcattcaccattcacagagtttgaagaaaacgccgaaatcggaaatggcgtctattgttcttcgatctcgcctgttgccaagattagcaaagctcagatctcgtaatctgagatgtttctctgcggaagcatcttcgacgaattctacatctaggtattcgggagtcacctctacccagtcgatgttttctgattttccaccgccaaatcagccgccacctcctcctcctcctcaagtggaagctgctgccgcggctg

SEQ ID NO: 139303 - DNA, 409 bp, Arabidopsis thaliana
acgcccacgcgtccggtctccctctcttaaactctctctttctctttctcttttggtttctgggttatttcaaagaaaagaatcaagaaacccctctttctctcttacaagaatcccatcatggtgtttggaaaagggtcaaaccttgacagattccttcattgcacaacacctgtagtgccaccccaatctctatccaaggcggagattaggagtttgaataggatttggcatccatgggagagacaaaaggttgagtttttcagattgagtgatctatgggattgttatgatgaatggagtgcttatggagctggtgttccaattcgtctctctaatggagaatctcttgttcaatattatgttccctatctctctgctattcagattttcacctctcgttcttcct

SEQ ID NO: 139304 - DNA, 285 bp, Arabidopsis thaliana
ccacgcgtccgaaaagaacaaatcgccgagggacaacccaggacgcatacaccgtggaagaaaattattgttgttgttgagggtatttacagcatggaacgggaaatttgtcatctgcccgagattgtttcaatatgcaagaagtataaggcatatgtttacttggccgaagctcacagcattggagcaattggcaagacatgaagaggtgtttgtgaactccttggagttggcacttctgatctggacataatgatgggaactttcacgaaatcatttgggtct

SEQ ID NO: 139305 - DNA, 373 bp, Arabidopsis thaliana
attacctctctctctctatctctacctggctttgtaatttgtttaccgactacaatggtcaaaatttctctactcctataaaaatgggtcgccttgtttttgatcaacggatttgattcatctttctttttacctgtggaggtctttgtcctggccttaataccgtgattagagaaatagtgagcagtctatcttatatgtatggagtgaagagaatactgggaatagatggtggatatagaggcttttatgctaagaatactgtctccttggactctaaagttgtaaatgatatccataagcgtggagggactatccttgggacctcacgaggtggtcacgataccacaaagatagttgacagcattcaaga

SEQ ID NO: 139306 - DNA, 342 bp, Arabidopsis thaliana
gggaaaaggagatagagattgaagatgcgtgacgcaatcatcgccgatcctcttctggccatcgaccatgaaacagtcgcagagaagaagaaacagagcaaaaatctaaagatttctcttttactgcttctgattctcttagcaacttcagtcttagccttggaaccatcagtgacgtggttgaatctgagaatggtgttgtggctgctgacgacgctcgatgttccgagatcggtgcctctgttcttagaagtggcggtcatgcggtggacgccgccgtggctattactttatgtgttggtgttgttaatccaatgtctagtggaatcggtggtggttctt

SEQ ID NO: 139307 - DNA, 258 bp, Arabidopsis thaliana
gcagatcatcgcatacctcagatcctcgtctttgcgcagagctgctttgaaggctctgtccaagacattaactaccgatgagcttctctagctgaaagcacactttgcaaacttaccaacgaataaaattggtgtcaacactttacatagcatcatactggcacgtgcgacacaggcaacagagccaatgatggaatcacggatcccggactttcttgcattgttaaatggacttcagtacatgagggatggattttg

SEQ ID NO: 139308 - DNA, 416 bp, Arabidopsis thaliana
  unsure (1)..(416): unsure at all n locations
aagaaagatgccggtgcacgatgagcaagagcatgaggtgtacggtggagagatcccagaagaggaagaaggtgagatggatacggaagagtacgaagaacacggcggagaagaaggtgccgccgccggagatgaggagcttgaacctggctctagctctagggacttggaggatatgaagaaacgaattaaggagattgaggaagaagctggagctttgcgtgaaatgcaagccaaggctgagaaagatatgggtgctagtcaagacccttcaggtggtgttagtgcggctgagaaggaagaagtggattcgcgttcaatatatgttggcaatgtggactatgcatgtactccagaggaagtccagcagcattttcaatcatgtgggacagtgaatanggttacaattctgacag

SEQ ID NO: 139309 - DNA, 348 bp, Arabidopsis thaliana
ggtcgaggcccgcgtccgcccacacgtccgcccacgcgtccgcccacgcgtccgaagaaaaatcgagatgggttcaactccgttttgctactctatcaatccatctccatcaaagcttgatttcacgaggacccatgtgtttagtcctgtttctaaacagttttacttagatttatcatcgttttccggaaaacccggaggagtatctgggtttaggagccgtcgagctttgctcggagtaaaggcggcgacggcgttagttgagaaggaggagaagagagaggcggtgacggagaagaagaagaaatcgagggttttagttgccggaggtggaatcggacgattggt

SEQ ID NO: 139310 - DNA, 402 bp, Arabidopsis thaliana
ccctttctccaacacctaccaaaagcctctctctctctctagttcttgatttttcaagatttcaagaaaacatggctgaccaaagtggtgggttggttatgatgagagagtacagaaaaggcaactggacgttgaatgagacgatggttctcattgaggccaagaggatggatgatgagaggaggatgcggcggtccatcggccttccaccgccggagcagcaacaagatatccggagtaataaaccggcggagctacggtggaagtggatagaagattactgttggagaaaaggttgtatgagaagtcagaatcagtgcaatgacaaatgggacaatctcatgagagactacaagaaagttagagagtacgagagacgaagggtagaatcgtctattaccg

SEQ ID NO: 139311 - DNA, 291 bp, Arabidopsis thaliana
accacgcgtccgcggacgcgtgggcggacgcgtgggctcaagtgttgaaggaagttgaagaatgcaagaaggagtacccgggcgccttcattaggatcatcggattcgacaacacccgtcaagtccaatgcatcagtttcattgcctacaagcccccaagcttcaccgaagcttaatttcttttctaaaacattcttatgaattatctctgctcatttcatttcctattgtctgtgttctttttctctttatgagacaatttctatcggattgtcaaatgtctgatttatg

SEQ ID NO: 139312 - DNA, 366 bp, Arabidopsis thaliana
attcttctcaatccaaaatccagctgataaataaataatttttctcttgtcgtcatattaaaaaaaagaaagattatctgtatttcaagtttcatgagcgtttgccaccacaacattgtcttttcggggttttagtcatacttaatggcttccaattcggagaaaaatcctcttctttcagatgagaaacccaaatcgacggaggagaataagagttctaagccggaatcagcttctgggagttcaacttcatcagctatgcctggcttgaatttcaatgcttttgatttctctaatatggctagtattctcaacgatcctagcatcagagaaatggctgagcaaatagctaaagatcctgcgttt

SEQ ID NO: 139313 - DNA, 341 bp, Arabidopsis thaliana
ctcaaatggtgtttttgggctttatcagatgccagatttcatctgtatccatctgctctctatttctaggcagaagctaacaacagctgtcttcaatgagcgtggtaattggctgacctttggttgcgcgaaacttgggcaactgttagtctgggattggcgaaccgaaacctatatactgaagcaacaaggacactattttgacgtcaactgtgtcacttactcaccggattcgcagctcttggcaactggtgctgatgataacaaagtcaaggtgtggaacgttatgtcaggaacatgtttcattacattcaccgagcataccaatgccgtgactgctc

SEQ ID NO: 139314 - DNA, 246 bp, Arabidopsis thaliana
tatggtgataatggctttggtgatgatgatgatgcttcagcattgaaattgttaaatctgagggtttgttgtattttctatggttttgttgatatcaaaccagagatgatgattcttcttcttctttacgtttccacagttcttcttatttgggggttgttggatttctctgacttgtcgttttttttttttttgtttctttttggattcaatctgttgttttattcgttttcccgggatttgttt

SEQ ID NO: 139315 - DNA, 420 bp, Arabidopsis thaliana
  unsure (1)..(420): unsure at all n locations
gcgaccctaatttgtgagctctcttctctttgcgcagtcaatttgctacaacttagaaaatggcggcggctacttcatccatcgctccttctctttcatgcccatctccttcttcttcatccaaaaccctttggtcttccaaagccagaaccttggctctacccaatatcggtttcctctcgtcttcttccaagtctctgaggtcgcttactgccaccgtcgctggaaatggcgccactggatcctcccttgccgctcgcatggtttcttcgtctgcggtcaaagcccctgtttctctcgattttgagacatctgtcttcaaaaaggagaaagtttctcttgctggttacgaagagtacattgtgagaggaggaagagacttgttcaagcatctcncagatgctttcaaggggattaagc

SEQ ID NO: 139316 - DNA, 392 bp, Arabidopsis thaliana
acccattcgaatttcctcttatgatttaggagattctgtgttagtatccttctttttgttgtttatttctttatttctctgccatgtcgaaggaacatacaaatctgaaattcttcttcattatatattagcttcacggtccatgttttttctgttctaatttttattattatgtgttaatttgatctcaggacaccacaagcttatttcataagaaacttcaaattagaatcagaaacaagagcatccttcttcatttacacaggtaaattaggtgtaaaaatggtgatgagaagtgtggatctacgatcagataccgttactagaccgacagatgcgatgcgagaagcaatgtgtaacgcagaggtggatgatgacgtcctcggatatga

SEQ ID NO: 139317 - DNA, 305 bp, Arabidopsis thaliana
agtgatccagccgccgccgtcttcaccaccatcttcaatgactagtcaagattccggcgtttcttccgatgatcagaaccatcactctaggatcgatcaagttctccggcacgatcaaggtctttacagcaagatcgggtcacacgtggcgagatccgacggcgttgacggtggtgagagctttaagcgtgatatgagagagcttcaggagcttttctctaagcttaatcctatggctgaagagtttgttcctccttctctgaataaacaaggaggtaacggtgttaacggtggtttcttcacct

SEQ ID NO: 139318 - DNA, 403 bp, Arabidopsis thaliana
cgtgatccagccgccgccgtcttcaccaccatcttcaatgactagtcaagattccggcgtttcttccgatgatcagaaccatcactctaggatcgatcaagttctccggcacgatcaaggtctttacagcaagatcgggtcacacgtggcgagatccgacggcgttgacggtggtgagagctttaagcgtgatatgagagagcttcaggagcttttctctaagcttaatcctatggctgaagagtttgttcctccttctctgaataaacaaggaggtaacggtgttaacggtggtttcttcacctctgctggttccttcttccgcaacaatggctttgctggtaccggaaatggcggatacggtaacgaaaacggtggtttccgacggaagaagattttggtc

SEQ ID NO: 139319 - DNA, 388 bp, Arabidopsis thaliana
  unsure (1)..(388): unsure at all n locations
cccacgcgtccgcaagaagctcactgtctcgagtcttgtcaagtctcaggacgaattcgaaagagaggtgaagaaacttggaaaactcaggcattcgaatctggttaaactcgaaggatattactggacaacttctctccagcttctgatctatgagtttctctctggtgggagtttatacaaacagttgcacgaagcaccaggaggtaatagttcgctttcttggaatgatcggttcaacattatccttggtacagcgaaatgcttagcttacttgcaccaatcaaacatcatccactacaacatcaaatcgagcaacgtgttgctagacagctctggtgagcctaaagtangagactacggattagcgaggctgttacctatgcta

SEQ ID NO: 139320 - DNA, 229 bp, Arabidopsis thaliana
ccgctgaagaacatgtcaagaaggagtatggaaacaatacttaaacggttccaatctaaagagctcaatttactggttgccactaaagttggtgaagaaggccttgatattcagacatgctgtcttgtgatccgttatgatttaccagagactgttaccagcttcatacagtccagaggtcgtgctcgaatgcctcagtctgaatatgcgtttctagtggacagcggaa

SEQ ID NO: 139321 - DNA, 336 bp, Arabidopsis thaliana
gtctcttctcactctgaaagattctctgacgatcagagatctcaatcaccggaattaaactctaaaccggtaagacgagaagaagaggcaacggcggatatcaagattcttacggagaggctctctgcagctcttttaaatgtcagtttaaaagaagatcttgctaaacagcatgctaaagttgcagaggaagctgtctcacgttgggaaaaggcagagaacgaagctgcggctctgaagcaacagcttgatgcttctacaagtaaggtttcggctctcgaggatcgaaatagtcatcttgatagtgcgcttaaggaatgcgtgaggcaactctgg

SEQ ID NO: 139322 - DNA, 422 bp, Arabidopsis thaliana
atcaaaaccaaaggatgtgtgtatgtatgtatatattctaacgctcaaaactgatcactagcattcctagatttttccttcttgtgatcacttgcagctatggccacacatgcagctctcgccgtctcaagaatcccggtcacacagcgactgcagtctaagagtgccattcactctttccctgctcaatgctcctccaagaggctagaagtcgctgaattctccggtctgcgtatgagtagtatcggtggggaagcatctttcttcgatgctgtagctgcacaaatcatccctaaggctgtgacaacatcaactcctgttagaggagagacagtggcgaaactgaaagttgcgattaacggttttggaaggattggtaggaactttcttaggtgttggcatggtcgtaaagactctcctct

SEQ ID NO: 139323 - DNA, 297 bp, Arabidopsis thaliana
gcctacacgttacacgctcgatgtagatctgaaggaagtagcgactcttgatgctcttaagagtaaggataagaaggtgactgctttaaaggaagctaaggctaagcttgaggaacgtttcaagactgggaagaacaggtggttctttactaagctcaggttctgaagaagaacctttgagatttttatctatctatctactttttgtttagttctagaatgaatttggatcattgtttaagaccttttggtttggaattgattctggattttgtctcttacttataatcttttgct

SEQ ID NO: 139324 - DNA, 364 bp, Arabidopsis thaliana
aggacgcgtgggcttacaagcgcgctagaatctgaatctggccatggcgaagattcgagtctttcgtggtctatttcccgctcacgctcccgctccagttcaagatcatcgtcgtcttcttcttattcttctccaatttgattaattagagattggatttggcgattttggtgaaatcattcatgttcaacttgcgatagatcgagctgctaatctttcaagaggagatgcatatgttgaattcaaggcaaaaatagctgatgctgagaaaccacagctgtacatggatggtgtatgtttcaagtgatccaaagggagatgctttaaaatctgataatgttggtactgacattgagaaatatga

SEQ ID NO: 139325 - DNA, 402 bp, Arabidopsis thaliana
ccacgcgtccagaagtgtaacggtggaaacggaggaagtgacaaagaagagaaaagaagaagtgaggaagaagagagtagaagatattggtcaagaggatgcttggtttaagaacaacactcaacaaaaacaagttgaggtttctgttacacctggtggtcgatggaatagattcaagacttactcaactattcaaagaacattggagatttggggttttgttgtacagtttattttcaggacttggttaagcaataagaagttctcttataaagggggaatgactgaagagaagaaggttttaagaaggaacgttttggctaagtggttgaaagaaaacattttgagattaggtcctacatttatcaaaattgggcaacagttctctactacagtggatat

SEQ ID NO: 139326 - DNA, 122 bp, Arabidopsis thaliana
acgacagctcccaaggttaggtttctcaccaagatttaccatcctaacatcgacaagcttggaagaatctgccttgacatactgaaagacaagtggagtcctgcactacaaatacgaactgt

SEQ ID NO: 139327 - DNA, 408 bp, Arabidopsis thaliana
gtcgccaacgagtcaatctcacgaaccgcggcgaagaacccgtacgacgttcttccccagtctgctctcgtagaagtcgaagtgaagcatctcgttgctcacgtcccaatgcacgaactctcctctgtaccgagtcattagactcttgattcgccggttaaccgccgaccggagatcttcgccggttagattacgaacccagtcgggattgtatttgggatcctcccagaatatgttgtggccgcgagcgatgattctgttagctctgacgagattcatcatcttatcagccaatgtgtagttgagtttgccttgatcggactccgtcgcgtaccatttcagctcgttctcgaataccgtggcgtcgaatctcttgacgaaccattcctaccaaaacagaatccgttt

SEQ ID NO: 139328 - DNA, 364 bp, Arabidopsis thaliana
atggaccgtgagacaaaaggcctatatcgaggctttgaatcaagatacaatgtttactccacagtttgttgttcaaggtcgtgttcaattacttgggaatgaagaagagtccttgcttaagtctattgttgaagctcctaggtttccgtctcctgcgtttcgggccacatttcaaagaccaacatcagaaacccttcaagtatctctcaccggagctttgaggatgaaagtggactcgagcgggatcgatataatggtggcgctatatgaaaacggtttggtgaatgattgcgctcgaggagagaactcaggaagagtcttgtccaatgactacgttgtaagaaagctagaaaagttatgcacc

SEQ ID NO: 139329 - DNA, 416 bp, Arabidopsis thaliana
ccacgcgtccgcagacgcgtggggtttccctgccttgataaagttatcaagtccgcaactgaagctagtgatggattcaattatctgggcatttagacatactgagagaaatattgctgaaaccgggcttaatcttttgcttgagatgctgaaaaactttcagcaatctgaattttgtaatcaattctaccggtcatactttatgcaaatcgagcaagaaatatttgccgttttgaccgataccttccataagcctggcttcaagctacatgtgttggtgctgcagcaactgttttgcctgcctgagagcggtgctttgacagaacccttgtgggatgctacaaccgttccttacccgtatccggacaacgttgcatttgttcgcgaatacaccattaagctactgagctcttcat

SEQ ID NO: 139330 - DNA, 126 bp, Arabidopsis thaliana
attcttcgtcctcttctctgaatagtaacaatgcgagtcatcttcctccccaaatcgtccagggcgaatctctctgttttccactaccaccttcacgtcactcaccctcgtccatcaactcaagat

SEQ ID NO: 139331 - DNA, 306 bp, Arabidopsis thaliana
aatctcttcaatggaacgattccggcggcgatgtttaaacaatccgggaaaatcgctgccaatttcatcgccggtaagaggtacgtttatatcaaaaacgatgggatgaagaaagagtgtcatggagctggtaatttacttgagtttcaaggaatcagatccgaacaattaaaccggctttcaacgaggaacccttgtaatatcactagcagagtctatggaggtcacacttcgccgacgtttgataacaatggttcgatgatgtttctggacatgtcttacaacatgttgtctggatacataccg

SEQ ID NO: 139332 - DNA, 412 bp, Arabidopsis thaliana
cagcttattacttcaaagaagctctcaataatctccttcacaacgtctcccaaaccctaaacccttattccctcatcttcaagatcgctgcttacaaatccttctcagagatctctcccgttcttcagttcgccaactttacctccaaccaagccctcttagagtccttccatggcttccaccgtctccacatcatcgacttcgatatcggctacggtggccaatgggcttccctcatgcaagagcttgttctccgcgacaacgccgctcctctctccctcaagatcaccgttttcgcttctccggcgaaccacgaccagctcgaacttggcttcactcaagacaacctcaagcacttcgcctctgagatcaacatctcccttgacatccaagttttgagcttagacctcct

SEQ ID NO: 139333 - DNA, 415 bp, Arabidopsis thaliana
atctgcacgttttttaacaatttgtgctcttcatcttccgtttcttcttcgccgtcagattcgactgtaactgattcatgagttaaaagagtatgttcgatacttgtggcccaaaaggagtcaaatctcaagtcatcagtggccaacgcgagaactttgtgagatagtatggactcaaggtactcgcaaagttccgaaacgggtctaaacaaatgcacattgaatatacaaggaggacctaaacgttttgctcaaggaagcaaagcatcatctggatcttttaagaaagggtttagaaaaggatcagaggggctttggtctatacgtcgatcgattggactcggtgtttcgcgcgctgtgtttccagaagatcttgaagtatcagagaagaagatatttgatccacaagacaagt

SEQ ID NO: 139334 - DNA, 262 bp, Arabidopsis thaliana
acacacaagccgtgtaccaaggggctttggttgtggagttctcctataaaaagaacagctcttgacggaactgaatacaatcttttgttattagatagtgaaggaattgatgcttacgaccaaactggtacctacagcactcaaatattctcattagctgttcttttgtcaagcatgttcgtgtataatcagatgggaggcattgacgaagcttcactggatcgcctttctcttgtcactcaaatgacaaagcatatccgcg

SEQ ID NO: 139335 - DNA, 419 bp, Arabidopsis thaliana
atcccaccattttcagagctcagagaaaaagaaagaaagaaaaaaagcttcgtgctccttcaccttcccaaatcggaaaacaatgcacgccaaaaccgattccgaggtaacaagcctcgcagcatcatcaccagccagatctccacgtagaccagtctactacgtccaatcaccatcacgcgactctcacgacggagaaaaaacagcaacatcgtttcactcaactccagtactaagtccgatgggatctccaccgcattctcactcatctatgggtcgtcactcacgtgaatcatcttctagtcgattctctggctctttaaagcctggatctagaaaagtcaaccctaacgatggttctaaacggaaaggtcacggcggtgagaaacagtggaaagaatgtgcggttattgaagaag

SEQ ID NO: 139336 - DNA, 402 bp, Arabidopsis thaliana
agcatactcaatacgacattgttcatcaactatctctctgcttatattgttgagatagaccatgaaaatatactcggtcctgttagcttccttgccgatcttggtggtttgtattgcatcagtattggcatatttttctacctactagtgcagtgtgagtacaggatcaagaagctgcgaaatgaagatactgttttcaggaagataaggaatcgtcgtaaagctctagatcactgggataaactgagaagatatgttgcatacacatgggattgcagcatattggtcgatgatgccatcaaaacgacaaaggtatcaggaatgtgtggtttaacgagacctccaacatcttctaatagctcggaacacggggaatcgatcatggcgaacaagaagcctaac

SEQ ID NO: 139337 - DNA, 410 bp, Arabidopsis thaliana
aaaattctctctttgattcctatcttcttctctttattttcactttgtgctttctctgtctctcctattatgagtctaaaagtctactagctgttcaatagttttgtctttctgtgtttcttcttcttcaaaaccgaaagaaattcaaaaagagtctttcgctgcttgttagtggggtgaggaacaaatgggaagaacaccttgttgtgacaagattggtttgaagaaaggtccttggacgcctgaagaagatgaggttcttgttgcgcatatcaagaaaaatggacatggaagctggagaacacttcctaaacttgctggtttacttcgctgtgggaagagttgcaggctgagatggacaaactatctgagaccagacataaagagaggtcctttcactgctgatgaag

SEQ ID NO: 139338 - DNA, 413 bp, Arabidopsis thaliana
aaacaagaatgggtagatccaacgagcaagatctgctctctaccgagatcgttaatcgtgggatcgaaccatccggtcctaacgccggctcaccaacgttctcggttagggtcaggagacgtttgcctgattttcttcagtcggtgaacttgaagtacgtgaaacttggttaccactacctcataaaccatgcggtttatttggcgaccataccggttcttgtgctggtttttagtgctgaggttgggagtttaagcagagaagagatttggaagaagctttgggactatgatcttgcaactgttatcggattcttcggtgtctttgttttaaccgcttgtgtctacttcatgtctcgtcctcgctctgtttatcttattgatttcgcttgttacaagccctccgatgaacac

SEQ ID NO: 139339 - DNA, 393 bp, Arabidopsis thaliana
ccaaactgtcagaactgtgccttcttcacagagccgtgaggaaaaactctaagcctatggttgaaatgctcttgagatatattcccaagcaacaaagaaacagcttgtttagacccgatgctgctggtccagccggcttaacacctcttcatattgcagctggtaaagacggttcagaacatgtgttggatgcgctaacagaagatcctgcaatggtggggattgaagcgtggaagacatgtcgagacagcacatgcttcacaccagaagactacgcacgcttacgcggtcagttctcatacatccacttgattcaacgcaagatcaatagaaagtcaacaactgaagatcatgttgtggtcaacatcgcagtttctttctcagacagagagc

SEQ ID NO: 139340 - DNA, 417 bp, Arabidopsis thaliana
aggacgcgtgggcggacgcgtgggctcatcttcaagccatctccgatcatcatcagacaatggcagcagctatggcaacagcaaccaagtgcatgtctctaaacccatttcctcctaaactccaaaaccaaaccaaatccaaaccattcatctccctaccaaccccaccaaaaccaaacgtctctctcgccgtcacaagcaccgccctagccggagccgtcttctcttccctcagctactctgagccagctttagccatccaacagatcgctcagctcgctgcagcaaacgccagtagcgacaaccgtggcttagctcttctccttcccatcgtcccagccattgcatgggtcctttacaacatcctccagccagctattaaccaggtcaacaagatgcgtgagagtaaaggtatcg

SEQ ID NO: 139341 - DNA, 373 bp, Arabidopsis thaliana
aaactcttttccacactcttcttagattattactattcgtagccatctctcatactctgtcccctctcgccggttctttccggatttctaatgactttccggcggttttcaacttcggagactctaactctgacaccggagaacttagctcgggtcttggattccttccacaaccttcctatgaaataaccttctttagatctccaacttccggaagattctgcaatggacgtcttatcgtcgattttctaatggaagcaattgatcgaccatatttgaggccttatttagattcgataagtcgacaaacttaccgaagaggctgcaattttgctgcggctgcgtcaacgattcagaaggcaaatgctgcatc

SEQ ID NO: 139342 - DNA, 414 bp, Arabidopsis thaliana
actcactgtaatcccttagatcttcttttcaaatttcaatggcgtccggtgatgttgagtatcggtgcttcgttggaggtctagcatgggccactgatgacagagctcttgagactgccttcgctcaatacggcgacgttattgattccaagatcattaacgatcgtgagactggaagatcaaggggattcggattcgtcaccttcaaggatgagaaagccatgaaggatgcgattgagggaatgaacggacaagatctcgatggccgtagcatcactgttaacgaggctcagtcacgaggaagcggtggcggcggaggccaccgtggaggtggtggcggtggataccgcagcggcggtggtggaggttactccggtggaggtggtagctacggatgtggcggcggtagacgcg

SEQ ID NO: 139343 - DNA, 398 bp, Arabidopsis thaliana
attctgtgggttgtaaaaggcattcgctttcgagtgttggttgtcgatttcgatgccccaatctgggacctgggtactgttcccaagctccacctggattcttattgatgtgaagctcgtataacttgtgaatcgatgcggcctttttaatttcgcttgggatttcttaggtatttattctctgtatccggatctctatctataatcggatcttgtacctattgggttagtactcttgatctgaatgtaataagaagcgtgtttttttttttttaataatttggaggagcttgtgttttagttcgttgagatctcgttcgttccgaatgtgggtttattaaggttcttgaaaaagtctgcaactttgaattaggtgcattaccaagaaatatatagag

SEQ ID NO: 139344 - DNA, 409 bp, Arabidopsis thaliana
agaaagcttcgagtactggttgaagctaaagctatgggacacgtgaatctacctgcatcaaagcgtggtaaccctcgtcaatggcgtctcctcgacatcgtaaccgctgctttcttcggtatcgtacttctcttcttcatccttttattcactcctcttggtgattccatggcggcttctggtcggcaaacgctgcttctctctacggcgtcagatccgaggcaacggcagcgattagtgactttggttgaagctggtcagcatttgcaaccgatcgagtattgtcctgcggaagctgttgctcatatgccttgtgaggatccgagaaggaatagtcagcttagtagagagatgactttctatagggagagacattgtcctttgcctgacgagactccgctctgtttga

SEQ ID NO: 139345 - DNA, 414 bp, Arabidopsis thaliana
gaatcgagcagcttatcttggccactgttcctgatcccaaaagtggcagggcgcctagtattgtaacagatgaaaatattcttttgctttttgacatacaacagaaggttgatcaaattcgtggaaattattcaggttcagaggtctctttgcccgacatatgtttgaagcctttgggagaggattgcgccactcagagtattctgcagtatttcaagatggactctggaacttttgatgattatggaggagttgagcatgctgagtactgtttccagcattacacttcatcagagacgtgtttgagcgcttttcaggcgcctgttgatcctagtgcagtgttgggaggattctcggggaataattactcagaggctactgcgtctgttgtaacatatccagtcaacaacgtca

SEQ ID NO: 139346 - DNA, 416 bp, Arabidopsis thaliana
agacgatccttagaccaacttcgtcttcttcctcgagagcttctctgatctccttcgccgttaataatttccacacgatcgcttcttcttcgtctactctctcttctcgcttgacaactgtatcatcgtccatggcttctggtgacgaaggagctgttttcaatttgtctgattctagccttcttaagatccttaaaggagacatcaccaagtggtctgttgattcttcctccgatgctattgtcaatccagcaaatgagcgtatgttaggtggtggtggtgctgatggagcaatacatagagctgctgggccacaactcagagctgcatgctatgaggttcctgaagttcgtcctggagtccgttgtccaactggagaagcaagaattactccgggttttaacttgcctgcatcg

SEQ ID NO: 139347 - DNA, 398 bp, Arabidopsis thaliana
agatgccattgttaacagtggtccacgtgaagatgctaccaggattggatctgctggtgtggttaggaggcaggctgttgatatctctcctctaagacgtgtgaaccaagcgatcttcttgcttacaactggtgcacgtgaagctgcctttagaaacatcaagacaatcgctgagtgccttgctgatgaactcatcaatgctgcaaagggatcttccaacagctatgccatcaagaagaaagatgagattgagagagttgctaaggccaatcgttaagggatctccctttcctctaagtttgcattatatcaaagagtttttgtgttgtttccattagctttggatatgtttcagatgatctctctatctttaatgaaattttgacgcttataatcga

SEQ ID NO: 139348 - DNA, 414 bp, Arabidopsis thaliana
cccacgcgtccgattgaaatctctagatgtctcttatcttaagatcacaaatgattcgatccggtctatagcgttgctggtaaagcttgaggttttagatatggtaagttgtcctttgatagatgatggtgggttacagtttctagagaatggttctccttcattacaggaggttgatgtcactaggtgtgaccgtgtgagtttgtctggcttgatctctatagtcagaggccatcctgatattcaacttcttaaagccagtcactgtgtatcggaagtctctggtagcttcttaaagtacatcaaaggtttgaagcatctcaagactatatggattgatggagctcatgtttctgattcctctcttgtaagtttaagctctagctgtagatctttaatggagattggactgag

SEQ ID NO: 139349 - DNA, 175 bp, Arabidopsis thaliana
aggacgcgtgggttcgaattctcagtattttgaatcattcgttgggttgatgtagtttttaatctaatggtagtagtgttgcttagagcttaatggattgttgtttcttctttatgttccttgagactgctttcaaacaagtttaagtattcaacgcttttcttttcaagggaat

SEQ ID NO: 139350 - DNA, 421 bp, Arabidopsis thaliana
tccaatctcaaatctgaatggaggaagtgatgatttctccggtggagcacgaccctcagggccaggttaagcagcagcaagcggccggcgttggtatactgcttcagattatgatgctcgtgctttccttcgttctcggccatgtcctccgccgtcatcgattccactatcttcctgaagccagcggttcgcttctcattggtttaatcgtcggtatacttgctaatatctccgatactgagactagcattaggacgtggtttaatttccacgaagagttcttcttcttgtttttgttgcctcccatcatattccagtcaggtttcagtcttcaacctaaaccattcttttctaactttggagccattgttacctttgctatcatcggaacttttgtcgcttcagttgttactggtggtct

SEQ ID NO: 139351 - DNA, 417 bp, Arabidopsis thaliana
  unsure (1)..(417): unsure at all n locations
acgactattactcaagattttgattctgactttcaggaagtaaaaatatggactttgatgatgatgacaaaccaaaagaggttaccaaaacccgtagattcgctcctggccgtgccggaaagtctaaacccaaacctaaaccggaacccactgctgataaaccggtacagccgccgccgcagtcacaaactgagtccgtgagcaagactgagcatgacgttgatgctaaattcgttggcactaaggttgaaactgaggtttgtaatggctctgtgaagatggagatcgattcaaaagtcgataaagagcctgagatcatggaaactgagttgatggaggaagatcagcagcttccattgcaggaggagaaggangaagaagaagaagaagacgacgttgttgttcgtgaaattgatg

SEQ ID NO: 139352 - DNA, 421 bp, Arabidopsis thaliana
aatttctctctttttatatttttgtgtcccaatctcttcttcatttctgtttggttgccgagaaaacgcaggaaacttttctgcaaaaaaaactcggtgaccatattcaaaactttcccacgttaattctctcttctttgttttgtttcagattcattacttttctccaaaaaactttcttcaagatctgttcttttaaataattatggcggaagaacatcgatgcgagacgcctgaaggtcaccgtctctgcgttaacaactgcggtttcttcggaagctcagcgacaatgaatctatgttcaaactgttacggcgatctctgtctcaaacaacaacaacaagcttccatgaaatcaaccgtcgaatcatctctctctccggtgatcgcacctgttctcgaaaactacgcggcggagtta

SEQ ID NO: 139353 - DNA, 409 bp, Arabidopsis thaliana
atatcgttttcgtcgtgagcttctgtctcgttcatctacacaatctgactcggttgagaagaaatggcaggacacaaggttgcgcatgccacattgaaaggcccgagtgttgtcaaggaattgattattggtttgacgcttggtttagctgctggtggtctctggaagatgcaccattggaatgagcagaggaaaactagaactttctatgatttgcttgagagaggtgagatcggtgttgtcgcctctgaagagtgaatgggaatgcctctctctcactctcaatgttgttggctcgatttttctgtttttatggtttcttgagatctcagataagttacctaagaaagttggttgcttgagaaataaacaaccactcagacatcaaaattggatatttgttaacaca

SEQ ID NO: 139354 - DNA, 425 bp, Arabidopsis thaliana
gatcttgtgaaccactacacacactaacacaatgagagagatccttcacattcaaggtggtcaatgcggtaaccagattggttccaagttctgggaagtcatctgcgacgagcacggcatcgattccaccggacgttacagtggagacactgcagatctccagcttgaacgtatcaatgtctattacaatgaagcttcaggtggaagatacgttcctcgtgctgttcttatggatcttgagcctggtactatggatagtatcagatccggaccgtttggtcagatcttccgtcctgataactttgtctttggtcagtctggtgctggtaataattgggctaaaggtcattacactgaaggtgctgaacttattgatgctgttcttgatgttgttcgtaaagaagctgagaactgcgattgccttc

SEQ ID NO: 139355 - DNA, 405 bp, Arabidopsis thaliana
gattgcgtcactgtagtagtagtagtaatgtctcttcttcttctcttctgttgcttctttacctctctttctatttctcattctcatggagcttccactattcacatttctcctactcagcctcccgcagcttcttcggagaaaaccggttctgtaatgaaatttatagtagcagaggcaccattattaggacctgcaggtttcaacaaccctcaagtaattgaagttgcttcagtagctttagctgctcaaagaacatatagaaaagatcctctcaatggttttgagaaatatactggaggatggaatatcagcaaccaacattactgggcttcagtgagctatacagctgttcctctctttgttcttgctgctgtttggtttcttgggtttggcatctgttta

SEQ ID NO: 139356 - DNA, 419 bp, Arabidopsis thaliana
atctgtaacagtcctaccgggagagtcacgcattgtcacattttctctggcttgggactgccctgaagtgcagtttcctagtggtaaaatatattctaggcgttacacaaagttttatggcaataatggtgatgctgcagcacaaattgcacatgatgctattcttggacatagtcaatgggagtcctggatagaagattggcaaagaccaatacttgaagacaaaagactgcctgcatggtaccctgtcactctcttcaacgagctttattaccttaattcaggaggaactctttggacagatggatcatccccagtacatagcttggcaggagtcagagaaaagaagttctcacttgataaatcccaactcggtctaaagaacgatatcgatgtaccgcatcagaatgatacagctg

SEQ ID NO: 139357 - DNA, 415 bp, Arabidopsis thaliana
ataagagtgtggcacagagctttatcctctctcagagtttcttctcctctgtgaatctccgacaatggcgatagctatggcggttgtttctttcccatctctgctcaacaaaacatccttatcctcttcactcttcactcccactttcctcccggcgaaatcctcttcacttctcatcaaatcatcaccaaaaaccagattcgtggtttcatcatccatggaagctggaatcggagtaatggggtcaaaactcgggatgatgagtttcttcgaagaagacggcacagtagttccagtaacagtcgtcggattccgcgaaggtaacatcgtaacccaaatcaaaaccctagccacagacggttacgacgcggttcaaatcggttaccgtcgtgtacgcgacagaaagctaactaaa

SEQ ID NO: 139358 - DNA, 419 bp, Arabidopsis thaliana; identical to SEQ ID NO: 125326

SEQ ID NO: 139359 - DNA, 359 bp, Arabidopsis thaliana
atagcatctagggttctcttcttctgttattcaatcgtcgtttttatgggtctttttggatgattgatagtttttaagtttctttataattctctaatcgagagagggagattggcagtgatgactcggaaatttcaagctcaacagaccggaattaggcgtttcttccaatttattggttgagtcgtttctgtgtcgataaccccgctgatctgagccttcctctcttttcatttgattctgatttgtttgcgttttcgaatttgaaattctctggtaatcgatttatacgtttttatcgattttgaaatcggtgtttgcgcttttttaatgatgatggggattttggagattacgat

SEQ ID NO: 139360 - DNA, 416 bp, Arabidopsis thaliana
aaggttttctctctctttgcaatcatggagtctctagggaagctacagcttcatcagcaaccaaatcacctctctttcactcatttctcttcatctttccccaaaaagccttcgtctttctctctcagatccttacccagatcaacatcatccttcaaatgcatttcaatcaaagcttcctcatccaagtctcaagactcgaagctctcaatcctcaaatccacatgcgtcagcttcactgcggcagcagcactgttccttgtgaatctccagctcaaaccttcaccggcgattgcggctcctgtggcggcgacgccgttaatggaatctctcaaacaaagtaacggaaacgtttcatttgaagaagaagagagatcactcgaagagtatcttgcttctcaccctgatgatgttga

SEQ ID NO: 139361 - DNA, 418 bp, Arabidopsis thaliana
gcacaagcgatggcctttgaggtctcttgtctgcagcttcagctcctctgcggcggagacagttactacttcaacggcagcttcagcgacggcggcttttccgttgaagcatgtgacaaggtcgaacttcgagacgacgctgaatgatctacgctcactcgtaaaggctgcagatttcgtggcgattgaccttgagatgactggcgtgacaagcgctccgtggcgagactccttagagttcgaccgctacgacgtcagatacctcaaagtcaaagactccgccgagaaattcgccgtcgttcagtttggtgtctgtccctttcgttgggattctcgtactcagtcattcgtgtcctacccgcacaatttctttgtatttcctcgtcaagaactcacatttgatccaccagctcatgaa

SEQ ID NO: 139362 - DNA, 291 bp, Arabidopsis thaliana
gctaggtttagcggctgacccggagaagactgctcaacttcagttagctgagatcaagcatgcacgtcttgcgatggtcgccttcttgggattcgcggttcaagcggctgcaacaggtaaaggtccactcaacaattgggctactcacctcagtgatccactccacaccaccatcatcgataccttctcctcatcttaaaatcattatcatgtgagattctatttgtaacttatgtaaaaacagagctatgatgatactgaatcgactttgggcttttgcttgtttggttt

SEQ ID NO: 139363 - DNA, 414 bp, Arabidopsis thaliana
  unsure (1)..(414): unsure at all n locations
gcaaagtttagaacgcgagcgaattctccgcggaattggggttaaaaggaagaacttttagggtttttgattcttcgggttttctcgtgctttgattcctttcaagtcaaagcaaagcattaccttttctcgtccatatcttttgacgacctaagtttctgctgtgaattgttaaacagccatcagcctgggcttgattagccaaccctgttaaggcanggtttgaactaaaagtgagatagtgagatggatgtctcagcacttttaacgtctgctgggattaatatagcgatatgcgtagtgcttgtatcgctttattccattctacgaaagcagccagccaattattgtgtttactttggtcgattgctttctgacggaagagttaaacgtcatgatcctcgttggtatgag

SEQ ID NO: 139364 - DNA, 382 bp, Arabidopsis thaliana
cacgtggtaaatctattgattttagattttgatatgtgtaaaacaaaattttcatttttatatagaaaaaaataattgtaagtaattataaatatcaaaaagttagttactaactttcaaaaccgtactttatataataagatatgaaaattcactaaaaaattccatacaactttaggcatatagagcttatttatactaaaacccctaaaatatcctaaaacaaactaaaccagcaagactcatgttgcatgtgtcgtcattttactgtgacgcatgagtaagcagcactgagagattttagtcactcacatataaaaatatggtccattgggtgtggattagtgtttcaaggagccatacaaagattgtatgtcactgt

SEQ ID NO: 139365 - DNA, 102 bp, Arabidopsis thaliana
cacacgcgtccgacttttataatacgaccacgtttgtgactccattaatggcggtctcatgctccctcaattcttcatgatctaactactacgagatctgat

SEQ ID NO: 139366 - DNA, 356 bp, Arabidopsis thaliana
  unsure (1)..(356): unsure at all n locations
aaatcctagggcacaggtgaaatcgccgagtgacgtctagccaccgcaccgcctccttctccggttatctcgctactaatcagactattccacagctatgtcacaggtagacaacagaaattcatcagcagccaagcgtgctagaactgacggggggcgtagagaagatgattggatctgcccaagttgtggcaatgtcaacttttcattcaggacaacttgcaatatgcgtaattgcactcagcctagacctgcagatcataatggaaagtctgctcncaaacctatgcaacatcaacaaggtttctcatcacccggggcatacttaggatctgggggtccccctccagtatata

SEQ ID NO: 139367 - DNA, 285 bp, Arabidopsis thaliana
acgcgtccagaatgagaggcgtaacaccaaactattaccattcttacactttcttcttcttcttcttcgttgtcttattagctctgtttcttcatgttttctcgataaacactttgtcagcgagagagactctaacaatctcaagcaaccgaagcattgtgtctcccggtaacatcttcgagctaggtttcttcaaaactacaacaagctctcgaaatggtgatcattggtatcttgggatttggtacaagtcaatctctgagagaacttatgtatgggttgcca

SEQ ID NO: 139368 - DNA, 369 bp, Arabidopsis thaliana
cccacgcgtccggatagattcatctttcaatctttttttatcttaaaacaaaactttgtgtgaagagaaagatggagatagaatcaaagttcaagagaatatgtgtgttttgtggaagtagtgctggtaataaagtcagttacaaagatgctgctatcgaactcggaaccgaactggtatcgagaaatatcgatcttgtctatggtggagggagcattggtttaatgggtttgatttctcaagctgttttcaatggaggtcgccatgtcattggggttatccccaagacactaatgccaagagagataacaggagagacagtgggagaagtgaaggcagtagcagacatgcaccaaaggaaagctgaaa

SEQ ID NO: 139369 - DNA, 419 bp, Arabidopsis thaliana
cagacgcgtggggtttcgagattcggagatctgcaagggagaagatgatcgtttgcgtcgccgtcgtcggccaccagaacaatccgctttacatacaaagcttcacggatgctgacgatgctctcaagctccaccacattgttcattgctcccttgatgtcatcgaagagcgagtgaacaatccgaaaaagtctggtacaacactgaacgaggcttttcttggcttgctctatcctactgtgaactacaaagtgtatggttacttgactaataccaaggttaaatttatattggtcactactgatttggatgttagagacaccgatgtgagaagtttcttcaggaagttccatgctgcttacgttgatgcagtctcaaacccctttcatgtccctggcaaaaagataacctcgagaacc

SEQ ID NO: 139370 - DNA, 280 bp, Arabidopsis thaliana
aagcaaactttgctctcggttcacttggaggtgatcctcttaaaacaaccggaattgttgaacttggcggggcttctgctcaggtgacatttgtgtctagtgagccaatgcctcctgagttctcacgtacaatatcatttggaaatgtcacatacaatctctacagtcacagcttccttcattttgggcagaatgctgcacatgataagttatggggttcacttctctcaagagaccataattcagctgtggaacctacacgggaaaaaatcttcctcga

SEQ ID NO: 139371 - DNA, 319 bp, Arabidopsis thaliana
gagatagagaagtacccttataggtctcataaacttcatcactttcctcctgtcgattcctatcctcggtggtggaatatggcttagcagccgagctaactcaagcgattgcctcagattcctccagtggccactcattatcatcggaatatcaatcatggtcatatctttagccggaatcgccggaacttgttaccataacaagttcctcatgtggctttacctttttcatcatgttctttgtaatcgctgctcttatatgattcataatcttcgcttacgtatttactgatataggctcatgccggtttgtgatgaa

SEQ ID NO: 139372 - DNA, 221 bp, Arabidopsis thaliana
ccacgcgtccggtatctgtgttggttctacttatctcgcttttttatggttccatattctcgtatggggttctctgttccatttagtaagtgcaccatgagggttctgaacaattatgccatatgatgtcaagagtcccgagtttcatgtccattgcatgtatttagtaatgaatctgtgtgtcttaactgaaaatgaggaaggcctatgagtcctaaggt

SEQ ID NO: 139373 - DNA, 361 bp, Arabidopsis thaliana
gaagattcttgtctctttgataaattctcggagtaggaggaatctctgactccttcgggcgagttgagctatgtggagttcggttgccaatttgaaggagaatttgaacaagattgcgcacgatgtgcatgacgacgacgaagatgatgatgaagatctcaccatttatgggtccaccaatggcggcactgatcggaggaattctaatggctttaggtattcgaggtctccaatggccaatggtttcgaatcgcctgttaatcctgagattgagagatataaagcagagatcaacaagcttcaaaaatcagaatcagaaatcaaagctctttcagtaaattatgcggctctactaaaagag

SEQ ID NO: 139374 - DNA, 359 bp, Arabidopsis thaliana
gggaaacacacaatgagtttccaatttgtttctgatctggttgaaggtttgatgagactgatggaaggagaacatgtcggcccattcaacctcggtaaccctggtgaattcacgatgctcgagctcgctaaggtggtccaagagacaattgatccgaatgcaaacatagagttcagaccaaacacagaagacgaccctcacaagagaaagcctgacatcacaaaggccaaagagcttttaggttgggaaccaaaggtctctcttcgtcagggactgcctctcatggtcaaagatttccgtcaacgtgtctttggtgaccagaaggaaggctcctccgcagctgcaaccaccaccaagac

SEQ ID NO: 139375 - DNA, 387 bp, Arabidopsis thaliana
ctggttattctcagaatcttggatctggctatcctggaagttcagtgagtggtggcgcagaaggaggctctcagatttctttgagttctcgccatccatcaattacaggtgctcctcaagagactgacattggtggtggatacagatctcatttatctacagctgctagtcattacggaacacaatatggctctgtgtatggatcaacttctcttagcagctctcagcctttaagcaccaatggtttaggttcatcagttttggataaccgctcgggatatgtccctactttacctgattcaccaaagtttgcatctggaagctatttgtctccctcgagccatggttatggtcaaaagacggacgatttgtattccgataagctgt

SEQ ID NO: 139376 - DNA, 357 bp, Arabidopsis thaliana
gcaagatctcgtcaattctctcttcctgactacgttgtctttgtcatttctgaataccgcaaagtcttacggaaaatgtacgatttgggtgctcgacgtgtccttgtgactggaacaggaccaatgggttgcgtcccggccgagctggcgcaacgtatccgcaacggcgagtgtgctaccgaactccaacgagccgcgtcactattcaacccacaactaattcaaatgataacagacctcaacaacgaagttggatcttcggccttcattgccgctaatactcaacaaatgcacatggacttcattagcgacccacaagcatatggattcgtcacgtcgaaggtggcttgttgtgga

SEQ ID NO: 139377 - DNA, 343 bp, Arabidopsis thaliana
cccacgcgtccgcccacgcgtccgaggttttcgtgagagctgatctcaatgtacctctcgatgataatcagactatcactgacgataccagaatccgtgccgccattccaacgatcaagtatttgattgaaaatggtgctaaagttatcctctccactcatctggtaatattattcccacacactccttacggtttgattcctccatcacctgaactaaagttgaacactttgatctttcagggaaggccaaagggagtcaccccaaagtttagtttggctcctcttgtccctaggctctccgagcttcttggtattgaggtcacgaaagctgatgattgtat

SEQ ID NO: 139378 - DNA, 370 bp, Arabidopsis thaliana
gacacagatccaatcggatcgttccctccctttgatctctgataacatcaattcgtttagagatcgaaccagagatattcttagcgtcgtcgtcgcgcttttgttcggtgttggttgtggtgctttaaccgctgctactatgtatcttgtttgggctcttgttgtgaatcgtcaaagctatgattttgaggaagaagaagatgattatgagaatgatgaatctgatgctgctagcttgaagaaattgggttatgttaagattccagctccagctcctgctcctgtgaaggaagctgcttgatttgaggttgtgaatttcagtttctgcatattatcatgatttacgttgttgcttatctatgttgttgcg

SEQ ID NO: 139379 - DNA, 172 bp, Arabidopsis thaliana
gagacattgtgctattgctctcgcagggaggtctaggcatatcctccctgccttaaagagagcttttatcttagtaatgttgaactttatgtagtacttatgtaggagagactttataattctaatgctttattctggatcttactgctgtcgtatttaggtgatgtttgat

SEQ ID NO: 139380 - DNA, 394 bp, Arabidopsis thaliana
gggtcgagcacgcgtccgagaagacatttttatttagatttccctctgatcctctcttttagatttcgaatcgagaccagatctgcgtgaagatgatagagaagtgtataggagcgcatcggtttcggagattacagagattcatgcgtcaagggaaagtgacgattctttgtctcgttctcaccgtcatcgtcttaaggtggcacaatcggagccggtaagtttggtacgccggagaaagatatcgaggagatccgtgagcatttcttctacacgcgtaaacgcggcgagcctcaccgtgtcctcgtcgaggtctcttccaaaacgacgtcgtccgaagacggaggaaatggtggtaacagctacgagaccttcgatatcaacaagctattcg

SEQ ID NO: 139381 - DNA, 419 bp, Arabidopsis thaliana
cggacgcgtgggcggacgcgtgggccttttcccggaaaatttatttgctgatttttcttccttccatcgccactttcctggaaaaaaaaactaaatttcgtctctttctttaagctaaaggagctttctgtgatcaattttttctatatttctgtagttgcgttcttatttcacgcgctttgtgatttgattatttaagccactaatggcttaggatctgtatattatcacttcatgaattctcgttttctcggataagttgttaagtttctaaattagggaattttaggaattagggcttttttgggtttgtatgtgtgcttgattgggtaagaagatggctgcagttataagaaagttattacctttcgcatcaccgaatcctaaaagggataatcgagaaagtgacgatgatgatg

SEQ ID NO: 139382 - DNA, 398 bp, Arabidopsis thaliana
aagcctgggaattttcgttacctccttcgttcttctctgatctcgaattcaataccaaattcttcaatctcccgaatctgattttcttatcactatccctggataacaaaagcccccaaagtaaaaacccaattgcgattccctcgtaaaccaatctagggttttcgcgagttcgtctctgagcttgtttgtttgtgatcgtgtgagaatgtctcggtgttatccgtttccaccacctggttatgtttggaaagaaagtctgatcgaatcgatcaagggggcataggaggaagtgaagaaagatagaaaacacaagaggaatgaaaaagatagaaacgatagggataatgaggcggggaggagcaggaagcatcggcataagagacggcggaaagatg

SEQ ID NO: 139383 - DNA, 283 bp, Arabidopsis thaliana
gggcaaaaactagaaaaaaaattgatggatttttttatatggctacaaaagaagattgttggatacgtaatcgaaaatgacgttatccttcaagacttgttcgtcgtcttctcctcgattaacaccaaaatccatcgccggagcaggagacgatgcttctcaattcttccatcacaagacaagttacagagcacacacaaccacactcttcttcatcctcgtttctctttctctctttggtttcatctctctttagtattcccccaacacgatttatcgagct

SEQ ID NO: 139384 - DNA, 212 bp, Arabidopsis thaliana
aggacgcgtgggactgagacgaaatcagatgacttggctggtggtctaaacattgaagccgaacccgttgagcaacaagaagagaacaccaaggacgaactgtagatttcacttctgatgtttctcctttgtgtttacctctttagtttaaagcagaacatcgttttactcgaatatcaagattagtttaattaagcagtttttgatggatt

SEQ ID NO: 139385 - DNA, 406 bp, Arabidopsis thaliana
aatgacattggtaaaggcatagaaaaaagaaaaaaaaaactgttcttcatcatcatcgtctctcccaagaaaaaccatgaaaatgaagaagaaaggaaaagtttatccatctcctcctcctcctcctcaatcttcatcatcttcttcttcttcgaaccatctcaacgaagaagatgatgattctctctctgtgttgaagcttcttccagcgacgattttggttcttgtttctgttctctcctctgaagaaagagaggttcttgcttacttaatcacaagaggaaccaccatttccgatagaggaaactcttcttcaaagaataagacgaagaagaagagcaacaaatctagcaaaaatcacaagccaccagttttcgattgtgagtgtttcgattgttacactaac

SEQ ID NO: 139386 - DNA, 200 bp, Arabidopsis thaliana
accacgcgtccggagactttataacgaaatgtcaacacccatcttctcgattcatcaatttctctaaggttcttcgttttcgttgttgtgaggaattttgcgccgatgtcggcggagagttgtttcggaagctcgggtggataaagcagcagcaaaggagtggctactcatggtggtagctatgttcattataatgtcta

SEQ ID NO: 139387 - DNA, 83 bp, Arabidopsis thaliana
aaggacgcgtgggcggacgcgtgggcggacgcgtgggcttacactccctaactatttcgagccgtataagttaacgtaaaaga

SEQ ID NO: 139388 - DNA, 341 bp, Arabidopsis thaliana
ggcagttacttatgcgtacagctggaaaaacgcctccggtttttctcagaccataaagaattggtttgggggacacagccataattcaccttctcttttcatagtggcaattcttatctacttatccccgaacatgctttctgcgttgctgtttttgtttccattcattcggcgctatcttgaaaggtctgactataagataatgatgctgatgatgtggtggtctcagcctcgtctgtatataggaaggggtatgcatgagagcgctttgtcacttttcaagtacacaatgtcttggatcgttctgctgatttcaaagctggcattcagttattacgctg

SEQ ID NO: 139389 - DNA, 241 bp, Arabidopsis thaliana
tgaatctgaaaagatacgtcgacttgcagactttttatttggaagcatccttaaagtaaaggcgccacttctagcttacaacagtttcgtggaagctatttatgtcttaaacgactgccatgcccacactggccatagtaatccagattctagacaatcaagaacaaaggatcaagttttttctatcagagggaatgatcaaagggctacgtctaagagaatgcagatctacgttactttg

SEQ ID NO: 139390 - DNA, 307 bp, Arabidopsis thaliana
agaaaaaatcaaattcagaggcaaggaatatcttatcccgcaccgctccatcagtattctccctgactgcaaaaccgttgtttataacaccggggagatcatctctcatcatacttcaagaaacttcatgaaatcgaaaaaagcgaataagaactttgatttcaaagtgttcaccgagtcagtgccaagtaagatcaagggtgactcttttatacccgttgaactctacggcttgaccaaagatgagtctgattacggatggtacacaacaagctttaaaatagatgacaatgacctctctaagaag

SEQ ID NO: 139391 - DNA, 360 bp, Arabidopsis thaliana
agctcgactcgtcgtcggcggcggtgtaaaaatagtcggagctatggcgatgcaggccggagttggcttatccaggatctttctcttagccggagcaggttacactggtacgatcatgatgaagaatggaaaattgtcggatttgttgggtgaattgcagagtttggtgaagggaatggagaaatctggagaagggtctgagggagattctgatgtttctgatgctatagctgcacaggttcgccggttggctatggagattcgacagctagcttcgcagcaacacataacggtcatgaatggagtttctggtgactctcttgttttttcagcaaacctacaagcccttgctgttcctgc

SEQ ID NO: 139392 - DNA, 418 bp, Arabidopsis thaliana
agcagaaccgtcgttgattgaagaacattccgatcatcagccatcatctgaggggatgaagaacgaagaatgttttctgattgatcacctccaattaggattgactgctcttcagaacttgcttacaaagtatccagatctggcttcagtgttttcgtctaaggagagattgttacctctctttgaatgtttttctgtggccattgcatcaaaaacagatattccaaaactctgcctcaatgtcctctctcggttaacagcttatgctccttgcttggagacgatggtatctgatggatctagtcttcttctcctcttacaaatgcttcattctgcaccttcttttcgcgagggtgctctccatgttctttatgctttggcaagcacaccagaacttgcttgggctgctgcaaaacat

SEQ ID NO: 139393 - DNA, 248 bp, Arabidopsis thaliana
gtaatcttagctaaacgctacatgataaactggacccgaacgcccgagcttatcggaacacgagttttcatagtcatgatgaccggttttctcttggctacggtttactggaaagtagatgactctcctagaggcgtccaagaaaggttaagcttcttctcctttgcaatggccacaatgttttacagttgcgcggatggcttacccgcttttatccaagaaagatagattttcttaagagaaaccgc

SEQ ID NO: 139394 - DNA, 214 bp, Arabidopsis thaliana
accacacgtctgcggacgcgtgggcggacgcgtgggcggacgcgtgggatgaagctcaccttcagagctcgtgccttctcaacacaagcataagagaagcttgaagcttcaggttgtacactcactgtgttgccgggaagaaagaaatgggttaagccatctgttgcaaagaaccaagcacgagcagatgaatactttgccaacaagagagctg

SEQ ID NO: 139395 - DNA, 355 bp, Arabidopsis thaliana
atgaagactctcccagccttgctaccactgagctcttgtcaatgctctttcaggcttgcggtgctaaatactccatcaaggatgatctgcttgatgagactgatgtcgatgatgttgtcgtttcccttgttaatcttgctagagccggggaactcgaagattatcagagttccagaaagaaggaactcaagaacttcaaagaaaatcttgtttccttctggaataatctcattatcgagtgccaaaacggaccattgtttgatagagtcttgttcgacaagtgcatggactacattatcgcactgtcatgtactccacccagagtttaccgtcaaactgccacgctaatgggcct

SEQ ID NO: 139396 - DNA, 427 bp, Arabidopsis thaliana
cattgatcaaaccagagagccgtcagggagagcaaaacaaagatcggagaagatgaagacgattctttcttccgaaacgatggacatccccgacagtgttaccatcaaggttcacgctaaagtgatcgaagtcgaaggacctcgcgggaagcttgttcgcgatttcaagcatctcaacctcgatttccagctgatcaaggatccagagactggaaagaagaagcttaagatcgattcgtggtttggaacacgcaaaaccagcgcctccatcagaaccgctcttagccacgtcgataacttgatctccggtgttaccagaggtttccgttacaagatgaggttcgtgtacgcccattttcccatcaacgcctccatcggcggtgacggaaagtctatcgagattcgtaacttccttggcgagaagaag

SEQ ID NO: 139397 - DNA, 410 bp, Arabidopsis thaliana
cagacgcgtgggctcgattctttcttacaatctctctgtctctctctgcttccttttctactgtcttctttcttcttctctagcttttgaattttcaatattgatttctcccatggcgagtagcagttgcagcagatctatctctgtttcaaattctgattctctcggtgttttttgtttgagctagggctaaattagtttccttcttgggtttttattcgtaatccgattcaaagtttgtatctttgggagggatgggtaagaggcaaatatcacaagatgaagtaggtccgcccataaaaccaagagctggtttacgaagggaacaagctggaagaggttcttacagaggtagttagttactttgtatctcatcgaaaacgaatcacaagaagcttcttttttttttt

SEQ ID NO: 139398 - DNA, 420 bp, Arabidopsis thaliana
  unsure (1)..(420): unsure at all n locations
cccacgcgtccgcgtttttgaaaaaactcaaattatcgtcgttttgttctcagatttcttctgctctcttcttcttctccttcttcttcgttccaccgcctctgttgctttatcttcttcttccttccttcgattgttgattacgtcggtggatctttgttctcctctgtgttgttttcattgctagatttcgtcaatgattggcttctcacgattcgatttttccggctcctgttcttaatttcctctgagagaatgatggatgagggatcagtangggatgtgagtaggattgatgaagctgatgttgctcaccttcaattcaagaatagtgagcagtcgtttaaaccggagaacattgaagtccgggaagtaaaagaagtgcaggttcagagagaagctggttctcctgattgttct

SEQ ID NO: 139399 - DNA, 425 bp, Arabidopsis thaliana
cacctcttgcaaaccaacgtaaaacactaactaagagatcaatatggctggagtgatgaagttggcatgcatggtcttggcttgcatgattgtggccggtccaatcacagcgaacgcgcttatgagttgtggcaccgtcaacggcaacctggcagggtgcattgcctacttgacccgaggtgctccacttacccaagggtgctgcaacggcgttactaaccttaaaaacatggccagtacaaccccagaccgtcagcaagcttgccgttgccttcaatctgccgctaaagccgttggtcccggtctcaacactgcccgtgcagctggacttcctagcgcatgcaaagtcaatattccttacaaaatcagcgccagcaccaactgcaacaccgtgaggtgatgagcgacggtcaaatgaagctact

SEQ ID NO: 139400 - DNA, 162 bp, Arabidopsis thaliana
cccacgcgtccgcggacgcgtgggcggacgcgtgggctgagaggcgttatgcgccccggatctcgaatcggcgccgctttaacacatggagactttcctaatcacagcggagtcggtcaacgagggacacgctgacaagctttgcgaccagatctctgatgc

SEQ ID NO: 139401 - DNA, 171 bp, Arabidopsis thaliana
cccacgcgtccgcttttcagctctctccatcgtcgtcgtatctgtgactctcgtgatcatcgcctgaaaaaaatttgagataatggccagaaagttcttcgtcggaggcaactggaaatgtaacggaactgctgaggaggtgaagaagattgtgaacactcttaatgaagc

SEQ ID NO: 139402 - DNA, 345 bp, Arabidopsis thaliana
cacacgcgtccgagaaattcaaaaaacaacatggatgatcatgaaacccctcttttgtccaaggacttatcatcatcatcatcatcatcatcatcatcatcatctgtggtggtttcatctttgaaatggatattgaaagttgtaatgtctgtgatttttgtgacttgggttgtgttccttatgatgtatcctggatcactcggtgatcaaatcctcacaaactggagagcaatctcctccaacactctctttggcctcacaggaagcatgttcttaattttcagtggtccgattcttgtcatccccatcttggcttctctctatctgataatctcaagggaagag

SEQ ID NO: 139403 - DNA, 395 bp, Arabidopsis thaliana
ctcccgcactatctacttcttgctcctccgtcatggctttctcaacatcaaacgcgcttcgttaccatcatcctcaaatttctctcaggaactctcttcgcgctcccaaatcgccttcttttgtcaggcttcccctcggaaaggtgttacagagcaggattgtgatacgtgctgcttcgtctgcggctggtaatccacagtctgatgctgactttaatccgtatgaggttcttggtgttaaccctatagagggatttgacaagatcaagcaaacttatggaaggaaacttaaagatgctcagaggagcggtgatgaagccactgctgctctagtaagttacgttacctctctctttctttggagtcctgtaagtgattttttttttttttttttt

SEQ ID NO: 139404 - DNA, 291 bp, Arabidopsis thaliana
aaaaatggaaaagttgatacagctttcatcgtcaagcatgaagaggagctagctgagcctcaagaaattgtggcagtgaaagatctgacaaacgcaacggtttagaatgatacatcagctctgaaagaccacccaattattgcaatcttcgtctccttttgtgtgttcattggtacaaacttcggtaacgataagactgttttactagagtctgtggttttatcaatgttcttcttgtatcataaacaagaggaaacacttttgtttgtagtctctatgtcaagatttttc

SEQ ID NO: 139405 - DNA, 422 bp, Arabidopsis thaliana
gagtgtgttctgtgttctctctctcgcgcgaagcggttctctttcttttgtttatttgtttttatttgtttttctcttatacggaggagagaagatggtggcgcctgctttgttaccggagctctggacggagatccttgtaccgatttgtgcggtgattggtatcgccttttcgcttttccaatggtacgttgtatctcgcgtgaaactcacctctgacctcggcgcatcgtcttccggtggagctaacaatgggaagaatggatacggtgattatctaatcgaggaagaggaaggtgttaatgaccagagtgttgtcgctaagtgcgctgagattcagactgctatttccgaaggtgcaacttcattcctattcacggagtacaaatatgttggtgtcttcatgattttctttgctgctg

SEQ ID NO: 139406 - DNA, 418 bp, Arabidopsis thaliana
caaacacaaaaatactgctgaggaaaagcaatccacacgaatccaatcaaagttttcattttttccccaaaagtttgggatttggattccgtgccgaaccggaaaagaatcaactcccttcaatttaagggtttggggttccggttgggccccaacaaatgaagtgttaagaaaatcctcctccggttgggtctgtttcagatggaagacaatgataagtctccccctaaggattactataagattctagaagttgattacgacgcaactgaggaattgatcagactcaattatcggaagcttgcattgaagtggcatcctgataagcacaaaggcgatagtgcagctacagaaaaatttcaagagattaatgaagcttataatgtgctgatggaccctgctaaacgttttgagtatg

SEQ ID NO: 139407 - DNA, 269 bp, Arabidopsis thaliana
aggaaatttactccataaagttgcctggggacccgaaacttggcgaaggcaaacctgagaatcaaaaccacgccattgtgtttactcgcggaaatgctatccaaactattgatatgaatcaggataattattttgaagaagccttaaagatgagaaatcttttggaggaatttgaccgggaccatggaattcgaccacctactattctggagttagggaacatgtctttactggaagtgtctcctccttggcatctttcatgtccaatc

SEQ ID NO: 139408 - DNA, 385 bp, Arabidopsis thaliana
  unsure (1)..(385): unsure at all n locations
cagacgcgtgggcggacgcgtgggggagtttccgataaccgctatccgggagatcaaaattctgaagaagctgcatcatgaaaatgtcatccatttgaaagagattgttacttctccaggtaataaggaactcttatcttagcttgtaattgctttagaaattttgtcaaaaggggtgttaagtttgatatgtagagttttgtgactgtttttgtctttaaaaggtcgagatanggatgatcaaggaaagccagataataacaaatacaagggtggaatctacatggtctttgagtacatggatcatgacttgactggacttgctgatcgtcctggactgagatttacggttcctcagataaagtgttacatgaagcaactgctg

SEQ ID NO: 139409 - DNA, 423 bp, Arabidopsis thaliana
cggacgcgtgggcggacgcgtgggtttatcttttgaccccaccactggatctctctatatacacattcatctgagtaatagagtaaaaacgaaacacaagaagcaattatgaagaattgtgagagatttgctaatctcgctctcgcaggtttgacattggcaccactcgttgtgagagtaaatccaaatttgaatgttattctcacagcatgtatcactgtttatgtgggttgctttcgttcggtcaaggatactcctccaacggagacgatgtcaaaagaacatgccatgcgtttcccattggttgggagtgctatgcttctctcacttttcttattgttcaagtttctctcaaaggacttggttaatgctgtgctaacagcttacttctttgttcttgggattgtcgctctttcagcgaca

SEQ ID NO: 139410 - DNA, 345 bp, Arabidopsis thaliana
  unsure (1)..(345): unsure at all n locations
cagacgcgtgggcggacgcgtgggcggacgcgtgggcggacgcgtgggctactctcactgtaatcccttagatcttcttttcaaatttcaatggcgtccggtgatgttgagtatcggtgcttcgttggaggtctagcatgggccactgatgacagagctcttgagactgccttcgctcaatacggcgacgttattgattccaaggtctgttacacgccgagatcggactccgagtgatatcgatgatctcatcctcgacggatctgttccgatcntgtgtntctctgttacttgattcgattactctgttactattctcgttctttgttactactactactacta

SEQ ID NO: 139411 - DNA, 421 bp, Arabidopsis thaliana
cccacgcgtccgaagatcttctcttttcattttttttttttttttttttttgttcgtttaatctctctctacgattctcgctcactgttcatcgaatccgtcattggatcgattcgaatttggtgtgtgttttctttccaatacctctgattagagatttcagcagatctgaacggaggagcgtcagatcggaatcgtccgtcggtggtttggtaaaaaaaaaaatggaggaagctttagaaatggcgagagccaaggatacaaaagagcgcatggctgctgttgaaaggctgcatcaacttctcgaagcttctaggaagagtttgagtcctgcggaagtgacgtcacttgttgattcttgtttggatctccttaaggatagtaattttagagtctctcaaggtgctcttcaagctcttgc

SEQ ID NO: 139412 - DNA, 443 bp, Arabidopsis thaliana
  unsure (1)..(443): unsure at all n locations
cggacgcgtgggcggacgcgtgggcggacgcgtgggcttttgcaggattggaaaactgagaggtataaagaaatcataaaatcaggaagtgtagaaccaagacctggtgtaataagactaatggatgaagcaaaagctgctgggaaaaaactagctgtttgttctgcagctacaaagagttcagtaatcttatgtctcgagaatctaatcgatatcgtaagttgtttcctttcgccaatctctgatctaccatgcttctttcaagttttttctttatcgattatactttatgtcgtttaggagcggttccaaggacttgattgcttccttgcaggtgatttcatcacattctctctcttcttatacttgcattttatgtgttaaacacttttctaaagtttgaatccatttggttgtatatttggctttgtangggatgatgt

SEQ ID NO: 139413 - DNA, 264 bp, Arabidopsis thaliana
cggacgcgtgggcggacgcgtggggagaaacagcagaaaatggatgtgcattggtatcattgtgctgcttttgatcattctcattgttgtcatccccatcattaccagtttcagctcttcttgagatactggctatgttcactccttttgttttgtttcgctcttctttgtaccaatggatgtcttaatccttttgtgttcttcaaggatgtcttaatcctttcgtgtcttgtatccaatttcaatgaaatggtgaatgtttac

SEQ ID NO: 139414 - DNA, 396 bp, Arabidopsis thaliana
ggaatcccttggaaacgagatataaataccctatttgctctcatctttacactcatagcaaaaaacatcttgttttctctgccaatctcaatttctctcccaaccagaaaattctctcactctctctcgatttcgcggaaatggatttccacagccttttgagaagggatcttcaatttctctgcaagaggaacaaaatcccagctaatatgaccaatatcgccatggctgatgctctcaaatctcttgagattgttgatggtcttgatgaatacatgaatcaatctgaatccagtgctccgcattctccaaccagtgtagcaaagctgccaccaagcactgcaactagaacaactcgacggaagaacacaacaaaagctgagcctcagccatcat

SEQ ID NO: 139415 - DNA, 189 bp, Arabidopsis thaliana
aaagctacgagtcaattaattaactatcttttatgaggagaacgagatcgaaggttaacgagtttctattgtatacaacggaagataaatctatctaataaaaaagttggtgtgttcatttgtaatttttttcccccatcagtttaaaagttatgttgtatgaaataagtatttcaataataatataat

SEQ ID NO: 139416 - DNA, 402 bp, Arabidopsis thaliana
caagacccttgataagaatctcgccaccagcctcttcaagattcttctgaagtataggccagaggacaaagccgcaaagaaggaacgccttttgaacaaggctcaagctgaggcagaaggaaagcctgctgaatccaagaagcccattgttgttaagtatggtctcaaccatgtgacttacctcatcgagcagaacaaggcacagcttgtggtcattgcacacgatgttgaccctatcgagttggtggtctggttacctgcactctgcaggaaaatggaagtcccttactgcattgttaagggaaaatctcgtcttggagcggtcgttcaccagaagactgctgctgccttgtgcttgaccactgtcaagaacgaggacaagcttgagttcagcaaaatcct

SEQ ID NO: 139417 - DNA, 420 bp, Arabidopsis thaliana
ggcgaattcctcaatctagtctccaatgtgttgaagcttaaacgcggtcatatattggagcttcttggttactgtaacgagtttggtcaaaggttacttgtgtatgagtactgtcctaatggatcacttcaagatgcactacatttggatcgcaagttgcacaagaagctcacttggaatgtacgtataaatattgcattaggagcttcaaaggcattgcagtttcttcatgaggtatgtcaaccgccggttgttcaccagaatttcaagtcttccaaggttcttcttgatggaaagctctcagtacgtgttgcagacagcggtttggcttatatgttaccaccacgcccaacgagtcagatggcgggttatgccgctcctgaggttgagtatggaagctacacttgtcagcgacgtatt

SEQ ID NO: 139418 - DNA, 427 bp, Arabidopsis thaliana
cggacgcgtgggtttttagaccaagctcaggctatcatctctccgttaattagggttttcttctctatctcgatttcaataccattgttgatccgctgagctagggttgttcgatcccgataattgtgtcgcttagctctgatctctgttcatcgaatttggttaatttgttttgattggttaagatacattggaaagcgatgccaccgaaggttgtgaagaggggaggcgccgcgagaagaggtgggaggcttacgagatcggcgctcaaggcgcagaatcctcacgtggaatcttcccatgacgaatctgttaatatcggtgagctctcaggctccgatgcactggaagccaaggaggtgactccggaggttgataaaactgttgaggaagagaatccattagatgtgccgaagtcatcggattc

SEQ ID NO: 139419 - DNA, 443 bp, Arabidopsis thaliana
cttcaggtaggttcgttgctcactcacgtcacgccggagaagacacatcggagatcgacaaatcgattcagagagagagagagatagcaattttcttctgtagtgttactttctgagagagtctggagagatcggtgttgagatttgggtaaatggaaacgagggagagagatctagaacgattgatcccgatgcataaatccggagcttctcctcgcgacgtcgttttgtctgttccgccgtctcctctcgcttctccgatccacgtcgccggcaaagaggcgatttacaaagtcattagaagctgggcctccaaaaagttcatgaccggatgtgtcattctgctaccaatcgctgtcacattctacttcacgtggtggtttatacatttcgttgatggattcttctccccgatctatactcatctcggaatcaatatgttc

SEQ ID NO: 139420 - DNA, 344 bp, Arabidopsis thaliana
gaatcatatgcctttcttttcgctatctctctctctctctctctccctttaacccaaacccatctctcaaagacttgacctttctctctctctatctctaatttatttatcgtttcgcgtgtcgccttctctctttctctcattctctctctctctttcccttcgtatctctctctcgtgaggccgtgccctagaagaagaagaagaagaagcccctttctccgggacttcaatccctaacttccgtcgccggatttctcgtccttgattatcggaggactctttaacaactttattccgatttcagatttccagatttgtaagctgctttctcctttctgggt

SEQ ID NO: 139421 - DNA, 217 bp, Arabidopsis thaliana
gaatatggtctcaaggctaaatctcaagggaggtacaagcgaatgataagaaagcctttacgtatccatgaaggccttattgtaagtggtaacgttgtaatacctatgtgtttgtttatctgtaatatatgcaacttcagcatctagattaaaagctgtttcaggttgaataacagtgaataaacaaaacttataaaacctttctatgtttatcttt

SEQ ID NO: 139422 - DNA, 445 bp, Arabidopsis thaliana
tccaagcagcttctctttggccatctcttcttgaagctgctttcttcctcaaattcttttttttccagattcttctcctttcttcttccttcttccttatttcgatttcgaattttgaattttctcaatggctcaatcgtgtcttaaaattgttcgaatcaacaatctaaggaacagagtgaatcgtcggattttgattctccgacgattcacacggttgttatggagtagaatcgttgcttgtactcctggcaaatctcggagatatctcttgctttctcgcgctcttccgtctccgactgtttctcgtccttctccttctccgatccccgccgtcgatgtcgtcgtcggtggtggtggtggtggtggtgagtttgttcgtcgttcgtcggttgtttacgataatgataacagtcatcggagatcggattctgatttggtttct

SEQ ID NO: 139423 - DNA, 393 bp, Arabidopsis thaliana
tgattatcaaaaactgttggttagtaacagaaattgttgcaaatgtaacatattatataagctttctttcactttggtgcattctctctaaataatggcctctattgatgcagtatctgattcttagttttgaaatggtttttgcataaattattgttctaatgcatttttgttttatctccagcatttccaagatcattgatcgttatgaaatacaacatgctgatgaacttagagccttagtaagtaattagctaagaacgtcattctaatattcttctggatgcggtttttggtgttatgaaggatagaagcgctgttcaagccggagaaacctcaatgttttgaactcgtaacaccgaacttaattctctagagttacagttattgtgt

SEQ ID NO: 139424 - DNA, 412 bp, Arabidopsis thaliana
cggacgcgtgggcggaagctgagctctaatcctgatcggagatggcgactagcgattctgaattcaattctgatcttcttctcgctcacaagcttcccgagacgcgttacacctacaatgaaagagatgtagcaatctatgctttgggaatcggcgcttgtggccaagatgctgtggattccgatgagctcaagtttgtgtatcacagaaatgggcaggatttgatccaggtcttaccaacttttgcttcactattcacacttggatctttgacagaaggactggatttgccaggttttaaatatgatcctagtctcttgttgcatgggcagcagtatattgaaatatacaggccattaccttccaaggcttccttaattaacaaagtaagcctcgctggtttgcaagataa

SEQ ID NO: 139425 - DNA, 366 bp, Arabidopsis thaliana
cagatccaaatcttcctacttaaccaaaacaacgaagcccataaagcctgatagtaatcctggaaacctcactaatatgatgaagaagctaatggaaatgaagaaatctaattccaagagcaagagggtcgagcttgtgattcccgaggaactgaagaaaattgatactggcaaaggaggagggaagagtacattgggaacattgcagaggaagctattcgggaaggagaaggtgaaggcattgacagaggttaagagtacaatgtctcttgctctcaacctccagagagtagtatgattttggtagaaccatctggagccatgatccacgattgagttgaataagagaagagtgttgttatatgt

SEQ ID NO: 139426 - DNA, 333 bp, Arabidopsis thaliana
tgttattttaaatttcttctttgtttcatgtcggactcaagagctatccatcgcctcactgtctctcaccggaatctacggttgtccaggaagaactcttctgtgtttgtttgacttgagctaatcagaaaggtgaaattgagacaatggagggtgaagttgctactaatggagtgattctcaagcataatggtgtaaaagatagttctttagaaacttgttggccatagaagaagaaaccggttgaggcaacgagtcttagcagtggttcatcagacatacaggaagagattagtgtggaatgtcctaagcgagtggctaatcaaagacgga

SEQ ID NO: 139427 - DNA, 443 bp, Arabidopsis thaliana
aaaaaaaatatgtattgtagagagtccttgtcgagtctccagactttgaacgtagcaaagagtctcagctctttgttccctaaacaatcagctctcatcaacccgatctccgctggacgtcgaaacaacctgcctcgtccaaacctcagaagacgatgtaaggtcaccgcttcacgggctaatattgaacaagaaggtaacacagtgaaagaacccattcagaatattaaagtaaagggatacataacggcccaagaagagtttctggagggcataacttggtcgagaggtctcgatgacattgctgatatccgcggcagatcattgctcgtcgagcttattagcgccaagactgaccagcggattacggtagaagactacgcacaacgtgtatgggccgaagcccctgatgagaagtacgagtgcgagtttgagatgcctga

SEQ ID NO: 139428 - DNA, 120 bp, Arabidopsis thaliana
catgtagaacctaatttttgtcaagttgcgtgtggacatagcctaacagttgcacttacaacatcgggccacgtctatactatgggcagtcctgtttatggtcagcttggaaacccacat

SEQ ID NO: 139429 - DNA, 318 bp, Arabidopsis thaliana
cagacgcgtgggcggacgcgtgggcggacgcgtgggcggacgcgtgggtggaaacacaccagtttcggaaaatgggcgaagctcgtttgggaaaaagagcactagttattcttactcggacactgcaagcatatccattgatgatcaatctgatggagagaaactttcgggatgtttaccttctacttctagttttaagagtgagttggtggattctatgtctcacgttactcctgaagccaacaaagtgtctcatgacttgaatgttcaggaatcagttagtagcagcaatgtagatggccagacatcattaagttc

SEQ ID NO: 139430 - DNA, 220 bp, Arabidopsis thaliana
aaaaaaaccattttttctcttttgttattgacttaaagaaagactatcaacgaataattatccttttttgagtttttcccatttcgtcgtcgtctccatttcatcgtcttctcgctgttctgctatattccgtttcgttggatgaggagaagaacacagtgaaagaagttgtgaaatcgagagagtttgtttcatgggcaattcatgtcgtggttctttt

SEQ ID NO: 139431 - DNA, 358 bp, Arabidopsis thaliana
cccacgcgtccggtaatcccttagatcttcttttcaaatttcaatggcgtccggtgatgttgagtatcggtgcttcgttggaggtctagcatgggccactgatgacagagctcttgagactgccttcgctcaatacggcgacgttattgattccaaggtctgttacacgccgagatcggactccgagtgatatcgatgatctcatcctcgacggatctgttccgatcttgtgtttctctgttacttgattcgattactctgttactattctcgttctttgttactactactactactactgttacttgtattttcccaaatcggtacgttcatcttcctgcttctgtgagcccggaga

SEQ ID NO: 139432 - DNA, 162 bp, Arabidopsis thaliana
caaatactaagagtgaaaccattgttctacctcacatgacagtcatgtttacattttctactttgttcaatatgaacgactaaaatcgaatcgtagttgcctccatttcgtctttaaatttggcttgaacttgtgattaatgattatggatgattcggtttt

SEQ ID NO: 139433 - DNA, 384 bp, Arabidopsis thaliana
ggaaaggtgaaagaatagctttgtgtgtaactaaagggtttaaagatttgttgcagataggtaatcaagctagacctgatatttttgatcttactgttgcgaaaccgtcgaatctttatgaggaggttatagaggttgatgaaagagttgtgcttgcgttggaagatgatgatgatgatgaagggtcgttgattaaaggagtgtctggggagtttcttagagttgtgaagccgtttgatggagaaggtttgaaacctttgttgaagggtttgcttgataaagggataagttgtttggctgttgttttgatgcattcgtatacttatccgaagcatgagatggatgtggagaagttggctttagagatgggttttagacatgttt

SEQ ID NO: 139434 - DNA, 279 bp, Arabidopsis thaliana
actgattacattgactttgaatacttttagcaactgactatataaatgactaaaattcttcaaacaatttatgtataccctttttgttgttgtctttacatttctagagaattttatttgatcataactggttttattcgaccaaaaaaaaaaaaaaaaaaaaaaaaaaaaaaaaaaaaaaaaaaaaaaaaaaaaaaaaaaaaaaaaaaaaaaaaaaaaaaaaaaaaaaaaaaaaaaaaaaaaaaaaaaaaaaaaaaaagggggggccgcccaaaaggt

SEQ ID NO: 139435 - DNA, 386 bp, Arabidopsis thaliana
cggacgcgtgggctttggcccaccttacgagtggcaagtgtacaatacgctcaatagctgttatggaattcctgctgtacatcataagggtcgtcaaggagatttttacattctggtcatggacatgcttgggcctagcctttgggatgtttggaattctttggctcaatcgatgtctccaaacatggtagcatgcattgcagtggaggcgatatctattcttgaaaaactgcatatgaaggggtttgtgcatggagatgtgaaaccagaaaactttttgcttggtcagcctggaacagcagacgagaagaaactataccttatcgatcttggtctagcatcaagatggaaagattcacactctggccagcatgttgaatatgatc

SEQ ID NO: 139436 - DNA, 383 bp, Arabidopsis thaliana
gtgtcataaccacaatcacttaccggatcttctctccctcgtatttgaagccacacaacatgaacattagggtgagaagagatcgagagaagaatagtttgatcatcttgtgagaaaaataatggctgcttcagtgatgctatcttcggtgacattgaaaccagctggtttcacggtggagaagacggcggctagaggattaccgtcgctcacaagagctcgtccctccttcaaaattgtcgccagtggcgtcaagaagatcaagaccgacaagcccttcggaattaacggcagcatggacttgagggacggcgtcgacgcctccggcagaaagggcaagggatacggtgtttacaagtacgtcgacaagtatggagctaacg

SEQ ID NO: 139437 - DNA, 237 bp, Arabidopsis thaliana
caccttgtatacaagacaaattcttgctgggttgaattatctccacgataaaggctttgttcacagggacattaaatgtgcaaatatgttggtggacgctaatggcaccgtcaaagttgcagattttggattggcagaggcgtcaaagttcaacgacattatgtcttgcaagggaacattattttggatggctccggaggttattaaccgaaaggatagtgatggcaatggaactcc

SEQ ID NO: 139438 - DNA, 369 bp, Arabidopsis thaliana
gttagttttgtcttcaaattctggagctttgaagctagatcatcaagttatcgaaatctttgttaggattttaggtagagaatctcagtactctgttgcagctaagttgctcgataaaattcctctacaagaatatctcctcgatgttcgggcttacacgacgatcttacatgcgtattcacggactgggaagtatgaaaaggctatcgatttgtttgagaggatgaaagagatgggtccttcacctactttggtgacttacaatgtgattctcgatgttttcgggaaaatgggtcgatcttggcggaaaattctaggggttttagatgaaatgagaagcaaaggattgaagtttgatgagtttacttg

SEQ ID NO: 139439 - DNA, 376 bp, Arabidopsis thaliana
aaagctatcaaactccagtcaatggcgatgatgacgacgacgacgacaacattcttccatccactacttcctgctaacacttacaaatccggagctgtagcttcttcctttgtctcagttcctcgttcgtcgtctctccaatttcgctcacttgtgtcagattctacgtcgatttgtggtccaagtaagttcaccgaaaaaaacagaagagtatcggttaccgtttccgccgccgcaacaactgaacctctcaccgtcctcgttaccggtgccggtggaagaacagaaattgaaggagaggtcggagcagttcgtggcaaggggtttagtgaggaccaaggagagtaaggagaagatcaatggagaggatgaagta

SEQ ID NO: 139440 - DNA, 381 bp, Arabidopsis thaliana
gaagtaatcacagagaaagagaagatgtctgagaaaaagggaaggaaagaggaagtgattaccagagagtacaccattaacctccacagacgccttcacaaatgcacctttaagaagaaggcaccgaaagccatcaaggaaatcaggaagttcgcagagaaagctatggggactaaggacgttagggtagacgtgaaattgaacaagcaaatctggagcaagggaatcagaggtccaccaaggaggatcagggttcgtgttgcacgtaagagaaacgacgatgaagatgcgaaggaagagttcttctcccttgtcactgttgctgaaatccctgcagaaagaccactgaagaagaagtgaagagagaaaaagagtctgatg

SEQ ID NO: 139441 - DNA, 311 bp, Arabidopsis thaliana
gtgatccctctagctaagtaccgtaaggcgatatgcgggtctcagctctcagttggtatgagatttggaatgatgtttgaaactgaagattccgggaaacgaaggtacatgggaactattgttggaatcagcgatttggatccgttgagatggcctggttctaagtggcgtaaccttcaggtagaatgggatgagcctggatgtaatgatccatgggaagagtttgtgggatgcgtaaggtgcataaggatattgtcgccaactgaggtccagcagatgagtgaagaagggatgaagcttttgaacagcgc

SEQ ID NO: 139442 - DNA, 323 bp, Arabidopsis thaliana
cactcatgtcgctcacgttgtctcagggttgcaacattttgtagagaaattgggttcatatgcatgatattctgcaatcgtatgaagacttaggagcgagactcttccttcatcttgttctcttgtcagactttcacatctttcttcactataggcatatataactagagacatgttgcgttttttgtaacaatcaggagattggttgtttacacaatcggaaacgaagaggacaattgagtgggctttgtgtcgatgtatgtggaatgtctgtcatccacatgagcactcattgatgtgtttgagtagctctctttctttgt

SEQ ID NO: 139443 - DNA, 166 bp, Arabidopsis thaliana
attaagaatgggttaatagttggttttcatgatatgtttacgttgttcataaataaaaacaagttgttattaagaatatgcgatgagacttgatgaaatatcagaaccatcaacaaactttggaatgttgtagcattctcttaacaaaaacttaacataagggttc

SEQ ID NO: 139444 - DNA, 266 bp, Arabidopsis thaliana
tgggattcatataatcgcactctcctctcgttcctcatcctcatcgccttgaagctctctcatcttcttcttcttcttcttcttcttctccggatctcgcttctccgtcaacgactccgatcaacctaccaggataactttgtgttgagaagatgtctagtgcatccaagatgaaatcgagagacaagaaggtcatgaatgattcacagaagacacctagtatagcgtctggatccatgggtggaagtagtgttgtggttggtggt

SEQ ID NO: 139445 - DNA, 351 bp, Arabidopsis thaliana
cccacgcgtccgcccacgcgtccggcgccgctttgtctctgtcgcaatctcaaccatatggagaaagacatggcaatgatgggagacaaactgatactgagaggcttgaaattttatggtttccatggagctattcctgaagagaagacgcttggccagatgtttatgcttgacatcgatgcttggatgtgtctcaaaaaggctggtctatcagacaacttagctgattctgtcagctatgtcgacatttacaacgtggcaaaggaagttgtagaagggtcatcaagaaaccttctggagagagttgcaggacttatagcttccaaaactctggaaatatcccctcggata

SEQ ID NO: 139446 - DNA, 346 bp, Arabidopsis thaliana
cccacgcgtccgcccacgcgtccgcggacgcgtgggttctactccgatcgatcaattgaagattgaaatggaagctaattcaggcggaggaggaggagctgaaggcggaagagcggtaaccggagggataaggatagggtgaagagacggtctgagagaaggaagagtagtgattctgaagatgacgttgaagaagaggatgagagggataaacgcagagtgaatgagaaggagagagggcatcgagaacatgagagagatagaggcaaagataggaaaagggatagagagagggaagagaggaaggataaagaaagagaaagggagaaggatagagagaggagag

SEQ ID NO: 139447 - DNA, 382 bp, Arabidopsis thaliana
gacatttcgccattagatcctcttttttttcttcgtaggtcgaacgaaattttgtgtttcgttgaggagaaaattgagccgtgtttgtgttgagatgtctatgatcgatgagccgttgtacccaatcgccgtacttatagacgagttaaaaaacgatgatattcagctaagattgaattccatcagaaggctttctacgatcgctcgtgctcttggggaagagaggactagaaaggaattgatccctttccttagcgaaaacaatgacgatgatgatgaggttttattagcaatggctgaagaattgggtgtgtttattccttatgttggtggtgttgagtatgcacatgttcttcttccacctttggaaactctttcgact

SEQ ID NO: 139448 - DNA, 398 bp, Arabidopsis thaliana
caaatacctatgtcaccgccgtcggcaaccgccggtgacatcaaccaccgtgaagtagacccgacgatctggcgcgcttgtgctggagcctccgtccagatccctgtccttcactctagggtttactactttccacaaggtcacgttgagcactgttgccctctcctctctactcttccttcctccacctcgccggttccatgtatcatcacttcaattcagttgctcgccgatccggtcaccgacgaggtctttgctcaccttattcttcaaccgatgacgcagcagcagtttactccgactaattattcacgattcggcagattcgatggcgatgttgatgataacaacaaagtgactaccttcgccaaaattctcacgccttctgatgcctaaca

SEQ ID NO: 139449 - DNA, 429 bp, Arabidopsis thaliana
gcgataattatgaacaaaggcggtggatccggtggcggatccggtggaggaagcggtccaacggccgccgccgccgccgcggctttacagaagcaaaaggcgttgttacagagagtggagactgacatcacatctgtcgtcgataacttcacgcagatcgtcaatgtttcaagggtgagtgatccgccggtgaagaactcgcaggagacatacatgatggagatgcgagcttctagaatggttcaagcagctgattctcttttgaaactcgtatcagaacttaagcaaacagcgatattttcaggatttgcatcactaaacgatcatgtagaacaaagaatagaagagtttgatcaagaggccgagaagacaaatcgattgttggctagaattgctgatgatgcatctgccaatcttaaagagctcgag

SEQ ID NO: 139450 - DNA, 242 bp, Arabidopsis thaliana
attttccgctcaattcgatcttacatgttaacaatggttggtctaactccagctgaggatcgttcagagattgcctttttcgacgtcgagacgacaattccgttccgagttggtcaggggtacgcgattctggagtttggatcgattctggtttgccccaagaagcttgtggagctgagaaactactctgttctggttcgtcctgctaatctcagcctcagcacgcctcggtccgtgaagtg

SEQ ID NO: 139451 - DNA, 301 bp, Arabidopsis thaliana
ctggaggtgaattttgatttttttggccgatcggatttgagtttttgaatctctgattgctgagaaaatgccggcgttttacggaggaaagcttacgaccttcgaggacgatgagaaggagagcgagtatggttacgttcgtaaggtttcaggtcctgttgttgttgtcaatattcgcttaaggataccgtgatagagcttgaattccaggggatcaagaaatcttacaccatgcttcagagctggcctgtacgtacgcctaggccagttgcatcaaagcttgctgccgatactcctctac

SEQ ID NO: 139452 - DNA, 371 bp, Arabidopsis thaliana
atttgaataatttgattggtaggcttttggttgatacaagagaaagagattgttttgatatggaaggtggtcgtggtggtggagatggcaatttcttaccaaactctaactttggtgtattctctgactccgctatggatatggatttcatggatgaactcttgtttgatggatgttggcttgagacaactgatggtaagagcttgaagcagaccatgggacaacaagtatccgattctactaccatgaatgacaacaacaacaactcgtacctttacggttatcaatatgctgagaacctttcacaagatcatatctccaacgaagaaacagggagaaagtttcctccaataccaccgggctttctcaag

SEQ ID NO: 139453 - DNA, 333 bp, Arabidopsis thaliana
cgccgctcctcccctgcagacgacaccaaatccacgagatcagacgctcttcagctcttcaacgcctctccttccgacggctctaagaaacagaaacaacatcaacaaccaccaaagtacacttcctcacacacttcctctgagtttctctacttaggtactttagtaaactctcgaagcaatggtttagagcagttacaagaggaggttgttgaccttaaaggtgagctctttatgcttcgtctccagaaatcggcaaggaatgagttcaaatctagcgactttcgtcgtatgaagaaacaagttgctcggatgttgacggttaaaagagag

SEQ ID NO: 139454 - DNA, 380 bp, Arabidopsis thaliana
ggaagaggtcgaaaacatcaaggaaaggaaaaaaagcatggagggctaacattagctccgaggacattgaagatttcttcgagaaaactaccagagatgctctctccggtggcaatctctccgctgctcccagcgaagacttgttccacgtcgataaatcccatgaccttccggtgaagcgaaagattgagaaacatagagagagagtgctccgtgttgacagtatcttaaagaagaatccatttgtccagttagtgccatcttcaaagccaaagttgaagaaaagtaagaagacaatcgttatagaagacaaagcacctaaacaggttcaaaaaagtgttggtgacgattctgtaatggccgacttgtggggtgatgat

SEQ ID NO: 139455 - DNA, 379 bp, Arabidopsis thaliana
gaagatgtttacgtaatccatggacggtgggtgttggttttcttgctcaatatatgatcaagccaattctaggttttctcattgcaatgactcttaagctttcggcacctcttgcgactggccttatcctagtctcatgctgccctggaggacaggcgtcaaacgttgctacttacatttccaaggggaatgtagcgctctctgtactcatgacaacgtgttcaaccattggggctattataatgactcctcttcttactaagcttcttgctggtcagcttgttcccgttgacgctgctggacttgctcttagtacgttccaagtagtgttggttcctaccataattggagttctggcaaatgagttctttcctaaatt

SEQ ID NO: 139456 - DNA, 100 bp, Arabidopsis thaliana
aaaagttttaatctaaattacgtatcaaattccgagcaagatgactattcttgttgaacattttgttcctgattcaagagtggatgaaaagaaagtgata

SEQ ID NO: 139457 - DNA, 297 bp, Arabidopsis thaliana
aaagttctctcctttcctttctaaaggaagaagaaaggctttatctctcaaaaccctcatccacaaaatcccctttaatccgctaatcagagggtttttctgtttttgtgttgcttcgttactacggttacattcttctcttccccttttgatttcaaagaaccctcttgataccttaagaagaggcaatttgaagttttcttcacagatccgtcttagctctttctagagaatggcggatttgataccattttatctgaatattgtggcgtttctatgtactgttggagctattgc

SEQ ID NO: 139458 - DNA, 263 bp, Arabidopsis thaliana
aaaaaatacagaaagtgaaaaagataaaaacttttttcttttctcttcttcagtttcttcttctttttgttttccttcctcgttctttcatgtcttccttgtgccattgatgagtccgtcaagactaaatcgagagtagtgcaagacttttttctcacactgtttctaaaaccgcgtgagaaatcttcgtcctcctcagatctctaccttttcccttaaattttcccgcattttctctctcttccaagcttctccaagcgtac

SEQ ID NO: 139459 - DNA, 288 bp, Arabidopsis thaliana
caacattactctcaccgctacaccttcctctgatttccgtttcagaagctcgccaaccgttactccaaccgcatgtggaatctcagtttcgttgtcgcgtacaagaacaagattagggtttagtgcccatcctgcaatgtaaatcaagtgcctagcactttcgatcgctttgtaaacatcttcccatagattccttgcattaaaacgaacatcatcagcccttggatgaaatgtggccctgtggtgtgcatcttgatagagtacgactctgcagttcgatctttgagg

SEQ ID NO: 139460 - DNA, 339 bp, Arabidopsis thaliana
atttctagcagagacagagatttgcagaagagacaacaatataaagagtttaaacactaacaaagaccacaaaggagctcttctctccggcaaaatctccgttaacctaatctggtacggcaaattcaaaccatctcaaagagcaatcatctcagacttcattaactcactcacacacacttcacctacgtccaaaactctccagcaaccatctgttgccacgtggtggaaaaccacagaaaaatactacaaactcgcaacacccaacaaaaactcatcacctctgtctctaactctcgggaaacaaatcatcgacgagtcttgctctctatgaaaatc

SEQ ID NO: 139461 - DNA, 393 bp, Arabidopsis thaliana
tcttaaagcaactacacaagtcttgaaattttctcatattttctatttactatataaacttttaatcaaatcaagattaactatggctgaggagtacaagaacaacgttcccgagcacgagacaccaacggtcgcaacagaggaatcaccagcgacgacaacagaggttacggatcgtggattgtttgatttcttggggaagaaggaagaggaagtgaaacctcaagagacaacgacgctcgagtctgagttcgatcataaggctcagatctctgaaccggagttagctgcggagcacgaggaagatgaggagaacaagcctagtgtcatcgaaaagcttcaccgatccaacagctcttcttcctcttcgagcgatgaagaaggtgaggaaaa

SEQ ID NO: 139462 - DNA, 418 bp, Arabidopsis thaliana
cacgcgtaaatatgcctgtctttgatcttttggagaggatgatggttaacaaatttggttttaagcatggagttgttctgaggtttttcactcgaactatttatgtcgcatttacattgttcattggagtgagtttccccttctttggagaccttctaggcttctttggaggatttggttttgcacctacttctttcttcctcccaagtataatgtggcttatcatcaagaaaccaaggagattcagcgtcacctggttcgtcaattggatctccattatcgtaggagtgttcataatgttagcgtcaacaattggagggttgaggaacatcattgcagattcttctacttatagtttctacgcttaatattgaatagatcttgtacactaaagcatgaatcattggatcatctaaat

SEQ ID NO: 139463 - DNA, 190 bp, Arabidopsis thaliana
cctcctgtgcaggcagttccatcttttcctagctcattcccacatttgttccctggcaaggacaatctccgctgcttgattccttgtgctattgaccaggatccttattttagaatgactcgtgatgtcgcaccccggttaggctatagcaagcccgccctgattgagtcaacattttttcctgcgttgc

SEQ ID NO: 139464 - DNA, 395 bp, Arabidopsis thaliana
ttttcctcttttcctcgaaattcattcttctttgactgtttccaatacgtttaagaactttttttaaatttattatgtgtcttgataatagagccatagaaaaaaaattgtttgtttaatgtcattttctttttgagtaaagaaactttcttctttgcaacttgaaaattttcgatttcgagagcgaaggaagagagagagagagggagagatcaaaaaaatttgtgaaaaaagagatttattttagggttttgttgattttctttgttcattttgccgtcgtctctttctctttctcttgtgaagaaaaagaagaaaaatgaaacttctgggtttggtcttcttgctgtttaatctgtttatgttttcgttttctcggaaacttttaaccgaga

SEQ ID NO: 139465 - DNA, 323 bp, Arabidopsis thaliana
aaaacgtcacgtcctctgtttctaacactgtttgatagacagctttctggaaatctgtcaaagaacaatacaccatccggtcttccttcttatgcaagtgatccttgataagagtcatggtgcgcctgagaaaccatccagacatctttttggcaagtctttgcatggcctttcggccagtggctagttctctctttgttgccgtgtgtcactgaccatgttctactgggtcagaaaactgcttcttgaagtatgtcccactcactaaaaggcctggcacaggccagtccataacacaccacagttccttcatgttgttctga

SEQ ID NO: 139466 - DNA, 405 bp, Arabidopsis thaliana
acctcactctctctcgcgtcagtcgttactgctgcaacaaatctgtatttgatttctccattaacaacgaatctaaatggccgctgcttttgcttccagattaacccgaggaggacgttcattgcttggaggtcttaacaatggtggttcgatgaattcttctaatggaatgatgaatgaaagtatcctctctcagcagcagcagagaaggacatttattcagatggggactgttctcaaagtcgtggacaattcaggtgcgaagaaagtgatgtgtattcaagctctaaaggggaaaaaaggagctagacttggagatactatagttgcttcagtgaaagaagcgatgccaaacggtaaagtgaagaaaggagcggttgtgtatggtgtggttgttcgtgctgc

SEQ ID NO: 139467 - DNA, 228 bp, Arabidopsis thaliana
ggttgatcacattgccagaaggaagccaagcttaaaccctgtgagctagatgaagatgggaaaagaagaatgggttttgtcagaagcaaaatagattcgaagttaaatgtatatgtaagatcttccatgttagctctctctccttcacatgttttctgatttgtaagtattgtgtgtaagcaataagagatatataatatgagcacttcttcatctacctttgtagat

SEQ ID NO: 139468 - DNA, 404 bp, Arabidopsis thaliana
  unsure (1)..(404): unsure at all n locations
caagctgaggcatacaattgaagtcattaataaccacatatctgcggcttcaacaactgctggagacttacctcttataaaccctgcagctggaaatgtatgttttgccagtggtacagccggatggtccttcacattacaatcttttgctaaaatgtatgccaagcttcatggtgtggccatggacgtggataagtttgcatctcgactttggggagatgtatattatcactctgatactagggtattcaagagaagtcctccagtaggtggtggagaaagagcatttgttcagtttattctggagcccctatacaagatatacagccaagtgataggtgaacataagaagagtgtagagaccacccttgcagaattangagtgactctgagtaatagtgcat

SEQ ID NO: 139469 - DNA, 423 bp, Arabidopsis thaliana
accacgcgtccgtctcatcaaaagcttttctccttgattttcgcattctttagagtcttaacgcaaagatgagacctcctctaactggaagtggtggtgggttcagtggtggaagagggcgtggtggatacagtggtggtagaggtgacggtggattcagtggtggtcgaggtggcggtggtagaggaggaggaagaggtttcagcgaccgtggtggtcgcggcagaggaagaggaccaccacgtggtggtgctcgcggcggcagaggaccagctggccgtggaggcatgaaaggaggaagcaaagtgattgtggaacctcacagacacgcaggagtgttcattgcaaagggtaaagaagatgcccttgttaccaagaatttggttcctggtgaagctgtctacaacgagaagagaatctctg

SEQ ID NO: 139470 - DNA, 373 bp, Arabidopsis thaliana
attcaaggtgtatgagattgacttccaatttattcccaactctgaagaagattgcgtctgcaaaatcactatgatatgggagaagcgcaacgatgatttccccgaaccaagcagctacatgcaactcctcaagagtatggttattgatatggaggaccacgtccttaaagcttaatcaatatcacaaccaccaccatcatcacaaccaccatcaccatcatcctatatatttattaaattgttttcatttatatataatagactagataagaacctgtataatgtgcgggataaaatgattgaaataaattattatgtataaaattattatatgagatatcatatatgtttgtatacaagaaaatatgtaact

SEQ ID NO: 139471 - DNA, 360 bp, Arabidopsis thaliana
aggacgcatgggtaagaactcagaatcagatattgttattgatgagactttgatacatgactctgtgaaagatttcgaagatactgcatacatatatggggatgctaatgaatttggttgctttaattctgaagttatcgatatgatgaagatcacagaagcagatactgcaatcggggagactttggtagatgagtctatgaaagagatccaggataaagaaggtaaagatgaagatgctgatgaatctagttgctttgtttcagaacttagcgatatgattaagaactcatctgcaagtgatgctattgaggataaagatgctactggtgaagagacactacatgataaagctgaaga

SEQ ID NO: 139472 - DNA, 400 bp, Arabidopsis thaliana
acagagatctatccatctctgtatgaagctgaagaacaatgggtgatggtaacctcaagaaaagcaagctgtcatggcccaaaacgttggtcaagaaatggctcaacatcaagagcaaatcagaagattttcacgcagacgacttggacagaggtgaaggtggtggagattggaggaacaatgtcattgaaagagaggaagcatgctctgtccgtaaaagcaaaactgagactcggagcaaaaggaacagcggaagagccagacgaaacaaactcgatgtcgattcaccgcttgatcatcttaaggtttttactgccacatggaatgtcgccggcaaatctccgccgagttatttaaatctcgacgattggcttcacacttctcctccttccgacattta

SEQ ID NO: 139473 - DNA, 423 bp, Arabidopsis thaliana
cggacgcgtgggcagtttcgtaaccaaagaaaaacgcaaatcccaaattttccggaaatggaggaatatttgaatcttatgttgaaagcgagagagattcttgttagtgaaagccatgaagaagtagcgatggtcatcgatcatctctttaagcgtcaagactccgaagagtataaaacatcgcgtgcgctgtacgacatctgcgtttcttgtaacccaggttgcttaaccctaaagcttcttaaagtctatcaatcttcttccagtggcattctcagactccgatcaatctctcaactctctgagaccctcacctatctgaaaaatcaaatcgtattttccaaattctctctcgactctctctatgaaatcaaaccccttttgattttatgccttacaatgcaagaaaccaaagaatctgac

SEQ ID NO: 139474 - DNA, 400 bp, Arabidopsis thaliana
accaagcgtccgcaaaaatagtgaagcagagccgcaaaaacacttttcccaaaatcaacgaagatagattcagatcggaagcgaaagaacgattcggtctcctccacagatcgaacatcgaaggagaagaaagaccatcatcacaacaagcatcgaaagaagagcaagatggcgtcgagagaccaagttaaggcatcgcacattttgattaagcatcaaggttctcggaggaaagcgtcgtggaaggatccagaagggaagattattctgactaccactagagaagccgccgttgagcagcttaaatcgatccgtgaagatattgtctccggcaaggcgaatttcgaagaagtggcgactcgtgtttctgactgtagctctgctaaacgcggcggtgatc

SEQ ID NO: 139475 - DNA, 378 bp, Arabidopsis thaliana
aaccatgagtttactcatgccaatatcacgttagcgcaagcagagctcggttataaacctgcggttgatcttgagacgggtttgaaaaagtttgtgaaatggtatatgggtttttacactggctcgaagaagaagagttcttggtgagctctgtctctctgcttaagtcatggtctctgtttccccttgttgagcttggagttcgctctaggttaagcttttgaaaccgagcacttgcattgccaggaaaaatcacttacgtatctgcattgtttctgtgttgctagattttgtttcatttatttgttagtagattttgagcaatgtacagcttcatcacttagatgtttcaattgtcgaaactcaattgtcttttcc

SEQ ID NO: 139476 - DNA, 396 bp, Arabidopsis thaliana
  unsure (1)..(396): unsure at all n locations
agtcatgaaaatgtgtgagaaggttgtggattcaaacggagaatctgttcctttatctgaagaaaagattgcaagtatctctgatgtcatagagggatttgcttcagaggctcttangactctctgcttagtttacacggatcttgatgaagctcccagaggggatcttcctaatggtggctacacattggtagcagttgttggaatcaaggacccggttcggcctggtgttagggaagccgttcagacttgtcaagctgctggaatcactgttcgtatggtcactggtgataacattagcactgccaaagcgattgcaaaggaatgtggtatacttacagcaggaggtgtagctatagaaggttcagacttccgtaatttgcctccacatgaaat

SEQ ID NO: 139477 - DNA, 396 bp, Arabidopsis thaliana
  unsure (1)..(396): unsure at all n locations
aagaacgtcatggtttgtgatcttattcattctactgattgtgaagggtttgggcgttggaaggcgaagattcagcacgaatttccagcttctattcagaatcataaagggtcttgtgttcctcacatttgtggcaattctcataactttcctcgcacttcctctgataacaatcaaagacttattcatctgcatgcttgccttcatgccaactggatggggaatgcttctcattgcacaagcgtgtaagcctctgattcaacagctanggatatggtcatcagttangacgctagctcgaagctacgagatcgtgatgggcttgcttctgttcacaccagttgcgtttttggcctggtttccttttgtgtctgagttccagacaagaatgctctt

SEQ ID NO: 139478 - DNA, 163 bp, Arabidopsis thaliana
attgtttcatatttgatatcgtttttgtgccaagctcatcacatgatgatgtttttgtaaatatttcgcaacttgtccatagcgctcgtgatggttacaaggtttgcattttcgcatatcgacaaacacgatctggaaaaacttatacaatgatggatatgcc

SEQ ID NO: 139479 - DNA, 408 bp, Arabidopsis thaliana
agatatgtggaagattgggcagagaggagttccctatttccagagactcattgctgcgccgttcacgaccttgcggtccttgccaacttctttggtcgagacagggcagaaccgtgtcattgatgcttcgttaactctcatccgtgaaagggcaaaactcaaaggagagttagtgcgactcataggaggagcaaaagctacaacagctcttcttggagtaccacttggtcacaactcttcttttcttgaaggcccagccttggctcctcctcatgtaagggaagctatttggtgtggtagtacaaactccaccactgaagaagggaaggagctaaaagatccacgtgttctaagtgatgttggtgatattccggtacaagagattagagaaatgggggttgatgatga

SEQ ID NO: 139480 - DNA, 398 bp, Arabidopsis thaliana
acactctcaaattggctcatccattccaagcacgctccttcgatcttcctcttggtacgctcgtttctaattaaacatgtctaattcaaaggacgagaaatcacaagatgcagctgatagaatcaaggctgcaacactcactgctgctaaaggtctaagccgtacacaagcggagagagcagcggctgcagcagcgagaaacgttaacgcttatggccagaaagaagaaggtccgagtagatggcaggagaaaagagaattaaagaggcagatgtatttgatgagtactgagaaagctgtcaggcttggtgaaaggaaagataaaacaatgtcagcttcagccgtgggaagcagtgcttcggcggcttcacagtgtcagaaatgtttccaagctgggc

SEQ ID NO: 139481 - DNA, 410 bp, Arabidopsis thaliana
acggacgcgtgggtttcgctttctccgtacacttggccttccttctagcgatcaaaccctaggtcccgccattgttggtcccagacttcaatcgaagctccaatttcactaatttcaggtgttgtttattctctggaagttggcgatacaatggattctactgctgcaaccaaacgtgttgttgacccacttactgttgggagtgcgtttgtcaatcagtactactacattttctgtaacatgcctgagcatctgccccggttttatcaagagatcagtagagttggccgtgttggacaggacggagtcatgcgtgatttctccacttttcaaggtataagtgaggagcttaagagactgacttatggagattgcaactcggctgagataaccagttatgatactcaaga

SEQ ID NO: 139482 - DNA, 373 bp, Arabidopsis thaliana
gaaatttggattctcagaaagtaaagcttcaagcttaagagttgaactcttcaagacttatggaagtactctcgctggtcttagggcgttaggtcatgatgttcatcctgatgaatatcacagtttcgtgcacggaaggttaccgtatgggtcgatcgaaccaaacaacaagctacgtaaccttctcaacaaaatcaaacagagaaaaattatatttacgaattcggacaagtttcttgaggaccttcaccgcatgattcttggtttagaagattgtttcgaagagatgatttgttttgagacaatgaacccaaatttattcgggtcaacaacccgacccgatgaatacccggttgttctcaagccttcgttg

SEQ ID NO: 139483 - DNA, 404 bp, Arabidopsis thaliana
  unsure (1)..(404): unsure at all n locations
aaattcgagcccaaaccgctgcgacttcaagccctacagttacaaaatccgtggacggcaagaaaacgttgaggaaaggaaatgtggtggtcactggagcctcgtctgggttaggtctagccacggctaaagctctagctgagacagggaaatggaacgtgataatggcgtgcagagacttccttaaagccgagagagctgctaaatccgtagggatgcctaaagacagctacacagtgatgcatttagacttagcctcgttggacagcgtgagacagtttgttgataatttcaggagaacagagacgcctctcgatgttttggtctgcaatgctgcggtttatttcncgacagctaaagagcctacttacagtgctgaatggtttgagcttagtgttgcgacg

SEQ ID NO: 139484 - DNA, 405 bp, Arabidopsis thaliana
aaaaaaatctcaaatctggcaaaaaatggcgacgattccaatggatatcgtcaacgacatattcctccgattaccagcaaaaactctagttcgttgccgtgctctctctaagccatgttatcatctaatcaacgatccagatttcatcgaatctcatcttcatcgcgttcttcaaaccggtgatcatctcatgattcttctcagaggagctcttcgtctctactctgtagatctcgattcacttgattccgtctccgacgttgagcatccgatgaaacgtggtggtccgaccgaagtttttggttcttccaacggtttaatcgggttatcgaattctccaactgatttagcggtttttaatccttcgactcgacagattcatcgattacctccttcgtctatcga

SEQ ID NO: 139485 - DNA, 399 bp, Arabidopsis thaliana
gcagtaatgaagagcaatgatgaagaaagagagggagacgaggagagtggttttgatccagagaagcaccttgacgcttacttgcctgttcgagtcaacgagcagagagttagcaacttgttgcagtcactgcttgtggcaggtgcagtgttggctatgccggccattaagctcataccgacttccattctatggggatactttgcttacatggccatcgacagcctcccgggaaatcaattcttcgaacgcttaacgcttctcttcgttccaacaagccggagattcaaggtcttggagggagcacacgcgtcgttcgtggagaaagttccttacaagtcaatggctgcgttcacactgttgcagatattctactttgggctgtgctatggggtgacg

SEQ ID NO: 139486 - DNA, 372 bp, Arabidopsis thaliana
atccactaaaactaaaaattgaagaaaaaacatgagtctcaccaccgacgaaatcgaagtgagagatttcgtggtgaaccaaaagaatggagtgaaaggactcgtcgactttctaaccctaaccacacttccttctccatacattcaacctcctcaagaacgcttcacttccgacaagatcctcctcggatcacctgtcccggtcattgacgtgtccaattggaatgaaccgcacgtggctagagagatctgccatgcagcgtcaaagctcggcttgtttcagatagtgaaccacgggatagctccggctgagttcaagggtgtgattgctgcggcgcgtgggtttttcgagttgccggcggaggagagaag

SEQ ID NO: 139487 - DNA, 405 bp, Arabidopsis thaliana
cgagataatgggttcgcttaaggaaggtcaaggaagagacatggaagaaggtgaatcagaagagccgcttttgatggctcagaaccagagattcactatgttccccattaggtacaaatctatttgggagatgtataagaaggctgaagccagtttctggactgctgaagaggttgatctttccactgatgtgcaacagtgggaggccttgacggattcagagaaacactttatcagccatattctggcgtttttcgcagcgtcagatggtattgttttggagaatttggctgctagattcttgaatgatgtccaagttccagaggctcgtgctttctatgggtttcaaatagccatggagaacattcattcagagatgtacagcttacttctggagacattcat

SEQ ID NO: 139488 - DNA, 382 bp, Arabidopsis thaliana
gcggctcttctttggatcaaaggcgaagtcaaggcggagaaagaaaagagagggtcgtgagatatggttgagacgagacgtagctcttccgcttccaagcgtttctgtgcttcttcttcttcccctgaagcatcttcttctcaaaggcctaacaagcgatctaaggttaagatcgatgccgctgcttcttctctcgaacctgcgacggcggaaccggctggttcttcatcagcgagcgaagttccgatcgagaatcaaggacctgcttcggatcctggatcggaatctggagagccggaacttggatcttctgatccacaggctatggatgcggagaagcctgttgttacaactgatgtccctgtgatggagaactctcctg

SEQ ID NO: 139489 - DNA, 388 bp, Arabidopsis thaliana
atttcgtccactttaatcattttcgttgatacagcttctcccggtaataatgtcggcggatttctccgtcgcactctaaattctttaggattttgtttctcttgctcatctgtaactcaggcaagctctcgttggattgttttaggcatgaatgagtcagtccctgattctgtggaagacaacggtaattcagtccctgcaaatggattattagtattgcctgataatgatcatgaggaacgaggtgttggatcacctcaacgatcgaacagcgttgaatctcctggtggatcagtacattctacgaggaaaggttttggtttgaagaaatggagacggatcaaaagagatggtcctgtgagagatgaggctgctcctgttgatgatg

SEQ ID NO: 139490 - DNA, 160 bp, Arabidopsis thaliana
aacgctgcaattctccagtctcaccatctccatgataaatgtgtcttcacgcctcctcataacagatacaatgaatgatgtcttacgttgcaaacttggtcatcaagagttttgaccgtgcttccgtggtgtatgtggaagatgtggtggatatgtctcg

SEQ ID NO: 139491 - DNA, 217 bp, Arabidopsis thaliana
  unsure (1)..(217): unsure at all n locations
attcttctcttattttttcaaggggaagatcgaagaagtaatcttcttaaacaagtcttagttttgcttgtagctaggatcaatgtgtagtatatgtgaataagcttttcgcagttctttgtctatttctaggttctttttgaataaatctaaatggcttgtaagttgtaacgtaagtggtatcgatgcaatttgattagttgggaacaannnanaa

SEQ ID NO: 139492 - DNA, 385 bp, Arabidopsis thaliana
cggacgcgtgggcggacgcgtgggcggacgcgtgggcggacgcgtggggtgaagttgaaagcatcgatatccaaagtaacgagcatagtgcttatgtcacatttaaagaaactcaaggagcagagactgctgtgctcttatctggagcgagtattgccgatcaatcagtcatcattgagttggctcccaactacagtccaccagcagcccctcatgctgaaacacagagcagcggtgcagaatctgttgtccagaaggcagaagatgttgtgagcagcatgttagcaaagggtttcattcttgggaaagatgctgtcggcaaagcaaaagcttttgatgagaaacatggtttcacctcaaccgccaccgcaggagttgcttcact

SEQ ID NO: 139493 - DNA, 379 bp, Arabidopsis thaliana
ctccgatgacacaaaacgaggaagattatttgacattttaagtaagaacagctagctttgccatctccctaaaggcaataaatctcggatccactttcacgatattttgatattttttctatttataatctttctgggttttgagtcttttgaaggctgaattgctctgaaatctcaattgtataatcatctcctgggtcgtcgttatcgtgatcatctagaagaaagcatgactacactagatttgaccagagccgagcttgctcttattgttctctatttgaacaaagctgaggctagagataagatatgcagagctatccaatatggttccaaatttttgagcggtggccaacctggtactgctcaaactgtcgac

SEQ ID NO: 139494 - DNA, 401 bp, Arabidopsis thaliana
cccacgcgtccgcccacgcgtccgccgcgtttttgctttgtagcgccggaccggagaagataaaacccttgctccgccccactcacaggaagttctacatcgacctgagttctcgtacttcgtcgtatcactcgttcttcctacgatgaactgtgcaatttcaggagaagttcccgtggagccagtggtttcgacgaagtcaggattactcttcgagagacgactaatcgaaagacatatatcggattatgggaagtgcccggttactggcgaaccacttaccattgatgacattgttcccatcaaaactggggagatcataaagccgaaaacattgcatacagctagtatccctggattgctcggaacgttccagaatgaatgggacggtttgatgctat

SEQ ID NO: 139495 - DNA, 381 bp, Arabidopsis thaliana
tccatcgttctatcattttctcctttccttcacctcaagatctcaaaaacacaaaaagagaaatcaatcaaaaccttagggttttctactaatttatctgtgtgatgttaagagaatcatcatcatcttcgtcgtcatgggaggagtaacttcatcaatcgctgcaaaattcgtttttttcccgccatcaccaccgtcttatggatttgtttccgacgttgaccgattatacataacagaagtacctcgccgtgatgatgtagatgtattgaagctaaagactcgtcgtggtaacgagattgtagctatttatattaaacatcctaaagctaatggtacgcttttgtattcacatggtaacgctgctgatttgggtcaaat

SEQ ID NO: 139496 - DNA, 401 bp, Arabidopsis thaliana
ggcggaaagaggaggagaaagcggcgcagagcgtggcggtgaccgtggtgacttcgggcgtggattcggcggtggacgtggaggtggccgtggccgtgatcgtggtccaagaggccgtggaagacgtggaggccgtgcctcggaagaaacgaaatgggttccagtgaccaaactaggtcgtctagtggctgacaataaaataacgaagctagagcagatctatcttcattctctcccagtaaaggagtaccaaatcatagatcatcttgttggtcctacgttgaaagacgaggttatgaagatcatgcctgttcagaaacaaaccagagctggtcaaaggactagattcaaggcctttgttgttgttggtgatggaaatggtcatgttggtttgggtgtca

SEQ ID NO: 139497 - DNA, 376 bp, Arabidopsis thaliana
acaaatcttaaacgttttactttgtgctgcactactcaacctcaatggccgcctcaacaatggctctctcctcccctgccttcgccggtaaggccgtcaagctttcccccgcggcatctgaagtccttggaagcggccgtgtgacaatgaggaagactgttgccaagccaaagggcccatcaggcagcccatggtatggatctgaccgtgtcaagtacttgggtccattctctggcgaatcaccgagctaccttaccggagagttccccggagactacggatgggacaccgccggactttcagctgaccccgagacattcgcaaggaaccgtgaactagaagttatccacagcatgtgggccatgctcagagccct

SEQ ID NO: 139498 - DNA, 373 bp, Arabidopsis thaliana
gactagttctagatcgcgagcggccgctcgcgcggacgcgtgggctcagccctaagagagaagaaatacgctctgctctgcgccttttctacaagaaattcaccaaaaaagcttgaatatttatcggaatcagagcttgggtttttaatcctggtaaagccatgtcacatatggtgtttcagagcgttgtcgctcccaaacccttatctcctctcaaaccctgtttacctatccctcgtccactcgttactctgccttgtaagctccgtcgtggcttcgttagagcttcttcgtcctcgtttcttgtcgatgattcagtttcaggactcgagcgttgcttacagttaccttctggagtttgagtaggcacatc

SEQ ID NO: 139499 - DNA, 217 bp, Arabidopsis thaliana
tgttggtgtcatgccctggggacaattaatgaaacgccaaatggaacgggtttcttttgctacactctgacatcaatgtctcacgcacgtgggacaaaccagcacatggacctttgtatggctacgatttctggtaccaatctcggttcacgacaatgatcagcacttcttggggtgcatctaaacccgtctccgaaggtttcaatctccagcatgt

SEQ ID NO: 139500 - DNA, 377 bp, Arabidopsis thaliana
gaacaatgaaaaatttaaccagtttcgtaattgttatcttactacaaagcttattgtttcatgtatatggtcgtcatcaaagttcttcgaagaacattttagtagattcatctccatttccttctgatttcctctttggtacagcttcttccgcttaccagtatgaaggtgcgttcttgactgatggaaaaagtttgaacaattgggatgtctttacgcataaaaatcctgggaaaatacttgacaagaacaatgcagatagagctgtggaccaatataatcgatttttggttattttcttatgataattatttctttctatttttgttcttgtcaacttcttttatcatattatattctcatattatttgatgttg

SEQ ID NO: 139501 - DNA, 278 bp, Arabidopsis thaliana
caaaaacttgtgctaagactacttcaaaagagttctggcttcagtgtgagggcatagtgcaagacttagatgatagacgtcaagagcttcctccgggcgtgctcaagcagcttcacactcggatgctttttatccttagcagatgtaccagattacgtcaatttcataaggaaagttgggggcatgaggaagatgctgtacaactacgtcagtcaggagtcctgcattctgccgataaaagagaccccactggagaagttagggacgggaaaggttca

SEQ ID NO: 139502 - DNA, 403 bp, Arabidopsis thaliana
gcaaaccccatcatctcccttcttcttcttcttcttccacttccctttgtaactttcaatctcagctaatatcaagtaacgtggaaaggatttgttccgtcaaaggttggtgattatacagagactgagttcctgataagttggattgagcttgttttcatttgcggatctttgagaaaaaagtttgcaactttatggctctggaacaacaacatgtttgtgaaaagcggcttcaagccaagaccttttctacccaagagtttcagttgactctcaattgggatgatttaacttgtcccatttgtttggatttccctcacaatggtgtgcttctccagtgttcttcttacggaaacggttgccgtgcttttgtctgcaatactgatcaccttcactctaactg

SEQ ID NO: 139503 - DNA, 197 bp, Arabidopsis thaliana
atagacctgaagatcctaactcagccaatgtgtggcttggacgctggcacgcagttgcaggtttgggctcctggtccattggtggttaagaatctgggaccaaaatctcagacatcgaagcgaagttttcacgcagtccacgcggaaaggggaaaacttaacagaggtgtcaggaaacgatccggtgtttcaactac

SEQ ID NO: 139504 - DNA, 120 bp, Arabidopsis thaliana
cattttcactgtccttttgaatcagcatcacaatcagaagcctgatagatggtgagatccacgccggtgagaaactctcacacttccaccgccgatctgctttcctggacggtaactcct

SEQ ID NO: 139505 - DNA, 210 bp, Arabidopsis thaliana
ggatacccgaatccatcctccaatctcgacttttaagacctccctccatcaaaacactcttgtattgtatgtatggctttcaaagtttctctcgtttcctcaaagtttgtatttttaagagaagtgtgtgtgtagacaatcgatgttttattggcttgtccttttttctggacatgtgaatgctgaccacaagtctaaatctggtggata

SEQ ID NO: 139506 - DNA, 173 bp, Arabidopsis thaliana
cacgaactttcactagacgacgacgacgatctaaagtcacagtcaactcactcacaaagacgactcctttattaaattattccaaactcctttcttcatcatcatcatcatcatcattcataaccacttaggcacagatgcgattttcttctccgtcttcattgtgctcttca

SEQ ID NO: 139507 - DNA, 149 bp, Arabidopsis thaliana
attgataagagagaaatggagagtgaaaatgaaacatgtctttgtatgttggatttgatttgtgttgaaacatgtctttgtattttcactctccatactctggtttggtctgtttgtttcaagcttgtgttataacactattgagatag

SEQ ID NO: 139508 - DNA, 422 bp, Arabidopsis thaliana
  unsure (1)..(422): unsure at all n locations
aaacccttcaaaaagagaaaagtctaaagaatanacaagagccctaatatcaaatcacaaccaaaaaaaccaaagaaagctaattaaagttttctctctagctattcctcttcttttcttgttcttgaaaactagggtttacttcaccaaaagataagatctttccccagaaaaagcaatacccaagtcatgtttctgtgtgtctgtatatagataaaacattacataccctaataaggttacacaaatagctataaaagagggaaaataagatagggattttttggggtgaggaaagatgggaagaggaagagtagagctcaagaggatagagaacaaaatcaacagacaagtgacgtttgctaaacgtagaaatggtttgctgaaaaaagcttatgagctttctgttctctgcgatgctg

SEQ ID NO: 139509 - DNA, 96 bp, Arabidopsis thaliana
agtttaattgttgttatagcaaaaagattacattaaatcaggaggatggtttgtgtctggtattggtaatgataataatcataatatgttttggat

SEQ ID NO: 139510 - DNA, 277 bp, Arabidopsis thaliana
accacgcgtccgcccacgcgtccgccttcttcttcttccaccgtctccgccacgaaccagagaaagctcaacaatggcgtcaatcctctcaaagaagcagaagaagaacgaaaaatacaccttgaaagagctcaaatcattaggtcatgacttactcacttctcgatctcacatcaataaccttcctctccttctcaccttcgtctcaccagaatctccgccgcagttcgtcgttgaatcactcctctcactccaatcctttttcactcctctactc

SEQ ID NO: 139511 - DNA, 189 bp, Arabidopsis thaliana
gattcttgaacagcacgatcgtcaacgatttcacggactacgcggatccacgtttcgagttagttggggatacggtaccaaactggatcaccatcaaccagctatatacagtgcctaccacaggatatggaatgggagcaaatgcacccggtcgatgttctcccactattgacattagatatcccggcg

SEQ ID NO: 139512 - DNA, 347 bp, Arabidopsis thaliana
attggaagtggacatggaagccacgaagagaagagttttgttttccaaaaacaggttacactaaaagcaggagagaatcatcttgtaatgcttggtgttctcacaggattcccagacagtggatcttacatggagcatagatacaccggtcctcgtggtatttccatcttaggattgacttctggaacacttgatctcactgagagcagcaaatggggaaacaagatcggtatggaatgtgaaaaacttggaatccacactgaggaaggtttaaagaaggtcgaatggaaaaaattcaccggaaaggcaccaggacttacatggtaccagacatactttgatgcacc

SEQ ID NO: 139513 - DNA, 327 bp, Arabidopsis thaliana
cccacgcgtccgcgcatgtgcgttatatcgcctagaacttaaagtaggaaatggaaagaagagtcctaagggaaagatttcaaaagaccctctggctgatctgcagaagaagatgggacagtttaaagtggcttcagacaaaccctctcctccaaccaaaggtcgtaaggagtgaagttagctattggtaatctaactcaagactcctgcaacaatagctccaagttgtctccagcattctacaaaagagccatcgccacctctgttttctttgtttttttctttctgactgtattatgaagagatacgatctttgatgtgttgtgt

SEQ ID NO: 139514 - DNA, 191 bp, Arabidopsis thaliana
tgcaactttgaattaggtgcattaccatgaaatatatagagactgcttctagttcgttattagttagaattcagagccatgtccgtcaagagtctcattcatgacatgagaggagagcttgggagtatatccagaaagggattcgatgtcagattcgggtatggtagattcaggtctcaacgtgttgttca

SEQ ID NO: 139515 - DNA, 204 bp, Arabidopsis thaliana
gtggttctcaactataggaagcaaaagaacgattatgaagacaggttgaagattgagaaggcggaagcagatgagaggaagacaatgagggagttggaaagggagatggagggaattgaggacgaggatgaggaggttgaggaaggtacaggtgagacaaatccttacttacagatggcgatgcagttcatgaagtcaggtgca

SEQ ID NO: 139516 - DNA, 357 bp, Arabidopsis thaliana
  unsure (1)..(357): unsure at all n locations
atttgccacatcctttagtcgcaaagaaacaggcttcgtctgagttattttcggtccccattgatacncctcctgagttggtcttcaagtgtaagagtgcacccaaaatgcttgtcatattgaaccctaagtcangacatggacgatctatcaaagttttccataatgtcgtggaaccaattttcaagctggccggaattaagatggaggttgtcaaaacaactaaagcaggtcatgcgagagaattggcttccactgtcgacattaacttatgctctgacggaattatttgtgttggaggggatggaatcatcaatgaggttcttaatggtctgcttactcgaagcaatccgaaag

SEQ ID NO: 139517 - DNA, 188 bp, Arabidopsis thaliana
cccaccaaagcctggagacatttcatatgaccaattcgttcgtgagagcaagggaatactagaatcactgagaagaagagcaaggatgatgactgatggattcaacagctgcaaaaacgtcgtctgtaatttcacagaaggtgctatgtattcattccctcaaataaagttgccgtcgatcgcaatcc

SEQ ID NO: 139518 - DNA, 375 bp, Arabidopsis thaliana
accacgcgtccgctctctctctctctctcgccgccttcctctcaccctcttcgcatagcttcactttcgccgatggctctacctaaccagcaaaccgtggattaccctagcttcaagctcgttatcgttggcgatggaggcacagggaagaccacatttgtaaagagacatcttactggagagtttgagaagaagtatgaacccactattggtgttgaggttcatcctcttgatttcttcactaactgtggcaagatccgtttctactgttgggatactgctggccaagagaaatttggtggtcttagggatggttactacatccatggacaatgtgctatcatcatgtttgatgtcacagcacgactgacatac

SEQ ID NO: 139519 - DNA, 354 bp, Arabidopsis thaliana
aaaacatctttaagagtcctcatggcgatgtctttatcaggagctgttctcagtggcatgggttcttctttccacaacgtaggagcaaagcagagtggtgttggtaccgtcagagttggccggaagagtgagctcgtcgtcgttgctcagcgcaagaagtcgttgatatacgccgttaaaagtgacggcaacatcctcgatgacctcaacgaagccacgtgagtctatattcttttcttttaacaaattttctcgtgactaaggctatcttcatgtgtactcgcaaaaactgcgactgaggaagctaagaaagctttggattatgtgactgagaaaggaaaagaagccggaaac

SEQ ID NO: 139520 - DNA, 386 bp, Arabidopsis thaliana
attgtggttaacggctctgctcaagtccaaattgtgtaaacaatttctcttcctaataattttccaagactttggatcaccctaacttcttcgtttcgtttcaatcaaatggcacatttctctgctagacttaagcttctctcaagcaacgatggattatcttttggtgtagattcgagagaccaatttcggcagagcctttacatggccggtggtggatctcctttggttccaatacgcatgagccgactaaagttttgtgctagaatcttctcatcttactcttttccttataagagaaagaaaattagggatctcgataacaccgagaaaaatcttgatattgacgaagacaacgatgagtgggattttgatggagacgatga

SEQ ID NO: 139521 - DNA, 154 bp, Arabidopsis thaliana
aaaagcctaaaaagccgaccttttttctttctttctctcctctacctctcagcttctgctggatctctccagcagacacgatcttgttcggagagattcgtacgggaccgatctatcaaggcttcaagggcaaacagaaatggaccacgacaag

SEQ ID NO: 139522 - DNA, 201 bp, Arabidopsis thaliana
accacacgtctgatgtgacccttattcttatcctgagtcctctgctcggttctcgccggagaaaaaacactgacaagagggttttcgaaaaggacgatgagaagttctaaaaacaccgatctaattgacactaatacggatatcgctcccaatttctctccccatggttcttcctccgaatgcgattttggtttcactttc

SEQ ID NO: 139523 - DNA, 410 bp, Arabidopsis thaliana
gtcttatcttttcctctccttactctccatcaatggcttctcttatctctttttctttgctcccaaaaccaaaagccgtaagaagttcaatttcagctcctcagacacagacaataaatactgaaaagcttgaagataaattcggacgaaaaggcataaaattctcggaatcaaacaacattcctatggtagagcttaaggtcagaaatggaagttcattaaaactgagtctatcagatgctcatgtactttcatataagccaaaggtatactggaaagacgagggattcgaggaagtcctttacacagttgatggtgatgagagcagaggtggggttggtgttgttatcgtaaacggggaagaacctaaaggagggtcttcagtaatctcaggatgtgattggagtgtc

SEQ ID NO: 139524 - DNA, 386 bp, Arabidopsis thaliana
aataaacagagctaaaatgtttcctctaatctccttttctccaacttctcttgatttcaccttcttcgccattatcatctcaggtttcgttttcatcatcactcgatggaattccaattcaaagaaacgtttaaaccttcctccaggtccgccaggttggccggtggtcggaaacttattccagttcgcgcgctcaggtaaaccgtttttcgaatacgcagaggatctcaagaaaacgtatggcccgatttttacactgagaatggggactcgaacaatgatcatcctctccgacgcaactctagtccacgaagctttgatccaacgcggagctctcttcgcttcacgacccgccgagaatccgacccgaacaatcttcagctgca

SEQ ID NO: 139525 - DNA, 412 bp, Arabidopsis thaliana
  unsure (1)..(412): unsure at all n locations
atgaaaatgtagcttcgggaagtgctgctggagcaacaacttccttgtttctgtaccatttggattatgcgcggacccgtttaggcactgatgcaaaggaatgttctgttaatggcaagagacagtttaaagggatgatcgatgtgtatcgtaaaactttgtcaagtgacggtattaaaggtctttaccgtggatttggtgtgtcaatagtgggaatcactctttaccgaggaatgtattttgggatgtacgacaccatcaaacccattgtgttagtcggttccttagagggaaacttcttggctagttttctattgggttggagtattactacctctgcaggcgtcattgcttacccttttgacacacttangaggagaatgatgcttacatcaggacaacctgttaaata

SEQ ID NO: 139526 - DNA, 416 bp, Arabidopsis thaliana
atgataagttgctcttctggagtgatgtttccccgtcgtacgtcggggcggagatagttcagccaccggagccggcaacttttcccggttcgttttagacctatatacattcatattatcaatcatcacaatcaatatgactcttactacgtggatatatattcacataattataattagtagtagcacatatgacatatgagtataaaaatacgtgtatcatttatttttgatgttttaaaaaagtattttacattattttactctaccactaggccatcattaaagcatcatatatccaagtatccaacacatgaaaacgttttaatatttagattgattctttaacaaagaacgaatataatagagcatatatatatacacgtttaaaaaaaaaatctagttatgaaaatata

SEQ ID NO: 139527 - DNA, 409 bp, Arabidopsis thaliana
acaacaacaaatcttaaacgttttactttgtgctgcactactcaacctcaatggccgcctcaacaatggctctctcctcccctgccttcgccggtaaggccgtcaagctttcccccgcggcatctgaagtccttggaagcggccgtgtgacaatgaggaagactgttgccaagccaaagggcccatcaggcagcccatggtacggatctgaccgtgtcaagtacttgggtccattctctggcgaatcatcgagctaccttaccggagagttccccggagactacggatgggacaccgccggactttcagctgaccccgagacattcgcaaggaaccgtgaactagaagttatccacagcaggtgggccatgctcggagccctaagctgcgtcttcactgagcttttggc

SEQ ID NO: 139528 - DNA, 231 bp, Arabidopsis thaliana
cagcaggacacattatccgatttgatcaataagcttccagagccgaggaagcttgatttgcttgaagctcttgctgagatctcaccacacacaacaactctgatagcatccgagatgcttcccccaatatttgagctcttaaagaaatacatgcctgccaggaacactgtggaaaaatcagactccagatatgttgagtgcttattatacgtgtttcatcatatggcgcac

SEQ ID NO: 139529 - DNA, 389 bp, Arabidopsis thaliana
caactacagagcttgcaccattccttatagattcccttccgataatctcaagaaagccactcctactgaaatctcctggatcaacgtcttcgccaattccattccttctttcaagttcctctctctctactttgacctcatttagatactgctcatgggtcgaatcaagttttgattttgaaaccaaaaattgcttcttttaggctcatattccaatagtctgcttgattaattgcaaattctgtcaaaactcatgaaacttttagcccttaagctattgatagtgtagttgctagttgttgctttgactttcctctgtgtttacttaacatcacgagattgtttctggaagcttataggaaacagatggaatcctaattttaacaata

SEQ ID NO: 139530 - DNA, 241 bp, Arabidopsis thaliana
cggacgcgtccgcccacgcgtccgcggacgcgtgggaggagcttaggctcccaaaggcacgtgtcgttggctaagtccgttcggcggaagcgtcgttcggaccgccttgaattataattaccaccgagcggcgggtagaatcctttgcagacgacttaaatacgcgacggggtattgtaagtggcagagtggccttgctgccacgatccactgagattcagccctttgtcgctaagattcg

SEQ ID NO: 139531 - DNA, 190 bp, Arabidopsis thaliana
tctagttggatcattcatgatctcaatagcactgataataatcggattttctgcagacattgggtatctgttatgagattcaacggaacattgcgctactttcacaggcacactaaccacggcagctgttgtctttatcattgggttctggttgttcgatcgaacaaccaatatcgtagaagtacctgct

SEQ ID NO: 139532 - DNA, 413 bp, Arabidopsis thaliana
caaaataattgagtttttttttaattagaaacaaatggggttgagtggtgttcttcatgtggaggttgaggttaagtctccggctgaaaagttctgggtagcccttggcgacggcatcaatctcttccccaaagctttccctaacgactacaaaaccatccaagttctagccggcgatggcaacgctcctggctccattcgcctcattacttatggagaaggatctccactggtgaagatatcggcggagaggatcgaagcagtggatttggagaacaaaagcatgtcgtacagcatcattggcggagaaatgttggagtactacaaaaccttcaaaggaaccatcaccgttatccctaacgatggtggtagccttctgaaatggtctggtgagtttgagaagacgcccatga

SEQ ID NO: 139533 - DNA, 404 bp, Arabidopsis thaliana
  unsure (1)..(404): unsure at all n locations
cggacgcgtgggatcagacaattcatcgagaactctaaaaaaggcaccttctacaggaggatgtcgagttgaaggatacatgcgtgtgaagaaggttccaggcaatttaatggtttcagctcgctcgggatctcattcctttgattcttctcagatgaatatgtcacatgttgttaaccatctatcctttgggcggaggattatgcctcagaaattttcggagtttaagcgcttgtcaccttatctcggcctaagccacgaccgtttagacggccggtccttcataaaccaacgagatctcggcccaaacgttaccattgagcattatcttcanatagtaaagactgaggtagtgaaaagcaatggacaggcattggttgaggcgtatgagtacacagcacata

SEQ ID NO: 139534 - DNA, 312 bp, Arabidopsis thaliana
cccacgcgtccgctcagtctctccatttcccggagcaaaaatagctctccgaccatgaagtttggatctttaccatccaaatcccttctcttccgcctctcttcttcctccacaacccaatctcaccgtcgaataattatccttttcatcactaacattcattcctctccattctccaccagaaccacctccggctccaatttcgtctccggatccagccattctcgctctcgacgtcctcagcacgactaagagtcgcgatccgttagggtttcggtctggtgggacttcctgagctgtaacttatctgta

SEQ ID NO: 139535 - DNA, 410 bp, Arabidopsis thaliana
gttgaccgtctcaataaagatcataatcatgaccttgaaccagggaagaagaatgacgctggtatgaaaaagataccggacgatgggacaggaggattggattctgttgatcttattgaactaaacgacttcggcaacaaccatatcaagaaaactcgagaaaacaggattggtaaagaatggtatccgctgcttctcgattatttccagtctagacaaaccgaagacatgggattcttttacgctgtcgaattggatgtcaataatggaagttgcatgagcattttctgggcggatagccgagcaagatttgcttgcagtcagtttggtgattccgttgttttcgatacttcatacagaaaaggaagctactctgttccgtttgctactatcatcggttttaaccatca

SEQ ID NO: 139536 - DNA, 328 bp, Arabidopsis thaliana
cggacgcgtgggcaaatcgatgcatgtgagattccaacaactactgatctaagcaagtgtaatggagaccagaagttttggtgggatgaaccaactgtctctgagcttagccttcatcagaatcatcagcttatttgggttcgagctaatcatatgatttatgattattgttttgatgctactaggtttcctgttactcctcttgagtgccaacatcatcgtcatttgtagtttagagattagtcaagaataaaaatggatcaagagaacacatgtggttactctttgatgattctgttttaatgtataaataatcaatcttctattg

SEQ ID NO: 139537 - DNA, 382 bp, Arabidopsis thaliana
ctgtcacggaggacacggggaatcaacgcggcggagagtgatggaagagctttcaagcctaaccgtgagtcagcgcgagcaatttctggtggagaacgatgtgttcgggatctataattacttcgacgccagcgacgtttctactcaaaaatacatgatggagattcagcgagataagcaattggattatctgatgaaaggcttaaggcagcttggtccgcagttttcttccttagatgctaatcgaccttggctttgttactggattcttcattcaatagctttgcttggggagactgtggatgatgaattagaaagcaatgccattgacttccttggacgctgccagggctctgaaggtggatacggtggtggtcctggc

SEQ ID NO: 139538 - DNA, 341 bp, Arabidopsis thaliana
accacgcgtccggcacagtggccagtgtgggaatttttgctggacgagagagcagaaccctactgcgatttatcgactactaggagaagaagaagaagaagacgatgcggagattcggggctgggaacagatccgtttccaagctcgtactcaccatttgtgtagctatcctgttcataccatctctatcgtatggagcttcacaagggaaccggaagacggcgaagtcttctgtgttttccttgttcaatcttagggataaaagcagattttggagcgagtctgtttttcgtactgattttgatgatttggagtcttccgttcactcgaagtctggtgtg

SEQ ID NO: 139539 - DNA, 384 bp, Arabidopsis thaliana
aacactttggttcatcaattgtttcaaaagaaactcaactaactgactcaaaagaaaatcaaataagcccccaaaatattttgagaatcatgctaaagatggagattaacggtggggtcgctacacctactgcttccgccgtcgccaaggtgacagaaaccaccactcccgttaactctccttctcccacttcttcacctccgccgcctccttcgccgcaacagccgccacaaccaccggttgtactaagcccttgtgcggcttgcaagattttgcggcggcggtgcgccgataaatgtgttttggcaccgtactttcctcctacggacccggcgaagttcacaatcgctcaccgtgtctttggagctagcaacattattaagt

SEQ ID NO: 139540 - DNA, 306 bp, Arabidopsis thaliana
tgggagtatactccgatggctcttacagcgttccatcaggacttatctactccttccctgtaacttgtcgcaatggagactggagtattgtccaaggccttccgattgatgaagtatcaaggaagaagatggatttgactgcagaggagctcaaggaagagaaggacttggcgtactcatgcctctcttaaacccttctggagcaaaattttcatctataaggtgtgagatcagttaaagcctttcagggctttgtccgaataagaagtgtgtttgaaagatctccaaacactgttttataacctc

SEQ ID NO: 139541 - DNA, 298 bp, Arabidopsis thaliana
cccacgcgtccgcgcaacattgttctttaacattttgcttcgcagcactcttgctagtaaaagagtgttggaagaatacaagctcagccgcgaggcttttgagtgggtcattggtgagattgaatcaaggtttttacaatcgctagtggccccaggggaaatgatcggttgtgttgctgctcaataattgaagaggactttgaatttgtgaggtcctacgatgaaatgccagatgaagatgtttccccagataagatatctccgtggctacttcgtatagagttgaatcgcgagatga

SEQ ID NO: 139542 - DNA, 380 bp, Arabidopsis thaliana
gcggcgatggttactcatcgtctctgtgtcttgaaggctcgttggatccgaatttagtgaagggaaagatcgttctttgtgatagaggaatcaattctagagcaaccaaaggtgagatcgtacggaaaaatggaggcttggggatgattatagcgaatggtgtgtttgacggtgaaggtttagtagctgattgccacgtgttaccggcgacatctgttggtgcttctggaggagatgagattcgtaggtatatctctgaatcatccaaatctcgttcatcgaaacatccaacggctacgattgttttcaaaggtacccgacttgggatccgacctgcaccggttgttgcatctttctctgctcgtggtcctaatccagag

SEQ ID NO: 139543 - DNA, 330 bp, Arabidopsis thaliana
ctgatggtaattccgacttatgtaacggatcagtgtacaaggaaaaagagaatggaaagtgtggcagccaaatcaatggttattatgaatcatgtaaaccttgtaatggttctgatttgcatgataatttagctgaaagttccgatcggttcggggagctatcgattaatggaaacaagataagtattaagtctagcaaaatgagccataaagctgaggcacgttgcggaattagtgatgaatccaggaaaaataagaagtacaccatagcaagaatatcgggaacccattccataagtgtggattttcgactttctagaggcattgcac

SEQ ID NO: 139544 - DNA, 313 bp, Arabidopsis thaliana
attccattgaacaccagagtgcacattgtttaccccatcttctgtcactctctgaggttcgaggcgcaaaatctgaggacacgcaaacccatgcttaccgtatgtacttcatgggtccaaacaatttcagggaaccttggcatctgccctactctcctcctggtgcaatcatagagatagtgtacgaagatgcttttaacagctttattaatgaaataaactctaccgcagcatatgattggtgggaagggtctgtgcacagcattctttcagttcttgcaaatccttgtgcctggtcgtggaaacaatggcg

SEQ ID NO: 139545 - DNA, 147 bp, Arabidopsis thaliana
aagacgcgtggggtgaataattgcaattgtatttctgtagcttttttttaaatgatctttttcacacgtgtgagactagtataaatgttgctaattttcgtttccagtataaaaaggtacattgcttttaccttcactttttaaccc

SEQ ID NO: 139546 - DNA, 391 bp, Arabidopsis thaliana
ataaaacataagagagtctaaacactgtggtagaaaaaaatatagacttttagatatgtgtagtaaaataacattagtgttaactttattttccagttatttcatatcaacagatgctgtgaatggatcatttcctgcgcttttggcttttggagattcaattctcgatactggcaacaacaattttctcctgacttttatgaaaggaaatatctggccatatggaaggagtttcagcatgagaagggcgacaggaagatttggaaatggaagagttttctctgatatagttgctgaaggtttagggatcaagaagattttaccagcttatcgtaagttgttcaattctccaagtgaccttagaactggtgtttgcttcgcatcaggtggt

SEQ ID NO: 139547 - DNA, 401 bp, Arabidopsis thaliana
acaggcgtgctggtggtgaaaaagtgtacaacgtgtttgataaccagcttcctgcggctctgaagagactccaatttgacaagcagctagcgatggacaacatccggaagctggtcactgaggctgatggttaccagcctcacttgattgctcctgagcaaggttaccgtcgtctcattgagtcttctattgtctccatcagaggccctgctgaagcatctgttgacaccgtatgaactctttactttcatctctaaaaagatgtatcaaaaacctaacacaaaacaataagcttctctctccgtttttttttttttctatggttaaatattaggttcatgctatcttaaaggatctggttcacaagtctgtgaatgaaactgtggaactaaaacaatacc

SEQ ID NO: 139548 - DNA, 395 bp, Arabidopsis thaliana
tccagagctaacgttgctttcttcccactccaaatggctcttgtgctctcagaacacacacagatataataaactcttaacgaagaagaagactttttcttttcttgagcaagctctgagaaactcacagagagggacagagagagaaatatttcattcgctactctctttaataccgccattgatgcaacctccttcgcgttaactgtcaaaatactccccaactgacaaaaattaaattcctttttttctctctcgattttaaaagctctaaaaggaacgagttgattaagtcggtcggttctggttatcactgaatttcattcaactcggtttattccggtttaagtgtgattttcccggctaatggatctgacccaaggtttcagagctag

SEQ ID NO: 139549 - DNA, 402 bp, Arabidopsis thaliana
cccacgcgtccggtttcgtctcttctctgatccattgttgaagatgtcgaagagaaaaactaaggagccaaaggttgagactgtgactcttggaccttctgttcgtgaaggagagcaagtttttggtgttgttcacatctttgcatctttcaatgacactttcattcatgtgactgatctctccggtagagaaactctcgtccgcatcaccggtggcatgaaggtgaaggctgaccgtgatgagtcctctccttatgctgctatgcttgcagctcaagatgttgctcaaagatgcaaggagcttggcatcactgccatgcacgtgaagctccgtgctactggaggaaacaaaaccaagactccaggtcctggtgctcagtctgctcttagagcccttgctcg

SEQ ID NO: 139550 - DNA, 219 bp, Arabidopsis thaliana
ttcccgggctcttattcattagatcacacacaaaagtaacttttgtttcgttcgctctctgtcatacacacaaaaaaatggcggaacttgagaatccaagtgtaatgtcgaagctgatagcattcgtagcttcattgctagagcgagttgctgagtcaaacgatatgagccgacgagtcgcgactcagtcagagatagtttcggtgtatcatggactga

SEQ ID NO: 139551 - DNA, 394 bp, Arabidopsis thaliana
cccacgcgtccgcttagatttcatgggttggtaagaatcaatcaatttgggaggtggagtatagtacaagtacttcaatttgcattgaaccctcacattgaatcatctgatttgcagaaaaaggagatctctttatgtaaaagtctctgagaattttggtttaaagagaggattttacggagatgggtttgttggaatcggtgaaatcaatcaactgggaacatgaatcatctccggtttatcaggattttcgagttcttcctctcttcgctgtgttcttcccttcgattcgatttctcctcgatagattcgtcttcgagaaattggcaaaatatttgatctatggaaaacatagacaggatatgggagatgacacaaccgagagaaagaagaa

SEQ ID NO: 139552 - DNA, 218 bp, Arabidopsis thaliana
tgcctactgagacatccattgatcatagcccgattgtggtgaacaatgctgctagtgccaccgatgttgatgacagacaagcaaatgagacactaatgattttaccttttgcaaagaagtcaccgttttggaagatgtatgagacacaggaggtatgcaaaatagcaccacagagtccagatttcagcccgctgttcgaggctaaagaagaactccgc

SEQ ID NO: 139553 - DNA, 411 bp, Arabidopsis thaliana
catgcattggatgcctgaagctcttaagatgcctgagcgtgagctgattgatcatgctggtttagactctgttgtctatctccggatttactggctcgggcttaagatttttgctccaatagcaatgcttgcttgggcagttcttgtaccggttaattggacaaacaacgagttggagttggctaagcattttaagaatgtgacttcaagtgatattgacaaactaacaatttcgaatatcccagaaggttcaaataggttttgggctcatatcataatggcttatgcctttacaatctggacttgttatatgctgatgaaggagtatgagacagttgctaacatgaggcttcagtttcttgcctcagaaggccgtcgacctgaccagttcactgttcttgttaggaatgt

SEQ ID NO: 139554 - DNA, 277 bp, Arabidopsis thaliana
catggacatgaagcacaaggagtcggagttgacagagagacgttctagaggattgctcacgaaagccgagacacaagctaaatacggatggtgatttgccgctattgtttttctcaatttgtgaaatttgcaacagattttctgtaactcagagtgtaatttttttcttttactattttccaagatccaagctttgaatgtaatactcatttccgtgaatgaatctaatctcagcagaatgctttgacccggaagctgattatagagttttgttgca

SEQ ID NO: 139555 - DNA, 378 bp, Arabidopsis thaliana
cccacgcgtccggccttgagagaaacttacgtgtgtaagaagctagaagctaagcaaaggctggaggatctcaagcgagattgtgaccctgagctaaagaaagatattgaggagttaatggagatatctaccgaaaacgagaggttacaggaggagattaaactttctggcgagctcaaagaggcaaagagtgcgatgcaagaaatttatgatgaagaaagttcatacaaaagcttggtgggttcactcactgtggaattagatggagtgcagagagaaaacagagaattgaagggaaaggagaaggagagacaagaagctgaagaaggagaatgggtagaagcgagtcgtaaagttgatgatttttctgctgagaaa

SEQ ID NO: 139556 - DNA, 191 bp, Arabidopsis thaliana
gagttatactaaagaaacttgaaggagaggaggttctgagtgagatagaagaaggaagagagagagagatgggtaagagtagtaacatagtttttgatcggattaaagaagaacggcagatgtggagctttttcaggatttttcagagggcagatctatcctctgactgcatgagagcgcttccttacagc

SEQ ID NO: 139557 - DNA, 263 bp, Arabidopsis thaliana
cacacacgtccgcccgtactgtcagcaggccatcttcaacgctactcaaaatccctgctgacgagcttgtgcaacttacagctaacgaccttcctctatccagcgatagcgtctcagaatctgttcagtgcgagaaacctttagagctgttgacagactctccgatatcacagttttataatgttgatttggaaagacagctgaaaccttgggtacctgatgaagatgttccagactgttcagatctggagaatgtgtttgat

SEQ ID NO: 139558 - DNA, 228 bp, Arabidopsis thaliana
cgtgactcctttcttgttgaacgcacgaagaaatggttagatagcactacatctcacgtaaataagctgctgtgtgagacatttcctcatattcttattcacccagccggcaaaattcgatggggatttctagcagcaatacgtggactgctctctaagagctcttgctcgttgaagggtgctagattagtgatgttggaatgcgtatgtactctggctgttgatgac

SEQ ID NO: 139559 - DNA, 152 bp, Arabidopsis thaliana
caataacaaagatttcagctttcaggatgctgatcttctcaaaccagatattcttgctccaggctctttaatatggtctgcctggtctgcaaatggaacagactaggctaactatatcggccaatgatttgcactaatttctggcaaaagca

SEQ ID NO: 139560 - DNA, 257 bp, Arabidopsis thaliana
gacaaaaagcaatgcaggagtcgctttgcaacagctttcaaatgtcgcgtaggtgaatttgtaagtgatgtcctgctagttccagaaaagtgccagtttttccacaaagagcggatggaggtgtgtgagaatcaccagcactggcacacggtagtcaaagaggcatgtctgactcagggaatgaccttatatagctactgcatgctgctcccatgtggggtagaccagttccatggcactgaatatgtgtgctgccc

SEQ ID NO: 139561 - DNA, 375 bp, Arabidopsis thaliana
aagaaaactctcgtctgttaaagctttcctctgtttaccttcggagtcaatcttgattccgatgggactcgaatcgggttttggagcgtttgggtgaagacatggagaaactaatgactgaatcaggtttgaaaccagttgttattgattcgaatcaagatttatctcgtgtatattgtgggatctgctctaatattggtgatgacgattatgatggtgatgctgttgttgttgatggtgatttgatctccacgcctttttgttctcacaagttctgcaaagcttgttggagcaagtatcttaagaaaaatttcttctctgtggagaaaaaccacactgcaatctcttgtcctgatcgagattgtcgagctgctg

SEQ ID NO: 139562 - DNA, 166 bp, Arabidopsis thaliana
aagaaaactccggagagactttgtggccatggtagcctctctccaatccaccgctacattccgccagtcagcgaagatcgccaccgctccttctcgcggaagttctcacctccgatcgactcaagccgtcggcaactcatttgggcccgaaacttcctcggctcgc

SEQ ID NO: 139563 - DNA, 314 bp, Arabidopsis thaliana
atttgctcctacgaccaatgggctttgctgcacattttttccacatggtggagtcattgccacaaggacaatagatggccacgtccagttccggacagctcctagggtcctgtcctcactgaagcacttatgccggcaagcccttcgaagtttcctaataacttaccaagtcctagcactgccaatccccaagaaaatgaaagagttcctcacatacaggactttttaatcaacaccacatcttgtgcttcattgtagcagggtaaatcgtcctgtcaaacggagttgctggaataatgggccaaacatctggt

SEQ ID NO: 139564 - DNA, 170 bp, Arabidopsis thaliana
acacttaacagtctttcttcagctgagtgaaccaaaactatttaataattgttattcttttgacaagtcttctcttttttgttcaaagtcttcaacttttttttacgatagagaactttttctctgtgtgtccactagaagcagcaactacaagagcttgaaaaaggtgg

SEQ ID NO: 139565 - DNA, 247 bp, Arabidopsis thaliana
cacgcgtccgaaaaaaattcattaattgctgaaactctctctctctctagtctctatctctcttcttcatccttgagctctgttagattctctctaactctaccatcgtttcatttcttaattctctgttttcttgttcctccagagtgatagatctggcagagaacaatgtcggaattagccaattaggtcgccgagataaaaacatggaagcgaggatgaagaagtatagcagagaagtgagtcc

SEQ ID NO: 139566 - DNA, 270 bp, Arabidopsis thaliana
gcgtccgcatcaacagacgctaaaacgatgacgaaaatagccgaggcatcgtttgataccgtggagtattggagaattgtggatgttcttcatagaaagattgggaaagatgaaagagagataaagaattggagagaagcgtacaaggcaatggtgttgttggagttcttactaatgcatggacctattcatttacctcatgattttctttatgagttggatcattttcgattcctctccactttccaatacgttgacaataatgggttt

SEQ ID NO: 139567 - DNA, 412 bp, Arabidopsis thaliana
gagcaatatcgagttgatggagcccttgaagaaagtttgaattttgaggagaaggaacaagaatctgaagctcagagactattggaagcagagaagagaagattgctggctgaaatcgaacttgggtcaatctttaggaagagtgttgatgtggatacgttgcctaagatcgaagagacgatggataatgatgttgataagattgaattggttgatcatactgcgttggttgatgttgttcatcatcctaagagaccagggactgctcaaaatgagaaggatacacctagaaagcttaagaaaattggagataagagaaatgttattgaggggagtggagtagaaaacaatgggaagcagtttaggagattgtacactaggaaacaattggagtcaatgaggtttgcccaca

SEQ ID NO: 139568 - DNA, 320 bp, Arabidopsis thaliana
accacgcgtccgagagtatcttatccctaatgatgttgtggatgttgatggtggtattaaagcggtaagaccaccaataattcagccccctccgggaagaaaactacctcttattgactttccaggatcatcgtgggatttccttacgtattttgctccaagtaaaacagttaagcggcagagttcctcctcttctgataatacctctgataaagaggaagttgaaacggaagagacgcgaggtatgtttgtccagttgggggatacggctcatgaggcatgcccattcgctacaaacgaggctgactcctccagtacag

SEQ ID NO: 139569 - DNA, 102 bp, Arabidopsis thaliana
gcgtccgcagatacaacgaccgttttgaccctgactagtttggtcggaggcttctgtgtgaattggggtaagatcgcatcagatctgttgaatcccaacatt

SEQ ID NO: 139570 - DNA, 279 bp, Arabidopsis thaliana
gggggtttgatctttgttgtgaaatcgagagataagctttggtaaaccatgggtggtcgttacgatcggaacacattcgacgaacaagacgaagtcaatccttttgctaatcctgggagtgttcctgctgcttcgaattccagactatcgcctttgcctcccgaacctgctggttttggttatggtcgtactgttgacattcctcttgacagaccagggtctggtgcacaggatttgaaaaagaaagagaaggagctccaagccaaagaagctgaccta

SEQ ID NO: 139571 - DNA, 283 bp, Arabidopsis thaliana
aaagagtggaagctgctaaaagaaaatcttgctttaatccgttggcaatatgctgtggcgtgtttgtttatgaagattgtcgtagcaaagaagagacggatgagcagcaaggggatagggaagaagctctgttttgcacgttgtgcaatgctgaggtccgtaagtttagcaagcattgtcgaagttgcgacaaatgtgtagattgtttcgatcatcattgccggtggcttaacaattgtgttggtcgcaagaattataggacttttatatcgctgatggctgt

SEQ ID NO: 139572 - DNA, 342 bp, Arabidopsis thaliana
tcaaaagcttattttatcaactccggctctttaagattctctctctctctctctccttcaccatctcagagattgctccactatctcatacatttggtgaccagaacaacttatctcttgagtggttcaacctctatctctctctctttctgccatgaaaatgcaaagccaaatgtaatagttagagagggagaaaccaagaactgaaagaccatgacttccaacagaagcaacctcctgttctcattagtcctcttccactttctttttgtccccacacaactccaagctcttaacactgatggtgttcttctgcttactttcaaatactccatcctcact

SEQ ID NO: 139573 - DNA, 287 bp, Arabidopsis thaliana
aaatttctcttaagatttaagaactaatatcttgtagcttcttatgatttcaccagttctaatttcttgtgactcaagccaaaacctttgttacctttttttgatgcttggctttaacgatgatatcacgagccctcttagtgctcagatcttcgatttctgcgatccacaactctttcaagaaacctttaatcaatcctctgaagtcacctctacttcaaacattcttgagaaatcaggaagcttccattccaacactaacaccaccacaacaactgagaacagta

SEQ ID NO: 139574 - DNA, 285 bp, Arabidopsis thaliana
gacttaccatgatggggaacactacaacagtgtgcgttccaaggaagatgcttgtggaggaccagccaggcctgttgtaatagaggctgatgctaaagtttcagcagcatctaaacaagcgaaagctacagagagcaagtccaaaaataaagctgataagtgtcatgtgaatgctggagctagcaaagttgtcatgtctggtagttgttgtgacaatactgagaaagctgaacaggttctattacaagttaatggtgatgtggatgctgcgatagaattcctgat

SEQ ID NO: 139575 - DNA, 244 bp, Arabidopsis thaliana
aagatcctatgtctatccgtaaatggactaatctttagacacacagagaatataatgagtttgaaaataaagtttctgcttctgcttgtcttgtatcatcatgttgattctgcctctatcgtcaagtttcttcctggttttgaagggcctcttcctttcgaacttgaaaccgggtacattggtattggtgaagacgagaatgtgcaatttttctactagttcatcaaatctgaaaacaatccaa

SEQ ID NO: 139576 - DNA, 149 bp, Arabidopsis thaliana
cccacgcgtcaggagatttaatacaaacgaaagagaaactagaaagatatggcaggactcatcaacaggatcggcgacgcactccacattggaggaggcaacaaggaatgtgagcacaagaaggaagaggaatacaagaaacacgttga

SEQ ID NO: 139577 - DNA, 232 bp, Arabidopsis thaliana
agacaacagagagagatgttttgtagcttatccatttccagatttgtctcgaggaagacaataacatcatcatctcttctctctcgcagtttcagattccttctctccgttgattctcctcctcacatccctcttctacgcgcttcttccaacaccctaatcccttcgtcttccttctcccgccgtatttgggactcctgcagcggtggcagcggatgtggcggcggatatg

SEQ ID NO: 139578 - DNA, 409 bp, Arabidopsis thaliana
caccacgcgtccgctcgagagaaaaccgtaaatctcttctccgttcactcaatcaaccaaagatgcgtgagattcttcacatccagggtggtcaatgcggtaaccagatcggagccaagttctgggaagtggtttgcgccgagcacggcatcgatccaaccggaaggtacaccggagactcagatctgcaacttgagcgcatcaacgtttactacaatgaagcgagttgcggtagattcgttcctcgtgcagtgctcatggatttggagcctgggactatggatagtctcagatctggaccgtacggtcagacctttcgacctgataacttcgtctttggtcaatccggtgcgggtaacaactgggccaagggacactacactgaaggagctgaactaatcgattccgt

SEQ ID NO: 139579 - DNA, 361 bp, Arabidopsis thaliana
aaacgattgagagtaggattgaagctactttcctttaatcatttctaattttgcaaactaatttcttcactttcatctttgatctctctggaaaaataactaatttgagttgttggaattaacttgttgaatttttctctgcaaattgtttggaataaggtaacgtttcctctatgtccacaattttgtgtgttattccaataattgattgtttttctctctttctcaattgttcatcgttgatatcgagaatgcatgaagatctataggaaatagttttacattcgcgtagattcggattgcaattgtgtaaattcggattgcgatttttgcttcatgcattaactcttgatcgatagtt

SEQ ID NO: 139580 - DNA, 191 bp, Arabidopsis thaliana
aggggaggagggtctccatacagaagaaaagaactcagtgaaatcacaccaactaagcttacgaaaacgtcacaagcacaggaagcacaattcaagcaccctgatagttccatgtttgagaatggggtgagagatagatggcataaaaagggagctgctgatagagatggtgccttgttgatggatatgga

SEQ ID NO: 139581 - DNA, 389 bp, Arabidopsis thaliana
cagatacaaagactgtagttgatttgataaagacacattttgaggataaaagatcaagtagcgagcctccacagataccagtgtttcctgttccttctcatgaagagacgcggttttcttgctttgttgagtcagaggcagctgggtctgcagtaatgatcagctataagatgcctgtaagtgatctgaagacagtgaaagattatagggatatgcttgcagaatcaatgtttctacatgctctaaaccagagactcttcaaaatatctcgtaggaaggaccctccattttttgcgtgttctgttgctgctgatgtcctggtgagccctttgaaggcctatataatgagttcgtcttgtaaagagaaaggaactcttgcatccctagag

SEQ ID NO: 139582 - DNA, 378 bp, Arabidopsis thaliana
cgccgacggagacacaaaatcgattgaaaatttcgacgccacaaaatcgattggaagtcttagctaggaatcgagaatgctatagctaaaagttgattgatcttcatattcgaaatttacacagcaggagcttccagcttgcaaaccaattcttacgcctggttgggtgatttcaactcttgttttgtggcccttgtcacggcttcgaatctacacaatgatgcctggtgcttaaactttttattgcatactctggtttaatcactcactataccaatatatatgctaataattgtggttctaatcactaatcaatgaaatgctgtttctaaagttgcgtacttggtttagatcctattgtggttcagtttgggagag

SEQ ID NO: 139583 - DNA, 383 bp, Arabidopsis thaliana
gtgaagaattgaaggaacttgaaatgcatctcagcttccataggaagcaaacgagaactgtttactgctgagatgcatttgaagaacacaatcaaacaagctacagtgagcttcttggacagtgaagaattgaaggaacttgaaagttgccttgaggaggtaagaaatgtcatgcagaaaagtgaagaagagtatagagatacaaaaacatgaaagaagaaaagacttgtcactatcatcatagattagcatttggtttctgggtgttgtaaaattaaatcatttctgttgtttggtttatgggtgttgtaaaattaatcatttttgttgtttgggttaaagacattgttgagatgataacttaatgtttctttttttgcgat

SEQ ID NO: 139584 - DNA, 406 bp, Arabidopsis thaliana
caaatcccaaatcctcccagatgtttttatcatcttcttcttcctgaagatttgatttcattttcctctctttcagatccctattctcatggcttctggatcttactggtgctatagttgtagccgattcgtttgggtttccgattcaatctcttgccctgattgcgacggtggtttcctcgaactcatccaagagcctctcgatttcacaccttccgattccttcaccaccaccaccaccactcaacatcgcagccccactcgcttccctcctccttcttcttcttcctccaccccatccgcttctatgcacgccgataacagtcccactcctaccatcgttactcgtacacgaagcaatcgatctcctaatccagttattgttctccgtggatctgctgctgct

SEQ ID NO: 139585 - DNA, 375 bp, Arabidopsis thaliana
cccaagcgtccggtgccttcagaaaagttgaagctagaatcgtcgagaagagaagaaaaggcttacactgagggactgtctattgcggttgaaagacttgaagcaggaaggaaaagaagaggtaacacatctggagatgagactagcgaaccaagcaataacaaaaagaggaaacatgatgttacccaaaaatattctgatgaagctgatacccagagtgtcatatcaagcccgcaaaatgtgcctgaggacaaacatgaactaccatcaagccaaacccagacgccaagtggtatggtagtcatcagtgaaaccgttaagatcacaagagtaacgtgtgagacagaggtgaccaacaaagtcacaacccttgac

SEQ ID NO: 139586 - DNA, 380 bp, Arabidopsis thaliana
cccacgcgtccgcccacgcgtccgcccacgcgtccgcggacgcgtgggtttgattcgtccaccagatggccgggaacgattgggtaaacagttacttagaggcgattctcgacgtcggtcagggtcttgacgatgctcgctcttctccatcacttcttcttagggagagaggtcgattcactcccagccgttactttgttgaggaagttatcactggttacgatgagactgatcttcatagatcctgggttaaggctgttgctacgaggagtccacaagagaggaacacgaggttagagaatatgtgttggaggatctggaatcttgctcgtcaaaagaagcagcatgaggaaaaagaagcacagaggctggctaagcgc

SEQ ID NO: 139587 - DNA, 305 bp, Arabidopsis thaliana
atttaacactgatgtgcaaaattatggaaacatcgagtacatgagatgcactccagagaatggcttctttcccgacttgtccaccgttggcaggacagatataattttcttctgttccccaaataaccctacgggtgctgctgccacgagagagcaactaacgcagttagttgagtttgcaaagaagaacggttctataatagtgtatgattccgcctatgcaatgtacatgtctgatgataacccacgatccatcttcgaaatccctggagcaaaggaggtcgctatggagacagcttcgttca

SEQ ID NO: 139588 - DNA, 170 bp, Arabidopsis thaliana
atcagagctatttttatggctatttcagcaacaaggcctcgtgcagatgtggcttattgtatccatgctcttgctatgcggttatcaagaacacataactgggcggttgcactgaaaactcttattgttattcaccgtgccttgagagaagtggaccagacatttcatga

SEQ ID NO: 139589 - DNA, 393 bp, Arabidopsis thaliana
gtgacacaagcagcagtatcatcgtcgtcatcactcactagcaaagctcgagcttcttccttcttcttcaatggtcgctctcttccttctctgaacccgatctctccgtttctgttcctccccacaagtagatccttcgctctcgtcgtcaagagcactctcggaaggaatggagacaaatctttacttaggatgactttaagtggggatagctcggaaactgtagagatgacttcaactgatatgattttcgagccgattttggagcatggagttttccggtttgattgttctgttgaccataggaaggctgcttttcctagtgtttcatttaagaacagcaaagaccgggaagttcctattgtgagtcacattgttccagcatatattcct

SEQ ID NO: 139590 - DNA, 376 bp, Arabidopsis thaliana
aagacacgtgggctgctgaatcagagaccagtgtaaactttctcatcaacagtaacaaaccgcagaggtcattgaactccaatctccgtcatcaaagccggaatccctctatagaatctgataaagcggttggagttgttgacaaactagagttatctagaaacatcgaagacaaggcaaagattctggagagacttttgtctgattcaaggagactgtcaagtctccggattagcctaacagatctgaaaagaaagctggagatgaatgagaaacaaagaagattcagcaacgctgatttggttatagtgaagagacagttgaaagaaatggaagaagctgtctcgcagctggaaaacacaaacgagattctttc

SEQ ID NO: 139591 - DNA, 373 bp, Arabidopsis thaliana
tcggttgacatctacaacgcacctagtggctcgttaagggttatgaccgcaaacaatgactgtactgtccggctatttgatgccacaaactttgccttgctcaacagatttgcctttcactggtctgtaaataacatctccaccagtccagatggtaagctagtggctgttctaggagacagtcctgagtgcttactagcagataccggatctggaaaagtgatccacggactcgaaggccatctcgactactcgttttcatcagcatggcacccaaacggtcaaatcttagccacgggtaaccaagacacaacctgtagactatgggacgtaaggaacctgtctcaatcactcaaagtcttgaaaggaaaca

SEQ ID NO: 139592 - DNA, 180 bp, Arabidopsis thaliana
ccgatgatggacgtgttgttggcagcttatggagatgaaaacgcagagcataagatcagcaggaaccacatcaaagcatttttcgtggagcttttctttgcgggtactgatacctcggcgcaatcaatacagtggacaatgggagagatcattaacaaccccaacattcttaaaagattg

SEQ ID NO: 139593 - DNA, 284 bp, Arabidopsis thaliana
ggtatccagaatttgaaaatgagacggctacaacgagatgatataaaggtatgtaactgaactgccacgagactaatttgttgtaattgattatccctggcggtatcttttcattttaatggctatcaataatcaaccatgggatatcaatctgctaccacaggttagaactgatggcacatgctataaaggacattatggggcttttatattaatatgtgtcttaaaaatttgattcatcctttggtgcctaatgtttttgcaagctaagcactgggattcct

SEQ ID NO: 139594 - DNA, 239 bp, Arabidopsis thaliana
gcgtccgaactaattgtttatgatgatttggtaatcataaaaacttgcggtgctaccaaaatcttcgagtgcatcaatgggattgttgctgcggtgggttggaataagctaagatccatcaaatatacccgtgggtcgtttttccgagccgatttgcagacatacccgcatcagcgaccttgtgacgataacagatgtgttaggctcgtccctaaatcagagttctcttggaggaattc

SEQ ID NO: 139595 - DNA, 427 bp, Arabidopsis thaliana
cccacgcgaccggtgacggaaatgctctgtatgcggtgcctcaaggtgcaacctgttggtcccatctgcacaacaccttcatgcgacggattcccaatggcaaagcactattgcagtatttgcaaactttttgatgatgaaagggccgtttaccactgtccattctgcaacctttgccgggtcggggaaggactaggaatcgattttttccattgcatgacatgtaactgttgcctagggatgaaattagtaaaccacaagtgcctcgagaagagcctcgagacaaattgccccatctgctgcgaatttcttttcacatcgagtgaagcagttagagccttaccatgtggtcactacatgcactcagcttgcttccaggtttgcaaatctctctttctctcattaaacttaaattaacttttaacgc

SEQ ID NO: 139596 - DNA, 420 bp, Arabidopsis thaliana
agaaatctctcaagtctctctcgttgtctcagggttgcaacattttgtagagaaaatgggttcatatgcatcagattctgcaatgttgaagacttggagaaagactcctccttcgtcttgttctcttgtcagactttcacatctttcttcactacaagcatatataactaagaaatgttgccttttttgtaaaaatcaggagattggttgtttacccaaaaggaaacgaagaggacaatggaaagggctttgtgtctatgtatgtggaatgtctctcatccacaacaccacccattgatgtgtttgattatctctctttctttgtctttaacaagaaagacaacaagtacctctcaatccaagatgttgaagttaagcgtttcagttcttctaaaacggtttggggattgccaaaagcta

SEQ ID NO: 139597 - DNA, 421 bp, Arabidopsis thaliana
accacgcgtccgcccacgcgtccgcccacgcgtccgcccacgcgtccgcttcatcagttccagtcaccaggcaaatgaggtattaccagctgaaggagataatgagatgatgatggtgccattgggggaggagaagtttatggtaatgaatgaaacaagaaggaaacttggaagttttcagatatgttcagtttgtacttgttgtggtggtgctaaaggtctttgcttgccttctccttgttgctatgctattaactgcaatatccctaatagaccctttggttactgttctttcactcccaaaacttgcaattgctttggttgccatatctgagatcttctacttcattgtaatttgggagagaaacaagtgaatctaaatcttgattcatcttcaagtgtgaaagggaggaaaaaaaga

SEQ ID NO: 139598 - DNA, 354 bp, Arabidopsis thaliana
gggtgcttatgattcttagacgagaagcacatgaggcagtgttctacaagcagagagaagacctacaggaatgggagaagaagttaacactggaagaagataggttgtctgaagttaaaagaagcattaaccatagagaagaaagagttatggaaaatgaaagaaccatcgagaagaaagagaagatccttgaaaatttacagcagaagatttctgttgccaagtccgaattaacagagaaagaagaatctataaagattaagctaaatgacatttctttgaaggaaaaagtgagttatctaggtgcaactttttttgcttccggtaccttctggcttagatattaattttgtg

SEQ ID NO: 139599 - DNA, 342 bp, Arabidopsis thaliana
ggtccagcacgcgtccggaccaaattgcccctgttatacatgagtggacatatgatgctatgtgccatgatttactgaacatggaaggaaacaaatatgtacatgtgattccaagcaaatcaggcggacaaccagagaagaaagatgtgctcttagaggaacatgatcctatttggctagagcttcgacatgcacatatagcagatgctagtgaaagattgcatgacaagatgaccaatttcttatcgaaaaacaaagctgctcagcttcagggtaagagagatggagctgagctttctacaagagatttgcagaagatggttcaagcattgccacagtaca

SEQ ID NO: 139600 - DNA, 221 bp, Arabidopsis thaliana
attgtagaatctatgcctgcggagagctcccgttagatgcttgataatcactattgaccgatgcattgtctttgccatctttgttctgttttttgctattatgactattgaggaatccaaaccatcaaaaagccaaagattttcaaattctggtcttttatttattatatatttcggatacatgagttataagttcttttaatcgatgtgggattcttatt

SEQ ID NO: 139601 - DNA, 128 bp, Arabidopsis thaliana
ttcttaggtcgaactcggtacccccaacacttgctcaccacttcatgactcgctcttctctcccttctttttcaactaaaggtgttaagttgcagcagaacgatgttcaaagaactgctgctgctttg

SEQ ID NO: 139602 - DNA, 221 bp, Arabidopsis thaliana
tcctcagttctctacatcaaatctatgataaacaatgacagacatttccagtctctttagaaaccgaattctcaaggaccaacctgactatggtttaactgtgagagttatatcaactctttgttggtgtcgttggctctacgccaaatgcaaacggcggtctccatcgttgccgcctggaccttggtgccttcccattatcggaaaccttccattcctcc

SEQ ID NO: 139603 - DNA, 288 bp, Arabidopsis thaliana
tgggctcttatcaatgagattgggagggacaattcgatcgactgtttgatccgttgctcgaggtctgattatgtttctattgcttccttgaaccggaatttccgttctttggtaaagagtggagagatttatagattaaggcgacaaaacgggtttgttgaacattgggtttacttctcttggcagctcttggaatgggttgcgtttgatcctgttgagagaaggtggatgcagttgccaactatgccttccagtgttaccttcatgtgtgcagataaggagtctctg

SEQ ID NO: 139604 - DNA, 384 bp, Arabidopsis thaliana
accacgcgtccgctagatcgcgagcggccgcccttttttttttttttttatgaaacatatgttgtgtattgtactattcatattcatttatcacattacaatcatcaaccaaaccaaaaacacaaacataacaacaagggacaagaagaacaaacattgatccatacctaaagtttcataattcgaacatcaaaaacatattttttaattatcataagtacgactctcatctctcagatcaaacaactcatcatcatcatcatccttaacgtctgaccctaacaccgtcgactataactcctccatcctttctgtttttccagctgaagcatgcgaagtaatcagtggatacgcttgttctgctgatatttaccctgaagtcaa

SEQ ID NO: 139605 - DNA, 323 bp, Arabidopsis thaliana
aagaaggattgggtcgaaagtgacattggaccagatgtttaagccttcttttatttttaatctgccaccgatttcttggtacgttcgtcggataaccatcaagaccatgaaaactctgatcgaagatcttcaaattacaagtgccatgatccgaggtatttgaaacgtcccaaatccgctacaaattgatagaacatcaaataaagttataaaatcactttttataaatttaaatagcagaatattacatatgactttagaagtgtatgttcttatggtcactttataacatcaaattaaatgtatagaaaatgtttctaacc

SEQ ID NO: 139606 - DNA, 132 bp, Arabidopsis thaliana
atgagttggtctcatctttgttgatttttgaatgcgcatgtatttttttcttctttttcatgacgggcaaagtgttatgaagtacaatgcaattgtctaaaacaggataagtcaatggttcgtgtgtgccat

SEQ ID NO: 139607 - DNA, 423 bp, Arabidopsis thaliana
attttagttgccgagttatgacgaagacgtcaaagaaatggaaggccaatccaaggaagagtatattggatcattgagaaggtaaaaattaactaattaagcaatcaattataccaaattgattaatcatagttttataattaacttacaatatatcggtgtagaaaaagtagtggattttctcgcggtgtatcaaaatacagaggcgttgcaaggtagatagaatttcaatatgatacgtagaactactctaatatacataagttgttgaatcatgatgaatttgcaggcatcaccataatgggagatgggaagctagaattggaagggtgtttggtaataaatatctatatcttggaacatacggtatttcattccattatccttactttatagtaatatttttatgaaatgtgtaaattc

SEQ ID NO: 139608 - DNA, 400 bp, Arabidopsis thaliana
agagtatgtagaccaaccatggaacaagaagaacgagatgttcaagttcatggctaacatttgccaaaagaagtgtgaggaagaatacttgggattcgccattgtgccaactaccacatcatctggtaaagagagctttatctactgcaatgcggatcatgccaagcgccttaaagtatcgcgtgaccaagcctctgcttctctctgaaaacattctcatctgattctgtttgatctcggcatgtgtgtgtccagtgtgtacaaaacaggaaactttcttctatattattccgattctacaaaattgcgtctaaatatttaagtttataccatctctatgagccactgtaaaacttgccatcgacttctagtctatttccagtgatggtttgattctccc

SEQ ID NO: 139609 - DNA, 345 bp, Arabidopsis thaliana
  unsure (1)..(345): unsure at all n locations
tgcaagtcattcatctctatgcacanatggcgaaagagaacagtagtcatagccttgcaagaagcaanagagaaaagagactcacttggattccttgtgtaagtggactttgcatattgtcttatgttcttggatcttggcaaaccaacactgtcccaacttcttcctctgaggcttactcaagaatgggatgtgatgaaacatcaacaaccactcgggctcagactactcagactcaaacaaatccttcttctgacgatacttcttcctctttgtcttcctcagaaccagttgagttagatttcgaaagccatcacaaactcgagctgaagattacgaatcaaa

SEQ ID NO: 139610 - DNA, 263 bp, Arabidopsis thaliana
cccacgcgtccgcccacgcgtccgcggacgcgtgggtggcaataaaattgttattgatacaaacaatacaagagcttatttaattcattaaatcgaaaagatttattgatcagattctcaagtgttgcaagcgttccttgttacctttttcgcttttgcagttctttcttacttgccttgcttttctctcgttcatgtattacttgatgcaagtcttgaaactttcccgatattggaccaaactctttttcattcatgccttt

SEQ ID NO: 139611 - DNA, 301 bp, Arabidopsis thaliana
agagcgtcttcataaacgcccttcgtcttcttccctgcaaatctattttctagatctttctttcttccgcgaaacgacaatgagagagtgcatttcgatccacattggtcaggctggtattcaagtcggaaatgcttgctgggagctttactgtcttgaacatggcattcagcctgatggccagatgcctggtgacaagactgttggtggaggtgatgatgctttcaacaccttcttcagtgaaaccggtgcaggtaagcacgtcccacgtgctgtctttgttgatcttgagccaactgtg

SEQ ID NO: 139612 - DNA, 317 bp, Arabidopsis thaliana
cccacgcgtccggacgaagaagtttctgaatcaatggctcaagcagcgagattaagcctgagaatgcagaaagagctaaagcttctcctctccgatccacctcacggcgcttcgtttccacatctctcttccgccgccaatggctccggcgatttctccactttctccaccatcgatgctcaaatcgaaggtcctgaagatactgtatatgctaatggaatcttcaatttgaagattcaaatccctgagagatatccatttcagccaccaattgtgtcgttcgctacaccgatttatcacccaaacatcgataacag

SEQ ID NO: 139613 - DNA, 309 bp, Arabidopsis thaliana
gagcctctgaagtgggaattaaaacagaagccgggcttgagtcctcctcgtggtggttttgatcctgatgatccaaatcaacaaatcgtcgctgaagatatatttgacgaatatggagggttccttgagggcagcatcccaatagaaatactgaagagtatgtcgtcggataagaaaagaagatccaaaaagaacaataggtacaagaagcattcatctcggactgttgaggaaactgatgaatcttcaacaggctcagaagatattacagagaagaggggatcaaagaagcgcaagaaacttaagaag

SEQ ID NO: 139614 - DNA, 298 bp, Arabidopsis thaliana
acaataaaagcttttttcgcgttttccaccgcaaccagcgtcaccttcaaccgccggagccgccgcaaggaaggctcatcatccgccgtggcgtaaggctttttcttcttctctttctcccttttctacgatttcgcggtcggtcgcttcctcgtaatctcgtgtgtttattccgggaaaatctcgatgggaaacaagttaaaatttgagattgagaatcaagcaactaatttcttcgcaagctgataaatccatgagctgattagcaagtttatataacgacattcatcgttgttgt

SEQ ID NO: 139615 - DNA, 396 bp, Arabidopsis thaliana
acatcatcgacaagtgggtcccggagtgagcaatcaagtgatcagactggaaattcatcaggatgggacattctcaggtcaatttctaaggcaactagttatcatgtttcaactcctaattttgagagaatctggtgggacaaaggtggtgatcttcgaagacctgtctcaatatggaggcctgttccacgtcctggttttgcaatattgggtgatagcataactgaaggattggagccacctgcactgggaatactcttcaaagcagatgactctgagattgctgcaaaacctgtacagttcaataaagtcgcacatattgtggggaaaggtttcgatgaagttttctgctggtttcctgttgcacctcctggttatgtttccctaggatgtgtt

SEQ ID NO: 139616 - DNA, 329 bp, Arabidopsis thaliana
aggagttcttccgttcctgggatcaggttagctggtgttaccaatacggtgcattcttatgatattctcactaggaagtggacaaggcttaaaccggctggtgagcctccgtctcctagggctgctcacgccgcagctgcagttggcaccatggtcgtttttcagggtggcattggaccggcggggcattctactgatgatctttacgttcttgacatgactaatgataagttcaagtggcacagggtggtggttcaaggggatggtcgaggccctcgctatggccatgttatggatttagtttctcagaggtatcttgttacagtcac

SEQ ID NO: 139617 - DNA, 218 bp, Arabidopsis thaliana
cccacgcgaccgaaccagttgagcgcaaacaagtagagaagccaattgagcgcaaaagaccaacaaagcttcatgttgatttacctgataaagaaacatgttcagataagcatagagttgcaagaactgtaatatttggtgggcttgctaatgctgagatggcagaggtagtccatagtcgagtcaaagagattggcactgtgtgctctgtcagatat

SEQ ID NO: 139618 - DNA, 327 bp, Arabidopsis thaliana
gactaagtgaacacagctgcaaagatcaactatttacatggaggaaacctaacgacaagggagaatttgaggaggttgagatcacagtgctcaattactataaagagcgtaacattgaagtgcgttattcaggtgacttcccttgcatcaatgttggtaagccgaagcgtcccacttacttccccattgagttctgtaatcttgtgtctctacagcgatacacagaatcgcttaccaattttcagagggctgccctaattgaaaagtctaggcagaagccacctgaaaggatggcctcgctaaccaaaggtctgaaggacagcaatt

SEQ ID NO: 139619 - DNA, 366 bp, Arabidopsis thaliana
ggtagatgcgtcgatcactatgtgcagtaataagttaattgattggaaaattaagtacgagaatactgttagtgagcaaaaagctgttacagagaagatagcggcaatggaggacaagttaaagcaagcttcaaccacaggagatggcttgagagctgagttctcccgtgttttggatgaaacggagaagataatcacagagaaagctgcaaagcttgcgactttggagcagcaattggcctctacgcgtgcggaattaaataaaagtgcgttgaaggtggaccaatgttcgtcagaagcagaagacgtgaggcttcaaatgtcgctcctgaatgagaaatatgaatctgtgaaatccgcatctga

SEQ ID NO: 139620 - DNA, 367 bp, Arabidopsis thaliana
aaacgttttactttgtgctgcactactcaacctcaatggccgcctcaacaatggctctctcctcccctgccttcgccggtaaggccgtcaagctttcccccgcggcatctgaagtccttggaagcggccgtgtgacaatgaggaagactgttgccaagccaaagggcccatcaggcagcccatggtacggatctgaccgtgtcaagtacttgggtccattctctggcgaatcaccgagctaccttaccggagagttccccggagactacggatgggacaccgccggactttcagctgaccccgagacattcgcaaggaacctagcaccaatctcttcgtctccgggcttagtaagcgcaccacttct

SEQ ID NO: 139621 - DNA, 281 bp, Arabidopsis thaliana
gtatggttagttgtaatagtatgggtaacggtggggtggagttcatgcacagggaggttcgttgtggagaagaacaacctccgagtgacttcgccggagtccatcagaggagtctatgaatgtgccctcggaaattttggcgtccctcaatacggcggaagcatgtccggtgcggtggtttatcctaaaactaatcaggaagcttgcaagaactttgacgattttgagatttctttcagatccatagtcactggattgcccacattcgttcttgtggatcg

SEQ ID NO: 139622 - DNA, 368 bp, Arabidopsis thaliana
attttaaatatcaaattcattagtcgatatgtagcaggtggtccctctaaacgctcaagttatattaaaccttctggattcatatttacttttaaatatttgtgactttttttccttcggtattaatttagcgcaatgtgaaagcaaaatttaagagttaaaatacattaaagtttggataataaatggagcatgagaattgcagataccactcgctgcaccacacgcagttccggaccaactactccctcttcatgcccttgtatgactacatctacggcacaatggatgaaagcacggatacgttgtacgagaaaactctagaaagaggagatgatatagtggacgtggtgcacgtaactcacctg

SEQ ID NO: 139623 - DNA, 312 bp, Arabidopsis thaliana
tacaaagaaacagagatgggtttggttacagaggaggtgagagctaaggcagagatgtacaccggagatgagatatgtagagagaagacaaagtgtttcctcaaggaaatatctatgcccaatggtttattaccattgaaggatatataacaggttgggtatgacagagagtcacgtgttgtatggctgaagcagaagaagagcatcactcacaagttcacagagatagataagcttgtctcctatggaaccgaagtcacagcttttatagtcccagaaaaacctgccaatgatgaacctgccaaagaggaa

SEQ ID NO: 139624 - DNA, 362 bp, Arabidopsis thaliana
gtccgaccacgcgatccgaacaatggatgcttcggtggtgagattttcccaatcgccggcaagagtgccaccggaatttgaaccagatatggagaagattaaacggaggctgctcaagtacggtgttgatccaacccccaaaatcctgaacaatctccgaaagaaagaaattcaaaaacacaaccgtagaaccaagcgcgaaaccgagtccgatgcggaggtgtatacggaggcgcacaaacaatcaatggaggaagaagctcgttttcaaacccttagacgggaatacaagcaattcacgacgtcaatttctggaaaaaggggcagcgatgttggtttgatggttgggaatccatgggaag

SEQ ID NO: 139625 - DNA, 415 bp, Arabidopsis thaliana
atgtctcagacaaagcagttatatcccggaacttctactggctgcatctgcctggaaaaaattacacactcttggagccgtacaggaagaagcaaatacctctcaagatcacttgcaatgcagttatggtgggttcaagatatgagctggaggtcaatgttcataacacatctagagctaacttagccaaaaacgttgtccaggaagacgaaaaacgtgatctggggttgctccagaaactctttagtagatgtgttgtttctgcagatagcaaccgtggtttgaaagtagtggaaatgaagggatcggattcaggagttgctttcttccttcgtttctcagttcacaatgcagagacagagaaacaagatacgaggattctaccagtacactactcagacaactatttctcact

SEQ ID NO: 139626 - DNA, 233 bp, Arabidopsis thaliana
gctcctctttgtggaacgaatgaattttggattcaacgttctttgggttctctacgcacaaatccgccatggaaacagatcaacatcaagaaatttgcaacgatggtggtttgttgtgtgaatcgaaggaagtttctgtcagcaagcacaagtccgacgctgtggaagaaagtgaggatactattacaagtggaaaccaagaagtttctcctgccaatggaccaacacttcca

SEQ ID NO: 139627 - DNA, 418 bp, Arabidopsis thaliana
accacgcgtccggaaacagagagcattatcaattattaacaattacacaagacagcgagattgtaaaagagtaagagagagagaatggcaggagaggcagaggctttggccacgacggcaccgttagctccggtcaccagtcagcgaaaagtacggaacgatttggaggaaacattaccaaaaccatacatggcaagagcattagcagctccagatacagagcatccgaatggaacagaaggtcacgatagcaaaggaatgagtgttatgcaacaacatgttgctttcttcgaccaaaacgacgatggaatcgtctatccttgggagacttataagggatttcgtgaccttggtttcaacccaatttcctctatcttttggaccttactcataaacttagcgttcagctacgttacac

SEQ ID NO: 139628 - DNA, 354 bp, Arabidopsis thaliana
accacgcgtccgcggacgcgtgggcgaatctaataacgctgacagattccggagagacttccggaacatcaactgggtccgcgtaccattggtttactgggattactctgccatgaacgtcttgactttggagtatgtaccatgtgttaagatcaacaacttggacaccttagctgcacggggttttaaccgttctacaatctcatcacgggccattgaagcttatcgtacacagagactctaaaccggcgtctttcatgcggatacgcacccaggaaaccttgcaattcatgtagatgaatcagtcatctactatgacttcggcatgatcggagagatcaggccatttactcg

SEQ ID NO: 139629 - DNA, 417 bp, Arabidopsis thaliana
ctctcttcactttgtcactgtgactcacattcatccaatccaggaggcatgtcgacatctgaggataaaccggaaatcatcagtagagtagttcatcaggagggtgacgtggaaatcgtcgatagaagtcagaaggataaggacgaggaaaaagaagaagggaaaggtggattcctcgataaggtgaaagatttcattcatgacattggtgagaaactcgagggaaccattggctttgggaagccaactgctgatgtctctgcgattcatatccctaagatcaatcttgagagggcagatattgttgtggatgtgcttgtcaagaacccgaatccagttcctatccctctcatcgatgtcaactacctggtccagagcgatgggaggaaactggtttctggtttgatcccggatgct

SEQ ID NO: 139630 - DNA, 402 bp, Arabidopsis thaliana
atccaagtagcagttgttcggaggctatctacatgtctcagccactcgtattattctccaatctataaaaattcaaattttcaatctccctttcttaagattaaaagtggcaaagttgagattttgatcgtcttcttcctctggaaatttcaatcgaaactatatcttcagagatgcagaatctgtgaaattgtagaaacgaatttcacatttttttttgaagaaatgacgacgcagatatttcagttgccgttaaagtactgtgcttcgagtttttcttccaccggccaacggaattacggtgcttcttcttcgccgtctccgattgtaatttgtaagagtaatggaatttccgatggtctttgggtgaagcggaggaagaacaatcggagatttggtagt

SEQ ID NO: 139631 - DNA, 153 bp, Arabidopsis thaliana
aggagagacgagacagagagtttttattttcgttaccggaaaattttgatctccgatggcttcttctcctgaatctgctcctccaacaaactccacctcttctccatctccaccgtctaataccaattcaaccacctcttctccgccggctcc

SEQ ID NO: 139632 - DNA, 414 bp, Arabidopsis thaliana
aggtatgacacgtgtccggttgttttaacgaagcagcgttcggtgagtgagaaatcagccgggtcgtcgtcgtcttcttcatcaaatttttcgagaatgagtttagattcgggtcgggttcacgggtcgagtacaccgagatgggttgagttttggagtgacgcggcggttgatcgtcggaggagaaactctgcttcttctatgtcgtcgtcacactcttcatcgccggagagatatttagatttaccaagatccgagacaccgaaatgggtcgacgattacgtgaaccggatcgggtcggttttaagaggaggcgggtggagcgaatccgacgttgatgatattgtacacgtgtcagcatctggtttttttgagggtgaaatggtaattttggataatcaagccgttcttgag

SEQ ID NO: 139633 - DNA, 411 bp, Arabidopsis thaliana
gcaaataaaagacagcgattgccatatagtcctgctgaattggctgccacagaggtgagggctatggagtgtattaggcagttacttctcagatctgcagaagcccttttcctactacaacttctttctcaacatcatgttgctagattagttcaggagcttgatgcaaatctaaagcaagctttagttcagttgacattccatcagctagtttgttctgaagagggtgaccaaattgcaacaaggctcatatctgccgtgatggagtattatactggctcagatggcaggggaacagttgacgatattagcccgcgactacgtgaaggttgcccaagttacttcaaggagtctgattacaaattctacttagctgttgaacgccttgagagagctgctttaacctcagat

SEQ ID NO: 139634 - DNA, 380 bp, Arabidopsis thaliana
attcagcataactcaaacacaatggtactcgcaaccaactctgactccgacgagcatttgcattccacttttgcttctagatatgtccgtgctgttgttcccaggttcaagatgcctgaccattgcatgcccaaagatgctgcttatcaagtgatcaatgatgagttgatgcttgatggtaatcccaggcttaacctagcctcctttgtcaccacttggatggaacctgagtgtgacaaactcatcatggattctgtcaataagaactatgttgatatggatgaatatcctgtcaccactgagctccagaaccggtgtgtaaatatgatagcaaacttgttccatgctcccgttggagaagacgaggctgctattgggtg

SEQ ID NO: 139635 - DNA, 222 bp, Arabidopsis thaliana
aggacgcgtgggcggacgcgtggggcaagtactcttatgtctactgtgttgatcttgtctgtttgaacagatgtaagaatcttagcaaataatgtttggcttaataaactttgatgtttatgttcattgcatcaatttttctctttttgaatttgtgacagtgatgtgtttacttttgatacaactttgtgtttgatcgtttaagtacattttggtttattt

SEQ ID NO: 139636 - DNA, 409 bp, Arabidopsis thaliana
cccacgcgtccgatggcataattgtgaactctctccgagctaggagtatgtttacttgcttcatgcaagaaccttttcaaatctttgcctcttatttgggtcatcaatgaagaaactcttgctgttcggtctagacagtacaactcaacagggcagactgaactcctcactgactggaaaaagattttcagccgggcatcggttgtagtcttccataattatctccttccgatactctacaccgagtttgatgctggcaacttctatgtgattcccggatctcctgaagaagtatgtaaagcaaagaatctagagtttcctccacagaaagatgatgtggtcatttccattgtgggaagtcagttcttgtacaagggtcaatggctggaacatgccctgcttctgcaag

SEQ ID NO: 139637 - DNA, 411 bp, Arabidopsis thaliana
atcaactttcagagaaaaaagtatacctacagagagagttatggcggagagtggtggacgaaggatcggagtggcggtggatttctcggactgcagtaagaaggctctgagctgggcgatcgataacgtggttcgcgacggagatcatctgatcctaatcactattgctcacgatatgaattacgaggaatgcgagatgcagctctgggagaccgttggatcaccttttattcctatgagtgaattctctgacgctgctgtgatgaaaaagtatgcattgaagccagatgctgaaacccttgacattgtcaatactgccgctaggaagaaaacgattacagtagtgatgaagatatattggggagatcctcgtgagaagatttgtgcagcagctgaacagattcctctctc

SEQ ID NO: 139638 - DNA, 411 bp, Arabidopsis thaliana
aggacacgtgggccagaatctgccgtcaccttttttcggtttttgcgtcttcctcaaaaattcgataacaatggtgaaacggaatcgagttccgccggcagaacaagcattacccatcgaagaagattgcaaatcgttgataaaaaagcttgcttcgtgtaagcaatcaatccgcgacagatccttgcgaactgttcttcgtacttggctcccagaacaaactgaaatctccgatgaagatatgaagaagctatggcaaggaatcttctattgtgtctggcacgctgataagtctctttaccaatcagaacttattgatcgtctctcttctgctcttcaatcacttcctcttcctttgtctatccattacttcaccgtcttcttgttcaccatgcgtcgtgagtggtctcg

SEQ ID NO: 139639 - DNA, 402 bp, Arabidopsis thaliana
accacgcgtccgcaacaatggcaacggcttctcctccatttatctcaactctcagcttcactcactcttctttcaaaacttcttcttcttcttcattttctccgaagcttcttcgacccctcttaagcttttccgtcaaagcttccagaaagcaagtagagatagtgtttgatcctgatgagaggcttaataagataggtgatgatgttgacaaagaagctcctttgtccaggcttaagctcttctcaccttgcaagatcaatgttttcttgaggatcaccggaaagcgagaagatgggtttcatgatttagcctctttgtttcatgtgattagcttaggagacactattaaattctcattgtcaccatcaaagtctaaagatcgtttgtctactaacgttc

SEQ ID NO: 139640 - DNA, 409 bp, Arabidopsis thaliana
accgataaaaaaaaaaaaaaaaactctctcagatctgagaatcatttcttcttcttcttcctcactttgttcatcatcttcttctccgatctaaacaacaatggcgacaccaggagcttcctcagcaagagatgaattcgtatacatggcgaaactcgccgaacaagcagagcgttacgaagaaatggttgaattcatggagaaagtcgcgaaagctgttgacaaagacgaactcaccgtcgaagaacgtaatctcctctccgtcgcttacaaaaacgtcatcggagctcgtcgtgcttcgtggagaatcatttcatcgatcgaacaaaaggaggagtctcgcggtaacgatgaccacgtttcgttgatccgtgactacagaagcaaaatcgaaacggaactttctgat

SEQ ID NO: 139641 - DNA, 409 bp, Arabidopsis thaliana
acttattgggttcgccttagctattctattagttgtggcgacttgcaaacctgaagaagagattacttgcgaagagaacgttccattcacatgtagccaaacagatcgtttcaacaaacaagatttcgaaagcgacttcatcttcggtgttgcatcttctgcttaccagatcgaaggcggcagaggtcgtggacttaacgtttgggatggcttcactcaccgatacccagagaaaggtggagccgatttgggcaatggagacactacttgtgactcataccggacttggcagaaagatctagacgtgatggaagagcttggagttaaaggctacagattctcctttgcgtggtcaagaatccttccagaaggaaagaggagtaggggaatcaacgaagatggtattaac

SEQ ID NO: 139642 - DNA, 389 bp, Arabidopsis thaliana
ggggaaaaaatgggtggatattttggagtttctacaatttttattatctgtttgttgggaatttcagccaatgctgaggtattcaccattggttcttcatcaggttctgatattactcaggcacttctgaaagcattcacatcggcatgccaatcttcgtcaccaagcaaagtggtgatcccaaaaggagagttcaagcttggtgagatcgagatgaggggtccatgcaaagctcccattgaggtcacccttcaaggtactgtcaaagctgacggtaacgctatccaagggaaggaaaaatgggtcgtcttcggcaacattgatggctttaagttgaacggaggaggagccttcgacggtgaaggcaatgcagcttggagagtcaataa

SEQ ID NO: 139643 - DNA, 225 bp, Arabidopsis thaliana
gaccgactttggctgggacaaggcatcaaatctactctacgtggaccaaccggtaggcaccggcttcagttacacatcggaccacagcgatcttcgtcatgacgaggatggtgtcagtaatgacctttatgacttcttacaggcgtttttcatagagcatccacaatttgtgaagactgagttgtacattaccggtgaatcctacgctggacattacattccggc

SEQ ID NO: 139644 - DNA, 114 bp, Arabidopsis thaliana
aaaatctaagcttctttttttggctcaatcaagttgtccgttccctgttctaaacatttcggatactcattccataaaaagtctctacaatttgagacgctctcctttgtggtt

SEQ ID NO: 139645 - DNA, 242 bp, Arabidopsis thaliana
acgcgtaggcggacgcgtgggcggacgcgtgggttttttttttaaaaagatagtaaaaactacgaacatcattttacagtagactatagtctatatcgtcgaaatcggatatggtcaatttttagttcgtgtataatttgacctattttccctcgttttcaacaaaaacgacgtcgtacgaacgaaccctaaaatctcgagcagcagagccaaagctagatttgattccctctcttcgattt

SEQ ID NO: 139646 - DNA, 229 bp, Arabidopsis thaliana
gtgagtttgggattactcctcgtgttaggactgtctctgccgatttcagtagaaatttccctaagtacaggaagcaattcagtgcattcttgaatacaccgcttggtggaagttttgctactattttcttcctttggtttgctctctctggatggctgttccgagttataataatcgccacttgggttcttccaattgctggccctcttctcattggtgcagtcgccaa

SEQ ID NO: 139647 - DNA, 377 bp, Arabidopsis thaliana
accacgcgtccgtatttggttctccattgtcgctaatgtctctattgctgctatgaacttcagtctcatgctcaattccgttggcttctaccaaatctcgaagctgagcatgattcctgtggtatgtgtaatggaatggattctacatagcaagagatactcaagagaagtgaaaatatctgttgtggttgttgttgttggtgttggtatttgtactgtgactgatgttaaagttaatgccaaaggttttatctgtgcttgtgttgcgattttctcgtcatccttgcagcaaattttaataggttctctacagaagaaatattcaattgggtcctttgagttgttgagtaaaacagcgccgattcaagctttttcgc

SEQ ID NO: 139648 - DNA, 419 bp, Arabidopsis thaliana
aaaagatcgatcaatcaatcatcaaactctctgtgtgccacatgcattactactgttgacttgttcaataaaggtaaagtaagatcaatccggcgaatcttctttcgttttccggcaccgatctcggtggatctccgattcacatggcggcggataatgcttatctgatgcagtttgttgacgaaacctctttttacaaccgaatcgttctgagtcatcttttgccggcgaatctatgggaacccttacctcattttctccagacatggctccgaaattacctcgccggaaccctactatacttcatctccggtttcctctggtgcttctacatctattaccttaaaatcaacgtttaccttcccaaagatgcaattcctacaataaaggctatgcgtttgcaaatgtttgtggcaatg

SEQ ID NO: 139649 - DNA, 382 bp, Arabidopsis thaliana
ggagagagcaaaaatggcgacgtcgggaacgtacgtgacggaagttccgctaaaaggatcggccgagaaatactacaagaggtggaagaacgagaaccatgtcttccctgatgctatcggccaccacatccaaaatgttaccgttcacgaaggcgaacatgactctcacgggtctatcaggagttggaactacacatgggatggaaaggaggaggtgttcaaggagagaagagagatagacgatgagaccaaaacgttgacgttaagacgacttgagggtcacgtgatggagcagctcaaagtgtacgacgtcgtctaccaattcattcgcaaatctgaggatacctgcatcggcaaaatcactttaatatgggagaagcgc

SEQ ID NO: 139650 - DNA, 344 bp, Arabidopsis thaliana
agctaacaaacggcgtgagtgggtggcttatcttcaagctggagctggtgtagtagctgatagtgacccgcaagacgaacactgtgagtgccagaacaaagccgctggtcttgctcgagccatcgacttggctgaatctgcatttgtgaaaaaatgattgtgcccaagaacagaggctggctttctttgaactccgagttcatgtgtataaaacagttacaagcagaacaaagttttttctttttcttgattttgtgagaattgcaattagactccattaatgaagctctgaaaaatgttacaatagaaaccatggtcaataatattcagctattctcccaaaa

SEQ ID NO: 139651 - DNA, 383 bp, Arabidopsis thaliana
cctccgtcgccgtcgtgtcgggttttctccgtatcccgtcaattcaaaagtctcaaaacccttcctttctcttttctcgacccaagaaatctttggtgagacccatttcagcttcaagctcagagttgccggaaaatgttcggaatttctggaaatggctcagagaccaaggagtcgtatccgggaagtctgtggcagaacctgcggtggtaccggaaggtttgggacttgtagccaggcgtgatattggaagaaacgaggtcgtattggagattcccaagcgattgtggataaacccagagacagtgactgcttccaagattggacctttatgcggcggattaaagccgtgggtttcagtagctctgtttttgatcagagag

SEQ ID NO: 139652 - DNA, 380 bp, Arabidopsis thaliana
gagctggacaacgaaaatagcgacgatagctacaaactttgaaggtatgaaaacagtagatgaagctgacgtgggcatctcctgttttatctcccagctccctggcttccgtggaatcctcaaacaaagatacgcagactttattgttaatgaagtagatatggatggtaatgtggttcatttgacatccttggacttgcctcctgagatggctgtgaaggaggaggataaagcgaaaagttgtgataatgtaccccaaaattatacttctgcagttgagtctttcaaatctatttccagtgttactgatgcagagcgtttggaaatattgatcaatcaagtcacctcaggaactgatggtgaagtcttaccagttgttc

SEQ ID NO: 139653 - DNA, 341 bp, Arabidopsis thaliana
cacgtacgtttaactctttatttaggttataggaagtagagggcatgtacaatctagtgatcgaacaaaccttctacgacacatgcacacacacacacacacaacgtatagctaaatctttatcattgctttcttatattaaggttttggcttttgtaagaaggtttcttacatatgagattcatatagtgtttgattcttaaggaactgttctgttgagtaataagaaagttgtgtattgaaatagagttgcatttgttaattttgtatagtgatgaatccctgtaatttgtgaaactcatttttatcatacatcatcaaactaagggtttataattata

SEQ ID NO: 139654 - DNA, 340 bp, Arabidopsis thaliana
cacacgcgtccgaatattatgatgattactatatatgcagctattggtacaactttgattcaaacatgtggagtgctgtgtacaaacgcacatatggtaaagactacaaattaaaagctggctatgattctgatgttcgccttggctgggcatctctctgggtaaatcatcaacctttagttttcttttctctcttctctcatcagcgtaatctttttactcgcttaagcccgaatccgagtcatacgagtaagatgctatagcatatagaacattcattcaccacacaattgtacctaatgatgcatctaccatctaataatatctaacggacaccatc

SEQ ID NO: 139655 - DNA, 237 bp, Arabidopsis thaliana
cccacacgtccgcggccatgagacctgcgacggagcttgcggtgaggatcggccgagagctgctaaaagtttccggaagctctcgagctgctcggatatggagtccattgattgaacagagtcttcacggtctcggttttcgtcactcaataagcccttcgcttgtggctcgagtcatagacccgtttctgctgaatcatcagtctcttgctctcggtttcttcaattgggctgctc

SEQ ID NO: 139656 - DNA, 211 bp, Arabidopsis thaliana
attttggagaagaacaaataacaaagataaatggtaacgtagaggagctgttgctgctgctgcatccacaatatcgaaacaccgaccacacccttcacttccatcactacctcgccatttcaatcccaatttcaatcacacaatcatcctaacagggtttagatatcaagttagggcgatacacggaataactactgatcctgtcattaca

SEQ ID NO: 139657 - DNA, 373 bp, Arabidopsis thaliana
  unsure (1)..(373): unsure at all n locations
taactctaggaacagcttacttcttgggactgagacggacttataggctcgctctgaagatccagcgtcggcttgttactccgaaacatcccaaaatccgtcaatttcttcatcggaggactcgtaaaatcttcgatgtggcgatttcggttcacaagaacatacaagaaagagacatagaagttggtaggaatctcggaaattggattcttcgttggctcgataagatgaaaccagcagctcagatccgtactcggccagaactaccacacaacagcaattccaacatggacaaggcaaagagactaacggaattgtcncgtcncaaatcgcacacgaacacgacgcagactccacaaaaccgtgaatccga

SEQ ID NO: 139658 - DNA, 173 bp, Arabidopsis thaliana
aagagaagatggatctgttgagcagtttaccagacgaggttcgttgtcttatattgtcctttcttaccacaaaggagtctgcttccacatctgttctgtctaagaagtggcgtaatctgtttgcacttgtccctaatcttgactttgatgactctgagtttcttcatccggaa

SEQ ID NO: 139659 - DNA, 208 bp, Arabidopsis thaliana
accctggaaaagatatcacattgcaggtattactggagagagacatggagggaaggaccgaggtgggacctgtggacgcgccaagatatcctaagactaaagaagaaggttggtggctagtcgttggagaagccaagacgaagcagttgatggccatcaagagaatctccctgcaacggaaggcgcatgtgaagctggagtttgcagt

SEQ ID NO: 139660 - DNA, 226 bp, Arabidopsis thaliana
aatttatgctaatgctataatgcatgctggaacgacagttgacacttttctcagggagaatttggattggctaagcacggccaccaattgggccaagtttagtgctacagcaggattacgtgttattcataggggtcacttgcaacagggcacgtcactgatggccccatacttgcctcagggcggagcaggtggtggcgggagtccttactccgaagggggtgct

SEQ ID NO: 139661 - DNA, 383 bp, Arabidopsis thaliana
gagaaatacaactgccgatcaattctcatatatacatagacgtgctttaactctgatgggttgtactgtgagggagaagcatgttagaccaaaccggaagaccagatccgtgaaacccgaattcgatccgtgttgtttgctcgacaggacggctctatcgaaatcgattgttgaatcgagtcttaagcatcttgtttatcatccgggtcttctcgattcgtgtccagagtcaaaccctagtggcagttttgaggataataatggttggggttattgtacggaggagcaattagaggatattttgttgaaacatttggagtatttatacaatgaagcgatttcgaagcttgtgggttctggttatgatgaggatgtggcgttga

SEQ ID NO: 139662 - DNA, 349 bp, Arabidopsis thaliana
cagacgcgtgggctcacagatcactctagggctcctgacagaaaaaccaaataccttttcctctttcgatttttgtggaatttcaaatctttctttcctcaatctttcagaatgatcttttcctgtgaagttcttgattttaaatcaccctttcttcagtactagcttatctcttcgtcaattttctctaccgacattcaatgactctccctattcggaaaaatcaagtcaaagcattaaaaatggttagaggaaagatagagatgaagaacatagaatacgcaacgagtagacaagtgactttctcaaaaagaagaagtggtttgttgaagaaagcttatgagctctc

SEQ ID NO: 139663 - DNA, 380 bp, Arabidopsis thaliana
gacacaagaaaatggatttataggatcaatcgatcaaggaaccaccagcaccagattcatcatttacgaccacgatgctcgtcctgttgcttctcatcaagtcgagttcactcagttctatcccgaagctggatgggtggaacacgatccaatggagatactggaaagtgtgaaagtgtgcattgcaaaggctctcgacaaagccactgccgatggacacaacgtcgacggtggcttgaaggccattgggcttacagatcagagagagactactgttgtttggagcaaatccactggccttcctctccacaaggctattgtctggatggatgctcgtaccagctccatctgcaagagactagagaaagaactctcgggag

SEQ ID NO: 139664 - DNA, 391 bp, Arabidopsis thaliana
acacctacgtagaccggtacgtgacgagatggagaggttcgtcgttagcgcggagctacttaaccatccggttttcatcggtttactaaaccgatctgctcaagagtatggttacgagcaaaaaggagttctacaaatcccttgccatgtccttgtcttcgaacgaatcatggaatcgcttcgtcttggacttccggtaccgattgatgttcaggatctaatcggtgacgggactatttgaagaagaagcttttattggaaggaatcttggtagttagagaagtttttttttcttctagatctggttgtttttgttcagatactactgagtcatcatacttcgtcgtcgtgtcgatgtaaataggtatataatttttccaggatccaaaag

SEQ ID NO: 139665 - DNA, 204 bp, Arabidopsis thaliana
agcttctcgaattgctacagtctttgcttcgttgcgggaattcccagcagtacgataccgagctgcaatgtcacttgatgcatcgacaatgacaactttgcgcgatttaattccaacaaagcttgcagctggaatctggaattgtctggcagaacataagcagtcgattgaaaattttcctcaaactgaaacatgcgagctact

SEQ ID NO: 139666 - DNA, 175 bp, Arabidopsis thaliana
cccacgcgaccgcacacgcgtccgcggacgcgtggggatcatgtcactaatttagtgagacagaacagtagaatcattttacctatagtgtttcccgctttggagaaaaacggtagcagccattggaatcaggctgtgaagaacttgacagagaatgttctcaaggttttgtccg

SEQ ID NO: 139667 - DNA, 370 bp, Arabidopsis thaliana
gataaagcattatttggagaaaaagaatggtatttttttagtcctagggatagaaaatatccaaacgggtcaagacctaaccgggttgccggatcgggttattggaaagctacgggtacggataaaataatctcgacggaaggacaaagagttggtattaaaaaagctttggtgttttacatcggaaaagctcctaaaggtactaaaaccaattggatcatgcatgagtatcgtctcattgaaccttctcgtagaaacggaagcactaaggtaacaaataaaatctaaacattaataaatactatatcttatattttcttcttgtagtgttttgaatgacctataattaatattcttgttaattttcttt

SEQ ID NO: 139668 - DNA, 386 bp, Arabidopsis thaliana
accacgcgtccgcgccgtaagattccggaatttcgccgcttaattgattgctgaaggtgataatcttctgaagttttcttctgtagcacaaatacggcggcaattcaccggagaatctgttcgtcgagacatcgaattcagagatttctgagaatttcccgagattccttggtaacgtccccgtgaaactgttgttgaagattttgaattcaacgagattaggattcaaagctacgacatctggtaatcctccggtgaagaaattatcattgagattgaaagagataagttgcagagcagcgatcttttccggtagttcaccggttagattattctgcgagacatcaaaattcctcaattcggttaaatttccgatactctccggt

SEQ ID NO: 139669 - DNA, 383 bp, Arabidopsis thaliana
aatttccgtctctgttttttcttgcattttccccagaattccttcacattctctccttttcctctttttaattcctcaccacctcaaattcttcataaacaaatccacttctgcatggttgggagaatctgttagagaatttttgttgttgttgggttcagatttggaaaatttcctttttttcgagtttcttctgaattattcatcgtggagattctcggatcgggaagggctgcgataggtggttttcactgcggggatagattcatcttctgtcttcacctgagggggtagccgatgctccggtctcggcggtttttaaacccctacctttacaaattctgggaaattagaataaaaaaggtttgatttttcagtttttg

SEQ ID NO: 139670 - DNA, 171 bp, Arabidopsis thaliana
gtccgaagatgaaacgaaattagtctctagtcgtatgtctgacgattgggacgatatcgtgctgacaaaagaagaaaaagatgtgaggcttcatatgaagattgatgcaatgatcacatcagaacggtccatgggctatgcttattctcaccagttatggagaaacagtcc

SEQ ID NO: 139671 - DNA, 116 bp, Arabidopsis thaliana
aatccgaaaaacgagaaagtatggatcagtgttgtacctccttcggagacaagatcagagtttgtgtgtttgtgtctgaatgtacggattggatttttaaagttgtgctttctttc

SEQ ID NO: 139672 - DNA, 402 bp, Arabidopsis thaliana
agtcgaggcctgcgcgactgcgtttgccacgtctccgccgcctcctccgattcttttaccctaactaaatttgccgatgttgtcactcatcaccgaagaatggccgccgaaactagcatcaggaagctcccatctctctccggcctccgtcaccgacgtaatccactggaagataatccctacttccacccctccaatggcttctacatcactccttctgacgtcatcctcgcccaggtcgcctacgaccactccgcccactcccaatcacgcgtggcctaccacagggctgggcctcgccgtgagatcatgtacgagccatcagctgtcaaggcggcgatcgttacgtgcggtgggctgtgccctggcatgaacacagtcataagagaactcgtggtgggt

SEQ ID NO: 139673 - DNA, 263 bp, Arabidopsis thaliana
agaagactcagaatcttcatcctcaaaccctagattccttaacgaaatggcgatggagatctcggtagatctgataaaccaactcaaggtctcgcttcgaaaggaggccaagctcacctccgtcgacgattgctcggactcatccttccccagccttcccacatccgaggaggctatcgcagaacttgatgcttcagctccctaccttcgttgccgaaactgcaaaggaaaacttttacgaggaatccagtctctgatctgtg

SEQ ID NO: 139674 - DNA, 399 bp, Arabidopsis thaliana
accacacgtccgaaacaataaaccatacaaaaaaatatgaaaatcctctcactttcactactcttgctcttggccgctacggtctcccacgtccagtcttcggcatccgttccagggctcatcgaactcctcgaatcgaacaccatctttgggaacgaagccgaactcttagagaaagagggactgtccatcaactaccccaactgcagaagctggcaccttggtgttgagacctctaacatcataaacttcgacacggtgcccgcaaattgcaaagcctatgttgaagactacttgatcacttccaaacagtaccaatacgactccaaaactgtaaacaaagaggcatatttttacgccaaaggacttgccctaaagaacgataccgtcaatgtttgg

SEQ ID NO: 139675 - DNA, 399 bp, Arabidopsis thaliana
attttcttttgttgcgacttttcttcttcttcttcctcaggaacttaagtttctgagtccatgaagatgccagtggcattggtctggctactggcattcactattctactgatcagtggggaaggcaataatgccatctgcaaggagaattttaagttagaccctagacctcatactgtttcgatcctctagtttggagcggttggtgatgggaagacgctcaacactattgctttccagaacgctgttttctatctcaagtcttttgcggataaaggcggtgctcagctttatgttccaccatggatatggctcaccggaagcttcaatctcacaagccatctcactctcttcttggagaaaggagcaacaattcttgcatcaccggatccgtcgcat

SEQ ID NO: 139676 - DNA, 86 bp, Arabidopsis thaliana
agatgattgtctctgtttaacatagttttgccatgtggatcttgaattctgtcaaactatttcaatagttgattcaacttgttttt

SEQ ID NO: 139677 - DNA, 304 bp, Arabidopsis thaliana
atgactgccatggttccatgatggttgaagcttttgcagccagagatacactcaaagtaccacacacttccgttggtggaggtcatgtcaagaccgcgagtttcaagttcaaggcggttgaggcaagaactagaattactttcttcagtggtttttaccataccaagaagactgatactgtatctttatgtggtcctgtcattgacgagattgtggtttctcatgtcgcttagattaagtttactctttatgacaactgcacttgtgttcttagactggtcatggacttggtgccttgctttgt

SEQ ID NO: 139678 - DNA, 411 bp, Arabidopsis thaliana
cccacgcgtccgcggacgcgtgggctctcacaacgccggatctgtagacggaagatggagtgtgtattcggtcttgttgggaatggattcgccatcgttgctgctgatacatcggcggttcatagtatccttcttcacaaaaacaacgaagacaagatcatggtacttgactcacacaagcttgttgctgctagtggcgagcctggtgaccgggttcagtttacggagtacgttcagaagaatgtgtccttgtacaaattcagaaatggaatcccgttgactaccgccgctgctgccaatttcactcgcggagagctcgctactgctttgaggaagaatccgtattcggtgaatatcctgatggctggctatgacgatgagtctggtgcatcactttactacatcgactac

SEQ ID NO: 139679 - DNA, 414 bp, Arabidopsis thaliana
ggtcagcgattcttctttcttcttcttctcagatcctttcaccgagtaagaagattttaaagatgccgtcaacgccgacgacgccgactacaacaacgccgatcacggcttcgtattggtgttacagctgtacgcgtttcgtcagcgtttgggctgatcaaggcacaacaaccgtcggtagcgtcgcttgccctcactgcgacggcggttttatcgaacagattaacgattcttcctccgccgctaccgaattaacgattccggcttctactgaagtaagatcgatcaataacaaccgtagatccgtgattagacgccggagatccggtcgtcgtccgtcctttaatccggtcatcgtacttcaaggaggcgccggcgagagagaagagggagaagaaggagatgcggctagag

SEQ ID NO: 139680 - DNA, 396 bp, Arabidopsis thaliana
agaaaatggtgaacattagagtacaaaaagctccggaatctccgaggacgatggaggtgggagaaatagacacaagagcaccgttccaatcggtgaaagctgcggtgagcttgttcggagaagttgcagtctcaaagcaaagaagtactccaaggcgatctcgactctcctctgagagcgtttgcgacaaggaaacacagctaatgctggtccacaaggaattcatgaagatcaagcaaaagcttgacaacgctgagagcacaagatctcgtgctctagacgatctctcaaaggcgaagaagacaatggaggatcttagcaacaaacttgagactgtcaacaagtctaagcaatcagctattgacaccaaagaaactgtccaacagcgggaagaac

SEQ ID NO: 139681 - DNA, 407 bp, Arabidopsis thaliana
aaaccctagccgccttattcgtcttcgtcgttctctagttttttcctcagtctctgttcttagatcccttgtagtttccaaatcttccgataaaaatgtcgggtaaaggagaaggaccatctatcggtatcgatcttggtaccacttactcttgcgtcggagtatggcaacacgaccgtgttgagatcattgctaatgatcaaggaaacagaaccacgccatcttacgttgctttcaccgactccgagaggttgatcggtgacacagctaagaatcacgtcgccatgaaccccgttaacaccgttttcgacgctaagaggttgatcggtcgtcgtttctctgacagctctgttcagagtgacatgaaattgtgggcattcaagattcaagccggacctgccgataag

SEQ ID NO: 139682 - DNA, 406 bp, Arabidopsis thaliana
gggctcaattcaagctcaaaaacgggcatcagaggtccctttatgcaggatgaaagctggaaagatgattttttgaatcctttggagcgaagagttatgaattggcattttgctcacacagaatatggttgtgctgctgtcctcaaggaagtttcgcttcctcactggaatcaagatgagttttatggcgggtttggagggcctcatgctatgattaagggtggttatagccgagttgttgagtcgcttgcagaaggactggacattcacttaaacaaaatagtttcagatgtatcttatgtctctgatgtatctgccatggataacagcaagcataaagtcagagttagtacatcaaatggctgtgagtatcttggagatgctgttctggtaactgttccacttg

SEQ ID NO: 139683 - DNA, 415 bp, Arabidopsis thaliana
acaacagattatagctataagagatgttgttccaccaccactaagaagacagttcagtgatgtttatatctctactgaattaatggatactgatcttcatcaaatcatcagatctaaccagagtttatcagaagaacactgtcagtacttcttgtaccagctacttcgaggactgaagtatatccactcagctaacattattcatagggatttaaagccgagcaatcttctgttgaacgcgaattgcgatttaaagatttgtgatttcggtcttgctagacctacttcagagaatgattttatgactgagtatgttgttacgagatggtatagagcacctgagcttctgttgaactcttcagattacacagctgctattgatgtttggtctgttggttgtatctttatggagctt

SEQ ID NO: 139684 - DNA, 416 bp, Arabidopsis thaliana; identical to SEQ ID NO: 126346

SEQ ID NO: 139685 - DNA, 206 bp, Arabidopsis thaliana
accgtctctcccgtcctcgccacgacctctaacaccatgagtactgatctacttttacagtcatcttctaaactatcacacaaccaggactacatcttccatggatgaagacaccatgtgagaccttactacttcgaattcaattctcacgtgaatagacgattgactgcgagaacaattgtggatttgtttgccgatgaatttaa

SEQ ID NO: 139686 - DNA, 410 bp, Arabidopsis thaliana
aggacgcgtgggcggaagaagaacaaaacaacaacaacaacaacaataacgatggcgatggcgagcttagctaggagaaaagcgtactttctcaccagaaacatctctaattctcccactgatgctttcagattctctttctccctcactcgcggcttcgcttcgtcaggatccgacgacaacgacgtcgtcatcatcggcggcggtcctggaggttatgtggcggcgattaaagcggcacagctcggtcttaagactacctgtatcgaaaagcgaggcgctctcggtggtacttgtcttaacgtcggctgtattccttcaaaggcccttcttcactcttctcacatgtaccatgaagcaaagcacgtttttgctaaccatggtgttaaggtctcttcggttgaggtaga

SEQ ID NO: 139687 - DNA, 414 bp, Arabidopsis thaliana
accacgcgtccgcggacgcgtgggggagatcggaagctaacacgggaagatttagccggaagaaatggcttcgttaggtttcaacctcggcttcaccttctccaatgcacaaattcagcagcatcgaaaagtttccggaggtggaagagctcgcgtaatctcctgtaacagctcttcttcttcttcttctcaagcatcatctcctcaggggatttctgcagtgacgcctcttgagatagagctcgagttcttcggtccgaagccgggtagcgacgggtcatatccggtagataaagcaaaggctgtgagtggagataagcttctcagaagcattatgcaggataacaaaattgaactctacgctgcttacgggaaagtgatgaactgtggtggtggaggaagctgtggaacttg

SEQ ID NO: 139688 - DNA, 414 bp, Arabidopsis thaliana
cggacgcgtgggcggacgcgtgggagaagaacgaggaaggtgtgattgttaacaggtacagaccaaaagagccttacactggaaaatgccttctcaacaccaaaatcacagctgatgatgctcctggagagacctggcacatggttttcagccatcaaggagaaatcccgtacagagaaggacaatctgttggtgtgattgcagatggaattgacaagaatggaaagcctcacaaggtcagactttactccattgcaagcagcgctcttggagatctcggcaattctgaaaccgtttctttgtgtgttaaaagacttgtttatactaatgaccaaggagagactgttaaaggagtttgctcaaatttcttgtgtgatttggcacccggaagtgatgttaagctgactggtcctg

SEQ ID NO: 139689 - DNA, 418 bp, Arabidopsis thaliana
atcgcaatgaccaagctagtagctgaagttttagagaaaaacaacttacccggtgccatttttacggccatgtgtggtggtgctgaaattggtgaagcaatagccaaagacacacgcattcccttagtatcctttactggaagctccagggtgggctcaatggtacaacaaacagtgaatgcgagatctgggaaaactttgcttgagttgagtggaaacaatgcaatcatagtcatggacgatgctgatatacagttagcggctcgatctgttctattcgctgcggttggaactgctggtcaacgttgcacaacttgccgtaggctgcttttgcatgagagtgtctatgacaaagtactcgagcaactgcttacctcatacaaacaagtcaaaatcggcaatcctcttgagaaaggga

SEQ ID NO: 139690 - DNA, 405 bp, Arabidopsis thaliana
gcgtccggttaggcattatcagcctctggcttgggctaaatggtgcaggaggctgcctcggcttgtggctacgatgcatagaatgagagatttcgacatggagatcactttccatttcgagagttctgttatacctttcatttctagagtggcgccttcggatacttataagatttgggagaggggtgcgaatcttagagcggatatgacactggctgggtttgatggtttcaggattcaaagatcggatcagactatactttttcttggagatgggtcagaggatggtaaagttccttccggttctcgtcttatgatatcacataaggataaggagatcatgaatgctctagacggtgctggagctgccgcatcataagaagaagttcgtcaagaagtggctgc

SEQ ID NO: 139691 - DNA, 336 bp, Arabidopsis thaliana
agactgcctataggtgtgctgttgttctccgtgatttgattatgccgtacctcctccgccgtatgaaggccgatgtaaacgcacatcttacaaaaaagactgaacacgttctcttttgcagtctcactgtggagcagcgatctacctacagggcattccttgcaagctccgaagtagaacagatttttgatggcaacaggaattcgctttatgggattgatgtgatgcgtaagatatgcaaccagcctgatctacttgagagagaacattctcaccagaacccagattatggaaacccagaacgcagtgggaagatgaaggttgttgcagaagtgc

SEQ ID NO: 139692 - DNA, 149 bp, Arabidopsis thaliana
gaattattatgatcaagaatgggtttgttgtgtcgatgcataattaaaattagttaatgatagttatgaggaaagtcacgtatgttgcttatctttcttcttcttgttaaaacaaagccaatcttaatgcataatatatcttggttgtc

SEQ ID NO: 139693 - DNA, 348 bp, Arabidopsis thaliana
accacgcgtccgcccacgcgtccgcccacgcgtccgcccacgcgtccggatttactcttaacttacagctgattacaattcactgtaatctctcaagaaccctagattcttttttttccttttcaattgtgatccgtcagcaatgcttgatctttaaatttactgatatctgaagatcgaattagggttctgatctacttgatatttatttgtttgggcttttattcagcagctcgatcttgggctgaagctatggctcagagtaattgggaagctgacaagatgcttgatgtttacatatatgagtatttggtgaagaagaaacttcataatactgctaagtcgttt

SEQ ID NO: 139694 - DNA, 437 bp, Arabidopsis thaliana
ggagaaaatcgtgtgtgtgtgtgtcaatggcggctttaagcatctcactagctttctctgttgattctctcaaaccaacccaatcaacgaagtttggcttctcgtcttcttcacatagatatccattactctactcgtgtaaatctcaccgctccaatctcagattcgctttccctccttcttcagtttcgacagctacagaaactggagaagaaaactctaaatcgaccgggaattacgcgtttctagaggaatcgtttcgtaccgggaggtttttgagtaacgatgagttagagaagcttaaaactcttgaaggatttgcgtattttcaagagcttgaatctggatcgatgtgggttcgagttatgagacatgaagagatggattcaacggtgcatctattggctgagtcatttggtgaatcgatgttattacct

SEQ ID NO: 139695 - DNA, 337 bp, Arabidopsis thaliana
cggacgcgtgggcggacgcgtgggcggacgcgtgggttttagtttcaacttttcagttatccacacacatacacacatacgcttccctgaatttggtgacgttagtcttcttccttccttctcactctttgtttcgccgtgaaaatgagctctgatagatagaagcgacagagagaaacttgaagcagatgtcgtctttcttcaaatccttcgcgggaaatcccagggaagctgctgcaatggcgatggttcaatcttcatcttacagagttttgtcaggtaaaagttgttcaaatttaaggagaaacacgccgttggattcttttcgtgccaaggg

SEQ ID NO: 139696 - DNA, 439 bp, Arabidopsis thaliana
ctgagatcttgaccaagattgacaggcgttctggtaaggagattgagaaggagcccaagtttttgaagaatggtgacgctggtatggttaagatgaccccaaccaagcccatggttgttgagactttctccgagtacccacctttgggacgtttcgctgttagggacatgaggcagaccgttgctgttggtgttattaagagcgtggacaagaaggacccaactggagccaaggtcaccaaggctgcagtgaagaagggtgccaaatgatgagactttcgttatgatcgactctcttatggttttctttggttcttaaaactttgatggcgtttgagcctttttcttttttctctttatttctgtgactttctctctcgctcctttttggatatctctgagactttttattatggttttcaattatgcagtttccggat

SEQ ID NO: 139697 - DNA, 437 bp, Arabidopsis thaliana
ctaacaagtatctgattgatgcatgtgcgaggtttgatgtcaaatgccctcctcctcagacaacagctcgtctgttagataaacttgttggagaatttctggaaccgacatgtgtgaacccaactttcatcatcaaccagcccgagatcatgagtcctttggctaaatggcacagatcgaagagtggattgacagagagattcgagctgttcatcaacaaacatgaactctgcaatgcctacacggagctaaacgatcctgtggtacagcgccagcgttttgctgatcagctcaaggatcgacagtctggagacgatgaagcgatggctttagatgaaacattttgtaatgctttagaatatgggttggctcctacaggtggctggggattaggaatagacagactctctatgcttttgaccgactcactgaacatc

SEQ ID NO: 139698 - DNA, 437 bp, Arabidopsis thaliana
aaatagagctcttcttctgtgttttccgtgtcttttccattttgcaggcctgagactgtctcgcatacatcatttacaatgcctgtagtgattcaaccactggattattgtaaagcattggacaaagtcccaagatcactctgcttatacaaatgaacaccatagacattgaaagaaagaagagtagctcactaacctttgcttttcatggagaatgctcctacaacgtgtttgcttttgatttctactatgacctgcaaaagagaaaccgagcaaaattcaactctagaattcaaccagcatataactttgttagcttcaatgagtattcgatgtttaacctgagattttttgttgatgtacacttttacatgcttccaccgcagaacacctggaaagtccatgagtcaattcatcaatctcgtgatatgagttca

SEQ ID NO: 139699 - DNA, 421 bp, Arabidopsis thaliana
ggaagtctttactcagagaaccaaaagaaaaataaagagaaaagaacccaaaaaaaaaaaagccattgtaaattcagaataaatggaagaacatctaaatccattagcagtgactcatcttcttcaacacacactaagaagcttatgcatccatgagaactctcaatgggtttatgctgttttctggaggatcttgcctagaaactatcctcctcccaaatgggatggtcaaggagcttatgatagatcaagagggaacaggagaaactggatcttggtttgggaagatggtttttgcaactttgcagcttctgccgcggaaatgagctccggagaaggtagtggtggcggtggtggctcagcggcttatggaaatagtgattttcaacaataccaagggcttcagcctgaattgttcttc

SEQ ID NO: 139700 - DNA, 298 bp, Arabidopsis thaliana
ggagccacggtggagttgactccgcttaaaccccctccgtcgccaccggcgttcttcaatttcaaaccccaatccaccacccatggatcgatcttccctcctccttctcctctttaccaccaccaccatctctatattcttcttcgatctaaccaccgccgatgaatcgccgatgattttccctcttagctactcttccttaccaccgcgaccgcgagtcgaggattttcgccgccgtcaccttcatcaatctcagctccctaacgctcacatgagactctacgatgacctcctctcc

SEQ ID NO: 139701 - DNA, 419 bp, Arabidopsis thaliana
caacaaagtggaagctcaaggaggaaatggtggagaaacattcgacgatggtgtttttgatcatgtaagaaaggtttatgttggtcaaggtgagtccggtgtagcttatgtcaaattcgaatatgagaaagatgggaaaagagaaacaagagaccatgggaaaatgacattgttaggaacagaggagtttgaggttgattcagatgattacatcacatcaattgaagtttctgtcgacaaagtctttggttataacagcgaaatcgtcactgctcttgtgttcaagactagtaagggtacaacctcaccgccttttggaatggtgactgagaagaaattcgaacttaaagatggtaacggaggaaaacttgccggattccatgggaaagctagtgatgttctttatgctcttggtgcct

SEQ ID NO: 139702 - DNA, 421 bp, Arabidopsis thaliana
catggagtgatgatgatgatagatagattgaatccaaacacaaaccggatccgagattaaaaacaatccggattgtttatatttactttagatcggagaaagatgccgccggcgaccggagatatcgatcgtcagatcgagcagcttatggagtgtaaagcgttatctgaaacggaggtgaagatgttgtgtgagcacgcaaagacgattcttgtggaagagtataatgttcaaccggttaaatgtccggttaccgtctgcggtgatatccacggccaattttacgatctaatcgagctttttcgtatcggtggttcttctcctgatactaattatcttttcatgggtgattatgttgatcgagggtattattctgtggagacagtctcacttttggtagcactgaaagttcgttacagag

SEQ ID NO: 139703 - DNA, 334 bp, Arabidopsis thaliana
agaaatgattgtagttttattgttggaaagccagtcgaacactcgggagttttggcatcttcttcaggactctttccacgcccttggtcaggtacatcaactacgtcagatgtgctgcagaaatttgtcctcttggggacagtggtagcaaaggctttacaagatggacgagtcttagaccttccactttccaaagccttcgacaaattaattctcggacaggagttgagttcatttgacatccacttcgttgaccctgaactttggtaaacactggtggaattgcaagctctggtacgtacgaaaaagcttttcgctgaagcacatggtgatt

SEQ ID NO: 139704 - DNA, 281 bp, Arabidopsis thaliana
gctgtagaacacaaacagaacaaacaaaaaatcaattgaagagtctctcagtcgttaggggaagcaaatagagaaatggctagctttactgcctccgcttccaccgtctccgccgctcgtccggctctccttctcaagcctaccgtcgccatctctgctcctgttcttggtaaaaaagccttccttgatctttctcagatctcatcttttagtagaaattcattctggttatgtgcaaagtgaagaagatctttgtttgcttatatttgttgagtggtttt

SEQ ID NO: 139705 - DNA, 261 bp, Arabidopsis thaliana
agatcgatttcgactgtaagtgaacattgaatgccgcgaagattactcaaatcgccggacacaagtttttcagtggattccattggcagagaactcgagagaaagagacacagagagagagagagatctaacaagagtcaaagtttctgacgttttcgcattcgttttgagatcgagttctgtttttggtggcgtgtgagatgaattcttaagaaggaagaagaagaggaaggaaagatgcgtagagagatctcgtttttg

SEQ ID NO: 139706 - DNA, 377 bp, Arabidopsis thaliana
catttccacacgattttccctgtgatttcttcatttccggcgacttaaaacggtgtctagcaaaatgagccgaccacaagatccaccccgaggtttcttcccatttggaaatccctttcggatgttatcatcaaagggatcagatttatcgccatggctactttctctattgaacggctttgagctacgtttggaagatagactgaagaaacttatgcctaagaacaaagatgacatcctcactttatcctggatgaagctatctatggagtcactctgcgagactcataagaacattaacactctcattactgatcaccagcttcctgtctctgattgggaagagaaatgggttgatgtttacctcaacataagcg

SEQ ID NO: 139707 - DNA, 301 bp, Arabidopsis thaliana
caagcttaaatccttcaattttcagcttctgtttgttaaatttcaggtttttgttgtttttgagctaattgaagaccctatttgatcttaagaagcaatcagcttttagtttaagcatctagaaacttgaattttgcgaacctttttggtatttttcaaaatttagtctctctgtagaactttggttttgtgtccgatgatcgttgattggtttctcagggtttaagttggtgttgaaatatttaactttctatttatggtctctacatgttttctgtttaattctattagaaacatgtga

SEQ ID NO: 139708 - DNA, 196 bp, Arabidopsis thaliana
ccagagtatctctcaactggtcaatcctctgagaaaacagatgtttttggcttcgggattcttcgtcttgagcttgtaaccggagaaagagcttttgagtttggtaaagcggctaaccacgaaacgtgtgatgcttgattgggttaaaaagattcatcaagagaagaaacttgagctacttgtggataaagagttg

SEQ ID NO: 139709 - DNA, 281 bp, Arabidopsis thaliana
aagggaaatgagtattgggaatcagaattgcctcaacatttcgagagaagttcaagcgacacgtttataagagccaaatacagtgagaagagatgggtttcaccgggagcgattcaaccggctcctatagttagccagctaagctgcaaagttagtcacttggtagagagtggatataaacctgaaactccaaagaaagctagaactctttcacttgacgaagagatccttcttcatcatgttcttcaagtaacacctccagaaacgagaactcgtgcggg

SEQ ID NO: 139710 - DNA, 261 bp, Arabidopsis thaliana
aacgtacagcgatcacatacatcgatgaaagcggagactggcatcggagcagtaaaggagctcctgagcagatcattgaactctgcaatctccaaggagagactaaaagaaaagcacacgaagttatcgatggttttgctgaacgtgggcttcgttctcttggtgttgctcaacagactgtgcctgagaagactaaggaaagtgatggtagtccatgggagttcgttggtctgttgccactctttgaccccccaagacatg

SEQ ID NO: 139711 - DNA, 328 bp, Arabidopsis thaliana
atttgtccgtactctcctctctgtccatgatgattatgtccagaattacgtggttaaaaacaacttgttgaaaccgatcatagatgtcttcattgccaatggaacccggtacaatctgctgaactctgcagtcttggatctgcttgagcacatacgcaagggaaatgcaactctgttgctcaaatacatagttgatacgttctgggaccagttggccccatttcagtgcttgacctccatccaggctttcaaggttaagtatgaacagtgtttagaaagtgccggaccaaaaagcacttctgatgcggttgatccaagaagaagagtt

SEQ ID NO: 139712 - DNA, 150 bp, Arabidopsis thaliana
acttcttatctggttcaaaaaatccttcagatgggtcaatgaacctccttgtgacttttgtggtaacaaaaccatacgccatgggatgggaaacccacttacctcggagcttgcttatggggcaaatcgagttgaaatatatcgctgtac

SEQ ID NO: 139713 - DNA, 99 bp, Arabidopsis thaliana
actactactgtatatggttctccaggaagcacacctcttcatttagcagctagaagtggatctatagattgtgtcagaaagttgcttgcgtggggtgct

SEQ ID NO: 139714 - DNA, 342 bp, Arabidopsis thaliana
ccaacttcagcgacaagataacaaaacgctttcacacgatcggataaaatggcggagaagagctttaagtacatcatcctcggcggcggcgtctctgccggatacgcagctaaggagtttgccaatcaaggggttcaaccaggagaattggctgttatctcgaaagaggcggtggctccatatgaacgccctgcacttagcaaggggtatttgtttcctgaaggggctgctagacttccaggtttccattgctgtgttggtagtggtggagaaaaactgcttcctgaatcctacaagcagaaaggaattgagttgatactaagcacagaaatagtgaaagct

SEQ ID NO: 139715 - DNA, 188 bp, Arabidopsis thaliana
atcaaaccacgtgattcagataacttcaccgtctaaaactctgttcgtttcgctggtcctttacgtagagactcgattagcaccaatgctaaattcgaaatcggaagccctaaacgcgtcgagattaagtttgagcaaggcgtagttgggacgcctcagctaagggattctattgagataccggaata

SEQ ID NO: 139716 - DNA, 266 bp, Arabidopsis thaliana
aaaaaccgagagttgcaattaatgcgactaatggaccatccaaatgtggtttccttgaagcattgtttcttctctacaacgactagagatgagctcttcctcaatctcgttatggagtatgtaccagagacattgtaccgggttttgaagcactatactagttcaaaccagcggatgcctatcttctatgtcaaactttacagatagcaaatcgtcagaggcttggcttatatccatactgctcctggtgtctgccacagagatgt

SEQ ID NO: 139717 - DNA, 228 bp, Arabidopsis thaliana
aatgtgtgagagagaggctgagacatttctggggattgatggagatgaaaggagataaagagagttttcagatgtaattaagagaaaacagatcttttggattttagggtttatatccaacaaaagctaaccaaaaactaataattcaagattggtgcttcggaagaagacgcaaaagtgtattttcttgcagttgcaaaactgttacgaaatttttaaagttttcct

SEQ ID NO: 139718 - DNA, 266 bp, Arabidopsis thaliana
acacaaatatcttgtccgatttcgttgttcacgtattacaacccgattcttaaacgtgggttggggaagttcatgtccagcatcagagctgttggtgtacagggacttgtggttcccgatgttcctcttgaggaaactgagatgctgagaaaagaagccctcaacaacgacattgagctggtcctactcactacaccaaccacaccaacagagcgaatgaagctaattgttgatgcgtcagaaggatttatttaccttgtgagctc

SEQ ID NO: 139719 - DNA, 171 bp, Arabidopsis thaliana
gggaatttgaataggatggaagaaatgtatgaagtgattaaagatcaggttggtgtaaacagtggtcctttggtcagagctatgatctgtgcatattgtaagaaatgctgttgaggatagagtccaaaagattgaagatttattgagtcttctctctggggaggaatatct

SEQ ID NO: 139720 - DNA, 226 bp, Arabidopsis thaliana
aaaaaaccgagagttgcaattaatgcgactaatggaccatccaaatgtggtttccttgaagcattgtttcttctctacaacgactagagatgagctcttcctcaatctcgttatggagtatgtaccagagacattgtaccgggttttgaggcactagactagttcaaaccagcggatgcctatcttcgatgtcaaactttacacataccagatcttcagaggcttg

SEQ ID NO: 139721 - DNA, 402 bp, Arabidopsis thaliana
gtctggatgaggtttatggctacaagacagcttgtgtggaacaaaaactataatgttaagccaagggagataagcaaagcgcaggatagactgactgaccttctccaggacgtttatgcaagttatccagagtacagagaacttttgcggatgataatgtctactgtaggtcgaggaggtgaaggagatgtcgggcaacgaatccgtgacgaaattctagtcatccagcggaaaaatgactgcaagggtggaattatggaggaatggcatcagaagttgcataacaacactagtccagatgatgttgtcatctgtcaggcattgatggattatatcaaaagtgactttgacttaagtgtttactgggaagacttgaacgataatggcataaccaaagagcga

SEQ ID NO: 139722 - DNA, 167 bp, Arabidopsis thaliana
gtctctcttctctgcttcgccctctcatttcctgtgagataaaggcggagtctctctccagttattttgctcatccatcgattcttagagttcaaaatggttgatcaagttcagcagcacgcagcggttggcaccctgcaaatagatctgaggcggcccaatctaac

SEQ ID NO: 139723 - DNA, 414 bp, Arabidopsis thaliana; identical to SEQ ID NO: 126466

SEQ ID NO: 139724 - DNA, 411 bp, Arabidopsis thaliana
atttgcaggcctgagtcaatgcacgagtataatttaaccccacactcgttgtatgctgctgtttccgttggtcttgagacagaaactatcatctctgttttgaataagctatctaagaccaagctacccggggagatcattgatttcatccatgcttctactgctaattatgggaaagtgaagttggtattgaagaaaaatcggtattttattgaatcaccattcccggaggtgttgaaaaggcttctcagtgatgatgtcataaatcgagcaagatttacttctgagccatattatggtggtgatggatttacgatcggcaaaacaagtggtgaacttgaagcaggacctggggagttgttgaatgaagcagaattggcagcagcagcagaagagaaagaaactcactca

SEQ ID NO: 139725 - DNA, 160 bp, Arabidopsis thaliana
aagaaacccaaaagcagaagaagatggtggcgatatctatgtacagaggcaaccttcacaaagttcccgacgtacctcgccggtggataatgcctgaccgtaatctctctttcaaggatttcaaatctcttcttcatcgccgtaaaaaagccctttctcg

SEQ ID NO: 139726 - DNA, 407 bp, Arabidopsis thaliana
cggacgcgtcagcccacgcgtccgcggacgcgtgggcaaaaaaatatgaaaatcctctcactttcactactcttgctcttggccgctacggtctcccacgtccagtcttcggcatccgttccagggctcatcgaactcctcgaatcgaacaccatctttgggaacgaagccgaactcttagagaaagagggactgtccatcaactaccccaactgcagaagctggcaccttggtgttgagacctctaacatcataaacttcgacacggtgcccgcaaattgcaaagcctatgttgaagactacttgatcacttccaaacagtaccaatacgactccaaaactgtaaacaaagaggcatatttttacgccaaaggacttgccctaaagaacgataccgtcaatgtttg

SEQ ID NO: 139727 - DNA, 167 bp, Arabidopsis thaliana
attgatgaattcatgaatgtttatcggctattagcttcagcaaaaaaggctccaggtacatttgttctggaggaactggtcaaattgttaacatatgggatctgcaaagaaagctttgtattaagaagttgaaaggtcatacaagtacaataactggtgtgatgtac

SEQ ID NO: 139728 - DNA, 325 bp, Arabidopsis thaliana
accacgcgtccgggccaacttgcactgactacatcatctccttaaactgcgatgatgtctctcgaggaagcaatacctatatcggaaagcttagatctaactttcgggggaccaagttcactgtctatgacgctcagccgaagaatcctggaactcaggttaccagaatccgttcaagcagacttctcagtttgaaacatgtgagcccgagaattccatctggcaactatcctgtagcagatatctcatatgagcttaacgtcttgggttccagaggaccgaggaggatgcagtgtgtcatggatgccatcgctgcatcagctgt

SEQ ID NO: 139729 - DNA, 367 bp, Arabidopsis thaliana
gaagaagcaaaaagagtcatattcgttgaaaacatcattcactcttctctgcgtctccttctttcacccgaaattgtctctgacaccgttttgattcaaccatggctaatgctgcgtcaggaatggcagtccatgatgactgcaagctaagatttctggaactgaaggcgaaaaggacacaccgtttcattgtctacaagattgaggagaagcagaagcaagtgattgttgagaaagttggtgaacctattctaacttacgaggactttgcagcaagtcttccagctgacgaatgccgatacgccatttatgatttcgaccttgtcactgcagagaattgccacaagagcaagattttcttcattgc

SEQ ID NO: 139730 - DNA, 284 bp, Arabidopsis thaliana
aataagagctataaaagaggatagaaccaacatttgaatttttttcttctatctctctccccaagatatatagcacacgaaaatgacgataccatcaattggctatgtctttttccttatcttcatctctattacaattgtttcgagttcaccagatcatggagaagttgaggacgagatgcagtttaactacgagaagaaaggagagaaggggccagagaactggggaagactaaagccagagtgggcaatgtgtggaaaaggcaacatgcagtctccgattg

SEQ ID NO: 139731 - DNA, 397 bp, Arabidopsis thaliana
gacgtgtcaaatcaatctactgttctctctcctatctgggcaaaaatctcagacaaacctgcaaaattagggtatttgaggatatggattatgatcggtacaagttatttgttggtggtattgcgaaagagacaagtgaagaagctctgaagcagtattttagcagatatggagctgtgttggaagctgttgtagctaaagagaaagtcactggaaaacctagaggttttgggtttgttcgctttgctaatgattgtgatgttgttaaagctcttagagacactcacttcattctcggtaaacccgttgatgtgagaaaggcgattaggaaacatgaactataccaacagccgtttagcatgcagtttttggagagaaaagtgcaacagatgaatgg

SEQ ID NO: 139732 - DNA, 219 bp, Arabidopsis thaliana
caggtttggatcaattatgtactgtcaattgcaagtgatatcaccatcgctagaaatccgattcgtctccttcaggttttctttcatcacatgtggcataccatttgttgtatcgttttgtttctgcatgtgatgtatctcactgttcacatctcgtttgtttttgctgtgaaacaggtttctcttgtcttgtgggctatatcctatgttgggacttta

SEQ ID NO: 139733 - DNA, 260 bp, Arabidopsis thaliana
cacacgcgtccgtttggcgacttgtaaaggtgacgagtttgtttgtgaagagaacgagccattcacatgtaaccaaactaaacttttcaacagtggcaatttcgaaaaaggcttcatcttcggtgttgcatctaccgccttccacctggtaagcagaagatgcaacaccgaagatgaacgcggtagatgccgtggacttaacgtttgggatagcttcactcaccgattcccagacaaacgtggagctgatttgggaaatg

SEQ ID NO: 139734 - DNA, 386 bp, Arabidopsis thaliana
aaaaaagagagagagagagagagagagagagagagagagagagaccccacaaagagcactaatcttcacaaccctaactccgatttttctcacacctcccaatctctctttctttctctctgatgaaaagctaacggaaaatggggaaatacataagaaagagcaaaatcgacggagctggagctggagctggtggtggaggtggaggcggaggtggaggtgaatcctctattgctttaatggatgttgtttcaccttcttcctcttcttcacttggtgttttaactcgagctaaatctctagctcttcaacaacaacaacaacgctgtcttcttcaaaaaccctcttctccttcttcgttaccaccgacttctgcttctcctaat

SEQ ID NO: 139735 - DNA, 127 bp, Arabidopsis thaliana
aaacaatgatttctctatgaacttcggcgactccgccgtcttatcttatgctcgacaagaatcctcacttcgacaaaggttgttctgtgggcgatatgggatctactgtatgtttcgaaggagattg

SEQ ID NO: 139736 - DNA, 281 bp, Arabidopsis thaliana
cagctatgaagatcgctggccctgttcggaaaaagcttaaacttaaaactgtctttagcatactgggacctatgcttagtcctgctagagtttcttatgctgtcgttggtgtataccacaacgatctggttgttaacatggcacaggcactgcaacgatttggaatgaaaagagcactggtggttcattcatgtggtctagacgaaatgagtcggttaggaagaggactagtttatgatgtacctccggaaaagatcgatgaattctcattcgacccattg

SEQ ID NO: 139737 - DNA, 392 bp, Arabidopsis thaliana
aggacgcgtgggggagcgtatcagtaaaataatccgagagaagaagcaagaaagggatatcaagaggaagcagatatattatttgaaaattgaagaagaaaggattaggaagctgcaggaagaagaggaagctcgcaagcagcagcagtctccgcaaatgtttccgatggttccgtcgattccccctgctaacaacatcagcaagctatgcaaggacacatggggattagaccaatgggtatgaccaacaacgggatgcagcatgcgatgcaacaaccagaaaccggtcttggaggaaacgtggggcttagaggaggaaagcaagatggagcagatggacaaggaaaagatgatggcaagtgaaaaggatccaaagaagctttgttttgttg

SEQ ID NO: 139738 - DNA, 240 bp, Arabidopsis thaliana
agtggtgagagaatgtacctttgtgatcttgttttgttgttgttatgtacctttggacttatgaatcttatatctgatccttttcttaaatgccaaatggttgttatgatgatgcacttcgttagccctttggtttttatattcgtacaatgacgtggtgagagaatgtagctttgtgatcatgtattgttgttgatatgtacctttggacttatgaatcatatatcagatccctttctt

SEQ ID NO: 139739 - DNA, 176 bp, Arabidopsis thaliana
agaatctatacgacgatgccgtcgaggctcagatcatcctcttcacttcatccacgtactctgctcctttctctcttagtacaccttttctattccttaggtcaccggcgtcagattaattcacacattgcctctcctcggacgtgcgatctcgtctccggcagatgggttttcaa

SEQ ID NO: 139740 - DNA, 395 bp, Arabidopsis thaliana
acgaatgggaaattgtctctcagcttcgacacttcccaccgaaccaaatgctcccaaatcagtggaggagggtgtgaaagtcttcacggtggcagatctgaagaaagcgactaatgatttcggaaaccagatggaactaggagagagcttgggatacatcaatcccaaaacgttatctccggccaagaaaggtgttggcatggccgtcgcggtcaagaaaatttacttagccaatgaacaagcttttcaagattggcttgttgacgtacagtttctacgacataactctcatccaagcttggtgaagctaattggctactgttatgatcgtgatatgttgtttattgtttctgaatactttccaaatggaagcttaggaagttacatcagtagag

SEQ ID NO: 139741 - DNA, 328 bp, Arabidopsis thaliana
accacacgtcggcccacacgatggttgcacgcttgttcatgcactatcttgtgtgtatgttgattcctttgggtcacgctatgtgagatacagagacactgcaaggttaagacttgttcatccgcttcgtcgataaaggatctgtctagatttgggtgtgacaaagctttctgatgttgtcattgaggaacttgaaaacgctgaacatattgataccttagacagcatacggtcaatatcactcactgctgtcagaatgaagttgcacagcgagacgtttcaagctgctttatggacggtgagccgtcaggccaccaccgtggatgac

SEQ ID NO: 139742 - DNA, 297 bp, Arabidopsis thaliana
gtctccgacgaagagaagctgacacttctggtttcgtcaatttctactgggataaagctctctactacctttttgctcagagaaaatggtttgattttcgaggatgataaaggcttcaggttgttgtagaggtgtttttgccagccttggtgctggtcatggattttatcgcttcttgttatttattatctggttatcaagcttccaagatgtagctgcgcatgataagcttaatgagcatagtagcagatccacaacctctgaattggcaaatccacctggtattggagtatctgg

SEQ ID NO: 139743 - DNA, 369 bp, Arabidopsis thaliana
gtttcacgctatttggaaggattcaagcaactttggtgatatctatgacgaagatcacttcatatcaagccttgaaggttatgtgaaaatagtgagagatgttcctgatgagataatgactcgttttagttacaatgtttcaagtattcctactattcgtgttcaagcttgggctactgtgaactactataacggggaagtttatccggttttaaaggaacatggggttattcggataactcctttcgcaaatagattggcgatgagtgttccaccgtatatacaacttttgaggtgcatagctaattacaaagcattgaagttttcttcacctatatcaacactagctgagaagttagtcgatcggat

SEQ ID NO: 139744 - DNA, 357 bp, Arabidopsis thaliana
actttcttctcagactaatgagctctatcagttggccgctgtagcattttgtttacttgtcgcttggtgtagtgacaagctcggtctaagtctggagttgggttcctttgcggcaggagtgatgatctcaacaactgatctcgctcagcatactcttgaacaggtggaacccatccgcaatttttttgcagcactgttccttgctagtatcggcatgttgatacatatgcacttcttgtggaaccatgttgacattctgctagcagctgtgttactggtgatagtgataaagacggtggtagttgctatcgttgttaaagtctttggatacaataacaaaactgcagtacttgttgg

SEQ ID NO: 139745 - DNA, 429 bp, Arabidopsis thaliana
accacgcgtccgatggagccatctccaatgtgactctccgccagtctgccacatccggtggaactgttacatatgaggggagatttgagattctgtctttatcgggatctttccatttgctggagaacaatggtcaaagaagcaggacgggaggtctaagcgtgtcattatcaagtccggatggtaatgtcctcggtggcagtgtagctggtcttcttatagcagcatcacctgttcagattgttgttgggagtttcttaccagacggagaaaaagaaccaaaacagcatgtgggacaaatgggactgtcgtcacccgtattaccgcgtgtggccccaacgcaggtgctgatgactccaagtagcccacaatctcgaggcacaatgagtgagtcatcttgtggaggaggacatggaagccctattcatc

SEQ ID NO: 139746 - DNA, 398 bp, Arabidopsis thaliana
gagatcttctctcttttatcttacgactctcacttcttatctcaaatctacttcaagatgtcttattccctggacagaatttggtggaatctatttacttgagattcaccgtatagttcgacctggaggtttttgggttctttctggtccacctgtgaactataatagacgatggcgtggatggaacacaaccatggaagatcagaaatctgactacaacaagcttcagtcacttctaacctccatgtgtttcaaaaagtacgctcaaaaagatgacatagccgtgtggcagaaactctcagacaaatcttgctatgacaaaatcgctaagaacatggaagcttaccctcccaaatgtgacgacagtatagaacctgattctgcttggtacactccac

SEQ ID NO: 139747 - DNA, 335 bp, Arabidopsis thaliana
acaggtcctagtggagatacttataaaggtcagtgggtgatgaacctgaaacatggacatggaatcaagcgtttcgcgaatggagatgtgtatgatggtgaatggaggaggggtttgcaagaagcccaaggaaagtatcagtggagagatgggagctattacatgggggaatggaagaacgctacgatctgtggcaaaggtacttttatttggacggatgggaatagatacgacggattttgggatgacggttttcctagaggaaacggtactttcaaatgggctgatgggagtttctacgttggtcattggtctaatgatccggaagagatgaa

SEQ ID NO: 139748 - DNA, 430 bp, Arabidopsis thaliana
  unsure (1)..(430): unsure at all n locations
gaacagttgaagatacaatacgaatgttcatcttcgcttgtggatgtgaccgagcttgaaaaccaagtagagagtctggaagctgagctcaagaagcagtccgaagagttttcagagtctttgtgccggattaaagaacttgaatcacaaatggagacattggaagaagagatggagaaacaagctcaggtattcgaggcagacattgatgctgtcacacgtggtaaagtggagcaagagcaaagagctatccaagccgaagaaactctaaggaaaacgaggtggaaaaacgctagtgtagcaggaaaactccaggatgaattcaaaagactctctgagcagatggattcaatgtttacatcaaatgagaaaatggctatganagcgatgacagaagctaacgaattacgaatgcagaaacgtcaactag

SEQ ID NO: 139749 - DNA, 424 bp, Arabidopsis thaliana
  unsure (1)..(424): unsure at all n locations
tggatctgttagaaatggttatgaggatcctcttgcactctctcccacggttgtgcgattttattcgcttagatcgcataactatgttcatgttttgaggtttagatctactgtttatatggttagatgcagtcctcggattgtcgctgttggcctcggttcgcagatatattgttttgatgcgctaactcttgaaaacaaattcagtgtcctctcgtatcctgtacctcagcttggaaaccaagggatatctggggttaatgttggatatggtccaatggctgtcggngctagatggttagcgtatgcttccaatagtcccttgtcttctagtataggtcgtctgagccctcagaatgttactcctcctggtgtcagtccatctacctcgccaaataatggtaatccggtggcaagatacgct

SEQ ID NO: 139750 - DNA, 239 bp, Arabidopsis thaliana
ccacgcgtccgcacagacactgatcaatggatgtcttatattcttctaattggcttcatcaagagagcattgatgagatgaggcagaatctacagagcactctgttcgaactagagacactgaaaatggaagctaatgagaaatcaagaacacacagagaagaagtgaaccaacttctcaatctcctcaaattcactcagcaagaaagagacgaagctagacaacagttatctcaattc

SEQ ID NO: 139751 - DNA, 320 bp, Arabidopsis thaliana
caaatccttccagcggataaagtggttcctgttccttcatctattgatcctatcgttgcagcatcaatcatgctcaagggtatgactgcacagtttctccttcgccgttgcttcaaggtcgaacctgggcacacaatccttgttcatgctgcagctggtggagttgggtctctgttgtgtcaatgggcaaatgcgcttggagccactgtgattggaactgtctcgaccaatgagaaagcggctcaagccaaagaagatggatgccaccatgttattatgtacaagaacgaggattttgtttcgcgagtcaatgacattac

SEQ ID NO: 139752 - DNA, 271 bp, Arabidopsis thaliana
cggttttcttatggaatgtttggttgatttgagaaagaatcttatgaaacgaggattgaatcttcttattagaagtggtaaaccagaagagattcttccttctcttgctaaagattttggagctcgtacagtttttgcgcataaagaaacgtgtagtgaggaggtagacgttgaaagacttgtgaatcaaggtttgaaaagggttggaaatagtactaagcttgagctcatttggggaagtaccatgtatcacaaagatgatcatcctttt

SEQ ID NO: 139753 - DNA, 228 bp, Arabidopsis thaliana
aggatgcgtgggcggacgcgtgggcggacgcgtgggcaaatgtcaaatgggttgttgaatcttcacgtgtcctcgtttctcctcttatctcatctaacttgtttctttagttttgttcaactcaagcacatccgagaaagtcatagtctttgaacatcaaattgccttttgtttgtcaaatgacttacgttcttgatctttttcttgtagggtttttttctctgcact

SEQ ID NO: 139754 - DNA, 133 bp, Arabidopsis thaliana
agtgcgtgaaggaattagagatgtttatggtggaaaggaatattacgaagtgcttaagaggtctaatacacctcacatgttttgcaaaaaccttactgcttctgatagatgcacccatggtggtttctctgtt

SEQ ID NO: 139755 - DNA, 358 bp, Arabidopsis thaliana
gctgtcaatagttttctgatctcaaaggattctccggtggttgaaccaactagaattcatagcggaagctacggtggtggaagacgtgagggaggaggaggatacggtggtggtgaaggaggaggttacggaggaagcggtggtggtggaggatggtaattcctttaattaggtttgggattaccaatgaatgttctctctctcgcttgttatgcttctacttggttttgtgtgttctctattttgttctggttctgctttagatttgatgtaacagttcgtgattaggtattttggtatctggaaacgtaatgttaagtcacttgtcattctctaaataacagatttcttcggagat

SEQ ID NO: 139756 - DNA, 210 bp, Arabidopsis thaliana
aagaatgatttcagttgaaaccaaagtcgtctttttgtaacttgtaaacactgtggaaggctaagttaatgattgtaatcttacttaataaatgaaattcttgattataaaaaaaaaaaaaaaaaaaaaaaaaaaaaaaaaaaaaaataaaaaaaacaaaaaaaaaggacaataaaaaaaaattaacaaaaaaaaaaaaaaagaaggaat

SEQ ID NO: 139757 - DNA, 393 bp, Arabidopsis thaliana
gggtaagggattgatgacaatttgtggaactgaagaaactaggttagattgtttttcttatggggttagagagaggttctggaagaagaataatagaaaatatctagcagactcgggccaggattaccgcaagcacgtttatcttcccgatgatattctggaaatgtgtttgatgaggcttcctttgaccagcttattgaatgcacaccttgtttgcaagaaatggcaatccatggccaacactcagcggtttctccagatgagacgagaaggctcctttcaaacaccgtggttgtttctgtttgctgctcttaaagatggatgctcctctggtgatattcacgggtatgatgtttctcaggacaaatggcataggattgaaactgatctact

SEQ ID NO: 139758 - DNA, 246 bp, Arabidopsis thaliana
aggtcgcgtgggctgttatagaagcaaccactcttgctattatcggaagaccgtttgaggttgtgtactatccgacagctagcacttcagagttttgtgtcaaggcattacatgctcgagctgccatgcggattccgtggtgctcatgtatgaggtttaagatggcttttgagacagaggattcgtctcggataaattggtttatggggactgtttcagctgtaaatgtctctgatcctatccgtt

SEQ ID NO: 139759 - DNA, 403 bp, Arabidopsis thaliana
tgaaaaccaaacaagaccatatgggcactcgaatactccattttgttatcggctacttccactagcctcctccttcgctgcgtctcctgtttctctacttcacgattactcgctagattcattgaagcagttgtgagttaagttggagaaaatggttgtgtttgggaatgtttctgcggcgaatttgccttatcaaaacgggtttttggaggcactttcatctggaggttgtgaactaatgggacatagctttagggttcccacttctcaagcgcttaagacaagaacaaggaggaggagtactgctggtcctttgcaggtagtttgtgtggatattccaaggccagagctagagaacactgtcaatttcttggaagctgctagtttatctgcatccttccgt

SEQ ID NO: 139760 - DNA, 405 bp, Arabidopsis thaliana
gttctcttggattcacgtggatgacttggtgaacttaatttacgaggccctcactaatccatcttataaaggagttattaatgggactgcgccgaatccggttaggcttggggaaatgtgccagcagctaggcagtgttcttagccgaccatcgtggctaccagttcctgactttgcactcaaagctttgctcggagaaggtgccactgtagttctggagggacagaaggtattacctgtaagagccaaagagcttggttttgaattcaagtataaatacgtgaaggatgcactcagagccattatgcaataaggtgacacacataagcatctttgtaaaattggttttgatcacagaaaatccccagaaaaacaagatattcttttcttttcgtctctatatct

SEQ ID NO: 139761 - DNA, 409 bp, Arabidopsis thaliana
attctctctgaatctcagtgaattctcataaaatgagagggatggtgagttttgccgtttgggctctctttgctgctttactctcacagcagctctttgcttctgttgcttccgtaaggtttgaggatgccaaaacatactacttatctcctccctctggctcacatggaactcctccatcacacactccaactccacacactccatcacacacgccaactccacacacccctccttgtaactgtggaagtccaccttcccacccttccacgccttcacacccttccactcctttccaaccaacgccatcacaccctccttctggtggatattacccatctcctccaccaacgaactccggttgttgtgactccaccatcacgcattgttgattcaggcacacccatca

SEQ ID NO: 139762 - DNA, 368 bp, Arabidopsis thaliana
gacgtgctctccaagagtgatcctatggttgttgtatatcaaagagaaaaagatgcaacactttcagaagttttccgcagtgaagttgttttgaactctttagctccgaaatggattaagaaatttatagtcgcttatcatttcgagactgtgcagacattggtgtttcgtgtgtatgatgttgacaccaagtttcaaaattcaagagaggagatgcttaagcttgacgaacagcagtttcttggtgaggcaagatgtgcattgtctgagataatcacaatatcaactaggacgagcacattacaactcaagcgcaaagatggctttgctccacaggctcagcctcacgacggaaagcttagcatcca

SEQ ID NO: 139763 - DNA, 408 bp, Arabidopsis thaliana
gttacctttatttttggtccgtacgaggaaaaatctaggagacagagctatttgttcgaaagatgcaacttttaaatagctgttgtggaaaaggatttgatgggaagaagaaagaaaaggaagagccatcttggagggtattttcactgaaggaacttcatgcagccaccaacagtttcaattacgataacaaactcggtgaaggtcgatttggtagtgtctattggggtcagctatgggatggctcacaaattgcagtcaagaggttgaaggaatggagtaatagagaagagatagattttgctgtggaagtcgagattcttgctcgtattcgtcacaagaatttgttgagtgttcgtggctactgtgctgaaggacaagaacgtcttcttgtgtacgagtacatgc

SEQ ID NO: 139764 - DNA, 412 bp, Arabidopsis thaliana
aacacgcgtccgctctgttcgtcgtttgtttttccggtggagaaaaatggtgatggaaattgtgaaaccaaacacatgcattagaggatgttgcaccagtgaatcgatccctcttcatctcccttcttcttccttcactcttctctccccaatcgctaaaggatcagagagtgttgtttatgaagcgattctcgatggccgaagagtagcagcgaagaagcctatcttgtctacttccgatgaccttgacaagttccacaggaatttgcagctctcatgcaatctcaatcatcctggtgtggctaagttactagcagcacatgcgaagcctccaaattacatgtttttctttgacttctacgagtctgggactttagctgagaagttacacgtcgaggagtggtctccgagt

SEQ ID NO: 139765 - DNA, 131 bp, Arabidopsis thaliana
aacacgcgtcagatctgttcgtggttcgtcttcctcgtcgtcatcggtggtgatggaaattggtgttccatgcatatgcataagaggatgttgcaccagtgagtctatacctcttcatctcacttcatctt

SEQ ID NO: 139766 - DNA, 409 bp, Arabidopsis thaliana
aacaaagcaggtgtagccctgaatgttcccctgtgcctagtccaagaatgacaagccctggtcctagctctagaatacagagtggtgctgttacacctcttcatcctcgagctggagggtcaactactgggtctcctactagaagacttgatgataacagacagcaaagccatcgtctgcctctcccgccgttattaatctctaatacttgtccgttttcacccacatattcagcagcgacatctccgtctgtcccccgaagtccggcaagggcagaggctacggttagccctggatcgcgatggaaaaaagggagattgctggggatgggaagttttggacatgtgtatcttggctttaacagtgaaagtggggagatgtgtgccatgaaagacgttactctatgctc

SEQ ID NO: 139767 - DNA, 156 bp, Arabidopsis thaliana
accacgcgtccgttctactggaatggagaatcaatgtgttttggctggttctccgcaaaggatttcaggctttgatggaatgtcctcccatggtcagccttcctatgctaatccccatttgcaagatagagccttccctttagacccaaattgggt

SEQ ID NO: 139768 - DNA, 361 bp, Arabidopsis thaliana
accacgcgtccgaaaacatatacttttccgacaaaacatggaagatgttaatcaggacaagaagaaagtacctccaatgtctgaaccagaaagatccacaccgattaaggtaacaatatcaagaatctttatcttaaacttgaaccaactttttgaaacatcaacactacaccatgttcttgactttagtttattgaaatcttgataagtcgaatcttgtgtttaaaatgtattttttaagtaatttagagctatgtcccctcgagtccaccttctggtgagcacaaggctttgcatttttgttacagactacaggaggacagtatcgtttctgcaagtcatgtgttgaacgaagtagttg

SEQ ID NO: 139769 - DNA, 394 bp, Arabidopsis thaliana
atcaattcgtttagttcatctttggaagattctcttccgattaagttttggtttttgttacaggagaggattatcaaaccattacatagggaaatcgaaatcgtttgggaatttaatggaagcgagtaacacaaacgatttggtgaaagtggagagtccattgaacaagagaagaagattgcttattgctaataagctaagaagaagatcgtccttgtcttctttcagcatctacactaaaattaaccctaattctatgccgttgcttgcattgcaagaatctgacaacgaggatcataaactcaatgatgatgatgatgatgatgatagtagcagtgatgatgaaactagtaagctgaaagagaagaggatgaagatgacgaaccatagagat

SEQ ID NO: 139770 - DNA, 308 bp, Arabidopsis thaliana
accacgcgtcggttgacgcgtgtgttctgacaactgggattacctcataatatgcgcagtttcttctgcttcttcgtcctcgtccctgtactaactcttgccccattggttttctccgagatcttcttagaggggcatttcgaacgtggatgggaaagtacgtgggtcttgtctgattggtgcagagacgacggcaatgctggcaccgttaggcacactgccggtaattgggacggcgatcgtgaccatacaggtattcatacttagcatgatgccaagcattatgcgatttctgcatagattcctga

SEQ ID NO: 139771 - DNA, 416 bp, Arabidopsis thaliana
aggacgcgtgggcggacgcgtgggcggacgcgtgggcggacgcgtggggtgatgttgagtatcggtgcttcgttggaggtctagcatgggccactgatgacagagctcttgagactgccttcgctcaatacggcgacgttattgattccaaggtctgttacacgccgagatcggactccgagtgatatcgatgatctcatcctcgacggatctgttccgatcttgtgtttctctgttacttgattcgattactctgttactattctcgttctttgttactactactactactactgttacttgtattttcccaaatcggtacgttcatcttcctgcttctgtgagcccggagatcgatcggatttttttgtattttgtatatttgttgtacatctaaatgcttttgttcagttttg

SEQ ID NO: 139772 - DNA, 405 bp, Arabidopsis thaliana
agcttatcgcggcgattagttcccggcgaagaagaagaagagagataagaaaatggcgactaatggatctgctagctcagcgcagctctctcagaaggaagctgatgtcaggatgatgtgtgccgctgaggttcatcttggaaccaagaattgcaattaccagatggagcgttacgtcttcaagagacgcaacgatggtatttacatcttcaaccttggcaaaacatgggaaaagctccagatggctgctagagttattgttgccattgagaacccacaggacatcatcgtccagtcagctaggccctatggacagagagctgtgttgaagtttgctcagtacactggagccaatgccattgctggaagacacactcctggtaccttcaccaatcagatgcagac

SEQ ID NO: 139773 - DNA, 399 bp, Arabidopsis thaliana
cttataacataataatcctctaagttctcctctctattgaaaacccagaacaaaagttgagaacttttcagatttcagatgggcaagacgaaactgttgactggtgggtcaagcaaaactcatggtaatggtagtagctacagagatcctctgttgcagaatcaggaggataaaccgaaagcgaatggaagcgagaatggtttgaatgatcttgagcatggtgtacttgaggcggcaaatgttggatttggcagagtcattgcgttggcaaagcccgatgcgggaaaattagtgattggcaccattgctttgttgataggttcaacaactaatctccttgttccaaagtttggtgggatgattatagacattgtatccagagatgtcaagacgcctgag

SEQ ID NO: 139774 - DNA, 406 bp, Arabidopsis thaliana
atctagacaagtatgcacattcgctcaagttgatagttaacgcgtcaatctctgggaaaacaaataacattgacgtttgctttcaccggaatttgtcgcgtggaattggaatgtgccctcatagtcgatgggagaaagcctctaaaggttcatgggttcagacaatgtcacccttcgaccataaaatccttgatgttagagtacctagctctaacaaggtctcattggaagtgtctgctgtagaagaattatttatgcatcgcatagtattcttactccttggtgctgtattactggcttcggcttctacactgagccaatctttagcgttttactacagtagtgcaatggctgttggtattatccttgtcgtgctgcttgttctctttcagggaatgaagcttct

SEQ ID NO: 139775 - DNA, 260 bp, Arabidopsis thaliana
acatccgaagccatcaaacatatatccatagaagcttcatcgatatggggaatcaagcagctgctgcagcattcttccttttcgctttagccgtcttctccaacttggcgctctcagcttcatcacttgtcagtggcaagatctcttgccttgactgccaccgcgatttcgacttctcaggcattaaggtcctccttaaatgcgactgagagatgagggatctaaccgcggtggcagctgcagacggatggttccggtca

SEQ ID NO: 139776 - DNA, 405 bp, Arabidopsis thaliana
accacgcgtccgatttatacaatatttatattttagttttgtatcctggcctgagaattgctggtcacgtagaaaatccctcagagatctgtaaacaaagtagaatagttgtccattagcgttttatcagtcctacggcaaggaagcttaatccgtcattcctcattgcctcttccatttttttaatgtttttatatgatcttgaaggtgtggtgctaggcagtcaggagatctagactcttctaatgaagaagcacttgacggaatacttggatttgggaaagctaattcttccatgatttcccagctggcctcatcagggagagtgaaaaagatatttgctcattgcttagatggaagaaatggaggtggtatatttgctattggacgtgttgtgcaaccaaa

SEQ ID NO: 139777 - DNA, 385 bp, Arabidopsis thaliana
gatttgactcgtgagcatcaccagttttttctttatcagatgcttcgtgctttgaagtatatgcatacagctaatgtttaccatcgtgatcttaaacccaagaacatactggcaaatgcaaactgcaagttgaaagtctgtgactttggacttgcaagagtgtcgtttaatgatacacctacgacagtcttttggacggattatgttgccacaagatggtacagggcacctgagctctgtggatcattctgttctaagtatactccagcaattgacatttggagcattggctgcatcttcgctgaggtattaacagggaagcctttgtttccaggaaaaagtgttgtccatcagttagacttgattaccgatcttcttggcacac

SEQ ID NO: 139778 - DNA, 155 bp, Arabidopsis thaliana
ctcgaacccgaaagaaaaacaaaaatggctgccatagcttctactctctctctttcttcaggcagacctcaaagacttttcgattcttccttccatgggtcagccatctccgcagctcgtaactccatcggtctcaaagtacgatctttctccgt

SEQ ID NO: 139779 - DNA, 184 bp, Arabidopsis thaliana
cggacgcgtgggcggacgcgtggggtcgatatcggcggtgacgatgcggcggcgttaccattctcatcgggaacaacagggttaccaaaaggagttgttttgacacacaagagcttaatcacaagcgttgcacaacaagtagatggagataacccaaatctttacctcaaatcaaacgacgtca

SEQ ID NO: 139780 - DNA, 401 bp, Arabidopsis thaliana
cttactccgtatctcgatccttggtctcgtctacatcttagctttcatagctcgtctcttcagtgttctccgctacgaatcaatgatccacgaattcgatccgtatttcaactaccgtacgactcttttcctcacagagaaaggcttctacgagttttggaactggttcgattccgagagttggtatcctctaggtcgaatcatcggcggtactctttatcccggtcttatggtcacagctgcgttaatctactggacattgcgatttctccgattcttcgttcatatccgtgaggtttgtgtgttaaccgcaccgttttttcgcgtcgaatacgactctcgttgcgtagttctttggtaaagagctttgggatacaggagctggtcttgttgctgctgtt

SEQ ID NO: 139781 - DNA, 316 bp, Arabidopsis thaliana
cgtgaatagagagatcactgtacttactgggttctgatcgttgctggctccactgagtccaagagtaatggtgaaggtggatttgaagaacaagccatggcaacaggaccaaccattgcacaatagatcgcatccggagataccaccagtagcagacgtcaaggctggagagtttttccgggtagaaatgattgatgcagtgggaggtgttaacatagacaatgactctgcacgcgacatcagtaacctactcctaagtactactcatcacctaagtgggccgattacggttgtacatgacgaaggtgttgcagct

SEQ ID NO: 139782 - DNA, 409 bp, Arabidopsis thaliana
ggagattcactagaaagaaaggaaaaaaatctctttgtctttgcagatgcgacacgcaaaacgacgattctgatctcgcttgtctgatttcaaaaacaatgagaagatagttctgattatataacacacaaaccctacttcattccttcatcatcgtctccaatcattacccaaagatccgtctttttctttacttcatgtcgaagcaaacgtacaaagtgtgtttctgctttcgccggaggtttcgttacactgcatcggaggcaccgcgtgagatcaagaccattttcgaaaagtactcagagaatggagttatgaccgttgatcatctccacaggtttctgatcgatgttcagaaacaagataaagccaccagagaagatgcacagtcaattatcaattctgcatc

SEQ ID NO: 139783 - DNA, 378 bp, Arabidopsis thaliana
gcttctctgggtttagtttttaaccaatgtgcactagaaaaaaagttaatctttaggatatgttcttttagtttcatgatgaaaaattgaagcttcatagtataatgatccttaaagcctgggatctgtgtttgtgaaccatctgggtttgtggaaagttcgtagctttcgaggatttatctattggctaaaaagatggattcttcttactcctttgccttggggacaagtagttctattttgccaaaactcagtttcaggaatgtagagaacagattttatggtgagaagaacaacaacaatggtttgtgtaaacgttttggatcagatttgggctccaagaagtttaggaatcaaaagttcaagcacggtgttgtt

SEQ ID NO: 139784 - DNA, 112 bp, Arabidopsis thaliana
cagacacgtgggctccaccaactttttcttgttcattcgctcgccaccacagaaaaatggtaaacctaactttgtcccctcaactcactgattgaactgcttgattttcgat

SEQ ID NO: 139785 - DNA, 391 bp, Arabidopsis thaliana; identical to SEQ ID NO: 120755

SEQ ID NO: 139786 - DNA, 339 bp, Arabidopsis thaliana
gagttgtaactctcagacagtcacttctcactcagacttcccgtcttgccttggaggagatcaaactcaagtttattgacaccgcctccatttttggacatggtcgcttccagacctcccttgagaagatgaggttttacaaccgtgtcacgaagtaagagttgttttatcacaattcttcttagaaagtttcatgtttggttatctgttgctacttatctcagagatgttatcctttaaacaatgttatggagttttcttttgcttttagtttgttacttttttggaagttaaaacgatttgcttctcaagttttgagactttgatgtgttctttatc

SEQ ID NO: 139787 - DNA, 257 bp, Arabidopsis thaliana
atttgtacaatcaagttggaggatctagaggccgggcttcgagttttctcgcagtgaaaagaaacttctgatggctaataattggttagtattacaaattgtattgattcaattctttacatcatatattctttatgtttttgtccccctcaagatcttgtaggaggagaggctttggtttcaacttccattgtttgatcaaatctatttctgttgtataaaactatattgatattttgtcttttcacttttctcat

SEQ ID NO: 139788 - DNA, 295 bp, Arabidopsis thaliana
cctttctatggggaggatgcgtcgtggaatcaatcgtcctctatgaacagtgatcttgacttcctacctgaacgaagtgtctcagcaacggagacttcagctgaggttcgacacggaattgcaatcaaatgtggcgctaaggtggagtacaaaccaagtttacgttcgaggacaggtttgcggttcacagttgaggcttggatttctactcaaaaaattggagaagggattggcaaagcgataacagaacacctgcatcaggctgctgaagcttctatagaggatttaccatgat

SEQ ID NO: 139789 - DNA, 404 bp, Arabidopsis thaliana
cccacacgtccgcggacgcgtgggatacttttactagttttagacttaataaatgcgatcgccctttttttagtatgttgaacctcattgctttcctccgccgtcgtctccgccgtccccggaaagccagaatctccgtcaaccaccaccacctctcagttgattcttctcctgagactcatcatcatcaaaatggcttttcatcggcagccgccatccacccaaacccggacaaaaccatcacagtggccacctttaacgctgctatgttctccatggctcccgccgtccctagcaacaagggcttgccattccggtccaagtctacggttgaccgccccaagagcattctcaagcccatgaacgccgccgcatctcctactcacgactctagaaagcaacag

SEQ ID NO: 139790 - DNA, 385 bp, Arabidopsis thaliana
gtcagctttatcagagaaagtttcccccattggtgaaaatttgtaagagatggacaaggaaaaggagcaaactttggagtggaacgaagcacagaagatagatataagcgttgaccttttggctgcagccaagaaacaccttctcttcctcggagctgttgatcggaaccgttgtctctacgatggccctgcactccaaagagccatctacagatacaatgcttattggcttcccttgcttgctcaatacaccgagtcttcttctatctgtcaaggaccattagtccctcctcttgactgtgaatgggtttggcattgccacaggcttaatccggtgaggtataagactgattgtgagcaattctatgggagagttctggacaat

SEQ ID NO: 139791 - DNA, 293 bp, Arabidopsis thaliana
accacgcgtccgagagtgtgttgttggccatgggatgcacggcctccaagctcgacagtgaggatgctgtccgtcgctgcaaggagcggcgccgtcttatgaaggacgccgtctacgctcgtcaccatctcgccgccgctcactctgactactgccgctcccttcgtctcactggctctgccctctcctccttcgccgccggcgagcccctctccgtctccgagaatactcccgctgtttttctcggcccttcctcaattcaggacgcgccacgtgtcccttcttcccattcc

SEQ ID NO: 139792 - DNA, 356 bp, Arabidopsis thaliana
gtcagattctctctctatctatctctctcaatctccatctgcccatatttcttgctgtcaacaaattcattcagcaatctcctttttccccatcaacaacaaacaaaaaataaagtcctttcacaacaattatatttagaacaaattcaccaaaaacccttccacaaaaaacctctcttcttcaacaatgtcgtctcgaaaccaaagatcaagaatcacctctagtttcttcgtctccttcttcactagaaccattcttcttcttctcattcttcttcttggtttctgcaatggagcaagaacaaacacgaacgtcttcaactcgaaaccacacaagaagcacaacgacgccgttt

SEQ ID NO: 139793 - DNA, 379 bp, Arabidopsis thaliana
cggacgcgtgggttgcaacctagggggctcgcagagactttatgtggttcaccattgtatatggccccagagatcatgcaactccagaagtatgatgcaaaggcagatctctggagtgttggtgctattttatttcaacttgtgacaggcagaaccccttttacaggaaacagccaaattcagttgctccaaaacattataagatcaaccgaattacattttccaggggactgtagagatttaagcttggactgcatagacctgtgtcagaagttactgcgccgtaatccagtggaacgtttgacatttgaagagttctttaatcaccctttcctttcggacaggcagtcatatgatttctccaggagtagattggggt

SEQ ID NO: 139794 - DNA, 336 bp, Arabidopsis thaliana
accacgcgtccgggaaggagcaaagtagaggatttaacaatggcgtctctttctctcagttctgctcatttctcttcaacttcttcttcatctccctccgccgccgtctctccttctccgtcattccccgtcggacttctcgctccttctccacttccaattctcagattaggtgttcgataaatgagccgttgaaggtgatgatttcgggtgcaccggcttcaggaaaaggcactcaatgtgagctcattgttcacaagtttggtttggtgcacatatcaacaggggatctattgagagcagaggtgtcatctgggacagatattggaaagagag

SEQ ID NO: 139795 - DNA, 263 bp, Arabidopsis thaliana
gtaaaatcagtgttcttccgagagtttgttcttcctagcatacaatgttttacaaacgccattgacgaccacgacaggagccaagcctcagtttttgacaactcgagtatctctgagaaaaagctccttggtcgcttcaacacttgtctttccctattatcgacctacgcagtaaataagattacttattgctatcttttagctgatgcaatctcgcgcattgtcgcgcctgagaagttactacaagagatcatcggtatttc

SEQ ID NO: 139796 - DNA, 242 bp, Arabidopsis thaliana
gcttgaaacaatggagtaccggaaaatcaaagatgaggacgatcatgacgttgcttctgatatcgagagtgtgaaaggaaaatctcataccgttgcttcgagtaacattgcaatggctactctgggtgttggatccagtgaacggatcaactggaaacgaaagggtgtagtaacatgtgcactgacgattctgacgagttctcaagcgatacgtatcgtgtggtcgaaacgagctgggaagt

SEQ ID NO: 139797 - DNA, 280 bp, Arabidopsis thaliana
atcaatatcaaaaacaatcagatttcttctaccaaacgattaattgccttttgggatacgattcagggcttcttttggggcctctgtttgatttaacaccttgtttgctgcaaaccaatatatcaaaggaaacgatggtgtcggacaatgagatgggtctggtattagctgtgtcgtccagcgtcttcataggttccagcttcattttgaataacaaaggtctcaaacacgctgctgctaatggcacccgctctggtttcggacgttatacatatttgtt

SEQ ID NO: 139798 - DNA, 375 bp, Arabidopsis thaliana
accacgcgtccggacttgctttacccaggtggcagcttcgacccattgggcctcgctactgaccccgaggctttcgcagagttgaaggtgaaggagctcaagaacggaaggttggctatgttctctatgtttggattcttcgttcaagccatcgtcaccggaaagggacctttggagaacctcgccgaccatttggccgacccagtcaacaacaacgcttgggccttcgccaccaacttcgtccccggaaagtgagcggctgcttattatgtgaatgagagcagagaaagagagtttgtttgtggtctattctatgtaaatttgtgaactttcctttgtggtatctttgtatagaaatcgaacctctttttctct

SEQ ID NO: 139799 - DNA, 399 bp, Arabidopsis thaliana
aggacgcgtgggtggatatttaaaagaacgggccgtcaccttttcttgaaggatgaagaagagggaaaaccaccattgcttcgacgcatggtggaagataccgatgattgtcatttcatatctgcactgcgagccttcaaaaggcgggtggcttattcaaatgtgggccatgatcacgttgttggctggaagacggcatccattagacgtgacagtgaattgcctaagtgggaagattctctgaatgagaagtatcctcatattgtttacgaagaactctgcaaggcatgtgatatggaggacataccagaaggcgagaatcattcagacgacatagaagaagaaatgatcaaaggcctctcctctgtctcatgggaaaaagttgatgttagctttcac

SEQ ID NO: 139800 - DNA, 386 bp, Arabidopsis thaliana
cccacgcgaccgcccaaatcttatcactactctaaaagaatcttcatcatggcctcagtaacctcagccaccgttgcaatcccatctttcaccggccttaaagcctcaaccatcaaatcatccgccaccgtcagaatccaaactgctgctgttgcatcaccgaagcttacagtgaagtcatctctaaagaacttcggagtcgcggccgtagcggctgcagcttcaattgctttggccggaaacgccatggcaatagaagttctcttgggaggaggggatgggtcgttagcttttattcccaacgacttctctatagctaaaggagagaagattgtgttcaagaacaacgctggatacccacacaatgttgtcttcgatgaagacga

SEQ ID NO: 139801 - DNA, 372 bp, Arabidopsis thaliana
accacgcgtccgaattatctggatctgcatatggtagtttagactctcctaagctaacttttcggaaaggtgtgaatctaagagctggtttcaacaaaattgcgatactaagcattgctgttggtctcccgaatgtgggtccacattttgagacatggaatgctggagttttgggtccagtttcattgaacggtctcaatgggggacggagagatctatcatggcagaaatggacttataaggttggtcttaaaggagagtctctgctccagctggagattcgccattggctgtagacatgggaagcatgggaaaaggtcaaatatggataaatgggcagagcctgggacgtcactggcctgcatataaagc

SEQ ID NO: 139802 - DNA, 133 bp, Arabidopsis thaliana
tatttccgtaaattgggtgctgttcggaataagcaggatgatcctgaaggaaacagatgggcaaagagcttgaaaggacagacaggtgttaaggttttcatgtctaagaaatcggtttcaaagatgatgatta

SEQ ID NO: 139803 - DNA, 226 bp, Arabidopsis thaliana
accacgcgtccggttggacaacaacggacccatctacttttctcattcgaggaaaaacttatcttgatgaccagaagaaggtcaaggcaaagggtacactgatggaaatggtagctgcagactggctaaaatctgacaagcgggaagatgatttggggtcccgtccaggaagcatagttcagaaatatgcagcaaaaggtggaccagagttctttttcatcgtgaa

SEQ ID NO: 139804 - DNA, 327 bp, Arabidopsis thaliana
attgttatttctctctctctctccttgtagatggaacttaagggcgttacttgtttgcttctttctttggttttgcttaattcgtgtgtggaatgtgttttgggggatggatctgtggtgggtcctgcgaggtttagagacgatgattgtaggtggggccggaggaggtttggggcacggtggtggtgttggtggagggcatggaggaggcgtcggcattgggattggaattggaataggtgttggggtaggtggaggctctggtcaaggttccggcagcggaagcggtagtggtggcggcggcggtcgccattaatcaaagctctt

SEQ ID NO: 139805 - DNA, 150 bp, Arabidopsis thaliana
aagaaacgagacagcgatcaactatcagagaagtgcgctctctcttactctcatcgattttccagaagagcagccatctccacattacagagttcgttcacaatcccaggttatcattttccagagtttgaaggtgtgttcctgtccctg

SEQ ID NO: 139806 - DNA, 280 bp, Arabidopsis thaliana
gactccggcggagatgaagagtgtgttgcgtattgcggcggcgatattctggctttggctgtttatcgtgttaggtgtgattgggagtgggaatgtgagagatacagacgatgagatctcgttactcgaaagtcaattggtggtgacatctccgtcgcagcttcttatggtgcctctcactttgattcaggctgctgcctccaaaggagctgtgtgcctgtatggaacactacctggttatcagctacaccctgggtctggatcaagagctaagcggtgg

SEQ ID NO: 139807 - DNA, 343 bp, Arabidopsis thaliana
cgaaaactggaagctgagtgtgccgacgccgttgccggattctttatacataagcggcggcgatgaagcgaatccggaggatctgtattcgtctccggtctctgtacgtatcgcttgggtgattttactcacgctttgtaaaatcgacggtaaagctcagccgtataaagacgttgctttgtcttatctcttcctcgctaacaatctccaatacgtcgtcgttaaagtccgatcgtcgactctgaaggttcttctcggagacgattgggtgtttaggcatgaagagaaggtgaagctgtatgctgataagtttgagaagcttgcgtgggggaaagtgctggat

SEQ ID NO: 139808 - DNA, 410 bp, Arabidopsis thaliana
aaaaatcaaaaggggtcatttactatcttttaagagacgacatatatagttctcgaccaagaaaagaaaagggggtgacctgagttcttcaacacataacataatggccggagttttcaaaacggttacgtttcttgttttggttttcgctgccgttgttgtcttcgcggaggactacgatgttggtgatgatacggaatggacgagacctatggaccccgagttctatactacttgggctaccggtaaaactttccgtgtaggcgacgagctcgaatttgatttcgctgctgggaggcatgatgtggcagttgtatcagaagctgcatttgaaaactgtgagaaagagaaacccattagccacatgaccgttcctccggtcaaaattatgctaaacaccactggaccac

SEQ ID NO: 139809 - DNA, 399 bp, Arabidopsis thaliana
aactaacaaatctgattcttctttccttgtaaataaagatatggatctgttactaaaacaaagtcgctttattcagatctgaagaagaagaagaagaagaaacatagttgaagtctctgttaagatgtcttcaacaacaacagattctacagaattgcaaaatctgatcaaactgtttcaaaattgccaaactcatcctcgtcaacattttcctgcaaaatcttcagctgtattactttgtctataccaagaacaaagagaagacaaaaacgagctacgcgtaatcttaaccaaacgatctactactctctcttctcatcctggggaagtagcattgcctggaggaaaaagagagcaagaggataaagatgatatagctactgcgttgagagaagctcg

SEQ ID NO: 139810 - DNA, 233 bp, Arabidopsis thaliana
gtggaaacactcacttacgctatcggttgagaagacttacttcaagtcccactcttttttgtacgtataaaaacactcttattaactccatatcatccctttttttgttggttcgtcttttaggaagttctttttttttagctgttgagtcatttgtttgtactattcgcacatttttgtgttcttgaaggtgaagaactctattgaggttctttggtaaaaaaaggtgagag

SEQ ID NO: 139811 - DNA, 362 bp, Arabidopsis thaliana
agcaactgttacaaactgaaccaagacgcacaagcgagtctcgtgggtcatgctcgaatcaaaagtcagttaatggctaatgcttctgcaaaacgttattatcggggatttgttccggagcctctggttggtatctgttacccggccactgaaataccgagttggttctgccaccaaagactaggacgttcactagaaatcccattgcctccgcactggtgtgatattaactttgttggacttgcgttatctgtagttgtctcattcaaggactatgaagacagtgcgaaacgtttctcggtaaagtgttgtggcaacttcgagaacaaagacagttccttcacgagatttgatttcactct

SEQ ID NO: 139812 - DNA, 382 bp, Arabidopsis thaliana
gtgaatacgttgtctgttggtggagcaagttctaccacaccgtcaaaatccacgaaatctgctactaccaattccagtgtacaatctcagtcacatagggcatctcttttggatactatcttacaaggggagcttccatgcgaccttgtgaagtcgaattctacatataatgttctggcactgttacgtgtattatagggtttaaatcagctttgccctcgtttaagagcccaaactctttccgatcgttttgcaaagggtaaaattacaagtctagatgatctgagtacaactgctgctaaggttcctcttgatgaatttgtcaatagcaaacttacacccaaattggctcgacaaatccaggatgcgcttgctttgtgca

SEQ ID NO: 139813 - DNA, 375 bp, Arabidopsis thaliana
aggacgcgtgggcggacgcgtgggcggacgcgtgggtgttgaccatacgtgtgggcatcccaatggtgcacacactccttcccctacaactaatcatttaatgggttcagtccctaaagttggaggcttcccaccattaggtgctcacggtccatttcagccaacaccagctcctcttacaacatctcttgcaggatggatgcctaatccatcggtacaacaccctactgtttccgctgggcctatcggcttaggtgcccccaacagtgctgtgtctatgttaaagcgtgagcgtcccaggagtcctccaactaatagcctatcaatggattatcagacggcagattctgaaagtgtgttgaagagaccagacct

SEQ ID NO: 139814 - DNA, 413 bp, Arabidopsis thaliana
attcttgtgatcacttgcagctatgggcacacatgcagctctcgccgtctcaagaatcccggtcacacagcgactgcagtctaagagtgccattcactctttccctgctcaatgctcctccaagaggctagaagtcgctgaattctccggtctgcgtatgagtagtatcggtggggaagcatctttcttcgatgctgtagctgcacaaatcatccctaaggctgtgacaacatcaactcctgttagaggagagacagtggcgaaactgaaagttgcgattaacggttttgggaggattggtaggaactttcttaagtgttggcatggtcgtaaagactctcctctcgaagttgttgtacctaacgacagtggtggtgtcaagaatgcatcccacttgcttaagtatgactcca

SEQ ID NO: 139815 - DNA, 369 bp, Arabidopsis thaliana
tttattgctttttctctcactctctgacctgaaatctcctactgagatttttgaagtgtattcaacaatggcggatccaccacatttctctctgtttcagcaaaaatttcgtaccggagacaaaccatttctcactcttgatgctgacttcttaatgaatcacacgaaagtgttactaaaatcggatgcttcagacaaagtttggaaagtgaaactggacggcggtaggctctccgaaggctgggaagagttcgcctgcgaccagaaattcagagacggtgacgttttggttttcaaacatcatggagacgaggtctttcatgtagctgtggtgtccccatctgtttccggcgacatacgtaacgcatc

SEQ ID NO: 139816 - DNA, 254 bp, Arabidopsis thaliana
cggacgcgtgggttcaatctcgtcggttgtcttcttgaagcagctactttgccgactcagttctacacagccttgctttacacagtgagcactgtactattggtgatccagactatttactacgattacatctacaaactttgtagacatacacgtaccaagatttgtcaaaaggatgaggaagatgaagagaagagaccattgagaacaccaaagacgatgggatctgctatttccatcccatcaggatctta

SEQ ID NO: 139817 - DNA, 148 bp, Arabidopsis thaliana
accctctcagattttttctacacgctgatcaaaatccacaatccaattttcataaaaacatcatctttcgttgaatcttctttacacgctctgtttttcatcaatggcgtcaatgaagctttctattgtcatacctacacacatcaat

SEQ ID NO: 139818 - DNA, 350 bp, Arabidopsis thaliana
ggcgaaaacgaagaatcacacggcgcacaatcagtctgccaaggcgcataagaacggaatcaagaagccaaggagacaccgtcacacaccaaccagaggaatggatcctaaattcctaagaaaccagaggtatgcaaggaagcacaacgtcaagagtggcgagaatgctggtgtcgaagagtagatcttttgatcgtctgattgacagtttaagttttttttatgaatttcacttgtttagacaaaggaaccaatgttctacaatcagggattatgtctatccagattctcttatatattttgcatgttacttgatttgatgcaattctttcacttgttcgtttatgttc

SEQ ID NO: 139819 - DNA, 406 bp, Arabidopsis thaliana
cggacgcgtgggcggacgcgtgggtttcctctcccaacattgctaaagaaatgcatgttggtcatcttagatcaactatcattggtgacactctagctcgcatgctcgagtactcaaaggttgaagttcttcgcagaaaccatgttggtgactggggaacacagtttgggatgctaattgagtttctctttgagaaatttcctgatacagagagtgtgaccgagacagctattggagatcttcaggtgttttacagagaatcaaaattgaaatttgatttgaatcctgagtttaaggaaaaagcacaacaggctgtggtccgtcttcagggtggagatcctgtttaccgccaggcatgggctaagatttgcgaaatcagccgaaacgagtttgccaaggtttacaa

SEQ ID NO: 139820 - DNA, 383 bp, Arabidopsis thaliana
atggtataacactgcttattcacttgagaagataaccaaattcaccattcaggagtggatgcagtcagcccctgatgtaaacctgcttctaccaacacctaatgtcttcattcctacggatttttcattaaaggatttaaaggataaggatatctttcctgttttgctgagaaagacatcatactcaagattgtggtataagcctgacacaaagttcttcaaaccaaaggcatacgttaagatggattttaactgcccccttgcagtcagctctcccgacgctgcggttctttcagatatttttgtttggttgctagtggactatttgaatgaatatgcttattatgctcaggctgctggtcttgactatggattaagtcttt

SEQ ID NO: 139821 - DNA, 90 bp, Arabidopsis thaliana
ccagaatgataatatgatgatgatgtacttgcgtgtgtttgtagatagatatttgttagagagacacatatatatgagtttggtcttcat

SEQ ID NO: 139822 - DNA, 388 bp, Arabidopsis thaliana
aaaacagaaaaaatgtcaacttcagaaaacactccgtttaatggcgttgcctcatccaccattgttcgagctaccattgtccaagcctccaccgtctacaacgatactcccgccactctagaaaaggcgaacaagtttattgtggaggctgcaagcaagggatcggagctggttgtgttcccggaggcgtttatcggtggttatcctcgaggttttaggtttggtttaggggtgggagttcataacgaagaacggcgtgatgagttccgcaagtaccatgcttctgctattaaagttcctggccctgaagtagaaaagttggcggagttggccgggaataacaatgtgtacttggtaatgggagcgatagagaacgatgggtatacac

SEQ ID NO: 139823 - DNA, 147 bp, Arabidopsis thaliana
cgaatcacgaatccgggcatcaacggatcatcaagaagctacttaaagaagatattccaatgatgatatggaatccttatggacgattgattgccaggagccccgaagctcaaaacccttttccgcatctaaaatgagtcctcttca

SEQ ID NO: 139824 - DNA, 365 bp, Arabidopsis thaliana
ctcatggtgaaagcaccaaaccaaggttgcccagaattaattctgctgagtccatggagttatgggctagccaacagaagggaaataagctctatcttgttttgattagtcttcatggtctcatacgtggtgaaaacatggagctcggccgcgactctgacaccggtggacaggttaaatatgttgtggaacttgcacgtgcactgggttcaatgccaggagtttatagggttgacttgcttactagacaagtgtcttcaccagatgttgactatagttatggtgaacctacggaaatgctgactcctagagattctgaagatttctcggatgagatgggggagagtagcggtgcttatattgtg

SEQ ID NO: 139825 - DNA, 381 bp, Arabidopsis thaliana
cccacgcgtccggaaaagagtaaaaaagcacatggcctcattaccattggggcctcagcctcatgctcttgctccgccgctgcagcttcacgacggcgacgctttgaaacgccgtcctgaattggattctgataaggaaatgtctgcaactgttattgagggaaatgacgctgttactggtcatatcatttccactactattggaggcaaaaacggcgaaccaaagcagaccattagttacatggctgagcgggttgttggaacaggttcattcgggattgtttttcaggcgaaatgcttggaaactggagaatcagtagccattaaaaaggtcttgcaagatcgacgctataaaaaccgtgagttgcaactaatgcgacc

SEQ ID NO: 139826 - DNA, 378 bp, Arabidopsis thaliana
gccggtgagacagaataagagagaatttcaaatatcgaagaaatttgggatcttgctgagcagtacaagtaattggattttgaaaatcagtctcactggattcgccgtccgttcgccgtttaaaaatgtctagccgccatgacaaagagaaaggcgtcaatgttcaagtcctcctccgatgcaggccatttagcgatgatgaattgagaagcaatgcgcctcaggttctcacttgtaatgatttgcaaagagaagttgctgtttcccaaaacatcgctgggaagcatattgatagggttttcacttttgataaggtgtttggaccatcagcacaacagaaggatttgtatgatcaagccgttgttccaattgtgaatg

SEQ ID NO: 139827 - DNA, 412 bp, Arabidopsis thaliana
cttgagaactcttctgattaaacatagcaacaacaacaactcttcttctcctctctttctcacttcaatttagcgatggctgcaactgcaatctcttctctttccttcccagctttgggtcaatcggacaagatctccaatttcgcatcttctcgtcctctcgcctccgcaattcgcatctgcacaaagttttctcgcctttctttgaattcgcgttccacttcgaaatctcttattcactgcatgtccaatgttaccgccgatgtgcctcctgtatcagagacaaagtcgaaattcctaaaagcttacaagcgacccatcccgagtatctacaacacggttttgcaggagctcattgtccagcagcatttgatgaggtataagaagacttatcgttatgatcctgtttttg

SEQ ID NO: 139828 - DNA, 412 bp, Arabidopsis thaliana
ctgaatctctctctcttctgcgtctcgccaaatttatttcccgattcaatttgtagggtttctgcagaagaaggaaaccaccattaaaccctaagtacgtcacctttcaagctccttcttctgtaggttttttctgttcttctgattcatgtttacaaagttttttttatgtctcttctaacttcttctccttctcgccgcgtaatcagtccttattgttcttcataatcgcagtaccaatcgcaatcgttttcttcctctctcgatctgttcctcggacgagaaaactggacaacaaacctatgccgtcgacgccgctggctaacggtggtacgcctcctatgggtggcggagagagaacgacggttacaacttccacggtggcggatgataagcctggagtttcgatgat

SEQ ID NO: 139829 - DNA, 369 bp, Arabidopsis thaliana
cgccgacttcgttttcttcgaatccaaatttctgtgtctgcttttgattcacagagaaggagcaggaaagatgttggatatcaatctatttcgtgaagagaaaggtaacaatccggagattatccgagaatcgcaacgccggagatttgccagcgttgaaatcgtcgatgagatcattaagctggacaaggaatggcgtcagcgtcaatttgaagttgatagcttcagaaaggagttcaacaagctcaataagcaagtggcgcagctcaaaattaaaaaagaagatgcgagtgagattattcaacaaactgagaaaaacaaacaagattctactgcaaaggaggctgaagttcgtgaagcttatgctgc

SEQ ID NO: 139830 - DNA, 263 bp, Arabidopsis thaliana
aggacctttgatccttaagtttttggtttactgtcctgagaaagtagtgtttctgaaatcagttgatgcatcagagatattagattctgaggataagttgtatgagttacttaaggaggtagttgaagagataggtgatactaatgttgttcaagttattaccaaatgtgaagatcattacgcagctgctgggaaaaagttgatggatgtgtatccttctctatactgggttccttgtgctgcacattgcatagacaagatgc

SEQ ID NO: 139831 - DNA, 425 bp, Arabidopsis thaliana
aagagattctagagaagatcgagaacggcgaattctccgatggagcgcttcgtaattttcaggtgattcgtttggagaaagagttagtttcacaattggcgacgaggcttggtgaaatctccggtttggtggagactcggatcggtggtggaggcgttgttcttgatctcggagatttgaaatggttagtggaacatccggcggcaaacggtggagctgtggtggagatgaggaagcttctggagagatataaaggaaggttatgtttcattggtacagctacttgtgagacttatcttcgatgtcaagtttattatccatcaatggagaatgattgggatcttcaagctattccgatcgccgccaaatcttctcttccggcgatattcccaaggcttgggagcaataacaataacaacgctatg

SEQ ID NO: 139832 - DNA, 447 bp, Arabidopsis thaliana
attccatccaatttagggttaggacttcccctaatttggaaacctagtcctgtttcctgatctgttttccggatcggacgagagacgaattaacgaaaatgggcgcgaattctattccgacggacgcaaccattgatcttgatgagcagatctcgcagctcatgcagtgcaagcctctctcggagcaacaggttagagcattatgcgagaaagccaaggagatcttaatggatgaaagcaatgttcagcctgtgaaaagccctgtgacaatctgcggtgatattcatggacagttccatgatcttgcagagcttttccgtatagggggaatgtgccctgataccaattacctgtttatgggagactatgtggaccgtggttattattctgttgaaactgttacgctgttagtcgccttaaagatgcgatatcctcagcgaatcacta

SEQ ID NO: 139833 - DNA, 373 bp, Arabidopsis thaliana
tgttttacactcgattgtcttttcaaataggtggccaagctgtatgaaagacgtgtggatacctgtgcaaattacccagaatactggattcgttatgtgacaaacatggaatcaactggcagtgccgaccttgcagaaaatgcccgtgctcgagcatctcaagtctttgtcacaaaacaaccagagattcacctatttgctgctcgattaaaagagcagcatggagatatagctggtgctatagctgcatatcaattagtgcactctgaaatttctcctggacttcttgaagcagtagtcaagcatgcaaatatggaataccgactaggtaagctggatgatgctttctctttgtatgagcaagtgattgctg

SEQ ID NO: 139834 - DNA, 381 bp, Arabidopsis thaliana
gagagattggaccgtgagagggcacagagggaggcagagatggaaaaagcccatcagagggagaaagacgagagacaatgacagcacagcagaactgaaagagaaagggaaagattggtggctagacaggcggtacagatggctacaacggaagcacgcgaaagagcagccacggaagctcatgcgacagttcaaagagctgctgttggaaacgctaccgatgcccgagagcgcgccgaaagagcagcagttcaaagagcgcatgctgaagcacgtgaaacggcagctgcaagggcaagagataacgcggcgaaagctgcggcagaagctatagaaaaggctgagaaagctgcagcagaagctaaagaaagggcgaatgct

SEQ ID NO: 139835 - DNA, 134 bp, Arabidopsis thaliana
gaagtttgatttatttagacagatgagttagaaaaagcatggtcggtatagatttgttcaaatgtgtaatgatgataatggtgttggttgtcacgtgtggtgaagctgtttctggagcgaagttcgatgagctt

SEQ ID NO: 139836 - DNA, 98 bp, Arabidopsis thaliana
accacgcgtccgcataactcttggactagagaatatgtgcaaataagattggtctgaaatagtagtcatgtggattcacaatgaaagaatgggattgg

SEQ ID NO: 139837 - DNA, 415 bp, Arabidopsis thaliana; identical to SEQ ID NO: 119620

SEQ ID NO: 139838 - DNA, 170 bp, Arabidopsis thaliana
cccacgcgtctggtcgacttctctttgctgtcgtgaaaccttaatactttggattacgacgaacgtaacttgatctttacaaacttagtagtaggaccgttatatttactcttttggtgagactagtctccattatcctgtgtttcttgacatggaatcaaggagtcttt

SEQ ID NO: 139839 - DNA, 285 bp, Arabidopsis thaliana
cacgaagcttcaataatagtgttgctgatcagcacgcggttcaagagactgttgcacgagttaagccatcgatcaatgagaccacgaccaaggaggagaaatccttctttaatttggataacgagaatggcgtagaggatactccaagactgatagatacgaaggacaacgtttttagaatgtccaatccaaaatccaagtaccctgtactgcagctagatttaaagctgatatcagatttggtcatcatcattgttgctgctacttgtggtggaattgcctttg

SEQ ID NO: 139840 - DNA, 421 bp, Arabidopsis thaliana
cttatctcttcaccaccagcttctcaaagctttagcctcgagagcaaaattctctcaagctttagccatgtctgcctctgcttcttccctctctgctttcaatcctaaatcccttcctctctgcgtctccagacccgcttccgtctccgtcttacctccttccctctccttcaaacttcactccgaccacctcgtctctatcttcgcttcctccgccctcaaatgctcatcccccgccgagtacccgtcgcgtttcgttagaaacgttgctgtatcttcggattttgaggtggaggaagatgatatgttcgctgacggtgacgattcagcgcctgtggagcgtaactccttctctcctgaccttaagctctttgttggtaacctttcttttaacgttgatagcgctcagcttgctcagctc

SEQ ID NO: 139841 - DNA, 398 bp, Arabidopsis thaliana
agaagaaaaaaaattggaagaaactagcataatgactaataaaacgtttgagtcattgtcattatctgataacacttataaatctatcaaggagatgggttttgcacgcatgactcagatacaagctaaagcaattccaccattgatgatgggagaagatgtacttggagctgccaggaccggttctggtaaaaccttagcttttcttattcctgctgttgagcttctttaccgtgttaagtttactcctcgcaatggaactggtgttcttgttatttgcccaacaagagagcttgctattcagtcttatggagtggcaaaagaacttcttaagtatcattcacagactgtgggaaaagttattggcggtgagaaaagaaagacagaagctgagattc

SEQ ID NO: 139842 - DNA, 388 bp, Arabidopsis thaliana
caagaagacaaaaacacagagagagaaagagagagaaatggcgacgacaacaacagaagcaacgaagacatcatcgaccaatggagaagatcagaagcagtctcagaatcttcgacatcaagaagttggtcacaagagtctcttacagagcgatgatctctaccaggtctgtttttttgttttactcaaaaactctgcttttcaattcaatttcagcaatctaaatctcaattaagaaaatcaacacagtatatactggagacaagtgtgtatcctagagaaccagaatcaatgaaggaactcagggaagtgacagcaaaacattcatggaacataatgaccacatcagctgatgaaggacagttcttaaacatgcttatcaagctcg

SEQ ID NO: 139843 - DNA, 417 bp, Arabidopsis thaliana
atcgttgagttggtgagatcatcttcttctcaacttcatcgatcttatcgtctcgaaaattgtcaccttttcttctcagctacttcaggcggagaaacactttccgtggtttagtgttgaggacgatcactgtttgtaattcgatggcgaggaagaagatcagagaatatgactccaagagacttctcaaggagcatttgaagcgtcttgctaatattgacctgcagattcgctctgctcaggtgacagaatctacggatttcactgagttaaccaaccaggagtcatggctatcgtccacaaagctagttgtgaaaccggatatgctatttgggaaacgcgggaaaagtggtttggtagctctaaagctggatcttgctgaagttgcagactttgtcaaagcccgcctcggcactg

SEQ ID NO: 139844 - DNA, 418 bp, Arabidopsis thaliana
caaatcttaaacgttttactttgtgctgcactactcaacctcaatggccgcctcaacaatggctctctcctcccctgccttcgccggtaaggccgtcaagctttcccccgcggcatctgaagtccttggaagcggccgtgtgacaatgaggaagactgttgccaagccaaagggcccatcaggcagcccatggtacggatctgaccgtgtcaagtacttgggtccattctctggcgaatcaccgagctaccttaccggagagttccccggagactacggatgggacaccgccggactttcagctgaccccgagacattcgcaaggaaccgtgaactagaagttatccacagcaggtgggccatgctcggagccctaagctgcgtcttccctgagcttttggctagaaacggagtcaag

SEQ ID NO: 139845 - DNA, 393 bp, Arabidopsis thaliana
gtttcaggatttcttctcaagaagtatctagtgatgttaccgttcatgtaggagaagcttcgttttcactgcacaagtttccactcatgtcaaaatgtgggtttatcaagaaacttgtgtcggaatcaagcaaagattcagattccactgttatcaagataccagatattccaggaggctctgaagcatttgagctagcggctaagttctgctacggcattaactttgatatgagcacagagaacattgccatgttgcgatgtgcagcggagtatctagagatgacagaggaacactctgtggaaaatctcgttgtaagagccgaagcttacttgaatgaagtagctctcaagagcttatcgagttcgatcacagtcttgcacaaatcagaga

SEQ ID NO: 139846 - DNA, 414 bp, Arabidopsis thaliana
  unsure (1)..(414): unsure at all n locations
cccacgcgtccgcccacgcgtccgtaagagcgtctcaatttcagtgtttcatcgaatatgctgagggtttcgacaatctgagattcttctccttgtgttcatgtccaaaggagattcctttcttcattctccttaccttcttaacaaacccttctctcttattatctaattcgcttttgtagctctatacgcaattagcaaatttggagaaatctcgattatagcaattttcttcagtctccatgtacttttcctctgtattactctaattcaaatgtataagatgtgccatgaacctaccaacatctcttcatcggagtctgattttacattccttgaggaagaccatctcnccttgacgtcacggcggagtttattgctatcgagtgaaagagtctctcaacgtatcgctgc

SEQ ID NO: 139847 - DNA, 426 bp, Arabidopsis thaliana
ctctttctttatatgcatgtttggaagcgtttctacgcgaagagcctttggtacctgacgaaatgtggttctgtccacaatgcaatgaaagaaggcaggcaagcaaaaagcttgatctgtggaggcttcctgaggtcttagtcatacatctaaagagattctcatacagcaggtccatgaagcataagttggaaacatttgttaactttcccattcatgacttagatctaacaaagtatgtagccaacaaaaacctatctcaacctcaactatatgagctctatgccttgaccaaccattatggtggtatgggcagcggacactacactgcacatatcaagcttttggacgacagtacgtggtataacttcgatgatagccatatatcacacataaacgaagatgatgtgaagtcaggtgctgcat

SEQ ID NO: 139848 - DNA, 324 bp, Arabidopsis thaliana
cggacgcgtggggcaattccggatcctttttatggacttgaaaatgaagcgatcacagatattgccgattccggaagggactactacactttctggttcttcactaaattccaatgtcaaaggttattgaatcaatacgtgcatttgaatttccgtgccatcaactactctgcacaagtgtttgtaaatggccacaagacagagcttcccaaagggatgtttcgcagacatacacttgacgtcactgatattctccatcctgagagcaatttacttgctcttattgttcatcccccagatcatcctgggactatacctcccgag

SEQ ID NO: 139849 - DNA, 269 bp, Arabidopsis thaliana
cgtcatccaattctttacaaagagctagatacacacaaactttaacagttatacttatgaaatgaactcatgaattgattatcatcaattctaaactttgtatttattgtttcaacttcagaccacatgaagtcatggagattcatcatcaactcttagtctctctcctcttcgtcctccttcccctatgctcctcccaagaaaacaccagaagcttggccattgatgtcaatggtcgagtcgaaacttctcctatctccgagaaacta

SEQ ID NO: 139850 - DNA, 411 bp, Arabidopsis thaliana
tttgatttaacccatacacacatctctctgttccacgattctcttcctcagcctccacgtcgtctctaaactcagcaaaaaccaatgtcgacggtgagaaaaatcactcttaagagttcggatggcgaaaacttcgaaattgacgaagcggtggcgctagagtcacaaaccatcaaacatatgattgaagatgactgtaccgataatggtatccctctccctaatgtcacaagcaagatcctttcgaaggtgattgagtactgtaagagacatgtcgaagctgctgagaaatccgaaaccacggccgatgctgctgctgctactactaccaccaccgtcgcgtcgggttctagtgatgaagatctcaagacttgggattctgagtttatcaaagttgattagggcactctc

SEQ ID NO: 139851 - DNA, 265 bp, Arabidopsis thaliana
gataatgaagcgtccgttttccatcatacactgggaagcacttgcattgttgctgatagggattagtataaatcacctgcgttctcttcctgaaggagctacaactgtggctgttccaactgctaacggtgcatacatatgtacctttatctttgttactgtcccatctttggcatctgtctacaactagtatgctctaaagagtcactatgacacatgcatttatctccagaacttatttctttatggttatggtgcgatattc

SEQ ID NO: 139852 - DNA, 424 bp, Arabidopsis thaliana
cccacgcgtccgcccacgcgtccggcacggatgggcaaaacaaacaggatgtggagacagctatctccatggtggaagctctagctgtgaagttaactcagaatgaaggtgaattgattcaggagaagtttgaagtgaagaaactaggaaacttcctcaagcagacttcagaagatgcaaagaaactggtaaatcaagaaaagtcattctcttgtgctgagatcgaaactgcaagggccgttgtgctgagacttggagaggcttttgaagaacaagaacggatttctgaagcttctagagctcaggggccggatgtggagaaattggttgaggaagttcaagaggctaggcaaatcaaacggatgcatcacccaacaaaggtactacatcaattcattgcactttaacttcataatttgatgtg

SEQ ID NO: 139853 - DNA, 415 bp, Arabidopsis thaliana
ggtgttcccatggtgaggagcgggcttcatgataattgggatgatgcagagggttattatagctatcagtttggcgagttacttgatggtagatatgaagtcattgcgactcatggaaaaggtgtcttctctactgtggttcgtgctaaagacttgaaagctggaccagctgaacctgaagaggtggcaataaaaattatccgtaacaatgagacgatgcataaagctggaaagattgaggttcaaatattgaagaagctggcatgcgctgaccgagaagacatgcgccactgtgttcgatttctttcaagctttaagtaccgtaatcacctttgcttggtgtttgagtcgctccatttgaatcttcgtgaggtcttgaagaagtttggtcgcaacattggtctccaactctctg

SEQ ID NO: 139854 - DNA, 392 bp, Arabidopsis thaliana
cagagaactcatcaaagacatcaactcttcccaagtctcctgagaaactaaaagctatgaatttcccaatctccacgatcaagattggcgactgtgtcttcgttgccaaaaaccctgatgacattgtggccaaattctattttgcaaagaagaaacttttatgggagtttctcttcggagaaccagtggctaacatgccgaggctgaagagtaagatcgagattcaatggaatgatgtctcatcttttgaagagagtagtaattcacgtgatgaaactggaatcctcaaaatcgagttgaaaaaacgtccaacattcttcacagagactaatccacaggcaggaaaacacactcaatggaaacaattggattacgatttcaccggagatcag

SEQ ID NO: 139855 - DNA, 462 bp, Arabidopsis thaliana
cacaaataaacaccataaactaaacaataaaccatacaaaaaaatatgaaaatcctctcactttcactactcttgctcttggccgctacggtctcccacgtccagtcttcggcatccgttccagggctcatcgaactcctcgaatcgaacaccatctttgggaacgaagccgaactcttagagaaagagggactgtccatcaactaccccaactgcagaagctggcaccttggtgttgagacctctaacatcataaacttcgacacggtgcccgcaaattgcaaagcctatgttgaagactacttgatcacttccaaacagtaccaatacgactccaaaactgtaaacaaagaggcatatttttacgccaaaggacttgccctaaagaacgataccgtcaatgtttggatctttgacctagacgacactctcctctctagtattccctactacgctaaatat

SEQ ID NO: 139856 - DNA, 408 bp, Arabidopsis thaliana
ggaaaattaccagacaagagttcttctttcttctctctgcctgcttctttttcctctcttttctctctctctctctttctttgtgaaaatctagaagaagagaaagctacaaaaatctcaacatcgagtcttgttgggatgtgaaacacatgattttcgaggagtagagagagacagagagaaattaagggaaagagctcacttgtgtgacttgttctgtaagagttttggctacagagcaaccatgctaacttgcgccttctcccaaaatcttatccactaatctcggtaaggaaagtgatgttggcaaaatggtgaagaaaggaagttggttttctgctatcaaaaaggtttttactccacattccaaagagaagctagccaatcaggaaccagagagaaagagtg

SEQ ID NO: 139857 - DNA, 273 bp, Arabidopsis thaliana
gatttctctcctctgctctccaattccatcttcccatggcgatttcggctccagccgcttgttcttcctcctctagaattctctgttcctactcctctccttctccttctctctgtcgcgccatttccagctctggtaaactcaaaaccctaactctctcttcctcagatccatcactcttgaggtctctctccttaagtcgactcaacgccggagctcctgagttcgttcctggtcgaactactcctccgctgcctcaacctccgaggatga

SEQ ID NO: 139858 - DNA, 411 bp, Arabidopsis thaliana
cccacgcgtccgctttctctgtgtctccttcaaatcttcatctctctctccatctctcttcctcctcctcctcctctcaccattttcactctcagatgctggttccatcggagtaaactacggccgaatctccgacgaactcccctccgcattcaaagtactccaactactaaaatcccaaggaatcacgcgagtcaaaatcttcgacgcagacccatcagttctcaaagcattatccggatctggaatcaaagtcaccgtagatctccccaacgagttactcttctccgccgccaaaagaacttccttcgccgtctcatgggtcaaacgcaacgtagcagcttatcatccttcaacacagatcgaatcaatagctgttggtaacgacgtcttcgttgatacacacaacac

SEQ ID NO: 139859 - DNA, 398 bp, Arabidopsis thaliana
cccacgcgtccggtttccagcttcttcttcttcttcacagctttctcgatatttttgagagtttttaaccaaattagacatttttaatcaatttttttttgtgttgagcaagacgaaaagagtctaatccaatcatgggatgtgtacccagaattgaatttggttgttcaagccaaagccttactctttcatggaacttaagagcatggaatttgtgtagattgaacacaatctcccatttccagaaacttccttatcctttggtagcttctactcgaaaacattacaagaacagtttgcttttgaagagatttttagttggtgttggcactgaggaatcatcactgtcagaagatttactagatgaatctctttctcgacctctcactagtgatgag

SEQ ID NO: 139860 - DNA, 423 bp, Arabidopsis thaliana
tcttcttcttcctcttcccctaacattccattccccgtatgggtctcaccacttcctaactcttctctctcttatctcttcttgttttagctatgaagaagcaatctcaattcagatccaatcatacccttctcttctttcatctctgatcattaacaacaacaacaacgactcgggttctgtaaattcagttattggagagaaaatggcgatgttagttgagccaccaaatgggattaagcaacaagggaaacattactactccatgtggcaaacattgttcgaaatcgatacaaagtatgttccgattaaacccattggaagaggagcttatggtgtggtttgttcttctatcaatcgtgagactaatgagagagttgctattaaaaagattcacaatgtgtttgagaatcgtgttgatgc

SEQ ID NO: 139861 - DNA, 411 bp, Arabidopsis thaliana
aggatcttgataatgatgatgaagatgatgatgatgatgatggaggtcgtgaagctgttacagagggaagggttgagaaatacattggtgtaaaagtgaaggtctcgttcactggtcaaggggaaacacaattaatgaaacaattgtctggaggccaaaagactgttgttgcactcgcgttaatctttgcaatccagcgatgtgatcctgcaccattctatctttttgatgagattgatgcagcacttgatccacagtaccgaaccgctgtgggaaacttgattcgtcgtcttgctgatgattatggcacgcagttcatcaccacaactttccgtcccgagcttgtgagagtcgcggataagatatatggagtatttcataagaacagagtgagtattgtgaatgttatct

SEQ ID NO: 139862 - DNA, 409 bp, Arabidopsis thaliana
gttcccgtcttatcgtgtacagtttaggagctcaagttccgaagattgagaaaactgtaagttgtctttcttatgaattatcgatgtttaggtttctcttgtttgtgctacttgggattgagttcttaatatctttgtgttgaattgatgtacaaaacccttttctaggcttcaacactatctaaatgttgatcgaatagttaactataaattgcaggaaagagattatgaagataaggctgagacaaaacccagtttctctcctaaacatgatgatgatgatgatgatattatggagtctgatgttgaactcgacaactctgatgtagttgaaccagacaatgagcctcctcagccgatgggagaccctactgctgaagtgaccgatgaaaatagggatgatgctcag

SEQ ID NO: 139863 - DNA, 247 bp, Arabidopsis thaliana
atctttctttctctcctctctatctttctctcacactcatgggtcttccaacagatttcaaagagcttcagattccaggttacgtactaaaaacactttacgtcatcggtttctttagagacatggtcgatgctctttgtccttacatcggtctaccaagttttcttgagcacaacgagacctctcgatccgacccgacccgactcgctctctccacgtcagcaactcttgccaacgagttaatccc

SEQ ID NO: 139864 - DNA, 423 bp, Arabidopsis thaliana
caagaatcgagaactgaaagatttgtcatttgtctctcaaatatctgtagagagagagagagatgagttcgtctctacctctgaggctacttcttcctcttacaacttctctgatttctcctcctcctcctcctccagattctttccatgctccttcgtcgttcagatcgataaaccctaatttcaaacgccgattgtcttcttcttcctgttgttcttcccagtcgcagcttttctctgggagatgcagatcctattcgcggtgtgttaccatgtgcttaccagaacacatgagaaatcaagagaacacagaaatcttgacagataaagatgaccacattgaatgtgtgcttgaatcggatgaagattctggcctcaggattccgactcaagcacaggctatcgttgaaggatctggttcag

SEQ ID NO: 139865 - DNA, 297 bp, Arabidopsis thaliana
ggaaacgagtgacgttgttgtccagccctacaactcactgttgacgctgaagcggcttacgttaaatgctgattgtgttgttgttcttgacaacactgcattgaacagaattgctgtggagcgtctacatttgactaatcctacttttgctcagaccaattctttggtgtcaactgtgatgtctgctagcacaacaacgttgcgttatcctggatacatgaataatgacttggttggcttgcttgcatctttgatcccaactccaaggtgtcacttcctcatgactggatatacacc

SEQ ID NO: 139866 - DNA, 419 bp, Arabidopsis thaliana
cggacgcgtggggtgaagtttgatttatttagagagataagttaaaaaaaaaatggtcggtatggatttgttcaaatgtgtaatgatgataatggtgttggttgtctcttgtggtgaagctgtttctggagctaagttcgatgagctttatcggtcaagctgggctatggatcattgtgtcaacgaaggcgaagtcacaaaactcaagcttgacaattactctggagctgggtttgaatcaagaagcaaatacttgtttggtaaagtctctatccagattaagcttgttgagggtgattcagcaggaacagtcactgctttctacatgtcttcagatggtccgaaccacaacgaattcgattttgagttcttaaggaacactaccggcgagccttacatagtccagaccaatatctacg

SEQ ID NO: 139867 - DNA, 426 bp, Arabidopsis thaliana
gctgaagaatacgagtcgatagttttggagctgacctataactacgacgtgactgagtacacaaagggcaatgcatatgcacagattgcaataggcacagatgatgtgtacaaaagcggtgaagttattaagatagtcaaccaagagctaggaggaaagatcactagagaagccggacctcttcctggactcggcaccaagattgtctcattccttgatccagatggctggaaaacggttttggtggacaacaaagattttctcaaggaactggaatgagaagagcgatgaatgaaggtcgagatcacaaaaccataataataaaaatgtgatcataaaataaaaggaagacttagagtttgatctaaaataagaagatgtggtttagtttgtgtcgtgctatgtgtgtgtgctcgtttcttttgt

SEQ ID NO: 139868 - DNA, 402 bp, Arabidopsis thaliana
caacaacaaatcttaaacgttttactttgtgctgcactactcaacctcaatggccgcctcaacaatggctctctcctcccctgccttcgccggtaaggccgtcaagctttcccccgcggcatctgaagtccttggaagcggccgtgtgacaatgaggaagactgttgccaagccaaagggcccatcaggcagcccatggtacggatctgaccgtgtcaagtacttgggtccattctctggcgaatcaccgagctaccttaccggagagttccccggagactacggatgggacaccgccggactttcagctgaccccgagacattcgcaaggaaccgtgaactagaagttatccacagcaggtgggccatgctcggagccctaagctgcgtcttccctgagct

SEQ ID NO: 139869 - DNA, 408 bp, Arabidopsis thaliana
cacaaacacatttctgttttctccattgtttcaaaccataaaaaaaaacacagattaaatggaatcgagtagcgttgatgagagtactacaagtacaggttccatctgtgaaaccccggcgataactccggcgaaaaagtcgtcggtaggtaacttatacaggatgggaagcggatcaagcgttgtgttagattcagagaacggcgtagaagctgaatctaggaagcttccgtcgtcaaaatacaaaggtgtggtgccacaaccaaacggaagatggggagctcagatttacgagaaacaccagcgcgtgtggctcgggacattcaacgaagaagacgaagccgctcgtgcctacgacgtcgcggttcacaggttccgtcgccgtgacgccgtcacaaatttcaaaga

SEQ ID NO: 139870 - DNA, 369 bp, Arabidopsis thaliana
cccacgcgtccggctgaaatgaaatcagagcaagagactctggtccacctaggcaatgaaagtatgccccttttcgtcatggatgtgataatcccctgtcagaagttgtcacttcatatatttgaaccacgatatcgactaatggcgacaagaataatggaaggaaatcatcggatgggaatggtatcacttgattcggcgacaggttctccagtggatgttgcttgcgaagttgaaatcacagactgtgatccactcacggatggacgttttgtcctgaagctggaaagccatataacgtgccgcattgtaaaatcttgggatcaagatggatatcgtgttgcacacgttgaatgggtgaaagatata

SEQ ID NO: 139871 - DNA, 228 bp, Arabidopsis thaliana
ggtgtgttgtcctctgacacggcgaccccactaatgcctcacagaaacgttcataaagatccaatgttgctacttacttcagtagtggatacttcacaacgacctgtgtttatgtcgtactaagacctttgtgtgtgacgcttttcgaactttttgtgatcatattcctctgatgttcattcatgatccctcgagtaccttgaagagtcctatttatttgaatttcca

SEQ ID NO: 139872 - DNA, 205 bp, Arabidopsis thaliana
cccacgcgtccgcggacgcgtgggccgctttcttcaccattcatgatcatagattcgtgacctgagaagacactcagtatgagtaagcttcagagtgaggctgttagagaagtcatttcgactatcaagggaaaatctgaggaaaagaatcgtaactttgttgagacagtggatcttcatattggtctgaataactatgatccac

SEQ ID NO: 139873 - DNA, 407 bp, Arabidopsis thaliana
cggacgcgtgggtccgagtcttatccaaagcaaaatcatattttgcttaaatatcttcttctccggctctgtctctgtctctcttcttcccgcggagctttcagtttttgtttggtaacatcgtttctctttctcactaactctgatatcatattatcaatttttccttttcaacacccaaaatcacaatctttcagctttattctgtttttccttgcttgagaattgtgttcgattcatgtctacgaactgaaatcacaaattttgccaacgttttatgattcctggttccgtatttttttttttgtaatcaatagttagctcatttcgaataatcaaactcaattttattgttcatgatttgttatctgggataaaagagagtaatgtgctaattatgtatactc

SEQ ID NO: 139874 - DNA, 311 bp, Arabidopsis thaliana
  unsure (1)..(311): unsure at all n locations
gaccacagtgaaggcaagagtgaacaatgctggtgtggctaacgctctgatccaacatgagtggcgtccaaagtcgttcttcaccgtttctggagaggttgattctaaggcgatcgataagagtgccaaggttgggattgctctcgctctcaagccctgagaagataccaccaaatgggccctgaagtgggtagaataggtgttatttctttttcgtcttcaaatctttggacaaatcgctgtctggtttgctaaacaatctttcatttgttttttttgttcggtgttgggatttgtagaaaatanaagag

SEQ ID NO: 139875 - DNA, 433 bp, Arabidopsis thaliana
gaccatttcttgttctttggacgaccatcggcgacagtgttaagtctagagtcttcttcttcttcggcgtagttttttccccggcttgaaaaatgggtctatccttcggaaagttgttcagcaagctctttgcaaagaaagagatgcgtatcctcatggtgggtctcgatgcagctggtaagactacgatcttgtacaagctcaagcttggagagatcgtgactacgattccaaccattggtttcaatgtggagactgtggaatacaagaacattagctttaccgtgtgggatgtcgggggtcaagacaagattcgtccattgtggaggcactacttccagaacactcagggacttatctttgtggtggacagcaatgatcgtgaccgtgttgtggaagccagagatgagcttcacagaatgttgaacgaaga

SEQ ID NO: 139876 - DNA, 425 bp, Arabidopsis thaliana
cccacgcgtccgattagttttgttcaaacaaattttggtcgtctccactcattgagtttagagaaatctcccagaatcatcaaaaggtctttactttgagattgtcactatgaattgcgcaatcacagaggatgatttgatctctccttacctcatcatcttcaaatcgctcttactcatcccaatctctcactatctcatcttcttcttcctcacaatcttacttttcctctacttcttcctagagattcattttcctaaagcagatcctatctctcttaccttcaatccaaactctgacttctgcaagtttattgtctccaagtgtcgtctccttcatggacgatactttcctacgttctggctttcaagccctcatcttcaaacagctttccttaccctttttggaaagtctcctcctttct

SEQ ID NO: 139877 - DNA, 418 bp, Arabidopsis thaliana
cccacgcgtccgcaactttccagtttcttaccattcatcaacaaccacatcatcagtacacagagactaatcaagaaaagccagcatcttcggagttggtgggagagagacagatatggagaggagaaagattgtgatgtgtggtgttttatttcttcttggtttattatcagctgttactgccttcgtcgctgaagctactcgaatcaagagatctcaggtcacggttaccgtttcggattcaatcacaaaatgcacttatccaagaagtccagctttcaatctcggcttcacttcagctcgcttgctgatgatggctcagataatactcagtgtctcaagcggttgtttctgttgtacaaaaggtcctgctccttcaaagtccaattggattaccgccttaatctgctttgttgtt

SEQ ID NO: 139878 - DNA, 427 bp, Arabidopsis thaliana
ggcgaggaggcgacgttcatcggcggcggagagtttgaaacggcggaacgacggatacgagtcactgtgtcaagtcgtacaacaagattcagatcggagactcatcaccattttcgtaatcttcttcattgtgattcccgccgtttcgattgctgtgtacaaagtcaaattcgctgatcgagtcatccaaacggaatcatcaatacgtcaaaagggaatcgttaaaactgatattaatttccaagaaatcctcactgaacattccaaggcttcagagaattcaactaggcactatgattatccagtgttagcttacattactccatggaactctaaaggctatgatatggcaaagatattcaactcaaagtttacacatttatcgccggtatggtacgacctgaagagccaagggtctggattggtt

SEQ ID NO: 139879 - DNA, 425 bp, Arabidopsis thaliana
caagtttcatagtcactaacctaaaagaattaatggaggaaactcggaggaggtttgtcatatcctctgttctaagtgtttctttgatctacttatgtctttcgacatgtcacgtttccgccttcgacttcggtagaaggcagctccggtttaatactgatggtcggttcaagatactgcaagtgtcagatatgcactacggttttggcaaagagacgcaatgctcagacgtttcacctgcagaatttccttactgctccgatctcaatactacctcctttttacagcgaactatcgcttccgagaagcccgatctcatcgtcttctctggagacaatgtatatggattgtgcgagacaagtgacgtggcaaaatcgatggacatggcatttgctcctgcgatcgaatcggggattccatgggtg

SEQ ID NO: 139880 - DNA, 425 bp, Arabidopsis thaliana
ggttttgcgattggtaacggtttaaccaacccggagatccaatatggtgcgtatggggattatgcactgcaaatgaagttgatttcagagtctgaccacgagagcctcaagcaagattacgttgagtgtcaaaatataaccaaaaaatgcagtaatttcaataaaaagctctttcttctttattttcgttagatacatattgttcgagttaaaagataagaaacttatattttgttaatatcaggtcttggtggtggtttagtttgtgattctgctgttgaagtttgcaccagtatcttcaacaagatagtggcaaaaaaaagtggcctaaatgtaagcataaaaaaccttaaactgattgtgttttctcaataaaatttcttttgtttacgagatttcctcgatttgtttgaagtattatgaca

SEQ ID NO: 139881 - DNA, 386 bp, Arabidopsis thaliana
actctgagtacacgacgttgcgtaagagttcgccgattctccgaaaacccgttgaccactgtcatggcttcacgttctgcttctaggcttcgttctctcgcatctgcctgttctggaggtgctgaagacggtggtggaacctctaatggctccctatcagcctctgctactgcaactgaagatgatgaattggctataggcactggatatcgtctgcctccacctgagatcagagatattgtagatgctccaccagtcccggctttatcattttcaccacatagggataagatattgtttctcaagcggagagcattgcctccgctcgcagatttagctagaccagaggagaagcttgctggtgttcgaattgatggatactgcaa

SEQ ID NO: 139882 - DNA, 437 bp, Arabidopsis thaliana
caagtgggtcgggtcaaaccatggttgattcgggttctgaatttactcacttagtcgacgtggcgtatgataaagtcaaagaagaaatagtgaggcttgtgggatcaagattaaagaaaggttacgtgtacggttcgacagctgacatgtgttttgatggtaaccattcgatggagatcggacggttgataggcgatcttgtgtttgagtttgggagaggtgttgagatactcgttgagaaacaaagccttttggttaacgtaggaggtgggattcactgtgttggaatcggacggtcaagcatgcttggtgcagctagtaatataatcgggaacgttcatcagcaaaatctttgggttgagtttgatgtgaccaataggagagttggttttagtaaagctgagtgtagattattgccgtgagtaggtgaatattct

SEQ ID NO: 139883 - DNA, 328 bp, Arabidopsis thaliana
aaaactcagaagaaagtggagtgatcatataacgacaatgaagaatctctttaacttgttccttatgtttttctttgcaatgccagattctttcactcgtccgatgaatccaaccaatttcagcgagagttgcgaagacgggagtggagaaaccggttcaagctttggcatagggttcgatttggttcttgattttggtttataccggaatagctgccccgaagcagagtctatcgtctactcgtgggtggaaaccacggtgttagaggatccaagaatggctgcttctcttctccgtcttcatttccacgactgttttgtcaatgga

SEQ ID NO: 139884 - DNA, 415 bp, Arabidopsis thaliana
accacgcatccgcaggaaatcatgaagtagattacatgccatacatgggggaggtgacacctttcaggaattaccttcagcgttacactacgccttacttagcctcaaaaagtagcagtcctctttggtacgctgttaggcgtgcatctgctcatatcattgtcctctccagctattcgccttttgtgaagtataccccgcaatggcactggcttagtgaagagcttacaagagttgatagggagaaaacaccttggctaattgttttgatgcacgtcccaatatacaacagtaatgaagcacatttcatggagggtgaaagcatgcgagcagcttttgaggagtggtttgtccaacacaaagttgatgtaatctttgctgggcatgttcatgcctacgagagatcgtaccgaat

SEQ ID NO: 139885 - DNA, 140 bp, Arabidopsis thaliana
ggcgatggcgttatcacgactttcttcacgatccaacactttcctaaagcctgcgattaccgccttgccctcctcgatctgccgtcatgtttcgacacactcatcagcgatgacagtcgaaaccgccgtccctttcacat

SEQ ID NO: 139886 - DNA, 447 bp, Arabidopsis thaliana
gacaagccaagccttatgacattccgtgaggtagagacagtatttcatgaatttggacatgctcttcagcacatgcttacgaagcaggatgaggggctagttgctggtatccgaaatatcgagtgggacgcggttgaattaccatcacagtttatggagaattggtgctaccacagggacactttaatgagcattgctaagcattacgaaacaggagaaacactcccagaggaagtatacaagaaactcctggccgcaagaacattccgtgcagggtcctttagtcttcgtcagttgaaatttgccagtgttgatcttgagctgcacacaaaatacgtaccaggaggaccagagtccatctatgacgtagatcaaagggtatcagtaaaaacccaagttatccctccacttcctgaggatagatttctctgtagcttcagtcacatc

SEQ ID NO: 139887 - DNA, 444 bp, Arabidopsis thaliana
  unsure (1)..(444): unsure at all n locations
ggaatgttgatgttattgggaagcctgatttcgcgtatcagagaggatcgtctccgatggcttctacgcttcatggtgcttcgattcttcttagattgtcaggaacttgggattggtttgttagtattactgttgatgattatcctctcgttactcaagatgagcttcttcatattatgtcacatttgcctaaggacttgaattttgtgaaccacactagctacattggttggaaagagtccaggaagttgaagccagttattgttgatccagggctctatcttgtggagaaaaccgatatgtttttcgcttcgcagaaacgagagttgcctaaggctttcaagttattctcaggtccatctttctccatcttaagccggaatttcatggagcactgtgtcttangcactgacaacttcnctcggactctactcatgtacttgt

SEQ ID NO: 139888 - DNA, 277 bp, Arabidopsis thaliana
ttaaagagaaccgtttggaccagatcagcttgcctcttgttcatacgtcttccatggcttccggtgatgttcttcctagattcttcactgtcttcctctcccattgcagctccgagtccatggtgataccaatgtcttactacaatcttttaccacgtccgttgcccaatactgcgattctcatcggaactggtggaagattttggtaagtagcaatgaccagcacgcaggagcaagtgtattttgaacaaggctggggaaatttcgttgctgataa

SEQ ID NO: 139889 - DNA, 263 bp, Arabidopsis thaliana
tttaattcttcgatctaaagctctcttcttcttcttcaaacggagctctcttcttcttcatcaacctttgttcttcgatctctgtcttttttttttttatctcttcttcgattgtaagaaaagtttcagctcaaagaaatctgggttaaagtgtgtttgaaattgtggatcgattcagagattcacgataccaataggtacttgtgaatttctaagtttttgggtttttatctttccccttgttgtatatgatgtgttagaat

SEQ ID NO: 139890 - DNA, 414 bp, Arabidopsis thaliana
cccacgcgtccgcgctttgacaatgcagtttgaaggagagaagaaaaacgtatccgaagttgcagacgtaaccctcaagcaagaagatgaacaacaagaacgtagatcttattcgacgccgtttagggaagagagagacacctttggcccgatccaagttccttccgataaattatggggagcacagacgcagagatcgcttcagaacttcgagattggtggtgaccgcgagcgaatgcccgaaccaatcgtccgagcttttggtgtcttgaagaaatgtgctgccaaggttaacatggagtatggtcttgatccaatgattggggaagccataatggaagctgcacaagaagtagcagaaggaaagctcaatgatcatttccctcttgttgtatggcaaactggtagtgggac

SEQ ID NO: 139891 - DNA, 372 bp, Arabidopsis thaliana
gtgatctcgattttgcaatatctgacgtttactgtgcatgattgttcactgctccgccgtcaatttagattgataaagtttgatacttgtgttgcaatcattgtggaattcaaactcaatgtcactttccgcttttgagcattgttgtctgttttcgcgtatccaaaatctgactagtatctagtgtttttattatattttcgtgtcccttacttttggcttatccttatctggtttctctgttttattttaattttcgtttggataattaagaccaaaatagtcggtaatgtatcgctatagctaggaataattttatcatcaattagtgtgttaatccggcttaatggtttctaagtcatcacatagtgt

SEQ ID NO: 139892 - DNA, 371 bp, Arabidopsis thaliana
ccgtaacatcatggagaatccagcttggtacactcaatacactccttatcaagctgagatctctcaaggtcgtctcgaatcgctcctcaatttccagaccgtgatcacagatctcacgggtcttcctatgtccaatgcgtcgcttctggatgaaggcactgctgctgcggaggcaatggccatgtgtaacaacattcttaagggtaaaaagaagacctttgtcattgctagtaactgtcaccctcagactattgatgtttgtaagactagagctgatgggtttgatttgaaagttgtcacctctgatcttaaggatatagattacagctctggtgatgtttgtggggttcttgttcagtatcctggtactg

SEQ ID NO: 139893 - DNA, 244 bp, Arabidopsis thaliana
ttcccttgctgctgccatctttgtgccgttctacgctggattcgacattgctaggtatctgtggggatacactatctcgagaagggatgctgcttcgcttgagttggtcgattggatcatgaagcggcctgagtgggatataatgaggggaaaagatcatttccttgttgcgggtatgataacgtgggattttaggagattgtctgaagacgaaactgattggggcaacaagcttcacttctta

SEQ ID NO: 139894 - DNA, 427 bp, Arabidopsis thaliana
ggaaggtctaaagattcaatctttggtcatttatccgatcaaatcttgccgtggaatctctgttcctcaggctaccgttactcatactggttttcagtgggaccggtattggttagttgttaactataaaggaagagcatacactcaaagagttgagccaacccttgctcttgttgaatcggagttgcctaaggaagccttcttggaagattgggagccaacaaatgactcattgttggtgataagagctcctggtatgagtccgttaaagataccgttgactaggccaagctcggtagcagaaggtgtgtcgatgtgggaatggtctggctctgcttttgatgaaggagaagaagctgcgaaatggttttcagattatcttggaaaacaaagccgtttggttcggtttaataaagatactgaaact

SEQ ID NO: 139895 - DNA, 413 bp, Arabidopsis thaliana
acggacgcgtccgcccacgcgtccggggtcacagtttcacagacacgcggctcctcgatggttgtcttccgccgacagccgccgcgtgtatgtccttcccatacggaatctgccacgttgcgtttgtataatctgcctgactagggctttagcagtgtataagagacgagacgagacgcgattcaccggagagtcaaagaggcaaggaggagaaagccaatgggacatgccacgtttacgtcggaagggcagaatatggagtcgtttcgactcttgagtggccacaaaatcccagccgttggactcggcacgtggcgatctgggtctcaagccgcccacgccgttgtcactgcaatcgtcgagggtggctataggcacatagatacagcttgggagtatggtgatcagagaga

SEQ ID NO: 139896 - DNA, 284 bp, Arabidopsis thaliana
aaggacgcgtgggcaaccatcaatgatggcccacgctgtttgatgctaaaatgtcccgacccttcttgtcctgctgctattggtcgagatatgatcgataagttggcttctaaggaagacaaggagaagtattagagatattttcttagatcttatgtcgaagtcaacagagagatgaagtggggtcctgccccaggatgtgaacatgcaattgattttgctggtgggaccgaaagttatgatgtttcgtgcttgtgttcgcataacttttgctggaattgcac

SEQ ID NO: 139897 - DNA, 353 bp, Arabidopsis thaliana
ccggttttgaagtgatatgggaaaaggatctggccaaggactcgccggtcccatggtacttacctcttgacaaaaatcatttctcactcagtagcttccgccttacagctgttggacgattcataaccaaaaacatggtcaagatccttgaatacataagacttgcacctcaaggaagccaaagggtctcaaatttcctggagcatgctgcggaaggattagtcgacggtggaaggagagagattttcacgccaatgtatttcttcttggcccggaagccagagtaagcggatgagagatggcgatggtcatcgtaggtcgaatgaagtgacacaatttctcaatttgcagtc

SEQ ID NO: 139898 - DNA, 268 bp, Arabidopsis thaliana
ccacgcgtacggatactttcatttgagatgtacgaaggagtttcgtgagaagatcatgacggattacttcacttacttagcgaaatcagcggagaagataatgagccatcgcgagaatctcaagatctagacttataaccaagaccggtctaaatgggaatctgctagcttcgagcatcacacgacctttgagacgttagctgttgagccagacctaaagaagactttgattgacgatcttgatgctttctctaaaggaaaagacttc

SEQ ID NO: 139899 - DNA, 437 bp, Arabidopsis thaliana
ataccatcttcccatggcgatttcggctccagccgcttgttcttcctcctctagaattctctgttcctactccccaaatcttctccttctctctgtcccgccatttccacctctggtaaactcaaaaccctaactctctcttcctccttcaccgtccgcgccgctcgtggaaagttcgagaggaagaagcctcatgtcaacatcggaaccatcggtcatgttgaccatgggaaaactactttaaccgcagctctaaccatggctctcgcttccattggttccagcgtcgctaaaaagtacgacgagattgacgctgcgccggaggagagagctcgtggtatcacaatcaacactgctactgttgagtacgagactgagaatcgtcactacgctcacgttgattgtcctggtcacgctgattacgttaagaatatgat

SEQ ID NO: 139900 - DNA, 271 bp, Arabidopsis thaliana
ttccttcgttccgatttgagtctattgctgacggtctaccagagacagacatggatgccacgcaggacatcacagctctttgcgagtccatcatgaataactgtctcgctccgttcagagagcatctccagcggatgaacgctggagataatgttccgccggtaagctgtattgtgtctcacggttgtatgagctttactcttgatgttgcggaggagcttggagtcccggaggttcttttttggacaagcagtggctgtgggttcctggc

SEQ ID NO: 139901 - DNA, 425 bp, Arabidopsis thaliana
cacacgcgtccgcccacgcgtccgcaaaattgttcttcttcggcaagattcctcgattttctccgtgttctgtaatttccgatagattttgacaactctctttgattgtttccctttagctttttatttttatctgcctttttttttttttgttgttgttccggttctattcgtttccttttgttaccttgtttttggttttgatctcaaatcctgctctgctctactatcttcaattcgattcttcatccgaacgaagaagacacaaattggagcttcactggacgttgatgataaagcatgaatcacggagggaacactcaggccgtagcaccaatggaccctaattccattgagaatcgatatggtgttgatggaagccaaacacagaaatattcatatcaatactcaactgggtctgaaag

SEQ ID NO: 139902 - DNA, 428 bp, Arabidopsis thaliana
gaaagcaatcggagttgattacgtcgacgagagtgaagttctcactctcgccgacgaagataatcacatcaacaaacataatttcaaaatcccttttgtttgtggatgtaggaatctcggtgaagctttaaggcggatccgtgaaggagccgccatgataagaaccaaaggtgaggctggaactggtaacgttgttgaagccgttaggcacgtgaggagtgtgaacggagctattcggttacttagaagcatggacgatgacgaggttttcacttacgcgaaaaagatcgctgcgccgtatgatttggttgtgcagactaaggagcttgggaggttaccggtggttcagttcgctgctggaggagtggcgacgccggcggatgcggcgttgatgatgcagttgggatgtgatggagtgtttgttgggt

SEQ ID NO: 139903 - DNA, 233 bp, Arabidopsis thaliana
tttgtttttgatttgcttaacacagaaatatctacaatgaaactgattaaacatccaaatgtggttgaaatcattgacgttatggctagcaaaacgaagatctatatcgttcttgagcttgtcaatggaggtgaactcattgagaaaatcgcgcaacaagggacgcttaaggaggatgaagctcggagatattttcagcaactcatcaatgctgtggattactgccacagtcc

SEQ ID NO: 139904 - DNA, 407 bp, Arabidopsis thaliana
catctcactcttctgaagcactcaaagagtaaagtttctctgcatttcagcttctctctctcttctctctgtagaaatggcgggtcggatccaatcccaccagctaccaaatggactctacgtatcgggaaagcttgagcaaccaaaagagcgaccaccgacaatggcggctcgagctgtgccttacaccggaggcgacatcaagaaatccggcgagctcggaaggatgttcgacatctccgtcgtcgattcagcttcttttcaaggaccaccgccgttaatcgtcggtggtaatagcagcggaggtacgtcaaggcttcaggcgccgccacgtgtctccggttcttcttcaaaccctaacagtggatccgttcgatctggtcccaactctggttcggttaagaaat

SEQ ID NO: 139905 - DNA, 433 bp, Arabidopsis thaliana
cgatgatcacttgtttcctcgaggtgagactacgaagatgccattgagctggcctcagagaaagagcatcattttggatgtggctaaagggttggcttatttgcattacggtgtgaaacccgctatttatcaccgggatattaaaggtacgaacatattgttagatgtcgatatgagagcgagagttgcggatttcggtttagctaaacagagtagagaaggagagtctcatctcactaccagagttgcgggaacacacggttacttggctccagagtatgccctctatggtcaattaaccgagaaaagcgatgtgtatagcttcggggttgttatattggagatcatgtgtggaaggaaagctcttgatctgtctacttctggatcaccaaacacttttctgatcacagattgggcttggtcattggtaaaa

SEQ ID NO: 139906 - DNA, 412 bp, Arabidopsis thaliana
cacctcctttatcgagagcttcagttttagagcaacaatgtctctatttctgaagcccttcctcttcctatacgacaccactcttagtcttctcttacttctgttcaatggatggagtcttgaggatacagcagcagcccaaaagaggcgtgaagcagacaaaaatgctgcagaaactgaatggatccaactccaatacttgtggaccaaaacaaggagtgttgtactacttcccgttttcaagggtttggtggttatgtgtttggttctatccattatagtgttcttcgagagtttttacatgaactttgtgatactcttcgtcaagttatttaaacgtaaaccccataaagtgtacaaatgggaggccatgcaagaagatgttgaggttggacccgataactacccaatg

SEQ ID NO: 139907 - DNA, 431 bp, Arabidopsis thaliana
ccacgcgaccgcagacgcgtccgcccacgcgtccgcccacgcgtccgcccacgcgtccgcccacgcgtccgcaagaccttgcgctagaagaacagtttcggctttgttttgttcaattctcacctcaccccggacagagtccaaaacaacggtttatttcttgcgtttgtcgggaaatcagagttgagtataataaacacccttcacgacattctttgcttgtccaccttggtatctgaaattgggggactcttattataaaagatatgatgatttgttactctccaattacaacatgttctacgaatgctatcagtatcaagaggcatttaggctctcgcctctacggcgttgtggctcacggatcatctaaattctcctgctacagtcttttatcaggactttcaagaagacattataccggttttcgt

SEQ ID NO: 139908 - DNA, 127 bp, Arabidopsis thaliana
gataaattatgccatatatctgagcgattttggagcatcgccgaagctaatgaggaattggaggtttctgtatatcggataacacttgttgttctctcgctcgattcatcccaaagcaagattcttg

SEQ ID NO: 139909 - DNA, 209 bp, Arabidopsis thaliana
aaataaatcaatgtgctagcttaaagatgcagatgcaccattcaatcatagtctcgcttgaagttagtcagctgatgatgcttacaactacaacatttcagaaaatgactacgtgtctgaagtcactcatcttcttacaagattcaggtcttgccatcctctctctaatgttccatcgagggagttctgaggatgcagctgatagctct

SEQ ID NO: 139910 - DNA, 304 bp, Arabidopsis thaliana
gtggaagagtgcaagaaggagtaccccaatgccttcattaggatcatcggattcgacaacacccgtcaagtccagtgcatcagtttcattgcctacaagccaccaagcttcaccggttaatttccctttgcttttgtgtaaacctcaaaactttatcccccatctttgattttatcccttgtttttctgcttttttcttctttcttgggttttaatttccggacttaacgtttgttttccggtttgcgagacatattctatcggattctcaactgtctgatgaaataaatatgtaatgttctat

SEQ ID NO: 139911 - DNA, 299 bp, Arabidopsis thaliana
gctcaaccggctccggtgacggcagtatcagatggtccgaagaagactgttgcgaggccgtaggctaggaagcttgccagacaacacaatgctgatattgaaacccttgctggaactggaccattcggtaggattacggcttctgatgtggagacagcggttggcattgctccgtccaaatcctccatcgcaccaacgcctcctcctccacctccggtgaccgctatagcaaccaccactaaattgccacctctggtacgtgaatcaagcattgttccgttcacaacagtgcaaactgc

SEQ ID NO: 139912 - DNA, 398 bp, Arabidopsis thaliana
cggacgcgtgggctctcaccgccttcatttcctcgatctccgtcttcctccttctccgtctgtcgcagagcatcgctcgaattagggtttctgctgagagaagatgagggaaattattagcattcatatcggacaagccgggatccaagtcggaaattcctgctgggagctttactgtctcgaacatggaatccagcccgacggaatgatgccgagtgatactacagttggtgttgcacacgatgcgttcaatactttctttagcgagactggagctgggaagcatgttcctagggctgtcttcgttgatctcgagcctaccgttatcgacgaagttcgtactggtacttaccgtcaacttttccatccagagcaactcatttctgggaaagaagatg

SEQ ID NO: 139913 - DNA, 380 bp, Arabidopsis thaliana
gaaaattattaacaaggtaaatctctaaccaatatgtatgcataactaaaagtctaaaactatgtgatgtatgcataactggaactatgtttttgaaccctgcgtatttagtgtctgctaaattctaccgatttgacacaatgggatagggtaaatgaataaaagtgcaaagtatagttacttatctatgacttatctggtgccattacttataattttaaataattggtagtcccacacatgaatccttatgctttcttacaccaataaccttcattttcttaaagctgacacatatttctctcttgacttctattgctaactgccaattgcttctttgctacaattctaaatatgcttaaaatggtatcacttttctc

SEQ ID NO: 139914 - DNA, 429 bp, Arabidopsis thaliana
ccacgcgaccgcagacgcgtgggttttttaaaagagtaataagaaaaacaattatctttgaactctctctatctctctctctctctctgcgatctatgcctgaagtggaagtggataacagcaacgagaagccatctgagattaacagtttccatcacatgatcataagtagtagtaaaaatgtgttgaaaatgggagaagttgaggtgagcaagaagaggaaatttcagacagatcaatctgatgagttatcgttattacctctgtcaaaacacacttgttttgccaatgttgcttgttcagagaatacaaatggtaactcggagattgatacagagtattcaatgtcttcttatgtgaactcaacaacttctatggagtgtaacaatgatatagagatgaaagaggaatcatcctggatcatgcggt

SEQ ID NO: 139915 - DNA, 321 bp, Arabidopsis thaliana
ccacgcgaccgtgattttgctagtacaaaaactctcatagttgtacagtttctacttatggggtttgctgagactaaaaggtatatggattttgtctctccgggatcacaagccaaagaaggatcgtttttctttggacttgaagcagcactcgaggggctcgagcctggatatcccggaggaccgcttttaaacccattaggccttgctaaggatgttcaaaatgctcatgactggaagcttaaggagatcaagaacggtcgtctagcgatgatggcgatgctcgggttctttgttcaagcctctgtgactcacactggc

SEQ ID NO: 139916 - DNA, 239 bp, Arabidopsis thaliana
cacgcgtccgcaagaagaagctgtctgcgctgcagagtcaggagtataagggaggtgatgaatccaagctagacaagactaaaacttccataaccagactgcaatcactcatcattgtttcttcagaagctgttttaaccacgtctaatgccattctccgcctccgggacactgaccttgtccctcagcttgttgaactctgccacggattaatgtacatgtggaagtcaatgcacgag

SEQ ID NO: 139917 - DNA, 218 bp, Arabidopsis thaliana
cacgtttctaagcgtcgcaagattcgttgaggcactactccgccggagattctcctccgctggtctctccttacaaaccctatccatcgactccgaaaccaccatacagttctggggagcaccaccgtcttcatcatcggtaaatacagaagaaccgtcgctcctcctcctccatggttttgggccttccgctgtatggcaatggagccatcaggtca

SEQ ID NO: 139918 - DNA, 274 bp, Arabidopsis thaliana
gcggtggccatttccttttagatctctttgcaaagtttcgatatttcatcttttgcaaagaactacctgtggtaagttcccaaattcataagaaactttttattggtttcatgtaaaacaaaatgtttattgttttgatatatacaggtgttgaaggcttttgtgcatggagatgggaacttgttgaacaactatcctgagctacaaaaagctcttgtttgggtctatttccattctaatgtcaatgagttcaacaaagtcgagtgttggggtc

SEQ ID NO: 139919 - DNA, 193 bp, Arabidopsis thaliana
attacctcgttctaccgtgtatttggtcatgacccgacaggatttggttgcctgttgattaaaaaatcagttatgggaagccttcagagtcaatcagggaaaactggatcaggtataatgaagatcacgcctgaatatccgttatatctcactgattcagtacatggtcttgacggattggttggttttgaag

SEQ ID NO: 139920 - DNA, 213 bp, Arabidopsis thaliana
cataaagagacaccacaactttctttcttcatcagtcacttctatcaacgccaaatttgcagactttcccaggaccaaaattatattaaaaaaaagttccttttttctgatcaaattgtgaaattcgcttgcttgctttcttcacagtcaattaattctctaacaaaacattcttcgatcgttcgttttcatcgtctatgcttctctgatcag

SEQ ID NO: 139921 - DNA, 443 bp, Arabidopsis thaliana
aaggaaacaaaaaatggcttctctttggctgaagttaatctccataagtctaatatacctcaatgttatcgctaaatcaactccgcatcaagaaagcgaattcgaatgtgtctctatagacaaacaatctgcactacaacatcctctaatgaagaatcatcgcatacagactagaccaagtcgagagcttctatcaatactctctacgtccaatggtaacatactcagagagattgatttgaagggatcagaagaatgtccaaagggacaagtaccgattcataaacaaaaaaccaacttaaccaatagtcttattcatccccaacaaattcatagagcaggccgtatcctgaaacaaagtcgcagggataaaaagaagaaaaagaacaatcgacgtaaaaaaaataaaaataaactcatgattccttctgcattgttgtctc

SEQ ID NO: 139922 - DNA, 217 bp, Arabidopsis thaliana
atctgagtcgtcaactctggaaagggtagcagcagagtcattaacaaacaaagtccttgatagaggactaatggagtatggatgtccacattacagaacaaggtgttgcattagatctccttgctgtaatgagatctttggttgccatcactgtcattataaggcgaagaacaacataaatgtacatcagaagcagaggcatgatattcctcgccac

SEQ ID NO: 139923 - DNA, 324 bp, Arabidopsis thaliana
accgaagttgagcctatcggtactggttgagattattctccggcggagacaatggaatcttccgtcgctccgtttcctcaccgacgcacgcatctgccgaatcgaaattatcgctctttgctttagcacttttgctcgagtttcgatcgggaacctcagatttctcttgccacactggcagttctctaggagctggtcttacgaacagaaattgctcaagagtctccgggagaaacttgcgaaccgccggagaatttatcaattacggaatcaagagtcaatggagtgtctggtgattcaagtggtgagaaggtggaaacaatt

SEQ ID NO: 139924 - DNA, 357 bp, Arabidopsis thaliana
gtgaaagtaaataatgtcttaagagggctaaatggggattagtagatgaatatgtagaatgattagtgagattagtacacttggtaaaggtctctcttccataaccaactttatcttatgattcgaatcattttatcttcatcaagaatttgacattatagctggcttaaaattggcttctatttgttctgtctctttccccggtttatagtgccttttgtttctttctctcttttttgtttttgttttgtttttgagtataatttttcttggtagtgttgaagaaagatgaacaatttgttgtcatgtaattatcaactctcccaaatggagccactgtggggataaagttttttg

SEQ ID NO: 139925 - DNA, 250 bp, Arabidopsis thaliana
cgtggacgaagcgtgagccgaagcatgagcagaagcaggcgcaggagcagaagtcccaaggcaaagtcttcacgtaggtcccctgcaaaatctacatcaagtgcatggtcctcacggcttctctcttcccctttttgtgcttcgggagtggctttcgccgaaacacacttgccatattctatggatctcttgcgggtattccttttgggacaatggtggttgtgtttgctaattgggggttcagttcctt

SEQ ID NO: 139926 - DNA, 424 bp, Arabidopsis thaliana
acgcgtccgacgttatggtttagcgattggtgcaacagtggctccgtttgtccgtgtcctagtctttatctgcttacctgttgcatggccaataagcaagttgctggactttctattgggtcatcgtcgtgcagcgctttttcgaagagctgagctgaaaacacttgtggattttcatggaaatgaggctggaaagggtggggagttgactcatgacgaaacgacaatcattgcaggagctcttgaactctctgagaaaatggtcaaagatgcaatgacaccaatatcggatatctttgtgattgatatcaatgccaaactagacagagacttgatgaacttgattcttgagaaagggcatagcagagttccagtatactatgagcagccaactaacataatcggccttgttctggtgaagaac

SEQ ID NO: 139927 - DNA, 415 bp, Arabidopsis thaliana
cactgcgtgcgttatacgaacttctacatcatttctcttttctctcatcgctcggtgaattcgaggatcctcgagctttttgatcggagactttttctctcatcgtcgttgtttgaattctccggctgagagatgcttgcttgacgacgaatctccaccgatcttttaccttttcgcacaacaagtaagagaaggatgtcgactccagcgaggaagagattgatgagggatttcaagaggttgcagcaagacccacctgcaggaattagtggtgctccacaagacaacaatatcatgttgtggaatgctgttatattcgggcctgatgataccccttgggatggaggtactttcaaattgtcactgcagttttcggaagattatccaaataaaccaccaacagtgcggtttgttt

SEQ ID NO: 139928 - DNA, 439 bp, Arabidopsis thaliana
acgcgtccgcaaatggccgaggaaaacaacgttctagtgatgtcaaaaaccctgagcgatacctcttgaatcctgaaaacccttactttgtgcaagcggtgacaaaaaggaacgacgttctgtatgtgagccgaccggtggttcagagctatcgcttgaagtttggtcccgttaagtccaccattacctatcttcttcccggggagaaaaaagaggaaggcgagaatagaatctataacgggaaaccttgtttcagtggctggtcggttctatgtcggaggcacaatctgaatatcggagactccgtggtttgtgaacttgaacgctccggtggtgtggttaccgctgtaagagtgcatttcgtcaagaaagactagaccaatcctctctagtaacaacaatatgttatttacaactttctgtaacaatgctaaatgtg

SEQ ID NO: 139929 - DNA, 443 bp, Arabidopsis thaliana
gcattttgtacatccctgggatgggtcctcgtaacaatgaagatgttacaaacccgaaaacaaagaacattcgtctctacgtgaagcgtgtgtttatctctgacgattttgatggagagcttttcccgagatatctgagctttgtgaagggagttgtggactctgatgatcttcctcttaatgtttctcgtgaaattctccaagaaagcagaattgtaagaatcatgagaaagaggctcattagaaaaacctttgacatgatacaagaaatctctgagagtgaaaacaaagaggattacaagaaattctgggagaactttggtagattccttaaattgggttgtattgaagacaccggtaaccacaagcgtatcacaccgctacttagattcttcagttccaagaatgaagaggaattgacaagcttggatgattatatcgag

SEQ ID NO: 139930 - DNA, 447 bp, Arabidopsis thaliana
  unsure (1)..(447): unsure at all n locations
gggtccagccacgcgtccgcacacacgtccggcgaaaaccgcagtttcagtggaagaaagcgttgttcgtgtacaagctattgcagatgctgctcgtagattcaacccagacattatcgtcctctgccacggaggtccgatatcgggtccagaagaggcagagtttgtgttgaagagaacacagggttgtgtccatggcttctacggagcatcaagcatggaaaggctacctgtagaacaagcaataacaaacactgttcaaaaatacaagtccatatcgatcaagtgaagtcaaaataataagttcacttagaaacctttatctttggtgtttctagtatatttgcatgtgttgtggcctatgggtgtggatgtntccttttgttgcatggttttttttttctggtcatctttgattgcctctgcaggatcttatatgatctctag

SEQ ID NO: 139931 - DNA, 421 bp, Arabidopsis thaliana
atcagatgtagagaaaggcttacctccaaaaaaggagacaatactcaaagttggcatgtctcaaatgcaaaaacagtactacaaggctttactgcagaaggatcttgaagtggttaatggtggtggagaacgcaaacgtctgttgaacatagcaatgcaattgcggaaatgctgcaatcacccttatctcttccagggtgcggagcctggtcccccatatactacaggagatcaccttgtaacaaacgcaggtaagatggttctcttagataaattgctacctaagttgaaggatcgagattcaagggttctgatatttctcagatgacaaggcttttggatattctcgaggattacctaatgtatcgtggttaccagtactgccgtattgatggaaatactggtggtgacgaacgagatg

SEQ ID NO: 139932 - DNA, 441 bp, Arabidopsis thaliana
ccgatggaggctaagttactcaaacccgcgttttacaattccccaaacctcaatcttacgaattcttcaagactcatctcgcgattatcaatctggaacgataaatcaaaagttggactatcttctgggtctctcttcctccgtctctccgcagcttctccgatccgatactctagggggctactaagggtagatgagagtgagtatttgaaacttgaaagcattagacactctttgattcgtcaagaggacagtattatctttaatcttcttgaacgagctcagtatcgctacaacgctgatacttatgacgaggatgcctttactatggaagggtttcaaggatctttagttgagtttatggtcagagaaactgaaaagcttcacgcaaaggtggacaggtacaagagtcctgatgagcatccctttttcccacaatgc

SEQ ID NO: 139933 - DNA, 439 bp, Arabidopsis thaliana
ggaacatctttctgttcctcgtttcagcgatgtagcagtagtacccagtggagtggagcaatggcttgccttagccgaatcttccttattctgatgattactatgtcttcttcgtctcctcctttctgttccggtggaagtcggaaggagctccgagataaagaaattacgagtaagagtgatgatacacaggcgagttatgttttaggatctaaatttgtggacccgacacgtgttcttcaactttcatggctaccaaggtcaggtacttctgattgatatctggttctaccatcatggatcatttctgcacataggaatgtatgttttactgcttcaaattttaggggtctgaagcaatttggtatgtatagggtctttctataccgcgggttcttgtcggaggaagagtgtgatcatctgatatctctggttaatt

SEQ ID NO: 139934 - DNA, 420 bp, Arabidopsis thaliana
acaaatcttaaacgttttactttgtgctgcactactcaacctcaatggccgcctcaacaatggctctctcctcccctgccttcgccggtaaggccgtcaagctttcccccgcggcatctgaagtccttggaagcggccgtgtgacaatgaggaagactgttgccaagccaaagggcccatcaggcagcccatggtacggatctgaccgtgtcaagtacttgggtccattctctggcgaatcaccgagctaccttaccggagagttccccggagactacggatgggacaccgccggactttcagctgaccccgagacattcgcaaggaaccgtgaactagaagttatccacagcaggtgggccatgctcggagccctaagctgcgtcttccctgagcttttggctagaaacggagtcaagt

SEQ ID NO: 139935 - DNA, 389 bp, Arabidopsis thaliana
cggatgggttctcagatcacacacaaccaaccatctcctcagaagcaatcaggtaagccagcggaatccgaatgtctctacgcaccagaggtttgaatccagattccgctggcttacctgatggcttttcagatttccggatgggttctcagatcacacacaaccaaccatctcctcagaagcaatcgccgcgtcttttggctcctattcccttcgaatccgcgtatgaaggatacggttcttatacgcaattggttgatactcttttgggtattgagagtaagtcttgtagaggcaaattggttaagggagaaattggagtggttaaggatgagaacgagtctcctatggtgaggactaggagtagttctcgtgtatctaaagtttct

SEQ ID NO: 139936 - DNA, 402 bp, Arabidopsis thaliana
cccacgcgtcaggaaaaaaggaaaagaaagaaatctataaaaaaaaatggattttcagacaattcaagtgatgccatgggaatatgttctagcttctcaatctcttaataactatcaagagaatcatgttcgttggtctcagtctccagattctcacactttctctgttgatcttcctggtaattataattacttattttctcactttattcattaccacatattgtaaagaataaataatcttggataatcttcatttttttgtatgtgttctgttttttttgtttgttcacttcccaaccagggttaaggaaagaagaaataaaagttgagatcgaagattcgatatacttaatcatacgaacggaggcaacccctatgtcgcctccggatcagcctttg

SEQ ID NO: 139937 - DNA, 406 bp, Arabidopsis thaliana
acccacgcgtccgcggacgcgtgggtcttagttcagggaggaggctcgagaacagtgccccatatctgaaagctgaagctaagaatctggacgttcgtgtttaaaccgacgacgtatttgaaattggctttgaaggaaaggtgaaattaatggcggaatcgtcgtcgccgtcgcctactgaagagatcgttcggttgattaagcgtttaagcgcttacgttgctttcaaaatgtcaagccttttctccactacatcgattcgaaatctggattcaagatcaattggtgcgattgcggggcttgcgattgcggtgatatttacgtggagggcgataagaacgcccggagagcaacgtcagagaaggcagccgaagcgtaggattcacaatgctgaaacgtctagtgc

SEQ ID NO: 139938 - DNA, 420 bp, Arabidopsis thaliana
gtttcttccaaacaaagattctttttttttttttccttctgggttttagaaacagagagtcactctaaagattttgtctcctgggttttttgggagagaaatcagtcgacgaagctaagatgagcagcaggcgatcagtgaagagatcattggttcttgatgatgatgacgatgaggatatattctacaacttcaaggtccttctacctaatggcactagtgtgaaactcacactgaaaaacccagaaccggagatctcgatgcagtcttttgtcaacttggtgaagaaggagtatgataatgcacgaaaagattgtcttttgatgtctaagaggatgaaggttgattggaactcaggcggaaagtttcatctggagtcaaatggtgggaagatgaaaggcattgttcgctttgctgcgt

SEQ ID NO: 139939 - DNA, 369 bp, Arabidopsis thaliana
acccacgcgtccggcaattgcaaagaacactgagagagagagagagtgtgtgtgtgacctttgagagatggaggaaaaacgacgcgattctgctggaaccctagcttttgctggtagctctggagattctccggcatctgagccgatgccggcgccacggcgacgcggcggaggtttgaaaaggaaagcgaatgctcttgggggttctaatttcttctcttctgcgccgtcgaagaggatgttgacgcgtgagaaggcgatgcttgcttctttttctccggtacataatgggcctttaactagagctcgtcaggcgccgagtattatgccctcggcggcggatggggttaagtcggaggttttgaatgt

SEQ ID NO: 139940 - DNA, 452 bp, Arabidopsis thaliana
  unsure (1)..(452): unsure at all n locations
tggtggggttttgggtgaggagggattgccgttgaatggtgttgaagctgatcggccgaagaaagttttgattttgatgagtgatactggtggtggtcacagagcttctgcggaagccattagagctgcttttaatcaggagtttggagatgagtaccaggtgtttattacggatttgtggacagatcatacgccctggccgttcaaccagcttcccaggagctataattttctggtgaaacatggaactctgtggaaaatgacttattatggtacatctccacgcattgttcatcaatctaattttgctgcaacttccacttttattgccagggaaatcgcccaagggttaatgaaatatcaaccagatatcataatcagtgttcatccgttgatgcaacatgtcncacttcgtgtcctaagatcaaaaggcttgcttaagaaaatcgtgt

SEQ ID NO: 139941 - DNA, 309 bp, Arabidopsis thaliana
acccacgcgtccgcgagtagcattaggttgtgtgtaaggaggcagttcaggttcctccgttggttccgagtcgacttgttccttgatgacgccttctctggagttcccggatcgcatcagtttccggaaaaaggatttcagtgaacaaggtcctagtcaacacgtttgggaaaagcgtaaattgacgcgtgccaagttgagtgaaaatttttgcaatccggaagacattgaaccagtcacatcttggctgaagggtcaacttctaggagaagaatcatttgcctctgtgtaagaagccacttcagattc

SEQ ID NO: 139942 - DNA, 434 bp, Arabidopsis thaliana
cggacgcgtgggttggacaacacaaacatagacctcgttgcagaacgcgagaaggtggtgtctttaacaaggcagattgagtcacttggtactgtcaaagagaagaatttagtgatggaaaaagaaactcaggagtataaggagatgctggaggaatcagaaaagtgtcgggtgcttttagaggagcagatttcgcagcttgaaagtgattccaacgagaatattagagagctctgtagcaaggtggacattgcatatgccaagttggcagaagaggttgagaagactgcctcattggttagaaaaagtgagtctattgatctaaacgaagagcataggcaacgggagcttgatcattacaaggaaatgcttgaggagtctaccaaaactcaacttctcttgcaagagaaagttgtagatgtggaaaacgactc

SEQ ID NO: 139943 - DNA, 327 bp, Arabidopsis thaliana
atccggcacgtcatcaatcatcatcatccgaaacctcagatctctaaggccgggatggtaattgcacgaggtttgttaggaatacaaacaactcttgtgaaaaatatgcaacatatggtattttccctaaccgaagcaggggctcgacttttcgttaccagattctttagacaattcatatcgatcggttgtgtaacgatactagaaggagacacgatattcatatttggggaaaatgaatctacttgtcctttgaaatctatcctcaagattcacagtcctcagttttactggaagattctcattgcaaacagagacctgaactca

SEQ ID NO: 139944 - DNA, 350 bp, Arabidopsis thaliana
gtcaatattaaattcaggaggattgatgattttgagttcacacctgaatgtgcaatatttgatttacttgacattcccttatatcatggatggatagttgatcctcaggatgttgaagcagctaatgcaattggtagcaaatcgtataatgctcttatgggtgagctagttgcactggagacacagaatgtagaggctcaaggcgatcaaaatcccggagaagattctgttgattttgctgcggcaactactgcagttttaggggttccttcaccttgtctttcgaaaacaagatcttttgatgattctccacctgcggctgcagagcttcgtagaatgagaaaggggga

SEQ ID NO: 139945 - DNA, 193 bp, Arabidopsis thaliana
gacaacagtattcacgtgaagcgagagattcaacttccatctacttctccggctggctttccggggagagaatctgtaactgtagtcgatctctgtagtagtgatgacgactccgacattggagaagtcgccggtggattagagaaagtaggaaacaacttcgtcggtctgaagagaggacgagatacttttg

SEQ ID NO: 139946 - DNA, 365 bp, Arabidopsis thaliana
gacattagagacctcagaagaagagaagtttttgattcttcgtcgagactttactcgattttgcatcgaagaagagaggaagaagaagaagaaaaagtgaaaaatttctgggtttcgattttgggtgagagataacaaaccctaggtgttgtgtaaatcgtgatcacatatatgctttttgagtcgacgattagagaagacgaagaagagtagcaagcaaacactatgatgaacacttctaatggaatgatatcagcgccatcttcgtcgtcttcaccggcggcgaatcctcagtcgccgggaattaagacttatttcaagacgcctgaagggaagtataagcttcactacgagaaaacgcattc

SEQ ID NO: 139947 - DNA, 377 bp, Arabidopsis thaliana
cggacgcgtgggcttttgtggtctctgttggatttggtttggactatcttcacgagattatcctcatcttcccgcttcttctctcctttgaatctttcttcgttgttctttcactttcttaaagaggatgtgagattgtttttggtacttagaaaatggatacaccggaaaagagtgaaacccagatcggtactccagtttctaaactcatagtcgaggattcaccactgtttagttacatatgcaatctctcaccaattatgactatcaaaccaattccaatcacttgtcctttaagctctctcaattacgcatctccaccttctgttttcacttctcctcacgctgtttctcataaagagtctcgtttcagaagt

SEQ ID NO: 139948 - DNA, 233 bp, Arabidopsis thaliana
attatcctctcatggcggataacacgagacctgtctaaaggctcttcttcttcttcgtcatcactactactactcctctctaacgttttcctcgagctgcgcggccactgaagatcgcagcgctagagcctgaatcttcttcatctcctatctcagctactaacagaacaccagaggattagagtccacacgttctaaatcgtaagtctcctcgaagccctgtctctgagaag

SEQ ID NO: 139949 - DNA, 393 bp, Arabidopsis thaliana
cggacgcgtgggcggacgcgtgggcggacgcgtgggcggacgcgtgggctgagattcccgccgacatgcttctgtttcaaatatgcattccatttatcatcgagcatttcagacttcggaccacaattaagtcccttctacgctgctggttcactggggttggttgggcgcttggtttaacagacttcctcttgccaagaccagaagacaacattggtcaggacaatggaaatggtgaaccaggaaggcagaacagagcacaagtgttgcaggtcggaggacctgacagggccatggctgcgcttccagtagctgatgaccctaacagaagtcgcctccgtgctgggaatgtcaacacgggtgaggaatatgaagatgatgacgaacaatctg

SEQ ID NO: 139950 - DNA, 400 bp, Arabidopsis thaliana
agctaatcctatgtttaagttctgctccaagattgaaaaccatgaatacaagggaaaaggaaaccaaagaactcgtaagaagagagcttgtgagactgctccacagccaaggaatgtgaaaaagactccaagattaggagtagagggaccagtgtatcaagttgatgaggagagaggacacactcaggtttcaaacagaaccaacaccatctcaggaaatttacagcgcttgctaccaccatcgtgctcagtctccgatcaggtggctaatgtgaaacagggcattgtagatagtctgaacactgtgagacaatgtcggactgagcttgagacaagtgaacaaaatctgcaagcctctttgctagcaattgacgccttaagggagaggatatggggaatc

SEQ ID NO: 139951 - DNA, 438 bp, Arabidopsis thaliana
cccaagcgtccgattttggggaaaactttgtgagcaaagagcgagaaaatgagcggagccggtaagaaaatcgcggatgtggctttcaaagcttcaaggactatcgattgggatggtatggctaaggtccttgtcacagatgaggctcgtagagagttctctaaccttcgtcgtgctttcgatgaggttaacacacagctccagaccaaatttagtcaggaacctgaacctatagattgggattactatacgaagggtattggagctggcattgttgacaagtacaaggaagcttatgacagcattgagattccaaagtacgttgacaaagttactcctgaatacaagccaaagtttgatgctttgttggtggaactgaaagaagcagaacagaaatcgctcaaggagtctgaacggttggagaaagaaattgctgat

SEQ ID NO: 139952 - DNA, 459 bp, Arabidopsis thaliana
cccattctcactcgcagaatatttgttctcatctgattcctccgatctgccatgtctcggcttttctaacgctaagaagtttcacagacgcggcgaaggagagggaggaaggagatagatctctttttccgtcgcgataataataaaaaataaacgtgtctagaggctgttactgaagagttgattcatacggagagaggatagaaatggcagatgggatatcgagcttttggggtcctgtgacttctactatagagtgttgtgagatgaactacgcctactcatcctacattgctgagttctacaacactatatccaatgtccctggaatcctattggctctcattggccttgtcaatgcattaaggcaacggtttgagaagaggtttagcattcttcacatttcgaatatgatacttgctatcggcagcatgctctaccatgccactttgcaacacg

SEQ ID NO: 139953 - DNA, 398 bp, Arabidopsis thaliana
cccacgcgtccgtaaaaactggaccttccgatcgctaatcaatatcaatcttagctttttttcgtcttccggttttagattttgtatcctaagctccgatactctttacgagaagcgtttttatttcaagctcagagtcaatcttagtatagggctgctaatggttttcatgtcttggatcacatcctgtggttgaaaaaggagtattctttactgattcttttgagaaagcaataaccaataaagtagaaggctctccttcgtaattgacctggaatctgtgatataagtattgaaagtaccataatttacagtttgtctctcagttcttgaaagtttagatgctgtctaatgatatatggtgtatgagtttaagttcctagactaatcaagaagac

SEQ ID NO: 139954 - DNA, 162 bp, Arabidopsis thaliana
cagacgcgtgggtctcactccgtctctcaatcacttctccgatcagccatggcttctgattcgtctctcggcaacaccaacgacggtcctccttctcccggcgaaaatgtttcaggccctagcgaatacacatactcgtcccccgccgcacttcagcgtcgc

SEQ ID NO: 139955 - DNA, 343 bp, Arabidopsis thaliana
tccgcagaaatcagttggagatattgagagattgattagtttcttggaaccttttggtggaattggtataattgctaggcggccagtgattctcaatagtgacttggatagtcagttgattcctagggttgatttcattaggaatctaagcggggaagacgatttcgctactggaacggtgctacgtagacttcctgccatattgagttatagtgttgagcatatgaacggccaagtagagtttctcaagtcttttgctggcttgacgagtgagcaagtgtttaagattgttcatgtgttccctaatgttatcagcactagtaaagagaggaaactgcgcccg

SEQ ID NO: 139956 - DNA, 440 bp, Arabidopsis thaliana
actgtgagtaaaaaagagaagaaagaaaaatggtgctaaaggtgtacggacctcactttgcttcaccaaagagagctttggtcacactgatcgagaagggcgttgccttcgagaccatccccgtcgatctcatgaaaggagaacacaagcagcctgcttatctcgctctacagccttttggtactgttcctgctgttgttgacggtgactacaaaatcttcgagtcccgtgcggtgatgaggtacgtagctgagaagtacaggtcacaaggacctgatcttttggggaaaaccgttgaagacagaggtcaagttgaacaatggcttgatgtggaagcgaccacttaccacccaccgctattgaacttaacgcttcacataatgttcgcatcagtcatgggattcccatctgatgagaagctgatcaaggagagtgaagag

SEQ ID NO: 139957 - DNA, 212 bp, Arabidopsis thaliana
aatggcttcctctatgctctcttccgctactatggttgcctctccggctcaggccactatggtcgctcctttcaacggacttaagtcctccgctgccttcccagccacccgcaaggctaacaacgacattacttccatcacaagcaacggcggaagagttaactgcatgcacgtgtggcctccgattggaaagaagaagtttgagactctct

SEQ ID NO: 139958 - DNA, 421 bp, Arabidopsis thaliana
gctacaagaaggtcaagtgaagatgcaatcaagattggaggaagaagaagaagctaaagcagctctaatgagtagaatccaaaagcttacaaagctcatacttgtctctaccaagaattctattcctggatatttaggtgacacaccagctcattctcgcagcatttctgctggtaaagatgataagttagactctctgctcttggatagtgataatctggcatctccatcttcgactctctctctagcatcagatgcgcgacggtcttccagcaagtttaaggatgaaaactctccagttggtctcaacctcctgctctcttctccacaccgctgttgatcttatcaatgagactaagcttgatgatgaaatcaagtcatggttggcgtttgctgcccagaaggtcgttgaagtgaacgc

SEQ ID NO: 139959 - DNA, 275 bp, Arabidopsis thaliana
caaaggcattgcgtgttggtaaagctgtagcagtagtgagtgtggagctgaggaagaagacgactggtaagattattgctcaaggtcgtcataccaagtactttgctcctcgttccaacctttgatcgttcaaccaacctttcttcttttttacattcaataaacaacatcaaggtgtttttagtctttgtcccatttgcttcttattattattgatactaataaaactacattactatatgtttttctaataatacaaacaaccttactttttc

SEQ ID NO: 139960 - DNA, 335 bp, Arabidopsis thaliana
gataaacatactgataatagtctcataagtgagctgtacaagcaataggtctcatcaaaacaccaaacctgggacaacgcaaaagaaaagctctgcttcgattgtcaatcttgtaaagcgggtctactcgacaacgtcaaaagcgcttggaagaaagttgcaatcgttaacatcgtcttccttgtcttcctcatcattgtctactctgttggttgctgtgctttcaggaacaacaagagggatgacagttattcccgtacctacggatataagccttgaacatagtttatcgggttttacgacagagattcgttgatacattgttggagtttggt

SEQ ID NO: 139961 - DNA, 181 bp, Arabidopsis thaliana
ctaaaaaaaaaggtaaaatattgattgatagcgatgagttcctgaagaacagtcgtttttcgtttctacaattagcaggactttcgataggaacctcttcatattgagagtaagctttaatctaagaagaagaaagtacaccactacaatccagcaagaaccatcaggaaaccggtgtgca

SEQ ID NO: 139962 - DNA, 434 bp, Arabidopsis thaliana
gtaaaccaaaaaaaaaaagagttctcctacaattttcctaaattcttggatttgagatttcactttttccgatttgaaacaatgatgataactcgcggtggagccaaggcggcgaaatcgctgttagtggcggctggaccacgtttgttctcgacggtccgtacggtttcgtctcacgaggctttatcagcaagccatattttgaagcctggtgttacatctgcttggatatggactagagctccgacgattggaggtatgagattcgctagcacgatcactctgggagagaaaactccgatgaaggaggatgacgcgaatcagaagaaaacagagaacgaatccaccggtggagacgccgccggaggtaataacaagggagataaaggaatcgcgagctattggggtgttgaacctaataagattactaaaga

SEQ ID NO: 139963 - DNA, 95 bp, Arabidopsis thaliana
aagaactatgcagagattaagaactaagtcccttttttgtcctgttaatgtatatatgtgctccatgtgaagaaatcaatcaaaaaatagattgt

SEQ ID NO: 139964 - DNA, 325 bp, Arabidopsis thaliana
accacgcgtccggtccacttctttgggctaaattcagggttttgtgaagaatgggtaacagagtaatctgcatgaagaagaaagatgttgttatcagaagtggaggagatgggtccagaagcaagagagtgaatcgttcacagaggaagttgcttgctgatgaagagaatttgcatcgaagagctttgtctatggctattcatcaagctcaagtttctcagagatttgatggatccatgtctagacgaatcgggtctactagctctagaagaggaacactctctgactcattttctaataacaggcaggttcctgagtttttgga

SEQ ID NO: 139965 - DNA, 403 bp, Arabidopsis thaliana
aggacgcgtgggcggacgcgtgggcggacgcgtggggtcgaggatttcaaagccgcctggtcggaatctcacatccgtcaaatggaagacggaaaagctatccagctcgtccttgatcagagcactggatgtggatttgcttccaaaagaaaatatctattcggacgagtgagcatgaagatcaaactcattcccggagactctgccggtacggtcaccgctttctacatgaactccgatacggccacggtgagagacgagctagattttgagttcttgggaaacagaagtggtcaaccttactcagtgcaaacaaacatatttgctcatggcaaaggagatagagaacaaagagttaatctttggttcgacccatctatggattaccacacttacactatct

SEQ ID NO: 139966 - DNA, 393 bp, Arabidopsis thaliana
acttcctggaccaactctgtgagataagcttagccacgagatgcgatctgttggcttcgctccatgaatctagcacgatcgatgcagcgaattttacaaagagtaacattgaaaaaaaaaaaaaacacaaaaagtttcaatggccgcctccacaatggctctctcctcccctgccttcgccggaaaggctgtgaacctttcccccgcggcatctgaagtcctcggaagcggccgtgtgacaatgaggaagactgttgccaagccaaagggtccatcaggcagcccatggtacggatccgaccgagtcaagtacttgggtccattctctggcgagtcaccgagctaccttaccggagagttccccggagactacggatgggacaccgctggact

SEQ ID NO: 139967 - DNA, 384 bp, Arabidopsis thaliana
cacacgcgtccgcccacgcgtccgcggctcgatccgccaagtagagtaagcagcaatgactaaaaagaagaatcctaatgttttcttggatgtatcaattggtggggatcccgttcaacggattgtcattgagctttttgctgatgttgtccccaagacagcggaaaacttccgtgccctctgcacaggtgaggcgggcgttggaaagtccactgggaagcctctacatttcaaaggatcatctttccatcgggttatcaaaggattcatggctcagggtggtgatttttccaatgggaatggcactggtggggagagcatctatggtgggaagttttcagatgagaactttagattggaccatgatggagctggagtcctttc

SEQ ID NO: 139968 - DNA, 338 bp, Arabidopsis thaliana
agacgattcatctattgggaatcggtcaacgtcctcaagtttatcatagatcttagggtttctaatcagatatttgattcatcaaaatcaccaactagggtttacaaagtccatgcttttcgatcattgatcagagagctttcaagaaatatttgcaagaaaatggcaatggctccagtaataaagctggtcttaggttcagttgcctttgccattttctggatattagcagtgtttccctctgtaccattcctaccaattggtcgaaccgccggttctctgttcggtgcaatgctaatggttatcttccaagtgataaccccggaacaagcttatgc

SEQ ID NO: 139969 - DNA, 385 bp, Arabidopsis thaliana
gcgaaacagccgatgaagtctcgcctgaatcttctgtacctttcaccggcgattgacttcacttcagaatcgagagatgagtaaacggaatccgaagattctgaagatttttctgtatatgttacttctcaactctctctttctcatcatctacttcgtttttcactcatcgtcgttttcaccggagcagtcacagcctcctcatatataccacgtttcagtgaataaccaatcggcgattcagaaaccgtggccgatcttaccttcttacctcccatggacgccgccgcagaggaatctaccaactggctcctgcgaaggttacttcgggaatggatttacaaagagagttgacttccttaagccgaggattggaggaggagga

SEQ ID NO: 139970 - DNA, 369 bp, Arabidopsis thaliana
aaccgtcggtggtgatgatgtcgaaaagagaggcggaattgaaagagataagatcgaagacgacggagcagttacaagaggaggttgttgaccttaaaggtgagctctttatgcttcgtctccagaaatcggcaaggaatgagttcaaatctagcgactttcgtcgtatgaagaaacaagttgctcggatgttgacggttaaaagagagacggagatcaaagaagggataaagaaaatgttgtctaggaaacttgacagacaatggaagaaaagcatagtaccaagaccacctccgtctctgaagaaacttcaagcagatttagcagcttcagctgcttcttctgcttgaaaaaacccgctattgattt

SEQ ID NO: 139971 - DNA, 409 bp, Arabidopsis thaliana
cggacgcgtgggcgaggatcctcgagctttttgatcggagactttttctctcatcgtcgttgtttgaattctccggctgagagatgcttgcttgacgacgaatctccaccgatcttttaccttttcgcacaacaagtaagagaaggatgtcgactccagcgaggaagagattgatgagggatttcaagaggttgcagcaagacccacctgcaggaattagtggtgctccacaagacaacaatatcatgttgtggaatgctgttatattcgggcctgatgataccccttgggatggaggtactttcaaattgtcactgcagttttcggaagattatccaaataaaccaccaacagtgcggtttgtttcacggatgttccatccaaacatttatgctgatgggagtatatg

SEQ ID NO: 139972 - DNA, 131 bp, Arabidopsis thaliana
aaacaaagttcatgaaataagtgttcttttaactgtttagacgcaattgccttcactctctacttcttattacaattctcaaatttggtcacttttgatttactcatttctcaaatgattcaatttcgact

SEQ ID NO: 139973 - DNA, 415 bp, Arabidopsis thaliana
attttctctatctatctggatattattttttcacttggggatttggagaaacctctcctctctctatctatagccatggctgctttcacttgtacctctcgtcctccgatttctctccgctccgagaccagaatcgtatcctcatcaccatcggcttcttctctctcttctcggcggatgttcgccgtcttaccggaatcatcaggtttgagaatccgtctttctctctctccggcttcgttgacctcgattcatcaacctagggtttctcgattacgaagagccgtcgtctgtgaagctcaggaaactactaccgatagtatgttttctcactattcctttttcgattttggttattaacttgtctttgattcgtgctcgttggtggattttgagaactgattattgatttgtg

SEQ ID NO: 139974 - DNA, 52 bp, Arabidopsis thaliana
aatttctctcaatgaaacatgaaattcatgggcatcaacaaagcaatgactt

SEQ ID NO: 139975 - DNA, 399 bp, Arabidopsis thaliana
  unsure (1)..(399): unsure at all n locations
gctcctctcacttcatgctacttctaatggctttacatcttctgagctcgccagaaaaggaattaatgttccaacatcacaatgctttctgaattatgtgttactggcaatcgtctatggaagtatcatgctgtatcgaagatccgacattaaggcgaaatggtattactatttcctccttgcttttgttgatgtggaggccaattttctcgtggtgaaggcttaccaatacacttcattgacaagtgtcatgctactggattgctgggcgatcccttgcgttttggtcttgacttggttttaccttaagacaaaatacagattgatgaagatcagtggtgtttttatctgtattgttggtgtttttatggtagtcttctcagacgtccatgcanggga

SEQ ID NO: 139976 - DNA, 425 bp, Arabidopsis thaliana
gcattttgtacatccctgggatgggtcctcttaacaatgaagatgttacaaacccgaaaacaaagaacattcgtctctacgtgaagcgtgtgtttatctctgacgattttgatggagagcttttcccgagatatctgagctttgtgaagggagttgtggactctgatgatcttcctcttaatgtttctcgtgaaattctccaagaaagcagaattgtaagaatcatgagaaagaggctcattagaaaaacctttgacatgatacaagaaatctctgagagtgaaaacaaagaggattacaagaaattctgggagaactttggtagattccttaaattgggttgtattgaagacaccggtaaccacaagcgtatcacaccgctacttagattcttcagttccaagaatgaagaggaattgacaagc

SEQ ID NO: 139977 - DNA, 284 bp, Arabidopsis thaliana
ggatgttcgtggaggagatgatgatgcagagtggcaaatatctcagagtccgactagtgtaattggtcattccaatggagatgaaggtcttaatcagcctatgcttgagctccaaatcaatgatcagaggtttgaggatgctgaagagatggttcatgaaagtgagaccaaagatcactagactcttcataattgtactcgaaaacatagtagttgtgttattttaacgatgaaagagttgtattatgttcaacgataaagtattatgtgcgtgatacttagct

SEQ ID NO: 139978 - DNA, 439 bp, Arabidopsis thaliana
gcggtggacactggaacacaacacaaacacaagatcaacgagaaaccaaacaacaacagcgaccatcgagagaatccactaagaaaacaaaatagattaaaaaggggtttctcaaagtttctcatcatatccattaaagtagcctcctttttgctttctccgtctctctctcttttgtccaatcaaaaagagtttgtgattcttctttatcgtctccttggagagatatgaatggcgatgagcttcctttcgagagtggtttcgaggtttacgctaagggaactcataagtcagagtttgactcgaatttgcttgatcctcgttctgatcctatttgggatgctataagagaagaagctaaacttgaggcagagaaagagcctattttgagtagcttcttgtatgctggtatcttagcacatgattgtttagagcaagc

SEQ ID NO: 139979 - DNA, 342 bp, Arabidopsis thaliana
cgcgtccgaaagtggtgagcacggccaaaaggattttggtactgaaaaatggcatcaaaattggttcaacttcaatcaaaggcatgtcaggcttcaaagtttgtggccaagcatgggaattcgtactacaagcaattgttggagcagaacaggcaatacatctaagagcctgcaactatagagaagtgcagtgaattgtctaaacaattgctctacactcgtcttgctatcattcccgggcgctacgaaacatttaggaaagaagtagactacgcaaagaacttattgaagaacagagcgaatctgaaggtggaagatgcaagaatcgctgcattgtttggc

SEQ ID NO: 139980 - DNA, 423 bp, Arabidopsis thaliana
cccacgcgtccggcgtcaccttctcatcaacaaattcaaattctcctcggtaagcatgagaattgaatctggggagaatttgaatttgttgatgagaaggtgacgcatatcgtatcccgaccaagcaaaacatgaggatggcattgtattggctcgtacagggatgcacagcaggcgactcacttgtcttccactactctggtcatggttcgcgtcaaagaaactacaacggtgatgaagttgatggctatgatgaaacactctgtcctctggattttgaaactcaggggatgattgtagacgatgagatcaacgcaaccattgtacgccctcttccacatggtgtcaagctccattcaattatcgatgcttgccatagtggtaccgttctggatttacccttcctatgcagaatgaacagag

SEQ ID NO: 139981 - DNA, 326 bp, Arabidopsis thaliana
cggacgcgtgggcggacgcgtgggcggacgcgtgggcggacgcgtgggagcaaatctatatatctattacccatctcgaattcgaccgaacccatgttctaatctccttcgcaacattggaaatctattttaaaaatccgttgagatatagttatataagtagtttggtgactcaattaggtttacacacaaagacatgggatcggctggtgtagcgagttcttcttctgatgttgcgatctcagctttgcgtgagaagcatgagaaggaagtagagaatctaacattaacgacacaacctttgaatacattgaagttgtttgttg

SEQ ID NO: 139982 - DNA, 154 bp, Arabidopsis thaliana
cttcactctctctaatcaaaaagcttttaacctcagccgttaaatctttctccgatcatgccgaccagaaacatcgccattggtggagtccaagaagaggtctatcaccccaacgcacttagggcggcgctcgctgagtttatctcgactttga

SEQ ID NO: 139983 - DNA, 352 bp, Arabidopsis thaliana
ggaaattagaagacgtggcctgacaagttgcacttattgcaatcccgagaacaatcgagactgacatacctgtgaaagacacatcttttgggtttgacactgctgtataagaggctcaacgagctattactgcagcacatgtggaagccgaaagtatagagaatggtatcggagttgtcaagcttatgggtcgctacagcgggttcataacgatgtatgccactctagcaagcacagatgtggactgctgtttgattccggagtcaccattttacctgaaaggagaacgcggactgtttgagtacatatagaaacgactcaaggagagctgtcacatggttcttgtgattgc

SEQ ID NO: 139984 - DNA, 409 bp, Arabidopsis thaliana
catctatctcctccactatctcctctctgcatctgacactctatagacattgttgataaaaatgagtacaccaggctcttctagatccattccattcaaatcgaagaaacgattggtgatggattcgccgtcttcgaaatctcaaaccgggaatccaaatccgtcttctgtagcattgcctacgccggaaaaaccacttgagaacatgcttagtagatcgagaaaccgatctgtggctttatcagtgaaagaaattcgtcaagccgctggatctcgtcgcagatctgaagatccggttgcttcatctgccaaaagcaggctctttttcgattcatcatcatcttctccttcaaaacgtaaaagctctaacaaaaatgcagagaaagagaaacttccggagaagtacgag

SEQ ID NO: 139985 - DNA, 423 bp, Arabidopsis thaliana
cccacgcgtccgttttgattctgcttactcccaaaaacacacatttaaacatcttagagagatgtcgatctccggagctgtgcttagtgggttgggtccttcgttcttgatcagtggaggcaagagaagcggcgttggcggtggagctatgaaagttggccggaagaatgtgatcattgcacctcagcgcaagaagtcatgggtctcagccgccgtgaaaggtgctggtaactcaccgaacgaccccaaatggcttgatgatgcctcagagaaagcttcggggtacgtgaaagagaagggaagtgaagtgggaaacgtgtctgctcaaaagggacaagagcttcaaaatcagatggagagagcaaaagactacatttttgggaaagctggtgaagcgatggactcggtggctgaaaatgcaaa

SEQ ID NO: 139986 - DNA, 389 bp, Arabidopsis thaliana
acgatttcctttttccgccggaagaagaagcaaaaaaaaaagaaatcgaatctctctttcaagtgttcgatttaaagcaaaagtgtaattataatcggaagcgagatcttgagaaatggtgggatgacggcggagggagatggcgaggggaggaggagaatggaccggagggatcgccggaaccggagttctctctttcaaaagaatcactctacttgtttgctttttcaacattctcattgctctctttgttcttcgctttctctatgcttcttctctccacatctattccaataacgataatggttcctactttttattttccttttcatttttgctctctgattcatgataattcgtatctgaagcagctctgttggttttttgtt

SEQ ID NO: 139987 - DNA, 420 bp, Arabidopsis thaliana
cccacgcgtccgcttaccaagagaaatttactttttttaaaatatacattcaaacttaaaacatgcaacttcaaataaagacactttctaatgagaaatttacaattgaatgtgaattaactgattcggtaagatcaataaaagaaaaaatcgcttcgaaagatcttaaagataaatacgaagctgatgcggttaaactaattttttcgggaaaaattctcgaagattcaaaaacacttgaatcttattcgataaaagaagatagttttctcgttgttgttaaacaaacaccgccaaaagcatcatcagcagcagcaactacaccgagttcatcagctgcatcaactaatgttcaacaaccaacaccagctgctgcttcagctagcccagctccagctcaacaacaacaacaacaacagc

SEQ ID NO: 139988 - DNA, 389 bp, Arabidopsis thaliana
aagattttacaggcaaatcgatttcactcgaagactggttgttgtgtaattgtgttcgtcgtctcaggttttcaatatctgtctctttgagttgtattgatgggttctgaaggaccaacgggtgtgacgattcatatcacagggttcaagaagttccatggagtagctgagaatcctacagataaaatggctaacaatttgaaagaatacttgggtaagaactgtgtttccatagatgtgaatcaatcaagttgtacagtgaatgtaacggaaaggtacagagcgataaagtttagtttatgatacagactgttggtaatgcttgtagaaccattggtcttcttcatgctattgggaatattacctctgaaatcaaactctccgacgga

SEQ ID NO: 139989 - DNA, 352 bp, Arabidopsis thaliana
gaagatacggattttctaatgagaaaaatgggtgttgttgtatgattacggctataataccatgccccaacccagataaatacgtcttctacgacttcgttcatccatccgagaaagcttacagaacaatttcgaaaaagcttgtccaggatatcaagaatggccttgcctgatttattatatatacaatgctttattttaattttaataacagccatcgttaataatagaaatgagaagacaaaaatcatacatggcgatctctctgtttttcttatgttaaagaatgtataatccagtttatgtattgttcactttatataatcccagaacaacaaaggagtttgtttac

SEQ ID NO: 139990 - DNA, 334 bp, Arabidopsis thaliana
ctcttccacccattgttatctctgtagaagcgtgagagagatcacgcgtgttcaccgacacaatcaaaaaatggcaaacggacccaaaaaatgggttcgggccggtaaaccaataaacccaagaacaaaagcaagaatcgtgcccgaaggttcaatgggtcccaaccccgtgagaagcttatgacggagactcctcacaaggttcttgcgcttgatgtttacaatgataagatcaagcacttgcttgagcctgataccgttcaatgggctggtcggatccagtttcatcgtatcaacattaagcatgattctagacttgaaggactgatcaaga

SEQ ID NO: 139991 - DNA, 376 bp, Arabidopsis thaliana
  unsure (1)..(376): unsure at all n locations
ctcacccactctcctcggaaaccacagcgacggacggacggacggacgataaaacttttgcctctaatttgctcctacaaatctggaatcagccggagcgaatctcgaagcttatgatctcgacttgctgaagaggctgggaatggctggtaaagaggagactgatgtatctgcacaagggtctttaaccagggaggccactgagatatggaggagtgagttggaatctcgccggtttcaggtagatagtttagaagctgaacttgtggatgtcaaggcttaccttgagtttggctcagaagaagatgccagaaaggagttaggagttctttcgggtanggtcagatcgactgcaactatgttgcgttatttgaga

SEQ ID NO: 139992 - DNA, 408 bp, Arabidopsis thaliana
cccacgcgtccgcggacgcgtgggtccgagcatctggcttctctgtcgcatcttctcttccctttcccccaccgacaattctattcatctccgatcaaaaactattcctttctgatcacaatgcatgctctcaaggacaaagtctcacaaaaactctctaatctcttcgccgattctccaagccaatctgcttctcctcgttattccaactccgattctccaaaggctaggttgaattcaagtgtaggcaaatcattgtcttcgtatttctcatttgttgttcctcaatctgggaacgaggaggattctgagttatgtccacctctacccattagaacagagagctatgagtgtattgagaattgcaaatctgctaatgggcaagctaaagctggaacctttatctca

SEQ ID NO: 139993 - DNA, 423 bp, Arabidopsis thaliana
accacgcgtccgcaaaacactaaaagtagaagaaaaatggcgactcttaaggtttctgattctgttcctgctccttctgatgatgctgagcaattgagaaccgcttttgaaggatggggtacgaacgaggacttgatcatatcaatcttggctcacagaagtgctgaacagaggaaagtcatcaggcaagcataccacgaaacctacggcgaagaccttctcaagactcttgacaaggagctctctaacgatttcgagagagctatcttgttgtggactcttgaacccggtgagcgtgatgctttattggctaatgaagctacaaaaagatggacttcaagcaaccaagttcttatggaagttgcttgcacaaggacatcaacgcagctgcttcacgctaggcaagcttaccatgctcgctac

SEQ ID NO: 139994 - DNA, 412 bp, Arabidopsis thaliana
aaaaaaaaaaaaaaacagaaagtaacatgagatctctcttattagccgtgtgcctggttcttgctttacactgcggtgaagcagccgtgtcttgcaacacggtgattgcggatctttacccttgcttatcctacgtgactcagggcggaccggtcccaaccctctgctgcaacggtctcacaacactcaagagtcaggctcaaacttctgtggaccgtcagggggtctgtcgttgcatcaaatctgctattggaggactcactctctctcctagaaccatccaaaatgctttggaattgccttctaaatgtggtgtcgatctcccttacaagttcagcccttccactgactgcgacagtatccagtgagacaagcagaaaatcttaaaggaagctactacaagaactataat

SEQ ID NO: 139995 - DNA, 370 bp, Arabidopsis thaliana
cggacgcgtgggtggtgaggctaaagattcatcagctcccaatgcatatggagatgatgttgaggcagaggcaaacgcatattttcatcaaatgttttctagtcatttgagtgttgacgcaatggttcaaatgctttcccgatacaaggaatctttggttccaagggaaaaattaatttttgaatgcatgattgctaatctgtttgaagaatatcggtttttccccaagtatcctgagagacagctgaaaatagcctccatactctttggttctgttataaaacaccagcttataagttcgctcactctggggatggccctgcgtctagtgttggattctttgcgtaaacctgcagattcaaaaatgttt

SEQ ID NO: 139996 - DNA, 415 bp, Arabidopsis thaliana
aaaaggcgtttcagattcgatttcggaaaatgtcaaagaagcattttccagtgagatacaaaaaaaagagatttaccggtgaccgctgagatggtgcataatctggacttcacggcgaacatcttcaatgtcgtctttgtgaacaaggcggcgcgtagggattgacttgcaagcgacctgttgtttcgtctctttgtgagttacgaggtacgtgacaccaaactggccacgaccaagctcacgaccaaactcataggttctccgtacttcctccatcggccgacctaagatccgaccattctgctgagtagatgtggtggaacgagatccgcctgttccggagcctgacgatccgacggttccggaaccggatgatccgcggcgttctccggcaggtttaacatggtggactacg

SEQ ID NO: 139997 - DNA, 339 bp, Arabidopsis thaliana
cgaagctggaaagagattctttacgtagtagataggccacaggtggtttcaatcttccccaacaaccagacgaaatcaaacataaatctgtaacagtcgaagaaactctcactctttaattgatcaatggcgtctcttcaaatcagtggctccgttaaattcgagccgttcgttggattcaaccggatgcgccatttccgtccgatcgccagtctcggatttcctcgttttcgacggagattcagtatcggacggtcattgttgcttcgtcgttcttcttccttctccggtgactctcgtgagtctgatgaagagagatttatcacagacgcagagaga

SEQ ID NO: 139998 - DNA, 372 bp, Arabidopsis thaliana
tgtaaaaccagagaattttctgcttgggcctcctggaactcctgaagagaaaaaacttttccttgtagacctcggcttagcatccaaatggcgagatactgcaactggactacatgttgaatatgaccagcgtcctgatgtttttagaggaacagtacgttatgctagtgtacatgctcatcttggcagaacttgcagtcggagggatgacctggaatctcttgcttacactcttgttttccttcttcgaggccggcttccatggcaagggtaccagggagagaacaaaggtttccttgtttgcaagaagaagatggccacttccccagaaactctttgctgcttctgtccccaaccttttcgtcagtttgt

SEQ ID NO: 139999 - DNA, 343 bp, Arabidopsis thaliana
tacttagtctacaatgttggtgatgctatttttattagtgacttgaactcgcaggacaaggatccagtaaagtctatacatatcagcaattcaaaccctatgtgccatgcatttcagccagatgctaagggtgggcatgatctacttattgggctgaactctggggatgtctacaccgtatcactaagacagcagttgcaggatgttggtaagaagcttgttagtgctcagcattataacaaagatggttctgtaaataacagccgctgtactagtatagcttgggtgcctggaggtgatggatcctttgttgctgctcatgccgatggaaatctgtacgtat

SEQ ID NO: 140000 - DNA, 285 bp, Arabidopsis thaliana
gtacgttctcttcttcttctatttttgctgtgtgacaaacaaaaagaccctttttggaatttggatcctcctcctccccggttccttcggcaagtcctcaagctccgcaacggcggaaattcctcaaggtttcctccggaatttccaattggcctctccaattctcctgcgataggtgaagatatgagaaattcgaaacgtttgatcaaggcgtcgtacactcccaagaacattctcatcaccggagctgctgggttcaatgcgtctcatgtcgccaacagactc

SEQ ID NO: 140001 - DNA, 217 bp, Arabidopsis thaliana
cccacgcgtccacggacgcgtgggcggacgcgtgggcggacgcgtgggctgagatggctcgtactaagcaaacagcgcgtaagtctactggaggaaaggctcctatgaagcagcttgctacaaaggctgcacgtaagtctgcaccaaccactggaggagtcaagaagccccatcgttaccgtccaggaactgttgcactacgtgaaattcgtaagta

SEQ ID NO: 140002 - DNA, 92 bp, Arabidopsis thaliana
aacttctcttatattatttatttcaagagttaaaaacatcaaatatccattgtgtcctctcttgttttttactatcttcaagagttggtact

SEQ ID NO: 140003 - DNA, 406 bp, Arabidopsis thaliana
cccacgcgtccggcatacaggaagaaatcaaatgagagtcctcatgtgtatgcaattgcagatacagcaattcgcgaaatgatacgcgatgaagttaaccaatctatcattatcagcggcgagagtggagcagggaaaactgagactgctaaaatagctatgcaatacttggctgctcttggaggcggaagcgggatcgaatatgagatacttaagactaatcccattttggaagcatttggaaatgcaaaaacattgagaaatgataattctagtcgttttgggaagctaatagagattcattttagtgaaagtggaaagatatcgggtgctcaaattcaaacctttttactagaaaagtctagagtggtccaatgtgctgaaggggaaaggtcatatcatattt

SEQ ID NO: 140004 - DNA, 341 bp, Arabidopsis thaliana
cccacgcgtccggccagcaggctatgtaacatggatatcatatcacaagtgcaacaaatcatttgctttgcgtttcatgatagtaagcttctcatggagacatgtcaagaagctagaaatctccggaagattgttaccctcttctacctggattgagtgattcagtgtttcccacttcaaaaaactcttctttgtcttcttagtgttttgttcatcttcctcttcggagaaagacaagttccattgtaattaggaatcgtcgtttacaaatgcacaacctattctttggtctttcatttttttatttgctttataggggaatctctcgatcatttttaata

SEQ ID NO: 140005 - DNA, 220 bp, Arabidopsis thaliana
gggttatgtataattacgtttcagataatctatcttttgggatgttttggttatgaatatacatacatatacatatagtaatgcgtggtttccatataagagtgaaggcatctatatgtttttttttttttattaacctacgtagctgtcttttgtggtctgtatcttgtggttttgcaaaaacctataataaaattagagctgaaatgttaccatttct

SEQ ID NO: 140006 - DNA, 359 bp, Arabidopsis thaliana
aaaaaaagtcaaaaaagtttcgaaaatccaaaaaaagataatggcgcaggttcaacttcagggtcagactccgaatggttcgaccgcggcggtcacttctgctccggcgacgtcaggtggagcaacggcaacccagtttggtaacacgtcgctttatgtgggggatctcgatttcaatgtgacggactcgcagcttttcgatgcgtttggccaaatgggtactgtggtcaccgttcgtgtctgtagggatttggtcactcgccgatctcttggctatggatacgttaacttcaccaatccccaatacgctgcaagagcgatccaagaactgaattacatacctctttatggaaaaccta

SEQ ID NO: 140007 - DNA, 403 bp, Arabidopsis thaliana
gtcgtctcttttcttctctccgagtagcttaagctttcgtcgtcgagctctttcccgcttctggcgatgttcatcctcagagttcattccgttgactccgagagaccaatctccgttgaagaagaagaatcaggtttcacttacgcatcgaaaagagctcagcctcctcttaaactcatacaaccatctctcaaactcaccgaccgcaaaggcttgatccatctctatcgcaaatcttcacatagctctctgcctaaccctagctcccgatccaccactctcttcatcgtcgctgttcccaattatctctcctctctcgattttatccgtttctgtgattcccgcatctcccaagtctccgacatcctcttcatcaggaacgatggaatggaagatagatata

SEQ ID NO: 140008 - DNA, 391 bp, Arabidopsis thaliana
gaagatcgtgacattggtactcgtcgtcttcgtcatactttcgacatcattcccggctgccatcaaagccgaagacacgggagatacaggaaatgtgggagtgacatgtgacgcaaggcagcttcagccttgccttgccgcgattacgggaggaggacaaccctcaggtgcatgttgtgcaaagcttacagagcaacagtcatgcctctgtggtttcgctaagaaccctgcgttcgcacagtacattagctctccaaacgctcgcaaagtgctccttgcttgcaatgttgcttatcccacttgttgaaacttatctagagattttataaataaataaacgaaaggaaataaattacattatatcaaacgttatgatacaattcaaccgttt

SEQ ID NO: 140009 - DNA, 153 bp, Arabidopsis thaliana
taacataaccaggtttggctctacggcctttgagaggcgatttttttaggtctagccacgcaccaaacttttcgtcgcaatatttctgaccttacctttctgcttagctggtgcccttggtcggggacttcgctcgttctggagcttcttctg

SEQ ID NO: 140010 - DNA, 397 bp, Arabidopsis thaliana
acacactactaataaaccatgaagcttcttatgctcgcctttgtttttctattagctttggcgacttgtaaaggtgacgagtttgtttgtgaagagaacgagccattcacatgtaaccaaactaaacttttcaacagtggcaatttcgaaaaaggcttcatcttcggtgttgcatcttctgcttaccaggtggaaggcggtagaggccgtggacttaacgtttgggatagcttcactcaccgattcccagagaaaggtggagctgatttgggaaatggagacactacttgtgactcatatactctttggcagaaagatatagacgtgatggacgagctcaactctactggctacagattctccattgcgtggtcaagactccttccaaaaggaaaga

SEQ ID NO: 140011 - DNA, 363 bp, Arabidopsis thaliana
acggacgcgtgggcaaatcttaaacgttttactttgtgctgcactactcaacctcaatggccgcctcaacaatggctctctcctcccctgccttcgccggtaaggccgtcaagctttcccccgcggcatctgaagtccttggaagcggccgtgtgacaatgaggaagactgttgccaagccaaagggcccatcaggcagcccatggtacggatctgaccgtgtcaagtacttgggtccattctctggcgaatcaccgagctaccttaccggagagttccccggagactacggatgggacaccgccggactttcagctgaccccgagacattcgcaaggaaccgtgaactagaagttatccaca

SEQ ID NO: 140012 - DNA, 409 bp, Arabidopsis thaliana
cccacgcgtccggaggaagtcatggatgcagcagaagctggtcagatcatcgaaagttgttgcccggttctttgtggcattgcatgcaagaaaggaagtcaatgtggatttaaagaaagaagctgagtactttggtgatattgtcatagtaccgtacatggatcattatgaccttgttgtgctcaagacagttgccatctgcgaatatggggtgaacacagtggcggcaaagtacgttatgaaatgtgacgatgatacatttgtgcgtgtggatgctgtgatccaggaagcagaaaaggttaagggaagagagagcctttatattggaaacattaattttaaccataagccattgcgtaccgggaaatgggctgtgacattcgaggaatggccagaagagtattatcct

SEQ ID NO: 140013 - DNA, 440 bp, Arabidopsis thaliana
gaaatggatgctgacctgactttggagaatgatccgtctaagggcagcaaaacacatgaaggtccagcctacgctggtggactggtcttggagccaaagagaggcttatatgacaaatatgtcttgcttctggatttcaatagtctttacccttctattatacaggaatagaatatctgttttacgactataccacgatcagaagatggagttcctcgtttaccttcgagtcagacacctggaattcttccaaagttgatggaacatttggtcagtataaggaaaagcgtcaaattaaagatgaacaacgaaacaagtctcaagtactgggagcttgacattcgacagcaggcattgaagctcacagccaatagtatgtatggctgtctggggttttctaattcaagattctatgctaagcctttagcagagctcataac

SEQ ID NO: 140014 - DNA, 425 bp, Arabidopsis thaliana
gaaaccggattgtctttgatcagtagtgggattttgtaatcaggatctgcaagattgtcatcatcatcagttaaatctgtatcaacccaagatgtccaatctacctcgctctctgtatcttcatcgtacgagagctctttcttgctttgcatgtcattcactttatcaactaatcttagcaagatttgatggtttagtacttcatagtccctgcatttttagacaagagaggatatatgttcaattgttcatcattttctgagtttgttttggttaatcaaaacattatagtatattttggttatacctgtatgacaaagcagcatgtagaagctgagctgaagcaagaagagcaaataaagacctgataaggtttatcatccatgcttggcgttctgtatcattcacgtatcgtaaactcgcca

SEQ ID NO: 140015 - DNA, 376 bp, Arabidopsis thaliana
agcaaaagaagttgtgtaaagaaggtgtttactggggagctgctggtggagtgtacattggaacagaatacggaatcgaacgtatccgtggcagcagagattggaaaaacgcaatgttagcaggcgcggcgacaggagcagtgctctcagcggttggtaagaaaggcaaagacactattgtgatcgatgccattcttggtggcgcgcttgcaaccgcttctcagttcgttaacaatcattatttctactgattctccatcttcctttagggaccaatttggttcatatggtgtggattcctttgtttactctttaaataataataaaaaacaatgtagtgtttttgaaatgaatacattcgagtattgttgacgtt

SEQ ID NO: 140016 - DNA, 443 bp, Arabidopsis thaliana
gataagaaaaaagtagacgaagaagaagaaattaagtcacttgaacaatggcgttggtccgaaatgcaaggccttgagcttctccctcataacaccaacaacaactcacgaagctccagagaaactcaccggaaatggataatgacggtggtgctcctcctcctccgccgacactagtggtggaagagcctaagaaagcagagattcgtggagttgcttttaaagagctattcagattcgccgacggattagattatgtattgatgggaattggctctgttggtgcttttgtccatggctgctctttacctctgtttcttcgattcttcgccgatcttgttaattcctttggttctaattctaataacgttgaaaagatgatggaagaagttctcaagtatgcgctttactttttagtggttggtgctgcaatctgggcttcc

SEQ ID NO: 140017 - DNA, 434 bp, Arabidopsis thaliana
cggacgcgtgggcggacgcgtgggcggacgcgtgggcggacgcgtgggcggacgcgtgggaaagtttatgtcaatctagcttacaacaacttgagtggaccaatcccacaaaccggtgctttggtgaacagaggaccaactgcattcttggggaatccaagactctgtggccctccattgaaggatccttgtttgccagatacggatagttcttcaacttctcacccttttgtaccggataacaacgagcaaggtggaggagggtcaaagaaaggagaaggtttaagtaaaactgctattgttgcaattgtggtttgtgatttcattggaatctgcattgtgggatttctcttctcttgttgttacttgaagatttgtgcacgtcgtaatagtgtggatgaggaaggctatgtgttggagaaagaagggaaaga

SEQ ID NO: 140018 - DNA, 128 bp, Arabidopsis thaliana
cggaagcgtgggaaataatgtttggcttaataaactttgatgtttatgttcattgcatcaatttttctctttttgaatttgtgacagtgatgtgtttacttttgatacaactttgtgtttgatcgttt

SEQ ID NO: 140019 - DNA, 431 bp, Arabidopsis thaliana
cccacgcgtccgggaaaacaaaggatcttccatgggcgatcgctgagaagatccgcaagaacaaaaacatcaaattccttgaaatcaggaatcttattcgatagtctatttgagcccttgatctggtaagctctgtctgatcttctaaagtttcgctttttaacttttggggaaatcatccacctttgtatcaagtttctggcaatttcttctctgtagttagaatcattcaataagccctttaatctcttcgacgcagctagtgttgaattacatctgggttttgtctactttgtgtcaaaaccatgcttttatgtttgattttcgcgaagtatgatttaggttcgattttagtgaaagaaagacttaacagttgtagttaactgaaactatgcgatatctgattacgttggtgttatgattttattgga

SEQ ID NO: 140020 - DNA, 429 bp, Arabidopsis thaliana; identical to SEQ ID NO: 125118

SEQ ID NO: 140021 - DNA, 432 bp, Arabidopsis thaliana
aattagatggtgtcaaacagcaaatggagctctttttctcctctcgaccaatgataaaaccatcaagttttggaaggttcaagacaagaagatcaagaaaatctgtgatatgaattcagatccttcaagaactgtaggaaacggaaccgttgcaagctcgagcaattcaaacattacaaactcatgccttgtgaatggaggagtatctgaagtgaacaactccttatgtaatgacttctcattgccagcaggaggcatctcttcgctgcgattaccagtggtaactagccatgagtcgagccctgtggctagatgtcgaagagtatatgctcatgctcatgattatcatattaattcaatctcaaataacagcgacggcgaaacatttatttctgctgatgatttgcgaattaatctttggaatctggaaat

SEQ ID NO: 140022 - DNA, 423 bp, Arabidopsis thaliana
cggacgcgtgggcggacgcgtgggcggacgcgtggggtcagaggagaggcttgtgaatcgatttaggagagaagtgatgagaactggtgttatacaggaatgtaagaggagaagatactttgagaataaacaagatgagaagaaacgtaggactcgtgatgctgctaagcgtaataagaaaaggcgtcctcaagcaaggtttactcaagaaacaagagaagaagcagcagcagcaactaagagtaagaaaaaagatgaggaagaagacaactgggagatgcctggtggagatgtaccttcttgaaacacgattttagtatataaaatctccggtcttttgattaaatttcgtattatcccgtttttattacttggtacattgtgagttggaaatgtgtttactgcatattataacttgcttct

SEQ ID NO: 140023 - DNA, 433 bp, Arabidopsis thaliana
gccgtctcctccgctctatccatatccaaaacagctataaagataaacttccagagcttggtgaaggagcagcaaccctagttttcaatccctaaaggtgaagtttttgttcttctttttctttgattctactcttttttcgtcacaatagcgcagtagcgatctgggttggcgtttttattgacggattttggtgggtttgggttcgtgttagattttactttcacagattcaggtatgtatttgatcttatttagctttggtaatactcaaaccaactagtatttgatcttaattaggtgacgttgatattttgtgtgttgtgggtcaatcatccactctaggttgatctgcgtctatgtttagtcctaattttgaagaatcattctaattgctgatgtttatttatgacaattttatgtcttacttcgaa

SEQ ID NO: 140024 - DNA, 432 bp, Arabidopsis thaliana
ctcagctagacgagaagctcaaatccggctacaaagctacaacaactgggaaattcactgaggctctccgtctcttcctttctatcctgcacaccatccctctagtggtagtcgagacaagaagagaagtggatgaggtcaaggaattaatcgttatcgttaaagaatatgtccttggtcttcaaatggagctcaagaggagagagatgaaagatgatccggtgaggcagcaagagctcgctgcttacttcactcactgcaacctccaaacacctcacttacggcttgcgctgcttagtgcaatgggtgtctgctacaaggcaaagaacctcgccactgcttctaatttcgccagaagactgttggaaacaagcccagttgatagccaagccaagatggctagacaagttgtgcaagccgctgaacgtaaca

SEQ ID NO: 140025 - DNA, 438 bp, Arabidopsis thaliana
aaaatggttgcctcagccgccgcacgacctcttgtcaccgtccaaggacttgacggtgacatgagcaccgatcaatccaccaccgtcactttaccagacgtcatgactgctccagttcgacctgacattgtcaacttcgtccacgcccaaatctccaacaacagccgtcagccttacgcagtctccaaaaaggccggtcaccaaacctccgccgagtcctggggaaccggaagagccgtgtcacgtatccctcgtgttcctggtggtggaactcaccgtgccggtcaagcagcgttcggaaacatgtgtcgtggtggtcgtatgtttgctccgactaagatctggagacgctggcaccgtcgtgtcaatgtcaacatgaagaggcacgcgattgtttctgcaatcgctgctactgctgttccagctcttgtgatggct

SEQ ID NO: 140026 - DNA, 329 bp, Arabidopsis thaliana
cgaattcccgtttcgtgaatttctctctctctgtgtgaacaaagacgaagaagacgaagtaacactgatagaaaccctagttttttttttaaatccgtcgaggcgtaatgtcgtcggagctgcagatttcgccggcgattcacgacccgcaaggtcaagagaagcagcagcaagccgccggagtcgggattttgcttcagatcatgatgcttgtcctctcttttgtactcggtcatgtccttcgccgtcataagttctattatctacctgaagctagtgcttctcttctaattgggctgatcgttggtggtttagcgaacatctcgaac

SEQ ID NO: 140027 - DNA, 306 bp, Arabidopsis thaliana
cgaaagaagatttgggtatgaccatggtggaggatatgaccgtgaaatgggtgggaggcctggttatggtgatgaaaggcctcatggtcgctttatgggtcgctatcaggactgggagggaggacgtggaggttatggtgatgcttccaacagtggaaatcctcaaagggatggattgatgtcatacaaacaatttatccaggagttggaagatgatatattgccatctgaagctgaacgcagatatcaagaatacaagtcagagtatatcacaacacaaaaacgtgccttttttaacacccacaa

SEQ ID NO: 140028 - DNA, 264 bp, Arabidopsis thaliana
cgcgtccgcccacgcgtccgcggacgcgtgggcggacgcgtgggggagccagtgaaggcagatgagtagctaagtgcttcagaagctctgacgaatgaagctcagtgatcaagcagacgaaacaaatcagcagttaatggagattaaggcctctgaggattccaggatggatgagcttcgcaagctctctcaagaacgagacaaagcgtggcattctgaactcgaagcaatgcacatacagcatgccatggattccgctgctct

SEQ ID NO: 140029 - DNA, 209 bp, Arabidopsis thaliana
cggacgcgtgggtttggactttctttgtcttaaccctaacatttccaaaggttttccaacaaacccgcagcgattagcatttgttctaatatctcatcaaaaccctttcaaaaggtgaaaatagattgggaataccaccttgctgtgaaaagactggagtgaagaaagggccatggacacgagacgaagacatcaacttggtttcgtac

SEQ ID NO: 140030 - DNA, 115 bp, Arabidopsis thaliana
cgggtcgacatcgcgtccggccacacgtccgatttcactccctcttccgattctcctgttgttccatgcatcattaagctatggatttcaatagaaaagctcatccagattgcgt

SEQ ID NO: 140031 - DNA, 293 bp, Arabidopsis thaliana
cggacgcgtgggttctctttctccttttcttctccgacgattcttctcagttctcagatctgatcgatttcttcatcagatgtttcaatctaaccattgagattgaatagtcaccagtagtagaagcttcgagatcaatttcgaatcgggatcatgtcgtgtttagccctagctctgcaaccagcaaatggatccgacattttgctccaaactagagaatggtttccaccagcaagagccttaatcgctctctcgtagtttcgtcaaatgcgtcaagcattagcgtcctcgaa

SEQ ID NO: 140032 - DNA, 177 bp, Arabidopsis thaliana
ataaatgtttcttgatcggttcagtgggagccatagctatctgcgtgcctatgtcttcagctcctgtggttcctcgtgccattgagcgtggatggagtgagtcttccagtcctaatgtccgtggcccgctagctcttgtttttgatttctctcatcgtgaagcataacgcaaatccg

SEQ ID NO: 140033 - DNA, 244 bp, Arabidopsis thaliana
acgcgtccggaacaacaaaccgatcgtgttacgtctctctctctctcagtctctcatcaccgacgaagatcacggctcttttctctgtttaatcggcggaatctctcttcttattttatttttcttccggtagatcgatccagctccgagatcaaccatgaatcctgaatatgactatttgttcatgcttttgctcactggtgattctggtgttggaaagtcatgcttgcctctaaggtttgct

SEQ ID NO: 140034 - DNA, 319 bp, Arabidopsis thaliana
gttagagcttagaagccgtcggcacagtaagaagaagaagaagaatgtctcacaggaagtttgagcacccaagacatggttctcttggtttccttccaaggaagagagctaaccgtcacagacgaaacgtgaatgcgttccctaaggatgaccaaaccaagccttgcaagttcacagctttcacgggttacaaagctggtatgactcacattgtcagagaagtggagaaacctggatccaagcttcacaagaaggagacatgtgaggctgttaccatcattgagacacctgctatggtggttgttggagttgttgccta

SEQ ID NO: 140035 - DNA, 376 bp, Arabidopsis thaliana
ttgatattggagggaatcggtaacgggcatggaagccactgatccaagcgcagagatcgagctctacaccattcctgctcaatccagttggttcttatgggatgatatacacgaaattgaaagacgcgagtttgcggagttcttcactgagagctcaatcactagaacccccaaagtttacaaggagtaccgagatttcattatcaataagtttagagaggacacttgtcggagactcaccttcaccagtgtccgcaagtttcttgttggcgatgtcaatttgctccagaaagtttttctcttcctcgaaaaatggggattgatcaattttagctcttccctgaagaaaaatgaccatctattgtccgtggataat

SEQ ID NO: 140036 - DNA, 440 bp, Arabidopsis thaliana
gcaaatttcaagtgttatttcattcaatttcgatccgagtaaccatggagtgtggatcaatggatcggacagataaatctgtcgacgtggcgaagctcgccgagcaagccgagcgttacgaagagatggttcaattcatggaacagctcgtaagtggagctacaccggccggtgagctgaccgtagaagagaggaatcttctctcggtcgcgtacaagaacgtgattggatctcttcgtgcggcatggagaatcgtgtcttcgattgagcaaaaggaagagagcaggaagaacgaagaacacgtgtcgcttgttaaggattacagatctaaagttgagactgagctttcttcgatctgttctgggattctcaggttacttgattcgcatctaagtccttcagctactgccagtgagtctaaggttttttacctgaagatg

SEQ ID NO: 140037 - DNA, 344 bp, Arabidopsis thaliana
gatggaataggacgaggaggaggatctggatcatctaacggctctggattcgggtctttatgaagaaaagaagtgttgacaacaccaacaagccgagtacaacgggcgctagggttaaagatgcctaaacgatctccttctaggcgaatgtcgacagtagggacagttgtacgggccgtctcagctccttcatccccaggtaataatggaagcataggaagtggttcaggacactttagccctggggctgggttttttacagtcacgcctgctcggcctcgacgaccgttaacctctgcagaaatcatgaggcagcaaatgaacgtgacagaacaaagtgacac

SEQ ID NO: 140038 - DNA, 411 bp, Arabidopsis thaliana
acggcaaataacgaaaaccatggatccgaaaccaacctcgatgtggagctcaattgtgaagaaagatccaccttcaaagcctccggttaacgacggagctccggcagcgattctcgggatggtcggaaactgcaaatccacaaaaggaatatctattgcggttgttgacgccaacgccatcattgaaggacgtcagagcttaacaaacttcgccgacaaattcgtaactgtccctgaggttctctctgagattcgtgaccctgcttctcgccgtcgtctcgctttcatccctttcactattgataccatggaaccttctcctgaatctctaagtaaagttatcaaatttgcaagagctactggtgatttgcaatctctgtctgatgttgatctgaagttgattgctttgtc

SEQ ID NO: 140039 - DNA, 301 bp, Arabidopsis thaliana
cctgttgatatcttgagaagacttctggaatccaactctccaaggtcccttctagaagattttttcacccgctttggactatgcgaagcagctgccatgtgcttgatgttagctgcccggataataaattttgaagatttaattagtaacattgttgccgataaagcagctgaggcttttgaggatccgagaattgtacgaatgccacaatttgatggcagtagtggattgtcaaatactagaacagcaactggacgtttcagcatgggtcatgttgttcaagaagccgagcccattttct

SEQ ID NO: 140040 - DNA, 282 bp, Arabidopsis thaliana
gtgacccgtgtggggacaataagttggtggaacactggctcggcccacgggtcggatctgttgtggcattgttccgggctgcccagtccaagctgagagtgatccgtgtgtgttaagcgaaggcttggctcaggcggttcttgcagtggagggcaatgcgtgaggctggtttcacagagcagcgatcacctcccgctctcagcagtggacggatcacagctcgacgccactcagattcaccatggcctgctggctcgttcccagctggaccaccaatttttg

SEQ ID NO: 140041 - DNA, 262 bp, Arabidopsis thaliana
ctccggaaagacaacactaacttgccatctgagcgctccatgacacagaatggttatgccgccattgaatagaactgttgttgcagcgtttacgccttttatatgttattctggtggtacctgtaaccatataacgttgcatttcctgtgtttgtaccatttctctgatagatttttggaataatttgaaggcaaaagatagattatttgttgtagaagaagctacaaaatttaatgattaaattgaatcatcaagccaatc

SEQ ID NO: 140042 - DNA, 165 bp, Arabidopsis thaliana
cgcccacgcgtccgcggacgcgtggggcggaatacactaaggttagagtaatgagccaagctccttgaaggccatgacttaacaactcagcttcggtgatccagaaagcattcgcggcacacgacgctagtgtgatcgacgcacgtaaccacgagtgggagaaat

SEQ ID NO: 140043 - DNA, 411 bp, Arabidopsis thaliana
tggagtttcacgatcccgagatcatacttttttccctcctcgtacgtaacgatttttttttgtgattattaatccaaggttttttggcgtctcttttaggttttgatccctattgcgcacggtacggagcctctagaagcggtggcgatgattaccgtgttgcgtcgaggtggtgctgacgtgacggtggcgtctgttgagactcaggttggcgttgatgcttgtcatggcatcaagatggtcgctgatactcttctctctgatattaccgactctgttttcgaccttattgtgctccccggagggcttcccggtggcgagactcttaaaaactgtaaatctttagagaacatggtcaagaaacaagactctgatggccgacttaacgcagctatatgttgtgctcctgcc

SEQ ID NO: 140044 - DNA, 360 bp, Arabidopsis thaliana
atttctcgagaaaaatgtcttgctgtggaggaaactgcggatgtggatctggctgcaagtgcggcaacggttgtggaggttgcaaaatgtaccctgacttgggattctccggcgagacaaccacaactgagacttttgtcttgggcgttgcaccggcgatgaagaatcagtacgaggcttcaggggagagtaacaacgctgagaacgatgcttgcaagtgtggatctgactgcaagtgtgatccttgcacctgcaagtgaagaagcctttttaaataagcagagataatcgagtctctttaattaattaagttattcaataagtaaaccatatataagatggtgtttttaggtttgggtt

SEQ ID NO: 140045 - DNA, 260 bp, Arabidopsis thaliana
aaaacccttcaaaacatttccttattctttcttcttcatctacaacaatggctggagttgcctttggttcctttgatgattcattcagcttggcttctctaagagcttacctcgctgagttcatctccactttactctttgttttcgctggtgttggctctgccattgcctacgcaaagctgacgtcggacgctgctcttgatacaccgggactagtggccatcgcggtctgtcatggttttgctctcttcgtggccgtt

SEQ ID NO: 140046 - DNA, 118 bp, Arabidopsis thaliana
ttacgaagattgagagagtagcatatcatgatgtgaaagcagtggagtatttcttgaaacaaaggtgtgaatcacagccagatattgctaaggttcgtgagtttttccatttcgcttg

SEQ ID NO: 140047 - DNA, 369 bp, Arabidopsis thaliana
aacgaaggtgaggaatgtgtaaacacagtgcctccagtttgtgcagacaaagaacccgtttatgaaggtgagtcacttcttggtaaaagggttgagaaggatgttggtgattgttcttctgaagggagggctacagatgggctcacagcagaagaaggtgaactaatcaggaactttatgaagaatagtgcaagtcaattaaccttttgtggactctttcgcttgcaaaaaggcctcaaagaacgtgaactctgtgtttttttccggaacaatcatttctgcaccatgttcaagtatgaaggtgaactttatcttttggctacagatcaaggttacctgaatcagcctgatttggtttgggaaaaacta

SEQ ID NO: 140048 - DNA, 176 bp, Arabidopsis thaliana
cggagacactttgcggagattgtcctataatgtcaggacgacacctaatgttaagattcttgagatctgtgggaggcacatgcttgaagctttggttttggctcataattctaatactggtgttgaacaatgttttcagaggtttccgtgtttgaattcgctgtcactgagttagg

SEQ ID NO: 140049 - DNA, 333 bp, Arabidopsis thaliana
cccacgcgtccgcccacgcgtccgcttttttgcactgatttgtgcttcgcttacacattgctagtagattccccgatctgggttttttcttattcgtgttcatcatactaaagtttggtgcttttttgtgtttgtgtagatagagagagagatttaaggaaggaatcatggcagggggtggagctccagcagccaaagcagacgaaccacaaccacatcctcctaaagatcaacttcccaacatttcttagtgcatcaccagtcctcctccttggcctgaagctattcttcttggattccaacattagcttgtgatgcttgggacaacggtgc

SEQ ID NO: 140050 - DNA, 335 bp, Arabidopsis thaliana
atttctcagtgtttcggctcggcccagaacaagatcgcaagacttcaagatgccgtcgcacaagtcgttcatgattaagaagaaattggggaagaaaatgaggcaaaacaggcctattcctcactggattcgtcttcgtaccgacaacaccatcaggtacaatgctaagcgtaggcattggcgcagaaccaagcttggattctaagaggtttacttttgcttattgtgagagctttgttcttttgaaaaagactttgttttctttatcagttttgattgttcacatttgtgtaagacgatctttaatcatttatgtttccaaagtttcctgtagt

SEQ ID NO: 140051 - DNA, 296 bp, Arabidopsis thaliana
agtaaacatgagtttggtcgccagtttgcaactcatcctcccgccacggccgagaagcaccaagttgttgtgctcattgcaaagcccaaaacaagaacaagaactctcttctacttctcctccaatctctcttttaccaaaactaatctcttttgctcttgctatctctctaacttccttttcccctgccttagccattccttctctctcctcttctcagccactcagcactcctttcagccaatccaagttcgtccagagcggtcttctcaatggcaaaattaggccttgccctt

SEQ ID NO: 140052 - DNA, 406 bp, Arabidopsis thaliana
acccacgcgtccgcatccgtgtatacaattacaatacaatggacaaggtcaaagtatttgaggctcattcggattacattaggtgtgtagctgtccatccgacccttccatatgtgctgtcatcttctgatgatatgctcataaagctttgggactgggaaaacggttgggcttgtactcagatatttgagggacattcgcactatgtgatgcaagtggtatttaatccaaaagataccaacacttttgccagtgcttcgcttgatcgtaccataaagatatggaatcttggttccccagacccaaattttacactggatgctcatcagaaaggagtcaactgtgtagattatttcacagggggtgataaaccctatctaattaccggctctgatgatcatactgc

SEQ ID NO: 140053 - DNA, 325 bp, Arabidopsis thaliana
atttaaattatttgagcagccgcagcgacaggaagttttcttcaactgcgacggagcgtgaagttcacgctccggcggtactacctaagaactgatccaactttgaaaagaaaaatgttgccgaagaatgctattgagaagatccaagcaaatgtgagcaagccttgcttctggaagtctctctctccatgacaaacttggaaatctaaatccatgaggataattccggaagactttgtgagaagaacgcgtggtgcttttgtgcacagagtggtgtttagtgttcgttgggaaaactcctggcaactctggctggagcgagaga

SEQ ID NO: 140054 - DNA, 206 bp, Arabidopsis thaliana
ttgatattgataaagtaccaaagcatgtgaaaaatacgggaagaaacttccaacagaacggtactgtgacgagagacttaccgtgtttgttggaagataaccaggatgcagaagtgattggcatcatcaccttagaggatgtctttgaagaacttctacaagcagaaattgtggatgaaactgatgtttacatcgatgtacataaa

SEQ ID NO: 140055 - DNA, 353 bp, Arabidopsis thaliana
acgcgtccgcccacgcgtccgcccacgcgtccgcccacgcgtccgcccacgcgtccgccttggtggcctgtcctcaaaacacaagatgacttgattggtgtggtaactacgattgcatgggtcacctcaggtcaccatgcagctgtaaactttggacagtacggatatggaggatactttcccaaccgaccaacgacaacaaggataagaatgccaacggaagatccgacagatgaagccttaaaagagttctatgagtcgccagaaaaagtgttgcttaagacatacccatcgcagaaacaggcgaccctagtgatggtcacgttggatcttttatcaacacattcacctga

SEQ ID NO: 140056 - DNA, 452 bp, Arabidopsis thaliana
gtcgtcttcagcttcatcggccgttgcatttcccggcgataagagagagaaagaggagaaagagtgagccagatcttcatcgtcgtggttcttgtttcttcctcgatctctcgatcttctgcttttgcttttccgattaagatcgtagaccatggccgatgctgatgacattcaacctattgtctgtgacaatggtactggaatggttaaggctggattcgctggagatgatgctcccagagcggttttccccagtgttgttggtcgacctagacatcatggtgtcatggttgggatgaatcagaaagatgcgtatgttggtgatgaagcacaatccaaaagaggtatcctcacattgaaataccctattgagcatggtgttgttagcaactgggatgacatggagaagatttggcatcacactttctacaatgagctccgtattgctcctg

SEQ ID NO: 140057 - DNA, 398 bp, Arabidopsis thaliana
cgaaaagcaaagtagaaaacacaagtttctctcacacacattatctctttctctattaccaccactcattcataacagaaacccaccaaaaaataaaaagagagacttttcactctggggagagagctcaagttctaatggcgaacttggtcttatcagaatgtggtatacgacctctccccagaatctacacaacacccagatccaatttcctctccaacaacaacaaattcagagcatcactttcttcttcttcttacaaaacatcatcatctcctctgtcttttggtctgaattcacgagatgggttcacgaggaattgggcgttgaatgtgagcacaccattaacgacaccaatatttgaggagtctccattggaggaagataatacacagaga

SEQ ID NO: 140058 - DNA, 454 bp, Arabidopsis thaliana
cttatagcacggtgcgacaagatggcgagctcagtgacgctgcttctatggagtcttcttcttctcggtacactaagcgctattcaggccaaaaagtctaaggaaaacttaaaggagatcacacacaaggtttattttgatgttgaaattgatgggaaagcagctggtcgtattgtcatgggtctatttggcaagacagtccccaaaactgtagagaatttccgagctttatgcactggggagaaaggaataggtaagaatgggaaggcgctccattacaaggggagttcatttcataggatcataccaagctttatgctccaaggaggcgattttacacatggaaatggaatgggaggagaatctatctatggtgagaagtttgctgatgagaacttcaaactcaagcatactggtccaaggttcttatcaatggcaaatgccggtcaagata

SEQ ID NO: 140059 - DNA, 183 bp, Arabidopsis thaliana
cggacgcgtggggctctcttttctctccagatttcgatgcccgacgctcgagataaaaccgtacatctcttctccgttcactcaatcaaccaaagatgcgtgggattcttcacatccagggtggtcattgcggtaaccatatcggggccaagttctgggaaatggtttgcgccgagcacggca

SEQ ID NO: 140060 - DNA, 364 bp, Arabidopsis thaliana
gtaaaattgaaagcattggagacaatggagagaataaacacgaaatgggtagcagcagcagcgagtatatggattcaaagctttagcggagctacatacacattcgctatctactcttcaatcctcaaatcatctcaatcttatgaccagtctactcttgatttcgtctctgtcttcaaagacatcggtggtacctttggtatcatctccggtttcctttacacggctatgacttctaagtcacgcggttttggtgggccttgggttgttgttttcgttgggttggttcagtggtttgttggattcttttttatttgggcttcggtggttgggttgattgctccgccgcctgtgccgttgatgt

SEQ ID NO: 140061 - DNA, 108 bp, Arabidopsis thaliana
cggacgcgtgggtgttcttcttgtatcataaacaagaggaaacacttttgtttgtagtctctatgtcaagatttttcaataattttcatatatagtagagattatatg

SEQ ID NO: 140062 - DNA, 372 bp, Arabidopsis thaliana
gactttgttcatggaaaagatgggcttggcaaccaaaacttccctccacctaaaggaaaaccaattgaaaagtctggacctgagtttttagttgaacaagcaaagctttgccctggtgaaatcacggttgttgctttgggaccactaacaaatctcgcgttggctgttcagcttgatccagagttttcgaaaaatgtcggacaaattgttcttcttggtggagcatttgcagtaaacggaaatgtaaatccagcttcggaagctaatatttttggcgatcccgaagctgcagatattgtgttcacatgtggggccgatataattgctgtgggaatcaatgtgacccatcaagttattatgacagctgatgac

SEQ ID NO: 140063 - DNA, 366 bp, Arabidopsis thaliana
ctagaaaaggcttcacgcccgatttcttttttccccagaaaaaggcttcacttccgttcgttgttcttcatcggtctgcgccgcctcgcacatcgtttcacctttctcagaatctctcttcccgtcgattagtttcctcagagtgaatccaacccagatttttcagattttaatcggaattattcgggatctaatgctcgcgtcgagtttatcgctagaaaaccctaatttcggaggatctgtcacttttattatcagaagcttgttgttgtaattacggattaggtatgtcctgatcgttattgttctttgtttgcaggttgcgatttgttgaaaaccttgatttagactatgaagtctcttaat

SEQ ID NO: 140064 - DNA, 420 bp, Arabidopsis thaliana
caattctcttcgaagatcgttttgatccaagagagaattctctgagagattgagaggggaagagaaattcttcgatccatagagagataattctctttgaacatcgatccatagagagatatgcaaaccatctcgaaagcttcttctgccacctccttttttcgatgttctaggaagctatcaagccagccatgtgtgagacagcttaacataagaaagagtcttgtgtgcagagtgatgaagctggtctcttcacctcttaggactttgcgtggtgctggtaaatctatccgagtttcaaagttctgcagtgtctccaatgtctcctcattgcaaattgaactggtgccttgccttaaggataactatgcttatatcttgcatgacgaggatactggtacagttggggtggttgaccct

SEQ ID NO: 140065 - DNA, 420 bp, Arabidopsis thaliana
aatgctcaaatgttgagacattgcatatagtgaaaactccagaatgttcaaactttggtctgatttatgtagctgagagatgtaagctgctgaggaagcttcatattgatggttggaggactaataggataggtgatgaaggtttactttctgtagccaaacactgtttaaacttgcaagaacttgtgctgattggtgttaatgcaacacatatgagtttagcagccattgcttcaaactgtgagaaactcgaacggttagcactttgcggaagtggaacaataggcgatacagagattgcttgcatcgctaggaaatgtggagcattgaggaaattctgtattaaaggatgtcctgtttcggatcgagggattgaggcgctcgctgttggttgtcctaatctggttaaattgaaggtga

SEQ ID NO: 140066 - DNA, 387 bp, Arabidopsis thaliana
caaatctcaacattcgaatttttaaaaattcttcaaaatctcttcttcaatggcgacgggaaagagttactacgctaggcctagctatcgatttctcggcaccgatcagccgtcttacttcaccgcttccgattcaggtctcgaattcgacgaatccgatctcttcaatccaatccactccgattcaccagatttttgccgtaaaatctcttcatcagtcagatccggtaaaaaatcgtcgaatcgtccctccgccgcttcctccgccgcagcagcgtcgtcgcttcctgttaacgtgccggactggtccaagattctccgcggagaataccgcgataaccgacggagaagcatcgaggataacgacgacgatgacgatgataacga

SEQ ID NO: 140067 - DNA, 184 bp, Arabidopsis thaliana
agatctctctatctctaacgctattcgatgtgcgtaaattagggttcttcaggcgtcggatctgattgtatattgtgaaaatctcagatcgcagatctcttatcgaacaccgttgcgtgtcttcgtttccgtctggaggtgaagcaaagtcaggagctgtacatttccgctttcatgttctgtg

SEQ ID NO: 140068 - DNA, 236 bp, Arabidopsis thaliana
cccacgcgtccgtggtggatcaacgatggttgttcaggtgggcgacgtactagatcgaggtggagaggagttgaagatactttatttcttagagaaattgaaacgagaggctgagagagctggaggtaagattctgactatgaatgggaaccatgagatcatgaatatagaaggtgactttagatatgtgactaagaaaggtttagaggaatttcagatttgggctgattggtatt

SEQ ID NO: 140069 - DNA, 314 bp, Arabidopsis thaliana
cccacgcgtccgagatttttctctctctcgtcgaaagcaaaacagtcgcctttctctatcttctgctcatatcagccattgacacagttgctttgggtttccctcaaacggcgccgattgtctggttcgtcaccctaaatctctcttcatagctcctatatacgtgcctttgcgtatgtataagtgttttctcatcgctgtgagtatctatattcgccggcaaaatttctccgtccgttgagtttgatttttttctctgtaccatttagatttgaattggtgttgaactttccttgaggtgatgagtttgttgt

SEQ ID NO: 140070 - DNA, 422 bp, Arabidopsis thaliana
gtctaaaaatcaaaaaggaagagaaaataaaaaagtattcaagatatttaaatgatatgagaagtttaagtgacgtagaagatgttgaaggagaccttgataaattaatgaatggcgttattaagaagaagctcaagattattcccaacgacctcatatggggaaacaattcggatgatgtgtttacagcaatggaggctgcttttatgaaacccgtaattgaagacgtcgatgagcttcttgccacgggggtagatgtgaccatctataatggacaacttgatgttatctgttcaacaagtggaactgaagcatgggttcacaaactcaggtgggaggggctagaagaattcaagaaaatggaaagagagccattattctgcgaaagtgacagagcaacaagaggctttaccaaatcatac

SEQ ID NO: 140071 - DNA, 304 bp, Arabidopsis thaliana
cccacgcgtccgcggacgcgtgggttcccaaggatccgcattgttgaagttccgggcaagagtcaactcagatcctcatgggactcttgcgaattggaatgtttctggtattaatgatctctgctattggtcaggggttacttgtgttgacggtaaagtgcacattctggatcttagcggatattctttggaaggaacgttagctcctgagcttagccaattgagtgacttaagatctctaatactctctcggaaccatttctccggtggaattccaaaggagtatgggagtttcgaaaacttg

SEQ ID NO: 140072 - DNA, 268 bp, Arabidopsis thaliana
cccacgcgtccggtcgtgtttcttcttctctttgataacaatggcttctgcttgtcgtaagctttttaacagagcttccgtctcttccctcaaatctaccctcagatcaaccaccggatctacgtcggctgcgtcatcagccggatttcgtcttccttctcaacccactcgccatttcgccttctccagatgtccttcggagctgggatgtgttcagtcgctgttaccgctgcacagcacggtggcggcggcgaggctgacgtcatgt

SEQ ID NO: 140073 - DNA, 346 bp, Arabidopsis thaliana
aacagatcatagagctgtggcatgtctgccatgtctccataatccacaggacacaattctacctactgttcaaaggtgaccaagccgatcaaatctacatggaagtcgagctaagacggttaacttggttagaacaacatctagcagaagtaggaaacgcaactccagctcgaaactgcgatgaatctgtggtttctctatcatcaagtataaaagcattgagaagagagcgagagtttttggcgaaaagggttaactcgagattgacgcctgaggagagagaggagctgtatatgaaatgggatgtgccattggaagggaaacagatgaaacttcagttcgtgaa

SEQ ID NO: 140074 - DNA, 377 bp, Arabidopsis thaliana
agattctgttccacttccagtctcaatcatcgcagagattgatctttacaagtttgatccttgggagcttccaattatttatatttcctaatttatgctttaatgatatgattaaaatgtacgatttaattttactatgaccactgtaatctagccactagttaaatttggtatatatagtaactatcttgtggataataatattttgaatggtttaggcaaggcgagttttggagagcacgagtggtacttctttaatcctcgggatcggaagtatccaaatggggttaggcgaaaccgggcatcaacttccggttattggaaagcaacgggaaccgataaaccgatatttacgtgcaatagtcacaaagttggtg

SEQ ID NO: 140075 - DNA, 365 bp, Arabidopsis thaliana
tgagagttaagctataagagagtagaaagttggtgttaattaaagttttggttcggatattgatggtttttgtcaaaatgactgatgtttacttgatgattgtgatgttgatgggtttggggtttagtatagagttatcaaatgggcacaagttctatgttggtgggagagatggttgggtccttactccttccgaggattattctcattggtctcaccgaaaccggtttcaagtcaacgacactctttattttaagtacctgaagggaaaagattcagtgttggaggtgagtgaaaaagagtacaacacatgcaacacgactcaccctttgacttccctctcagacggtgactctctcttccta

SEQ ID NO: 140076 - DNA, 341 bp, Arabidopsis thaliana
caacagtaagggaaagactgatgcatcacctcctaagaaaaccggcaacacagaaacgcgaaaacgaaaaagaaaacaggtagaggttcactccttatcatctggaagcgagtcagccggtgacattgaaggtgaagaggatgttcagagtacatggaaagaggacggaaatgcgccaagctcgggtacatttgatgaatgtgatgattatggaggtgctctaaaaatcactcaggaaggtgatgtgatgcaagaagaaagtgactttgatcactgttcttcaaattgtacaaagatgaaagaatcaatgatgagagagatagagaaccttgaactgaagc

SEQ ID NO: 140077 - DNA, 378 bp, Arabidopsis thaliana
cccacgcgtccggaacttgttagaggctatctagatttcatgccacatgcctggaatattgtccctgtgaagcaaggttcctcgtgggttcgtatggtagttgatgcttgtcgtcctcatgatatcagagaagatacagatcaagaatatttctgcaggtacattccccttaatcggctaaatgaatccattcgcattaaggaaaagttggaaccaggatgttctgtttcttctctgtcaacgggaaaaggagttgaaagagctaatagtagtcttatccgatgcaagctaggctcaactgaagcagttgtgaagatgcgcacattagaggtttctggagcttccttagatgacattaggacttttgagtatacatgc

SEQ ID NO: 140078 - DNA, 351 bp, Arabidopsis thaliana
aggttttgttgcgttcttccgatttgggttggagaggaaatggcgtcgggatggggaataacgggaaacaaagggagatgctacgatttctggatggatttcagtgaatgtatgtctcactgcagagagcccaaagattgtacccttcttcgtgaagattacctcgagtgtctccaccattccaaagagtgtgattgtgatgtctagatcacttagttgtccaaattccaaaaatcctagatcaggtcgagcaattgggaaatgagtcccatgcctttgttgattggccattttcggaatcctcagctgcagaatcaagatgccattgagagatgatgttctcgtgtttaa

SEQ ID NO: 140079 - DNA, 380 bp, Arabidopsis thaliana
cttatgtacacagccacttggccaaaagaagtaagaaaaattgcaagcgatcttcttgtgaaccctgtccaagttaacataggcagggtagatgagttggctgctaacaaagcaataacgcagtatgttgaagtagtcccacaaatggagaaagagagacgtttggagcaaatccttatgtcacaagaacgaggttcaaaagttataatattttgctccacgaagaggctttgtgaccatcttgcacgtagtgtcggacgtcattttggcgctgttgtgatccatggagacaagactcaaggtgagagagattgggtgcttaaccagttccgaagcgggaagtcttgtgtactgatagctactgacgttgctgcccgggg

SEQ ID NO: 140080 - DNA, 397 bp, Arabidopsis thaliana
attttaatgccgccggccactcttgcgacgagctttatagctcctgtacttcctttcgaatcttcaacaccacttctccctatggtaacaacagtacggttcatacgacgccgtattgctgtttcactaactacgatacggtgcgggtgatgagtatgaacattttggattgctcacattacacgacggtgattgacaatggaaaaatgagaggagtggggcctttggattggtcctatggaatcgagctttcgtactcggtaacggagattggctgtgaccgttgccgaaagtcaggtggcacttgtggctttgacgccgagacggagatctttctttgccagtgttccggttccaacaacaaccctacgagagaatgtggtggaagtatgactga

SEQ ID NO: 140081 - DNA, 312 bp, Arabidopsis thaliana
aaaagatgtaactgagccaacggtagatagttttcttcgagaccttgaagaacctgaagacgaaccagaaacatcggaagagatcagcaaacaaagcatatagagagttctgattttgatgaaacaagctgtggagagcgggactgcacttgtgttagatgctgctgatctggacgcagacacagtcttttcaaaagctgttgccttttcgagtgtagcttcaccaggaccagttttccagcatggcttgagaaaacaaccaacggttaagaagcaggaaagccaagaattcgggtacggagacttggaggc

SEQ ID NO: 140082 - DNA, 110 bp, Arabidopsis thaliana
accacgcgtccgcgaccttctctctacggagttgagatcaatccccccaaatctcggtgtggttcctctagggtttttgatcggaatcggaatcgataatctaaccggca

SEQ ID NO: 140083 - DNA, 387 bp, Arabidopsis thaliana
cggacgcgtgggagacagaacactgtgtcaattttcattacctgggaacgaaaagcaaaatcaaagacaataattttttccccgagagagaaaatgcagaggttgaagcagcagcagcagcagcaacaagttatgatgcagcaagctcttatgcagcaacagtctctctaccatcctggtctccttgccccgccacagatagaaccaatcccaagtggaaatctcccccctggttttgatccaagtacttgccgcagtgtgtacgttggaaacatccatattcaggtgacggaacctctgcttcaagaggtttttgctggcactggtcctgtagaaagctgtaaactaattaggaaagaaaagtcttcttatgggtttgtgcactac

SEQ ID NO: 140084 - DNA, 433 bp, Arabidopsis thaliana
tctatctctcccttttcgacttgagagtttgggtcctttgggagaaagaagaagaagaagaaaaagattggattttgttcactttaacatcttcaatctctaaacccacctgagttttctccatttctctgtttggtttcttgtcagttttcaagaaagcgtccaaatcctagatcctctgttttctcttctctgtttgctttcattttctctggattcggatctgaccactaaagagaggtttatcgtttcagacaacaaaactcaaagatcgaatctatcttttgtccttagagtctggaaaaagcagctctcttttgatctcctctttagattcttcaaagctttagatgcttatctctctttctctctcagattccatttgaataaatgccattttgacagatcaaatatctcccacttttctctctct

SEQ ID NO: 140085 - DNA, 316 bp, Arabidopsis thaliana
gcgtccgcaaacgatgagaagtagaattaatgaaaaaatgagagctttacaacgtcgcatctctaattcaaataagacgggtaacgcttcagtgcttgatgaagccattgagtagctgaaacagcttcagcgccaagttcagatgttgactatgagacatggaataaacttgcatcccttgtgtttacctggtactacattacacccattgcaactctctcagattcaaccccctgaagcaaccaatgatcctctgcgtaatcataccaagcaatttgcttcgacttctaatgcaccggaaatgatcaatactgtg

SEQ ID NO: 140086 - DNA, 211 bp, Arabidopsis thaliana
gcgtccgccgcgagtccggaataaaacagttaatgccaatgataaccagcctaaggaagaggatacagaagccaagagtgcatgattcattagccatcagacaggggaaccttatcaagttcacgttgttgtcgattatattgtgtaatgcagcattaggcaactgacttgtttcctttgtttggcgataaacggcaaggtgtttggcact

SEQ ID NO: 140087 - DNA, 417 bp, Arabidopsis thaliana
caaatacttcagatatacccattcatcctcatatgagcaggctcagagagcatttcaggctgcacaagctatccatgatttgaatggtgtagcaagtgtccttatacacaatccttaccatattgagtcgctcataactatggcggattactttaagtttgtaggtgagaatgatatggctgcagattccattggaaaatgcttgtacggtttggagcgtgcgtggcatcctatgttcactccgttccagggtaactgccggttggagtttaaccacgatgaaaacaagctgttcttcaagacgcttttcactcacatgagaaacatggacaggcgtggctgtcataggtcagcgttggaggtctgcaaactcttgctttccttggacacgagtaatcctgtgggcgctttgttttg

SEQ ID NO: 140088 - DNA, 426 bp, Arabidopsis thaliana
caaaaacaaatcttaaacgttttactttgtgctgcactactcaacctcaatggccgcctcaacaatggctctctcctcccctgccttcgccggtaaggccgtcaagctttcccccgcggcatctgaagtccttggaagcggccgtgtgacaatgaggaagactgttgccaagccaaagggcccatcaggcagcccatggtacggatctgaccgtgtcaagtacttgggtccattctctggcgaatcaccgagctaccttaccggagagttccccggagactacggatgggacacctccggactttcagctgaccccgagacattcgcaaggaaccgtgaactagaagttatccacagcaggtgggccatgctcggagccctaggctgcgtcttccctgagcttttggctagaaacggagtcaagtt

SEQ ID NO: 140089 - DNA, 255 bp, Arabidopsis thaliana
cccacgcgtccgatttcgatgagccagaccaatcgggtcataactatggtcctgatgatcctcgggttacgactgctgtttctagggttgataaaatgattggtagggtgataaaggggctgatgcatagggagatctttgatgaggttcatgtgatattgcttggtgatcacagaatggtgaccaactgtgagtgtaacgagaaagcgatttacattgatgacttaacggattggatcaagatactcgcggctt

SEQ ID NO: 140090 - DNA, 235 bp, Arabidopsis thaliana
cagatcaaatcaagaatgtcgatctctctctatttccttttgctcttgcctctctttttaaacttcttcaaaaagctctcaccttctaaaggaaagcttcctcctggacctctaggtcttccgattatctggaacttgcactaacttggaaaatctctccagagatcttttcataaactttctcaaaactatggacccgtgatgtttctacatttcggtgtggtccctgtggttg

SEQ ID NO: 140091 - DNA, 226 bp, Arabidopsis thaliana
ggtatcccgagcctgcaactagtcttgatcgtttcaaattagccgacaatacatttggtcttcatcatgctgcttgtttagcttttgtttcaggtcatattgtggtttgtttgatacaactttggttcggtcaccaattgtgtgaatttaaataaattccgaaattaaacacactcaaagtgtctcaaaaaaaaaaaaagaaaaaaaaaaaaaaaaaaaagggggg

SEQ ID NO: 140092 - DNA, 417 bp, Arabidopsis thaliana
gtaggtctttcttgtaagcagccaactacaaccgaagagatatatgatacaatagctcatattgatttggctacagagtcttccccgagcttgagttcctctgttcagtctccatatcctgttatttgtagtcatttggatgacatatataaaatgattctggacaagttggctaagctggatgatctcttaccggtggttcttaagaaatgcttgggcacaaatggaacatgtccaatctctgtgttcaactattcccttttggtgaacttcaagacaaagctaagtagccactctgctcccaagcaaaatgggcataagaacttcaagcagcaattcactcggaaggcctcgcgagagctttttgttaagaagttttcctgcaaggctcccgtttatcataactgtagaatatac

SEQ ID NO: 140093 - DNA, 435 bp, Arabidopsis thaliana
gtcacaagtaccttcatatggaacttgatcctccgtttacaatctctgagctgagctcaaacgcaatttatctcacagaagattttactcccaagctggttgatttcgaatgctggaagacaattcttgcaagatcagaaaagaatttgagaaatattagtagccagggttcgatatgtgtactcccaaacggaatggagagccgatatcttgatgtgtcgggtaatatctatgcattcgggattcttttgctggaaattgtcagtggaagacctccttattgcaaagacaaaggattcttaattgaatgggcaaaggagttccttgaagcaccagaggcaatgtcgggattggtggattcagagctgaaacattttaaccaagaagatcttgagacggtatgcgaagtggctagccaatgcttgaaccggggac

SEQ ID NO: 140094 - DNA, 442 bp, Arabidopsis thaliana
cggacgcgtgggctcacttctgcacgatatgtggcaagggtttcaagagagacgcgaatttgaggatgcatatgagagggcatggagatgagtacaaaacagcagctgctctggcgaaaccgaacaaagaatccgtacccgggtctgagccgatgctgatcaagaggtactcgtgcccattccttggttgcaaacgtaacaaggagcacaaaaagttccagcctttgaaaacgattctatgcgtgaagaatcactataaacgcacccactgcgataaaagcttcacttgcagccggtgccataccaagaaattctctgtcattgcagatcttaaaacccacgagaagcactgcgggaaaaacaagtggctttgttcctgtggtacaacattttcaaggaaagacaagttgtttggtcacatagctctgttccagggacacac

SEQ ID NO: 140095 - DNA, 437 bp, Arabidopsis thaliana
ctgaattgattgctaagatcatatgtcatggtgctcaggactatactagagctacacttaggacttcctttcttgcttcttgtgtttcatcttgccatagccggactgtgagtcttgctgatactgtaactgttatggctcaaaggttgcacgagcgtctccaagagtgtaacggtgatgaggtcctcaaagcagaagctggtgctaaagttcaaaagtttactgaatgggcactcaaatgtataggttttcactcccgatgccagggccctagagataaagctaaccaagactcagctgctgagatccaactccagctttctgctttcaagatgttcttagatcttgcaggaaaccatctatcaggaaaggatttcacagaagcctttgatgcagcttgcttcccgcttacgctgttctctacctcgtttaatcct

SEQ ID NO: 140096 - DNA, 421 bp, Arabidopsis thaliana
cagccataaaagctggtttttatgacattggtattggagctgggctggagtccatgacaactaatccaaggggatggaaaggatcagtcaacccaaatgtgaagaagtttgaacaagctcacaattgccttcttccaatgggtattacttcagaaaatgtagcacaccggtttaatgtttcaagggaggagcaggatcaagctgctgttgattctcacagaaaggctgcttctgctactgcttccggaaagtttaaggatgagataacccctgtaaaaaccaagattgttgacccaaagacaggtgatgagaaacccataacagtttctgtggatgatgggattcgacctaacacaaccctttccggacttgcaaagctgaagccagtgtttaaggaagacggaaccacaactgctgggaa

SEQ ID NO: 140097 - DNA, 409 bp, Arabidopsis thaliana
  unsure (1)..(409): unsure at all n locations
acgctgtgtacgatgttgatgtgagattacaaggtgagattcagccgcagctggaggtgactccgattaccaaatacgggtcggatcctcagctcgtagtgggtaggcaaatcgccgtgaataaggtttacatttgctatggattgaaaggaggaaacattanggttctcaatatcaacacagcattgaggtctctgttccgtggccattcacagagagtgacggatatggctttctttgccgaggatgttgatatgttggccagtgttagcctagatggaaaagtttttgtgtggaaaatttctgaagggtctgagggagaggatcagccccaaataactgggaagatagtacttgctcttcagatactaagagaggaagacaccaaacatccacgcgtttgttggca

SEQ ID NO: 140098 - DNA, 335 bp, Arabidopsis thaliana
gccatgggtgtttagtcgtgccggttacgacaacggaaagaaagctccgggacgttgttcgccgtacatccccggttatggacagcattgtcaggatgggcggtctggatacgaagcttatcaagtcagtcacgacttactcttgtcgcaagcttacgcggttgacgcattcagaaactgcaaaaagtgttctggccgtgaactatgctcttgcggaatctctcaaaaatccttacctccgtgctttatccaccaaacttaacggcggtctccgttccataaccgtcgttctaacggcgaaagatgttaccgtcgaaagattctgtatgagccgg

SEQ ID NO: 140099 - DNA, 403 bp, Arabidopsis thaliana
aaaaatatctacagatgtcatgtttcatttggaattcaatacgtaatcaacacctaatcgcttgatcgatgttaaattcgagactttccagcagaaaatggagaatgagacagaattgagggttgttcatcaggaagaacaacaacgcgaagaaggagaagatgaatcacagccacaaaacccaccaccagccttacgacgtcgtttcgtgatatatctttacgttggatattttcttgcaagatggagtgccagaacatgggaattctctgttgcattgtatatgatccacttgtggccaaactctctgcttctcgctgccatttatggtgctatagaatctggttctactgcaatctttggtcccattgtggggcaatgggtcgagggaatggactacgtt

SEQ ID NO: 140100 - DNA, 361 bp, Arabidopsis thaliana
gtccgaaagaaacaaagccgtacaacgagggctcttcctgggcaacaaaaccaccattttcgttttatctcaatcttcgtctctttcgaaagatctaaccacaacaactccttaagatggataagtatcaacgagtggtgaagccgaaagcggatacgccgattgatgcgaatgagattcgtatcactagtcaaggcaaggcacgaaactacatcacctatgcgatgactcttcttcaggataaagggtcaactgaagttgtattcaaggcaatgggaagaacttctaagcctgttgtcattgctgattgtggtcagatttcttagatctgtctgagattgttgatgatgatgatgatgat

SEQ ID NO: 140101 - DNA, 412 bp, Arabidopsis thaliana
cggacgcgtgggttgtactctctcagttactatctctctgtctcatggcgaatccgacggagaacctcgacgcgaatccacaaatccgagaaccagaagctgaagaagaagttgaagaactgaacggatacgaaggtgacgatggaggagaagatgacgatggagaagacgatgacaccgagtcgaaatctcaaacgcgcgaaagcggatccagtgtagacagaatcaaggcggaatcgctattccgtcggatgcgagctgctcctgtgccggtgcgtgttcacgacgtgattatcggtggaaacgagaagactaaggaccatatcattgaagcggaagtggatgctgtgagagaggcgaccacgttgccaattcgaatctccgtgcgttagatatctttgattccgtcaac

SEQ ID NO: 140102 - DNA, 413 bp, Arabidopsis thaliana
acggacgcgtgggataaaacaaaaagaaaaaaaaaacattttttccaacacttgaaaagaaaaatcataaactttactaataataaagtttactattaatgaagggaggggttaaacttttggccgtgtgcctttgcgtggccacggcgaccgtcatgatggtccaagcggaggacccttacttccaccacgtgtggaacgtgacgtacggaaccgcatctcctctcggcgttccacaacaagtcatcctcatcaacggtcaattccctggtcctaacatcaactcgacttctaacaacaacgtcatcgttaatgtcttcaacaacctcgacgagcctttcctcatcacctgggccggaatccagcacaggaagaactgctggcaagatggaacagctggaacaatgtgtccg

SEQ ID NO: 140103 - DNA, 387 bp, Arabidopsis thaliana
cggacgtcgtggggctgaagtctgaaagatgcaggcaagtgataggtttaacataaattctcagcttgagcatcttcaagctaagtatgttggtacaggtcatgcagatttgagcagatttgaatggactgtgaacattcagcgtgatagttatgcttcatacattggtcactacccgatgctttcttactttgcaatagctgagaacgaatctattgggcgagaacgttacaacttcatgcagaaaatgctcttaccttgcggccttcctccagaaagagaagacgagtaagagcttgtgtgcatttgaaattaaaaaaaacattctacttcttagaagcttgtgtgcaatcatctttaactgctccaccaatgtaattgccgaaa

SEQ ID NO: 140104 - DNA, 438 bp, Arabidopsis thaliana
gtccgcgtcgatctctccttcaacaatttaaccggtccaatccctgattctccggttttcttaaaccaggaatcaaatttcttttcaggaaacccgggtctatgcggtgaaccgacccgaaacccgtgtcttatcccttcctcgccgtctatcgtctccgaagccgacgtaccgacgtctacaccagcaatcgccgcaataccgaacacaatcggttcaaacccggttaccgatccaaattcacaacaaaccgacccaaatccccgaaccgggttacgacccggagttataatagggatcgtagtcggagatatcgctggaatcgggatcctcgccgtgattttcctctacatctacagatgcaagaagaacaagatagtggataacaacaacaacgacaagcagagaacagaaacagacacaattacgttatcaaca

SEQ ID NO: 140105 - DNA, 445 bp, Arabidopsis thaliana
  unsure (1)..(445): unsure at all n locations
attgctcaatatctgtaatacatctccgatattaacgacaatagctcccggaattggagggacatgaatccatttgtctccatcctcagtggctcgggcgtaaagactgcttaatacaccatcttcttgtaggaggagagtgagagtgttgatgtctgagtggcgaccagttcctatggccaggcttggctcaggacatttcggatagtagttgaagttcattctcattgttcccattagggtttctttattggactcatcgatgattgtgtttagattgttgatgaacagaaggccacgtggcagcgaagtcatgtcgttgaggaagatactcaaacttgaggaaatctctccattccaaaacactttctatgcaaggattgaaacttgtggtcaaccacgccgtctccgacactgaactcnctctccaataccttcttctctc

SEQ ID NO: 140106 - DNA, 444 bp, Arabidopsis thaliana
gcagagcgagaaaaaatggcaaccatgtctgctcttcagagctcttttacttctctttctctatctcccagctcttccttcctcggacagcgtttaatttccccgatttccctctccgtcacttctccggtcaagcccgctgagaacccatgtcttgttcttgcaaagctcaagcgttgggaacgaaaagaatgcacaccaaacagtcttccgattctccacaaaatgcatgtcaagtttggagatacagtcagagtaatatctggacgcgacaagggtaaaatcggagaggttactaagattttcactcacaacagtaccattgtgaatatagatgtgaacctcagaacattacacatgaagagccgagaagagggagagcctggtcaaattgtcaagatagaagcacctatccacagctcaaatgtgatgttgtattcaaaa

SEQ ID NO: 140107 - DNA, 451 bp, Arabidopsis thaliana
ctccaattcaaatctctgtctgtgtctctgtctctcaactttcaatttctgagagagtcggaaatattctccagatcgcctaaggcaaattcgttttccgattcggcctagcgacggcgagagaggagaggaagaggcaagttgattgaccggagaagaagacgaagccgttcttggagaaaatgataacgattccttatttaaccgctgtatccacctacttcagctatggattgctctttgcttttggtcagctccgagatttcttccgtcgcttcattgattggtggttcactagcaatctccagggatacgcgccgatctgtttggggcatgaggatttctatatcaggcgattgtatcatcggattcaggattgttttgaacgacctatatcgagtgcacctgatgcttggtttgatgtggttgagcgctactctaatgacaacaa

SEQ ID NO: 140108 - DNA, 446 bp, Arabidopsis thaliana
aatctacacacaattaacaaagctcaatctctctcttctcttactctctacctctgtagctgatagggtcagcttcgtcggcgctatttctgccggatttcacggacgatttgagatctgttcttccttcttcttttttcctctcctgatctgattcaactctaatctgcttcagtctctgtgttacgaactgattccgttcagtgaaaaaaaatgttgagcgtttcaagcttctgcagtttaatgggagactgaggagtcatttgagtgaaacgtttggaactttggaaacagatggagtgtcgtttggagttgaagaaggtattaactaaggaaagctcaaaggcatttacaccggataagtttagagacgataaacgcgggttatcttactccgatttccaccgcgagattacgagaaaagttgaagatgtatgtcctaaacg

SEQ ID NO: 140109 - DNA, 448 bp, Arabidopsis thaliana
ctgctctagtttccaaggatgttgcacaaaaggatattgagattctcttgagacgagtgaaaactgctacagctttattgacttacctgaaatctaaagcgacaactgtggctgctgccgatttggccaatctttcacttgaaactgaccagctccaagatacaatagacgaacatgatgggacttatgtcactgagatgcttcagcatgtagagaccgttacaggcgtcatggagtctctggctaggcgtgcttttatcgccgaatcagaagccgctatcgagaaaggaaaggttgtgctaagccaagaggaaattcaaagaaaggttggccaactcgagaacatgtccgtgaagttagaggacatggaaaagtttgctcttgggaccagtagtattctctgtgaaatgcggcagagggttgatgatttggttgaagagacctctag

SEQ ID NO: 140110 - DNA, 176 bp, Arabidopsis thaliana
ctttgatttcctcgattcatggggacttatcagctataatagctccgcctctgctaatccgctcaagtgggaattaaaaagacgccggaaaatccgccggagatgctgcttctgagccagccatagctgtcacagacactgccaagagaaactgcaatggctgcaaagcaatttgc

SEQ ID NO: 140111 - DNA, 449 bp, Arabidopsis thaliana
gttatttaaaaatgggttttcttcttttgtaacgaaaaaatgtgtcaaactttgaattgaccattttttttttataaggattcgatgaagaaattgagaagctattactcaaatgtgagacatcatcagaatcaccatcatcatcaccatcatcatagcaacattgtttcttcagagaggaaatggatatttttccctctattgattggttcaatcttcgctttgttcttactcttcctcacaacaaccctaacttcaccaaccggaggagtccgatttctcccttttacccgacccgttttgttaaccggatctggttcatcagctttcgttgaatccaaaatcaaacctcaacaaatctcatcactcccgtcgccaccgcgttttgcttacttgatttctggatccgccggcgacgggaaatctctccggcgaactcttttggctct

SEQ ID NO: 140112 - DNA, 423 bp, Arabidopsis thaliana
agatggcagactacattgttgcatctccgcatggactccgaaggaaaaatgcatacccttcagaaatcgtggaagcactagctactcatgtatctgattccctacatagcagagaagtcgcggctgtatatataccatgtatcgatgaggaagttgttgagttagatactctttacatttcatcaaaccggcattacttggatagtattgctgaaaggctcggattgaaagatggcaaccaagtgatgatatccaggatgtttggcaaagcttcctgtggctctgagtgtagattgtactctgagattccaaagaagtacttggataattcatcagatgcctctggtacttcaaatgaagactcatctcatattgtaaaatctcggaatgcacgagcaagttacatttgtggtcaagatattc

SEQ ID NO: 140113 - DNA, 436 bp, Arabidopsis thaliana
  unsure (1)..(436): unsure at all n locations
nggaaagattcccaccgaacaatgttcttctaatgcttgctggagctggacttttatggatgggatggtccggttttaacggtggtgctccttacgcggccaacttaacctcctctatcgccgtgttaaacaccaacctctcggccgccacaagcctccttgtatggactacacttgatgtcatcttctttggcaaaccttctgtcatcggagcaattcaaggcatggttactggcttagccggcgtcactcccggagcaggtttcagtcatcttcttttcaagttttttgtttactctaagtctctaagtttatttatgattaaggttgaattatgtggaaacttattaatattgcattgttaatttattatactgacaaataagatatctattgcaggtttgatccaaacatgggcagctataataattggagt

SEQ ID NO: 140114 - DNA, 379 bp, Arabidopsis thaliana
gtccgaaaaagttggacgccagaaaacaacaactagaggacctctctaggcgatatgaagaattagaggcaaaatcaaaagcagatatgaaagttcttgtcaaagaggtcaaatctctgaggcgttctcatgtggaattagaaaaagagctaacccactctttgacagataaaactaatgccgagaaactcctccaagaggaaagaaaactactagagaacacagttgcggctagaaagaagctgcttagtgactgcagaattctccacgaccggcttaaagagtacaacttaaatttgtcaatggatggaaacggtaactttgtcgacgactcaactacaatatcagacgttttgcgtttactgtcaatatctgatga

SEQ ID NO: 140115 - DNA, 442 bp, Arabidopsis thaliana
aataatctccctgaagcgatcaatgcccactttagagatgtcgaaagaagcatttatgatgactcaagcttagacactcgttcagactacaatgttgtggaagataacaatcacgttcgtggtagcgagactaggccagttaacgagtctaggccagtccctggcgcacttccatctatactctcggctgctcgggcttttagaccgtctttgcttctagatcccaattacagacggaatatccttaggcagctcagtggctctgctctctctggaagtccttctccatcatctcacactggagaagtcactgggttccctgctcactctacctggggaaatgatcacactcgtcctcctggacttggagcggttggagacggttatgctaggcattcaccaagctatggatcccaggtccatggtgggacacatagggatg

SEQ ID NO: 140116 - DNA, 446 bp, Arabidopsis thaliana
acgcatccgcccacgcgtccgcggacgcgtggggcggaatacactaaagctataagattagcatttgagctttgtaggcctcacaaagtttttgagctcttcagtggtctctgcaggaaaagagattcagacgaacagatagtgaaagctcttcaaggacttgaaaaagaagagttccgtctactttttgaatatgtccgagaatggaacacaaaaccaaagctatgccacattgctcagtttgttctttacaaaaccttcaacatacttcctcccacagaaattgttcaggtaaaaggaattggggaactcctggaagggttaatctcatatagtcagagacatttcagtagaattgacagatttgtaagaagcagtttcttgttagactacacacttggtgagatgtctgtgatcgatccagagactgttgagacagagtatcc

SEQ ID NO: 140117 - DNA, 418 bp, Arabidopsis thaliana
cccacgcgtccgcccacgcgtccgatcaaatctctctctttctctctctaatggcggcgacattaggcagagaccagtatgtgtacatggcgaagctcgccgagcaggcggagcgttacgaagagatggttcaattcatggaacagctcgttacaggcgctactccagcggaagagctcaccgttgaagagaggaatctcctctctgttgcttacaaaaacgtgatcggatctctacgcgccgcctggaggatcgtgtcttcgattgagcagaaggaagagagtaggaagaacgacgagcacgtgtcgcttgtcaaggattacagatctaaagttgagtctgagctttcttctgtttgctctggaatccttaagctccttgactcgcatctgatcccatctgctggagcgagtgagtc

SEQ ID NO: 140118 - DNA, 457 bp, Arabidopsis thaliana
caccagtctctcgcaatcttcgctcttctctttgctctctctctctcaacgcggttcagatccgagtttgggagattcaagctccctgaaaaaagccctttactctcgcttaccaactttgctccagcatggcaggatctgcaccagaaggcacacagtttgatgcacgtcagtttgaccagaaactcaatgaagtacttgagggacaagatgagttcttcacatcctatgatgatgttcatgagagctttgatgccatgggtcttcaagagaaccttctcaggggtatttatgcttatggttttgagaagccttctgctattcagcaaagaggaatcgtccccttctgtaagggtcttgatgtgattcaacaggctcagtctggtactgggaaaacagcaactttctgctctggtgtcttgcagcagctggacttctcccttatccagtgtcaggc

SEQ ID NO: 140119 - DNA, 253 bp, Arabidopsis thaliana
gggaggtgttaacttcgtgaaggacaagaccggcctgaacaagtagcgatccgagtcaactttgggagttataatttcccttttctaattaattgttgggattttcaaataaaatttgggagtcataattgattctcgtactcatcgtacttgttgttgtttttagtgttgtaatgttttaatgtttcttctccctttagatgtactacgtttggaactttaagtttaatcaacaaaatctagtttaagttct

SEQ ID NO: 140120 - DNA, 427 bp, Arabidopsis thaliana
  unsure (1)..(427): unsure at all n locations
attagccctttcgttgcgacgctctctgcgaatccaactttcgtttcagctgtagtcgcgtggttctttgcgcaatcgagtaaaatggttatcaatttcttcattgagaggaaatgggattttcgtcttctctatgcttctggtgggatgccttcgtctcactcagctttatgtatggctttgacgacctctgtggcgctttgtcatggagttgcagattccttgtttcctgtttgtttagggtttagcttgattgtcatgtatgatgcaattggtgttagacgccatgccggtatgcaagctgaggttctgaacttgatcattanggacttgttcgaaggacatcccatcagtcaaagaaagcttaaggaactgcttggtcacactccttcgcaggttcttgctggagcattggttggtattgtga

SEQ ID NO: 140121 - DNA, 412 bp, Arabidopsis thaliana
cccacgcgtccgcggacgcgtgggaagaaaataatataaacacacacatacaagaactgaagaatgagcagacccggagattggaactgcaggtcatgcagccatctcaacttccagcgccgtgactcttgccagcgatgcggtgactctcgttccggccccggtggagttggtggcttagactttggtaatttcggtggcagagccatgtctgctttcggattcaccaccggctccgacgttcgtcccggtgattggtactgcaccgtgggaaactgcgggacacacaacttcgccagtcgctccacctgcttcaaatgcggcactttcaaggacgagaccggcgctggaggcggaggtggtggcatcggcggtccggccatgtttgacgccgacattatgcggtctagag

SEQ ID NO: 140122 - DNA, 369 bp, Arabidopsis thaliana
cccacgcgtccgctctcgccgacaattaccggctacaaggtttctctgctcgtcaacgttctctgaattagtggtattgaaagatgagcttatctcagaatgctccgaaaagtaagggtattaaaagagaggagctcaagaaacagtacgaagatgttgaagatgaggaagagattgggtccgatgatgatctcactaggggaaagagaagaaagacagagaaggagaagcagaagctagaagaatcggaactggttgaaatgacaaagcttgagaatttgatattcgggtcactctactctcctgttacgtttggtaaggaagaagaagaagatggttcggctttgtttcatgtagaccgttctgctg

SEQ ID NO: 140123 - DNA, 179 bp, Arabidopsis thaliana
caaatagtaatattagtagtaatttttttatttttttggggaaaaaatgggtggatattttggaatttctacaatttttattatctgtttgttgggaatttcagccagtgctgaggtattcatcattggttcgtcatcatgttctgatattactcatgcacttctgaaagcattcagat

SEQ ID NO: 140124 - DNA, 434 bp, Arabidopsis thaliana
cggacgcgtgggcggacgcgtgggcagccatgttcatccagatggcacgtgattcggaagccaaaactctggcaagtggagcaatcctcaatacaaacaaagaagaatctgagagagcagaggaacataagctatgaggggtcaagagtggcagatatatcagtgatggccacagagtatagccccgtgctgaaatggcttagctacagggcatctccagatgcgtttccgggaatgggcgaagagacagatgaggaggacagtgatatttctgaagatgatgaaatacaagactggtgacattcaccatcttaagtgtcttatatgttaggtcagatagaactggtatgatagttaacaacttaacatcaagggaaggaacactaattgttctgcttacttataaatagaaaatggagagtcacttctctatc

SEQ ID NO: 140125 - DNA, 425 bp, Arabidopsis thaliana
cggacgcgtgggcggacgcgtggggaatgatcctaatccgtttagcttttaaaaaaataagaagacatatttatcaacttgatcaacttgagcaagttgcagcagatattttcctcggccaagatctagagttttgagaatggcgatggtatcaggaagacgatctactctaaaccccgacgcacctctttttattccggcagctgtacgacaagtggaagatttctcaccggagtggtggcaattggtgacaacttcgacttggtaccctgattactggatcagtcagcagcagcaaggcgcggatggtttctatgacaacggagagaatgagaatggtggaggtcatatcgatgtagctgatcttcttccagaatcatttgattttgatgatatggaagatttctttgacactgatgctgctg

SEQ ID NO: 140126 - DNA, 409 bp, Arabidopsis thaliana
cggacgcgtgggcatggtttaaactatactcagcagcctataaggtccgagttctcaagaagtttattgcaagaacaccagcaactcccaaatggttacatgcatgggaaccttgggttgcagacaatgccgaatggggcaaatgttttgggaggtgatgtagaatctagtagggataagttatcagcaaggggatttactccagaacttcataatgttcctatgaggcttgagatgggagaatctccggttaattatgatttctttggtggtcaacaacaatcaaacacacagctctctggcatgctccagcctttgccaaggcagcagatgacattcaatgatatgcaactactgaagcagcaagttatggttaagcaaatgcatgaatatcaaatgcaacaacaac

SEQ ID NO: 140127 - DNA, 391 bp, Arabidopsis thaliana
cccacgcgtccggcgaagaagacgaacgcaaagatgcagattttcgtgaaaacgctaaccggcaagaccatcaccctcgaggtcgagagcagtgacaccatcgacaatgtcaaggccaagatccaggacaaagaaggaattcctccggaccagcagaggttgatcttcgccggaaaacagcttgaagatggtcgtaccttggctgactacaacatccagaaagagtcgactttgcatcatgttctgaggcttacgggaggtatcattgagccttcattgatgatgttggctcgtaagtataaccaagacaaaatgatttgtcgcaagtaagatctctgatcttttctctttgttgttctaagtgtaccatgtccatgtgtgatgattatag

SEQ ID NO: 140128 - DNA, 258 bp, Arabidopsis thaliana
cagacgcgtgggggagatttcagggtccatgagattttaagggtatagatcagagggtagctttagttctgccattgatttaattgaattattgattttgtgtgttttggtgaattcattttgcttaacacgatatgaccactgtagtgttgttttgtgtcctctgtagctgaatctctctgtttgtttaagggaataagcttttgttctttgatgatgttatagtggtacactcttatatgtgatgtttctagttct

SEQ ID NO: 140129 - DNA, 423 bp, Arabidopsis thaliana
gtggcgtttgcgtggacattggtggctctgtgttgcgggtctcacacttcgcatattcttcattccttgggaattcacattgctcatggagggatttgggatttgctacacaactcttacgtgaaaggtggtttggccgttggagctttgttgggaccaggaagagaattgctgtttgatggcataaaagctttcgggaaaagatcacctaatatgaactcgttagttggattgggatccatggctgcattttccatcagtttgatctcactagttaatccagaactggagtgggatgcttccttcatcgatgaaccggtcatgctgcttggctttgtgctccttggtcgttctttggaacaaagagcaaagcttcaagcatctaccgatatgaatgaactattgtcactcatctccactcaa

SEQ ID NO: 140130 - DNA, 345 bp, Arabidopsis thaliana
cggacgcgtgggattttacaaggttatgggttgactgagtcaacgggtacaggagcttctacggatactgttgatgaaagtccgcaatacggtaccgctgggaaattgtcggcaactatggaacggaggattgttgatccggttactggtcagattcttggaccgaaacagaccggtgagctttggctcaagggtccttccataatgaaaggttatttcagcaatgaggaagctacgatttcgactcttgattctgaacgatggttaacaactggagatctttgctatatcgatgaagatggattcatattcgtggttgatcggttaaaggaactgatcaagtac

SEQ ID NO: 140131 - DNA, 243 bp, Arabidopsis thaliana
cagacgcgtggggtcgcttaatggggaactccagcaacttgatgttcaatctaacgggtatgttcctcacagttgatgctgggtataactaccttgtgaggctacatttctgtgagactcttccacaagttaccaaagcaggccaacgtgtcttctccatattcgtcgaagataagatggctaagaaagagacggacgtgattcggttgaccggtggtcctcggattccaatgtatttaaatt

SEQ ID NO: 140132 - DNA, 450 bp, Arabidopsis thaliana
  unsure (1)..(450): unsure at all n locations
ctccgttcgaaatcgcatccatcgccgtcgtcgtcggtgacgaaaaccaccgcgtaaaaccgtttcctaaatcagatgttcaatcttagaagtatctcttagaagctctcttgtatgaaaaaatgggactgttaagcataatccggaagatcaagaagaaagagaaggagatgcgtattcttatggttggacttgataattctgggaagacgacgattgttctgaaaataaacggagaagacacaagtgtgattagtccaactcttggattcaacatcaaaaccattatctaccaaaagtatacgctaaatatatgggatgttggtgggcaaaagactataagatcgtattggaggaattactttgagcagactgatggtttggtttgggtggttgatagttctgatcttangaggttagatgattgcaagatggaacttgacaatctct

SEQ ID NO: 140133 - DNA, 395 bp, Arabidopsis thaliana
cggacgcgtgggcggacgcgtgggcggacgcgtgggcggacgcgtgggcggacgcgtgggcacaaatattagtctttaattttcgaaacttctctcaggcgaattcaagtttcatagttttggtctagtttttgtccaccgatctatctctttagttgaaacttatcagaatggctcgtccacaagaccctccacgtggtttcttcccttttggaaaccccttcaaaaatctatcttcgaagaactcggtactctcctcaaagcttctcccactcctgaacaattttgagaccaacttagcatcttctattagtaagcttgtccctaaggaaaagagcgatatcctgactgtctcatggatgaaacaagctatggaatctctttgcgagacacat

SEQ ID NO: 140134 - DNA, 311 bp, Arabidopsis thaliana
cggacgcgtggggtttttgtttctctcttcttcttgattgttgcgcttttgttagctttctctggttcattttccatggacggaccttgacctctctgcttcccttcgtgcattttcgctctctcactatcctctctctttctagtgtttgtttgatcctctgcgtactctgttcttcttctctcttcagataaaacaagtcttgcatattgaagatctgatgtcttatcgattgctaagtgtggataaggatgaactggttacgtcaccttgtttgataaaacgtaactacttgggtctctctgaatgtt

SEQ ID NO: 140135 - DNA, 290 bp, Arabidopsis thaliana
cagacgcgtgggcaaatagccaaaaggggaagaaacccattgtgatgcggatgagggtaggttacaagattaatggcaaagatgtgttggaggaaggacaaatcaacaatttcccacgtgggttatgagaacgtttcaggtattccaagattcatatacatattcctaatttatataatcacttcccatagactaaaacaaacttcttcatagaacctttgtatgtgtgattcgttggctttgtgtgaaatctgggtttaaagtgagataactttttgatggtctgagtt

SEQ ID NO: 140136 - DNA, 396 bp, Arabidopsis thaliana
ctaattatcttcaactaaaaaaccaaaattgacttcagattcgccttcttcttctcttgcaacgtttcaatttcatgtgccttcgaccttagattccaattttgaattcgaatttctggggtttcgattgagctcttctcgcttttttctacggttttgtcgcatatgctgcgagtgtgagtggaaatttgggggaagaagaagaatgaagatgcatataaaggagatatgcttggagggttttaaatcatacgcgacgaggacggtggtttctggtttcgatccacatttcaacgcgataaccggtctgaatggttcgggaaaatccaacatcctcgattccatctgtttcgttctgggtatcaccaatcttcagcaagttcgagctgctaatct

SEQ ID NO: 140137 - DNA, 336 bp, Arabidopsis thaliana
ggaaaatttttccttgattcattacgacagagagaaccatgccggcgaaacagaggaccccgaaggtcaacagaaaccctgatctgatcaggggtgttggtaaatactcgagatcccagatgtaccataagagaggtttgtgggctatcaaggccaaaaatggaggcgttttcccacgtcacgacgctaaatctaaggttgatgctccggtggagaagccaccgaagttctatccagctgaagatgttaagaaacctctccccaacaggcgcacggcaaaaccaaccaagctcagagctagcattactccaggtacagtgttgattatccttgctg

SEQ ID NO: 140138 - DNA, 372 bp, Arabidopsis thaliana
ggggtttgcccaacctggaatcaaaaaacttgtgtttaagctgaaggaactggtcaggcgtatcgatgaacctgtttcaagacacatggaagagcatgggctagagtttcttcaatttgctttccggtggtataattgtcttctgattcgtgagatcccattcaatctcatcaatcgactatgggacacttatcttgctgaaggagatgcgttgccagacttcctggtgtatatatatgctagctttctcttgacgtggtctgatgagctgaagaagctagattttcaagaaatggtaatgttcctgcaacaccttccgacacataactggtcagaccaagagctcgaaatggttttgtcaagagcttacat

SEQ ID NO: 140139 - DNA, 402 bp, Arabidopsis thaliana
ggtcaaccaaccttgactggtacaagggaccaactcttcttgaggctcttgaccagatcaacgagcccaagaggccatcagacaagccccttcgtcttccacttcaggatgtctacaagattggtggtattggaacggtgccagtgggacgtgttgagactggtatgatcaagcctggtatggttgttacctttgctcccacagggttgaccactgaggttaagtctgttgagatgcaccacgagtctcttcttgaggcacttcccggtgacaatgttggattcaatgtcaagaatgttgctgtcaaggatcttaagagaggatacgttgcctctaactccaaggatgatccagctaagggtgccgccaacttcacctcccaggtcatcatcatgaaccacc

SEQ ID NO: 140140 - DNA, 388 bp, Arabidopsis thaliana
aggaggagcaattgcatgtatgctcttggctcttctcttcttagggacatggccagcaatcatgactctaaccgaaagacgcggtcgacttcctcaacacacttatcttgactacacactcacaaatctgttagctgcagtgatcatagcgttgacactaggagaaataggtccgagcagaccaaatttctttacacagctctctcaagataattggcagtcagtgatgtttgcaatggctggaggaatagttcttagccttggaaacttagcaacacaatatgcttgggcttatgttggtttatcagttactgaagtcatcacagctagtatcactgttgttatcggcacaactttgaactatttcttggatgatagaatcaacaga

SEQ ID NO: 140141 - DNA, 341 bp, Arabidopsis thaliana
ggacagtgaaatcgaagaattgaagcagaagcttctccatctctgcaatctctctatccatctctcgtcatcgcatgtttcgcttcccaattcggaagaaagagagacgacgcgtctgaagcatatctccgtaatcggggtgaagaaaaacgcggcgagaagaagaggcagattttcgttttgggagggtagacaaatctggcgaaagtggagggcctaatggcgaggccgtggcttaagccaggagcttgtataaatggagatcaatatgactacgacggttcggaagacgaccattccaggccttggtggcgccgtcgtctcagatccttgtatatggc

SEQ ID NO: 140142 - DNA, 347 bp, Arabidopsis thaliana
acgcgtccgccacgcgtccgcccacgcgtccgcgcacgcgtccgaaaagaatcaataaccctataaataaaagatcagacaaacagaagtttcctcttcttcttccttaagctagtaccttttgttcttgaaattagggttaatttcttttttccaaataccatcaattctccagaccataaaaactcaaaaagatcagatctttcctctgaaaaagagatacccaacttatgtttttgtgtgtctgtatatagataaacattacatacccatatttgtgtatagacataaatagtgggaattaaggtaacaaaaagaaatgggaataggaagagtagagctgaaga

SEQ ID NO: 140143 - DNA, 366 bp, Arabidopsis thaliana
gcaaagtgtgtcttctccgatttcgcagacggttagatctcaacaagcgattctcatcgtcgtgaaccttcttctttaatggcgatcgataactctcgtcctcctccggacgaaatcttttacaagacgaagaagattttgtatcgtggacaaaggtgcaatatcattctccaggataagaatggaccatgtcctctcatcgccatttgtaatgttcttatcttgaaacacggaattaatctagacacttacaattctcaagtatctgaagaggatttggtgaatcttgtgatcgatgtactggatgatacagacgagtacattgatattgggctcatcagaaaacttgcttgtgggataaatgtc

SEQ ID NO: 140144 - DNA, 421 bp, Arabidopsis thaliana
  unsure (1)..(421): unsure at all n locations
ggttcttctcaattagtccttcttcacctcttgcttgagtggtgagaaaaaaggaagatggaaatgggtcgtcgagatttgatgagacgtggaacaaccaatcgattttccaataaacaacaatctggatctgggttttctacaaaatctaagaaaggaatgctgaagaaacttggttttgctgatgagaaactgaaacaagagatgagctacgatactcttccttctccagatttagaaaacgaggtttctaagaagaaatctaagcttccaaaaaagaatttgaaagacactaatggtgtggatcatgcctctgtaccacggaagcttcgttcagccatgaagaagcggaatcttgaatctgtntctaagctatcctctgtttcaaagagacttaaccggtttaaaaccggaactgaat

SEQ ID NO: 140145 - DNA, 278 bp, Arabidopsis thaliana
aacaaatcttaaacgttttactttgtgctgcactactcaacctcaatggccgcctcaacaatggctctctcctcccctgccttcgccggtaaggccgtcacgctttcccccacggcatctgaagtccttggaagcggccgtgtgacaatgaggaagactgttgccaagccaaagggcccatcaggaagcccatggtacggatctgaccgtgtcaagtacttgggtccattctctggcgaatcagcgagctaccttaccggatagttccccggagacta

SEQ ID NO: 140146 - DNA, 324 bp, Arabidopsis thaliana
aggattcatcgatgttaacgtcgtccattcttcttctttgatcccttcattgatctctcacatttccgattccaatttagggtttcctctcttttcacatttctagggtttttcttgttccctttgtaccggagatggtgaattgaaaggaaaaataaaacgcttttgagagcttatatttgaggttgtttcctcatgtcatagcattctatttaccattgtggacagcttttacggaaatctttcatatgttgtagttgactttgtggaagagtccataccacttttatcttctcaactcatgaatctattggattctcggtc

SEQ ID NO: 140147 - DNA, 359 bp, Arabidopsis thaliana
gaaaattctcatctgattcagtccatggctgccacggctcttttccgatcgattcgccgacgcgacgtcgtctccgcgcctctttccgtttacaaatcccttgctggtaatgctcaaccttcctggggtagttcatacattggtcagaactatgcaagtttctccagagctttcgggtaggtttgtgtttgtttcttgtgctttttatacctattagaattactctgtggatgtcatttcgactacgtgttgttttcttttataggtcaaaacctgttgtgaatgacattcttggtactggtttgggcactaacaatgccattagagaggagagagaggtaaaatgactttgtctacat

SEQ ID NO: 140148 - DNA, 367 bp, Arabidopsis thaliana
acgcgtccgctaaaagagaagcctttaaagtttttttttaatcaaaaacagaaggaagaaaattttcctttttgttttagatggcatgaatcatcatcatcgctttgctttcttgattctctatttcgtttgatgggatttgtttttctgggaatttattcattcacctgctgccatggctaaattatctttcaaggattctcttaaagctcttgaagccgatattcaacacgctaatacactgtaaattcctccattctccacttttattgacatttatcgacttttattgtaaagtctcgatttttagtttatctcagcgttcaagttagtttttttttttattctagttgttgcttaattttgt

SEQ ID NO: 140149 - DNA, 183 bp, Arabidopsis thaliana
cccacgcgtccgcccacgcgtccgcccacgcgtccgcggacgcgtgggaatgtcaaagccaagatccaagacaaggaacgaatcacaccggaccaacagcgattgattttcgccggaaagcagctcgaagacggacgtaccctagccgtttacaacatccagaaagaatcaacgcctcacctt

SEQ ID NO: 140150 - DNA, 312 bp, Arabidopsis thaliana
agatcgcgagcgccgccctttttttttttttttctccttctcctcatgtttcttctttttctctcctccagtagtagccttgatgatataagtatgcgagacctcaccattctctctctcactcttcagctccgtcgtccaattataactcttcttcttattcttattcttcttcttctccgcttcagcagcagcaatagctttagctttcgccttctccttcttcaaagcagctaactttaacccttcctcatccttcttccctcctttaatctccgtcgtcgatctatacttcctctctcccgaaccttc

SEQ ID NO: 140151 - DNA, 270 bp, Arabidopsis thaliana
gaacgggagattagccatgtttgcgatgctcggtttctttatccaagcgtatgttaccggagaaggtcctgttgagaaccttgcaaagcatctcagtgatccttttggaaacaacttgcttaccgtcatcgctggaactgccgagagagctcccactctctaagccatttctactttttttaagagcttccaaaatgtacactttgttcgattggaactccttttgacaatgttaaaaaaacttccatctgaatcttcttgatatatttc

SEQ ID NO: 140152 - DNA, 434 bp, Arabidopsis thaliana
cggacgcgtgggcggacgcgtgggtaaaaacctaaaaaaaaaaccccaacacacacacatggattctcaggaccactgcagcaactctccaggaggaggtaagaaccatgtctgtactaaatgtggttggagttattcaaatccacatcctagtgctaaaaaccgtcgtgctcacaagaaaatctgtggaaccatcaaaggatttgagatctttgactctgaaatgaagaaagagaatcttgatttgccggaagaacactctttggatgatgagcaaaaaccaccaaccccaagtccaacagttgtcgaaaaatctgctccaacagttgtcgaaaaagctgctaatgagagaattggggatgtttctgaagaggatgtgtttactgatgctgtttgtgagttttcgagatctgattctttcaaggaagagacag

SEQ ID NO: 140153 - DNA, 434 bp, Arabidopsis thaliana
tgtagtgagagaagaaagatagagaaaaaaaatgggaggcaaaggtgtgatgatggtggcgatactttgcctttgggcactctctgcaacatctgaagcagtaacagaggctgagccaggtttgatgatgaacttctacaaggacacgtgtcctcaggccgaagacatcgtccgtgaacaagtcaaactcctctacaaacgccacaagaacaccgctttctcttggctccgtaacatcttccatgactgcgccgttgagtcatgtgatgcgtcgcttttgctggattcgacaagaagagagctaggagagaaagaacacgacaggagcttcggacttagaaactttaggtacatcgaggagatcaaggaagctctcgagagggagtgtcctggtgttgtctcatgttctgacattctcgtcttgtccgcaagag

SEQ ID NO: 140154 - DNA, 152 bp, Arabidopsis thaliana
caggctttactaacgacagcatcagagctcgatcctagacatcaacctgtttggattgcctggggttggatggaatggaaagaaggaaacacaagaacagctacagaactttaccaaagagctctctccattgatgcaaataccgaaagtgc

SEQ ID NO: 140155 - DNA, 400 bp, Arabidopsis thaliana
cactcttctttttttttttttttggtttttcatttaagtctattcaatcatggaaaccggtttaaacatcttaaagctatcgctatgcgtcagcctagtcgtggttggatcatatgctcaggctcccgcaccatggaatccatctaatgggtttcgtccggggacatgtgaccactacgagtgtcccacctataaattggtacaggccggatacggctttgagatccgcatgtacgacgctgccctatggatatctactagtcctatcccctccctatccatgactcaagccaccaaaaccggtttccgacggtaaatgaataaatcgaatatataagacttggtgttctttcggtttctttatattataaactgaagttgactacgtttttgggtttat

SEQ ID NO: 140156 - DNA, 436 bp, Arabidopsis thaliana
ctgttttcaaaacagaggagaagaagcttgagctaaagcttggaccacctggtgaagaagatgatgatgaatcgatgataagacacatgaagaaagaaccaaaagacaaatctatcctctctctcgctggcaaatacttctctccttcttccaccaaaaccacatcccataaaagaactgctcctggtccagtggtgggatggcctccggttcgatccttcaggaagaatttagctagtggaagttcttcaaagcttggaaatgactcaaccacctccaatggtgttaccctcaagaaccaaaagtgtgatgctgctgctaagacaacagaaccaaagagacaaggaggcatgtttgtgaagatcaacatgtatggtgttcccattggtcgtaaagttgatctcagtgctcataatagctatgagcagttatcttt

SEQ ID NO: 140157 - DNA, 216 bp, Arabidopsis thaliana
tgcgtcatcgtacttttctgcattccacgccgtcgaaatctaactgctctacagtgagcatgcaaaactcactgacaatggaactacgaccatcacgtgattccggttcatctgatgtcgatgctgatatgagcgatggcttttcaccgcacgatacttctcacagagtcatcgctgatgaaggttcgttgctgagatcagcatcgatgtatcaag

SEQ ID NO: 140158 - DNA, 421 bp, Arabidopsis thaliana
cttcactctccagcgatcgtttattgcttgaagacggcttcttcttctcacaaacctcatctctgctaatcaaaatgtctctggttgcaaatgaggagtttcaacacattcttcgtgtgttgaatactaatgttgatggtaagcagaagattatgtttgcccttacctctatcaaaggtattggtaggcgattggctaacattgtctgcaagaaggctgatgtcgacatgaacaaaagggctggtgagttatctgctgctgagattgataacctcatgacaatcgttgcaaacccacgtcagttcaagatcccagactggttcttgaacaggcagaaggattacaaagatggcaagtattctcaagttgtctccaatgctcttgacatgaagctgagagatgatcttgaacgtctcaagaa

SEQ ID NO: 140159 - DNA, 438 bp, Arabidopsis thaliana
cccacgcgtccggctagctcctccaaatccaaatcgttgcgttaaggtttcttcaagtttcaatctttttgcaatgaattgcccagccatgactgcttctccttcttcttcctcttcctcttcctactcaacgtttcgtcctcctcctccactcttgccacaattgagtaacgattcacaaagatctgttgttatgcactgcacaagattaccctttgaagcatttgctgctacttcatcaaaccggcttcttgggaaacattcattgcctttgagagcagctttggttacttcgaaccctttaaacatttcatcttcctcagttatctctgatgccatttcatcttcctctgttatcactgatgatgccaaaattggtgtcttgttattaaaccttggaggtcctgagactttagatgatgtacaaccctttttgtt

SEQ ID NO: 140160 - DNA, 428 bp, Arabidopsis thaliana
cacaaatgtcatcattgaaagtggagctgtcccgatattcatccaacttctcagctctgctagtgaagatgtccgcgaacaggctgtttgggcattgggaaatgttgctggagactcaccaaaatgccgggatttagtcctaagttacggtgccatgacacctcttctgtctcaattcaatgagaatacaaagctttcaatgctgagaaatgctacatggacattatcaaacttctgcagagggaagcccccacccgcatttgaacagacacaaccagctttaccagttcttgagcgccttgtgcaatcaatggatgaagaagttctcacagatgcatgctgggctctgtcatacctctcggataattcaaacgacagaatacaagcagtcattgatgcacgagttgttcctcgcctcatccagctct

SEQ ID NO: 140161 - DNA, 426 bp, Arabidopsis thaliana
gttttcctacgagatgagtaaagcccaaaaacggaaacgcctaaacaaatacgacggcgaatcaaaaactccggccaataaatcaaccgtcgacggcggcaatccttaccctacactacttagacctaccgctgaagaatgccgagacgtaagggatgctttgttgtctctccatggattccctcccgaattcgctaattaccgccgtcaaagactccgatcattctccgccgtcgatgatcacgatacacagtgtaatctgaaatctgagacattgaatgaaacggaagaggagagtgtacttgatgggcttgttaagattcttctctcgcagaatacaactgagagcaattcccaaagggcttttgcttctcttaaagctacatttccgaaatgggatgacgttttgaatgctgagtctaaatc

SEQ ID NO: 140162 - DNA, 440 bp, Arabidopsis thaliana
  unsure (1)..(440): unsure at all n locations
atcgatcaacanagtgaggttaggttccatctccacctctttctctctcgaatcttctccgattaaaggaacaaggtctggtttacaaaagtctcatagatgtcgagtggaacagtgagaagggtttcacgtcaagatatacaactggttcaaaaccttatagaacgatgccttcaactttacatgaatcagaaagaagttgtggatactttactagagcaggctaaaatcgagcctgggttcacagaactagtttggcagaagcttgaagaagagaatcgggagtttttcaaagcttactatcttaggctaatggttaaacaccagataatggaattcaacaagttgcttgagcagcaggttcaccacatgcgtcagatgcatccaactggtgttgcttctgtccaaaacacaaatggttctcatcttcaatcaatgaa

SEQ ID NO: 140163 - DNA, 373 bp, Arabidopsis thaliana
cgcgtcaggtcgacgaggatctcgattcgttagggctcctgggctcttactctgtcgcgttaatcttcaacctcaacccaaaatcccatctttttcctacagtcttcgctctgattatcgtcttcataatggtttctccaattacatcagacgtaactcaattcgaacatctccggttatcaatgccttcctctcagataactcaccatccccgtcaccatcaccatccccaattcgttttgttcaacggagttcaatgcttaatggtcgtctcttctcgacttctactcccaatccagaccaaaccaccaccaagactaaggaaatcaagacaacctcgtcggattcagactcagctatggctgacatgaag

SEQ ID NO: 140164 - DNA, 318 bp, Arabidopsis thaliana
acagatctggtcgcgacgtcgccgtcgccgtcgtcagcgccgagatccgccacagacttcttctcggatccttacgattctcatcttctatggttcaagccttccctcttcctctcccctaacttcgactccgagtcctagatctcagaactccgtacatttgctcactttgacactcgccgatctgatctccggtcacgatttgcatcgctcaggcgagagcttgtcgatcacatcaggcgagattatgccggtttcgtcaatttaagcactaagctcgtagatatcgaggcatctgtggttcgtatgcgtggtccg

SEQ ID NO: 140165 - DNA, 247 bp, Arabidopsis thaliana
aatgaaggaaaaactttttagggagaaactttttaggtccaaagatcgacatagaatagaagattttgaatttgttttgttatataaagtttcgtctgaagcgatctactttttgtgctaaagattgaaactttttggtaagataattgtgttatgtggatggctcgtggaggtgggtcttcattctaatggtgcacgaaaggcagggaagcatggatactgccgctctcgatgagatcattcgtcg

SEQ ID NO: 140166 - DNA, 371 bp, Arabidopsis thaliana
acggacgcgtgggttgtggtcgaatttttaaatgggaagtggaagagatagagacgaccctttatccttcaccagcaatccatctacggcgtcgtctccagtcactgtatctgactatctcgacaactttctcggcgaacccacttctcgctccggtagttttcaaagcgagagcttactcggtggaggcggtggagaaagcatcaacgacgctgattttggattcgctcgtcctgatttccgatcggaacaactagctggaaccgtacagttttacgagaggcatgtcttcttgtgctacaaaaagccatctgtttggcccgcaaggatcgaggctgctgagttcgatcgattggctaggctactctctg

SEQ ID NO: 140167 - DNA, 372 bp, Arabidopsis thaliana
cttgtcttctctaaccctctaaattctctttggtcgggatcactggaaagaaatgtataatctcactttctctccatcattgtcctcttctttgctctcttttacacaacaaactcctgcagccatagtgtcctcttctcctccggatttagtacttcaacaaaaactccggtttgtcgtggaaacctcaccggaccgatgggcttatgtcattttttggcaaaagatgtttgatgatcaatcggaccggtcttacttggtttgggttgatggtcatttctgtggaaacaagaacaacaattcccaggaaaatgttcatttttctttgcctcttatgttatctaatcaaaatatccaaaatttatttaaatc

SEQ ID NO: 140168 - DNA, 375 bp, Arabidopsis thaliana
caaaaacaaagtcgattacgctagaatccatggtcacgacatcttctacagcaattctcttcttcatccgaagatgaattcgtattgggcgaaacttccggtggttaaagctgcgatgcttgctcacccatttatggattgaagctttaggtaattttctcaaacacatttatggattgaagctttagagagaaaatgggtgatgaggcagagatcaaggaacatttaaagccacaagcttcatctgaaacaatagacaagaaacataatgtgaaagggaagaggttatggcagaaagtcaagtatcaattggtggagtttcattcattgcctgcttatttaagagacaatgagtacatcattggtcattaccga

SEQ ID NO: 140169 - DNA, 122 bp, Arabidopsis thaliana
aattaccttgcttcgtggttatttacaaagttttagaatctctccctataatattaaaaagttagaagtacaaaaaacaaacattatttctcaagttaaaattatagggagagattagggat

SEQ ID NO: 140170 - DNA, 318 bp, Arabidopsis thaliana
ttttggagcttaataatacaaagctagtctggtttgatttagagagtaagaagatgagtactcttaggattaaggattgccctagctcgtatagtgcggaactcgttgtgagtagccttgtcttggggtgtaaaggagatcttaataacattaagtatcgaaaagaacaacaagctaaagaagctagagaagctaaaattatgcagaacactaaaaggagggatgatttcctgtccaaaggattcaagctggtcttataagccagaaacaagagacaggagctaaagctgcacaaggtaagtgaaaaagttgaccgtt

SEQ ID NO: 140171 - DNA, 413 bp, Arabidopsis thaliana
gatattgtaagtgttagttggacgaaagtgacaaagagtaatcaattgggagtcaaaaccaaagatggattgtactacaagttcgttggatttcgagatcaggatgttccaagtctgtctagctttttccaaagttcttatggaaaaacaccggatgagaagcaattatcagttagtggtcgtaattggggagaggtggatttacacgggaatacactaacctttttggttggatcaaaacaagcttttgaagtatctttagctgatgtttcacagactcagcttcaagggaaaaatgatgttactttggagtttcatgttgatgatactgctggtgctaatgagaaagactcgctgatggagattagttttcatattcctaattccaacactcagtttgttggtgatgaaaa

SEQ ID NO: 140172 - DNA, 414 bp, Arabidopsis thaliana
acggacgcgtgggcggacgcgtgggcggacgcgtgggtcttgtttggtctggtaggggactgcagatgaagtggttgattgttctcatggaaaacaactttgggaactttcaaaagaaaagtatgagcctttatgggtatctggaggaggacactgcaatctagaactctatccagagttcataaaacatctgaagaaatacgtaatttctatttccaagggaccaagaactggttcgaacaagactgcaacgacggatgcagccaaaaaacagagcaagcctgcagagaacgggcgtgctgatacgtttcaacttggctgttgccttccagaagtttctagaaacagtgtagacagtcagctggagaaatctaagaagactagtaaacccgagaagtctcgtatgagcattga

SEQ ID NO: 140173 - DNA, 414 bp, Arabidopsis thaliana
  unsure (1)..(414): unsure at all n locations
gcacgacgaagagccagatccttcgcaaccaagttggcagagtgattctctcgtggactgggaaccaaggtatgtggataaattcaatgcttttgctaacaagcctgatgttgctaaagtggaagtctacgcaaagggtttgaggagcctcttgaaatatatcaaggacaaatacggcaatcctgaaatcatgatcaccgagaatggatacggagaggatctangtgagcaagacacaagccttgtagtggcgctgtcagatcagcacagaacatactatatccagaaacatctcttgagcttgcacgaagcaatttgcgatgataaagtaaacgttacagggtattttcattggtcattgatggacaattttgaatggcaagatggatacaaggcgagatttgggctctacta

SEQ ID NO: 140174 - DNA, 411 bp, Arabidopsis thaliana
cccacgcgtccgaaactgtgaaacctgaacaacatggtggtggattcggtgacaatggaggaggaagataccaaggaggaggcggccatggtggccacggagggggaggataccaaggaggaggaggacgataccaaggaggcggtgggcgacaaggaggagggggaagttactgccgccacggctgctgctacaaaggttaccatggctgctcaaggtgttgttcatatgccggagaagcggttcagactcagtctggtcactaaatctacataatatatcaaccaccatgagtgtacgatttcatttatatatacacttacgtgtgtatgtgatatgacaatacacttacgtttgtaatgaagtgccttaagtttaagaggagaaactatcggaataaagtttcataat

SEQ ID NO: 140175 - DNA, 360 bp, Arabidopsis thaliana
cttccactgagctccgccgtgttcgctcctactctgatacctttgtcctctgtgactgaagacgttaaagcctcgccggagaagataaccggtgagaaggtagaggaagatgagaagaacaatccaggtgggacagctcaaacgagggattactacttggattcacgaaggagaagaagctttgatcgatcatcgagacatggtttgcttgaagttgatgaattgaaagctatttctaatgctaaggtatcacctgaaactgttggtttgtttcatggagcgaagttgcttgttactgagagggaacttagggattcgaattggtattctattaagaattacaaaccggagagcttggag

SEQ ID NO: 140176 - DNA, 328 bp, Arabidopsis thaliana
gtttttcacgccggagatagagagagagaagtaaaaaagcgagaaaaagctagaaactttagaatacccaataatggatccgatcgaatctgtcgagtacaatggcttcgagacctctaacggtaacgtcgaccatggttggaagaaagtcgtgtacccgaaacgtcaccggaagcaaaaacaagcggatcaagcgacggcaaatggtggcaatatttgttgcattagcgatggtattgcgtatgaagcctgatgctttgactaatgtactgccaactctgagggagaatcctaagtatcagggtcaggataagcttccggttacagt

SEQ ID NO: 140177 - DNA, 398 bp, Arabidopsis thaliana
cccacgcgtccgatgatgttgaagatgttgagaaacatttcccgggtacactaacagccattagagactggtttagagactacaagatcccagatggaaagcctgctaacagatttggtcttggagacaaaccagcaaacaaagactatgctttgaagatcatccaagaaacaaatgaatcatgggctaaacttgtgaagagatcagttgatgctggagacctttcactttactgaacatattttgcaatgtcgacttatgaggtcgaataatgaatagactcaagattcctatatcattcttgttgtttcctttcaattgagatgtaaacattgggatttggattttgtttttcaccattgatgactgagaagtaataaaatgactttctgctttgg

SEQ ID NO: 140178 - DNA, 410 bp, Arabidopsis thaliana
cccacgcgtccggctttatgcctgcttgtgtgacaatctttgacaagaattgtaaaccattgatggaacttggcgaaggtccttataacactcttcgatggaacccaaaagggagagttttatgtgtggctggattcggtaacttgcctggtgatatggccttctgggatgttgtaaataagaagcagctaggaagtaataaagccgagtggtctgtgacaagtgaatggtctccagacgggcgttatttcttgactgcctcaacagcaccaagacgtcaaattgacaatgggatgaaaatcttcaactacgacggaaagcgttattataagaagatgtttgagaggctgtatcaggctgaatggaaaccagagtctccagagaggttcggtgacatcagtgaacttatc

SEQ ID NO: 140179 - DNA, 413 bp, Arabidopsis thaliana
agatagtttgcggtccattatgcacctcgaatccgttaacaacagttgaatggtatttggtgtttacatctctctgcatcgttctgtctcagctaccaaacctcaattctattgcgggactctccttaataggagcagtgactgcaataacttactccacaatggtttgggttctctctgtgagccaaccaagaccagccactatctcatacgagcctctttctatgccttcgacttctggttcactcttcgctgttttgaatgctcttggcattatagcttttgccttcagaggtcacaacttggttttggaaattcagtcgacgatgccatcaacgtttaagcatcctgctcacgtaccaatgtggagaggagccaaaatctcttacttcctcattgctctgtgtatcttt

SEQ ID NO: 140180 - DNA, 105 bp, Arabidopsis thaliana
tccggctccccttttcttatccggaaaccaaaaacttccggtgataaaacctccttcgacacctctcaacttcttggataaaatggcgtcaactttcactggcac

SEQ ID NO: 140181 - DNA, 367 bp, Arabidopsis thaliana
aaccaaactaaacttttcaacagtggcaatttcgaaaaaggcttcatcttcggtgttgcatcttctgcttaccatgtggaaggcggtagaggccgtggacttaacgtttgggatagcttcactcaccgattcccagagaaaggtggagctgatttgggaaatggagacactacttgtgactcatatactctttggcagaaagatatagacgtgatggacgagctcaactctactggctacagattctccattgcgtggtcaagactccttccaaaaggaaagaggagcaggggagtgaacccaggagctattaagtactacaacggtctcatagatggcctcgtcgcaaagaatatgacgccctttg

SEQ ID NO: 140182 - DNA, 339 bp, Arabidopsis thaliana
gttaccggtactggtccagaccaatacaacgttgcttcatacatgtctgtaacactaagctgtgaccaccgcgtaatagatggtgcaattggagccgagtggctgaaagcattcaagggctacatcgagaccccagaatctatgttgctctaaaattcagacgcacacacacatcaaaagctaaactcataagagtcttctgacctcaaatttctttcccacaacatattctaccagatttgatcagcagtacgcaatggcctttaaagttgagtgttttgctattctttaaatcattgagttgacagatttttgtctcaaaataaaatcacgaatcca

SEQ ID NO: 140183 - DNA, 377 bp, Arabidopsis thaliana
aaaaaaaacccttcaaaacatttccttattctttcttcttcatctacaacaatggctggagttgcctttggttcctttgatgattcattcagcttggcttctctaagagcttacctcgctgagttcatctccactttactctttgttttcgctggtgttggctctgccattgcctacgcaaagctgacgtcggacgctgctcttgatacaccgggactagtggccatcgcggtttgtcatggttttgctctcttcgtggccgttgcaatcggagccaacatctccggtggccatgtgaacccagccgtcacttttggtcttgctgtcggtggtcaaatcacagtcatcaccggagttttctactggatcgctcagct

SEQ ID NO: 140184 - DNA, 242 bp, Arabidopsis thaliana
ctccaaggtctgggaaactgtttccaagattttcattcgcgcaaacgttaatacattggtgattgtcacagaacaagcacgacatgcatttgacgtactggcatctatccacaacaacgagctccatacatactgatggcatcatatctgtatgtggggatggtttcgtcaacgatatccttactgggtatctcttgtcgagacttaaagtccctcttccagctactccttcacattccttc

SEQ ID NO: 140185 - DNA, 212 bp, Arabidopsis thaliana
ccacgcgtccgaccaaacacacgttgaggttttggtcacgaccattaacgtttcttataattattatctatctcataattcaacatgtcaactcatcacgaccgtcattagctagagcggagcattttctccggtgcctcgacgctcaggcagccgaccacggcagtctcaactcaggaaccgccgtgatcgcaacaaactcatctttctca

SEQ ID NO: 140186 - DNA, 266 bp, Arabidopsis thaliana
tttatttttttttttttttttttttttaaataacttattcttgattatgttccaagtttggttcaaatcgagcgagctggaggcaacaggaaaagagggcactaaacactgtctacatgtaatctcttttctttctgtgcgtgtgtttctcttaattttatctttgtcatgttctttcagtatcaatcaagcttttctaattcaatgaacaaagtgattcagaagacaaaaaaaaaaaaaaagggcggccgctcgctcgatttgaa

SEQ ID NO: 140187 - DNA, 409 bp, Arabidopsis thaliana
ggtatgtctggtggtggaggaagtaaatccaaaagtaaaaaaagtaaactcaaagctaaattgggaaagaaaaaaggtatgtccggaggcatgtcaggaagtgaagaaggtatgtctggaagtgaaggaggtatgtccagtggtggaggaagtaaatccaaaagtaaaaaagtaaactcaaagctaaattgggaaagaaaaaaagtatgtccggaggcatgtcaggaagtgaagaaggtatgtctggaagtgaaggaggtaaacacggaggtcttggaggtaaattcggaaagaaaagaggcatgtccggaagtggaggaggcatgtcaggaagtgaaggaggtgtgtctggaagtgaaggaagtatgtccggaggtggtatgtctgggggtagcggaagtaaacacaa

SEQ ID NO: 140188 - DNA, 163 bp, Arabidopsis thaliana
gggaagcaggtttggccaaggttcaggcagataagaagaaggtagacgctagaaagaaaagcttgaagagactatgatgatgctatcactcagtgtcttacgctctttgaacctaaactgttgtttccttttttacttgtaagagatctgttgtttgaggatt

SEQ ID NO: 140189 - DNA, 175 bp, Arabidopsis thaliana
ctattgacatcttcgctcttcttcacaatcctctttgtttccgccaattttctcgaggaataatatattcatctttcccctattgctcatgatgtttgagcaaggattcaacgatatcaacttaggtgtggccactgatgggacttccccgatgttggggttaatcgcaaagttt

SEQ ID NO: 140190 - DNA, 401 bp, Arabidopsis thaliana
aagaaccctacagatcatcccctacctcgctgcttcgggtcgaatcagcgagtcgggtcaaaattcacctgagaaaaatgttcgcgaggcggttcacttcgttcttcaaaggatcttcaacctcaagcccggacaaaacagctgggacattgggctcttttggtcgcaaggcagtgtctttcgtcttgattacagtcactggtggtgttgctttgagtgctctcgatgatctttctatctatcgtggatgtagcagcaaggcgatggagaaggtgatgaatagtaaggtgatgattgaagccatcggagagccaattgagaaagggccatggtacaatgcttcactagctgtttctcaccaaaggcactcagtgtcttgttcattccctgtgattggacca

SEQ ID NO: 140191 - DNA, 406 bp, Arabidopsis thaliana
agaagcaccaaccgacacaagttttggatctcaaattgtgtctgcgaccgcgttgtttccaacactttgagcaagttaaagagagagagcttttattctttggaggatctaaataggtccaagctcgtcatgcagctaggaaaaagaagaggattaatatacagttattagaaacattaaagtttcttctgtgttttgtagaacaaggagatgatgcggtacaaagaggagaaagaggtgaagaaggaagctttcaggaagtatttggagtcaagtggagttcttgattctcttactaaagttctggtttctctgtatgagcagaatgacaagccttcctctgctctagaattcattcaacaaaagctaggtggtccatcagtctctgactatgagaagcttcaag

SEQ ID NO: 140192 - DNA, 407 bp, Arabidopsis thaliana
gaaaaagtttcgagctttagaaacaatggcggctttccccaacctcaactctggctccggattgaagaagcttgatgagcatcttctcactcgcagttacatcactgggtaccaagcttcaaaggatgatatcactgtgtttacagctctttcaaagcccccaacttcagagtttgtcaatgtatctcgttggttcaaccacatcgatgccctcttgaggatctctggtgtctctgctgaaggaagtggtgtcattgttgaagggtcatcacctatcacagaagaggctgttgctactccccctgcagctgattctaaggatactgctgctgaagaagaagatgatgatgatgttgaccttttcggggaggagaccgaagaggaaaagaaagctgctgaagagagag

SEQ ID NO: 140193 - DNA, 325 bp, Arabidopsis thaliana
aaacttttaccaagcagtgaatcctgatgttgcaaagatgtttcaacttgatccggcatcaaaagggcctgctcttgtcgtatttaacaaggaagaggagaaaattacccattttgatggagaatttgttaagtctgctctagttagttttgtgtctgccatcatgcttgctttggtctctgttttcaccagagagactgctccggaaatttttgatagtgcagtcaagatacagttgttgttgtttgtaaccaaaactgagtctgataaggttcttacggcatttcaagaagcagccaaatcattcaaaggaaagctcatcttt

SEQ ID NO: 140194 - DNA, 121 bp, Arabidopsis thaliana
accacgcgtccgctcatctgttcgaagtctctagggacatactaaaagactttggatcatcttctgactctccattggcggttcttccgatatggattttagcaatgatgtgtttactctt

SEQ ID NO: 140195 - DNA, 410 bp, Arabidopsis thaliana
ggaagatcaaccatcttttcaagaagaagaagctgctaaagttccttatgttggtgataaggaacctctgtctagtttagctgcagagtatcaatcagggagtcccattttgctggagaagattaagatactggacagtcaatatatcggaatccggcgaacaagaggagatggaaattgcttcttccgaagttttatgttctcttaccttgagcatatattggaatcacaagatcgtgctgaagtcgatcgtatcaaggtcaatgttgagaaatgtagaaagactctgcaaaacttaggttatacagattttacatttgaggacttctttgcgttgttccttgagcaactagatgacattctccaaggaactgaagagtctataagctacgatgagctggttaacagaa

SEQ ID NO: 140196 - DNA, 270 bp, Arabidopsis thaliana
gaatattccggcgaagattgagactctcaatatccaatggagaattattcccggcggtctattctcctttccacggtggtcgccgccgtgttattctctttaattccggtttcaatctctattcccttcatactctttcacggaattggagataaatgttctggtggagttagtaacttcacgcaactcctaaccaacctctctggctctcctggctattgcttagaaataggaaatggagaaaaggactcatggttcatgccactaaga

SEQ ID NO: 140197 - DNA, 414 bp, Arabidopsis thaliana
accaaaacttgtttggaattttcagaaggagaaactgagtggccgccaattcttctcttggtccctctggttctcgggcttgacagagtgaaccccaggtacattccatctctgatagccactttcacgttccctcaaagcctcggcattttgggcggcaaaccaggtgcatcaacttacatagttggagttcaagaagacaaaggtttctaccttgatccgcatgatgttcaacaggttttcttgatcactccttataaatctttattttagaatcaaactagaattattgtagttccaagaaaaaacttaacacttcgatctgaagtttgagacatataaggtggtccatatatattttccttatattgtctccatcacattcatttatctattgtctaattggtttgggga

SEQ ID NO: 140198 - DNA, 404 bp, Arabidopsis thaliana
ccataagtgatgaacagagaaagactgtcctccatcattcatgtcctggagctggagcctgtggtggcatgtacacagcgaatacaatggcttctgctatcgaagcaatgggaatgtcccttccttacagttcttcaatacctgctgaagacccattgaagttggacgagtgtcgcttagcaggaaaatatcttctagaattgctaaagatggacttaaaaccccgtgacattatcactccaaaatcacttcgtaatgcaatggtttccgtcatggcccttgggggatcgacaaatgcagtattgcatctaattgctattgcaaggtctgttggtttggagttgactcttgacgattttcagaaagttagcgatgcggttccatttctagcagatcttaaaccc

SEQ ID NO: 140199 - DNA, 172 bp, Arabidopsis thaliana
cccacgcgtccgcccacgcgtccgcccacgcgtccgcccacgcgtccgcacatttggtcgacggtcctgctcagcccatggaatttacccaatccgacactgctgcgagtactgtggagaaccagccagctgaggatcctcctactctgaaagttcacgtggactatcccta

SEQ ID NO: 140200 - DNA, 318 bp, Arabidopsis thaliana
ggcgaaatccaccgcgctgatgatttttagcttttgttcgtttgtacaaaatctttacatgtaaagattagattctcatacttaggcgtataggtccttttcggtttcaaagtcactagcaatcgaattcttatgggcgagatccaccgcgctgatgatttttagcttttgttcgtttgtacaaaatctttacatgtgaagattagattctcatacttaggcgtacacgtccttttcggacagatttcgtacatcacataagagcacacgacatgatataataatgttttttaggtgataaattgtttggtttgcact

SEQ ID NO: 140201 - DNA, 211 bp, Arabidopsis thaliana
ctagaattgtgagtgtattactggaatcaattaaagatgtgccaaatgttgcagagaaggtctgtggagcaatatacaatcttgcacagggatatgaagactctggagcaagttcctctcttctctctccttatcttacacagatcatcacacatctccttgcagctgctgagcgtacagatggggcagagtctaagctaagaggtgctgc

SEQ ID NO: 140202 - DNA, 403 bp, Arabidopsis thaliana
gagaaaggaaaaaaatggtgaatccttcttcacctggaattgccatactcggagctgggatcttcgtcaaaactcaatacattccgagattagctgagatctccgatctcgtcgacctgaaagcgatttggagccgtactgaggaatctgcaaaaggagctgtggagatagcaagaaagcattttcctgaagtgaagtgcaaatggggagatgagggtctcaatgagatcattcaagacagttcaatagttggtgttgctgtagttgtagctgcagaaaccatggttgaattgtcactgaagatgctcaaggcaggaaagcacgtccttcaagagaagccagctgctgcttcaatcagtgagatagaaactgcaatgtcaagctatagaaatatttctgctga

SEQ ID NO: 140203 - DNA, 151 bp, Arabidopsis thaliana
aagagactcacgctttcgatgttcccaagaaaggttgtagaatctatgcctgcggagagctcccgttagatgcttgataatcactattgaccgatgcattgtctttgccatctttgttctgttttttgctattatgactattgaggaatcc

SEQ ID NO: 140204 - DNA, 423 bp, Arabidopsis thaliana; identical to SEQ ID NO: 127705

SEQ ID NO: 140205 - DNA, 151 bp, Arabidopsis thaliana
aagagactcgcgctttcgatgttcccaagaaaggttgtagaatctatgcctgcggagagctcccgttagatgcttgataatcactattgaccgatgcattgtctttgccatctttgttctgttttttgctattatgactattgaggaatcc

SEQ ID NO: 140206 - DNA, 266 bp, Arabidopsis thaliana
caaaactccggtgaacatggcgtcgcttactctccggtgcgattcgacgcatcttttgccttcccgtgatgttgtcaagggaacaaaaccatttggaacgagcttggtgtatcctacgatcatatcgaaaaactttaatgttagaatgagagtgatacctgaggaaggacatgtgttctcttcttctaagagtaatggatcatcaatggggattgagttacagccagatttggtttcgtttggaacattagcacctgaaatgattc

SEQ ID NO: 140207 - DNA, 424 bp, Arabidopsis thaliana
cattaatcgttgggaaaagtttgatgatacggagtggacaattcttggtgtagaaggagaatctgagagagagagagtcatggaagctctgaaaaccgcaacttttagccctatgtcggtgttatccgagaaaagatcagaaccacgaaagcctttctcgctccctaacctctttccaccaaaatcacagagaccaatctcccaagaaagcttcttgaagagattcaatggtggattggctcttctaacttctgttctaagcagtgcaacagctcctgctaaatccctgacgtacgaggaagctctgcaacaatctatgaccacttcttcatcttttgattcggatggtctgattgaagggatatccaattttgtcacagacaatcctttggttattgccggtggagttgctgcattggctgtt

SEQ ID NO: 140208 - DNA, 130 bp, Arabidopsis thaliana
gagaaaaatagagacacactcatctctgtattcttctgcgccacaaactgaacatcaaattcacctttttctccacaatatccttgattgatcctcagagaggatttaagcttgaagttacacagcttct

SEQ ID NO: 140209 - DNA, 157 bp, Arabidopsis thaliana
attcaaaaaagatttctcagccatcaaaattctctttctcctcacccaacaactcacaagcatacctctttttcttccatatagataagttaattaagaaaacgaattatcaggttttgtttcggctgatctgaagaagttcatccatggatacggc

SEQ ID NO: 140210 - DNA, 326 bp, Arabidopsis thaliana
tggaaaggaacatcccggggcatgttggatctctgatgattcggttaaggacttatgtcataacgaaaaccggctttggtacacgagaggatgtcctagcacttttggttggtttgctcttcttggattgggactttatatcatcttcttctctcctggaatggggactgttccatggatagttaactcagagatttatccattgagattcagaggaatatgtggaggaatagctgcaactgcaaattggatatcaaatttgattgtggctcaatcttttttgtcattgaccgaagctattgggacttcttggacttttctcatct

SEQ ID NO: 140211 - DNA, 408 bp, Arabidopsis thaliana
ggtaaatccagacaaggagcttcagaaagagctgaaatcgagttataaagcacttgatgatgatcagaagagcgtatttctggacatagcatgttttttcaggtcagagaaagcagattttgtttcaagcattctgaaatcagacgacattgatgctaaagatgtgatgagagaacttgaggagaagtgccttgtaaccatttcttacgataggattgagatgcatgatctattgcatgcaatggggaaggaaattggaaaagaaaaatccatcagaaaggcaggcgaacgtcgtaggttgtggaaccacaaagatattcgtgatatcctggagcataacacgggcactgaatgtgttagaggcatcttcttgaacatgtctgaagtcagaagaatcaagctttttcc

SEQ ID NO: 140212 - DNA, 337 bp, Arabidopsis thaliana
ataaaaaactcactccctagaaaagtttgaaaatggcgaaggcagataagaaaccagcggagaagaaaccggcagagaaaactccggcagccgaaccagcagcagcggcagagaataaaccaaaagccggaaagaaactcccgaaggaaccagccggcgccggagacaggaagaagaagagatcaaagaagaacgttgagacatacaagatctacatcttcaaggtgttgaagcaagttcatccagatatcggaatctccagcaaagccatgggaatcatgaacagtttcatcaatgatatctttgagaaacttgctggtgagtcttcgaagcttgc

SEQ ID NO: 140213 - DNA, 362 bp, Arabidopsis thaliana
gaagcaagtagagagatagaggagagagagtttgataaagagagagaaaaaggggttgcgatttgggagaagagaaatagagaggagaagcattagagaagaagaagaagaagatggatagaaatagagaagctagaagagtacctatggcggctgccggaaatggtctttcccggcggagacatagagccggaagtttcagagattcaccagaggaggaaggtccggtggagttaccggaggcggcgaggttgagagatcgaggagggagtaataagaaggatcgagatcgggaacgtgatagagacagagagagggaaagagaaagagatagggagagagatcggttaaatagccggagt

SEQ ID NO: 140214 - DNA, 345 bp, Arabidopsis thaliana
ctagttctagatcgcgagcggccgccctttttttttttctttttttttttttttttttagtattcacagttttattcatggcaagctttgagcatccaatgaacaagatcaaggcgatgccgagggtaaacagtgaaggagttctatgcggtgccaacttcaaggtggatgtgtacaatcgtgttaacagtatccctcgtcgaggaagtgaagccaattggtctctctgaatacttttaataacactttcaatttggtttctttttcgcacttgtgcttcttctccgctttcatcttaattatggactgttcctaagcttgccatgaataaaactgtgaataata

SEQ ID NO: 140215 - DNA, 374 bp, Arabidopsis thaliana
caagatcaataaaaagtcaacaactgaagatcatgttgtggtcaacatcccagtttctttctcagacagagagcagaaagaaccaaaatcaggtccgatggcttcagccttggagatcacacagattccatgcaagctctgtgaccataaactggtgtatgggacaacacgcaggtctgtagcgtacagaccagctatgttgtcaatggtggcgattgctgcggtttgcgtctgtgtggcacttctgtttaagagttgcccggaagtgctctatgtgtttcaaccgttcaggtgggagttattggactatggaacaagctgagtgtaagtctactttgaaagatcttctaagatatatatatgaatgttactta

SEQ ID NO: 140216 - DNA, 376 bp, Arabidopsis thaliana
cggacgcgtgggtgctgtttctgctctccagcaggttttcgatgctagttcatattcccagctggttagagacaaatacgagtgctatccggaaaatggtggtggaaaccagagccctatagccacagggatggttcatcaagttccttcattcgggtcggattcggactggatggagccatcaatgcatttatgccattcaagaacgttaaagcctcatgcttatgatcaggtttacaatgcttttgacctactacgaaccgaaccatctgtccagaaaatggtagtatcattgtcgtctgacaaagcagtttgggaggcggtgatgaacaacgatgtggtgcgagagattagggacttgtacaacaatggcata

SEQ ID NO: 140217 - DNA, 399 bp, Arabidopsis thaliana
aaattatacactccccctgctggttctgggtttatctcaggattttcttcattctgacgtagatctacattcgatatgagtctcccaacacagattgttccttttggaccgagttcatatttgtcggtacaagcaagagttgttgaagaccatacaatgtcacaagttattttacacgcagtatcaaatggagggggtactggtctactgttaatggtgacaggggcaagtcatgttgagtatggttcaagaggaagaggtttgccagcaaggatctcaaggaagtttccaaagaaacaccaagttgttgtattacttgaccctgaaagacagttcttgcgaagagatggcgaaactccagttgctgatttcttgtggtattctgctgcaagaccctgc

SEQ ID NO: 140218 - DNA, 374 bp, Arabidopsis thaliana
cggacgcgtggggtttctctgttacttgattcgattactctgttactattctcgttctttgttactactactactactactgttacttgtattttcccaaatcggtacgttcatcttcctgcttctgtgagcccggagatcgatcggatttttttgtattttgtatatttgttgtagatctaaatgcttttgttcagttttgttggattgttttgctgatctggtttttgtattatttggataacagatcattaacgatcgtgagactggaagatcaaggggattcggattcgtcaccttcaaggatgagaaagccatgaaggatgcgattgagggaatgaacggacaagatctcgatggccgtagcatcactg

SEQ ID NO: 140219 - DNA, 380 bp, Arabidopsis thaliana
ctcttcatcatcaacctttcttcttcttcttctcaatcttttctcaagaaaatcacaaatttcccaagaaaacactcacatatatgatgctatatatagaaagatagtctcatctaattctctctctccctcggattcgttagatgtgatcattttttcttgatttttgatcagattcttgcgtatagctgtatatatacaccaagatacactcatcatcgtcatatatagattatgtgcagcgtctctgagcttcttgacatggaaaacttccaaggagacttaaccgacgtcgtacgaggaatcggaggccacgtgttatcaccggagactcctccctcgaacatctggcctcttcctctgtcacatccaacaccatc

SEQ ID NO: 140220 - DNA, 272 bp, Arabidopsis thaliana
accacgcgtccgcccacgcgtccgaaacactcctttccggtttcgtttcctacttcctctaatcacatcgaccgagagcaaacacgaccaagatttcaaaccaattcccgcctttcaagtgttggaaaaaaaccaattgggtcagataacatggggagctctcgtcatgaaaagcgaaaagaggctcgcttgcagaagaaccacaagaaacatgaatcttggcttcagcgtcataagtcggaaaaggagaaacgagtatcatcatctgcttc

SEQ ID NO: 140221 - DNA, 382 bp, Arabidopsis thaliana
cccacgcgtccggaaaacttttgatttcgagagtgcttcggagcagaagaacgagcaaagctagggtttccatctatcaaatccagctacaatcgaacctattcatcgaaattagggttttttttttggtcccttaatttttcccttctagtagcttctgatccttcgatttccatggcggatgggtactggaaccagcagcgacagcaacatcatcctcctggtggtcctatgaaacgtccccgttccgatttcgaagctccatcatcaacaatgactatacggcacggtggtggttattatccgcgagatgaggatctcgatgttcccgatactagaactatcggttcagcttacgatcgctatctccatagcgtgcaat

SEQ ID NO: 140222 - DNA, 244 bp, Arabidopsis thaliana
gcacgcagagatcgggataagaagaacccgaagcagaacccaattgctttgaaacaatcacctgttaggagaaatccgaggcggcagctgaagaagaaagtggtggtgaaggaagcgatcgttgcagctgaaaagacgacgcctttggtgaaagaggaagaagaacagattagggtttcgagtgaagataagaagatggatgagaacgacagtggtggtcaagcagctccagtgcctgatgatg

SEQ ID NO: 140223 - DNA, 265 bp, Arabidopsis thaliana
aaatactgaagttgttctggcacagtgttccaaagaatttggctcctgtatggttgcacatgccatggaattattgacagctggaagcgaagaaggagaagttcttgtacatgaggaacagcgtaagttgggtggaattaacatggaagagctccatagacttgtttatgctcaagttctttcatctcatgctttgacttggcatatagctcctatttatctatcatcgtgcgagaaacatggattaggcttattagagctgttg

SEQ ID NO: 140224 - DNA, 387 bp, Arabidopsis thaliana
gttcttgagtacgttccagaaactgttcatcgtgttatcaaacactacaacaaactgaatcagagaatgcctcttatatacgtcaaactttacacttatcagatttttagagccttatcttacattcaccgatgcattggtgtgtgtcatcgtgacataaaacctcaaaacttgttggtaaatccgcacactcatcaagtaaagctatgtgattttggaagtgcaaaagtattggtaaaaggagaaccaaacatttcctacatctgctcgaggtattacagagcacctgaacttatttttggagcaaccgagtatacgacagccattgatgtctggtctgcaggatgtgttctagctgaactattgcttggacaggccttgttccct

SEQ ID NO: 140225 - DNA, 401 bp, Arabidopsis thaliana
  unsure (1)..(401): unsure at all n locations
gaccaatgttggtggtgctggagatgttcattcggttgcggttaaaggttctagaacaaggtggcaacaaatgtcaagaaactggggacagaactggcaaagcaacaatctcttaaacggtcaagcattgtcatttaaggtgactgctagtgatggtcgtaccgtcgtctctaacaacattgctccagctagttggtcctttggacaaaccttcaccggccgtcaattccgttaaaattgagtcaagttcggttttatatagttttagggtttgtgtagtagttggttgaggaaagagtagagaaagagagagggtttaaggctttttaaggtttttaagtggagagccttganacttcttctttgactcttgagggttaaaatggagaaaagagcttgtt

SEQ ID NO: 140226 - DNA, 415 bp, Arabidopsis thaliana
cctatggcttgtttctcggttggaccggctcatgagctgtcttctcttaacggtggttctcaagagtcaccaccaactactactacatctcttaagctagtgtcggggtcatgttatctcccgcatcctgaaaaggaagctacaggtggagaagacgctcactttatctgcgatgaagaacaagctattggagttgcagatggagttggcggttgggctgaggttggtgttaatgcgggactgttttcgcgtgagcttatgtcttattcagtatctgcaattcaagaacagcataaaggttcttctatcgaccctttagtggtgttagagaaagcacattctcaaaccaaagccaaaggctcctccacggcttgtatcatcgttttaaaagataagggattacacgccattaatc

SEQ ID NO: 140227 - DNA, 366 bp, Arabidopsis thaliana
cccacgcgtccgaaaaggggaaaaatttaggaccggtgggtttgaagtttgaggtgttcaacggaagtgctccttctttgttctctactacatattcatggacaaagatggcaaacattatattcttggatcagccagtaggatctggcttctcctactcaaaaactccaattgataaaactggtgacataagtgaagtaaagaggacccatgagtttcttcaaagtggctaagcaggcatccacaatatttctccaaccctttatatgtagttggagattcttattccggtatgattgtcccggccctcgttcaagaaatctcacaacgaaattatatatgttgcgaacctcctataaatctaca

SEQ ID NO: 140228 - DNA, 291 bp, Arabidopsis thaliana
ggacaagagagacgtgcaaaatttgcaagatctaatgattctgggaagtatgaatatgaatacatcgatccagatgatatagccacaattatgtataccagtggaaccacaggaaatccaaaaggtgttatgctcacacatcagaatttgttacaccagataagaaacttgtccgattttgtgcctgcggaagctggggaaagatttctgagtatgttgccatcatggcatgcttatgaacgggcttgtgaatacttcatatttacatgtggagttgagcaaaagtatacg

SEQ ID NO: 140229 - DNA, 357 bp, Arabidopsis thaliana
gtcgaatctcccgatcactgtttccgcaaattcacagaagacggactcttcctcattagtttcagccgtgaccatcaagaactcatagtctatcgtccttcttggctcacttactccagaaccgatgattccacaaccaccctacctcctctacctcgccgtgcttcgaaattcgacagctttttcactcaactctactcagtcaatctcgcttcttctaacgaactcatctgcaaagacttcttcctctatcaccaaactcgtcgtttcggtcttttcgctacttcaacagctcagatccatgattcatcatctccttctaatgacgctgttcctggtgttccttccattgataag

SEQ ID NO: 140230 - DNA, 260 bp, Arabidopsis thaliana
ctcacggaagattcttcagaatatctgatccgatatcagaagccccaagttcgcttgaattccgtctgagcaatggctttggtcttgcacacgtacaagggaaacaaaagtgctgagaaggcactcattgcagcagagtacgttggtgtgcagatcgatgtgccctctgactttcagatgggtgtcactaacaaaacccctgtacttgaaagcaacgcaattgcccgttatgtaagccgattgaatggtgacaactcttt

SEQ ID NO: 140231 - DNA, 367 bp, Arabidopsis thaliana
cgcgtgggcggacgcgtgggcggacgcgtgggcggacgcgtgggatcccggcgccggagaccggaagaaagaagaaaggtttgatccgagtgcacaaccaccgttcaagatcggagatataagggcggcgattcctaagcactgttgggttaagagtcctttgagatcaatgagttacgtcgtcagagacattatcgccgtcgcggctttggccatcgctgccgtgtatgttgatagctggttcctttggcctctttattgggccgcccaaggaacacttttctgggccatctttgttctcggccacgactgtggacatgggagtttctcagacattcctctactgaatagtgtggttggtcacatt

SEQ ID NO: 140232 - DNA, 401 bp, Arabidopsis thaliana
attatccaggataacgataacaacactctctctctcactgcaagagcgcgaaacagagtaaggctcactttgttttagctttctcctctacttcgataatgccgtttgctccttccttgttgtcatcgtcttcctcagtctctcaatttcttcccagattccccaacgcgactagattcaatgtaactccacggagcagagccgccaccgtcgtcgcggcatccgtcaccgacctagccggggtcgacagtacaacaatcgccgtactcggtggaggatccgtagcagcactcgcggcgatggtttccttaacggatccggagaggaggcggaaattgcaggcggaggaagttggcggaggcgataaggaggttgtgagggagtatttcaatagcacgggg

SEQ ID NO: 140233 - DNA, 421 bp, Arabidopsis thaliana
aactagcattctacaccggtcctacattgggtggtctattgaacgcaacgtgtggaaacgcgactgaattgataatcgcgattcttgctttgaccaataacaaagtcgcagtggtgaaatattcgctgctaggttcgattttgtcgaaccttttattggttctagggacttcactcttctgtggaggaatcgctaatatccgaagggaacagcggttcgaccggaaacaagccgatgtgaacttcttcttacttctactgggtttcttgtgtcacttgctgccattgttggtgggatacttgaaaaacggagaggcttcggctgctgttttgtccgacatgcaactgagtatatcgcgaggcttcagtattgttatgttgatcagctacattgcatatcttgttttccaactgtggactca

SEQ ID NO: 140234 - DNA, 420 bp, Arabidopsis thaliana
atacaattcgtcgatatgtgtgatcccactagagacgatggctccagccgaagcagagtggtgagtactatgcaaaagagggcgtattttcagagacaatggccgttggtcgatgtcgtaagagcgtcagtcgttgtgattgtgcacgttttgtgtctcttggcgccgtttaacttcaaatgggaagctttacggttcggtttggtgctcttcgcgttgactacactcagcatcacattctcattccatatgaacttgtctcaccgtagcttcaagataccaaaatggctcgaatatccttgggcttattctgctgttttcgctcttcagggtgatccaatggattgggtgagcatacataggttccatcaccagttcacagattcggaccgcgacccacatagccctaaagaaggatta

SEQ ID NO: 140235 - DNA, 349 bp, Arabidopsis thaliana
cgcaggtgtcctaagatgagctcaacgagaacagaaatctcgtgtcgaacaagaggatggacaacacggaggaaacaagaggcttatttcagttcagacgaatcagatcaggaagcttgtgaatcatttgggttactcttttttcctctctaggctctttgatgttgaggttcgagctgagattggttctgatgaggttattgagaaagtcagagccttgcctagagcgattcatttgcactctgggactgatgctccactgaatgtgacattcataagagcgcctccaggtgctttgttgaaagttgatatccctcttgtgttcattggagatgatgtttctcctgga

SEQ ID NO: 140236 - DNA, 305 bp, Arabidopsis thaliana
gttctagatcgcgagcggccgcccttttttttttttttttttttttttgagtaaaaaaatctcttgagaatttcagcaaagtctaagaagatagtcgaatacaacaaactaaacaacgacataaagatttcgaaagggtacagcaaaaccaaatgccaagtataccgcattactcgaacaaactgaaacccatgtcatcatcggattcttctttctcttctttcgtctcttctttcttggactcagcagcaggagcaccaccacctcctccacctccagatgtagcagaagcaaccgcaacacca

SEQ ID NO: 140237 - DNA, 130 bp, Arabidopsis thaliana
aagaagatgatgatggcgatcgattctaaactttcttttttaccattcttattttcgtttaccgtaggtggttaaaaaaccttttttgttgatgaggctcatttaaagaaccaaccaaatgatgtttctt

SEQ ID NO: 140238 - DNA, 432 bp, Arabidopsis thaliana
ggtttgtgaaggttttttctagggtttcgaaaagatgccggcgacagcaggaagagtgcgtatgcccgcaaacaatcgggtgcatagtagtgcagcgcttcagactcatggaatatcgcactgggacgaaacctcacacgtctcgaaactctatggttcgattactccgccacgaagtccgattactatctctactgtcacaacattttgttcttgttcctcgtcttctctctcgttcctctccctctcgttttcgtcgaattggctcgatctgcttctggtttgtttaatcggtataagatccagcctaaggttaattactctttatctgatatgttcaaatgttacaaagacgtcatgacgatgtttatcctcgtcgttggtccattgcaactcgtttcttatccttcgattcagatgattgagatacga

SEQ ID NO: 140239 - DNA, 362 bp, Arabidopsis thaliana
ctgtttccttccaacttcccaaaattcaaaatcccttctctgtcaccggaaaattcccaaaatgcaacctccgatttgtaaacccagacctcagagtcacctcgaatttctgaaaccgcgtctcaaagagtcgatcaagcagctcttgttacagtacccaggggggcgaaacaatttctccgagttcgacgccattttcacacgtagtcttaacaatattcccgaagcaccacctctcgagctcgtctgggtctactccgccatcagattctactcttccaagttagctttccgggatgattccgttaggttaacttcgtgtttcttccagctgatagtttcgttttccgattcgttttccg

SEQ ID NO: 140240 - DNA, 388 bp, Arabidopsis thaliana
ctgtgatatggatggtacactgcttaacagtaaaagtcagatttcggaggcaaatgcaaaagctttaaaagaagcccttctgaggggacttaaagtagtcatagctacggggaagtcccgcccaggtgcgatcagaatcttgaagacggctgatctaactggatccgatggcattatctcagagtcctctccaggcgttttcgttcagggattacttgtctatggtagacaagggaaagaagtgtatcgaggaaacttagaccgagatgtctgcagagagacctgtctttattctttggagcatcgaattcctctcattgcattcagccaggatcgctgcttgacattgtttgaccaccctcttgtcgactctcttcacacaatctac

SEQ ID NO: 140241 - DNA, 370 bp, Arabidopsis thaliana
caacaacggtcatttgcgaatttcgaacaactctttcaataaaagcaacaaaaagatcgaaactttacagtcgtaggaaggaaaaaaatggtgagaaagcgaagagttgtagtggggatcacaccagatccatgtgagacaaagaagaaaacgaaaagcaagcgaagaaagagacttagtaaggaggaggaagaagaagaagagggaacacctctcagaggtatattttgtctcaaaacacgacaagatatgaagattttcgaagagaaagaggattgctttatcctcgatttcgatcccaacgattcatttgatgcacgaaagctctccgatagccctgcatctgaatgtgacgacgacgtggcgattg

SEQ ID NO: 140242 - DNA, 332 bp, Arabidopsis thaliana
cccacgcgtccgcccacgcgtccgcccacgcgtccggccagattttaaggttcctgtcatgtctgattgcgaaatcgcttttttcttcttcctgagttcctttttttctccgatgaaattttaaccgtgatgatgatgatcataatgaaacagatatgagcaagaaaaatctagcgattctgttgcgtgctagaatgagatccaacaatccctccaaattttccctctctcaatttcctaaggaaattcaatctaatcctcaagagaatcattctagagatcacattgtgcaaaattctaatgattttggtaccactggaagggtttatgat

SEQ ID NO: 140243 - DNA, 389 bp, Arabidopsis thaliana
cttgttatgaagagtggtaaatacactcttggttacaagtctgttctcaaatccctccgtggctccaaagggaaactgattctaatctccaccaattgcccaccgttgagaagatcagagattgagtactacgcaatgctcgctaaagttggtgtccaccattacaatggaaataacgttgatttgggaacagcttgcggaaagtacttccgtgtttcttgtctgagcattgttgatcctggtgattctgacattatcaagtcaattcctggtgaccagtgatacaattttcagattttatttttcccagactttttacccgtctttgtattcgagtctctcaaaattttatgagcaatagacattgtgtttcttctttgtcaagtttt

SEQ ID NO: 140244 - DNA, 390 bp, Arabidopsis thaliana
cagctccattccttttgcgttggtcttgagggctcaccggacttgaaggcagggaaagaggtggcggaatatttggggacggtgcaccacgagttccacttctcggtgcaggacgggattgatgcgatagaggatgtgatttaccatgttgagacctatgatgtgacgactatcagagcgagcacaccgatgttcttgatgtcccggaaaatcaagtctctaggggtcaagatggttctctccggcgaaggtgcggacgagatctttggagggtacctctatttccacaaggcacctaacaagaaagagtttcaccaagaaacttgtcgcaagatcaaggctcttcacaagtatgactgtctaagagccaacaaatctacctctgccttt

SEQ ID NO: 140245 - DNA, 281 bp, Arabidopsis thaliana
cacacatcatgtccgatatctccaatggaaatatactctcatacttttctcaataaagagtgaaaaacattaaacttggcttagagaaatgtgaggtttaccaaatttctaccactcttacaacttcttcttcgtcttcctcttaattctgttccctgcttactctaactctgccaacactttgtcaggttcagaatctctaactatctcaagcaatatcaccattgtgtctcctggtaatgtcgtcgagcttggtttcttcaaacccggtttagattctc

SEQ ID NO: 140246 - DNA, 409 bp, Arabidopsis thaliana
cccacgcgtccgcggacgcgtgggcgggtgagaagaacgcgaataagtgatcggattaggaggctgcaagagcttgttcctaacatggataagcaaaccaacactgcagacatgttggaagaagctgtggagtatgtgaaggctcttcaaagccagatccaggaattgacagagcagcagaagagatgcaaatgcaaacctaaagaagaacaataatgtatcctttaggatttgatatatctgtattttatttttgtactatctaaaaatggtgatgatctgttcgaaaattcgaaacatgatcttatatattgaactagaaaaaatagatatatatgaattttagctgtaaaatttttgtacaataaggagaaaaagatttagaagagtcaataaaaagatgatgttt

SEQ ID NO: 140247 - DNA, 349 bp, Arabidopsis thaliana
gtacctgaaggcttaacattagccaaaccagctgcatcgatcggtattgtgcagttggattgcgtcttctctcatcttctccttcctgctcgtcttctcattaccacccatcttctggtctcggaagccatctcccccttagacgacccaagagccaagtggttcgtgtcaaggtagatgaaaatgtagccgagacagagccaccgaaatggtgggagaggaatgctccaaacatggtcgatattcattctactgaagagttcttgagcgctttaagcggtgcgggtgaaagattagttattgtagagttttatggaacttggtgtgcttcttgcagagcattgttccc

SEQ ID NO: 140248 - DNA, 386 bp, Arabidopsis thaliana
cccacgcgtccggaaaaacaaatcttcacaaggcaaaaaatccaaaattgagttttttttttcttcattttttacaatggtgtctcggtttcgtcttgctctagaggctgttttgggttcgagacgacgtaagaagatggcgagtactagtagtggtggtggtggtggtggtgataagaagaagaagaaaggtttctctgtaaaccctaaagattataaacttatggaagaagttggatatggtgctagtgctgttgttcatcgtgctatttatcttcctactaatgaagttgttgctatcaagtctttggatctcgatcgctgcaatagtaatctggatgatataaggagggaggctcagactatgactttgatagaccatccga

SEQ ID NO: 140249 - DNA, 394 bp, Arabidopsis thaliana
gtctttaactcaggagaagaaatctcgaccccagaaagagtcccatagaaaacccgatggcatttctcgcgaggtttatgcgcttaccgggggcgttgcacctcttatgccttcaattgatttaaagcgccgtcctcctgcagatgagaaggttgcttggaaatggctttccttcacaaattctgctaggaaagatgatttgcagctttaccattgggttagagtggttaatgatgttccaccaacaggtgactattcctttgccaaatataacaagtcagttgatattttgaaatacacagacgaggagtatgagaatcatttaacggattctgtgtggaccaaggaagagacagatcagttgtttgaattctgtcaaaattttgatctccgc

SEQ ID NO: 140250 - DNA, 343 bp, Arabidopsis thaliana
cggacgcgtggggtgaatctcaggaacatcttcgtctctgttcaggtacctgagcaccattctcatcagcggccgagattccggtttgtggtgacaacagagcaaaccgacggcgagagctagccttgcctctccttcgtcgtaaccagatccgagtctcgggtcgatcgcactgaggatctcaccgctcgcttgtagctccataacccagtcggctataaagaaggtcccagagtccgtcggtttcctcccggagacgatctctaacagcaaaacgccaaacgcgaaaacgtcggaagctgatgaggagtttccgttgcgggctagctccggcgccatatat

SEQ ID NO: 140251 - DNA, 183 bp, Arabidopsis thaliana
aatctgttggggcaaagcctgaaaaagttcagttgattgaccttaagagagcaggatcacggaaattatgcttactaaagtaaagatgccgctacctgatatgatggctgcagttctggcaatggatgagtctgtactacatattgctcaaatagagaatcttataaagttttgcccaaccaa

SEQ ID NO: 140252 - DNA, 406 bp, Arabidopsis thaliana
tatttctccgttttcgttttgtctttctttatcgtctcggtttcgtcgtctgatgtcaacgacggcgatgatctcgtgatccgtcaggtggttggtggagccgagcctcaggttttgacctcagaggatcacttttctctcttcaagcggaagttcgggaaggtctacgcttccaacgaggagcatgactatagattctcggttttcaaagcgaatctcaggcgagcgaggcgtcaccagaagttggatccgtcggcgactcatggtgttacgcagttctcagatctgactcggtctgagttccgtaagaagcacttgggggttagaagtggctttaagcttcctaaagatgccaacaaggctccgattctccctaccgaaaatctccctgaggattttgattggg

SEQ ID NO: 140253 - DNA, 416 bp, Arabidopsis thaliana
gaacaaagatgtcgaaagaagtgagcgaagaaggcaaaacccaccatggaaaagactacgtggatcctccaccagctcctcttctcgacatgggtgagctcaaatcctggtctttctacagagctctcatcgctgagttcatcgctacactcctcttcctctacgtcaccgtcgctactgtcatcggccacaagaagcaaaccggtccttgtgacggcgttggtttacttggtatcgcttgggctttcggtggtatgatcttcgtcctcgtctactgcaccgccggtatctctggtggtcacattaacccagctgtgactttcggtctgttcttggcccgtaaggtctctttggtgcgagctcttggttacatgatagctcagtgtcttggagccatttgtggtgtgggtttcgtg

SEQ ID NO: 140254 - DNA, 420 bp, Arabidopsis thaliana
agagatattgaaattgacgagagacagagccaaagctccgaaccacgccatgtctctagtccccggcggaatcgctgttccccttttttgttaagactaggaaagctcagagtcagaggcatgtccagagtttgatcgtcgtatccttgggcttatcaatatcagctgactctcagagtttgctctcatgctttgcccaccacaagggcttagtggcggatgccttgatcgtcctctcggagttgtccctgaacagaatccaaaggctataagctcttttcagaagatttgaaacctgcttcttgctcataccaacatcatttgaggagcatgacaatcttctttccttggcatatgacaactgctcatctgatcctgccccagcctcatcctcgctacacgaagcccattcacttcctg

SEQ ID NO: 140255 - DNA, 422 bp, Arabidopsis thaliana
ataccagctgaaaatatgctttatcattgttccgtttgcaatttcacatcgtgccttggttgtaccaaaaacccaccactccttgttattgagcatatgaagacccacaaacacccacttactctcttacctagaagaatctcatgtatctgtgacgtttgtgggaagaaatgccagtttacggcgtatgtatgtcttcagtgtgattttgttaccgcaagaaagtgtatcgacaggccccgtgtcatcaatatcaatcgtcatgatcatcgcatatatttaactcatcatctcggcactgggtattcggaatgcggagtttgtcacaaaaatgtaagtcagtacaagggggcttactcttgctctgtttgccctaactatgctgttcattctacatgtgccgtgagaactgacgtatggga

SEQ ID NO: 140256 - DNA, 415 bp, Arabidopsis thaliana
gcttactttgaaggcagttttgatgcttgcagatcaactgattagcagagttgaatatatgcattcaagggggtttcttcaccgtgacatcaaacctgacaatttcttgatgggacttggtcgcaaagcaaaccaggtgtatatcattgattttgggcttgcaaagaagtatagggatctccaaacacataggcatatcccctatagagaaaacaagaaccttacgggcacagctcggtatgctagtgtcaacactcacctaggagttgagcaaagtaggagggatgatctggagtctcttggttacgtactcatgtatttcctgagaggaagcttaccgtggcagggactaaaagctggcacaaagaagcaaaagtatgacagaattagcgagaagaaagtatcaactcctata

SEQ ID NO: 140257 - DNA, 417 bp, Arabidopsis thaliana
accacgcgtccgcaatgatcggtgctataacaagcgggcctatagctgatttagttggaagaaagggggcgatgagagtttcctctgcattttgtgtagtcgggtggctagcaatcatctttgccaagggagtagtggctctggaccttggaagactggcaacgggatatggaatgggagcattttcctatgtggtgccaatctttatagcagaaattgcacctaaaactttcagaggggctctaaccacactgaaccagattctgatctgcactggagtgtcggtttccttcatcataggcacactagtgacgtggagagtcttggcattaataggaatcatcccatgcgctgcctccttccttggcctcttttttatccctgagtctccaagatggctggcaaaagtggggcgtg

SEQ ID NO: 140258 - DNA, 422 bp, Arabidopsis thaliana
gagagatgtatctgaagagaccgatatggagcgatggcgcgtcagcaacgccggagaatccatcagaatcggagaccggagaagaatcagacgcggcgtcgatggtagtcgaagagctggtgacttctctcaatacacagagactttacagggagctgacactatccctcaggaccggtttacgcgatgcttgcgctgaattctccttccttcgcatccgtggtcttagatctcttctcaaaactctccgaactgtcgctgattcagattcaatcattcgtctcttctctcatacccaaaccatttccgatctccaactggttccggtgctttttcaacattcattgaaagaagcggaggatgataaagtgacgagcttggatcatatattcagtgtggagccgatgaagataacaagtcct

SEQ ID NO: 140259 - DNA, 286 bp, Arabidopsis thaliana
cgtaaagtcttgacagagttttgtagcctagaaaaatggcgtcagtgggtatagctcctaatcctgcagcaacagactctacaggtgttgagaaattgcctaaacacagttttacaagataagagtgtacaagaaccgtgagcttcaaaccatgaggctacttgaccatcctaatgttgtgtctccgaaacattgtttcgtctcaaccactgagtcacatgagctttacctcactcttgtccttgagtaccttccagaaactgttcatcgagtgatcaaacactac

SEQ ID NO: 140260 - DNA, 389 bp, Arabidopsis thaliana
  unsure (1)..(389): unsure at all n locations
agccctggcacatttcagtagataatccgtggcccaacggatggccacacgggagttctggagctcgggtcccatcttcttaccgtactccanagagctccaggaaagcatggttgtggtgaacgccatcgggaaattgaacttcacattgtccccagcatcatagtagcctccggtcaagtccacctgcaactcataccgtgttattcagatggatttactatgcttttactacttgactatgggtatacagttttagggtcttacgtgagcagatgagccatcagagaggccagagctagacctccatgagagttgttggtcactatggaggcgaccagaccgctgaccttggaaaaagagtaatgactttgagagtgcttctctgt

SEQ ID NO: 140261 - DNA, 415 bp, Arabidopsis thaliana
gagagtttataatcatctttgtctgtccgatgtttctctggccttgttgggactgtttgttttctgttgtgtgcgtgagaaggttactaaaaagctggggccaacgatatggcctgtgttcggaattactccagagttcttctttcacaggaatgatgtttatggttgggctacaagatgtttgaaaaaatgtcgaggtacctttctctataacggaatctggcttggtgggtcgtatggagctgtgacttgtgtccctgcgaacgttgaatacatgctcaagactaacttcaagaacttcccaaaaggtgcgtttttcaaagaacggttcaatgatctgctcgaggatggtatcttcaatgctgatgctgagtcttggaaggagcaacgacggatcatcattaccgaaatgcat

SEQ ID NO: 140262 - DNA, 421 bp, Arabidopsis thaliana
gaatcatcttctttctctttcggaacaaaaatgacgtctcctctctcacatctcctaaaccttgatctatcagacaccaagaaaatcatcgctgagtacatatggatcggtggctctggaatggatattagaagcaaagccaggacattaccaggaccagtaagtaatccaacaaagcttccaaaatggaactacgatggatctagcaccgatcaagctgccggagatgatagtgaagtcattctttatcctcaggcaatatttaaggacccattcaggaaggggaacaacattctggtgatgtgtgatgcttacagaccggccggagatccaattccgaccaacaataggcacaaggccgtaaaaatcttcgatcatcccaatgtgaatgctgaagagccttggtttgggatagagcaag

SEQ ID NO: 140263 - DNA, 382 bp, Arabidopsis thaliana
acgtttttaaactcttcgtcttcttcttcccccgcgtataaattctcatttctgtcattttgatcagatccaagaaaccaaaagagtaaaacaaacacagagaagcttcttcttaaacgatgccgtactataccagagatgacaacgacgtcgacgatttcgatgagtttgatccaacgccgtacagtggtggttacgacatcacggtgatctacggccgtccgattccaccttccgatgagacttgttatcctctctcatctggtgtcgatgatgatttcgaatacgagagacctgaatttactcagatccatgagccttctgcttacggtgatgaagctcttaacacagagtacagtagctattctcgacccaagccacg

SEQ ID NO: 140264 - DNA, 424 bp, Arabidopsis thaliana
agattttgcctcggtgtctgtcccaactctcaagaggctaaggtttagctggcaagagcgagatgagtttccaaagagtgtgttgttagatactccgaatcttgtatacttgaagtttactgatactgttgcaggcaagtatccgaaagtgaatttggattcccttgttgaagctcatatcgatcttcgcttgttgaagcctctattgataaattaccatcaaggttatggggaaaatgatatggttggcaatgctacagattttataatgcgtatatgcaatgtgaagactctttatctatctgccaacactcttcaggtacttacttacagttgtgatgctataccaatattcaacaacctgactcatttaaccatcgagagtaatccgagagtaggatggcagtcagtaccgggcttgctc

SEQ ID NO: 140265 - DNA, 368 bp, Arabidopsis thaliana
actcaccaaacaactctcatcaatataaagagaagagagtggtagagttatatattacacacataaacttagatatagtagtgttatattcttgattaagtaataaagatgaaaggtggaagcatggagaaaattaagccgatattggcgataatttcactgcaatttgggtatgcatgcatgtacatcatcaccatggtctcgttcaaacatggcatggaccattgggttcttgctacataccgtcatgtcgtagccacggttgtcatggctccctttgctctcatgttcgagaggaaaattaggcccaagatgacactatcaatattctggaggcttcttgctcttggaatattatagcccctcat

SEQ ID NO: 140266 - DNA, 224 bp, Arabidopsis thaliana
acggacgcgtgggtaacaaacactatgggtctctaaatttcagatttctgggatctgggtgttaggttaatctctttctcatcgattattagtagagaaagctcactcgtttcactcagagtttctaccgttttgttttcctgaaaatgggttgtgtttgaaatctcacactttgagatttgggtgtatattttgggatccatcttaccacatttagaaatttc

SEQ ID NO: 140267 - DNA, 360 bp, Arabidopsis thaliana
  unsure (1)..(360): unsure at all n locations
agagaatagctacaactcagttgggaatggacacggtttccatttacgatatggactggtcatgcccaacagcaatagttgttggaaacgacggcaggggaataagtgacgaagcgttggagttatcacatctgcgttgcagtattccgatgaatggaatggttgattcgtttaatgtctcagtggctgcagggattctgatgcaccacgcagtctctgatagaaccactcgtctgggaagccatggagatctgtcggaagcagagacagagatattgatggctgagttctcacttcgtcacagtacaagctcaatttgcattgcttacgagttcgctaaacgtanacaacaacactcta

SEQ ID NO: 140268 - DNA, 377 bp, Arabidopsis thaliana
ctttatgatgacagtcacaggtaaggtcagtaaaagttggcaatctctcttcaggagcaactgagcatgatattaaagagtttttctctttctctggtgaagttgaaagcatcgatatccaaaggttagtgatattgtttccttgttctttgatttcaaaattttgacatttaaagctttttttgatcaattaacttccgaagctttttctcagcaaatttagatacagttctcttaaacttactgactctgagctttgtttttgttttctttttctaactagcagtaacgagcatagtgcttatgtcacatttaaagaaactcaaggagcagagactgctgtgctcttatctgtgggttcactcttatctcaatat

SEQ ID NO: 140269 - DNA, 144 bp, Arabidopsis thaliana
gcgtcagccgaaatctttttgtgggcagaaacgtttgtgtcttacgccaatctctgtgtctctctgtcgagagagaaatggcagcatcatcagtactactctcgtgcttcaaatcgcagcatcaaccaaaccttctccatggct

SEQ ID NO: 140270 - DNA, 334 bp, Arabidopsis thaliana
aggcagaagaaggatagaactattgatcgtcgcaaaagactcatcatagccatggatactgcatttgggatggagtatttgcacggaaagaacattgttcatttcgatttgaagtgtgagaatcttcttgtgaacatgagagatcctcagcgtcctatatgcaagattggtgatttggggttatcgaaggtgaaacagaagactctagtatcaggaggtgttcgtgggactttgccatggatggcacctgagctcttgagtgggaaaagcaacatggtctctgaaaagatcgatgtttactcgtttgggattgtaatgtgggaactactcactg

SEQ ID NO: 140271 - DNA, 393 bp, Arabidopsis thaliana
ctaaaacttccatagataccagctttgggtcgtcattttcctttggttatattacgttaagtttcgtctgtggacttaatatatcaaagataattacgagtgtatttcctgaatttggtggctggatcaatcagaatattcagcaacgtcctgaggtcagtttcattccatcaatattcaacgaacctgaatcttacaaattatttttgttgttgtcagctgaatctgggagatctgaaaatgtgtaaatctaggccagtgtcagagaaagacactaatctaaaaccttggtatgatgaatctggtaatactacaggtatggcacctggggatgtaaattctaaaccactgcatgaagttcatgaaagagaaaatgaagttcatgaaagtgtt

SEQ ID NO: 140272 - DNA, 367 bp, Arabidopsis thaliana
gcgattaaacctactcaatctcagatctcgttaaacctagaaacctcgagaaaaaccgtatcaatggcgccgaaagcagagaagaagcccgctgagaagaaaccagcttccgataagccggtggaggagaaatcaaaagccgagaaagctccggcggagaagaaaccaaaggccggaaagaagctcccgaaggaagctggtgccggaggcgacaagaagaaaaagatgaagaagaagagtgtcgagacttacaagatctacatcttcaaggtgcttaagcaagttcatcgcgatatcggaatctccagcaaagcgatggggatcatgaacagtttcattaacgatatcttcgagaagcttgctcaag

SEQ ID NO: 140273 - DNA, 105 bp, Arabidopsis thaliana
tgcattccgcagtgtctggatgctctgtgtcgcaacaatatcggtcttcatgctgtgaaggatcgaaatgccttgaagtgttttgtgaaaatagatagttctccc

SEQ ID NO: 140274 - DNA, 351 bp, Arabidopsis thaliana
gggggaaatcgatggccgagagaagaaactttagctcttcttcggatccgatccgatatggattctacttttcgtgatgctactctcaaagctcctctttgggaacatgtttccaggaagctattggagttaggttacaaacgaagttcaaagaaatgcaaagagaaattcgaaaacgttcagaaatattacaaacgtactaaagaaactcgcggtggtcgtcatgatggtaaagcttacaagttcttctctcagcttgaagctctcaacactactcctccttctcatcctcacgctcatcaaccagaacagaaacaacaacaacaaccacaacaagagatggtcatgagc

SEQ ID NO: 140275 - DNA, 232 bp, Arabidopsis thaliana
ccggcaaatctttgtctggactggactgtttcaatgtttacagacatctgctaatctgttaaaaaattccattcaatggttgatttgttcttttcgtttcctctacacgttaggttttggcacattcacatagttacagcatctgaagttctaagcggaaaccattcctcccgagatggcgaccgtgaaaggccttcttaaaggccttcgctacattagtcagattttcgac

SEQ ID NO: 140276 - DNA, 416 bp, Arabidopsis thaliana
  unsure (1)..(416): unsure at all n locations
catggcttccttcgtggaatctggttggcagtaccttgtgacacattttagcgactttcaactggcatgtattgggagttttctcctccatgaaagcgtgtttttcttatctggactccctttcatttttcttgaaaggcaaggctttctcagcaagtacaaaattcaggtttattctcttcttattatttatcttttacaagtgtcttctatgtatgcaatcatagctttgtgtgatggtttgaatatgatagtctagaggttgatccccaagaattcagtctcacgtgaaaagtgttttcttatgacaggctgatgtccatttcagcgattactaataattgtgaatatgacccttttctatgcttctcttaccctttatggtcaacacatacttttcttttgtcnctatgcag

SEQ ID NO: 140277 - DNA, 374 bp, Arabidopsis thaliana
agaaaaaaagaaatggcaacaaaccctaaagtctacttcgacatgaccgtcggtggcaaatccgccggtcgtatcgtgatggagctttacgccgacacaacaccagaaaccgccgagaatttcagagcactctgtaccggagagagaggaatcggtaaacaaggtaagccattacactacaaaggatcaagctttcaccgagtgattccgaaattcatgtgtcaaggaggtgatttcacagccgggaatggtaccggaggtgaatctatctatggatcgaagttcaaagacgagaactttatcaagaaacatacaggaccaggtattttgtctatggctaacgctggtgcgaacacgaatggatctcagttttt

SEQ ID NO: 140278 - DNA, 425 bp, Arabidopsis thaliana
ccagttcttcaacttcagctcaagaggtttgaatacgattttatgagggacacaatggtgaagattaatgatcggtatgagtttcctctccaactggatctcgacagagaagatggaagatatttatcccctgatgcagacaagagtgtccgcaatctctacaccctccacagtgtcttggttcacagtggaggagtgcatggagggcattattatgcttttattaggccaacactttcagatcagtggtataaatttgacgatgaacgggtcacgaaagaagatgtcaaaagagcactggaagagcaatatggtggtgaagaagagttaccgcagaataatcctggtttcaataatccacctttcaaattcacaaaatactcgaatgcatacatgcttgtttatattcgggaaagtgacaagga

SEQ ID NO: 140279 - DNA, 371 bp, Arabidopsis thaliana
accacgcgtccgcccacgcgtccgcccacgcgtccgcccacgcgtccgcacacacaaaaaaaaacaattttctgtctatatatatattaaggatccaaattagggagagaccaaagaggaaattaataacaatcaatccaacaacgaatggagattgaagaagcgagtcgtgaaagtggacatgttgtgtgcggatcatggattcgtcgcccgaagaaagtaaactgggttcttatcgctaaagcttccaaacgccgtggctcatctgtttcttctcctgctctcctcaacatcttctcttttgaccccattactgcttctctttcctcctctcctttggcaacacacacgcttaaggatagtgatggtga

SEQ ID NO: 140280 - DNA, 419 bp, Arabidopsis thaliana
gttcattttgatgggaggtactttcatgtcactgcctgctgagtatcgggatttcttcatacggaatcttcatgatgctttatcaggacacacttctgccaacgttgaagaggcagttgcttactctgaacatagtgcaactaaatgcattgggatgacaattgaaacgaggccagattactgccttggacctcatttacgacaaatgctgatttacggttgcacccggctagagataggtgtccagagcacatatgaagatgttgcccgtgacacaaatagaggtcatactgttgctgctgtagctgactgcttctgcttggctaaagatgctggtttcaaggtggttgcacatatgatgcctgatcttcctaatgttggggttgagagagacatggaaagtttcaaggagtttttcg

SEQ ID NO: 140281 - DNA, 417 bp, Arabidopsis thaliana
aaaaaaagcaaagaacacttgaacgttttctagatagagatggaagggaaagaagaggatgttcgagtgggagctaacaagttcccggagaggcaaccgataggtacatcggctcagacggacaaagactacaaggagccaccaccagctccatttttcgagccaggcgagctgagttcgtggtccttctacagagccggaatcgccgagttcatagccaccttcctgtttctatacataacagtattgacagtgatgggagtgaagagagcaccaaacatgtgtgcctctgttggaatccaaggcattgcttgggctttcggtggcatgatctttgcccttgtctactgtactgctggaatctctggtgggcacataaacccagcggtgacatttggtctgttcttggctcgtaag

SEQ ID NO: 140282 - DNA, 374 bp, Arabidopsis thaliana
cggacgcgtgggcaaaattatccgatctgattctatggctgagacattcaagatccgacaactggagatctccgagaagagaaaaggattcatcgagcttctaggtcaactaaccgtcaccggatcagtaacagacgaagaattcgatcggcgattcgaagaaatcagatcgtatggtgacgaccacgtgatctgcgtgatcgaggaagaaacttcgggaaaaatcgctgccacgggtagtgtgatgatagagaagaagtttctgaggaattgcggtaaagctgggcacattgaagacgttgttgtggattcaaggtttcacgggaaacagctggggaacaaagttgttgagtttcctatggatcattgcaaat

SEQ ID NO: 140283 - DNA, 420 bp, Arabidopsis thaliana
tgtgaccggagctcagtgaaacatccggtgatatgcagcgaaagcggtagagcgatagtctctcatcattctgtgctgatctttgaagctgtttcagcagataaaccaatggttcatcaagcaactcccggcgatattcagttcctgcttgaaggtaatgaggaagctcgagccaattatgaggatctttatgctgctgtgatgcgtggagaccacgaaagctgccttctttatgtcgatcagctgaagcagaggtgtgttgaaggtttcaaagaaggtgttttgagcatcgagcagttagcttctgttgatggtttatgcgagtgggtgttgaaggctataggcgcatcggatccggttcatacttacaatatcaatctatcagttttcacttcgattcctgatctctgggggattgat

SEQ ID NO: 140284 - DNA, 71 bp, Arabidopsis thaliana
aaaaaagtataataaaatgtaatcgtctttattgtatttttttaatgaagtaatatcattgagattgccat

SEQ ID NO: 140285 - DNA, 416 bp, Arabidopsis thaliana
aggacgcgtggggagaaaatggcgatgttagttgagccaccaaatgggattaagcaacaagggaaacattactactccatgtggcaaacattgttcgaaatcgatacaaagtatgttccgattaaacccattggaagaggagcttatggtgtggtttgttcttctatcaatcgtgagactaatgagagagttgctattaaaaagattcacaatgtgtttgagaatcgtgttgatgctttgagaacgttgagggaacttaaacttcttaggcatgtgaggcatgagaatgtgatcgcgcttaaagatgttatgttgcctgctaatagatccagtttcaaggatgtttatttggtttatgagctaatggatactgatcttcatcagattattaaatcctctcagtctctttctgatga

SEQ ID NO: 140286 - DNA, 298 bp, Arabidopsis thaliana
gctgaaaatagtgttgaagagaacaattctcttaacaatttgaatgagcctgctaattcactgaaggttataaatgtgtcagttggtaatccacctgttgaaaaagctgttcttattgatcaaactatgggacatcacttggaagaatcggccacttcaattgagtcattgaagttaacttccgagagggagactctcaccacaccgaaaaagactcgcaagcctaaaacgaaaactctgaaggtggaattcaagtttttcaagctggccctgggcttacgaagaaagaaggtacaga

SEQ ID NO: 140287 - DNA, 377 bp, Arabidopsis thaliana
ctcgcaccatcgcaaaaaccctaatttttctcttcgattttctcttctcacaaaccctaattgtttcttcctcccaccactcgctttctccttccatcgttggtttttttaataagtttctctcttttttcttgtttggggaagaagccattggtttctttaaacgattgaatctataaaacttcttctttttcttctgggttctgtgttcttcgtctctttcgttgaacccgttgtttcgattttctttcgtctgagggagattttttttctgttgatgcgttgatacgaattttgccgttgttttgttgaattctaggaatagtgattaagtggttagggtttctggtttagtgcccatcaggctagttccctta

SEQ ID NO: 140288 - DNA, 290 bp, Arabidopsis thaliana
ctctcccgcaaccttcgattttcgtttattcgcatccatcggagagagaaaacaatcaataagcgaccatgttggtgtaccaagatcttctcaccggtgatgagcttctgtctgactctttcccttacaaggagattgagaatggaatcctctgggaagtagaaggaaagtgggttactgtgggagctgtagatgttaacattggtgccaatccatctgctgaagaaggtggtgaggatgaaggtgttgatgactctactcaaaaggttgttgacattgtcgacaccttc

SEQ ID NO: 140289 - DNA, 377 bp, Arabidopsis thaliana
gcttcttcttcttctagggcttccacgcgactacgcctgccaaaatcattctacaggaagcatgaagccagtcttctgtgggaactttgagtatgatgcgcgcgaaggtgacctggaacgactattcaggaaatacggcaaggttgagagggttgatatgaaagctgggtttgcttttgtatacatggaagatgaaagggatgcggaagatgccatccgagcacttgaccgctttgaatttgggcgtaagggacgcagacttcgtgttgaatggacaaagagtgaacgtggaggtgataaaagatctggtggtggttcaaggagatcctcatccagcatgagaccttccaagactctctttgtgattaactttgatg

SEQ ID NO: 140290 - DNA, 416 bp, Arabidopsis thaliana
ggtcgacccacgcaaccgattcaaactggccggcacatgatttgcatcagggcattggaatggattgggattcgatcaacgatttgagggttgacatgggtagaatacagcaaaggatggataacctgcagaggatgctagaggcttgcatggaaatgcaactcgagttacaacggtccataagacaagaggtctctgctgcgatgcaccgctctactgaccaaccaggtccatccaaggacactgcgagttacgagtcaaaatgggaatatgtaaggaaagggatctgctgcgtatgctgcgagagcaatattgactctttattgtatagatgtggacatatgaacacctgcgagaagtgtgcaaagaagctagtggaagcgggaggaaaatgtcccatgtgtcaagcccctgtg

SEQ ID NO: 140291 - DNA, 82 bp, Arabidopsis thaliana
ttttgttactttaggagtaacatttctcagactcggaactgaagacaaatggtatatttgatacatatatgtttattgtagc

SEQ ID NO: 140292 - DNA, 300 bp, Arabidopsis thaliana
accactgacgcgtgggtgacattctaaacacaatttttctgataataatatacacatttaccattatgcccatctaactgaaaacggcaattaggttccttgttatttgttttcttccttctccttcagtttcttttttgtggccttaatttatttcatattaattcttaaaaagaatgagtcttcactcacataagagtcacctgtaacagaatcactctgatgatcgagacaggtaaataccttctcggcgccgccggtgctagcgggttctgcgctaaatcgatcgcctaggaagtt

SEQ ID NO: 140293 - DNA, 82 bp, Arabidopsis thaliana
ttatgttacttaaggagtaacatttctcatactcggaactgaagacaaatggtatatttgatacatatatgtttattgtagc

SEQ ID NO: 140294 - DNA, 345 bp, Arabidopsis thaliana
caagaaaaacaaaacaaaacaagagtctcattatctctctaattctaaagatggagaagaatatatcaataagcaagaagctagggaacattgtacgttttgtcttgtacatgttacacaaaggcatttctaagcaaaagctcctagccgactttaatgccactctcaaacgcggcaagaatctcatgttccacaaccgccgccgtgtcccaggctcggctgttgcgtcccatccacagaacgagtacgagtttagctgcagcgacactcctaactacaaccgggttttccccttcaacatggctgccttcaagaagaagaccaccacaacagcctcttctcctg

SEQ ID NO: 140295 - DNA, 405 bp, Arabidopsis thaliana
  unsure (1)..(405): unsure at all n locations
ggaagctgcttgtgttgtatgcctctcagaccggaaacgctcttgatgcggcggagcgtattggccgcgaagcagaacgccgtggactgccagcttctgtcgtctccaccgacgaattcgacacgagttccttacctcatcatgaggaggctgttgtttttgttgtctccactacagggcaaggagactctcctgattcctttaaggcattttggaggtttcttcttcaaagaaatctgggaaactattggttgcaacaagttcgctatgcagtgtttgganccnttaaaggtgattctggttaccagaagtacaactttgtagcaaagaagctagacaaaagattatcagatcttggggccacaaccatcattgaaaaacgtctaggagatgatcaacacccat

SEQ ID NO: 140296 - DNA, 277 bp, Arabidopsis thaliana
cccacgcgtccggtcaatccaagatgggtcacagagtattggtttatgttggagctctgtttctgattttattcacgatttttccatcttctagtgctttaatttcgtctcctgatgctaatcctccttaccctaaagctatctccgatttgaaggaatcaattgtgaagggacttggattccaatccgaggaagtcaaggtttctgggtttgatataagggatgcattggtaggacattctgtttcatacgaatttgatttagaaatcgacaataa

SEQ ID NO: 140297 - DNA, 372 bp, Arabidopsis thaliana
atttttcttttacgcgtatcccttttcaatatacatatatatatacagagctagagaagttgcagaatcctgtgttaatcatattacaatctgcattgtgaaattttgcgaattcatctagggtttgatctgactccaaatttgggatttttagggtttaaatctagagatagagagagagagagaatgggaggttgtttatctggagatgtgaaaggaggcaaacaagccattggaggggtccagcagagacccacttcctcaaccattccgggccccagacaatgctgctcacaacgacgccgtcgattttttcttcagatctcgtggtcaatatcctctcttttctcaaatcgagttaactttgtcggc

SEQ ID NO: 140298 - DNA, 435 bp, Arabidopsis thaliana
cataaacacaaaacaccgcttagcttctaaaatctgaacatcgaaaaaatgagttggtggtgggctggcgccatcggagctgccaagaagaaactcgacgaagatgaaccatcacaaagcttcgagagcgtcgctctcatcatcggcgttactggaatcgtcggaaacagcttggcggagattctccctctttccgacacacccggtggtccatggaaagtctacggcgtcgctcgtcgtcctcgtcctacctggaacgccgatcatccgatcgattacatccagtgcgatgtctccgacgccgaagacacaagatccaagctttcccctttaaccgatgtcacacatgtcttctacgtcacctggaccaatcgtgaatcggaaagtgaaaactgtgaagcaaatggctcaatgctccgtaacgttctccaagcg

SEQ ID NO: 140299 - DNA, 278 bp, Arabidopsis thaliana
  unsure (1)..(278): unsure at all n locations
ggtangagggcttctcagtgcgtatgatctttctggggataaaattttccttgaaaaggctatggatattgcagacagattattgcctgcatgggacactcaatcgggtataccatataatattatcaacttgaagcatggaaatgctcacaatcctacatgggcggggggagacagtattcttgcagattctggtactgagcagcttgaatttattgccctttcccagaggacaggggacccaaaatatcagcaaaaggtagaaaaggttatttcag

SEQ ID NO: 140300 - DNA, 436 bp, Arabidopsis thaliana
gcgtttatactctgtaatgccagatccgcggtaacgcaagtcagtgacctactccggcgtttatcactgaatccgattatggctagtcttcttcgatccttaatccttttgctaatcgtgcaatcatttttggttgcgatcgctttcgggtcgaaagaagttgaagaattcagcgaggcattgctcttgaagcctttacctgatcgaaaagttttagctcacttccacttcgagaaccgagctcctccgtcaaactcccatggccgccatcaccatctcttcccgaaagctatttctcagttggttcagaagtttcgggtcaaggagatggagttatcttttactcagggtcgatggaaccatgaacattggggaggatttgaccctctatcaagtatgaatgcgaagcctgttggtgtggagctgtgggctgtgt

SEQ ID NO: 140301 - DNA, 380 bp, Arabidopsis thaliana
atagggctttaattttctctctgttttgtcataacatcactgactatatatccttcttaatcactttatattatctcgctatggctttcattgaatggtattttttttgtaaatttaagctttttgttttctcatcgttactacttatttgatttaaaaggtcttttgtgtgttctggtggtactattctgttcaaacttattacaatggatctatataaagttcgtttcaggaagctcttagataatcatgttatcatctttttttgttctagcttcccttaaaaagttgcaggtccctatgctaagttatgaataatgtagtttcagttaagctaagccacagtcttaaaaagtgtcaagtaccaaattattgaacat

SEQ ID NO: 140302 - DNA, 388 bp, Arabidopsis thaliana
tatgggttcttattattgaagtacatcaaagagttgcagatagagagaaacattcggtaacaaacatctgaactgttgttatgaaacgaggattctccgattctccttcaagctctgctcctcctccttcttccagattcaaatctaatcccgaaggtgattctcagtttctggaagatgagactacaaagaattttgcccggaaagttgctgatcattacagtaggagaacaaaccaaacattggaagagcgagaagctagtcccatcattcatttgaagaaacttaacaattggattaaaagtgttttgatccagctttatgctcgtcctgacgatgctgttctcgaccttgcctgtgggaagggtggtgatttgatcaagtggga

SEQ ID NO: 140303 - DNA, 314 bp, Arabidopsis thaliana
aatcgtgactcaacaaagtcattggttcgtgttaaaagtagagatgcccgaaagatcatatgcagtgcaatttctaacaccggatcacattttgcttactctgaccaaattggccccagtctgttcgagttgaagaaaaatgaatttacaaagtgtccatggagtgttagtagaaggcgacttcctgaacttccatttgcacattccatgattttcagttcggactgctctcgtctaataatagcagggcatgatagaaggatatatactattgacataagtagtttggaactagtatatgcatttacaccatc

SEQ ID NO: 140304 - DNA, 297 bp, Arabidopsis thaliana
gaaaatggcaaagacgagttgtgaaataatcctctgtttcttcttcttcattttaagcttcagggtcatttctgtttctgcacaacaaacttgtgacaacactgctggtagtttcaaacccaatagtacttatgacaacaaccgtcgtctcctcctctctaccttcgcctctaacgtcacggctcagaacggctacttcaatggttcgttcgggcttggtacagacagagtctacgccatggggatgtgcgctccaggtgctgaacctgatgtttgctccaactgtattaagaacac

SEQ ID NO: 140305 - DNA, 424 bp, Arabidopsis thaliana
cccacgcgtccggggaagaacaaaattgatatcactgtccctactggagcacaaattatctactccaaatacgcaggaactgaggtggagttcaatgatgtgaagcatcttatcctcaaggaagatgatattgttggcattcttgagacagaggacatcaaagatctcaaacctttgaatgaccgagtctttattaaggttgctgaggcggaggagaaaacagctggagggttgttgttaaccgagactaccaaagagaagccttctattggcacggtaagtgctcacttgatatcatgtccattcggggaatctgatactttcttagtagcttgatgtgatagtcagttcatacacaagttccaattatacatattctcctcttcattttatggcaggtgatagcagttggaccgggttccct

SEQ ID NO: 140306 - DNA, 377 bp, Arabidopsis thaliana
acgcacgcgtccgaccacgagtccgcggacgcgtgggcggacgcgtggggtgagtagcgggaaaggttttaaaactgcaaaggcaaggaaaggactgaatttcaataatgttgatggaaaagaaataagtgctaaggttctttcagaatctgaacgcgcaagcaaagctgaggctgaaattgtggctttaaaagatgctctttctaaagtgcaggctgaaaaggaagctagcttagctcagtttgatcagaatttggagaaactgtctaatttggagtctgaggtatctcgtgcacaagaggactctatggtgcttattgaacgagccacaagagccgaagctgaggtcgaaacgctcatagaatccctcagcaaag

SEQ ID NO: 140307 - DNA, 392 bp, Arabidopsis thaliana
ggatcctcgagctttttgatcggagactttttctctcatcgtcgttgtttgaattctccggctgagagatgcttgcttgacgacgaatctccaccgatcttttaccttttcgcacaacaagtaagagaaggatgtcgactccagcgaggaagagattgatgagggatttcaagaggttgcagcaagacccacctgcaggaattagtggtgctccacaagacaacaatatcatgttgtggaatgctgttatattcgggcctgatgataccccttgggatggaggtactttcaaattgtcactgcagttttcggaagattatccaaataaaccaccaacagtgcggtttgtttcacggatgttccatccaaacatttatgctgatgggagtata

SEQ ID NO: 140308 - DNA, 403 bp, Arabidopsis thaliana
agacagcttttgggagtcaacggccgcgacgatggacccattattacatcttgtattagggatggagttaacagaatatccttgagtggaggtgacgttcggattttttgttttggggtcagacttgtgaagcgcaggactctacaacaggttctaaatttgattccagaagagggtaaaggggagacttttgaagatgctcttgcacgtgtccgccgatgcattggaggtggaggtggagatgataatgccgacagtgatagtgacattgaagttgttgctgatttcttcggtgtcaatcttcggtgtcctatgagcggttctaggataaaagttgctgggagatttttaccctgtgtgcacatgggctgttttgaccttgatgtgtttgtggagttgaatc

SEQ ID NO: 140309 - DNA, 396 bp, Arabidopsis thaliana
atcatcaatggttatatagattactgttttttcttcttctccatttctcaaaacattattttcctacagagaatcaagaacccgaactacaagggaaaatggaagaacccatggatagataatccagaatttgaagatgatccagatctttacgttctgaagtctatcaaatatgcaggcattgaagtatggcaggtaagttctagagctttcttgaattccatcaaatattaacttttataatcactacatcatcaccagatatggatgaatatttatataatattcactgccaattagttcttttaacatatatatgctgcttgtacatataggtcatccaaatttttaaggttgaaaacaaaaccaaaagaaacagaaaagatctgataaaaa

SEQ ID NO: 140310 - DNA, 280 bp, Arabidopsis thaliana
gagcaatgatgtggttggtcatggtggtatctttagtgggttcggacttgtacctacattttagatattgagagagggagagactctaaaatggaagatggtgggtggtttggtgtttgttttagtaataaggtttttaacgaacgtttaatttaaacgagtttgtttgttttttgttgatgagtatttttagttgttgtgggcgatgaagaggaagagaagtgagtgggtggtgtttaactgtttataagtaacttgttttgtatatatcgtgattttg

SEQ ID NO: 140311 - DNA, 326 bp, Arabidopsis thaliana
aaggtaatggtgctaagctttatttgccctgaggaagctgaaagccctggatctaagcgataatgaattttcaagctcagtggaattgcaagggacttgcccatggaaaaatatggaagagctcaaactcagtaacaacaaactagctggtcagtttcctctatgtttaactagcttgactggacttcgagttcttgatctttcatcaaatcaattgactgggaacgtaccctctgctctcgctaaccttgaatcccttgagtacctatcactgtttggtaacaacttcgaaggcttcttctcacttggtttactcgccaacctct

SEQ ID NO: 140312 - DNA, 352 bp, Arabidopsis thaliana
acagaatcctcaccgtgtcatcagaggccctgtgtttactgttggacgccggggatgtgatttatctatcagagaccaagctatgcccagcaccctctgtgaactgaagcagtctgagcacggtggtccatcagttgcatcccttgagatattaggaaatggagttattgttcatgtcaatggcaagtgttaccagaaaagtacttgtgttcatctacggggtggtgacgaggtgatcttcagccttaatgggaaacatgcttatatatttcaacctgttaaagatgaaaatttagcagctcctgacagagcttcttcgttgagtatatgtgaagctcggggtgcccctctg

SEQ ID NO: 140313 - DNA, 442 bp, Arabidopsis thaliana
  unsure (1)..(442): unsure at all n locations
cacacgcgtccggggaagatgaggttcttgttangagaatcaatgggaggagcagtgcttttgttgttacacagaaagaagcctcagttttgggatggggctgtcttggttgctccaatgtgtaagattgctgaagaaatgaaaccaagccctttggtaatttcgatattggccaaacttagtggagtgataccttcgtggaaaatcatccctggccaagatatcattgagactgcttttaagcagccagaaatcaggaaacaggttagggaaaatccctactgctacaagggacgtccacgtttgaagactgcttatgagcttttgagggttagcaccgatctcgagaagaggcttaatgaggtttcattaccgttcatagttttgcacggtgaagacgataaagtcacagataaagcggtgagtcgacaactgtatgaag

SEQ ID NO: 140314 - DNA, 405 bp, Arabidopsis thaliana
accacgcgtccgcccagagcttgattctaagaaggggaagaaggagcagaagctgaaactatctgattcggatgaagaagagtcggagaagaagaagagtaagaagaaggataagaagcgtaaggcttccgaggaggaggatgaagtgaagagcgattcaagctcggagaagaagaagagcagcaagaaggttaagttgggcgttgaggatgttgaagttgataaccctaatgctgtttctaagtttcggatttctgcgcctttgagggagaagcttaaggcgaatggtattgaagctcttttcccgattcaggcttccacgtttgatatggttctcgatggtgctgatttagttggacgggctcgtactggtcaaggtaaaacattggcttttgtgttgcctat

SEQ ID NO: 140315 - DNA, 416 bp, Arabidopsis thaliana
gaagaaactaacagatacagaggtatcacactcctcttcaatgagcccccagaggctagaaaacccagcgaacgatggagactgtatgtttttaaggatggtgaaccactgaatgagccactctgccttcaccgccaaagctgctacctctttggacgtgaaagaaggattgccgacattcctacggatcacccatcttgcagcaagcagcatgctgtcattcagtaccgggaaatggaaaaggagaaaccagatggtatgatggggaagcaagtgaagccttacataatggatcttggtagtaccaacaaaacttatatcaatgaaagtcccattgagccacaaagatattatgagctttttgagaaagacaccataaagtttggcaacagcagccgagagtacgtactgttgca

SEQ ID NO: 140316 - DNA, 398 bp, Arabidopsis thaliana
cccacgcgtccgaactttttgtcgaaaataattgaattccgattttgtttttgtatggtttttgatgtttcagatggtggacagaacttggtttagaaaaagatgtggagaaggcaagaagccagccgttaaaatggcatacgtggtccatgaaaattcttcaagatccgaccttaaccgaacaaaggcttgatcttaccaaaccaatatcgcttgtttatgttatagatgacattttcgatgtctatggggagctagaagaactaaccatcttcacacgagttgttgagagatgggatcataaggggcttaagacgctacccaaatacatgagggtttgttttgaagctctagatatgatcacaacggagattagcatgaagatctacaaatcacat

SEQ ID NO: 140317 - DNA, 394 bp, Arabidopsis thaliana
  unsure (1)..(394): unsure at all n locations
aaagaaagagagaaagagagacagagataatggcgtacagtgcgtgtttcctacaccagagcgcattggcttcatcagccgcacgatcatcatcttcctcctcatcccagcgtcacgtgtcgctctccaaacctgttcagatcatctgtaaagctcaacagtctcatgaagacgataactccgccgtctcccgccgtcttgctctcactctcctcgtcggcgccgctgctgttggttccaaagtatctcctgctgatgccgcctacggtgaagctgcaaacgtgtttgggaagccaaagacgaacacagacttcttgccatacaatggagatgggttcanagtgcaggttccagcanaatggaacccaagcaaagagattgagtatccaggaca

SEQ ID NO: 140318 - DNA, 431 bp, Arabidopsis thaliana
aatttttaactccatatacatgattataaacgttcatatgttatttgatatgaattaaataaactaatttttgtttatgatttactatttttatttttaatagatttttgtatattgtgtatctaaaatatcatatttataatattgtatgttggaaatgcttaaaccacctaaaattgcatatgttttgattagacgttatatgttttaagtattgtgtcagtgcttgcttcgtgcctaacgctttcttaaacacaaacaagtcaatattttatactacacaaactcattaatagatattagtgctaaacttaataaagcatatataactattcaagtccacaaaatcttttaccaaaataaacttttaaaatataaacttttttacatgtctagcacgtatccgaacatttccaaaaagatactccatc

SEQ ID NO: 140319 - DNA, 434 bp, Arabidopsis thaliana
cagacgcgtgggctcttacacgcagagttcgcgagatcagaatcaatggtggcatgaaaaacgacgcttgagctcaaattcgtcgaccatggaacctgcaactcttactcgttcttcctctcttactagattcccttatcgtcgtggtttatccactctccgactcgctcgagtcaactcgttctcaattcttccacctaaaactcttctccgtcaaaaaccgcttcgtatctctgcttcccttaatcttccaccacggtcgattcgtctacgtgctgtcgaagatcaccatcacgatcatcatcacgatgacgagcaagatcatcacaaccaccatcatcatcaccatcaacacggatgctgttctgtggaattgaaagcggagagtaagcctcagaagatgttgttcggattcgctaaagctatcggatggg

SEQ ID NO: 140320 - DNA, 434 bp, Arabidopsis thaliana
caaaaccgttttcatcggaagaagaacaagttggattgattttgctttggatctcacatctgagatcagattaatctctctgtgaagtcgaagaacgaaaccctagttcccatggatctctcttcacgcttctcatcgatccttatccttctcttgatctccatctccatagcttcggctgagattcgtaaatcagagatccgatccgatgatcgtccaatcatccctttagacgaattcggtttcactcacagcggtcgtcttgagcttgacgcttccaagatctggctttccaacagcaatcccgatctcgatctctccaaagtgggcttctttctctgcactagagacgcttgggttcatgtgatccaacagcttgaagaagaagagatcacgtgcgctctacaatcagatctcgttaagcatgtgttcac

SEQ ID NO: 140321 - DNA, 65 bp, Arabidopsis thaliana
agttgttactactgttttggaggttcacaagtgtcaattaaaagtttcattttttttaccccaac

SEQ ID NO: 140322 - DNA, 131 bp, Arabidopsis thaliana
cagacgcgtgggcggacgcgtgggcagacttatgatctcatacctatctatcttccatcactttcatgtctgtctgtgagtgtgtttcatcttagagttcttgggttttgagcttgaattattgttgaacc

SEQ ID NO: 140323 - DNA, 448 bp, Arabidopsis thaliana
aaaaatgatgtcatcaatggcactctcttctacttccctctgctcttctttcatctctcaacatccaaaactctccatcactgcttctcctccattgttccatacccaaacaaccaaacccatctctgtaaaacggaaaatcataactctagcagctccagagacactcaccgctgaaacagtcaccggaattgatacttccgacaacactccacaacaaacaataaaggtggtgaagccagatgagaaatcaagagtggtactcaagtttgtgtggatggagaagaacataggattaggattggaccaacatgtacctggacatggcacaatcccacttagtccttacttcttctggcctaagaaagatgcttgggaagagcttaagtctactcttgaagctaaaccatggatctctcagaagaagatgatcattcttctaaaccaa

SEQ ID NO: 140324 - DNA, 296 bp, Arabidopsis thaliana
attccctctattttcggatttttgcatcttctcggatcatcttcaccactatagggtgcatcatcatctacagacgacatgtaatcatcggagaaaccagaaatcgagatccttgctgcttcaaacggagctcttcctctgcttaaacgatccttctccatcactcgtcgattctcaaaacaatagtgttgcttttcactccttgacgcatagttttggcttgagctacgatgcaattaccactgaaggacagcagtcagttgcagacttgtttcccaaattgttggtgcatttat

SEQ ID NO: 140325 - DNA, 351 bp, Arabidopsis thaliana
ggaaactccaagagctccagaaagagaagagtgatacgttacagaaggtgctcgagtttgtgagcacggtgcatgatctatgtgccgtccttcgtttagattgcttaagcactgtcaccgaagttcatccgagcttagatgaggcacatggtgttcaaaccaagagcattagcaatgaaacacttgcaaggttggctaagactgtcttgactcttaaagaagataaaatgcacagacttaagaagcttcaagaactagctactcagctaactgatctatggaatctgatggatacttctgatgaggaaagggagctttttgaccatgtaacctctaacatttcagcttcag

SEQ ID NO: 140326 - DNA, 246 bp, Arabidopsis thaliana
  unsure (1)..(246): unsure at all n locations
cccacgcgtccgcgctgcgagcatccttcgtcttcacttccacgactgctttgttaatggttgtgacgcntccatcttgttagacaacacgacatcatttcgaacagagaaagatgcgtttggnaacgcaaattcggctcggggatttccagtgattgatagaatgaaagctgcggtggagagggcatgcccaagaaacgtttcatgcgcagatatgctcaccattgcagctcaacaatctgtcac

SEQ ID NO: 140327 - DNA, 336 bp, Arabidopsis thaliana
  unsure (1)..(336): unsure at all n locations
caaatcttaaacgttttaccttgtgctgcactactcaacctcaatggccgcctcaacaatggctctctcctcccctgccttcgccggtaaggccgtcaagctttcccccgcggcatcggaagtccttggaagcggccgtgtgacaatgaggaagactgttgccaatgcaaagggcacatcatgcagcccatggtacggatctgaccgtgtcaagtacttgagtccattctctggcgaatcaccgagctaccttaccggagagttccccggaaggtacngatgggacaccgccggacttgcagctgaccccgagacattcacaaggaaccgtgaact

SEQ ID NO: 140328 - DNA, 345 bp, Arabidopsis thaliana
  unsure (1)..(345): unsure at all n locations
ccttgatctgcttgacttttcttcagaggagctcacttggtctgcttctgcttctgagaatcctaaaggtaagggcaacggaacaggggacgttggatcggacacaaggacatggttaagtgctgctctctccaaccaagccacttgtatggaaggcttcgatggtagctctggtctcgtaaaatcccttgtcgctggcagtctcgatcaactatattccgtgcttagggaattgttaccacttgtgcaaccagagcagaanacccaaggctgcntctaaacctggccctattgctaaaggaccgaaggcaccacctggccgtaaactcagagacaccgacgaag

SEQ ID NO: 140329 - DNA, 162 bp, Arabidopsis thaliana
  unsure (1)..(162): unsure at all n locations
attgatgtgagctctagtgtgcttgatgacttttgtgttaaaacgagtgtcttggttactttatgaaanattctaccggctttatttctttcgtctgctttctagctcgagctatgtctgagtttatacacaaatgtctttcagtagcaaaaattctgcact

SEQ ID NO: 140330 - DNA, 301 bp, Arabidopsis thaliana
ggacgacgagaggattcgagagcgagagagacttcagatcgagcagattcgtgagcttgattgcgaggaattacaagtcgaagaagtcgatgaccttcacgattccgattccgatgataataatgatgatctctcttcatttcctttctcttcccacgctcaagcttctggtaacctcggtgatgatgaacttatgttcaacccagctttggcttcttggcatatgtatcttggcgaggttgaagacactcaaaacagagtttcttttgtgggtggaggaacggtattgaagatcccgctt

SEQ ID NO: 140331 - DNA, 297 bp, Arabidopsis thaliana
  unsure (1)..(297): unsure at all n locations
ctgaaaacaagtatcttggtacacgagttcggtccgatggaaccattggagagtattcatggatgacatntggagaagcagcgtctgagcgacaagccattggttcaggactcttgtttcatggagttaaccaaggagattgcgttggactctattttattaacagaccagngtggttggttgtggatcatgcttgtgcagcatattcatttgtctctgttcctggatatgatacacttggtccagacgctgttaagtttgtggtgaatcatgctagtctgcaagctatattttgtg

SEQ ID NO: 140332 - DNA, 142 bp, Arabidopsis thaliana
aggatctatacctctcctcagtctcatactcaaatcaataatccaagccccaaagatgggaaaaccagtgaagatagtttaaaaaatgataggttcttgcaaagtcgctatagttcatcatctggttttaatcaatggtgtg

SEQ ID NO: 140333 - DNA, 318 bp, Arabidopsis thaliana
  unsure (1)..(318): unsure at all n locations
gcaaggtctgtaactgcttcactggtcatttggagtttttttaaggttctaggaatgttcaaatttaatntgttctaggagttaagttaggcgttgaaggagggaggacagtgttcgtgtatgttgaaggttcttaatctggtccacttcctcactgttaatgtactcagatgtttgcttttggctttttcttttttctccagggtttgcttttgtatacatgggggatgaaagggatgcggaagatgccatccgagcacttgaccgctttgaattgggggcgtaagggacgcagacttcgtgttgaatggacaaaga

SEQ ID NO: 140334 - DNA, 310 bp, Arabidopsis thaliana
gtttagctcaaaggggctcaacttctcagcactcgtgtcctctgctcgtgtattctctagaaaggtagatcgttcttgtaagaacatcgctctgagagttacttgtgaagcgggaagagtggagctgctagagagaaaagcctcagagactttcaagttaaacaaaagtgagaaaaaattgacctgtgtaatgaaattcggtggctcatcagtggcatcttcttataaaggatgatacaagttgccaaactcatactcagcttcgcagatgagatagctgttgttgtgctatcagcaatggcaaagacca

SEQ ID NO: 140335 - DNA, 312 bp, Arabidopsis thaliana
  unsure (1)..(312): unsure at all n locations
cttgtgtagataccaatgaggtagaaacacagaagtttgtggattctttggtggctttggctatggatangaagacaaagatgaattcatgtgagacaaatgtggtcttcagcgagtttcaggactggcttgagaaacatggagattacgaagctatagtagatggagcaaatattgggctctaccaacaaaattttgtagatggcagtttcagtctttcacagcgtgaatctgtgatgaaggaactttaccgtgaaagtggtaataacaaatggcccngaattctattgcacaagagacgggtcaagacgc

SEQ ID NO: 140336 - DNA, 395 bp, Arabidopsis thaliana
  unsure (1)..(395): unsure at all n locations
cagtctcgctcgcgtctttcctcaaacctctctgtctcttcttcttcctcgcctcgtctatctggtaatactactcttatatcacaaaatctccacgaaagcgctactcgaagatccgtcttttcaggtcgtttatgtattttctcttgaaggaagagattagttctttaatacaaaatgtctgggtcaacaaaagtattggatcctgcgtttcaaggangggggcagaaaccaggtactgaaatctggagaatcgaaaattttgagccaggctcagtaccaaagtctgaacatggaaagttctatatgggagatacctacattgtcttgcagaccacacagaataagggtggcgcttattcanttgatatacatttttggattggtaaagatac

SEQ ID NO: 140337 - DNA, 197 bp, Arabidopsis thaliana
atgatggggtttacatctacaaatgtgccaaataatctgacccaaaaagatttagggtccaatgggggaataatatcgttgttgcaaaacttaatccagttattgcttcttgcaatatggattcgtcttgtggcttgtactgggggaaataccatttgttaaccttttattaattcaaattgccaatgtcaataact

SEQ ID NO: 140338 - DNA, 134 bp, Arabidopsis thaliana
caaatttccaaatgtctctaattgaggatggcgccttgtgctacgacacgcatgactagccgtatatcggggacacgcccgcgtgttgctcgacctttccctactgacgcggaggttgagtcgggttacaagcg

SEQ ID NO: 140339 - DNA, 366 bp, Arabidopsis thaliana
cgcgtccgcaaattcacaacttgtggctatgcagctataaacacatcaagtcctttgtcaataagacaaactctgagttctcctggtggattttatgagttaggcttcttcagtcctaataatactcagaatcagtatgtcgggatctggttcaagaagattgttcctcgtgtagttgtgtgggtggctaacagagatacgccagttactagctctgcagcagatctcactatcagcagcaatgggagcctgatcttgcttgatgggaaacaagatgttatttggtcaacaggaaaagctttcacatccaacaaatgtcatgcggagctcttagataccggaaattttgttgtaattgatgatgtt

SEQ ID NO: 140340 - DNA, 356 bp, Arabidopsis thaliana
acgcgtcaaagagacgatgccgacggattcgaaaatggccaagtttcttcaatcctatggatatgatttgattctgggatctgtagctgcaatctatgtggtcatggcaccatatactaaggtggaagagagcttcaacgttcagtcaatgcacgacattctttaccatcgccatcatttggactcttatgatcatttggagttccccggtgttgtccctcgaacttttattggagccttcatagtctctgtttttgcatcacctgttgtaacaattaacagctgccttggtttccccagggtttatacccttgttgcacctcgtttggtgttgggctgcatcatattgtccacac

SEQ ID NO: 140341 - DNA, 423 bp, Arabidopsis thaliana
cccacgcgtccggtacggcaacacaaaccaagagagtgtaagttaagcgacatgtgttagagatatccggagatctcaaccgttggattctttctccttcaaatcaaattataaatcccatcaaacagagagagagagagaagaggaggagaattcgaagaataaaagataagaactttgacgttttgaagcttaaagcttgaaacttgtttcatccatggcggctcgtagagtgtcttctcttttatctcgatctttttcagcttcctctcccttactgtttcgttctcaagggagaaattgttacaatggagggatcttaaggagatttggaacctcttctgctgctgctgaggaaatcataaacccatctgttcaagtttctcacacacagctcctcatcaatgggaactttgttgactc

SEQ ID NO: 140342 - DNA, 371 bp, Arabidopsis thaliana
actctttttcccttcatactcgtcttcacatctgaattccgacaagatattgcgtctgctctcctctcttccctcattctcgtcttctcattaccaaaaacatcttcttctcgtagctaactcaatccaattccaatctccattcaaatcgagcaccagataattttttctcctaaattctaatataagccctaaaattcaaaattgaaatatctatagaatctccttccgattcagacggataatcgccatcaacagcgtgtgaattcgatcaaaaatctgaactttccacaaagaaattcgaaagctcagatttttcgatttcgaaaattttgaaaactcagttaatggcggattttcagacatcaaca

SEQ ID NO: 140343 - DNA, 280 bp, Arabidopsis thaliana
gttaccttttgttcgttcgaatcccaatatagacgatcgaagaggaagacgatcaagcagtctctcaaacttcttctccagatccgaatctcacgcgcatttctccgatctctccatgtgaatgacctacaatttcgcatcacttttggtcttgatcactgtttctctccttctactgaatctcgtgttttgagtaatcactaatatacacaacggtggagatgaaggggagatcagaaggagggaagaagtagccggtgattgtgttactctgcgttgc

SEQ ID NO: 140344 - DNA, 355 bp, Arabidopsis thaliana
ataacctccaaaacaaaaatatcacagatccaaaagatcggattaacataatctctccaaataatcatgcgttactctcatactctccagcagttctcaattctatctttcttcgttacaatatggaccgttcaatcagtaccaccacaaccaccgattcgatgcgaccaaaccggctgcaccgtctccaacgcgtacggcacgtggcctgaccgcaaaacctgtcacgcggctaacgtcacatacccaacgacggaggaagaccttcgtaaagccgttgcttacgcggctgagcacaatctcaaagtcaaaaccgtcaccaaattctctcacaccataccgaaactcgcttgtc

SEQ ID NO: 140345 - DNA, 105 bp, Arabidopsis thaliana
acggacgcgtgggcaaatttctcagaatgctcgattgactccgagagttatcaagagctccggtgctacattctccggcgacgaatcgatcgtgatctctctttt

SEQ ID NO: 140346 - DNA, 243 bp, Arabidopsis thaliana
ccgaagcttccgctcaacatcaccgtcgagaccagccatgggtcctgtcatcaaagctcaaggttccgttgtcggttccgtcatcaaataccacactcgtcagggcaaatgtcctgctaactaccgtagccacaaattcggctagagaaatggttacctcacgggcatcatcaaggatattatccatgatgctgctcgtgctgctcttcttgctcgtgtcactttccgtcatcctttccgttt

SEQ ID NO: 140347 - DNA, 420 bp, Arabidopsis thaliana
acccacgcgtccgggcaaattaagatcatcttcataaatcttctcagatctcttccaattttctagaaaaaacatgtcttgctgtggtggaagctgtggttgtggatctgcctgcaagtgcggcaatggttgcggaggttgcaaaaggtaccctgacttggagaacaccgccaccgagactcttgtcctcggtgttgctccggcgatgaactctcagtacgaggcttccggcgagactttcgttgccgagaatgatgcttgcaaatgcggatctgactgcaagtgcaacccttgtacctgcaaatgaagaacttcataaaccctaagtctgtaataaccctaatgttatgttaggtttgcttatatgtaataattggctgatttttccggtagttttgccggcgacgttggtctttctct

SEQ ID NO: 140348 - DNA, 414 bp, Arabidopsis thaliana
cggacgcgtgggcggacgcgtgggcggacgcgtgggcaaaatttgtatgctttattcgatttaatgtctttgatacacttgttcttgttgttgggtctgctgagccttgaagctgcggcgtcgttttcaccgggatcgcgctcgattctccgggacatcggcagtaacgtcgccgatcagaaagacaacgctatcgaattgaacgctaccaactttgattcagttttccaagattcccccgccaaatatgccgttttagagttcttcgctcactggtgccctgcatgtagaaactacaagccacattatgaaaaagttgcaaggctattcaatggagcagacgcagtatatcctggtgtcgttttgatgaccagagttgattgtgcgataaagatgaatgtaaagctttgtgac

SEQ ID NO: 140349 - DNA, 244 bp, Arabidopsis thaliana
agtcttggaccacatcgttaatcaatgttgtttgttgtttgatgtttactttttttttttactcagttttgaaaattcgataagtattctagctctagaattccatatctaggttttttgttttctcctagatagtctgaagaatcaattgtaatggtctgtggaattacacggaaacagttttgttgtaataatggagcatcagttttctttggttgaatgaaaaatcataatttttttgact

SEQ ID NO: 140350 - DNA, 382 bp, Arabidopsis thaliana
actttcattttccctctctctttcaagttccttgttatttaagaaagccatgaatccgattatctatttctaaccctgggccgaccagaaaactttttggacgacccaaacttcaagggttctaataaattcatcaccggaaaaagatacatataaaataaaaatctctcaccactgctgattcaaatggtgaatcttgggagctacgttttcgtctttgtcgcgttgtctctcaccgtggtggttccatcggttcaagcccacatcgccgaatatgatgaatactggacgcagcgtcaaaccaacgcattgcgagaaactttggaatcttatgacccgaacccagagaacgtcacggaccactttaactaccatgccgcct

SEQ ID NO: 140351 - DNA, 341 bp, Arabidopsis thaliana
aatttctccgatcgccggttagcagattcaagcgagatacgagatccgacgagcagatcttctgcttaatctgtaaacatgcctctcagactagatatcaagagaaagtttgctcaacgatcagagagagtcaaatctgttgatctgcatcctactgaaccatggattctagcaagtttgtattctggaaccgtgtgtatttggaactaccagacacagacgattacaaaatccttcgaggtgacggaattgccagttaggtcggccaagtttattccgcgcaagcaatgggttgtggctggagcggatgatatgtacatccgtgtatacaattacaatac

SEQ ID NO: 140352 - DNA, 388 bp, Arabidopsis thaliana
  unsure (1)..(388): unsure at all n locations
atgttgagttaactggggagacattattggatcttaagttgcttgagaaaggtcagataatcataagtactcctgagaaatgggacgctctgtcccggaggtggaaacagagaaaatatatccagcaggttagtttgtttatcgttgacgagcttcatttaattgggggtcaaggtggtcaagtgttggaggtaattgtctctagaatgagatatatttcaagtcaggttgggaataaaatcaggattgttgcattatcaacttcccttgcaaatgccaaagatcttggagagtggattggggccagttcatgtggcgtttttaacttcccgcctaatgttcgtcctgtcncactggagatccacattcatggngtggacatattgag

SEQ ID NO: 140353 - DNA, 289 bp, Arabidopsis thaliana
accacgcgtccgcccacgcgtccgcccacgcgtccggaatgatggaaaatattgcaagctctgtctctctctgttagtcaccaaatgatgtaaccggttctctttctccctcttcttaaaagttgtctcaccaaatgttctgttaaaatactaaatcaaaccgatctcatcatgcgtacctattcccggttatcgcagtctgtttttttcttctcaaaaaactaaaatgttggatttcgtggtttttgtttggagtgtctaatatatcatcatgctcttccgtttgaac

SEQ ID NO: 140354 - DNA, 248 bp, Arabidopsis thaliana
caatgccatgaattccaaaccatataacattcaagtagaagatagactaaaagggctgttcacacagtaatacttcctgcacatgaacactaagccagaatcgataacatgaaacacacatacagtcagtactcagtagattgacggcacctacggccaccaagtaatactacagacggtacacgttccaatgcctaacgatgaaacatcatcaatagaatcacacttgtttttcatcatacaccgta

SEQ ID NO: 140355 - DNA, 396 bp, Arabidopsis thaliana
acggacgcgtgggcggacgcgtggggttcaacatttggcggagtcaaagaaacagagtgattctctgatccgattccggcgaaagaggacgaaacaaacggaacttgttcatcatcttctccagaaatgacgtcgtttcaggtgatgcgttcttcaaattcgagaaactcggatctatctcgtcgcatctcttctgcttctacttcttcttcgtctataagacctcaacaacagttccggcgagatctaacaagtgtcggttacggcggaagaaacgacggattatacagttcaaattcgatgacggtcgaagggattttacacgatactttcgcatcagatccaccagcaccaacggaatcttcactcttagatgcgtcgataaatctgatggat

SEQ ID NO: 140356 - DNA, 431 bp, Arabidopsis thaliana
aacgctatgggagtgaaaaagattgcagtaccatccctgcaaccgcttggttgtctccctcccttcacattcgtaacctcgttccagcgttgcaacgagacacaaaacgcgttagttaacctccacaacaacttattgcagcaagttgtggcaaagctcaataacgagactaaacagtcgactttcatcatccttgatctctacaatgctttcttgactgtgttcaagaacaaaggatctaatccagggagtacaaggtttgagagtccattaaagccgtgttgcgtaggtgtgagccgcgagtataactgtggaagtgtggatgagaagggagtgaagaagtatattgtatgtgataatcctaaaactgctttcttttgggatggacttcaccctacagaagaaggatggagatcggtttactctgtttt

SEQ ID NO: 140357 - DNA, 424 bp, Arabidopsis thaliana
acggacgcgtgggcggacgcgtgggcgatcacagcgacgaggtcgaatacgatcttcttacccctgtcgacagttctgaattaatatcaattttcattgtcttcctatctctctttctctctttggcttcttccaatctaatttcagtgatttacttgttaagaattcaccttttgagaggcccagttttgaaatatggctggccaaaacgcgcgtttgaatgtggttcccactgttactatgctcggggttatgaaagctcgtcttgttggcgctacaagaggtcatgctctcctcaagaaaaagagtgatgctttaactgttcagtttagggcacttctcaagaaaatcgttacagctaaggagtctatgggagatatgatgaagacatcgtcttttgctcttaccgaagtaaagtatgttg

SEQ ID NO: 140358 - DNA, 416 bp, Arabidopsis thaliana
agtttgtttcaatagctatgcggatactagtggagctggaaatgatgtttatgagtttgtaagtattaacatagagatgttctttcttcttcttatgctgtttcttaaagatttggagtttattttgtgcaggtaaagtcgattgggaagtttaaggagactaaacgaacagaggggatatcgacatctgatataatcatgagaatagtgaaagattataaccagtatgtgttgcgtaatctggaccgaggttattcaagagaagaactcggtgtcagcttcgttaaggagaagaggcttagagtgaatatgagattgaagaaacttacagagaaagttaaagaacaacaagaaaagatacaaacggtagcaaaaactgctgggaatgcacatgatgagtggcttgaaaatgctga

SEQ ID NO: 140359 - DNA, 167 bp, Arabidopsis thaliana
aacgaaggatgctctttcaggagaaagggtgattgattgaagcaatcatcaaaataatgaaggctgttttctttttcttttttttttgttgttgttggctatgatgttatctctggaattttaaaatgtttggatttttaatataagtaagcagagtttgctctttt

SEQ ID NO: 140360 - DNA, 300 bp, Arabidopsis thaliana
gtggggaaacattatagcgagagatatagatagagatttcataacgacaatccagagaaagggtcttgccagtttaaggcatccttgggggtgagagagctattgatacatttcaaaaggaagaagaggaagatacgagtgtgagagagatttagagggagagaagaatgatatattcgttttgagtgtgttaaggtttcatttcctctgcagatctacatttagctcttcgcatggaacggaaacttgtggttttgggaatcccgtgggatattgattccgattggcttaatgattaca

SEQ ID NO: 140361 - DNA, 429 bp, Arabidopsis thaliana
aggacgcgtgggcatatacagcatctccacgttgaagagtgcaatgaactcctctacttcaatctcccatcactcactaaccatggcaggaacctgagaagacttagcattaaaagttgccatgacttggagtacctggtcacacccgcagattttgaaaatgattggcttccgagtctagaggttctgacgttacacagccttcacaacttaaccagagtgtggggaaattctgtaagccaagattgtctgcggaatatccgttgcataaacatttcacactgcaagaagctgaagaatgtctcatgggttcagaaactcccaaagctagaggtgattgaactgttcgactgcagagagatagaggaattgataagcgaacacgagagtccatccgtcgaagatccaacattgttcccaagcctgaag

SEQ ID NO: 140362 - DNA, 350 bp, Arabidopsis thaliana
agaagaaacagaggttcctcttgtgtttttgttttgggattaaggaagctatttctgttctcttcgagtttcaggtctagccctaaccctaaaattcagccatgtcttcgaagcaaggagggaaattgaagcctttgaagcagcccaagtctggtaagaagtagtacgatgagcacgatatggagttaatgcagaaaaagaaggatgaagagaaggcacttaaagaactcagggccaaggcttcacaaaaaggatcattcggaggctcaggacttaagaaaagtgggaagaaataagactaaatctgcctcaatgtaatcctatatcaccttatatatgtctgtcaatgt

SEQ ID NO: 140363 - DNA, 429 bp, Arabidopsis thaliana
acgcgtccgaaagtatcgaaactgctcggatatttgactttgaggagtttccaagaagagataaggttacatacatgtattataccggccgattagaagtcttcaacgaaaattttcctgctgctgatacaaagctatcatatgccttgcaaaattgcaaccccaaaagagaacgaaatataaggatgatattaaagtatttggtaccggtgaagctttctttaggaattataccaaaagatgagctcctgcgaaattataatctgcatgagtacacaaagattgtgcaagctctgagaaagggtgatctaaggcttctccggcatgctcttcaagaacatgaagatcggttcttgaggtcgggtgtgtatcttgtcttggaaaagctagagctccaagtctaccagagactcatgaagaaaatttata

SEQ ID NO: 140364 - DNA, 372 bp, Arabidopsis thaliana
cgcgtccaaaaaagatgccagagatgttttagataaactgaatgctacaccatctagggattttgatggtatggtgggaattgaagctcatttgagagaaataaaatctttgctagatttagataatgttgaagttaagatagttgcaatcgctggtcctgctgggattggtaagactactattgccagagctttatatggtttactctctaaaaggtttcaacttagttgttttgtggacaaccttaggggaagctatcatagtggttttgatgagtatggttttaagctgcatttacaagaacagtttctttcaaaggttttgaaccaaagtggaatgagaatatgccatttaggtgcaataaaagaaaa

SEQ ID NO: 140365 - DNA, 408 bp, Arabidopsis thaliana
aatctgattcgtttcttccaaaccctagaaaaatccttagcaatggaggatgctgatggacttagcttcgatttcgaaggcggtcttgattccggacctgttcagaacaccgcttccgtcccggttgctccgcctgaaaactcttcctccgccgctgttaacgtagcaccgacctacgatcattcttccgcgacggtggctggagctgggaggggtagaagtttccgtcaaactgtttgtagacactggcttcgaggtctgtgtatgaaaggtgacgcctgtgggtttctccatcagttcgataaagctcgtatgccgatctgccgttttttccggttatacggtgaatgtcgagagcaggattgtgtgtataaacataccaatgaagatatcaaagaatgcaatatg

SEQ ID NO: 140366 - DNA, 379 bp, Arabidopsis thaliana
aatgaaaagggttctgatctaacaagtttgagcgcacctgctattagcaatggtggccgggatgctgcatctctaaaaactacaaattttggttcgtccgcgctggatttggttaaaaagaaactacatgattctggaatgcctgtctcatctacgataacatctgaagcaaatagtggtaaaacaactgaggtcacacccagtggagaaagtggaaatagtacgggtaaggtgaaagatgctcctggagctggggccctttccgattcttcttcagattcggaagatgaagatagtggaccatcgaaggaagagtgttctaaacagtttaaggaaatgctgaaagagagaggaatatcaccgttttctaaatgggaga

SEQ ID NO: 140367 - DNA, 143 bp, Arabidopsis thaliana
aggacgcgtgggaaacaagttcacaatttcgaataatgtcactaaccgcacaattcgcgccgccggtcaccggtataaccacaagtctcagggatacaagaccgtcactgtcaaatctccgtgtatttccggtttacactgag

SEQ ID NO: 140368 - DNA, 344 bp, Arabidopsis thaliana
aaccgattacagttaagctaaaagtggttgacgttgatcctggccttcgcggtgatactgtgcaaggtggatcaaaaccggcgacaatggaaacgggtgcaatagttgctgtaccactctttattaacgtcggtgaagagatatttgtggacacaagaactggtgcatacatgaaccgagcgtgatccgggtctactacacctagttaattgggtcgttaacaacaaggcaatgatacatcttttttgtatatgagaatgttcgaatccggggacacatgtttgtttttctgaacatcgagagacaatttttcgattaaataaatttatatatatttaagtttg

SEQ ID NO: 140369 - DNA, 422 bp, Arabidopsis thaliana
aatccaaaagcattacagacacagtaatggcggctcctcggaatttaacaggtgacggtggagcaagacagctagtaaaagacgaagaaagccccgcagcttcatcggcagctaaaggactcttaaacgatgactcaccgactggtaaacgaaccaaatcggagagatttcctctctcacggtgggaattcgccgtgtttttcaccgtctttctcgttttcaccaccggactcttttgtatttacctcaccatgcctgccgctgaatacggcaagctcaaagttcctagaactatctccgatcttcgattgctcaaagagaatcttgggtcttatgcaagtgagtaccaagcacggttcattttaggttactgttcgacgtatatctttatgcagacatttatgatacctggaacgatcttt

SEQ ID NO: 140370 - DNA, 413 bp, Arabidopsis thaliana
acccacgcgtccgagaatagtttgatcatcttgtgagaaaaataatggctgcttcagtgatgctatcttcggtgacattgaaaccagctggtttcacggtggagaagacggcggctagaggattaccgtcgctcacaagagctcgtccctccttcaaaattgtcgccagtggcgtcaagaagatcaagaccgacaagcccttcggaattaacggcagcatggacttgagggacggcgtcgacgcctccggcagaaagggcaagggatacggtgtttacaagtacgtcgacaagtatggagctaacgtcgatggatacagtcctatttacaacgagaacgagtggtcagcgagtggtgacgtgtacaagggaggagtcaccggattggcaatttgggcggtaactctcgccgga

SEQ ID NO: 140371 - DNA, 325 bp, Arabidopsis thaliana
agtatacgtgtggatggaaatgatgcacttgccatgtacagtgcggtacatactgctcgcgaaatggcaattagagaacagaggccagtcttgattgaggccttaacataccgtgtaggacaccattcaacatcagatgattccactaggtaccgctctgcaggtgagatagagtggtggaacaaagcaagaaacccactgtctaggtttaggacatggattgaaagtaatggctggtggagtgataaaacggaatcggatctgagaagcagaatcaaagaagagatgttaaaagcgctccgggttgcagagaagactgagaaac

SEQ ID NO: 140372 - DNA, 122 bp, Arabidopsis thaliana
aaattcttcagtcgtctcttgacaaatcctcaaaatatccacaattttcctctctattacccaggttgatttcatcagaacctcttcgccattaatggttacagcgatgttttgtggatcat

SEQ ID NO: 140373 - DNA, 394 bp, Arabidopsis thaliana
aaaagaatgcaggtaaattcactgatgaccattgaagcaaaaaagaagtacgagttcttggaatctataagtgcaattatggattcccatttcaaatattttaagcttgtatgtttcttctcttattttgcatttagagatgtaaccaagtgtgaccaactaagggaaacatcagtacctcgttgtactccttaatgtggtctctttgttctccagggttatgatctattaagtcaattggagccttacatccatcaggtattgacatacgcacaacagtcaaaagaacagtctaagattgaacaagatcgatttgcacaacgcattcaagaattcaggactcaatctgaattagacagccaacaggcctctgctaaagcagattcctccgatg

SEQ ID NO: 140374 - DNA, 426 bp, Arabidopsis thaliana
aatgtctctagttgcgaacgaggagtttcagcatattctgcgtgtgctcaatactaatgtcgatgggaagcaaaaaattatgtttgctttgacctcaatcaagggtattggaaggcgattggctaacattgtgtgcaagaaggctgatgttgacatgaacaagagggctggagaactaagtgctgctgagattgataacctcatgacaatcgttgctaaccctcgccagttcaagatcccagactggtttcttaacagacaaaaggattacaaggatgggaaatactcccaagttgtttccaatgctcttgacatgaagttgagagatgatcttgagcgtctcaagaagatcagaaaccatcgtggtctgaggcactactggggtctccgtgtacgtggacagcacaccagaaccaccggacgccg

SEQ ID NO: 140375 - DNA, 411 bp, Arabidopsis thaliana
actcgatccttccggcttgctcaaaaggttgatcagacgctaggatttgagaagcaatggcgaatagaatagatcatgagtacgattacttgttcaagatcgtcctgatcggcgattccggtgttggtaaatccaacattctctctcgattcaccagaaacgagttctgtctcgaatccaaatccaccattggcgtcgaattcgccacccggactttacaggttgaaggcaaaacagtgaaggctcagatttgggacactgcaggtcaagagcgttatcgagcaatcacaagtgcttactacagaggagctgttggagctcttcttgtctacgacataaccaagagacaaacttttgagaatgtcttgagatggttacgtgagctaagggatcatgctgattccaacattg

SEQ ID NO: 140376 - DNA, 429 bp, Arabidopsis thaliana
accacccacgcgtccgaattgcctcacgttcctaggccaaagatgaagatttgcatgcttggtgatgcccagcacgtcgaagaggctgagaagattggattggaatctatggatgttgaagctcttaagaagttgaacaagaacaagaaacttgttaagaagcttgctaagaaattccatgctttccttgcttctgaatctgtcattaagcagattcctcgtcttcttggtcctggtctcaacaaggcaggaaaattcccaactcttgttagccaccaagagtctttggaatccaaagtgaatgagacaaaggcaacagtgaagttccagctcaagaaggttctatgtatgggagttgctgtcggtaatctttccatggaggagaagcagatctttcaaaatgttcagatgagtgttaacttcctcgtt

SEQ ID NO: 140377 - DNA, 431 bp, Arabidopsis thaliana
acggacgcgtccgcccacgcgtccgcacggagatggtgtatttttgagtggttctacagtgcaattgactatccatggtttgccagacaagagtttgttgagtatttggatcatgtacggttgggtcatgttcctagattaactcgcgttgaatggggtgtcataaggagttctcttgggaaaccaacgcgattttctgaacagtttttgaaggaggaaaaagaaaagctatacctatacagggactctgtaagaaaacattatgatgaactaaacacgggcatgagggaatgacttccaatggatttggcccggcctctaaatgtttcacagagagtcatttgcctgcatccaaagtcaagagagattcatgacggcaatgtcctaactgttgatcactgtaggtaccggattcagtttgacaaccctga

SEQ ID NO: 140378 - DNA, 421 bp, Arabidopsis thaliana
aaggacgcgtgggcggagtttcgtccgggaatctcctagatggcttatcgtaaagggtcgtaaagaagaagccgtctcaattctccaaagcattgcttctaatgcaatcactatgagcttcacaaacttatgttttgaagtagaaaatgatcaatccaagtcaaatcctgatgtttatgatgcgttaaagatcttggtgaggaaaagttggtcgtttagaagattattagcggcaatggtggttggattcggtatcggtatggtttattatggaatgccattagctttaacgaatctaaacttcaatctttacttaagggttgtgttcaacgccttgtctgagttcccagcttttctgataacgtttttcttcattgataaaatcaataggagagatgcgttgatcggatttacagctcta

SEQ ID NO: 140379 - DNA, 349 bp, Arabidopsis thaliana
  unsure (1)..(349): unsure at all n locations
cacacgcgtccggtttttgaagtgatgcctagaaaggatgttgtgtcgtataatactatcattgcagggtatgcacagagtggaatgtatgaagatgctttgagaatggttagggagatgggaactactgacttaaagcctgattcttttactttgtctagtgtgcttccgatattttctgagtatgtggatgttattaaggggaaagagattcatgggtatgtgattaggaaagggattgatagtgatgtatatattgggagtagtttggttgatatgtatgcgaaaagtgctcggattgaagactctgaaagagtgttttctcgcttgtattgtcnggatggtatct

SEQ ID NO: 140380 - DNA, 428 bp, Arabidopsis thaliana
ccacgcgtccgcagacgcgtgggcggacgcgtgggcgaagtcgaagtggtcttcaaatctccggcggatggtaatcgtcggcggatggtttagactttagagataacagaagaagacctcatctttagagtccggagcgaaattaatggcggccatagctcgtcttccactaactcattctcttccctccatcttcaatccttcatccttcctctctcagtctctctcttttcctacttatctccatcgctctccctttcgctccttctcctccgtctctccaatcctctgcacctcccatcgcgattcgagatcgccggggagtgattctaatgcgtcgattgttggggatcttctggattatcttaatgaatcctggacacagtttcacgccactgctgaggcgaagagacagcttttggctgctg

SEQ ID NO: 140381 - DNA, 436 bp, Arabidopsis thaliana
acccaacaatgtctctcctcctacgaactttgcctctccgacctactcgtttcctctccgccacagccatatccatctctaacgctactaatttcttcgtcggacccaaacggacaaacccacttcccggaactcgaagaaccttctccagttcccctgttgcagctgcctccggcgatgtagtagtgaagccggttccatctcctccgtcggttctccggtgggtgtcacggacagagctatgcggcgagttatcagtcaatgatgttggtaaaagagtccacctttgcggatgggtcgcccttcaccgagttcatggtggcctcactttccttaatcttagagatcataccggcattgtccaggttaggacgcttccggatgagtttcctgaggcacatggcttgatcaatgacatgaggcttgagtacgttgt

SEQ ID NO: 140382 - DNA, 450 bp, Arabidopsis thaliana
cccacgcgtccgcggacgcgtgggtggatgttgggtgtggggttgctagctttgggggatatctttttgacagagatgtactcgctttgtcatttgcacccaaagacgaacacgaggcacaggtgcaatttgctctggaacgtggtattcctgcaatgtcaatgttatgggaaccaagagattaccttttccaggatctgtttttgaccttatccattgtgctcgttgtagagttccttggcatatcgaaggtggtaaactacttttggagttgaaccgtgcattgaggccgggtggtttctttgtctggtcagcgactccagtctataggaagactgaggaagatgttggcatatggaaagctatgtcgaagctaacaaaggcaatgtgctgggaactgatgacgattaagaaagatgaactgaatgaagttggtgctgccatttacca

SEQ ID NO: 140383 - DNA, 449 bp, Arabidopsis thaliana
  unsure (1)..(449): unsure at all n locations
accacgcgtccgcccacgcgtccgcccacgcgtccgcggacgcgtgggctcagtaggctccaacttgagcaatcttgagagtggaaaagtttatcaagataatcatcactcaggtgtggagaaacctgttttggtccaaaatacagtaagtagggaacaaatcgatcagattactaacatctcagcatctctagcgcagtttcttgcaaatggtcagcccattccacagcttgaacaggcattgcagctgcctctgcattcagaatctgttcaaccaaatcaggctactactcaaagtaatgtagtgagtagtaatccaaatcagctatggggattagggatgagcactggcgctgaaggagtcnccgcggttactgcatcaaagataagcaatgtcgaagagattcaagaagtatcgctagatcccaaggaaaacggggacaaaaaga

SEQ ID NO: 140384 - DNA, 434 bp, Arabidopsis thaliana
  unsure (1)..(434): unsure at all n locations
caccatatatctatcctctctatgggttgggagaattgcctcaggcatttgcacgacttagtgctgtctatggtgggacgtatatgttgaacaaacctgagtgcaaggtanagtttgacgaggagggtaaggtttctggtgttacatctgagggagagactgccaaatgcaagaaagttgtctgcgatccttcttacctaaccaacaaggtcaggaagattggcagggttgctcgggcgattgccattatgagccaccctattccaaacaccaatgattctcagtcggtgcaagtcattctaccccaaaaacaattgggccgcaaatcagacatgtatgtcctctgttgttcatattcacacaacgttgctcccaagggaaagttcatagcatttgtgtcaacagacgctgaaactgataaccctcaaaccgag

SEQ ID NO: 140385 - DNA, 412 bp, Arabidopsis thaliana
gatcagacgggtggtgtctgatgaggcaagagctatgtacaatggtggcgtggccggtctgacatattggagtccgaatgtgaatatcttgagggacccgcggtggggccgaggccaagaaactcccggagaagatcctatcgttgccgcaaaatatgccgccagctacgtccggggacttcagggtactgctgccggtaaccgccttaaagtcgccgcatgttgcaaacattacactgcttatgatcttgataattggaatggcgtcgaccgtttccacttcaacgctaaggtaaatcttcttcacatattatatatatctaatatcgtatatagtaagaaaatattttgcaatttattatcaaatttatataaccaattttgcatgttttgtttcaaagtttgtatgcat

SEQ ID NO: 140386 - DNA, 394 bp, Arabidopsis thaliana
agcccacgcgtccggttagtcataaaaaaaaaaaaaacacaaaaaagtttcaatggccgcctcaacaatggctctctcctcccctgctttcgccggaaaggctgtgaacctttcgcctgcggcatcagaagtccttggaagcggccgtgtgacaatgaggaagactgttgccaagccaaagggtccatcaggcagcccatggtacggatccgaccgagtcaagtacttgggtccattctctggcgagtcacccagctaccttaccggagagttccctggagactacggatgggacacagctggtctatccgctgaccccgagacattcgcaaggaaccgtgagctagaagttatccacagcaggtgggccatgctcggagccctaagctgcgtc

SEQ ID NO: 140387 - DNA, 167 bp, Arabidopsis thaliana
ccacgcgtccggaaaaagatgtgtaattttcattgttttattcatcatagtgaaactaggctctatgccacacctgaaagacgacaaacagacatttgagagtagaatggtgtactacaatgtggatgtgtgtgtgtgttttgtcaaagttactttgatacttgtat

SEQ ID NO: 140388 - DNA, 444 bp, Arabidopsis thaliana
agaaaaaaaaagtttctagaggcttcgttagcctaattcattaactaggttctcctagtttctgctgctaattcccaaatctcagcgaaatcaaacttctctgctctgcttagctctcagctagctgaaatctctctcaatccgtgtagcttagcttccctaatccaaccatggcaaagttcggtgaaggtgacaagagatggatcgtagaagacagacctgacggcaccaacgtccataactggcactggtccgaaaccaattgccttgaatggtctcgcaacttcttcaccaaacaattctccggcgttgatatcctctccggcgaaggtaatcttttcatcaaggtcagtaagatcgagaaagtcgaaggcgaagcttatgtgaatgtgaggaaggggaagattatccctggctacgagcttaacgtctctttatcttggg

SEQ ID NO: 140389 - DNA, 450 bp, Arabidopsis thaliana
gatggagtatgatgagaagtggattaaggggttacaggagaggttgctgaatggggttagagagaagcttgatggtgttgtggtgaatggttcaatggatagtcgatatgtagggaatttgaatttgtcgtttgcttatgttgaaggagagagtttgttgatgggattgaaggaagttgcagtgtctagtggaagtgcttgtactagtgcgagtttggagccttcttatgtgttgagagctttgggtgtggatgaagacatggctcacacttcgattaggtttgggattggtaggtttaccacgaaggaagagattgataaagcggtcgagcttacggttaaacaagttgagaagttgagggaaatgagcccgctttatgaaatggttaaagaaggtatcgatatcaagaacattcaatggtctcaacactgattcaacagttccactca

SEQ ID NO: 140390 - DNA, 382 bp, Arabidopsis thaliana
  unsure (1)..(382): unsure at all n locations
agcaccacgcgtccggttcttgttttcgatagtgcaactccaattgcagggaaaggtgtagcagcagtgatcctagcccaaaagcctgatgatcttctttctcgatgcaatggtgtaccatgcatttttccagattacgagtttggaactgagattttaaaatacatacgtaccaccaggtctctatcttgaaacaaaaacactctcttaactacacaagtgcatgtatatatatacatcattgatcgtcgtgccaacagatctcccacggtgagaattactgcagctactacactaactggtcagcctgcaacaactaaggttgctgcattctcatgtanagggcctaattcggtttcaccagccattctcaagcctgata

SEQ ID NO: 140391 - DNA, 427 bp, Arabidopsis thaliana
gatcatttctcctccattgatctttctttactcagatctttcctcttcctctgagatgtggagctacgtttggttaccgttggtagctctatctctctttaaggatagcatcataatggccaaggctgcgacgattctcctccctagtcaaaccggatttgatatttctcggagtccggtatgctctgctccggatccgaacctaaattacagaccggttattggtattctgagccatcctggcgacggtgcgtcaggtcgtttgagcaatgctacagacgcgtcctccattgcggcttcgtatgtgaaattagctgagtctggtggagcacgtgtgatcccactcatctttaacgagcctgaagaaattctctttcagaagctagaattggtcaacggtgtgatactaactggtggttgggctaaa

SEQ ID NO: 140392 - DNA, 227 bp, Arabidopsis thaliana
cacacgacgtccggagatagacaaatgtaaagaaaaacacagagagaaaattagtttaattaatctctcaaatatatacaaatattaaaacttcttcttcttcaattacaattctcattctttttttcttgttcttatattgtagttgcaagaaagttaaaagattttgacttttcttgtttcagatttcagcaaatgggatcgattttaagcttcgtctgggttaa

SEQ ID NO: 140393 - DNA, 219 bp, Arabidopsis thaliana
gcgtccggaacaaatgttctaaagatcaaagcttaagtgagaagcagatgcaacagatggcgaaatcgcagatctggtttggatttgcgtcacacgcgttgcatctggtgtcagccgtatctgacgatgtggttgatttgactgacgataacttcgacaaggaacttggtaatgataacggagctctcgtcgagttttacgctccctgttgtggtcact

SEQ ID NO: 140394 - DNA, 330 bp, Arabidopsis thaliana
actagtatctagatcgcgagcggccgccctttttttttttttttttttttcgagaaagctggaatcactaaatttgttgtcaatctcatttatctgtatatactactactagtaaattgagaaaggatcacacccataaaccctcagaagaagatacaatctgattcgagtcccgtcaacgaatctgattaccatgaaggcgaacgtcttactcatctactcgacttgattcatagaggaattgagacgtccaagctttcgaatgtgaactcattacctgagaagatatggctcaagaagcaaatagcgattgggatcaacgaagtcact

SEQ ID NO: 140395 - DNA, 243 bp, Arabidopsis thaliana
acgcgtccgaaaaaatcattatttattaattattttggccaagttactgcatttaactttttgggcacatcaccacaatactctcacaattccaactatatagaaatataatcactctctctttttcatttttcttttgaatgttttcttagtattagatgaaagttgagaattctaatcctcactcatcgagagttgagaatcaaatgagttaaattgcatcttttcaggattgctagaagg

SEQ ID NO: 140396 - DNA, 347 bp, Arabidopsis thaliana
cataaacgttttactttgtgctgcactactcaacctcaatggccgcctcaacaatggctctctcctcccctgccttcgccggtaaggccgtcaagctttcccccgcggcatctgaagtccttggaagcggccgtgtgacaatgaggaagactgttgccaagccaaagggcccatcaggcagcccatggtacggatctgaccgtgtcaagtacttgggtccattctctggcgaatcaccgagctaccttaccggagagttccccggagactacggatgggacaccgccggactttcagctgaccccgagacattcgcaaggaaccgtgaactagaagttatccacagc

SEQ ID NO: 140397 - DNA, 297 bp, Arabidopsis thaliana
agattcatccttatgatctgagatcaatccaagaaatatccacttcagacaactgttgtcctcggatctgtttttcagacaaaagtggagctcaaaacggagacaaatcttcaatctttgactccttgcagaaccagttatggcaagagaagagcaaaacattgaaaacagaggatccgtacatgtggtcgaaagagaaagtaatttacgtagtgtggtgtgtggtcctgtgcggtggctaaagatgttggcgtcaaagcttcactggagctatgtgtttgctgtggtctccaattg

SEQ ID NO: 140398 - DNA, 238 bp, Arabidopsis thaliana
cagacgcgtgggcggcgctttcgcagactccgtcttgaattcggaatcagtcaagatctcaacaacatcaacatcccaagaaatcgaatcctgagtagcagacaaatgaggaacgtcgtgtgtgaccgagtttctccaaggaggaagaccaccattacctcgtaaatagttaccagatctagtcctaagcttaatcttagacccttctctaagcggttcccactcaacagacgaatca

SEQ ID NO: 140399 - DNA, 356 bp, Arabidopsis thaliana
acaacaacaaatcttaaacgttttactttgtgctgcactactcaacctcaatggccgcctcaacaatggctctctcctcccctgccttcgccggtaaggccgtcaagctttcccccgcggcatctgaagtccttggaagcggccgtgtgacaatgaggaagactgttgccaagccaaagggcccatcatgcagcccatggtacggatctgaccgtgtcaagtacttgggtccattctctggcgaatcaccgagctaccttaccggagagttccccggagactacggatgggacaccgccggactttcagctgaccccgagacattcgcaaggaaccgtgaactagaagttatccac

SEQ ID NO: 140400 - DNA, 373 bp, Arabidopsis thaliana
cacacgcgtccgcaaattccctcattacctcaatcgaagtctcttcatcactggtgaaagttatgctggccattatgttcctcaactagctgagcttatgattcagtacaacaagaagcaccatttgttcaatctgagaggaattgctattggcaatccagttttggagtttgcgacagatttcaactcgcgagctgagtacttctggtctcatggcttgatatcggattcgacttacaaaatgttcacatcttactgtaattactcgcgctatgtgagtgagtactatagagggtcaatgtctagtatgtgctctaaggtgatgagtcaagttagcactgagacgagtcgatttgttgataaatatgatgtc

SEQ ID NO: 140401 - DNA, 231 bp, Arabidopsis thaliana
atccgggtataatatgagagatagacaaatgtaaagaaaaacacagagagaaaattagtttaattaatctctcaaatatatacaaatattaaaacttcttcttcttcaattacaattctcattctttttttcttgttcttatattgtagttgcaagaaagttaaaagattttgacttttcttgtttcagatttcagcaaatgggatcgattttaagcttcgtctgggttaa

SEQ ID NO: 140402 - DNA, 383 bp, Arabidopsis thaliana
  unsure (1)..(383): unsure at all n locations
attggctaaaaataataagacactcgttagagtgctcgtccctcgtgcccttacctgcctaattccaactatctggcaaaatcatgactttgatggaagatgccgagttgaaaccaaggatgggttcttttaagaagaggagctcttctaagaatttgaggtattcaatgacaaagagaagaagaagtagcaaagtgatgtctgtggagatcatcgaagatgtgcatgacgcagaggagttgaaagccgttgatgcttttcgccaatcgcttattctcgatgagctactcccggagaaacacgatgactaccatatgatgcttagatttttgaaggctanaaaatttgatcttgagaaaaccaaacagatgtggactgaaatg

SEQ ID NO: 140403 - DNA, 421 bp, Arabidopsis thaliana
gcacgcgtcagcattattttgttaacaaaaaaaaagaagaattatctggcaaagtgtttaatttccgagaaagttgaagcagagaagcagaaagtttcagaattctcttttctccaagtttaacgcgtttttagctcaaagctcacacacacgaccactctattcctcctttaacctttgtgtttgtcaatttgtgtttcctcttttgtcgactcatttctcgattcaatctcgattttttttttttttgtttttatggaaatctaatgaactttttttatggatttgatctgttaaagtttcgattaataagatagtggtttaggtttacggttttgtaattgatttattatctgtaatgggttgtgaggtttcaaagttatctgcactttgttgtgtttcagagtctggaagatcgaat

SEQ ID NO: 140404 - DNA, 327 bp, Arabidopsis thaliana
acgcgtccgccaaagcgtccgcccacgcgtccgcggacgcgtgggcctgtcttcatatccaacagagatctcttcatggctccaattactgtcggcgatgttgtaccagacggaactatctctggcttcgatgaaaatgatcagcttcagaccgtctctgttcactctatcgccgccggtaaaaaaagtcattctctttggtgttcctggtgctttcactcccacatgcagcatgagccatgtgcctggattcattgggaaagcagaggagctgaagtcaaagggtatcgatgagatcatttgctttagtgtgaatgatccatttgt

SEQ ID NO: 140405 - DNA, 249 bp, Arabidopsis thaliana
acgcgtccgtaggattggtttgcaccaaacacagtagatcgacttgaaaggcaagtggtgccacagtttttctctgggaaatcgccaaatcatacacccgaaagttatatggaattcaggaacgcgattgtttccaaatatgtagagaaccctgaaaagacactgacgatttctgattgccaacgattggtagatggtgttgacattgaagattttgcacgagttttccgttttcctgatcactgggga

SEQ ID NO: 140406 - DNA, 130 bp, Arabidopsis thaliana
tcgtcaatacatttcttcaaattacgtttcttttattctttcgttactctcaacaaattttgacatctgattggagttgattccaaataagaaagatcaggagctttagggaaagtatggatatgggttt

SEQ ID NO: 140407 - DNA, 388 bp, Arabidopsis thaliana
gacaaaatcagcaatcctcttgagaaagggacattgttaggaccattacatactcctgaatcaaaaaagaactttgagaaaggaattgaagtcatcaaatcccagggtggtaaaatactaacgggaggtaaagcagtcgaaggtgaaggaaactttgtggagcctacgataatcgagatatcagcagatgctgctgtcgtcaaagaagagctatttgctccggttctatatgttctaaagtttaagtcatttggagaggctgttgcgataaacaactcggttcctcaaggtctaagcagctcgatattcactcggaaccctgaaaacatcttcaggtggatcggaccactgggaagtgactgtggcattgtgaatgtgaacataccga

SEQ ID NO: 140408 - DNA, 310 bp, Arabidopsis thaliana
ccacgcgtcagcacacgcgtccgcccacgcgtccgcccacgcgtccgcggtgaagcagttgatgagctttgatccaggggaatggagtgagagtttaaggaaagagtatcttcttgtcatcgggggcttcttctctcttcctctccctctcttctccaccacttaccgcaaagccatccaagcgcggaggaaggtggcggaggcgttgacggtggtggtgatgaaaaggagggaggaggaggaagaatgagcggagagaaagaaagatatgcttgcggcgttgcttgcggcggatgatggattttccgat

SEQ ID NO: 140409 - DNA, 419 bp, Arabidopsis thaliana
agcattctttgccatctgttacaaacaccaaactctcctgattcatcagttttaagtcttcttcaagtcccagggatcatcaatccaatggctcagatcttagcagcttctccaggatgtcagatgagagtgcctaaacactcatcagtcattgcatcatcatccaagttatggagctctgttgtgttgaaacagaagaagcagagcaacaacaaagtcagaggctttagagttcttgctctccaatctgataacagtactgtcaatagagttgagactcttctcaatttagacaccaaaccttactctgacaggatcattgctgaatacatttggatcggaggatctggaattgaccttagaagcaagtcaaggactatcgaaaagccggtggaggatccttctgagctacctaagtg

SEQ ID NO: 140410 - DNA, 396 bp, Arabidopsis thaliana
  unsure (1)..(396): unsure at all n locations
tgaggtaaagaagatatacagtagcatgaaagctgctggttacttacccacaatccgcctttataggatgatgattgagcttctctgcaaagggaaacgagttagagatgctgaaattatggtctctgaaatggaagaggccaatttcaaggttgagcttgctatatggaattccatgctgaagatgtatacggctatcgaggattacaagaagacagttcaagtataccagaggataaaagaaactggactggaaccagacgagaccacttacaatactctgattataatgtattgtagagacagacgaccagaagaagggtacttgcttatgcagcanatgagaaatcttggtttggacccaaaactggacacatacaagagcttgatctctgc

SEQ ID NO: 140411 - DNA, 373 bp, Arabidopsis thaliana
cattacttctgggttttcgataatctcttttgggtatttgcaaacccctcaaagattcttcctttctcctttaaatcgtctctgctttggctttgtactagccatcgcaattcagcatcatctattgcaagtatctccaaggttttgatttccacaatggcaacaactactctcaatgacagtgtcaccactacacttgcttcagagcctcaaaggacttaccaagttgttgttgctgcaactaaagaaatgggtattggtaaagatgggaaattgccatggaatttgccaacagatctcaagttctttaaagacattactttgaccacttcagattcctctaagaaaaatgctgttgtgatgggtagaaaga

SEQ ID NO: 140412 - DNA, 333 bp, Arabidopsis thaliana
cccacacgtccggttgagcttccttcacgtccacacttctcacctacaacaacaactaaaagctaagctctatgttcacattttgatcgaaagttttagtaaattagagccaatcattgattacccttttctccaatagaagctctctcttctgtctccaatcgacttcagctaaaccctccaagagacacaaacagaagaacgagaggttaatctaaccgaactttaccattcacaagatcgatacacaagatcgctctcgctctacaagttgtatacctgcaggtttggcaggtttggttgaagtgcattgaatcttaagcgttttgtgac

SEQ ID NO: 140413 - DNA, 259 bp, Arabidopsis thaliana
caacatttttgtacttcgctcatggtttgaaggaggtcaagtgctgagagagaagctctcgttgggttactgtggtcggtcgcagcgactctctaagtttatgtttctttatattgtcctgtgtttcgtcgtcgtcccctattaaaattacctgccagtttacttttctctcttcttgttttctgtgttggaagattctcaagttatttattccgcaaaaaacggtttatcatttacaattagttgaattttggtcgtt

SEQ ID NO: 140414 - DNA, 373 bp, Arabidopsis thaliana
agttttgtcaaaccctgctctcttttctccaagtgctctcatggtgcttccgctcttccggcgcgctgcgatcgcccggacttcctcgcttctcagagctcgtcttttcgcgcgtgcctccgaattccattctcgcttttctaatggactataccacttggacgacaaaattagtagcagtaatggtgtgaggtctgcctctatagacttgattacaagaatggatgatagttctccaaagcccattctgcgatttggcgtgcaaaacttttcatctacaggacccatatcacagacggttcttgcaatgccagccttgtctcctactatgagtcatggaaatgttgtaaaatggatgaagaaagaaagtgac

SEQ ID NO: 140415 - DNA, 442 bp, Arabidopsis thaliana
aaaacaaagcatccatttttgattcagacttcagagagacagagaaggaagaagaagaagaagaagaagaaaaaactatggagaatgagagggaaaagcaggtttacttggctaagctctccgagcaaaccgaaagatacgatgaaatggtggaggcgatgaagaaagttgctcagcttgatgtggagctaactgtggaagagaggaatcttgtatctgtagggtacaagaatgtgattggtgcaaggagagcatcatggagaatactatcttccattgagcagaaggaagagtccaagggaaatgatgaaaatgtcaagaggcttaagaattatcgtaagagagttgaagatgagcttgctaaagtttgtaatgacatcttgtctgtcattgataagcatctcattccatcgtctaacgctgtggagtcaactgtcttttt

SEQ ID NO: 140416 - DNA, 238 bp, Arabidopsis thaliana
tatgctttgctgtgataaagttctctcctttcctttctaaaggaagaagaaaggctttatctctcaaaaccctcatccacaaaatcccctttaatccgctaatcagagggtttttctgtttttgtgttgcttcgttactacggttacattcttctcgtccccttttgatttcaaagtgaatcgcgaaattgggttcatgttcttgcactgatttcagtgtaacccttcaatttcagaa

SEQ ID NO: 140417 - DNA, 374 bp, Arabidopsis thaliana
gttttccttcttaccggggaggaattgttttctgggcagacactgttggaccaaagtacatatatgagaggctcaagaaattgtcggagacttatggcagctttttcaaaccatcgaggtatctggaggaaagagcaatgaatggaatgcttttgagtgaatcgaaatcgtcgaggtccaaattgtgaagcgtttaattaagtatatgcagaaggagaggctgaaggtgttagtcactaaatgaaaataaatcagtctctcttgttgtttcaaagttcaaagttaaaatgctattaaggtgtggttgttgttaacactcttaaaataaacaattttctgctcttaataaatgtttgtagtgacgtcagtttcat

SEQ ID NO: 140418 - DNA, 412 bp, Arabidopsis thaliana
cagacgcgtgggcttttgttcttgaaattagggttaatttcttttttccaaataccatcaattctccagaccataaaaactcaaaaagatcagatctttcctctgaaaaagagatacccaacttatgtttttgtgtgtctgtatatagataaacattacatacccatatttgtgtatagacataaaaagtggaaattaaggtaacaaaaagaaatgggaagaggaagagtagagctgaagaggatagagaacaaaatcaacagacaagtaacgtttgcaaagcgtaggaacggtttgttgaagaaagcttatgaattgtctgttctctgtgatgctgaagttgctctcatcatcttctccaaccgtggaaagctctatgagttttgcagctcctcaaacatgctcaagacac

SEQ ID NO: 140419 - DNA, 413 bp, Arabidopsis thaliana
ggtgaactttctcctagctggtggtcgaagatctcgggtttcttgttcggaattcaccccgaacatgtagatactcggttgtgttcagcgctccgtaggacagaagggtacctgcacaatcttcccactgttaacaggtttaataccctcccgaaccctcgattaactatacaagacgcaatgccacacatgaggagttggtggccacaatgggatatcagaaagcatttcaatagcggcacgtgttctaatatgaaagatgcaactcttctctgtgaacgaattggtcgccgtatagctgaatgcaagggaaagcctactcaacaggaccagactttaatacttcgacattgtcacacctccaatctcatttggatagcaacaaacatcctctcacccttggagcctgaaca

SEQ ID NO: 140420 - DNA, 365 bp, Arabidopsis thaliana
aattgttagctatgaccaacctttattttaagacggcttttcttctctccctcttgttactgtccttctcttatcagagtaaactaatcgaggctaaggaagacaaagaatgtaacgacagcaaatgtcttcctaatccgtcaaggataaatttagaagaagggaatataaaaagaatcgatgtgaatcatggagggatatgtgacacataccttgagtgtggagggttggcatgttctgattatcgtcgggcgtgttgcgtaaacggaaaatgtgtatgccgcaaacaaggccaaactctgcccgattgcccaaactaaattatgtattgacaacattctaattaataaaataagatgtcttag

SEQ ID NO: 140421 - DNA, 123 bp, Arabidopsis thaliana
ctgccttcagtagtaacctctgagcttgagggaaactcatgtccatggcgctaattgtccggccattctttgttcctggaagtgctggaatttctgggagtagaaacatatgcaagaaaaatc

SEQ ID NO: 140422 - DNA, 396 bp, Arabidopsis thaliana
aagaagaagaagaagagcttcaagaagacaaatacactattttttatcgtctgcaatgcccttaccctttgaagagtttcaagggaaggggatttcttgtttctcttctttctcgtcttccttcccccaaccaccgtcgtctccgcttttgagccaccgcaaagcaagaggcggcgaagaagaagaggaagaagttcccgcggcggagcctacctctgttctggactccctcataagcccaacctcttcctccacggtgtcttcctctcacggcggaaacagcgccgtctgaggcggcggcgacgccaccaccgatgagcaatgcggagccattgggttgggtgattgggaggagcaagttcctcatgaccacgaacagagcattctcggactcat

SEQ ID NO: 140423 - DNA, 209 bp, Arabidopsis thaliana
cgcgtccgagaaaatgatgatggcgatcgattctaaactttcttttttaccattcttattttcgtttaccgtaggtggttaaaagaccttttttgttgatgaggctcatttaaagaaccaaccaaatgatgtttctttctctcactctctgtctttctgttttctttttgttctgtttagaatttagaaatccaccaagtattcggtcg

SEQ ID NO: 140424 - DNA, 275 bp, Arabidopsis thaliana
gacagcggacgtactctaggatcccccgacggtgttctcatcagtgggaaatctggtaaactaggcggaaacaacgctcctctcttcaccatgaagcccggaaagacttacaagtacaggatctgcaatgttggattcaaatccactcttaacttcaggatccaaggacacaagatgaagcttgttgagatggaaggctcccacgttctccagaacgactacgactctcttgatgtccacgttggacagtgcttcgccgttctagtgaccgctga

SEQ ID NO: 140425 - DNA, 416 bp, Arabidopsis thaliana
cgcagctctacagaagaaatgggacaacatatgccaaagtatccatcacactccggcgtttcctaaacttgggtttcagtcggtgagtccgcagttcccagttcagactgagaagagtgtgagaactcctacaagctatttggagacgcctaaactgctgaatccgccaatctcaaagccaaaacctatggaggatcttacggcatcggtgactaaccgcacagtgagtttgcctttgagctgtgttactacagattttgggttgggagtaatctatgcatccaaaaaccaggaatcaaaaacaacgagggagaaaccgatgctggtgactctaaactcttctttagaacatacatatcagaaagatttcaagtctctcagagaaatactctctcgtaaagttgcctggcagaccg

SEQ ID NO: 140426 - DNA, 211 bp, Arabidopsis thaliana
acgcgtccgcccaagcgtccgcccacgcgtccgcccacgcgtccgcccacgcgtccgctgaaaaggcgtataaggaaacagcttctcctggaaacttcaagttcaaagcagaagatggagttggacacggggcgacgagtttcatgatcaaagaatcatcagactgggttgacaaattccttaaacaagaagatatgacaacttgacagat

SEQ ID NO: 140427 - DNA, 271 bp, Arabidopsis thaliana
atgaaaatgaccaagttgaagattttgctcttgttcagtatattgagaacagtaaatgtcataggtctaattcttttcccagtagcattctcagggataacagtgagaaagagtcacgagtagaattgcctaatctgcacagatgacattcggtggggaaagtaggtgtgaagaggcctggtgaaggcagtgacttggtggagggatcaaaatgacagacagattgggtggcagtttctgaagctaatgaacgcttcaacatgtttaaaac

SEQ ID NO: 140428 - DNA, 352 bp, Arabidopsis thaliana
ggaaaaacaaggaacctgcaccccctagagtcgttcagcatcatgatttctcttcacagccaaatcacttccgcaccaaaatactcaagcagtatccgaggttcataaaccactgcatcaagatattccacctgctaattttgagaagcatcagaaatctgagactgccagcgtggagactagaagtgatggtcagaagatttctagtcattcaaatgcattccatgaagatcaaaatacagtgagctcagagtgtgactggagtgaacacacttgtcccaatgggaataaatattacttccattgcatcacttgcgaaagcacgtgggagaaaccggacgaatactccatg

SEQ ID NO: 140429 - DNA, 288 bp, Arabidopsis thaliana
cgcggcgccgaaaccgccgcggaagattgtgacgacggtactgataagagcaataccggaaacagtttcttcgatatatatggacccgaagcgaaagcagaactcgatttcaaaagccctgaaacaacattgaacttacaagatgttcaaggacttgtgacatgggttcttgcagaaggttttatgccttcatgggtatttattaagaacaagcctctcattccaaaggttgtactgctctaccttcctggattggatgcagctttatacttatcacattctaaaact

SEQ ID NO: 140430 - DNA, 323 bp, Arabidopsis thaliana
tctacttgcaggaggttgaggcagttgacgaagaacgagagtgtgaggaagatggtatgtcagaatgcgggggaaaagagataactggaacactggagattatgactaagaagctaagatggggtcggttagctagagagctcaccactcttgaagctgtgtgttggcgtaaatttactgttggagggattgtacaaccttcccgctgcaatttcagcgcgtgtgctgttgggaaccggcttgtgctatttggtggggaaggggttaacatgcagccattggatgatacttttgttctcaatcttgatgcagagtgtcctgag

SEQ ID NO: 140431 - DNA, 278 bp, Arabidopsis thaliana
gataccaacagagcatttgacgaggataaacgttgtcgagcatggacgtttcctatctgtgatgatcttatttacagttgcatgcaatgtgattttatcctccatcaaacatgtgcacatcttcctccgaggaaacaacatgcgacacatcctcatccccttcttctactggtggatgaggaacatgaagattattttcaatgcactgcttgtaagcgtgaaagcaatggttttgcgtacacatgttgtgctacggattgcaacttcacattagacgt

SEQ ID NO: 140432 - DNA, 314 bp, Arabidopsis thaliana
gagaaagatgcttgagtattaccaaggaggagttggggtgatcaggagagaccttctggctggatgttgggcaccttatctcgagcgtgcggttacattgaaaccgtgttacgatggaggcattgatggtggcgaggtggcagctaaaatactgcaggacacagccatggggaagaagcgttccaaactcaatcttagcggagcgaggagattgcgggatgcaataatattaggcttccagctacagagagctcctgggagagatctttcagttccagaatggtatcaagtcgctggaaacgaagctgggattc

SEQ ID NO: 140433 - DNA, 333 bp, Arabidopsis thaliana
gctcaaggcttatatcatacaagttgctggttgtctagcaaagctgatcaggaccagctcgtatcttagggacataagttttgttaatgacttgtgtcgccacctgaggaaaagctttcaggcgacagctagatcaattggagatgaggaactcaacttgaacgtgatgattcaaaactctattgaagattgtctgcgggagatagccaaaggaattgttaatacacagcccctgttcgatatgatggctgtttcagtcgagggtcttccttcttcaggaattgtttcacgcgcagccgttggatcactgttgatacttgcacatgcaatgtc

SEQ ID NO: 140434 - DNA, 402 bp, Arabidopsis thaliana
cagcttcgactccatatctgaggtttctgacgtctgattagaaaatgtctcgagctgagtcatcttgggagaggctggtgaatgctgctttacggagagatagaacaggaggagttgctggtggtaatcaaagcagtattgttggttatgtcccttcctcactatccaacaatagggacatcgatgcaattcttagagctgccgatgagattcaggatgaggatcccaacattgcaagaatcttatgtgagcatggttactcacttgcacaaaatctcgatcctaatagtgaaggcagaggtgttttacagttcaaaactggattgatgtctgttattaagcaaaaattagcagaaagagaggttgggaccatagacagaagtcaggatattcttcgactac

SEQ ID NO: 140435 - DNA, 225 bp, Arabidopsis thaliana
cggacgcgtgggcggacgcgtgggcggacgcgtggggttttataaataaaacctgatctcttagtttggtttcgtgctgcgtcacatggtctgttcctttgctttgtgttgggatgatgttactatgttaactctatctaagacatggatggtttctttcttatttcagtttagtttatgtcgttctgctcctcgggtcaaatgaatggttgagtcttttttatt

SEQ ID NO: 140436 - DNA, 391 bp, Arabidopsis thaliana
cgctcgattcgtcttcgtcgcccattgaaggaggtcagaccagaagtcgcacgcgagccttataattgtgtaatccttagggttttgctcgcgatttctggtactattaggtttccgtcgatttcttcgtcgggataaaaaccctcttcttcgccggagggagaacacggcgagaattacacagctatccttcgaattccgtcgctggttagcttaggactttctgattctgtcgctttaatcttcttctctccatgacacaacgggtattccaagtctggaaaggaagcaataaattcatcctgggtgggagattgatatttggaccagatgctaggtcactgcctcttaccttgctattgatcatagttccggttgttttgttctgtgt

SEQ ID NO: 140437 - DNA, 377 bp, Arabidopsis thaliana
gcgtccgctactacaattgcagctagagagccatggcctcctccttcaacgaagaaaccgccaagaagttgcttacccaggttgagttctacttcagtgacagtaatctacccacagacggatttctcaagagggaagtcaccaagagcaaagatggcctggttagtttgcctctggtttgttccttctctcgtatgaggaacctccttggcctcggtaacatcaatagagaagacatccctccgaggattgtggaggaagttgctaatctcttgcgcacctctgattttcttaaagtttccaataatggacaaaggatcggtagaggaactaaactctccaaaccggaagaggtgcttgaacaagtccacagaaga

SEQ ID NO: 140438 - DNA, 194 bp, Arabidopsis thaliana
gtccgccaacgcgaccgccccacgcgtccgaaaccatgaagcttcttatgctcgcctttgtttttctattagctttggcgacttgtaaaggtgacgagtttgtttgtgaagagaacgagccattcagatgtgaccaaactaaacttttcaacagtggcaatttcgaaaaaggcttcatcttcggtgttgcatct

SEQ ID NO: 140439 - DNA, 388 bp, Arabidopsis thaliana
aaaaaattatattcaagagaaaaaggaaaaaatgaatttcatctccgatcaggtaaagaaactctcaagctcaacaccagaggagccagaccacaacaagccagtcgaaggaaccgaaacagctacaagaccagctaccaacgccgagctcatggcaagtgccaaggttgtagctgaagctgctcaagccgcagctcgtaacgaatcagacaaactcgacaagggtaaagtcgccggagcctctgctgatatcttagacgctgccgagaaatacggtaagttcgatgaaaagagtagcactggtcagtacctcgacaaggctgagaagtatctcaacgactacgagtcgtcacactccaccggtgctggtggtcctcctcctccgacg

SEQ ID NO: 140440 - DNA, 432 bp, Arabidopsis thaliana
gagaagaaaactttcctactttgtttcaatccaaacgagtcaaaatgcttctcaagactgtttcttcatcttcttcttcagctctctcgctggtgaatttccatggcgtgaagaaggatgtgtctcctttgttaccttccatttcatcgaatcttcgagtttcttctggaaaatctggaaacttaactttctcttttcgcgcatctaaaagctcaaccaccgacgcgctaagcggcgttgtcttcgagccgtttaaggaagtaaaaaaggagctcgatctcgtccctaccagctctcatctctcactcgctcgacaaaagtactcagacgagtgcgaagccgccattaacgagcagatcaatgtggaatacaatgtctcgtatgtgtatcacgctatgtatgcttactttgatcgggataacatcgcgctca

SEQ ID NO: 140441 - DNA, 378 bp, Arabidopsis thaliana
cagacgcgtgggcggacgcgtgggcggacgcgtgggcggacgcgtggggtcgtcgtcatcatctctgacagcaatgttattcacataggcaaagaagtcattcttttgcatgctgttttccaataaagttaattctctaacagaacaagtttcgagattggatattgacgacaacgatatgggacttggaggtagtgaaacaatggaatgcaagtgtggtatgcctctgtgtatctgtgtagctcctcccaaatcaactgataaaccaaacccacctgctaccattgctcctgtggttcttcctcagttgaagtcagaggcttcagcaaaaagtaaaggttccacttccagcagcaatgctagatcagctctaaatgc

SEQ ID NO: 140442 - DNA, 176 bp, Arabidopsis thaliana
catcgatctatcatcgcttggtcgttaaatccgtcaaaaagataatcacatgtgttgttgtttcttgtctatataataataatgcttgtaatcccaaaaactcatgtttccttcctttctactctcactgtctttgtaatctctttttacaataaatcaatgtttcttgaagcagt

SEQ ID NO: 140443 - DNA, 402 bp, Arabidopsis thaliana
ggcttgttggtgtggcaagagttttggatcactggcgatgttgatggaagaggtgttccagtatcaaatccgaatggaccactagaccatgaattattcctcttatgtgctcgtgatactgtcaaacttctgagaaaccatccaagcctggctctttgggtgggtggaaatgaacaagttccgccaaaagacataaatgaggctctaaagcaagaccttaggcttcattcttattttgaaacccaattgttatcagacaaagattcagatcctagtgtttatcttgacggtactagagtttatattcaaggatctatgtgggacggctttgcagatggaaaggggaacttcactgacggcccttatgagattcaataccctgaagattttttaaagacacat

SEQ ID NO: 140444 - DNA, 420 bp, Arabidopsis thaliana
caaaaaatccagattttgtgtttagccgacgagaattgggaaaaatgtcgtgtacgcatgatcacaactgcgaagatcatgagtgttcttccgattggtctctctacaaacacattgatctctccaaggtttcagctctgaatgaatctgtttcgggaagtgcaaaatcagtcttcaaagcgtgggaacagcgattacactcttctggggagcatttggagagcaatgagggagaccctgaattgcttgtttttgtaccatttacatcagacgtcaagatcaagagcatatcaattgttggtggccctgaaggaacaagtccttctaagttgagagtgtttatcaatcgtgaagggattgacttctccgatgctgagagtatgcaagccgttcaagaatgggagttagctgaaaatttgc

SEQ ID NO: 140445 - DNA, 82 bp, Arabidopsis thaliana
cagacgcgtgggcgctatgtgccatggctcaccaaagcgcgcgctttttagatctgtggtgttctattaacagattctctgc

SEQ ID NO: 140446 - DNA, 108 bp, Arabidopsis thaliana
agatcattgtcttttgtgtttgttttgatcatatcttttagatgtctagcaactctgccatgtgatgagtttgtacttccagtggaatgataataatattatagtttt

SEQ ID NO: 140447 - DNA, 430 bp, Arabidopsis thaliana
tcttcatcattttctcttcttcttctccaagaaaacactgaagaagaaatggggttccttaagccaaccatggcgattctttttctagcgatggtcgccgtttcatcagccgtggacatgtcaatcatctcctacgacgagaaacatggcgtctccaccaccggtggccgtagcgaagccgaggttatgagtatctacgaggcatggttggtgaaacacggcaaggctcagagccagaactctcttgttgagaaagatcgacggttcgagatctttaaagacaatcttcgtttcgtcgatgaacataacgagaagaatcttagttatagattgggtttgactcgttttgcggatcttactaacgatgagtatagatccaagtatcttggagctaagatggagaagaaaggtgagagaaggactagcctac

SEQ ID NO: 140448 - DNA, 426 bp, Arabidopsis thaliana
catcaaaaaagagcgtcttcataaacgcccttcgtcttcttccctggaaatctagtttctttcttccacgaaaatgagagagtgcatttcgatccacattggtcaggctggtatccaggtcggaaatgcttgctgggagctgtactgtcttgaacatggcattcagcctgatggccagatgccgagtgacaagactgttggtggaggtgacgatgctttcaacaccttcttcagtgaaaccggtgcaggtaagcacgtcccacgtgctgtctttgttgatcttgagccaactgtgatcgacgaggtcaggactggtacttaccgtcagcttttccaccctgaacaactcatcagcggtaaagaagatgcagctaacaatttcgcccgtggtcattacaccattgggaaagagattgttgacctgtg

SEQ ID NO: 140449 - DNA, 437 bp, Arabidopsis thaliana
  unsure (1)..(437): unsure at all n locations
catcttcaaaatctctctcttcaccaaatcctcagaagatgagcaacgacaaggatagcttcaacgtctccgatcttactgctgctcttaaggacgaggatcgagctggccttgtcaatgctctaaagaacaagctgcagaatctggctggtcagcgttctgatgtgctcgagaatctgactcccaatgtgagaaagcgcgttgatgccttgagggatatacagagccaacatgatgaactagaggcaaaattccgtgaggagagagctattcttgaagccaagtatcaaacgctgtatcagcctttgtatgtcaagcgttatgagattgtgaatggcactactgaagttgaactggctccagaggatgataccaaggtggaccaaggagaagaganaactgcagaagagaaaggagttccaagtttctggctgaca

SEQ ID NO: 140450 - DNA, 264 bp, Arabidopsis thaliana
gtccggagagacagaggaggatggtggagttaacgaatcaaagagggtcggataaaccaaagtaccatgaccgaatcagaaatgtccgacggagggagaacatgcgttgactcttattattctcagactttacgctagagcaatcatttcgatttgatctccgatgcttttttttgttggtttgttcttttaatttgctagactcttaatgaataatgtatatgatggtgttttggtgatatcgaatgtatcaattgtttctgc

SEQ ID NO: 140451 - DNA, 427 bp, Arabidopsis thaliana
cagacgcgtgggcggacgcgtgggcggacgcgtggggcctgagcaggaggaagaagacgaagaagaagaggagcagctactaccatggttctcaagacggagctttgtcgtgtcagtggacagaagatttacccaggaagaggaattaggtttatccgatctgattctcaggttttcttgtttcttaactcaaaatgtaagaggtacttccataacaagttgaagccatccaagcttgcatggactgccatgtacagaaagcaacacaagaaggatgcagcacaagaggctgtgaagagaaggagacgtgccaccaagaagccatactcaaggtccattgttggtgctaccttggaagtaattcagaagaagagagctgagaagcctgaagttcgtgatgcagccagggaagctgctctgcgtgaga

SEQ ID NO: 140452 - DNA, 263 bp, Arabidopsis thaliana
agaacacgcgtccgcccacgcgtccgcccacgcgtccgatggaagttagagaactctttaggatgtctttgtttgttttcttctactttctagcgtgttagtgtacattggtgtactggagcaaatcttccttaactctttagtagctgacaagtatgatctacatttgtgttagtgtccacgtataatgatggcttgtgtatccaaactacagcttctgatgcttaacagttacatgtttatgcttaaaaataaaaaaataa

SEQ ID NO: 140453 - DNA, 216 bp, Arabidopsis thaliana
cagacgcatgggcggacgcgtgggtcggacacgattgagcgatctgctgcggtgggaatacgaaactcggaacttcaaggtctcatggtagctcagatcgtttgcggttttcacggaatcgagtcctctctaccacacaaactgagaaccggaacggttaagcgcggaatatgaaaaggagctcgaagcagctcatgggaggattcaataaatctg

SEQ ID NO: 140454 - DNA, 337 bp, Arabidopsis thaliana
gatatttggaagctctaaaaagataaatcttgtttttccctcctaattgtaaagaagagggctttagacttttagaacaacactcgagggaagtacgacgacgaagaagagctaacaacgataatgaatcgggttactactgaaagcattgcgtctacggcgatactggtggtgatggtgtttctcttctcgtggagatctatcgaggcggcgaatgtatcctacgaccaccgttctctcaccatcggcaatcgccgtcagctcattatctccgccgccattcactatcccagaagcgtccctgctatgtggccatctcttgttcaaacagcaaaag

SEQ ID NO: 140455 - DNA, 381 bp, Arabidopsis thaliana
acgacgatttcaccgactaatcggagtttggatcggagattagatccgggaaatcactgacgaatcctttctggattttggatcggtctatgcttctctactctacttgatcttgatcttcgagaaatttaacttcgttttgcaattgatcgtctcgctttaagaagcttgcagatccgttgatctctttctgtgattttgcggggtttagggttagggttttaatttcgatttcggttgtcaattttgatggcttcgactgctgatttcctcctggatgatcaaacggacgaggatttcttcgacaaacttgttgatgattcctatactcctaccgcttcatcctctgccaaggagctgaaattcgatgacggtagtgat

SEQ ID NO: 140456 - DNA, 283 bp, Arabidopsis thaliana
ccaacgcatccggttgttattaactcgattaagaagtaaacctacaaccacactatatatttgtctcacttaacacccacgcgtccgcccacgcgtccgcccacgcgtccgatggctgtggctacagctccgtcgccaaaacggcatttcccccggcggaactccaaacctttacccgaaagttaagaaccaaaggcaagggtggcaacaagagaagccaacccttttcaattctcgccggaattgggattcccaccggttggttaagccttctcctcctcct

SEQ ID NO: 140457 - DNA, 300 bp, Arabidopsis thaliana
accactgcacaggcatgcaccgtcttcctctctctcgctctctttgtcgcaatctctggaatttgtgtgatttttcggaattgcttttttaagtgtcactcgtggttgggttcatctcttagttcgaggagtgttctatttttggggctttattgattccatcttctcccttgccgtttatgggataaaatcaacatcaatgagggctttcatgtgagattttgtgtgtgaattttaattcaaatggctgatatgcgtagacgaaatggaagtggaggttcctctaatcatgaaaggaat

SEQ ID NO: 140458 - DNA, 438 bp, Arabidopsis thaliana
gtccgggatgatactctctcttctatctctccaactgatcctcttcctcactctccgatccatcccttttcctcaccgtcacatccccgaaaacttcccttctcccgccgccgtcgtcaccaccaccgtcacaaccaccgtcatttctgccgcctcttccaatccccctctctcatcctcctcatctgacgaacgatgcgattcaggtcgagtcttcgtctacgacatgccaaagatcttcaacgaagtgattctacaacagtgtgataatctcaatccatggagctctcgctgcgacgcactttctaacgacgggtttggtcaagaagcgacgtcgttaagcaacgtgatccctaaagatttggttcaatcatggttttggactgaccaattcgtaaccgaaattattttccataaccggattttaaccaccggtgt

SEQ ID NO: 140459 - DNA, 444 bp, Arabidopsis thaliana
ccacgcgtccggaggtgtttagtgaaaattgggttgtttaccactatttcaatcttcgagctcacaagtacgaggttacggtcgttgagatctatgatcagtcgagggcggagaacaaaaatgtgtggaaactcattctgggaaagcacaatctaacagcacccatcacttcgtactctaggccagaggtgtttacaaagtcacagtcatacttctttgctcagtctgtgaaaaccattgcggtgacatccacagcaaagggtataacttcaaagcagcttctcattggtaccatcggggatcagatattggcacttgataaacgatttgtggatccacgccggacacttaacccgtctcaagctgaaaaagaagaaggaatcatccctctcactgatacattacccatcattcctcaggcgtatgttacacactcccacaaag

SEQ ID NO: 140460 - DNA, 410 bp, Arabidopsis thaliana
ccacgcgaccgtaacgggtcaggagctttacaccattgagctcccaaacaatgttagtgagatcaaaccaggacaagatgtaacagtcgtcacaaacaatggcaaatctttcacatgtacactccgatttgacacagaggtggagttggcttatttcgatcacggagggattttgcaatacgttatcaggaacttgatcaaacaataaatctggtaacaccagagacttgagttatatatcccaaggtttgttgcaataaaaatgtttgcagggaggaggacgagaatgactttaatttaaacttttgcttttgttcttcttcgtctcttgcttcgtgctagtcaattggaaacattatcactgtcgagtcattttttttctttcaaataaacatgcgagctcttttttt

SEQ ID NO: 140461 - DNA, 398 bp, Arabidopsis thaliana
aagaagatcctgtcgcttctgttctcacatcgtcagatgggagctacttattcaagaatattattccaggaacatacaatatccgtgcatcccatccagagctgcaagttgaagttcgcggttcaacagaggtggaacttggatttgcaaatggcatggttgatgacatattcttcgtccttggttatgatcttaaggggtcggttgttgctcaggggaatccaatcctgggtgtccatatatatttgcattcagatgatgtttccatggtagattgtccccaaggatctggtgacgctgctggagaaaggaaatctctttgccatgctgtatccgatgcagaaggaattttcagtttcaagtccatcccttgtggaaaatacgaattggtgccgcat

SEQ ID NO: 140462 - DNA, 377 bp, Arabidopsis thaliana
ccacgcgtccgccaacgcgtccgcccacgcgtccgcccacgcgtccggcggaaatatctgaaccaacgcgatgccgtcgacgcagtccttgaccgtcgcagcgaagacgctacgaaatcggatcttctctaggtctggatctacatccgccggtccgagtcggtgggcgacgccaggtcacgaggagcgacctaagggttactttatgaaccgtactcctccggcaccaggacagtcgcgaaaatgggaagattgggagcttccttgttacatcaccagcttccttacaattgttatcctcggcgttggactcaatgccaaacctgatctttcaatcgagacttgggctcatcagaaagctttagagcgtcttgaga

SEQ ID NO: 140463 - DNA, 446 bp, Arabidopsis thaliana
ccacgcgtccggaactttctaggtaggagggactcctctgagcaaatgccgttttgtgggtgcgctattggtgctgttgatgggggtctttatgttattggtggactttctaggtctaaaacagtgagctgtgtttggcggtttgatccgattttgaactcttggagtgaagttagttctatgttggcgagtcgggcttattccaaaacaggtgtattgaataagaaactatatgttgttggaggggttgatcggggacggggaggtttatctcctcttcagtcagctgaggtttatgatccaagcacggatgcttggtcagaggttccgagcatgcctttctcaaaggcgcaagtgttgccaaatgcgtttttggctgacttactaaagcctattgccacaggaatgacttgctacaacggtaggttatgtgttcctcagagttt

SEQ ID NO: 140464 - DNA, 254 bp, Arabidopsis thaliana
ccacgcgtccgccaacgcgtccgcagacgcgtgggatcaacagcaggaagcggctaagttatcatatagtcaatccgctaatacaatgtcatcattgatgccacctgcttcaattgaacccgtacatgagtggggtgggaacgggaggacaatggcagcacattctagaagtgtatcagagccagatttcagtaggacgccaatacaggatcagactgactcctcaaaagacaaagctcctgatggggtgacac

SEQ ID NO: 140465 - DNA, 396 bp, Arabidopsis thaliana
cgcgtccgcacacgcgtccggctcatggtacggagccgtttgaagcggtggttatgatcgatgtgctacggcgaggcggagcggatgttacggtggcttccgttgagaatcaggtcggcgttgatgcttgccatggaatcaaaatggtcgctgatactcttctctctgatatcaccgactcggttttcgaccttattatgctccctggaggacttcctggtggtgagactcttaagaattgtaaacctttagagaagatggtgaagaagcaagacactgatggacgacttaacgctgctatctgttgtgcgccggcgttggcgtttggtacttggggactactagagggtaaaaaagtatgtgtgtagtgagtgatcagtatccaagaagttttct

SEQ ID NO: 140466 - DNA, 403 bp, Arabidopsis thaliana
  unsure (1)..(403): unsure at all n locations
cacgcgtccggttttttcggacatgtacaatgggaccagatgccggcagatatggtagtaaattcgattcttgtatcaatggccgctcaagccggtaaacaagaagagattatttaccatgtgggttcttcacgtagaaatccgatgaaaaattcaaagtttcctgaattagcgtatcggtatttctcaatcaaaccgtggaccaacaaagaagggaaggtcgttaaggtcngggccattgagatcctgagttctatgcgtagtttccatagatacatgaccatacgctacttgattgcattgaaggtaaatagtatctaatgatatattaactagtgtttttatatggttcctaaatatctatatggttcatttcagggacttgaattggtaaacataatac

SEQ ID NO: 140467 - DNA, 373 bp, Arabidopsis thaliana
ccacgcgtccggtaaaggagctcaagaacggaagattgggtttggctaccgacccagaggcattcgctgagttgaaggtgaaggagctcaagaacggaagattggctatgttctctatgtttggattcttcgttcaagccatcgtcactggtaagggaccgatagagaaccttgctgaccatttggccgatccagttaacaacaacgcatgggccttcgccaccaactttgttcccggaaagtgagccaagttttatctgtattttgcttcagtctttgcttcgtgagtgtgagaggagaaagagagcttgtttagatgtaaaatttgcaagactttgtatttttttcattaatcaaataactcgtttttctc

SEQ ID NO: 140468 - DNA, 416 bp, Arabidopsis thaliana
gaaggtgtgaacctcttagctgtcatgtgtcacgaagatgtggatccaaagaggacaacaagcaatcacttgattgaaattattgaagttctcggaattgaggcagttcgtcgtgctttgcttgatgaactccgtgttgtgatatcctttgatggttcttatgtgaattaccgtcatcttgccatcttgtgtgatactatgacctatcgcggtcatctgatggctatcactcgacacggtatcaatagaaatgacactgggcctctgatgagatgctcttttgaagaaacagttgatattctgctagatgctgcggcttatgctgagacagactgcttacggggtgttactgagaatataatgttgggtcaacttgcaccaattgggacaggagattgtgagttgtatctgaatga

SEQ ID NO: 140469 - DNA, 218 bp, Arabidopsis thaliana
aactagtaccttttgttcttgaaattagggttaatttctttttgtccaaatacgatcatttctcgagagcattgtgtctcaacttgatcagatgtttccgctggtaaggagatacccgtcttatgtttctgtgtgtctgtacatagataaacattacatatggatatgtgtgtatagacatacaaagtggaaattaaggtaacaaaaagaaatgggaa

SEQ ID NO: 140470 - DNA, 369 bp, Arabidopsis thaliana
gcatctccttctcacttccatggcgattctcgtcgtctgaattaggttgtggaatcgaagtattgagaggggagattattgaaattaggggttttgaatagtgatggatggtaataaggatgatgcgtctcggtgtttgagaatcgccgaagacgccattgtttctggtgataaagaacgagcgttgaaattcatcaatatggcgaaacggcttaatccaagtctctctgttgatgaacttgttgctgcttgtgacaatctggattcagtttcgaggaattcttctgttagcgagaagcttaaaactatggacggtgatgatgataagcttgagactgggaaaatgaagtatactgaggaaaatgtgga

SEQ ID NO: 140471 - DNA, 310 bp, Arabidopsis thaliana
cacacgcgtccgtgggtggtatgggaggcatggaagagtttgaagacagtgatgatgaagaagagacagcaaaatcaggagacaagaaggatgatgccgttaaggaggaaggtcttgcgacagagaaggcaccagcggcagaagaaacaacatctgttaaggaagacaagtgaagactctgttctagagatgatgaaaaaccatatggtattattagcttttcaggtttatgaaaccctctgaattacttcctcttttatatgaatgttgttggtactctgttttctttctatggatttgatcttggttt

SEQ ID NO: 140472 - DNA, 433 bp, Arabidopsis thaliana
  unsure (1)..(433): unsure at all n locations
ctattctcgagaaaaatgtcttgctgtggaggaaactgcggatgtggatctggctgcaagtgcggcaacggttgtggaggttgcaaaatgtaccctgacttgggattctccggcgagacaaccacaactgagacttttgtcttgggcgttgcaccggcgatgaagaatcagtacgaggcttcaggggagagtaacaacgctgagaacgatgcttgcaagtgtggatctgactgcaagtgtgatccttgcacctgcaagtgaagaagcctttttaaataagcagagataatcgagtctctttaattaattaagttattcaataagtaaaccatatataggatggtgtttttaggtttggtttatgtgtaataatggcttcagcttatcttttagccgatcattgtcttttgtgtntgttttgatcatatctttt

SEQ ID NO: 140473 - DNA, 421 bp, Arabidopsis thaliana
  unsure (1)..(421): unsure at all n locations
gcataagaagactagtgtacaagaatttgtaaaggtatatgatacagttttgcaagatagatgtgaagaagaagccaaagctgattctgaaatgtggaacaagcagccagcaatgaagtctccatcgccatttgagaagagtgtttctgaagtctatactcctgcagttttcaaaaagttccagattgaagttttgggtgcgattgcgtgtagtcctagggaggagaaccgagatgccacatgttctacttttagagtgcaggattttgaaaacaaccaagacttcatggtaacatggaaccaaacaaaggctgaagtctcttgcatctgtcggttatttgagtataaagggtatctctgcagacacactcttaatgttcttcagtgttgtcatctttcttccatcncctcgcagtacata

SEQ ID NO: 140474 - DNA, 425 bp, Arabidopsis thaliana
aaaattttgaatgtgaagttgcttctttcgtctcaagatctctctttatctctctatctgtttgattgacagtcaccatctaatgtggaggagatagatgataatccttcggtatcattagaggatgaatcagcacatgtgatgcagttcaagtggtctgattttaggattcttgatcgtgttagcattggtcatggcggcagggctgatgagcttgtgtttgaagctatagttcaggttccagataggtcagtttctacttcatatgtattacaagatttcaagatgaatttcagaggcttcatctgtggtgcttcaatttcacagccctttgtttaaccaaggagttgttcttcggaaattgaataccactcgagctcaaagacgaggaagaagagctatagaagttcgtcctcccttttaat

SEQ ID NO: 140475 - DNA, 437 bp, Arabidopsis thaliana
caaattgtaaatttagggaagagactttcgcaagcaatctagaagcaaatcgatcgccaaatctccggattatttgcaagaatcgttcccagataatcttccccagattctccacttctccagctctgatcggagtgttgctcgaacagcttgaagaagacgacgaagatatggctacttcgaagaaaatgatcacacgtgaagaatgggagaagaaactaaatgctgtgaagcttaggaaagaagatatgaatactttggtgatgaattttcttgtgactgaaggatatgttgaagctgctgagaaattccaaagggagtctggaaccaaaccagagatagatcttgcgaccattactgatcgaatggctgttaaaaaggctgttcaaaacggaaatgtcgaggatgcgattgaaaaagttaatgatttgaatcct

SEQ ID NO: 140476 - DNA, 437 bp, Arabidopsis thaliana
  unsure (1)..(437): unsure at all n locations
caggtgctttagctttggtaaaatgaagatatactctagaacggttgctgtttcactcattgtgtcattcctcctgtgtttctctgcctttgctgagcgcaatgacgggaccttcagagttggactgaaaaaactcaagttggattcgaaaaatcggcttgcagcacgcgtcgaatccaagcaagaaaagcccctgagagcttacagacttggagattctggagatgctgatgttgttgtgcttaagaattatctagatgctcagtactatggtgagatcgccattggtactccacctcagaagttcactgtggtttttgacactgggagctctaacctctgggtgccatcatcaaaatgctatttctcacttgcatgtctcttgcatcncaaatacaagtcgtctcgttcaagcacatatgagaagaatggaaagc

SEQ ID NO: 140477 - DNA, 434 bp, Arabidopsis thaliana
caaaagtagttttgtaacagagagatagatagaaagctcttgaagatctaaccaaaatctacttttgttcttcttcttcttcttttcataaattttcggagtggtcctatttattgtttcttggatcattagagagacagctatcgatggatgaagatggaaacttgcagattagtaatagtaattacaatggagaagaagaaggagaagatccagagaacaacactttgaatcaaccactgcttaagagacatagaactctttcttcaactcctcttgctttggtcggtgccaaggtttcacacatcgagagtttagattatgaaataaacgagaatgatctgttcaagcatgactggagaagcagatcaaaagcacaagtgtttcaatacatattcttaaaatggacattagcttgtcttgttggtctcttc

SEQ ID NO: 140478 - DNA, 441 bp, Arabidopsis thaliana
gccaacacgcgtccgcaaacgcgtccgatttatttgtgctgaggtcatgaaattcgaggatctcaaggaacttggcaatgaacctgcagtcaaggccgcaggaaaatacagacaggagggtaaaacatatgttgttcaggatggagatatcattttcttcaagttcaatgtttccggtggtgggaagaaatgagatccatccgtctgtccacctatccgcggtgtcctctctggatcttgaagctctatccatttccgagaaaggaaccaagctgtattttccgtttttgagtggctttaccaaacaagtatttgtaactctttacattttgcagttagctaagacatgtctttgcctttagacagagcattaagcctgctgtatcgtttagaactctttcaataagtttttctctactatttgcaaattataacaattgt

SEQ ID NO: 140479 - DNA, 162 bp, Arabidopsis thaliana
gtaaagccggcgcgttttccgccttctttcgttcgttatcttatagctaattaaatctaatacaaaggaacaggaaaacgaacgaaagaaggcggaaaaaaatgtcgaaatgtctcgttttgatgtacatatggatcataaaattttacatttttttctatc

SEQ ID NO: 140480 - DNA, 434 bp, Arabidopsis thaliana
aaacgtggaccgtggttgtctcaacagggatgaacttggaggttccatctctggttggattcaggtgttttgagctaatcttcttctgggtttacttctctaccatactttctaccgatttgaagatttgtcttctgtacctttgatgatgattctcagttttgcagcaatgactcagtttttcgccttctagtcattaaactactttcccacaatgagatacttagtgtttttgtaggttctttcacacttgttagcaagggtatatgtatgttgccgttctcagaatttggtaggtatgaatcacagatgtcattgtttattattgataacataagtgattcttgctggtagtgtgacctcttgagggcaggctcatagaagatgaagagcctcttggttttgatgataatgctccctacttctgagttctg

SEQ ID NO: 140481 - DNA, 318 bp, Arabidopsis thaliana
cgcgtccgcaatagcagagagaaagtggagggagcggtgagggaagtgatggttggagaagagaggaggaaacgggccaaggagttagcagaaatggcgaaaaatgcggtgaaagaaggaggatcgtcagatctagaggtagataggttgatggaagagcttacgttagttaaactgcaaaaagagaaggtataaagaagttgaatgtattgcaagttatggaacaataatgtttttgtaattctgatggtttgagttacaacagtaaaagattgtatttgttcattcaaatttacaatggatgatcttttagtttgt

SEQ ID NO: 140482 - DNA, 310 bp, Arabidopsis thaliana
  unsure (1)..(310): unsure at all n locations
ccaacgcgtccgtcccttcatctcgtggagaaccaccaaagaaacctttggtgccatctggtcccaaaactctgtcaaacgagacgaagactgttgtccaagttagaacattccaagatttgcttaaggatgagtatgatgctgatttatttgactactacgcttcatcacaactagtattggcttctttggatggtactgtgaaggaagtangggttcctgcagtgtatacatcgttagacccttcgacagaccataagtacttgttggtgtcatcacttcacaggccatattccttcattgtaccttg

SEQ ID NO: 140483 - DNA, 297 bp, Arabidopsis thaliana
acgcgtccggtatatgtagaatctccggtgaagccgaattcaaaccctaacacttttggttcatcagttcttcttgacgattcagtgttgttgcgcgtcttatttctacattttgctttctcgatttgagaatgtgctgattttagattagagaagtaagggttttatagatcgggaataaatggaggaaggtggatatgcgtttgaggttaacaatggaagaccaacggcgagtgagtttggtacgacggcgaggatttcgtcaccgtcattgactatgtcatcgtctttccgtga

SEQ ID NO: 140484 - DNA, 325 bp, Arabidopsis thaliana
aacgaataagaaagtgatcaagaatgtgattaagctcttaacgatggtgattttgatgggcactgtggtgatttggatcatgatgccaacgtctacttacaagaagatttggttgaaatccatgcgtgccaagctcggcaaatcgatttattttgggaaaccaggagtaaaccttttggtttacatgttcccaatgattctactggcttctcttggatctatttaccttcacttgaagaaacaaacgagagtaaaccaatttaatagtagaatggataggaagaagatagacaagtttggtgcattgaaaagaccaatgttagtg

SEQ ID NO: 140485 - DNA, 429 bp, Arabidopsis thaliana
atatctctctctctctctgcctcctttcggattcaaatctcagatctagctcaaccatggcgttgctcgtcgagaagacctcaagtggccgtgaatacaaggtcaaagacatgtctcaagccgatttcggtcgtctcgaactcgagctcgccgaagttgagatgcctggactcatggcttgtcgtaccgaattcggaccttctcagccattcaaaggcgctagaatcaccggatctcttcacatgaccatccaaaccgccgtactcatcgaaaccctaactgctctcggtgctgaagtcagatggtgttcctgcaacatcttttccactcaagaccacgccgccgcagccatcgctcgtgactccgccgctgttttcgcctggaaaggtgagactcttcaggagtactggtggtgtaccgagcgtgctc

SEQ ID NO: 140486 - DNA, 294 bp, Arabidopsis thaliana
tgtcaatggaattttaccccaagttgccctcatacatggagttagcgtctttcccaaggcatcggatccatggttttggctttacattatcttgtttctcggtgggtacgcgcaagatctatcagactttttattagaaggaggaacttatcggaaatggtggaacgatcaaagaatgtggatggtgagaggactctcttctttcttctttggttttacagagttcactctcaaaaccctaaacctctccactcaaggatataatgtcacgagtaaatccaacgacgataatga

SEQ ID NO: 140487 - DNA, 423 bp, Arabidopsis thaliana
cggaagcgtgggcgggttcgaagccatctttttcctaaatccccaattttttttttttccctcgtttccgaatcttttaccggcgagactctgccatggattcaggcgaacaaaagtctaagcggaggttccaaccaaatcctccgaggccttctcgccgtcttccgatcgctccaacctcaaacaccgaagctgaggaggatgaagagaatataaaagcatctcgccaatttgacagacgtatcgtcggcaggagacccaaaaccgaaacgaaagcttcttctcctgaagttgcattccaaccaagcttgtcaccacttgcaataaggtcctttggtgttcctaaagaagatgacaagcccaattctgatgttaatccgtcttctcctgctagtattcttcctgctgtttcgtctgttactg

SEQ ID NO: 140488 - DNA, 356 bp, Arabidopsis thaliana
caaaatcttgtcttttttttcttcttaaaaacaagatccaaatttctgaaaaatccattcactacaaagaaagaaatgctgtctacaactcttagtggtaactatggcttccctctgtgcatctctgggatcactcagcaattaagtctgtccaaagaaatggcagatcatgacaagagaaggaaggtgatacagaggagaaggagatcagaaggtaaacatgagtacaagagccatggtgaagaagatgtggagaggcttcaagagaatgaagatgttagagatctagttgctttactacaagatctaggcttgtggagcttttcttctcacacagccaaagctgcttagtgttt

SEQ ID NO: 140489 - DNA, 349 bp, Arabidopsis thaliana
ttttcaacccttgcttaaaggtgtttcaatggctttctttaatccttttgggttttgagattgctgcttatttcaaaggttggagctttggaacttctaagcttcagcttcagtttatcttcaataaagggttctttgattgggtttacacgagatgggttttgcttcgtgttgagtatcttgctcctcctcttcagtttcttgctaatggctgcattgttctgtttcttgttcagagtcttgatagactcattctttgtcttggttgtttttggatccggtttaagaagattaaaccggttcctaaaccggattctatctctgatcttgaatctggtgataatggtgc

SEQ ID NO: 140490 - DNA, 231 bp, Arabidopsis thaliana
gtcagcagataacaaagatggtgtcctattgtgcttatcacatggctcccaacccagataacgtgttaattatacaaactccttcatgagccttctctgcaaagagtcttgtccaacacaataagaaaggtggttccaagcttatttcattaatcacagaagacgatgaatcacctgctagagaataccattacatgtgatccattttctgctgctcattgtcgagtattt

SEQ ID NO: 140491 - DNA, 393 bp, Arabidopsis thaliana
cacttttctttctagattaatcaaattctttgaaaccagtttctcacttcgcctctctcttcagatccgtcctctgtagctctagaacaatggggtttatctctaggaatgtgtttccggcatgcgagagtatgtgcatttgctgtcctgctctcaggtcgagatctcgtcagcctgtcaagcgttacaagaaattgctcggcgagatcttccctaaatcccctgatggtggaccaaatgagagaaagattgtcaaattgtgtgagtatgctgcaaagaacccaatccgtatccctaagattgctaagtttcttgaagagaggtgttacaaggaccttcgatctgaacagatgaagttcatcaatattgtcactgaagcttacaacaaaatgc

SEQ ID NO: 140492 - DNA, 441 bp, Arabidopsis thaliana
  unsure (1)..(441): unsure at all n locations
cgatatcatctaaatctctctcgatctcaatttcgcaaaatggctgacaagaagatcagaatcggaatcaacggtttcggaagaatcggtcgtttggttgctagagttgttcttcagagggatgatgttgagctcgtcgctgttaacgatcctttcatcaccaccgagtacatgacatacatgtttaagtatgacagtgttcacggtcagtggaagcaccatgagcttaaggtgaaggatgacaaaactcttctcttcggtgagaagccagtcactgttttcggcatcaggaaccctgaggacatcccatggggtgaggctggagctgactttgttgttgagtctactggtgtcttcactgacaaagacaaggctgctgctcacttgaagggtggtgctaaanaaggtgtcatctctgccccaagcaaagatgcgcccatg

SEQ ID NO: 140493 - DNA, 330 bp, Arabidopsis thaliana
ctgacggtgctggatgttgagaaccctgagttcaagaggaaactggatagaatggttgtgagctatgagaagctgctggctataggagaaacagatgatgcttccttcatcaagaccctcaagaggattcctttggttacttctttagcctctgagatcttggctgcttatctcatgcctcctgttgagtctggctctgttgatttcgccgagtttgagcctaatcttgtctattagtagctgcaatgtcaagtcttgagtttacggctggttcttgatttcttgtaattgaatgatcgaaactgagaaacatcgtctttttttttttgc

SEQ ID NO: 140494 - DNA, 206 bp, Arabidopsis thaliana
gtcaagaagtgagccatttgatgccctgagtgatatagaactgaaagaaagagaagaaggtgaaactttatatgcagaactagtatcaagaactagcgacattgctgtttctaaaaagctttgtgaggaccctcacgacattgattgtcatgtacatgacatccatgtagtgactgatgaagataacaaggggcaactgaatgttc

SEQ ID NO: 140495 - DNA, 358 bp, Arabidopsis thaliana
cgcgtccgataatttatcattagacaatgaaagtgtgatgttctgtcctgtgaagcttgtattaccacattgtaactaaatgttttatcttcattatcagtttaatttagccacaaacccgagaacaaggagagcgagtcgaggataaattaaactgataatgagactcgaacatagacagaggcaatggtgatacgaagtggatcaaagacactaacaatttctactcacattattgtacctcaatcatttatcattagacaatgaaagtgtgatgttctgtcctgtgaagcttgtattaccacattgtaactaaatgttttatcttcattcatccaatccgtaacgtaattgaacg

SEQ ID NO: 140496 - DNA, 121 bp, Arabidopsis thaliana
atttatggatctgttaaaacagtttgctttggattatcagtatttatgttgttgtgagtctcttaaactactcgaatacaatctttcagcttcataatatcagatcttttgagcttaaggg

SEQ ID NO: 140497 - DNA, 192 bp, Arabidopsis thaliana
cccacgcgtccgaagaaacatatatatataaagcaaacatgtttcttagttcacaaagagaaaaggaaatagtactcttattagtaccatagtcaccgagcttaatttgagtactatttcctttgctctttgtgaactaagaaacatatatagataaagcaaacatgttccagagaaagggaaaaaccaaaa

SEQ ID NO: 140498 - DNA, 207 bp, Arabidopsis thaliana
aatccgattctttatacgtataataccatcccttgtgatcaaacaagtaaaccattcagaagatgaaaggaagaattttgattttgagtttgctcatagtgactctggtcatggcagaagttcaagtagaagcagagatctgctgtccttccaatcaagctagaaatggctatagtgtaagccgtaaaaagttttccaatggaatgt

SEQ ID NO: 140499 - DNA, 419 bp, Arabidopsis thaliana
tgaaatggacaatggtgatgctacaattcaatctagaagagaagtctttgcattacagggacgaacctttatctcacatcttcgtcatgaacaatgtccattacatagttcagaaggtcaaaagctctccggagctaatggagttgataggagacaagtatttaaggaagcttaccgggatatttagacaagcagctaccaagtatcagagagctacatgggtcagggtgttgaatagcttgagagatgaaggattacatgtgagcggaagcttctcttccggtgtatcgaagagtgctttaagagagaggtttaaagctttcaatacaatgtttgaagaggttcacaggattcaatcgacatggtcggttccggatactcagcttagagaagaactcaggatatctctatcggagcat

SEQ ID NO: 140500 - DNA, 355 bp, Arabidopsis thaliana
atacaaaaatgcgtcagcttctcccaaatcaaacaactccaatctcacttcctcaccgccggccatttccaatcttcctttctccgttctcgtcttctcgaacgctgcgcaatctcaccattcggagacctttccttcgccgtacaaattttccggtacatccctaaacctttaaccaatgattggaacgcaatcatccgcggattcgccggaagttctcatccttcacttgcgttttcatggtatcgttccatgttgcagcaatcttcgtcatcgtcggctatatgtagagtcgatgctttgacttgttcttttactcttaaagcttgtgcacgtgcgctttgttcttccgcta

SEQ ID NO: 140501 - DNA, 434 bp, Arabidopsis thaliana
acggtcaaggattctgattgataacgatattcaagttcagcaatctcattgcagtagaaaatggaatcgaatcatcctcacttcaagctaattttgggatcttcttcgattgcgcgacgtgggatactaacagatatgggataccaattcactctcatgagtgctgatattgatgagaaaagcatccgcaaggagaaacctgaagagttggttttggctttagctgaggcaaaggctgaagcaatcatgcagcggatccctgatggtgaaaacatagaggaggataagtcgaccttacttattacttgtgaccaagtggttgtctatgaagatgctgttagagagaaaccctcgagtgtcgaagaagcaagggagtacataagaggctattccaaggggcatacagcaacagtgagttctgtggctgtgacaaa

SEQ ID NO: 140502 - DNA, 365 bp, Arabidopsis thaliana
gaattgaaaccacacaaagaacagaaaataagaaagataataaaaggaggcaaacacgaagagctcacaacaagattcaagattcaagattcatgctttcagatttcaactaatcaggtaaaagaccactttacctgcaaaatgacgagatcgtgggtgcttttgtttgttcttatgttcattgtgttgacttctcagtttgagtggaatgaacaagttgagaatgaaagtgagactagtagtcgtcctctgattctttcagataaagagcaacaacatatccctcaaggcaaagaatctgtacaagtaaagaaaattctatttcaagaaaagaaaattcagaagttaaacgagctggtccgaga

SEQ ID NO: 140503 - DNA, 401 bp, Arabidopsis thaliana
cccacgcgtccgttcaactgcaatctctctctgaaccatgagaggtcacgatcggattaacaattgtttgccggaggaacttatcctcgagatattccggcgacttgaatcgaaaccgaatcgcgacgcatgctccctcgtctgcaagcgatggttatctctcgagcgatttagccgcaccacgcttcgtatcggcgcttcgttttctcccgacgacttcatctccctcctatctcgtcgctttctctatattacctctatccatgtcgacgaacgtatctccgtctcccttccttccctctctccttccccaaaaagaaaacgtgggagggacagttcgtcgccatcgtcgagtaagcggaagaaattgactgataagacacattctggagctgagaacg

SEQ ID NO: 140504 - DNA, 311 bp, Arabidopsis thaliana
acgcgtacgcgaacgcgtgggcggacgcgtgggtagattttaaccaatttacaaaaatttcgagcaggaatcgaagaaaaggactatttgacccttttcttcatcctcctccctcatttcggccagcgcgaggtcttcattatttattagccgccgaagggaattcctccggcgccattttttataacttttgtgtttttatctttagagatgggaaccgaaattatcaggcctcaaaattgtttggttgaccggatgagagattctccggcgattttttttaactcacggaggaatcattttcaccggaa

SEQ ID NO: 140505 - DNA, 193 bp, Arabidopsis thaliana
atgacgtgagctctcagctacaagcacaagctgctcagaggttcaagatgcctgacgttgcgtctatgatccccaacactgatggttctgaaccagccaccgttgcacagggggaggaagacgatgaagatgttgatgagactggtgttgaacgccaaggacattgatcttgtgatgactcaagccggtgtct

SEQ ID NO: 140506 - DNA, 378 bp, Arabidopsis thaliana
ccacgcgaccgcaaacgcgtgggcggacgcgtgggctgaaacttttgccttgcttgcttgcccagaaagtcgccgagaaagttaaaagtagaacggcggagaaaaaaaaaacgaagaggaagaggagagatggagtcgcagaagaagatagctcatgagatcggaggtatgaagaacgatgctcttcgctttggtcttcacggcgttaagagcgatatccttagatctcatcctctcgaaacggcttacgaatctgggaagcaatcacaagaagaaatgaagaggagagtgatcacgcatacttatggagctgctcttcctttgaagatggatcttgatagacaaatcctttctcggtttcagagacctcctggacca

SEQ ID NO: 140507 - DNA, 335 bp, Arabidopsis thaliana
gcacaaaccccaaaaattaacagaaaaccaaaagaaggcggcgcaaacaaaagataatgcaaccagagacctcagatcagatgttgtactcgtttcttgccggaaacgaagtcggcggtggagggtagggcgtctccggcgactacatgacgactatgcagagcttatgtgggtcttcgtcgtcgacgtcatcgtattacccactggcgatctccggcatcggagaaacgatggctcaagacagagctttagctgctttgaggaaccacaaagaagctgagagaagaaggagagagaggatcaattctcatctcaacaagcttcgtaacgtactc

SEQ ID NO: 140508 - DNA, 207 bp, Arabidopsis thaliana
tttctctctctaatggcggcgacattaggcagagaccagtatgtgtacatggcgaagctcgccgagcaggcggagcgttacgaagagatggttcaattcatggaacagctcgttacaggcgctactccagcggaagagctcaccgttgaagagaggaatctcctctctgttgcttacaaaaacgtgatcggatctctacgcgccgcc

SEQ ID NO: 140509 - DNA, 351 bp, Arabidopsis thaliana
cgaatctttaccggttaagactcaacggtaacagactcgcggggaatattccggcggagattgggaatctgaaaaatctcaacttcatcgatataagtgagaatcgtctcatcggaggcatgcgtccggagatctccggttgtacaagtctcgaattcgtcgatctacattcaaacggtttaaccggtggtttacccggtacacttccgaagagcttacaattcattgatttatccgataattcattaagcggttctctaccaaccggaatcggatcgttaaccgaactcacgaagctcaatctcgcgaagaatcgtttctccggcgaaatccctcgagagatatcttcct

SEQ ID NO: 140510 - DNA, 324 bp, Arabidopsis thaliana
gcaggatttgaggtgattgatacttgtttcttattggtcttcataagtgtcaataggaatagagttgtttcacaccttatgttgcctcaaatgagtatgcgtagtgtccattatcagctactctatgcattcttacagcttcaataagagttgtttcatgatattaggcactcgatgctgatggaatggatatggaaattgacttgtcaaacctcgggaccgtaaataccatgtttgcagcattgttcagcaaactaggtgtgcctatcaagactactgtatctgctaatgttcttgaagaggctatgaatggaactgttacag

SEQ ID NO: 140511 - DNA, 185 bp, Arabidopsis thaliana
ctaatctactgttcttgttttgaaaatcaggttcccttctttttgtaaattaattctcaatttaaatatcatgggatgatctttctcttgttttagtttttgttctcgtcttttttccttggagacaaattattataaagacatactactttgtactttcacatccaatgagtttgtgttatgtt

SEQ ID NO: 140512 - DNA, 386 bp, Arabidopsis thaliana
  unsure (1)..(386): unsure at all n locations
ggatcgtagtggtcacgagatgaagaagacgttgacgtggtgggatctcatgtggtttggtatcggtgcagtcatcggctctgggatattcgttctcactggactcgaagcacggggcaggggggtccanccgtcgtgttgtcttacgttgtctctggtgtctccgccatgctctccgtcttttgttacaccgagttcgccgttgagattcccgtcgcaggcggttcttttgcctacttaagagtggagctcggcgacttcatggccttcatcgccgcgggaaacataatcctcgaatacgttgtcggtggagctgccgtggctcgatcgtggacctcttacttcgccactctcttaaaccataaacctgaagacttccgcatcat

SEQ ID NO: 140513 - DNA, 190 bp, Arabidopsis thaliana
cttaaaccctttcattcaacaaatccctaatggaaaatcatctgatatcgtcgcgactcaggccatcacagaactcctcactagttcggggacttctgcaggaaagccgaagttgatgccttctacagctgaagaattggaaaggaagacatttttctacagcatgcttgtgcctatcatgaacaaatat

SEQ ID NO: 140514 - DNA, 374 bp, Arabidopsis thaliana
  unsure (1)..(374): unsure at all n locations
gttaagattgagagagagcgaacaacanacaaaaaaagagagagcggagagaagaaaaaaaaccctagcgtgttgttcagtgactttggggggaaaatttctcgtagtttcttcgctgggtccgtcgtctcatctctttccatttgtggaattcaatggaagctttaggtttttggtgctgagaattctctgttttcgaatctagggtttgtagaggagatctattcaattgtagatacgcaagatcgaaacgagtcagaaaactaggagaaggagtcatgtcggattctgataaagagctcgagaatcagattattgaagctggggaaaagcttattgacccgccttcttcactcgatgagcttctctctttc

SEQ ID NO: 140515 - DNA, 264 bp, Arabidopsis thaliana
actacccaaggaactgttattattgatgaagagagtgatgatgatattccttttgcaccaatgggacgaagtaggcaagggagacctgctggttctgtagccaataataataatcaagattacaatgatatagaagaagaaatgatcagagctgccattgagacctcaaagaaagaggctgagggatcaagtaaccctttacttgaagagaggccacttcacatggaagatgatgatgacatagcaatagctgttacaatgtca

SEQ ID NO: 140516 - DNA, 291 bp, Arabidopsis thaliana
cagagcaaaactcaggcagatcccttcttggctcttcgaacctcaccaccacacacctattgcaaaccctaaccctaatttgagctcggcgtcttcctcttcaacaacaacagctcatcttgagccttccctaaccaaccagagatccaaaaccactccttttccttctgcccggtttgatcttttggacagtactactagctatggaggtttgatgatggacagagagaagaacaagagcaatgtatgtagcagagagatcaagaaaagtgccatcgatgcatgtcattc

SEQ ID NO: 140517 - DNA, 189 bp, Arabidopsis thaliana
gcgaaattctctgatgtctcttcattttattttccctctacatctctcccaacgatttccaaatctcagttcactttggctcatccacctgaatccatggagattgcttcgtcatctctctcacatgctcacaaggtcattctcacgcgtcaaccttcgtcccgggtcatcacctgcgcccttggctcg

SEQ ID NO: 140518 - DNA, 313 bp, Arabidopsis thaliana
tggagcaacactatcagaagccgatactgttgctgttcatgatatgaatgacaaaggtcaagtagtccaagatatttcgtccacatcagatgagaaaaaagtaacaacaaatgtgcactgggaagggaaaatgtcgaaagacttggttacattcgcggaaggataccaaatgactctgttacccggaggtatgtacatgggatgtccttgctacgtatcaaagtgtgttgctgatttaaagtctttccacttagaattctgctggcttgaatcgccgagctcaagacaaagactcatccgcacatatgaccat

SEQ ID NO: 140519 - DNA, 323 bp, Arabidopsis thaliana
ataattttgaaggaagatatgatttagtgaaatttgtgaagcttgcggctaaagctggtctctatgttcatttaagaattggtccttacgtctgtgctgaatggaattacggtggtttcccagtgtggttgcattttgttccaggaattaagtttcgaactgataatgagccatttaaggaagaaatgcagagatttaccacaaagattgttgatttgatgaagcaagaaaagctttatgcatcacaaggaggtccaatcattctctcgcagattgagaatgaatatggaaatattgactcagcttatggtgcggctgctaaa

SEQ ID NO: 140520 - DNA, 264 bp, Arabidopsis thaliana
gttagtgtttttatttgtcttggttctacaaagatcaattatgctgttgttgaactggatcgagtgatggaagctagaattgatgacagtggggaggctcaacaattctatgggtcagtacgtaaaagatgtgtggactggaatttgcatgattggcaacgggatggtgatctcattctcgccacccagactaccacgggacgtcagtttatccctctatgaaactcgtccaatatctcctcatcctgctctgatgaaggcaat

SEQ ID NO: 140521 - DNA, 312 bp, Arabidopsis thaliana
aaaaaacatacctgggtttgatcctgcctctgattcgcggacatcggcacctgtcgtccttgttagtgatgagtgttgagatgaaccacatcgtcagcacttgcagagctcgttgcaggcatttgtagactcgcttccagaaactaccaagcttgggattatactgtatggtcgtactgtttcaatatatgatttctctgaagattcagttgcttctgcggatgttatttctggtgcagtatcaccatctgcagagtcgatgagagcgctgatttatgggaccggtgtatacttgtcaccaatgcatgcatc

SEQ ID NO: 140522 - DNA, 434 bp, Arabidopsis thaliana
aaaaaatggagggaggaataatacatggaggagcagatgaatcagctttcaaagaatgtttctctctaacatggaagaatccttatgttcttcgtcttgctttctctgccggaatcggtggtcttctctttggttacgacaccggagtgatatcaggtgctctgctttatatcagagatgatttcaagtctgttgacagaaatacttggttacaggagatgatagtgagcatggcagttgcaggagccatcgttggagccgccataggaggttgggcgaacgacaaattagggaggagaagcgcgattctcatggcggatttcctctttttattaggagctatcattatggcggctgctcctaacccgtccctccttgtcgttggccgtgtttttgtgggcctcggggtcgggatggcctcgatgaccgctcct

SEQ ID NO: 140523 - DNA, 361 bp, Arabidopsis thaliana
gtcaatttctttgtttggttgttctttcttcgcatccaaagatgaagctcgtcaggtttttgatgaagttaaacaatgaaactgtgtctatcgagctgaagaatgggactgtggtccatggaaccatcactggtgttgatgtgagcatgaacactcacttgaagacagtgaagatgagcctgaaggggaaaaacccagtaacacttgatcatcttagcttgaggggtaataatattcgctactacattcttcctgatagcttgaacctcgagactttacttgtggaagacactcctagagttaaacctaagaagcctgttgctgggaaagctgttggacgcggtcgcggacgtggccgtgg

SEQ ID NO: 140524 - DNA, 424 bp, Arabidopsis thaliana
  unsure (1)..(424): unsure at all n locations
cccacgcgtccgggaatctcttaatgaagagcacataataggctgtggaggctttggcacagtgtacaagctgtctatggacgatggcaatgtttttgcgctgaaaagaattgttaagttaaatgaaggttttgatcggttttttgaaagggagcttgagattcttgggagcatcaaacatcgttaccttgtgaatctacgtggatactgcaattcacccacatcaaagcttctgctatatgattaccttcctggtggtagccttgatgaagctctacataagagaggcgagcagctggattgggattcgcgagttaatatcataatangagcggcaaaagggttggcatacttgcatcatgattgttctcctaagattatacaccgtgatatanaatcaagcaacatcttactggatggaaat

SEQ ID NO: 140525 - DNA, 396 bp, Arabidopsis thaliana
cggacgcgtgggtgaaattcggtaaccttcttgatgcttggcatcctagtgatgtgtctgtccacactatcctttccccttggaagactgtttttgatgctgcaagctgggagcagcttatgcgtcgttacatagttcctaaattacaggtggccttgcaagagttccagataaacccagcagatcagaacttagacgagttcaatttggttatggggtgggtatcttcagtacccattcatctaatgactgatttgatggagagattctttttccccaagtggctggatgttttatatcactggttgtgttcagaaccaaagttcgatgagataatgaaatggtttttgggttggaaaggaacattcccacaggagctttctgcaaacaggagga

SEQ ID NO: 140526 - DNA, 394 bp, Arabidopsis thaliana
ttaagtttgtgttcttgggatcatcaagagttaaaacaaaaaaaaaaaaacatttcttttttccttcttcaatttgagatttagtgtctcctttaacacccacaaagccagcagatgctttcctgatgactccttgtttgatctgatcataagaagaagaagactatggccacttattacaaaactggctcaagtgagatttattccagaccagaatttgtccctggaaacgcaatgaactacacaaattctttcacagagacatttcctagagattcaactaataatgtgtcaccttcaaaagagattcaagtgttgtcaagccttggtggagtttcacaaatggttgagattcaagattctggttcttggagagatcaagaagacaatgaca

SEQ ID NO: 140527 - DNA, 348 bp, Arabidopsis thaliana
gcaacttcgtttgcagaagcgaaatgtttgtctctaggagtctctcgagacactgctggaggacttgtaaatggtctttattttctctcctccaatccgattcctgtgttaggagatctggtttcgtcatcgaatccggttacgagcattggtaactcaagtgaaggtaattcgaattcgtttcagccgttgatgaatcaagtgtttaaaggatggtctcgaggtatgtcaacatcgagaggaatgagtatgaggagcaaagttgagagtagaatgcgtaaagagtctggtaagacgttaagagagattatgagagcgaagaagttgaagaagaaactcatgactgat

SEQ ID NO: 140528 - DNA, 256 bp, Arabidopsis thaliana
acggacgcgtgggctcgaaaggaaaaaaggggtctccttcaaacattctgcagaggttgctggtatggacaaacaagaagatgaaaacaatgatggggaggctcttgcagattttgagaaaattatgactgtagaaaggagcacagttgttgatgatagtggtgatggtacaagtgaaggagatggagctaaagagctaaatgatactcagtgtaatgggaatacgttgcaccaacaaaactccaaactctctttg

SEQ ID NO: 140529 - DNA, 320 bp, Arabidopsis thaliana
gaaagctcttcaagaattagggtttcgttttgaatcttctctgattcccaaatccaaagatatgaagagatcttcagggagaaaggattcaaatttcatagaacaattgatactttacgtcgctagtgctgcattgagtagcttggttctctacgttggtctccgtcaacttgacccgaaccgtgacgccgctaaaaagtctctcgagcacaaaagagaaatcgccaaacgtttgggtcgtcctcttattcaaaccaatcaatacgaggatgtgattgcgtgtgatgtaataaacccattacacatagatgttgaatttg

SEQ ID NO: 140530 - DNA, 402 bp, Arabidopsis thaliana
cgaacgcgtgggcggacgcgtgggaaagctttttcagcttctttgttgaattgcgagcagaggtagaaatcagcaggaaacaaaaatgttgttcttttcttacttcaaggatttggttggacaagaagtgacggttgagctgaagaatgatttagccataagaggaactcttcactcagttgatcagtatctgaatatcaagctcgagaacactagggttgttgaccaggacaagtaccctcacatgctttcagtgagaaactgtttcatcagaggatctgtggtaaggtacgtgcagttacctaaagatggagtcgatgttgatttgcttcacgacgcagctagaagagaagctaggggtggctgattctgaaatatctttgtatctccaaaacttgaata

SEQ ID NO: 140531 - DNA, 309 bp, Arabidopsis thaliana
  unsure (1)..(309): unsure at all n locations
cccacgcatccgcccacgcgtccggagcctttcagacttcacccgaatcatatttcttagttctcctccagtggatgaggctaaagttcgccagaaccaaagcccatacttgagcgaggtaatccgcacaaacgacctctgcaagacttattcagatgcttgtgtagagctgtgccaagaactcggcctagaagtagttgatctcttctctacttttcagaaagcagatgactggaaaactgtttgcttcacagacgggattcatttgtcagcacaaggaagcanaatagtagcgggagagatactaag

SEQ ID NO: 140532 - DNA, 366 bp, Arabidopsis thaliana
  unsure (1)..(366): unsure at all n locations
ctcgacaaagattctaactttgagagagatttttcggttgtagatgcagattcagagcgtatcatctctcgagaaaggatcaatgtctcatgaaataagctagactctgtttctgttttcttcttcttcgatctcaatttcttcttcttcgagctaggggttgtttatgtttgggaaaggaatgggcactaggcagtattcactgggagaagtagggccaccaataaatccgagagctggattgcgaagggaacaagctggtagaggttcatacagaggtagttagtagattcgtagctcatctgtaggcaaanaaggtttccttttaggtggcaagactgtttattttcagacacagagactgat

SEQ ID NO: 140533 - DNA, 137 bp, Arabidopsis thaliana
cttaaatcgtggtggatacttaatcatggtcgatcaagtctccggcgagaacctggtcggagttaataaattcgatcttcaacgtgctaccgtcgtgtctatcgtctccatcatctttggttacgatactggtgtta

SEQ ID NO: 140534 - DNA, 117 bp, Arabidopsis thaliana
gaccgatgcataaagtcatccactcatcttgcgtgtgatactctagtgacggctccatctatctcactccctctctgcttccttcaatcaaattgcaattcaactggatcgtcataa

SEQ ID NO: 140535 - DNA, 355 bp, Arabidopsis thaliana
cccacgcgtccggttctcttaaagattaagagagccaaaacgaagcaaattaatctgccttcaatggcttcttcagcagcagccatcgtctccggttctccatttcgttcttcaccattaatccataaccatcatgcttctcgttatgctcctggatccatctccgtcgtatctctcccccgtcaagtttcccgccgtggcctctccgttaaatcggggttgatcgagccagacggaggaaaactcatgaacctcgtagtcgaagaatcacggcggcgcgtgatgaaacacgaggcggagacggttccggcaaggatcaagctgaaccgtgtggatctagagtgggtacatgtgc

SEQ ID NO: 140536 - DNA, 343 bp, Arabidopsis thaliana
cccacgcgtccggtccatcaactaccccaactgcagaagctggacagtccctctttctctaagagttcggcttcgttcccaaagatggtgttcgattcgaggagttcgatgagccctggaacggatgccgaagactggacgtgggagaccgtagcggccaagagcaagagtagtgaaagtgggactgtccatcaactaccccaactgcagaagctggcaccttggtgttgagacctctaacatcataaacttcgacacggtgcccgcaaattgcaaagcctatgttgaagactacttgatcacttccaaacagtaccaatacgactccaaaactgtaaacaaa

SEQ ID NO: 140537 - DNA, 363 bp, Arabidopsis thaliana
acgcgtcagctcatctcttcttttcttcatcgtctttccaaccttcacgttttcctccaccttattgtttcagagtttcaattgggagtcatggaagaaagaaggaggattctacaattctctccacaactccattgacgacatagccaacgctggaatcactcatctttggcttcctcctccttctcaatccgttgctcctgaaggttacttaccgggaaagctatacgatctaaacagctccaaatacggttcagaggcggaactgaaatcgttaatcaaagcgttgaatcaaaaaggaataaaagctttggctgatatagtgattaaccacagaacagctgagaagaaagacgataaatg

SEQ ID NO: 140538 - DNA, 343 bp, Arabidopsis thaliana
agaaaagcaactggggcttacagtcatagccagggtatcaagggtttacgtgatgtaattgcagctggaatcgaagcacgtgatggtttccctgctgatccaaatgatattttcttgactgatggtgcaagtccagcggttcacatgatgatgcaacttctcttgagctcagagaaagatggtattctttccccgattcctcagtatccattgtactcggcttcaattgcccttcatggtggatctttggttccgtactatcttgatgaagcaacaggatggggactggaaatatctgaccttaagaagcaactagaggaagctaggtccaagggcatctctg

SEQ ID NO: 140539 - DNA, 389 bp, Arabidopsis thaliana
ccttgaaagacttggtattggatggaaactgtagaagcggggcatgatgatgttattggttggttcgagcatgtgtcggaaaatgcctgcaaggtccaaagcgagacgctacgaaggattcttgagctcaactccggagtggagtatctgaggaaatggcttgggactgttgatgtagaaaagatggacgattatactttggaaactctctttacttccttggtgcctattgtttcacatgctgatttagatccttatattcaaagaattgcagatggagagacttctccattacttacacaagaacccatcactgttctgtccctcagctctggaacaacagaagggagacaaaagtatgttccgtttactcgccatagcgcgcaaac

SEQ ID NO: 140540 - DNA, 273 bp, Arabidopsis thaliana
aaagatttgaagtctctaaaccctaaattaccaatcttgatccgtgaatgtagtggagtccagcctcagatgtgggcaagatatgatatgggtgtggagaggtgtgtaaacttggatggtctgacagagccacagattctaaaggcccttgaaaaccttgtgaaatccggagctacaaaggcctaagtttgtttgtttgtttgtttttctctatatgatcccgaataagattaaaccgcaaaacaatcatttgacatttcctgtcattctact

SEQ ID NO: 140541 - DNA, 184 bp, Arabidopsis thaliana
cttctatatgcaatagagaactatctatatctataaatctatatcgactgaggaagatacaaagcaattgttctctctctctagtagagccttttgtttctttttcaaatcttttttgaagtcctttgcttaagattcttgtaatggcgttaaaaaacttgaagaaaggaatattattattgtt

SEQ ID NO: 140542 - DNA, 233 bp, Arabidopsis thaliana
ggattacctcccgttcttgaagcttccactgcgttttaccatcttttatcattcgttgattcgtctctccatagtcatttagtagaactcggagttgaacctcagtactttgggcttcgctggttacgagttttgtttggaagagagtttttgcttcaggatttattgatagtgtgggatgagatattctcagcagataacacgacgagaacagatgcggataacaatacaaa

SEQ ID NO: 140543 - DNA, 162 bp, Arabidopsis thaliana
gcgataagatgataagactaaaagaaggaaaaagaaaaatactatagtagcatcttaattaattaatgcataaataaggaccaaaggaataagtagttgggctttaattaccgctgtactttgtaatataactaaacctataatatattgtgttcttgcgcc

SEQ ID NO: 140544 - DNA, 451 bp, Arabidopsis thaliana
  unsure (1)..(451): unsure at all n locations
cgaacaagaaccctagaattcgcctcctctttccaaaattcccaatttttgtaatgacgggatagaaaaattcccaatgtccgctttatctttcattctcgattagaattcttcaaccaaaggtcactctctctccgttccattgcttctggatttcgtttttaagggttttacatttttcctgccttcttttacccatcagaggaagtttcaagccattttgttaatcagctctctcataagctaagatgtcgtcatcgccttttccagtcttggacaaccgaccaattgataagtggaaggttacggaattgaaagaagagcttaaaagacggagactaacaacaagaggcttgaaggaggaattggttangcgtcttgatgaagcacttcgtgctgagcaagaagagtctgaaaggatcaatagtgctactgttgctgctgctgaaaa

SEQ ID NO: 140545 - DNA, 345 bp, Arabidopsis thaliana
gtatgcgttgtctctcagagtgagagcgagttaagtcagccgagtttcccggtggagtgtataggatttggaaatggggacgagtttcagaacctgagttacggatttgagccggattatgatctgaaacagcagatatcgagcttggaatcgttccttgagctggacggtaacacggcggagcaaccgagtcagcttgatgagtccgtttccgaggtggatatgtggatgcttgatgatgtcattgcgtcgtatgagtaaaagaaaaaaaataagtttaaaaaaagttaaataaagtctgtaatatatatgtaaccgccgttacttttaaaaggtttttaccgt

SEQ ID NO: 140546 - DNA, 313 bp, Arabidopsis thaliana
cccacgcgtccgcgaagttagatctacaggctataagtcgacgagacaacacaaacaagcttatgataaaatcaaactacatttggaagctgaacaggccaagagtagcaaagaagcctgcaaaaccacgcaagatgcagagcacatggctattcgctatctcggtttaagagcatattcagcagctgacctgaagaagaagctcataggaaagaaatatcctattgaagtcgttgacaaagtgatcgatgatttccagattcgaggttttgtcaatgatagcttgtacgcggagtcattcactcgatctaga

SEQ ID NO: 140547 - DNA, 346 bp, Arabidopsis thaliana
gagataactggattgactaaggaagatttgaaggatggtatgccacttgagcatgtacgagagagagttttttcgttcttgtgcggtggacagaatgatggggctggaaggcttcttcttgttggtcatgaccttaggcatgatatgagttgcttgaagcttgaataccctagccatttgttgaggtaactaactgacccgtttttgttgactctttgcttgaaatctaatgtaattgctatgcttcacctcagagacacagcaaaatacgtgccgttgatgaagacaaatcttgtaagccaatcgctcaagtacctcacaaagtcatatctcggatacaagatcc

SEQ ID NO: 140548 - DNA, 318 bp, Arabidopsis thaliana
gctactgatacttctgcaacttctgtccttaaactctctgtctctgaaacattcttcagccaaaccaaatggaaagatcactgtaatgggtcttgtttactgcgacgtctgctccaacaacagtttctccaatcacagctatttcattcccggtgtggaagtgagaataatctgcagattcaattcagcttcatcgacaactacagagatgattacgttctctgcaaatcgaaccacaaatgagcttggactctacaagctagacataacgtctctggaaggcgttgcttgcgccgctgaagcaaacaaagattctct

SEQ ID NO: 140549 - DNA, 359 bp, Arabidopsis thaliana
cccacgcgtccgcggacgcgtggggtattcgtagcggttctaacatgtacagtggtgttccaagtaatcataatcgagctgctgggtacatttgcggatacaacaccattaaatttgggacaatggttggttagcatcatactcgggttccttggcatgcctgttgctgctgccttgaagatgatccctgttggttcacactaagcaacacattgtataatgtgattccttgtgccacaactttggcattgaaaggtaccaattttttctccggcctttggaagtttgatatcccaagatggccttggactagttacggtgcttttttatgttttcattttggccaaatgtataagtga

SEQ ID NO: 140550 - DNA, 295 bp, Arabidopsis thaliana
tggagtgttgcatttgcaaagatgtttacaaatgggatgagtgaaagccagtcatcaatgatctacctaaccgatgtaacaccagaagcattcaaggctatgatgaatttcatgtacactggagagttgaacatggaagacactgtgaattttggcaccgagttgattcatcttctctttctagctgaccggtttggagttgttccacttcatcaagaatgctgcaaaatgctcttggagtgcctcacagaaggatggcgttccgttttggcagaaggattctgtatgctcagtt

SEQ ID NO: 140551 - DNA, 449 bp, Arabidopsis thaliana
  unsure (1)..(449): unsure at all n locations
catgactagtcggagagaagtacggtgccggtgcggcagacggatgtgggttcaaccagacgcccgtaccgtccaatgctcaacctgccacaccgtcacgcagctctactcgctagtggacatagctcgcggtgcaaaccgcataattcatgggtttcaacagctacttagacaacaccaaccgcaacatcatgaacaacaacaacaacaaatgatggctcaaccgccaccacggctgcttgagcctcttccctcgccgtttgggaagaagagagcagttttatgcggcgtgaactataagggaaaaagttatagcttgaaaggttgcatcagtgatgctaagtccatgagatctttantggttcaacanatgggtttccctattgactctattctcatgctcacagaagatgaagccagcccgcagagaataccgacgaagagaaaca

SEQ ID NO: 140552 - DNA, 310 bp, Arabidopsis thaliana
ccatcactcgaagacgttttcgcacaatgcgtcaccgattttaaaccttcaaatccaaaatccccaatccaaaactacatatacactcaacgaagcccgaatttcctcacaatccttaacaactacgtccgtaaccttcgttacgtcaacaacatgacacgtaaacccgtagcgattgtaactgccgcggatgtcactcacatccaggctacaatgacttgtgccaagaaactcgggctccagctccggatccgcagtggaggacatgactacgacggtatgtcgtatttatcaaccattgatttcgttg

SEQ ID NO: 140553 - DNA, 431 bp, Arabidopsis thaliana
aacaaataaaatatactgctttagctttggacacctcctcttactaatctctataactatatttaaaaagtagaaaataatggcacgtctatttgtcgtagttgcccttttggctttggccgtgggcaccgtattcgccgccgatgcaccttcagctgcacccaccgcctcaccaaccaaatccccaaccaaggctcctgccgctgcacccaaatcctccgccgccgcaccgaaagcatcatcccctgttgctgaggaacccacccctgaagacgactactctgcagccagccccagtgactccgccgaggcacccaccgtctcctccccacccgctcctacccccgaagccgatggtccctcctccgacggaccctcatctgatggacccgccgccgccgagtcacccaaaagtggcgccacgactaatg

SEQ ID NO: 140554 - DNA, 162 bp, Arabidopsis thaliana
tccgcctaacactaaactttctctttgcggctcttaaacattttcttagctttttctatcttcgtgtgataatggctggtaaaagataacgtcctgcgatcagtatcgatcttggcaccacgtagtcgtgcgtccgagtgtggcaacacgaccgtgttgaga

SEQ ID NO: 140555 - DNA, 161 bp, Arabidopsis thaliana
cccaagcgtctgcctagtctcctgtcttgtctaaagagaagagatagaggcatatgtggagacctctgaggaaagctctgatttggatgttatacataaacatctaattgtagacgtgaggatcactgatggtttcatcgatgattttgtcgctgatgaca

SEQ ID NO: 140556 - DNA, 257 bp, Arabidopsis thaliana
ctaaacacgaactttttcttccttgaagtcgccggcgagacaaacaaaaacaacataatcccgacggttacacgtaccggagaattgtatttaaattgaagccgctttgtattttcctcacagccaaagatttttccttactaggattttcattttctcgtctgttttcgtttcaaattcagaaaatcttccgtttcaatccggtttatatcggtttttaacaatgtcgatggtaactgtcaaagttagcaacgttt

SEQ ID NO: 140557 - DNA, 452 bp, Arabidopsis thaliana
cttcaaaaccgatcaaatccatggctaactcttccgctggctccgccgcagaccaccgcaacaaacacctctccgtcaatccaccgcaccagatcttcaaagatatccaaggttctgacaatgcgattcctctttcaccacagtggcttctctccaaaccaggggagaacaagactgggatgggaactggggatcctaatcagtatggaaaccattcggatgttgtgagaacaacagggaatggggaggagacactggataatctgaagaaaaaagatgttttccggccatccttgcttgatgcagaaagtggtcgtcgtgatcgttggcgtgatgaggaaagggacaccttgtcctcagtccgaaatgaccgctggcggaatggcgacaaagactctggtgataataagaaggttgaccggtgggataatgtggctcctaaatttggggaa

SEQ ID NO: 140558 - DNA, 174 bp, Arabidopsis thaliana
  unsure (1)..(174): unsure at all n locations
gatccggtgctgcacctccggctggagtcgctgaattcaccttaaacggagctaatggtctcgatttctacgacgtcagtctcgtcgacggttacaacatcccgatgaccatcgtccctcagggtggangagatgccggaggcgtcgccggaaactgtacgacaaccggctgcg

SEQ ID NO: 140559 - DNA, 415 bp, Arabidopsis thaliana
gaaaaccttcgtgctctttcttcgccgccaagttatatcgacggtgttttcgtatcgacgtcttctcctctctctctctctcgccgtcatcacctctttgaatgaacggcggacgcgggaaaaggcctaactcagcagaggaggaaggaaccatggctgaaccctctgtaaagaagagcaagttgacggaatccgattggataagtggtttagcagatgatttgctacttcagatcctctcgaaagtccctacgagggaatccgttttcacaagccgtatgtcaaagcgatggagaaatctctggagacacgttcctgccttggacttggactccagtaaattccctcatgagtcggacttggaagatttctttgatagctttctgcagtttgatggtaatcttaagatagagag

SEQ ID NO: 140560 - DNA, 447 bp, Arabidopsis thaliana
gaaaatggtgggagcgactgtagttagtaaatggactcccctatgtgtggcttcgccgccggagagaaactcggcaagtctcaatccacactgttctccagccagggttaattttagaacagcgttggccgcatttcgtcctcagttccgtcttttctctcgcaattccgcgtctcgccgccgtcttcgcgcttccagctccgccgaatcgggaatcttccttcctcaccttgtagcttctatggaggacgttgaggagacttacattatggtgaaacctgatggcatacaacgaggccttgtaggagaaatcatttctcgctttgagaaaaaggggtttaaacttattgggctcaagatgtttcagtgcccaaaagaattggctgaggagcattataaggatcttagtgctaaatcattctttcctaacctgattgagtacatcac

SEQ ID NO: 140561 - DNA, 364 bp, Arabidopsis thaliana
agcaaaaaaaactcactccctagaaaagtttgaaaatggcgaaggcagataagaaaccagcggagaagaaaccggcagagaaaactccggcagccgaaccagcagcagcggcagagaagaaaccaaaagccggaaagaaactcccgaaggaaccagccggcgccggagacaagaagaagaagagatcaaagaagaacgttgagacatacaagatctacatcttcaaggtgttgaagcaagttcatccagatatcggaatctccagcaaagccatgggaatcatgaacagtttcatcaatgatatctttgagaaacttgctggtgagtcttcgaagcttgcgaggtacaacaagaagccgacgat

SEQ ID NO: 140562 - DNA, 283 bp, Arabidopsis thaliana
  unsure (1)..(283): unsure at all n locations
cgatgggagagatagcaacagagttcacgccggttatggatgatgatgatgaccggtgcgttgtaccggaggtagagctcactgtacccaagaccgacgattcaactttaccggttttaacatttcggatgtgggttcttggtatangcgcgtgcattgtactctcctttatcaaccagtttttctggtacagaacgatgccgttgagtatcaccggaatctccgctcagatcgccgtcgtgccgcttggtcatctcatggcgagagtgcttccgacaaaaag

SEQ ID NO: 140563 - DNA, 439 bp, Arabidopsis thaliana
cccaagcgtccgcttccggaaaagagctgtgaagagtataggtccatggaagactggtttgagtggacaattgcagaaagcttttgttactggtgtacctaagctaaaccggtctgaactagaaacagcctgtgaagatttcagtaatatcattgaagcatttgatggttacactgtctataaaggaactttgtccagtggcgttgagattgcggttgcttcaaccgccattttggaaactagggaatggacaagagctatggaaatgacttaccgcagaaggattgatacaatgtcaagagtcaaccataagaactttattaatctgattggttattgcgaagaagatgaaccgtttaataggatgatggttttcgaatatgctccaaatggaactcttttcgaacatttgcatgataaggaaatggagcatcttgat

SEQ ID NO: 140564 - DNA, 383 bp, Arabidopsis thaliana
gacgatttgaaagagaatgagattgattcagctggagatggtgatgttttggtgattctggatctacgagcagatgattctttggttgaagcaggttttgcccgtgagattgtaaacaggatccagaaactaaggaaaaagtcaggtctggaaccaacagactttgtggaagtgtacttccaatcattggacgaggatgaatctgtttctaaacaagttctagtctctcaggaacaaaacatcaaggattcaattggctccactttacttttgtctagtttaatgccatcacatgcagtcataatagccgatgagacattcaccccaaaagaaacatccgatgagagtgtcaaaaaggttccaaagttgtcgtataagataag

SEQ ID NO: 140565 - DNA, 454 bp, Arabidopsis thaliana
tctaaacaacaccatcaccaccaccaccggttcgcaagatccgaatctcgacccaattccagacccggatcaatttcccaaccggaaccgcaaccaaccacaatctcgccgccctcgcggattcgccgctgcagcagcagcagcgtcgatagctccaacggaaaacgatgtaaacaacggaaacatcgccggaatcggcggtggagaaggaagcagcggcggcggaggatgtggaggagggaaagggaagagagagagggagaaggaaaaagagagaacgaagcttagagaaagacatagacgagcaatcactagtagaatgctcgccggattaagacagtacggtaattttccgttaccggcgcgtgctgatatgaatgacgtaatcgctgctttggctcgtgaagctggttggagtgttgaagccgatggtactacttatcggcaatcacag

SEQ ID NO: 140566 - DNA, 210 bp, Arabidopsis thaliana
cgtccgcggcagcgtgggcggacgagtgggcggacgcgtgggcggacgcgtgggcggacgcgtgggcggacgcgtgggtcttcgtcaaaggttgttctgtggactagatgggatctactgtatgtttctagggagattgaataatctctgtacattgaatcgacaatacggtttatctgggaagaactcaaacgaggcaatgtttgtgat

SEQ ID NO: 140567 - DNA, 448 bp, Arabidopsis thaliana
ttaaatcgaagctacattatcaaatcacaatggcgaaaaagctctgtttcattgttatgctatcaatatgtctcctaatttttgactttgcgggtgctcaggaggaatctccttcacctgctgctgtctcgccaggacgtgaaccttcaacggattctcctttgtcaccgtcttcatcaccggaagaagattctcctttgtcaccgtcttcatcaccggaagaagattctcctctcccaccatcttcatcaccggaagaagattctcctctggcaccgtcttcatcaccggaagtagattctcctctggcaccgtcttcttcaccagaagtagattcccctcagccaccgtcttcttcaccagaagcagattctcctctgccaccgtcttcttcaccagaagcgaattcccctcagtcaccggcttcatcaccgaaacctgaatccct

SEQ ID NO: 140568 - DNA, 456 bp, Arabidopsis thaliana
aaaattcttcatcgactcaaattcaaaaactcatctctctctatctctatttctctggttccatagctcaccgtcgcatcgcagatctactccttccgcaataaattttaccggcggaggtatcagatctcgccgatctgttgtagcagctactgtattttgggcttctcatttgatattggggaaacgaggagtagaggacgatggaaaatctgatctctctggttaacaagatacagagagcttgcacggctttaggagaccatggagactccagcgctttacctactctttgggattccttgcctgcgatcgccgtcgttggtggtcagagctcagggaagtcttcagtcctggagagcatcgtgggaaaggactttttaccccgtggatctggcattgttactcgaaggccccttgtcttacagttgcaaaagatcgatgatggaacccggg

SEQ ID NO: 140569 - DNA, 171 bp, Arabidopsis thaliana
cccaagcgtccgcccacgcgtccgcgaaaaaaatcaaaacccaaaccactatcttattgtttcgttagctagagagcaattgtgtctgttgaaagattttatgttattttggggaaattattacaaggcttgtatctgacttttatctttcttctaaaacattttactttc

SEQ ID NO: 140570 - DNA, 451 bp, Arabidopsis thaliana
ggtacctccacttagagagaagcagacagaacataactaaaatcgagaaaaatggcaaacagtggtgaaggtaaagtggtgtgtgtaacaggagcctccggttacatcgcctcatggctcgtcaagttcctacttagccgtggctacactgttaaggcctccgtccgtgatcccagtgatccgaaaaagacacaacacttagtttcactagaaggtgcaaaggaaagacttcacttgttcaaagcagaccttttggaacaaggttctttcgactctgctattgatggttgccatggagttttccacactgcttctccattttttaatgatgccaaagacccacaggctgaacttattgatcctgcggtcaaggggacgcttaacgttttgaattcgtgcgccaaagcctcttcggttaagagggttgttgtaacctcctccatggctgccg

SEQ ID NO: 140571 - DNA, 414 bp, Arabidopsis thaliana
gtcatgactgctccagttcgacctgacgtctggtaaagtgacggtggtggattgatcggtgctcatgtcaccgtcaagtccttggacggtgacaagaggtcgtgcggcggctgaggcaaccatcactttaccagacgtcatgactgctccagttcgacctgacattgtcaacttcgtccacgcccaaatctccaacaacagccgtcagccttacgcagtctccaaaaaggccggtcaccaaacctccgccgagtcctggggaaccggaagagccgtgtcacgtatccctcgtgttcctggtggtggaactcaccgtgccggtcaagcagcgttcggaaacatgtgtcgtggtggtcgtatgtttgctccgactaagatctggagacgctggcaccgtcgtgtcaatgtcaacat

SEQ ID NO: 140572 - DNA, 453 bp, Arabidopsis thaliana
tcgacccaggcctccgccgcagttgacgttcagatgaccaccgctgagttaaatccatttccgtctcgctccgttttctcggtgtcgacgttggcactggaagcgcccgtgccggtttgttcgatgataatgggaagcttctaggatctgctactagtccaatacagatttggaaggatggagactgtattgagcaatcttcaacagatatttggcatgcagtttgtgctgctgtgaaatctgcttgctctcttgcaaatgtttcggatgtggaagtgaaaggaataggctttgctgccacgtgctctctcgtggcggttgatgctgagggatctcctgttacagtgtcgtggagtggtgattcaagaagaaacattattgtatggatggaccatagagctgtaaagcaggcagagagaatcaactcatttaattctccagtcttgcagtact

SEQ ID NO: 140573 - DNA, 424 bp, Arabidopsis thaliana
ccggacaatttccatcttctaggtttctttctttctcagcaatttccaggaaaatggaagtgaaagctagagctcctgggaagatcatacttgcaggggaacacgctgttgttcatggatccaccgctgtagctgccgccattgatctctacacttacgttactctccgctttcctcttccatcagctgagaacaatgataggcttacacttcagctcaaggacatttccttggagttttcatggtccttagccagaatcaaagaagcgattccttatgattcaagcactctctgccgttctacgccggcttcatgttcagaggagacccttaaatcaattgcagttttggttgaagagcaaaatcttccaaaggaaaagatgtggctctcctctgggatctccacgtttctctggttatacac

SEQ ID NO: 140574 - DNA, 446 bp, Arabidopsis thaliana
gattatcagggtctttctagatgaatggaaacctgtaataatggaactctcaaatagagaacctgagttacttttgactctactcaaggaagtccttgatatgatccaaaataatgaacggagaagacatgaaaccgaaaagccagtggaagaggtttctcaagttgagcaggtccctttcttgtttgcatggcttgtgagtcttctcaatggatcaaagcattttcagagaaacagttctctagaagtgaaacctccaagcattttccttatggaacttatacgtagatgtcttgtcttgggagccttaggatatgagctggttttgaaatcagcatttctactcgcagagattgtgggaggccgtgtcttaaaggagaagctcataaaacttcctcttatgcataaaagctctgcaattgttccattgaaacagagttctactc

SEQ ID NO: 140575 - DNA, 428 bp, Arabidopsis thaliana
attgaatctcacgatttcttatcaatggaactcgcttctctttctcagatccccatccaaatcgttttataggtagattagatagataaactacggatatactcgaactctatccatttacggtattgatttggaaatatggacaagtatgacgttgtcaaggatctgggagctggaaatttcggtgtggctcgccttctcaggcacaaggacaccaaagagcttgttgccatgaaatacatcgagagaggtcgcaagatagatgagaacgtggcgagagagattattaatcacagatcacttaaacatcctaatatcatccggttcaaggaggtgatcctgacacctactcatcttgctattgtgatggagtatgcttctggaggagagctctttgatcgaatctgtactgccggtagatttagtga

SEQ ID NO: 140576 - DNA, 441 bp, Arabidopsis thaliana
cttaatagtgtattctttatacgtataataacatcccttgtgatcaaacaagtaaaccattcaaaagatgaaaggaagaattttgattttgagtttgctcataatgagtctggtcatggcacaagttcaagtagaagcaaagatctgctgcccttccaaccaagctagaaatggctatagtgtatgccgtataaggttttccaagggcaggtgtatgcaagtgagtggatgccaaaactctgatacatgccctcgaggttgggtaaacgccattctcgaaaactcagctgatgctaccaatgagcactgcaagttagggtgtgaaacttctgtgtgtggtgccatgaacactctccagaactctgatgcaagtgaaattgtgaatggagcgtcggaacaatgtgccaagggatgttctattttctgtaccaagagctatgt

SEQ ID NO: 140577 - DNA, 265 bp, Arabidopsis thaliana
cggaaaacacggctctcgcatcgatgaagaacgtagcgaaatgcgatacttggtgtgaattgcagaatcccgtgaaccatcgagtctttgaacgcaagttgcgccccaagccttctggccgagggcacgtctgcctgggtgtcacaaatcgtcgtccctcaccatcctttgctgatgcgggacggaagctggtctcccgtgtgttaccgcacgcggttggcctaaatccgagccaaggacgcctggagcgtaccgacatgcggtg

SEQ ID NO: 140578 - DNA, 451 bp, Arabidopsis thaliana
ataaaacaatctcaatactaatggctactaccaagctcgtctacattctcctcatcctattcaccttcaccgtatctccggcgatctcaacggccccggaacattgtgatagcggctttgataacccgtgcatcaacaaagctaaggctttaccactcaaaatcgtagccattgttgccatacttacaacaagcttgataggcgtgacctctcctcttttcagccgttacatttcgttcctccgtcccgatggcaatggtttcatgatcgtcaaatgtttttcttctggaatcatccttggaaccggtttcatgcacgtcttgcctgactctttcgagatgttgtcatcgaaatgtcttagtgataatccgtggcataagttcccttttgcgggttttgtcgctatgatgtccggtctagtcactctagccattgactccattaccaccag

SEQ ID NO: 140579 - DNA, 449 bp, Arabidopsis thaliana
agcggacgcgtgggcggacgcgtgggcggcagtttgggcgatgtgctgttattggtaactctggtgatctcttaaaaacaaagttcggaaaggagatagatacttatgatacggttctaagagaaaatggtgctcctattcagaactacaaggaatatgtgggagagaaaagtacattccgtcttcttaatagagggtcagcaaaagcccttgacaaagtcgtggagttggatgaaaaaaagcaagaggtcctgctcgtcaaaacaacaatacatgatattatgaacaagatgattcgggaagtcccaataaaaaatcctgtgtacttaatgctcggtgcttcatttggctcagcagccaaaggaactgggctcaaggctcttgagtttgctctctcgacgtgtgattcagtggatatgtatggattcacagtggattcaggctataaa

SEQ ID NO: 140580 - DNA, 445 bp, Arabidopsis thaliana
cccaagcgtccgcatcccttcgctcaatgtctctgctggtcttttgggtttcttctttgtcaagacatggactaagatgctccataggtctggtctcttgaaacagccatttactcgccaggagaatactgttattcagacctgtgttgttgcctcttctggcattgccttcagcggaggttttgggacatacctctttggcatgagtgaacgaattgcgacccaatcaggagatgtatcccgtggcgtcaaggacccttctttgggttggattatcggtttcctctttgtcgtcagctttcttggcctcttctcagttgtccccctgcgaaagataatggtaatagacttcaaactaacatacccaagtggtactgcaacagctcatcttatcaacagctttcacacccctcaaggcgccaagctagccaagaaacaagtgagg

SEQ ID NO: 140581 - DNA, 396 bp, Arabidopsis thaliana
gcactaccatggaggttgccaagttggaagagtggttgacaagaattacagagtcttaggcattgattccttaagggtcatcgatggatccacatttctcaagtctccggggactaatcctcaagctactgttatgatgctcggaaggtatatgggccaaaggattcttcaagagagggagatatacaacaaaccggataaagaagcgtgagatattacttgttttgagaaaatcttgatcttggaattgttttaatcaatgtatgattaacttaaagagtatgaatgtgtacatctgttcatgttctgtttctaatatgtataataatggtggaattatggtacttggggcttctagttttgcagaatttcggaatatgagtctagtattatcca

SEQ ID NO: 140582 - DNA, 449 bp, Arabidopsis thaliana
  unsure (1)..(449): unsure at all n locations
ctctatttcattattaatcttcccgtctataattcattaattctcgttagcagcttcttcttcgttggattcgtaaaatggatggatttggagctaactacgagtgtttgttctttgatatggacgatactttataccctttgagcatcggaatcaacttagcttgtcgaaacaacatccaagagttcatgcttaaccaactcggaatcgaagagagtgaagttccaaagttgtgtttggatctttacaaagaatatggaaccaccatggctggtctcaaggttatgggttacgaattcgacaacgatgaattccatgaatatgtccatggaagacttccctacgagaaactaaaacctgatccactcctccgtaaccttctcctctctatgcctcaccgtanaatcatctttactaacgcagacaaagctcacgcaacacgagctctc

SEQ ID NO: 140583 - DNA, 425 bp, Arabidopsis thaliana
aaaaatcactctccattttgattttcgtatctctcgtgtcacactcacacaaaacacaatcttcctcaaaaaaaattttgtgcaatctgatttgattttcactgtctttctaagtttcgaaacggtggattttgtccgtacgtggttttgattctcgtagatgtcgaagctctgacgtaagattagagtttcgatttctaggtttcttataactatggcggtggaatatgaatgctgcgggaccagcttcttcatacacatcgctgtgatagtgttactagtcttgttcgctggactaatgtctggtcttactttgggtcttatgtctatgagtctcgttgatcttgaggttcttgctaaatccggtactcccagagatcgtatccatgctgcaaagattttaccagttgtgaaaaatcagcatc

SEQ ID NO: 140584 - DNA, 435 bp, Arabidopsis thaliana
gaaacagattgaaatttgtcaggaagagaatagaattatagacaagatgcacagacagaaggttgcagaagttgaaaagcttatgcagagtgttcgggaattagaagaagctgttcttgctggtggtgcagccgcaaacgcagtgagagattaccaaaggaaattccaagaaatgaatgaagagaggaaaatccttgaacgggaattggcccgtgcgaaggtaaatgcaaacagagttgctactgttgtagctaacgaatggaaagattctaatgacaaagtgatgcctgtaaggcagtggcttgaagaacgtagatttttgcagggagaaatgcaacaactacgcgacaaacttgccatagctgaccgagctgcaaaatctgaagctcagctgaaggagaaatttttactgcggcttagagtgttagaagagag

SEQ ID NO: 140585 - DNA, 438 bp, Arabidopsis thaliana
aacgttattaaccgattaaagaacgacatcaaattgttgtactctttgggagcgagtaaattcgtggttcaattgctagcaccattgggatgcttaccgatcgtgagacaagaatacaaaaccggcaacgagtgttacgagctgctcaatgatttggccaaacaacataacggaaaaatcggtccaatgttaaacgaatttgctaaaattagtactagcccctatggttttcagttcaccgtcttcgatttctacaacgccgttcttcgtaggattgcgacaggaagaagtcttaactacagattcttcgtaacgaatacttcgtgttgcggtgttgggacacacaatgcatatggttgcggaaagggaaacgtgcactcgaagctatgtgagtaccaaagatcttacttcttcttcgatggacgtcacaacacagag

SEQ ID NO: 140586 - DNA, 461 bp, Arabidopsis thaliana
tcgaccacgcgtccgaagatttggatttgcattcctcttctctctcgccgctctcaatatgcttcgatttctattctcctcttcctcttgattttgtcttcttctctttgctgcggagagattaagaaacccaagggttttaagcaagagacgcggcgaggaagctatccagaactctctgaaacatccattcctttttctcatggacgtagtgttgccggaaactgccgtggtaaccggtggttcggttatcggagattatggatttaatgtggatccttttctcgttgaggcgttgcacaactctcgccatcgtctcacgattttgcggatggaacttgatgttcaaaggttgttgcagaaccctgaacagcagcagtttgagttccagcattttcctacttcgtatcttcgtcttgcagcccatcgtgttgctaaccattatgggctagctacagctg

SEQ ID NO: 140587 - DNA, 415 bp, Arabidopsis thaliana
cccacgcgtccgcccacgcgtccggaagaccaaagagaacaaaaagagaaaaagagaaagatgaggttgttcgatccatggccagtgttcttcaagagagaatggaaacgttgttggccgtttctcaccggattcgccgttaccggcgttctcatcaccaagctcaccgctggactcactgaggaagacgccaagaactccaagtttgtccaacaacacaggcggtgatctactgacgtgagttgtcgaagctgagaagccgaagcgttcttatggaaactactgagagtgcttcagctttcaaacctgttctaataacatgaaagagaggattatagacactatcaatctctcgtttccttttctctgtgttttcacaactcttgaacagtgcaaattctactctgtttatcca

SEQ ID NO: 140588 - DNA, 355 bp, Arabidopsis thaliana
ctcaagatcaatggcggctgaaatggcgttagtgaaacccatctccaagttctcttccccaaagctctcaaacccgagcaaattcctcttcctcaccgcctcctccaaccaccgccacctcgaagtccaagaagggaacgaagaaagagattcaagagtcgcttcttactccgaggttctacacgacggacttcgaggaaatggaacagcttttcaacacggagatcaacaagaaccttaacgaagcagagttcgaggctctgcttcaagagttcaagaccgattacaaccagacacatttcgtgaggaacaaggagtttaaagaagctgcagacaaattgcaaggacctctccg

SEQ ID NO: 140589 - DNA, 435 bp, Arabidopsis thaliana
cacaagcgtccgctctcttcttactctcaccatatctgctctctctctctctctgtttcaagcttttgctcccatttttcatttccttcgtattctcgctcgagcttagcggttgatgtaccaatgaccaaatcgatatttgaatcgccgtggctacctttctttttcttctgatttctctatctctcgcttgattctaccacttttagggtttctattattcccagggactttgggtttctttaagaagttcgattcgtctccgttttctttttagggttaacgaagtctgtggtgttggatttcgatctttttttttttggtatcttccccattgactgttgcggtgataagagagtgacgcaatggtgtctaagaatgatcatatcgagactttattcaattcaatccaactagttaaagatgttgttcttc

SEQ ID NO: 140590 - DNA, 430 bp, Arabidopsis thaliana
cgacatttatgttcaagggattttgttggagagggactttaacatagcacagagagcaggtggagttggtaaaccgttcctaaggcaagttgatgaagttcaagtgaatggaagtacgttggagattcatttgaagtggacaggaaaaggcacaaacgtaataccaacaagaggtgtttacgggcctctcatatccgctataaccgtcacaccgaatttcaaggttgataccggaaaaccattgtccaatggagtagttgcaggcattgtaatcgcagcgtgtgtagctttcgggttgctggtacttgtaatcctcaggctaacaggttacttaggtggaaaagaagtggatgaaaatgaagagcttcggggactcgatttgcagacaggatcgttcacattgaagcaaatcaaacgtgctactaacaac

SEQ ID NO: 140591 - DNA, 354 bp, Arabidopsis thaliana
cactatgtgtgtgatggcgtgccctagaaactccataacatacaacgccacgcgctgcgcgtgcggtatcggtcagctactaaaccggagctccgggagctgcgagatcttcggttggccgtcaacaatctccacagacaaagatgtaaactacagcgtaatatcattcgccgagactttattcgctttcgataggatccgtaagttcacgcaatctcaagctattttcttagaagctacgctcgtgatgcttctctcctggttagtcttttgtttcttcctgagattcagcaaactcggcgatggtcgtaatgtctggtttaatctccgttggtggattactcgacttgacgt

SEQ ID NO: 140592 - DNA, 413 bp, Arabidopsis thaliana
gaccatacaaagcctatggcgaggtttccgacttctccggcgcctaaccgcctcttgaggctcttctcttccaacaaacggtcgtcatctcctactgccgcgcttttaaccggagattttcagctgattcgtcatttctccgccggaaccgctgctcgtgttgccaaggatgagaaggaaccatggtggaaagaatccatggacaagcttcgcaacatcgggatctcagctcatatagactctggaaagactacgttgactgaacgtgttctcttctataccggtcggatccatgagatccacgaagtcagaggtagagatggcgtcggcgctaaaatggattccatggacttagaacgagagataggtatcaccatccaatcagccgctacctacggtacttggaaggatta

SEQ ID NO: 140593 - DNA, 405 bp, Arabidopsis thaliana
cccaagcgtccggttttgccttggcctcgatgatggtttctggaaattgataagacttacttcttcagctgcaaaagacttctttttaccgaaacaagtcagtgacaattatataagttatgtcaaatggaagtttttgcacagagttttcagctctgctttacaagttcttgccactcaggcaatgtttagagcaataggaattggacaatctcggtcactagcttcatctgctgcttttaactggattttgaaagatggacttggaaggttaagtagatgtatatacactgctagtcttgcttctgcttttgacactaatttgaagagagttaggttctcgacgtctgtactcttcagtctaagcattggagttgagttaatgactccagtattccctcagta

SEQ ID NO: 140594 - DNA, 251 bp, Arabidopsis thaliana
acgcgtccgaaacactaaaaatcatacctttttttttactcctcattccccaatttagggtcggtctgtgtgattttggatttcatgagattttgatagtcgaccacccgtcgatctttggcggcactcgatctatggttcactgtaacttttgaattttgagactaatcttcgtagcctggtcgatccattttcacgaactgaagaatcagatagattgcttctgagcctcccgtcatgtattctctgat

SEQ ID NO: 140595 - DNA, 212 bp, Arabidopsis thaliana
cgcaattgaaagaaaaaaaaaaacgagaagcgttttctttctctccaaaatccattactcgcgaactttcctctgctaaggtattctttaaccttgtcaacacactagccttaagtgttcactagaaagaggtggtgattatgagttcaagcgaagcgtttcccgtgatgcaggagatcatgcttgagtttcgtgctgggaagatgtctttg

SEQ ID NO: 140596 - DNA, 88 bp, Arabidopsis thaliana
cattaatgtgttatttatttatattcatgtgaatttgtaacaaaaatattttgtggatgttttctatagatttattgtttcaactttc

SEQ ID NO: 140597 - DNA, 260 bp, Arabidopsis thaliana
cgcgtccgcctagtcaaccgatatactgtttggattagtcaaggtcctttcatgtgcctcatccacaataacgacactgtagctggccaggtctggctcaccaagcagctcgcgcaaaagcattccatcagtcatatacttcagaactgttttgtctgaagtacaatcctcaaatcgaatggaatagccaacctcatgtccgagtttgacacccatctcttgagccacacgggcagctacactcatagctgcaactcttc

SEQ ID NO: 140598 - DNA, 272 bp, Arabidopsis thaliana
cgaaagcatcttcttcatcaattgatctactctgctctgctcaagatcagaaatcgtcggtttagttctccggttaaaagtttcgtctctgcgggaattggaacttcaatggagggattaaagctctcagaagcggaattgatgatttttattcatccttcccagagcagaaacgtttttcaaggaatttgtcgcgagctcagttctcttctattccagttcgttctttttcttcctcctatttacttcttctttggtttcaagttttgatt

SEQ ID NO: 140599 - DNA, 453 bp, Arabidopsis thaliana
gcgaattttgcacatttctagggttccaatcaaaatctatctgcaacaaaaatggctaatcgtttcagatcagggatctccttcttcaagaccatcgccgtaacagattctgtctcctccgttagatccaagtcgcttttcccagcgttgagaacttatgcaactgcttctgctcaaacaaccgctaatgttaaggtgcctattgctttagttggtgaaaatgggaactttgcttcatggctatacattgcagctgtgaaaatgaattccttggaaaagattgagacggatctttctgagatgattgaggcaatgaagacagctcctatttttgctcagtttacaaaggattcctctgttcctagagggacaagattggctgctattaaggatgcttgtgatcaagcaaagtttgccgaacccactaagaacttcctctctttgttagctgag

SEQ ID NO: 140600 - DNA, 449 bp, Arabidopsis thaliana
  unsure (1)..(449): unsure at all n locations
ggtcgacccatacgtccgcttgtcttgtttgtcgtgcaagtaacaaagatcaagatgatatcaagattttctcttcttctgttcttgttcttggtcatagttcctctatcaaaatcttcaatcttcaaaaccttcatcaaatcctctccttcctcagtcgtcttccctctctccggcaacgtcttccctctcggatactactcagtcttaatgcaaataggaagccctccaaaggcatttcaatttgatattgataccggaagcgatctcacttgggttcaatgtgatgctccttgcagtggttgcactttgcctcctaatcttcagtacaagcctaaaggaaacattatcncgtgctcaaacccgatctgtacagctcttcactggcctaacaagcctcattgcccaaacccgcaagaacaatgtgactatgaagttaaatatgctga

SEQ ID NO: 140601 - DNA, 443 bp, Arabidopsis thaliana
gttcagtgttctctctctcgcgcgaagcggttctctttcttttgtttatttgtttttatttgtttttctcttatacggaggagagaagatggtggcgcctgctttgttaccggagctctggacggagatccttgtaccgatttgtgcggtgattggtatcgccttttcgcttttccaatggtacgttgtatctcgcgtgaaactcacctctgacctcggcgcatcgtcttccggtggagctaacaatgggaagaatggatacggtgattatctaatcgaggaagaggaaggtgttaatgaccagagtgttgtcgctaagtgcgctgagattcagactgctatttccgaaggtgcaacttcattcctattcacggagtacaaatatgttggtgtcttcatgattttctttgctgctgttatctttgttttcctcggctctgttg

SEQ ID NO: 140602 - DNA, 362 bp, Arabidopsis thaliana
acgatcaaatttccgtttttgctaccgtcgtctctggtcagactcagaggaaacacggagcttgagcaactgacaagactgtttcgtgtttggggctttcgaagagagtagggagattcgcgggtttcgtcaattcctgggttttctctagattgctgtttcggtggtgttttcttttgaggatttaagggaaacatggaacccaacaaggatgataatgtttcattagcagcaacagctcaaatttcagcacctccagttctacaagatgcctcgtctctgccaggtttctctgccattccacctgtggttcctccttcttttcccccaccaatggctccaatacctatgatgccacatcc

SEQ ID NO: 140603 - DNA, 415 bp, Arabidopsis thaliana
cgtgaagctactttgtaattataaagatttattgtttcccataaactggttaaatgattttagaaactaaagtaaaatgagcttgacactagagtttctgcttcttctgattgtacttatcttgagtcaccatgctcattctggctctattgtcaaattccttcctggttttgaaggcccccttccttttgaactcgaaaccgggtacattggtattggtgaggaagaggaagtgcaattattctactatttcatcaaatctgagaagaatccagaagaagaccctcttcttctatggttaagtggaggacctggatgttcctctcttactggccttctttttgagaatggtatatctataatatttcgctaagcattactagaataacttgtttacagccgggggaaataaata

SEQ ID NO: 140604 - DNA, 412 bp, Arabidopsis thaliana
gctgtatgtaatgcagagcttcacacagattatggtggtgctgcagtgagatgggggcttacacatcataaagagagtgcagctgattgttgccaggcttgcttagaccaggcaaagcgtgcgaaacctggagaaacgagatgcaatatttgggtttattgcccatctgagtttggttgtttctctccagatatttatgagcataaacatcaggagtgttggcttaaatacgcagagaagccaaaacagaatttcaaagacagatattctgagacatacagaaacaaccacccaaaagcgccatctatcgttccatgggtttcaggtgttgtaacggcttgagcaaaacccatgtggacagattgatgggagaaataggagatagttttggtttttttttctcagctgtgtt

SEQ ID NO: 140605 - DNA, 445 bp, Arabidopsis thaliana
ctaaaaagcaaattctctggaagaagaagaagacgaagatgcaaccgacagagacgtcgcagccggcgccgtcggatcaaggccgccggcttaaggatcagttaccggagagtatgagcttcagtagccaaatgaagaaggaagacgatgagttgtcgatgaaagctttgtcggcgttcaaggccaaagaagaggagatcgagaagaagaagatggagatcagagaaagagttcaagctcagcttggtcgtgttgaagatgagtccaagcgtctcgctatgattcgcgaggaacttgaaggttttgctgatcccatgaggaaggaagttactatggtgaggaagaagattgattctctcgacaaagaattaaagccattggggaatacagttcagaaaaaggaaacagagtacaatgatgctcttgaagcattcaatgaaaagaa

SEQ ID NO: 140606 - DNA, 342 bp, Arabidopsis thaliana
atcagggttttcctcggaacctaaaagagttatattttgctggcactacgttaagagaagtgccccaacttcctttaagcctagaggtcttgaatgcacatggttctgaggcggagaagcttcctatgcattacaagttcaacaattttttcgatctatctcaacaagtggtcaacgattttttattgaaaacgctgacttatgtaaaacacataccaagagggtatacgcaggaactcatcaacaaagctccgactttcatcttcagtgcgccctcacatacaaatcaaaacgccacatttgatctgcaatcaggatcttctgtaatgacacgactaaatc

SEQ ID NO: 140607 - DNA, 399 bp, Arabidopsis thaliana
acgaccacgcgtccgcttctcatctcctagacaaacgaaactcatgacatgagaagaaaattttggagggtgtttataaactataatataatacacatcaaatctttgacacgagtaccaacttgaacaacaagaagaagctgcattgatcttcccaaaagatcctccatggctcaaggcatggatggttcctgtgatgatgcttttcgttttctttgtattttcaattgtaggaatttgtcaacgttgtcgcaattgtcgccgtggtgaaaattctcccagcattcatcctattaactaattatttaatttagatttattttttcctttttgttttctttctataatatgtaaatcattgttggtgaaatgtcaaagtttacagtttcaccatatcga

SEQ ID NO: 140608 - DNA, 458 bp, Arabidopsis thaliana
caagacatccgtataagaaaaatggcacaagctacgcgtcagtcttctctacaaggggaacttgaggtagatattgagatcaaagcatcggcaaagaagttccatcacatgctctctggaagaccacaagatgttgcgaaagccactcctgacatccagggatgtgctttgcatgagggagagtttggcaaagttggcagtgtcatattctggaactatgctattgatgggcagcccaaggtggcgagggagaggatcgaggcagtggatcaggagaagaatctgttagtgctcagggtaatagatggagatctgacgaaagagttcaagagcttcttggtcactatccaggcaaccccaaagctaagaggaccgggaagtgtggttaagtgtcacttaaaatatgagaggattgacgagaaggtggctcctccggagaagctgctcgagttgtttgc

SEQ ID NO: 140609 - DNA, 413 bp, Arabidopsis thaliana
ggggagacctatgatctgtgcaatcaagggagatccagaagatgcctttaagaagactgtcgaaatcgatcggatgattgatgctcttagagatgcaaaccctagacaagttgagaagattgttgttgaaaatatccttgcttttgatgaggttttttggataagactagcagctaggtcggatacttgtaaatcagaagatgacaagaaggactatgaggagttagctacaactgtgatgactatagttgactgtgttgtgaataagactcgggaaaagatagagacgtctactgatattctgaaagggattttaagacctgctatagatggagtggaagagatttcatggccgccaagagatcctgaagccatcaatctaatgaaaaaggaaattatacaacgggaaaaag

SEQ ID NO: 140610 - DNA, 446 bp, Arabidopsis thaliana
cccaagcgtccggttgaatcaaagcagagaagaagaagaagacgatcatgaatccagattccgattatcctcatctccctaacatcaagatccaccatccttcatctcctcgtcactctcagcaccactcttcctccactccttccgccgctactcctaccccaaccgccggtgctcgccgtaagatcggagtcgccgttgacctttccgaagaaagcgctttcgctgttcgctgggctgtcgatcattacatccgtcccggagacgccgtcgtcattctccacgtttctccaacctccgttctcttcggcgccgattggggacctctccctctccaaactcctcctcctccttccgccgctaccgatcccggagctcagccgaagcctagtcaggaagatttcgatgcgtttacttcttccaaagtagcggatctagcgaagccg

SEQ ID NO: 140611 - DNA, 363 bp, Arabidopsis thaliana
ctgatcttcctgcatcgatggtttccgagttgttatgggcttgggaatctcttaaggtagcaacatgttgtaagtctctagttattgtctacaatggaatttgccttattcaaattgggatggtagctgaatctccagaagataagaaaacagtcatagtaaagaccgataagttgatgcaaggatcggtttacagaggggttatgaaatccaaagcacagagttacttggctaatctttctctttatcctgggagatcagagctgccatttctacctgcaaatacacaggcggtgattttgcagccgcttggagataaaggaatcgcagtcattggtggaaatacgattagaggattcacgt

SEQ ID NO: 140612 - DNA, 142 bp, Arabidopsis thaliana
gtagaaccgttggatgaatctggaactgatgagaaaagtttgatgtctgagacgaagtacaagttcaaaactgagaagcctccgatgggtaatgtaacacgcattggtggaagtaaaggaattgatgagattatgtctggga

SEQ ID NO: 140613 - DNA, 367 bp, Arabidopsis thaliana
cccacgcgtccgacgccacaagatcctaaggcctctcacggatctctcttaagatcaatcgccgcggctcatgacgcagtcgcctgttcaaccgcctccgccgctcccagctcagccgcattccgccgccggaggtgtaataagaggcgatgtacaggttaggtgcgcaggctgtcgcgtgattctgagggtgaaaaccggcgttgtggagttctcgtgtccgacttgtcaacttccccaaatgttgccgccggagcttctttctagggcacggccgcagtttccgcagtctccacaacaaccaccacagccaattcagacgcttccgccaccgattcaacagcagcttaagcctcttaatctacct

SEQ ID NO: 140614 - DNA, 326 bp, Arabidopsis thaliana
gaaagatctcaacttttttcaacccaaatcttcagatctggaggaacgaaacagtaagagattgaaatcaaacatggaagaagatgaatcaacaacaccgaagaagaagtcagattctcagctgaatcttcgaccgtcgatgaatcgtccgacggtgtcactcgagtcacgaatcaagcgtttaatcgattcgaatcattatcactctccttcgaaacctatttactcagataggtttattccaagtagatctggttccaatttcgcgcttttcgatttggcatcttcttcgccgaataagaaagatgggaaagaagatggggctg

SEQ ID NO: 140615 - DNA, 433 bp, Arabidopsis thaliana
ctaatattttttgtacacttagactaaggaaagcaaagtttcatattcctaaaaattctggttttataagtatcaaagacaaattcagtctccatggaaatagagcaaagaaggatcatgaagagagaaggagaagaagaagaagacaacaatcaactttcactgcaagaagaagaaccagatacagaggaagagatgtctgggaggacaatcgaaccgtggacgaagcagataacggtgagaggagtgttcgtgagcatagtgatcggagttgtgttcagtgtgattgctcagaagctaaatctcacgacaggaattgttccaaatctcaacagctctgcagctttacttgcttttgtctttgtccagacttggactaagattctcaagaaatcaggatttgttgcgaaaacattcacaagacaagagaaca

SEQ ID NO: 140616 - DNA, 306 bp, Arabidopsis thaliana
cggacgagtgggtcgaaatatcgataatttcatggaggagttgaaacgtgaacacgaaatgagagatagaccaaaccaggatcgtgaccgtcagggcgatagctcgccatctagccggtttgatgagctacctgatgattttgatcccagtgggaggccaggatcgtttgacgatggtgacccacgaactacgaatctgtatgttgggaatctgtccccaaaggttgatgagaatttccttctgcgcacgttcggaagatttgggcccatagctagtgtcaggattatgtggccaggaacagatga

SEQ ID NO: 140617 - DNA, 382 bp, Arabidopsis thaliana
gtcgaccacgcgtccggtttaagaagatgtattcgatgttttcatggaaaattgtgggaagtttgaccgtgatgatatatatggtttaatatctctttacgaagcatcatatctttcgacaaaattggataaaaacctgcaaatattcatcagaccttttgctacacaacaactcagagactttgttgatactcatagtaatgaagattttgggtcgtgtgacatggtggaaattgtggtccaagcgttggatatgccctactattggcaaatgagaaagctatccaccagatggtacatagatgtgtatggaaaaagacaaaattataagaaccttgtcgtcgttgaatttgccaagattgatttcaacatcgtacaagct

SEQ ID NO: 140618 - DNA, 231 bp, Arabidopsis thaliana
  unsure (1)..(231): unsure at all n locations
tttttggcatcacanatccattgtaggagcggaatacatgtttcacaacgtttggaggggtcaaagcaaggagatggtaagtcaggtgatacgagcttcaatgtgcttcgtcgcgtgctttcgccaaaggagaaagatctaatcaagaagctccccggacaaccttccggcgttagttttagacagtatggcggttatgtgcccgtaaacgaaacatccagtcggtttttg

SEQ ID NO: 140619 - DNA, 432 bp, Arabidopsis thaliana
atttgcctccttgaaaatttccaatgacgaagaaactcaatccactggaagatccaccaacggcaacttcaagcgacgaagatgacgtcgagacttccgaagctggtgaagcttcagacgattcctcttcatctgaagaagacgtaccaatcaaaattcgaatcaaatccccttccgccacaaccgccgccgctcctccagctaaatccaccgccgtctccaccgccgctgattcagattctggatccgagactgaaacagattcggattctgaatcaacaaatccaccgaattctggatctgggaagacaatcgctttaaacacagtgaatctaaagaagaaagaggatccaacgtcgtcgtcagctactttagctttaccggcgatgaaatcaggaacaaaacggccagcgagtgaagctgctgctacga

SEQ ID NO: 140620 - DNA, 256 bp, Arabidopsis thaliana
agtaaacaaaactaccaaaaaaaaaaacagaaaaaaacctttcaggtctcaactagcaatggagatgaagaagattgcctgcggagtcgttttcgctgctgcttccatgaccgccgtcatggctgcagaggtcggagcacctgcaccaggacccgccgcaagtggagcctccgtagctgttccggctcttggctctttggttggagcttcccttgtgtctctcttcgcctactacttgaactaagcttttctattt

SEQ ID NO: 140621 - DNA, 441 bp, Arabidopsis thaliana
gagacagtagtaagaaagaagaagaagaaaaatggaagatacgaagaagaaaaagaagaagaatattaacaacaaccaagattccaagaaaaaagagcgtcatattgttacttggtcacaagaggaagatgttatactaagagaacaaataactctacatggaactgaaaattgggcgatcattgcatcaaagttcaaagacaaaagcacaagacaatgcagaagaagatggtatacatacttaaactctgatttcaaaagaggaggttggtcccctgaagaagatatgcttttgtgtgaggcacaaagagtatttggtaatagatggactgagatagcaaaggtggtttcaggcagaactgataatgctgtgaagaacaggtttacaacactttgtaagaagagagccaagcatgaagctatgactaaagacagcaactc

SEQ ID NO: 140622 - DNA, 394 bp, Arabidopsis thaliana
tttaatggtatgcctaaaccattggtgtttaagagtaataaggatcagtttaagtttgtggagccgcggctaacttatgggacgattggtggacggtttaggaaaggcgagaatccgtttgtcgaagaagcgtatcagcgagttgcgttggatcagttgcttaggattgctggtattcaagaagatgatttgttgataatgtctgatgttgatgagattcctagtgctcatactatcaatcttttgagatggtgtgatgatattcctccagttcttcaccttcagttgaagaattatttgtattctttcgaatactatgtcgatagcaagagctggagagcgtctatacaccgttacagtccagggaaaacgcggtatgctcatttccgtcaga

SEQ ID NO: 140623 - DNA, 381 bp, Arabidopsis thaliana
cccaagcgtacgggaaacagagaggtttggttttgcgttgcgtgagctgtttcctctttaactctctcttcttctacctcttgaccctctctctctctctctggtgatgcggtttcttccttggaagccatgaaaacacaatcagcttcaccgttcttcttcgtctccttcttcttcttcttcttcttcttctcttctctgtttcttctctcctctgctttaaactctgatggagttctcttactgagtttcaaatactctgttcttcttgatcctctctctttattacaatcatggaactacgaccacgacaatccttgttcatggcgaggtgtgttgtgtaataacgattcaagagttgttactttatctctcccaaac

SEQ ID NO: 140624 - DNA, 443 bp, Arabidopsis thaliana
gtaaagagagaagatagaaacataaaatgtcggagaagaagggaaggaaagaggaggtggtgaccagagagtacaccatcaaccttcacagacgccttcatagctgtacctttaagaagaaggctccaaaggcgatcaaggagataaggaagtttgctgagaaggaaatggggacaaaggatgtgagagtggatgttaaattgaacaagcagatttggagcaaaggtatcagaggtcctccgaggagaatcagagtccgagttgctcgtaagagaaatgatgatgaagatgcaaaggaagagttcttctctcttgtcactgttgctgaaatccctgctgaaggactctctggcctcggcactaagatcattgaagaagaggattaaactatcttatagtaacaacaacatttgatcagatttttcgagttttgtttttcgaat

SEQ ID NO: 140625 - DNA, 420 bp, Arabidopsis thaliana
cgcaatgttcgtcggcgacgacgactcagttcagattgttcggcttcttgaccagacgcttacttctattgatggcgtttctgtccgcgaggcgacggaggctctggatctactgtctacgaagctccctcatttcccttatcgtcttctctccatcgcttccggaagtgaaaatccaagcctgaaagttgctgctgcaacatatctgaagaattttaccagaaagagcactggcactgaagggacaatctcagaagtcagcaaggagtttaaggatcagctcctcctagctttgcttcaggcagagcctgcagttcttaaagtcttacttgaactgctgcacattgttgttgtgtcagaatttgttaggaaaaatgcatggcctaaacttgtaccggagctgcgctctgctatcgagaa

SEQ ID NO: 140626 - DNA, 432 bp, Arabidopsis thaliana
  unsure (1)..(432): unsure at all n locations
atcaagcgcgatcgtatgttgaaatactcccggtctcaacgggagagaagaagtcctcatatgcttgtggagtcactgtacgctaaggatatggggatgagaagctgtcggctggaacattggggtgaatccaagtctgcaaaatccatcaactcatttctcattccaagtgaaatgcttgtccctacaaaagtaaagcttagatctttgcagagacaagactctggtgatggacaagactctccattttctttcccaaggagatctttcagccgtttggagcagagtatattggaagacgagagctggtttcaaagatccaatggtttccagccgtacatgagtgtgacagagtctgcaagggaaaagatgagatcactgagcacaccaaggcaacgtgtanggatcatggattctttgtttgataactac

SEQ ID NO: 140627 - DNA, 440 bp, Arabidopsis thaliana
cttattcttcttcgccttctctctgagtcgaactcgctccgatcgactgagccaactcgcccgccttctgtaatgatcatttcctctacattgtacaaaaaaagagtgttgtaatgactcgttccgggagacgatggtcggagcgacggtgagagttacagttttctttccggcgaccaatactctcggcggcggagatgtttaagtcagcgagatggcgtagcgagaagaacaggatcaaagtcgttttcagattgaagtttcatgcgactcaggcgtcacagttcaatacagagggattgattctgtctctagttcccggagatattggaaaaccgacggcgaggtcagagaaagctattgtgaacgacggacattgccggtgggagattccggtttacgagactgtgaaatttctcaaagatgtaaaaactggaaaa

SEQ ID NO: 140628 - DNA, 440 bp, Arabidopsis thaliana
atcatcttcttcttcttcctctctgtatttttctcattctcttcgatttgtttgcttgctagtgactagtgagtgagagagtatggagagaagtactccggtgagaaagccacacacatcgaccgcagatctacttacttggtcggaagttccaccgccggattctccttcctccgcttctcgctccgccgttcgttcccaccagccatcggatgggattagcaaagtggtgtttggtggtcaagtcaccgatgaagaagttgagagcttgaaccgcaggaagccttgctcagaacataaaatgaaggagataactggcagtgggatcttttctcgtaacgaaaaagatgatgcgtcagagccattaccagtttatcagcaagcagttaatggtataagccagatatcatttggtgaagaggaaaatctatctcctaaaa

SEQ ID NO: 140629 - DNA, 439 bp, Arabidopsis thaliana
tttatctctctatctctaaactttcacctaagatcgatcaatggccaagggaagaggcagtgcatcatggtcggctcgagccatagtgactctcatggctgtgtcagtgttgttgcttcaagctgactacgttcaagctgcaacgtacacggtcggtgactctggtatctggacctttaacgctgtgggttggcctaaaggcaaacactttagagccggcgacgttcttgtgtttaactataatccgaggatgcacaacgtagtgaaggtagatagcggaagttacaacaactgcaaaacaccgacaggggcaaaaccttacacttcaggcaaagatcgtataactttgtctaaaggacaaaactttttcatctgcaattttcaaaccattgcgaaagcgatatgaaaatcgcagtcaccgcggtttgatcgaacatct

SEQ ID NO: 140630 - DNA, 443 bp, Arabidopsis thaliana
gatattatcggatgtgtcgtaatgaaaggggtaaaacacgtggcagtcaaccaggctgtcagttgttggtgaaagcagacaagcgcgtgattttaatataatctctctttacccgcgccaacaacactttaccaagacagatctctcatggcggtgctctgatgcttcagcctttgattttttccttttttgacctttttaatctctaattataataatcagtacaaaatcactgttgtttaccattaatttaaggaattaatcctaatctgattttaaggaattaatctctatttgccaaagaagaggcgcaaaggctccgtcttttttcttcttcttgtttctgtgttaccgatctggctctgtcttcttcttcttcttcttcttcttcttcttcttcttcttcttcttcgtttacgtctctgtgaaatgctcaagctgat

SEQ ID NO: 140631 - DNA, 297 bp, Arabidopsis thaliana
cccaagcgtccgatgacaattaaccttgacctaaagagaggaggaaacggaaggttcttgaaaactgcggcttacggacactttggaagagacgaccctgacttcacctgggaagtcgtcaagccacgcaagtgggacaaacctcaagcttaaattttacctactctgtttctgtcttcattccacaaaccaattatctgcgcacttttttatttctctgtttttgtggtttattgtgtttatgtatcattgtacttgagctatttcaattgggtgtttgtttttatggcgactttt

SEQ ID NO: 140632 - DNA, 403 bp, Arabidopsis thaliana
cggaagcgtgggaagacgcgtgggcaaaaaccaaaatctcagtctcaaacaaacaacaacaacacacgagtcacgaggttgaagaagaagaagaagaagcaaatatgttaaacggctggagaagagctttttgcacttccattcccaaagaaactaaccaaaacgacgtcgacgacgacggactcgttggtctccgccacaaatcaacctctcgattcggctttttctcaactccttctacgcctcgttctgattccggcaccggaacttacagcctccgttgcaggacttcaacagccaccgccgtctccactacttcatctcttcccggaactccaaagcttaagtgcaaaaccaccaccaccggagaaacaactcccagaaacagaagccttgtctctct

SEQ ID NO: 140633 - DNA, 401 bp, Arabidopsis thaliana
tgaaaacctaaagcattgcttttgccttcatggtatcagagctcatggaacatagatccatggaactctactctgttccttctctcaatatttcaaattgtgtcaccgtcactcttactgccaagaactatattctctggaaatctcagttcgaatcttttcttgatggtcaagggcttctgggttttgtcacaggctcgattcctgcaccaagccaaaccagcgttgtttcagacattgatgggtcaacatcggcttcacccaatcctgagtactacacctggttcaagacagatcgagttgtcaaatcctggctccttggttctttcttagaagatattctcagtgttgtggtcaactgcaacacttctcatgaggtatggatctctgtagcaaaccac

SEQ ID NO: 140634 - DNA, 371 bp, Arabidopsis thaliana
gggtcgcccacgcgtccgcggaagcgtgggcggacgcgtgggcggacgcgtggggcgtctttctctttctctctgtctgaagttgagaacacgaaccactgaaaaacccgcgaaagactcgagcacgaaccaacaatggcggaacccaaaaccaagtatgatcgtcagctaaggatttggggagaattaggtcaatcagctcttgaaaccgcgagcatatgtttgctcaattgtggtccaactggctctgaggctctaaagaatcttgttattggtggaatcggaagtatcaccattgtcgacggatctaaagtagaaattggcgaccttggaaacaatttcatggtggatgcgaagagcgttggtcagtc

SEQ ID NO: 140635 - DNA, 410 bp, Arabidopsis thaliana
gctaaaggtaaaattggcattgcacacagtccagcttggttcgaaccacaagaccttgagcatgttggaggttccattgaacgtgtgcttgatttcatcctaagatggtaaaataattacaataatgaaaaatgtgatatattataactctaactgtttataagttctttttttttttttttttaatcaggcatttggctccaacaacttatggagattatccacaatcgatgaaggatcgtgtcggtcatagattgccaaaattcacagaagctgagaagaagttgctaaagggttctacagattacgtaagaatgaattactatacttcagtgtttgcaaaagaaattagccctgatcctaagagtccgagttggacgactgattctcttgttgattgggataataag

SEQ ID NO: 140636 - DNA, 462 bp, Arabidopsis thaliana
ctcaactctctgaatatttttcttcttacgatttacaaatttccgatgctgtgacattaacgtctgagaacagagaaacacttcaaatctttgaattcgtagtgcgacggagacggaggagccatcagtttcgaaaatggcgtgcgaaggtggaggatctaacgtcagatctagctactacaccattctcgggattcgtaaagatgcctctgtttccgatatccgcactgcttatcgtaagctagctatgaaatggcatccggatagatatgctcgaaatcctggagtcgccggagaagctaaacgtcggtttcaacaaatccaggaagcctattctgttttgaatgatgagaataagaggtcaatgtacgatgttggactatatgatcctcatgaagatgatgacgatgacttctgtgatttcatgcaagagatgatctcaatgatgaacaatgtcaaaga

SEQ ID NO: 140637 - DNA, 415 bp, Arabidopsis thaliana
cccaagcgtccgcggacgcgtgggtttttcttcaacttccatttttcgaaaggcgacgagaaaaagtatttctccagttttggaattcgccatggctgttgatagcagaatggatctgctaagcgaaagagctgtgttgatgagagcatctcttcaaaagagtcaaaccatcaccgataatgttgtttctatcctcggctccttcgatagtcgtctgtctgctcttgaaaccgccatgcgtcctactcagattaggactcatgctataaggaaagctcatgagaatattgataggactcttaaggctgctgaagttattttgtctcaattcgatctcctccgtcaggcagagactaaagtactcaaggggccacatgaggacctggaaagttatctggatgcaattgctcaactc

SEQ ID NO: 140638 - DNA, 444 bp, Arabidopsis thaliana
caaaagttacaaaaggagagtatgtcaaaggtttcatatgcaccgttgctgcgtctgctggttatggtctagtcttatccctacaacagctagcctttctaaaagtcctaaagaagcaaaatttctcagaagttatggatatgataatctacgtgagtctagtggccagttgtgttagcgtggtggggctttttgctagcagtgagtggaaaactttgagcagtgaaatggataactacaaacatgggaaggtatcctacattatgaacctagtgtggacagctgttacctggcaggtattctccatcggtggcacaggactgatcttcgagctctcctctctattctcaaatgcaataagcgttttgggactcccagtggttcctatcttggctgtaatcattttccatgacaaaatgaatgggttaaaggtgatttctatga

SEQ ID NO: 140639 - DNA, 446 bp, Arabidopsis thaliana
attaatttcactgagcgcataacatttttgagacaagagactctctctctctctcttctctctttctctccccctctctccggcgatggttgttgctatggaccaacgcaccaatgtgaacggagatcccggcgccggagaccggaagaaagaagaaaggtttgatccgagtgcacaaccaccgttcaagatcggagatataagggcggcgattcctaagcactgttgggttaagagtcctttgagatcaatgagttacgtcgtcagagacattatcgccgtcgcggctttggccatcgctgccgtgtatgttgatagctggttcctttggcctctttattgggccgcccaaggaacacttttctgggccatctttgttctcggccacgactgtggacatgggagtttctcagacattcctctactgaatagtgtggttggtcaca

SEQ ID NO: 140640 - DNA, 432 bp, Arabidopsis thaliana
caattttcctctctttacccagaagatttcatcagaacctcttcgccattaatgggttagtgttactttccccaaatgtagaattaagggtttagggtttttagttccaaattcaattcttaacgaagcaatttcaaatctttttttcatttcagttacagcgatgttttgtgcatcatcttctccaattacatctcctctctacccaaaagcttataaattttctcaaacaaaatcgaattcgaagagattttcctctctgcgtgcttcgttgcctgtttctgataacaagcttcttaaatttgaatacacaccatggcttattgttggacttggtaaccctggattaaagtattacggaacaaggcataatattggttttgagatgattgatcatatagctcgagcaacggatatttctatgaacacaat

SEQ ID NO: 140641 - DNA, 433 bp, Arabidopsis thaliana
tgtaatttactgagtgaaaaaagcttatcgcggcgattagttcccggcgaagaagaagaagagagataagaaaatggcgactaatggatctgctagctcagcgcagctctctcagaaggaagctgatgtcaggatgatgtgtgccgctgaggttcatcttggaaccaagaattgcaattaccagatggagcgttacgtcttcaagagacgcaacgatggtatttacatcttcaaccttggcaaaacatgggaaaagctccagatggctgctagagttattgttgccattgagaacccacaggacatcatcgtccagtcagctaggccctatggacagagagctgtgttgaagtttgctcagtacactggagccaatgccattgctggaagacacactcctggtaccttcaccaatcagatgcagacatccttc

SEQ ID NO: 140642 - DNA, 448 bp, Arabidopsis thaliana
cttttgtcactcatcttcacaggaaacaatggtgtttgtgaagtcctccaaatcgaatgcttacttcaagaggtaccaagtgaagttcaggagaaggagagatgggaagactgattacagggcaaggatccgtcttatcaatcaagacaagaacaagtacaacacccctaagtaccgttttgttgttcgatttaccaacaaagacattgtggcacagattgtatctgcaagcatagctggtgacattgttaaagcttcggcttacgcacatgagcttcctcagtatggactcactgttggtcttaccaactatgctgcagcttactgtactggccttcttttggctcgtcgtgttctgaaaatgctggaaatggatgatgagtacgagggaaacgtagaggccactggagaggacttttctgtggaaccaactgattccagaagacct

SEQ ID NO: 140643 - DNA, 402 bp, Arabidopsis thaliana
caaaaacaaatcttaaacgttttactttgtgctgcactactcaacctcaatggccgcctcaacaatggctctctcctcccctgccttcgccggtaaggccgtcaagctttcccccgcggcatctgaagtccttggaagcggccgtgtgacaatgaggaagactgttgccaagccaaagggcccatcaggcagcccatggtacggatctgaccgtgtcaagtacttgggtccattctctggcgaatcaccgagctaccttaccggagagttccccggagactacggatgggacaccgccggactttcagctgaccccgagacattcgcaaggaaccgtgaactagaagttatccacagcaggtgggccatgctcggagccctaagctgcgtcttccctgagct

SEQ ID NO: 140644 - DNA, 392 bp, Arabidopsis thaliana
aatcatggcggatacaatggttgctcatatggaccgacataataagatagatgttgagatctcagaagatgacaagagattaacaaagctttgctctctaaagaagaaggctataaatgcgacgaacaagtttaagcactcaatgaccaagaaaggtcgaaggcatagccgtgtggcgtgtgtctcaatcgtcgatgaaatcgatacagaagagttgcaagcggttgatgctttccgtcaagctcttattttagacgaactacttccctctaagcatgatgatcatcacatgatgcttaggttcttgagggcaagaaagtttgatctcgaaaaggctaagcaaatgtggtctgatatgcttaactggaggaaagaatatggcgcagacacga

SEQ ID NO: 140645 - DNA, 356 bp, Arabidopsis thaliana
gcgattaaacctactcaatctcagatctcgttaaacctagaaacctcgagaaaaaccgtatcaatggcgccgaaagcagagaagaagcccgctgagaagaaaccagcttccgagaagccggtggaggagaaatcaaaagccgagaaagctccggcggagaagaaacgaaaggccggaaagaagctcccgaaggaagctggtgccggaggcgacaagaagaaaaagatgaagaataagagtgtcgagacttacaagatctacatcttcaaggtgcttaagcaagttcatcccgatatcggaatctccagcaaagcgatggggatcatgaacagtttcattaacgatatcttcgagaa

SEQ ID NO: 140646 - DNA, 434 bp, Arabidopsis thaliana
ccaaaccacaacagaacagaactcagccatggcttcttcttcttcttctcttctaatcctagccgttgcttgtttcgtctcgctaatctcaccggcgatttcacaacaggcttgcaaatcacagaacttgaactccgccggtccgttcgatagttgcgaagaccttccggtactcaattcctagctccattacacctacaattcctcaaattcatctctctccgtcgctttcgtcgccactccatctcaagccaacggtggctgggtcgcttgggctattaaccctacggggactaagatggctggttctcaagccttcctcgcttacagatccggcggtggtgcggctccggtcgtgaagacgtacaacattagcagctacagcagtctcgtcgaatgtaaacttgcttttgatttttggaatctacgcgccg

SEQ ID NO: 140647 - DNA, 197 bp, Arabidopsis thaliana
cccaagcgaccgcccacgcgtccggttgagatgaattcaatgttatctaacttagcattcaacaacattattagaatggtgacgggaaaatgttactatggagatggtgcagaggatgatcctgaggctaaacgtgtgcggcagcttatcgcagaggcgatgagttgttttggtgcaggacatgcggctgatcattt

SEQ ID NO: 140648 - DNA, 446 bp, Arabidopsis thaliana
cggacgcgtgggggaaaagagccttatattagatctgctgaggatattgctttccatgccgctcttttcgttgcaaaaaatggaagttacatcaactattacatgtaccatggtggaacaaactttggaaggacttcatcttcgtatttcattacaggatactatgatcaagctcctctcgacgaatacggtcttttaagacagcctaagtacggtcatttgaaggagcttcacgctgcgataaaatcctctgcaaatcctctgcttcaaggaaagcaaacgattctctccttgggaccaatgcaacaagcttatgtctttgaagacgcgaacaatggatgcgttgcgtatctggtaaacaatgacgctaaagccagtcaaatacaattcagaaacaatgcgtatagcttgagtcccaagtcaattggtattcttcagaactgcaa

SEQ ID NO: 140649 - DNA, 446 bp, Arabidopsis thaliana
agcctccgacgaaacctgatgcactactcgctctgggaatgttcctctgtgctgagtctccacagtggctattcaagcaagggaagatagctgaagcagaagctgagtttgagaggctgcttggagggtctcatgtgaaaacagcaatggcagaattatacaaactagatctagacaagacggatgaaccagatgttgtgagcctctctgagctgttatatggtcggcattcaagaggtatgtagaactctttgcttttgtcccgcggaaggaactgcaaacatgtatgttgattgttgtgtctatttgtttcctgtatagtactttgttattcacttgttccttttgcagttgtttttattggattaaccctgtttgctttgcaacagctatctggtataaatgctgttttttatttctcttctaccgtattcaaaagtgctgga

SEQ ID NO: 140650 - DNA, 290 bp, Arabidopsis thaliana
ctctgtgttctttcttgcctcctcttatcgtgaaaataaacatacttaggatcgtagaagagagaaaataagaagaaagatggtaggaagcaaagaaaaatcgaaagagaaacgagataagagactccaagagatctccctccttcgtactattccctattctgatcaccagaggtggtggacctctgaaaccgtggcggtggtaacacgtgcgaatagaggaataggatttgagatggtgagacaattggctggacatgggacaacagttattctaacatcaagagacg

SEQ ID NO: 140651 - DNA, 445 bp, Arabidopsis thaliana
ggcgagtgtacattgttgaatcttcccatttcctcatccaaattccgacataactatcctagccgccatttgttctccacattacaaaaccctcagcagcttcaaaactcttccgatctctccctcacgctcgcaattctctcgtctccattttaatagtttttcttctcggaatcacaaatcttcggcttcttgttccttggcgtgtgtgtgtgttgttgaatggctcttgttcagcggattccaatttcctcctccagtattcggaattggcaacaagcgaggaccaatttgactcctatttgttgtttacattacaatactgcatcttcttcttcttcaccctttacagagaagcactctgtggagagataccaaagggatcaatggctgtacaaagcggttgaaccaacgccaccatcgactccatctccatcgccatttg

SEQ ID NO: 140652 - DNA, 413 bp, Arabidopsis thaliana
  unsure (1)..(413): unsure at all n locations
cccaagcgtacgagaaattccagatctttcaaaggccaccaatctgaagcatttatatctcaacaactgcaaaagtttggagattcccaatagtagaaggaagtgtcaccaaaaattggtgaggttggaaatgaaagaatgcacagggctggaggttcttccaaccgatgtcaacttgtcatctctcgaaaccctcgatctcagtggttgctcaagtttgagaacttttcctctgatttcaaagagtatcaaatggctctatctggaaaacaccgccattgaagaaattctagatctttcaaaggccaccaagctcgagtctttgatactcaacaactgcaaaagtttggtgacacttccttctacaattgggaatcttcanaatttgagacgtttgtacatgaaaagatgca
